United States Patent Application Publication US 2011/0183924 A1 - sequence listing, part 238

SEQ ID NO: 648954 - DNA, 653 bp, Homo sapiens
  misc_feature (1)..(1): n is a, c, g, or t
  misc_feature (32)..(32): n is a, c, g, or t
  misc_feature (143)..(144): n is a, c, g, or t
  misc_feature (151)..(151): n is a, c, g, or t
  misc_feature (167)..(167): n is a, c, g, or t
  misc_feature (192)..(192): n is a, c, g, or t
  misc_feature (198)..(198): n is a, c, g, or t
  misc_feature (200)..(200): n is a, c, g, or t
  misc_feature (202)..(202): n is a, c, g, or t
  misc_feature (218)..(218): n is a, c, g, or t
  misc_feature (227)..(227): n is a, c, g, or t
  misc_feature (249)..(249): n is a, c, g, or t
  misc_feature (288)..(288): n is a, c, g, or t
  misc_feature (305)..(305): n is a, c, g, or t
  misc_feature (317)..(317): n is a, c, g, or t
  misc_feature (336)..(336): n is a, c, g, or t
  misc_feature (359)..(359): n is a, c, g, or t
  misc_feature (366)..(366): n is a, c, g, or t
  misc_feature (417)..(417): n is a, c, g, or t
  misc_feature (438)..(438): n is a, c, g, or t
  misc_feature (528)..(528): n is a, c, g, or t
ngaagtaggggagttagatggctcttccctgnacaaatgggccccacaagtgattaaagccaggggccgtatttctcggcatttgtcaagctggaacagtctttagtgaactcagctacgctcttttagaactgctggtttcnnctgaagncacatggatggcattnagtgttctgtgactggtctggcacnctactntngntgacaaagatgggaangggtctaanagtcatgtcacttataaaagancttgggaggagcttttttcgaaagatccaaagattttgnaaggagagattacagcngaactaagaccncgtagaagataggtagatntcagctcaatataaggaatggtnttgtagnatcagtgcagttccgaatggaataagctgtttgaacatggcttagcagaanctgaatgacacactgttaganattctagggaattctgcactgagtacagcattggattagatctgtgggctgtttccaactcaagattctgatatctcatcataagcattntgagcaaggcagttggtataaaggtggccgtagtaatagaagtcagtgtgaagtctaaagcaattccgcaatgaatttaaaggcaagaattttagggacaaggatacagaaaaatgcctagtaag

SEQ ID NO: 648955 - DNA, 309 bp, Homo sapiens
ctccctgccggccgatcgattcctttccattccattctattacatttgatcctattttattaaattgcattctattcgagtgatttccattcgagccctttccattcgattccattccattctattccattcctttggattccattccattccgttccgttcacatcaattccttgcgattccattacattcgatttcttgccattcgattccattccttttgactccatttcattcgattccattccatcccattaatttccattccattcgagacctttccattgcagtcttttcccttcgagtcca

SEQ ID NO: 648956 - DNA, 523 bp, Homo sapiens
ggtcgcggggggcagtggcggtgtaatgttggctagcaggatatttaggctaatttgggaagcgagccaggtgcacctctgtgtgtgtacgagctcatgaaagtggtgtgaagagcgaagacttttcgatcccagcttatatggatcggggtgaacagtccctatgtccggaggtggtccaatgtcagagcaccctgtcgtgggcagtccaagaatgcctcttgtcatggaatgaagggatgcaaggggacctccatggacgcgagcgcgtcgtcgcaactggtagtgcagagagagtccggaagtttgtgaatacgctatttagagttgcccaggagcaggctattcgcctcggaggattgtaactagggggctgcagaactagtcggtgaagaacggtgtcgtgggagcggtcgcgcatcgctctacctttccccatacccgcggatcttggctgaaccccgggttgttacttaccgtgtttccttgcgcaaaagtcgtgccagtaaagacactgatgtcg

SEQ ID NO: 648957 - DNA, 378 bp, Homo sapiens
  misc_feature (161)..(161): n is a, c, g, or t
  misc_feature (168)..(168): n is a, c, g, or t
  misc_feature (179)..(179): n is a, c, g, or t
  misc_feature (191)..(191): n is a, c, g, or t
tattaccactaaattcgcggccgcgtcgacgaagccattcacttcatcaaaaccaagaagaaaagaaagagagagagaaacaggaaggagctggggttacaacccctgcaccctaacttccttccaccaggacttactaatttttgttgttgtttaaattntttattnatttcaatttntattaaattttnacaaatctttcattacaaattacaaaacaaaacataaaaccacacacgcacccaaattaaccagagtcacagtctctccatttccttgaacatctatacaggtagaaaaggtcttgggaatagaaaccgaagcctcccattggacttacacatttactactgaatatatttgttctgaggtcgacgc

SEQ ID NO: 648958 - DNA, 316 bp, Homo sapiens
caaaaaggctgggtacgcctcctaaggcgtctgtccccccgtgtccgagctccattaccaatgtctgtaggccgcctctaaagagcgtagcgagtttctcgtggttgctctgaaaaaagcgttgctgccgccggctatgatgcggagaaaaacaacagccgtatcacacttggtctcaagagcctggtgagcaagggcactctggtgcaaacgaaaggcaccggtgcttctggggcctttaaactcccccagaaggcagccttccggggaagccaagcccaaggttaaaaaggcgggcggaacccaacctaagacg

SEQ ID NO: 648959 - DNA, 457 bp, Homo sapiens
  misc_feature (88)..(89): n is a, c, g, or t
tcctgtggcccctccgccggcgtttgtgctgtgtgacatccctctcctccaccgctgcctggggttgggggcagtcggggcagtcagnncaggccaggccacccctgggtgaagagggcattggggccagaagggtctgcactgaccacctccaagtttctgttcttaggctgttcccgccgcagcagaatataaagtgctgaagccagaacccagactgggacgcaaggcccagaacctgcgcagggccaccggcaatcggccaccatgcccctgccctgctgtgcctcgacttacccatctgctgctggggtaatcctaaccatctcttactgagggaccctgagtgccttgttcaagttcagtgtggtgagcccattggtgggaggtgtttttcctccccaaagactgtattttgaaaagtactaataaaatacaggaggtgagtaccaaggca

SEQ ID NO: 648960 - DNA, 249 bp, Homo sapiens
tacatgatacaatcgagctcggtacctcgattaggcaaatagaatcttggccactgacccgggcacatggcagcacagcactggttcgaaccgttactctgtcacctggaacagaaaaagtacatgggaccttaagctcaccttctttacttgtatcaaatgatgactggtatactggtctcccatcccttcgcttgtggcaggagatggcttaaataaataacttaaacttagattggccttatcgag

SEQ ID NO: 648961 - DNA, 202 bp, Homo sapiens
ttatgtcttagtttcccatagggcatatcttactcaagctatctaacagctcttaaaatattggatattgtatttaagtttttgatattttggttaattcactctacgtattcttcaaatagcaatatcgtctgctacattttctggtgcttcaaaggattgattttgcatatgatcgttagacataatccgcgaggtgtgt

SEQ ID NO: 648962 - DNA, 282 bp, Homo sapiens
  misc_feature (17)..(17): n is a, c, g, or t
  misc_feature (59)..(59): n is a, c, g, or t
  misc_feature (134)..(134): n is a, c, g, or t
  misc_feature (197)..(197): n is a, c, g, or t
  misc_feature (215)..(215): n is a, c, g, or t
tgataattcatattttnaggccaggaacagcagctcacgcctgtaatcccagcactttnggaggccaaaatgggcagatcacttgggcccaggagttcaagaccagcctgggcaacatggccaaaccccatctntacaaaaaattagctggatgtggtggcatgtgcctgtagtcccagctacccaggaggctcatntgggaggactgattgagnccagggagctcaatgctgcagtgagccatggagccatgattcatgccactgcacttccagcctgggg

SEQ ID NO: 648963 - DNA, 118 bp, Homo sapiens
tccgtaacgagcgccgctgcaggagtcaggggtgttaggagggtcgttacggaggcgtcgttacggagggctgttacggacgtgttaggaggcgctcgttacggaggcgctcgttacg

SEQ ID NO: 648964 - DNA, 1051 bp, Homo sapiens
  misc_feature (181)..(181): n is a, c, g, or t
  misc_feature (363)..(363): n is a, c, g, or t
gtttctgggcttcagtctggtactctctctgccagaaacggttctgccggttcccccagctctgggtacccggcgtctgcatcgcgtcgcctatgtagtgggccatcgtccagtgcgtcgtgctcagccagaaacacagaagccgctgaatccgggtagatgaagaagtttcaaatctggnaagagcatccaagtggcgtgccacagacgtatggcagatatcatccgaagcatgtttgggacccaagtccagtgatgaagatgcttttggacccaagtgcgaggcatcgtgatgaccaatgagtggcaatgccattcttcgagagattcaagtccacgcatcctagcggccaaggtccatgnatcgagagattatgccggacccaggatgaagaggttggagatgggaccacgagtcagataattagttcttgcacgggacaatgctgtctgtagctgagcacttcctggtaagcagcagatgcagcccaacagtggtgatcagtgcttaccgctaaggcatcggatgatcatgatcaggaccctaagagaagaatcaagtatcccagtcgacatcagtgacagtgatatgatgctgaacgatcatcaacgagtcgtctattactaccaaagccatcagtcggtggtccatctttggcttgcaagcattgccctggatgctgtcaaagatggtacagttctgaggagaatggtcgggaaagagattgccgttcagcacaagtactgccacgtagtgggcaaacgataacccggatgcctcattgcacggaccggggccgagtagccgtcctgaataccagggtgtgaacctgcaaagtatgcagggcagttcaggaacctcggcttggtcctccggactgccacggcgggaatcaaggaaaccgctaaaggcccacgggactggggacacccggagagggagccctgccgcaatttcccagcggtgcccgatcacccaaacgctctgaggacctaatccccgagccgagggggcacacgcaaagggcctaaaataggcacagagcccagg

SEQ ID NO: 648965 - DNA, 165 bp, Homo sapiens
ctgtatcccccgaactttgttgaggctgaggtaggaagatacttgtagcccaggagttcaagactagccctggcaatgaagcgaaaccccatcgctacaaaaaattagccaggcaatgtggtgcatgcctgtagtcccagctacttgagacctgagcaagccagg

SEQ ID NO: 648966 - DNA, 109 bp, Homo sapiens
tctttcttttgtttcttccctgcttgctttcttgcttgattgcttagttttcttaaaattattatttatgcattctttttcagacatttcacctagttctagatcgcga

SEQ ID NO: 648967 - DNA, 234 bp, Homo sapiens
  misc_feature (175)..(175): n is a, c, g, or t
cagaggacccgaaatgaacgaacatcatataataacaatgtaaaaaattttataacaaggatggactgattttcatatatccaaatcagagtcactgtacatatacacagaattgtctttggcattgaaggccaagagggaacagccataaaaattgagtgtttctggtagcccnctttatttttggctgatccaacagtttgttaaggaaaagccagcttgccggttatttta

SEQ ID NO: 648968 - DNA, 744 bp, Homo sapiens
  misc_feature (530)..(530): n is a, c, g, or t
  misc_feature (577)..(577): n is a, c, g, or t
  misc_feature (579)..(579): n is a, c, g, or t
ggcagcgccgcatgggccgcaagcccggggtgctgccatggcgcgactgtccgtctcgctggccctgcagggcacatgcccaatggctgtctagcctcccggcccagtgatttgccttcaaggaaactggggagtcagaaaattgggaactcatatcaacatggcaaacctattgaaaacagtggtgactggctgctcgtgtcctctacttagcaatttggggtcctgtaagggtctacgtgtgaagaaggattttttacgaacattttatactcaccaagaactgtggtgtaaagcgcctgtaaaaccaggaattccatataagcaactgactgttggagtccccaaagagatattccaaaatgagaagcgagtggcattgtctcctgctggtgttcagaacttggtcaagcagggttttaatgttgtcgtggaatcgggtgcgggcgaagcttccaagttctcagatgatcactatagagtggcaggtgcccaaatccaaggggcaaaggaagtgctggcttctgatntggtggtcaaagtgcgagcccctatggttaatccaacattaggtgtncntgaagctgaccttttaaagacatcaggaacgctgattagtgccatctaccccagccaaaatccagagttgctaaataaactttcccagggaaaaagtacagatctgggcaatggaccaggttccaagaagtcacaattgctcagggatatgatgcgctaaggtca

SEQ ID NO: 648969 - DNA, 524 bp, Homo sapiens
ggcagcgccgcatgggccgcaagcccggggtgctgccatggcgcgactgtccgtctcgctggccctgcagggcacatgcccaatggctgtctagcctcccggcccagtgatttgccttcaaggaaactggggagtcagaaaattgggaactcatatcaacatggcaaacctattgaaaacagtggtgactggctgctcgtgtcctctacttagcaatttggggtcctgtaagggtctacgtgtgaagaaggattttttacgaacattttatactcaccaagaactgtggtgtaaagcgcctgtaaaaccaggtaaagtctcacttcagtgattgtaaatgaaaccttcaagtcataggaactaatagatctgatgattgataaaaggaaaagccatgtagttttatggcctggtgcttgtgagtgatcattttaaacaaacaacaagtaagtgctatcttgtattttccatgtactatagacgttcctgatttccagcgctaacagagaagacaaggtaataga

SEQ ID NO: 648970 - DNA, 759 bp, Homo sapiens
  misc_feature (545)..(545): n is a, c, g, or t
  misc_feature (592)..(592): n is a, c, g, or t
  misc_feature (594)..(594): n is a, c, g, or t
agcgggatgcgcagcgcgcgggggcaaggcccggcgtgtgcgcagcgcgacgtgctctcgcggacctcagggcacagccgcatggggtgtggtctatcggccggtttattggctttcatgggaagtggtgagtcagaaaatggggaacgtcgatactcaatctatgggcaaatacgtagtggtaagatactagtggtgacatgtggcgtgtcgtgtacatatagttagcaatttggggtcctgtaagggtctacgtgtgaagaaggattttttacgaacattttatactcaccaagaactgtggtgtaaagcgcctgtaaaaccaggaattccatataagcaactgactgttggagtccccaaagagatattccaaaatgagaagcgagtggcattgtctcctgctggtgttcagaacttggtcaagcagggttttaatgttgtcgtggaatcgggtgcgggcgaagcttccaagttctcagatgatcactatagagtggcaggtgcccaaatccaaggggcaaaggaagtgctggcttctgatntggtggtcaaagtgcgagcccctatggttaatccaacattaggtgtncntgaagctgaccttttaaagacatcaggaacgctgattagtgccatctaccccagccaaaatccagagttgctaaataaactttcccagggaaaaagtacagatctgggcaatggaccaggttccaagaagtcacaattgctcagggatatgatgcgctaaggtca

SEQ ID NO: 648971 - DNA, 747 bp, Homo sapiens
ctacttcagagtggtggctcggaatgaaatcggtgacagtgagccacttgactccaggacacctggctcatcaataaggaccagagtgagtctgggacttgcagttagggttaagtctgggtgccctgatggtggggatgacataagggtcccaaagggtacccaagaggcaagataaaatctgaaaaccattgagatagaacggttaatatctgggacgctgcggagagaaggaaatattggctttcttcggggtacttaggggtgagactaaagtggaggtggggaggtacctttgggggcagagaggacggcggaggggctgcggagggacatagagcgcaaacgcgttctgctctgaggggagggtctaacggggctgagaacaggggagggctctagggagccgggaggatgtctgggatccctggaggctaggggttaagggtgggggccgcgtcgggaaactcgaactgaggagctaaagggataagaggggagactgtggtcgctgactatgacgtaggggaagcttggaggcggagttcacacaggctgggaataaccgggtccaggaagctggcgctggaatgacatctcggccccagcgggtgtgggacacgcgtggctctcgggctggccgcaaccctgccagtggctcggcgacgccgcctccggcggtcgcgccgccgccctggcggcgcccggtgccggcagccccttcccgaacccagtgtaaccctcgcg

SEQ ID NO: 648972 - DNA, 986 bp, Homo sapiens
ttgtgaacatactactggtaggaatgtatacaacggaagcatataatataatcattgcatagccacactcactaaccgaagatagatacttgacaattagagggagcgagataaccgcaacatagcgatatcaacatacataacgctcgttgcggaagcacttaaaagtcagatgcgaccacattcacataaggctaaggtaatatactattagcgtctatgcatagagatataaaagtacagtcttgaatagctattcaagataatagggcattagcttctatagctattaatagacaaattattcactctcaatgcgacctttgtaagcatggttaacacagtggggtcctgtagccagagcgtgactccacacagaaggcctttggaaacacacaagcacttgtgggtcacaccgcctgtgcaagaattttgttcttactggcaataaaatgtaccgacacgaaaaacaatctgagcaatgagggtgtagaatggtcctaacaacacctttgagtgaacccgcaagtttgaacaagagggaagggactgaacatgagagcattgaaattctatccttggatgttatagagcatacaagactcagacgagcttgacttgatagaccacgcatgtgtgcttcactagacaacatctaggacatacccacagctcattagatcagactcatcgactgtgcacgaaccggcgtatatgcctacacagaaacctagaatgtgaccctcatggcataccctttacttgtatacttgcactaattcacctacatagatggcacaacccacttcaagaagggggtcctataaacgtgcgcgactggtaggaaaaaagactcaagatcaccggtgaatgccctagacattagcaggggggccttggcattcaacagggcccgagaggtagcaaatacgggctggaacatcttcccctatggtgcaccaatgcccggtcctcaaagagagacg

SEQ ID NO: 648973 - DNA, 206 bp, Homo sapiens
agggacgacgaatctctaagatcttgaacagaaggatcgttggtcgctccaaagcctgagggagactacttgtgtgtgaaagtcgataggactccgaaaggcacccagggtgttgtcacaaattttgaaagttttgccgaatgacgggagaaacaggtacctgtgagatgtggtcgaagatgaaaagaaaccatcaatagcccttg

SEQ ID NO: 648974 - DNA, 144 bp, Homo sapiens
gggcggctgtcccctttttgggggaaaaatgcctgaaaattggggggcccttcaagtaggtagcttctatttcccatatttgtcttatatacaagtatttgcttttttcaaaataattcccataaagcattttaaagttaggga

SEQ ID NO: 648975 - DNA, 154 bp, Homo sapiens
cgctctctgtgggtgcatcattcgtactgtcttttcccttgtcttgaatctgtgacgacgggcagtggtgtattagcattctcgattggtggacatggttatgagacaaagggagaaagctgcgaagcggacctggaccccacagagagagcgt

SEQ ID NO: 648976 - DNA, 1685 bp, Homo sapiens
ttttttgttttttttaagagatgtaaaagaacatgaaaaggctttattattcaaatttggaaaacctagacagcaaaacaattggcattattaatttaggtgcaagtgagcatttgggtctcaataaaagacctcccaaagttctggaacacgacttattacattaaaccaaaagtggaactccatatagagaataaatataatttaacagagtgttccagagagtatagcttatacccaagaacacgtgcgatagacaccactctctctccacctgtgcattatactgtgacatctcgagataacacacagtcttatagtcgccaaacaccgtggtgtgtcccgtgcgaaatacacgtgaagctctcctatatatgcgcgctccccccaaatatatacacacacgcgcctcggagatcttacagcgcgcacagatatcaaatctcactatagagagagagatatatacacgacaaaaatgtgcgcgccacaaagagagaaaccaattatagagctgattggctcctcctagaaaacaaacatcgcgacgacctgctgaggcgacaaaacaacaacctctcgatggggagagatgttgccgaccacaagcagagggtgttataaacagcccccccagcagacttctcccgcaacactgtgccaaaacacatattactccacttataatcttctatgcttcatcccccaacactggtgtcgtcgctcctcacacattataattatatagtcggccgcacacacaacggcagtcgacagccggacgtcagttatcatcatcaacggccgcagacgaacacaaagatagttagcacgaccactcctaataaacacccacccacgtcgtcgatgcaggctggctgcagtacaaattaattcatcattaatgatagtaggaggacgacggaccgtcggcggccggcaggacgggcgcccatattatatgtcgaagagagcccccccacggcacgacacgagtgtagggctcgagtggacaacacaaccacccaacttacaagaaggcagattctatcccccaaaacaattcccacccaacgaccgaaggaggaaacacaaagagtggctgcgtggggtatcttcatctcccacaccagcagaaaggtagtatggcccaccccccaagcgcaacaccacacgccaggagacaaccaccccccctgcttgtatgtgcgatatcaacgctccaataatataactccatagatgggcaggagagatcgacggaggagaaacaatagcgagagggaccacaacaatcgactgggccaaacacgacgtcaacgataggaacacccacccccggagagaagtagaaggtagaaccagcctgtacagtacccgacgaagaaaacaatcagtcatataacaggcacgcatcgattcatcacagcacgggtcggaggggagcaccaccaacaaagggggtcagtataataacaaacaatgtcttaatataatacccgccgcgacgtcatacctaaaaaacagacgaagtaagtaggaagaagatcatacctttgtatgacgaggacaccaattttccaccgataaaatattctcctcgcgacgacgagcaagacaactactggtgattgatatccaccacctttattatcaccaaacaaccatcgttggctacacgcaac

SEQ ID NO: 648977 - DNA, 262 bp, Homo sapiens
  misc_feature (16)..(16): n is a, c, g, or t
  misc_feature (22)..(23): n is a, c, g, or t
  misc_feature (25)..(25): n is a, c, g, or t
  misc_feature (60)..(60): n is a, c, g, or t
  misc_feature (75)..(75): n is a, c, g, or t
  misc_feature (91)..(91): n is a, c, g, or t
  misc_feature (110)..(110): n is a, c, g, or t
cattataggaatttantatggnnantcaggtcatcaatagggaggacaaactttataaangtttgtattttaatnagcactaattaaaaangtgagaaacattaaattancatcactgacacagacttcactgcttatgaaccacattctgcttttcaagaatgtttgatttatctataaaaactttattattaatcaaatggatttccccccaccttagactcatcagcaatcagaaggttgaggagagatgccatgctga

SEQ ID NO: 648978 - DNA, 280 bp, Homo sapiens
ggcgcgtcagaacaagggaagtcatttccacgtggagggagaaagcaagagagtgagcaagacaagtcactagtcttccataggtctaatctcagaagtgacatctcatcttttggctgtattatgttcgttgatagcaagtttttagatccagcttacacttgattgcagcctatgaaaggccctaaagcaggggacccagctaagccaaggccaggttcctgacccataggaactgtgagataataaaattttttttttttttttttttttttttttt

SEQ ID NO: 648979 - DNA, 462 bp, Homo sapiens
  misc_feature (95)..(95): n is a, c, g, or t
  misc_feature (166)..(166): n is a, c, g, or t
  misc_feature (250)..(250): n is a, c, g, or t
  misc_feature (280)..(280): n is a, c, g, or t
ggtgtgggttttggggtatgtgttagacgacttgttgtgcctcttctttcttgtgggtgggtgtgaaggtagtggatctagggtgtaatagaagnttctttctgctcccttatgtagaccattgttagtgctttggttgttggtgctttctgtatggtgtggtgantggcagcagctctcctgttgtgagtagttatagtgctgtcctgcagccaggggcaaaagctgcttttgcatcagagctgagggntgcactaggtgtaacttccaccccttgacntattttagagtgtgaggatgaaaggaagaggaaaaaatagacggagggcgcgcgggggtgcgggcggcagggtgcgcgcgtggccgtgggggagcgcgcgcgcgggccggggctcgtgtcggggcttccaaagagaagttgcagcgaggcgccccccggcgtccggcgcctgggcccggtcg

SEQ ID NO: 648980 - DNA, 883 bp, Homo sapiens
  misc_feature (19)..(21): n is a, c, g, or t
  misc_feature (28)..(28): n is a, c, g, or t
  misc_feature (31)..(32): n is a, c, g, or t
  misc_feature (49)..(49): n is a, c, g, or t
  misc_feature (54)..(54): n is a, c, g, or t
  misc_feature (58)..(58): n is a, c, g, or t
  misc_feature (62)..(62): n is a, c, g, or t
  misc_feature (66)..(66): n is a, c, g, or t
  misc_feature (79)..(79): n is a, c, g, or t
  misc_feature (81)..(81): n is a, c, g, or t
  misc_feature (83)..(83): n is a, c, g, or t
  misc_feature (85)..(86): n is a, c, g, or t
  misc_feature (88)..(89): n is a, c, g, or t
  misc_feature (91)..(91): n is a, c, g, or t
  misc_feature (97)..(97): n is a, c, g, or t
  misc_feature (109)..(109): n is a, c, g, or t
  misc_feature (111)..(111): n is a, c, g, or t
  misc_feature (121)..(121): n is a, c, g, or t
  misc_feature (130)..(130): n is a, c, g, or t
  misc_feature (133)..(133): n is a, c, g, or t
  misc_feature (159)..(159): n is a, c, g, or t
  misc_feature (169)..(169): n is a, c, g, or t
  misc_feature (190)..(190): n is a, c, g, or t
  misc_feature (193)..(193): n is a, c, g, or t
  misc_feature (197)..(198): n is a, c, g, or t
  misc_feature (218)..(218): n is a, c, g, or t
  misc_feature (224)..(224): n is a, c, g, or t
  misc_feature (227)..(227): n is a, c, g, or t
  misc_feature (236)..(236): n is a, c, g, or t
  misc_feature (238)..(238): n is a, c, g, or t
  misc_feature (286)..(286): n is a, c, g, or t
  misc_feature (299)..(299): n is a, c, g, or t
  misc_feature (305)..(306): n is a, c, g, or t
  misc_feature (317)..(319): n is a, c, g, or t
  misc_feature (324)..(325): n is a, c, g, or t
  misc_feature (327)..(327): n is a, c, g, or t
  misc_feature (331)..(331): n is a, c, g, or t
  misc_feature (356)..(357): n is a, c, g, or t
  misc_feature (375)..(375): n is a, c, g, or t
  misc_feature (389)..(389): n is a, c, g, or t
  misc_feature (392)..(392): n is a, c, g, or t
  misc_feature (396)..(396): n is a, c, g, or t
  misc_feature (398)..(399): n is a, c, g, or t
  misc_feature (414)..(414): n is a, c, g, or t
  misc_feature (428)..(428): n is a, c, g, or t
  misc_feature (434)..(435): n is a, c, g, or t
  misc_feature (446)..(446): n is a, c, g, or t
  misc_feature (456)..(456): n is a, c, g, or t
  misc_feature (473)..(473): n is a, c, g, or t
  misc_feature (477)..(477): n is a, c, g, or t
  misc_feature (516)..(516): n is a, c, g, or t
  misc_feature (856)..(856): n is a, c, g, or t
tggggagctgggcggggannncggggcntgnnaggcccgggctgaagcngcgtntganagangagngcgcagcgtagananangnnanncnaggaangcaaagatgaananaatggtggangaaataatnaanctgctgtaatccctttatggggagangaagatgaangcggctgtaaagcactctggnaanggtnnactggtaaaaggaggaaatngacttngtngggggtttngngggaggacaaacgggaatagaagttgggggggctgtaggggggctgtnaggtgcatggatnaaaaanngaaagtttaannnggttnntnaaanaataatggagctgcaccctgcagannaaaaaaggctctttaaanaagccgcagcaatnatnaggnanntggagtggacggaanaagtgaaaatgaangcgctnntaatgggaagngaggccctgnagaagcagatgctggcnatgntggtgaactacgtaaccaaggagctgcgggccgagatcnagtatgatgactaggccgcacctccggggaggtggggggccctttaaatgactctgtgattctgaagaggtggcttgggagttgggagaagccagcggatgccccctggggaatctccacatcatcagtgtattactagtaatgtcccgctggagaggccaccgctgtgcagtgtcatgttccagaaattactgatgaagcagcatgtgttggtggcatgtgcactggcctgccatgacagccctctgactggcccccagtgaagagtaaaggcctgcctgccgcagttccggaggcgtctgctgagtcctctcacccgcatgggtctggggaagtgatnacgctcagccgacggtctgacaaactt

SEQ ID NO: 648981 - DNA, 456 bp, Homo sapiens
  misc_feature (263)..(263): n is a, c, g, or t
  misc_feature (265)..(266): n is a, c, g, or t
  misc_feature (268)..(268): n is a, c, g, or t
  misc_feature (270)..(270): n is a, c, g, or t
  misc_feature (273)..(273): n is a, c, g, or t
  misc_feature (277)..(277): n is a, c, g, or t
  misc_feature (279)..(279): n is a, c, g, or t
  misc_feature (281)..(281): n is a, c, g, or t
  misc_feature (288)..(288): n is a, c, g, or t
  misc_feature (308)..(308): n is a, c, g, or t
  misc_feature (311)..(311): n is a, c, g, or t
  misc_feature (334)..(334): n is a, c, g, or t
  misc_feature (367)..(367): n is a, c, g, or t
  misc_feature (390)..(390): n is a, c, g, or t
  misc_feature (419)..(419): n is a, c, g, or t
  misc_feature (433)..(433): n is a, c, g, or t
cagtggccgctcccgtggccgttaggaaatgagcgataacgatgacatcgaggtggagaccgacgaagagcatccgaggtttcaatctgcggctgacaaacgggctcatcataatgcactggaacgaaaacgtagggaccacatcaaagacagctttcacagtttgcggactcagtcccatcacttcaaggaggggaggcatcccgggcccaaatccctggcaaagccacaggattttttccgtatttgccgagggaaaaacncnncncnccngcangntnttgacgncctcaagcggcagaatgctnttntggagcagcaaggggaaagcganagctgatcaagttctttgttcctggggaattcncttctcttcctccctcatggaanatgcaagtaaaaggaaatgcaagtaaccncctgggttagaaancctcaaataaaataaaataaaat

SEQ ID NO: 648982 - DNA, 714 bp, Homo sapiens
  misc_feature (1)..(1): n is a, c, g, or t
  misc_feature (3)..(3): n is a, c, g, or t
  misc_feature (19)..(19): n is a, c, g, or t
  misc_feature (27)..(27): n is a, c, g, or t
  misc_feature (51)..(51): n is a, c, g, or t
  misc_feature (59)..(59): n is a, c, g, or t
  misc_feature (95)..(95): n is a, c, g, or t
  misc_feature (114)..(114): n is a, c, g, or t
  misc_feature (133)..(133): n is a, c, g, or t
  misc_feature (159)..(159): n is a, c, g, or t
  misc_feature (261)..(261): n is a, c, g, or t
  misc_feature (462)..(462): n is a, c, g, or t
ncngtctcgctgcatactncgcggttntccagtcgtactcgcgctgctggngtctatgnccactgcgccgacttggcgcgcactattaactaccntagcgacacacatcgtgcncgactcgttgttctgcgcntcaccgccgagcgagctctatgcgtnctcacgtctatagagtgatcgcatctcgctcctagctctatgacgccgtgcctactcgtgctacgtccggtatcagctacaatagtcacggcgcatgacgcntagctatacgtcgcactcgatcgtatcatgtaccacagacactcgaaagatcgagcgtactgcaactatcgacactccgcgcatcaagcgcatatcgcaccccgtctctcagtgtccgcgacgatagacagctcaagccctcgtcccacgctcgtgtgacgcacgagcagccgccacagagtacgcgctcgtccatgcggntatcatctatcgctcctcacgctcatgcgcatcaccttcacatcgcacgatctataccagcgcaccgcctgccactatagatcacttctatagggtcgtactcgaacggcacgataataaccgcgtacgtccaagcactcgtcgaccagactcctcttcacgcatcatctcgcctacgatctgcatacgtaccgtactgtggacttaccatccgatgcccgatctagtctctctatacacacctgggggccg

SEQ ID NO: 648983 - DNA, 541 bp, Homo sapiens
agagctcctggcctcaggaagtcagcccttcacaccacaggggaagggcctctctgcagtctgaccgctggccctggtgctcctggcatgtggggagccatgtggcctagtggctttgaagtcagaaagccctgggtttgatctccagctctgctctttgaactctaatttcttccttgtgggttacaataatgaatgcatgtcagggcctagcccagagccagaacacagttggccttgaataagtagccttcccttcccctcgttctattgccctcctacccctccaccctaatgttggcttttccaccctatcagttactggggaggatgaggagtgccagtccttcctgggaaattgtagccctagggaagtctggaatgggcagagcctctttccaaaaatggggagggggcacatggctccctggagcaccagattcctggcagatatgctgccctgctgagagtgggtacagagccccgcttaggtctctgtctcagggagctccctccctcctgttcataaggggggacccag

SEQ ID NO: 648984 - DNA, 196 bp, Homo sapiens
accaagattgaagtgccagaagcttagtgcggacacccgtatcggcatagcgcactacagcccagaactcctgggctcaagcgatcctcccacctcagcctcccgagtagctaggactacaggcgtgtaccaccaccccccgctaaattgaaacatcttttttgtacagatgggcgacagagcgagactccatctc

SEQ ID NO: 648985 - DNA, 147 bp, Homo sapiens
aggatccgcccggtaatttgcctttgggaatctcaaaccactggtgcggctctgcccaggtatagcatggcaagtgttgaaagcagggggtcgtgtcacttcccactccagcagcctcagccagttactgataggagatagtccccc

SEQ ID NO: 648986 - DNA, 458 bp, Homo sapiens
ggatataggcatgcagtgtgaaataagcacatcatggagaatggggtatccatcccctcaagcatttatcctttgtgatacaaaaattcaattaccctcttttagttaagtatcttttctaatgcctttaattaaaaaaactttattttgaagtaatttaaaacttcaaaataagcaagaaaagagcaagaataacacagagaactccctatatcccagattaaccaattttcaatgttatttttgtcatatttggggtatggggagatctttttgttgtttttttaagagtcagagtctatcttatcttgcccaggctggtctcaaatgtctggcctcacatgctcctcctgcctcagcctcctgagtagctgcgattataggcatgagccatcatgcccagcttttttttttttgagacggagtcttgctctgttgcccaggctggaggtcgacgc

SEQ ID NO: 648987 - DNA, 193 bp, Homo sapiens
  misc_feature (39)..(39): n is a, c, g, or t
  misc_feature (43)..(44): n is a, c, g, or t
ggcactaaagcctttaataatacgagatgaaatgcaacngtgnnatgacaagtaagtgagcctgacctggcattgcctcgcctcaccgctggctttgaccagggtatgatctttaacttttctgagctgatttgatcgtggtctttacacacaggtggtcgttcctgtttggacactgttttatttgtttgac

SEQ ID NO: 648988 - DNA, 621 bp, Homo sapiens
ggaattacaggtgtgagccaccacacctggcctgtattttctctatctcttctctattattttcttgcttctgctaattattatttccctgcttctgctagctttgggtttagtttgctcttctttttctagatccttaagatgtaagttaggttattaatttgagatcattcttcttttttggtggtggtattggttctttttttaaatttaaatttttatttttattttactttatgttctgagatacatgtgcagaatgtgcaggtttgttacatagctgtacatgtgccatggtggtttgctgtaccgatcaacccgtcatctaggttttaagcccctcatgcattaggtatttctcctgatgctctccctccccttgctcctcacacccaattggaccaatctatcaccctatagaaagactaatgttagtattagttacattgaaacattctccttcgcataagcccgcgtcagattaaaacacctgaactgccatttacaagccccatttttacaatccaacaacacaggcttatttaccctcactggtgaccccacaccaggcgtgcttcttaaggaagggttaatcactgtgcgccgttttcacccgctggc

SEQ ID NO: 648989 - DNA, 772 bp, Homo sapiens
  misc_feature (5)..(5): n is a, c, g, or t
  misc_feature (7)..(7): n is a, c, g, or t
  misc_feature (10)..(11): n is a, c, g, or t
gacananggnnaggtgaggaggctgcgtctggctcccgctctcacagccattgcagtacattgagctccatagagacagcgccggggcaagtgagagccggacgggcactgggcgactctgtgcctcgctgaggaaaaataactaaacatgggcaaaggagatcctaagaagccgagaggcaaaatgtcatcatatgcattttttgtgcaaacttgtcgggaggagcataagaagaagcacccagatgcttcagtcaacttctcagagttttctaagaagtgctcagagaggtggaagaccatgtctgctaaagagaaaggaaaatttgaagatatggcaaaagcggacaaggcccgttatgaaagagaaatgaaaacctatatccctcccaaaggggagacaaaaaagaagttcaaggatcccaatgcacccaagaggcctccttcggccttcttcctcttctgctctgagtatcgcccaaaaatcaaaggagaacatcctggcctgtccattggtgatgttgcgaagaaactgggagagatgtggaataacactgctgcagatgacaagcagccttatgaaaagaaggctgcgaagctgaaggaaaaatacgaaaaggtaagaagtgtgggttttgcttggtaaattgatcacaagtccgccagatgtattgattgtactaggtttgaaggtgtattaggtcttatgggataacagctccataaggatatggtgttagtatataggtccctacatccttacaagagatgt

SEQ ID NO: 648990 - DNA, 339 bp, Homo sapiens
  misc_feature (5)..(5): n is a, c, g, or t
  misc_feature (7)..(7): n is a, c, g, or t
  misc_feature (10)..(11): n is a, c, g, or t
  misc_feature (266)..(266): n is a, c, g, or t
  misc_feature (296)..(296): n is a, c, g, or t
  misc_feature (304)..(304): n is a, c, g, or t
  misc_feature (309)..(309): n is a, c, g, or t
  misc_feature (320)..(321): n is a, c, g, or t
gacananggnnaggtgaggaggctgcgtctggctcccgctctcacagccattgcagtacattgagctccatagagacagcgccggggcaagtgagagccggacgggcactgggcgactctgtgcctcgctgaggaaaaataactaaacatgggcaaaggagatcctaagaagccgagaggcaaaatgtcatcatatgcattttttgtgcaaacttgtcgggaggagcataagaagaagcacccagatgcttcagtcaactctaagnttctagagtctcaggagtgagccagtctcnaaggaagnaattnagattgcaagnncagcccttatgagaatga

SEQ ID NO: 648991 - DNA, 141 bp, Homo sapiens
cttaaaaaggaccaccacggaaagagaatggttcacgggaagagaatcataagccccatgtctgacgcggtaaggagtgatgaaaacaggcggctgtcccctgtctcctgtatgaggcacgatggctcacctggggtatcc

SEQ ID NO: 648992 - DNA, 392 bp, Homo sapiens
acatactctatatcttcatcatctatatatcatctataccatgaaataaacatttatagacaataaacatcatctcaagaggaataacacttgattttctaaaaggatgtcttaacatcatctgtgttttggaatcctggattattttctcctttgctaatatcgatggaggcctaaggattttctccacttcttgctatatttttcttcttccgatctctgatcccagtgaagatcaggatgacaatgccaaccactatcactcccatcacaactcctaaaacaatcagccatattgaaacaggtggctggttaggaggtccaagtgttggctgtatccccagaaactctaggctgtcgtcattcagacggaaagcctcattgatacggct

SEQ ID NO: 648993 - DNA, 1980 bp, Homo sapiens
  misc_feature (5)..(5): n is a, c, g, or t
  misc_feature (7)..(7): n is a, c, g, or t
  misc_feature (10)..(11): n is a, c, g, or t
  misc_feature (1788)..(1789): n is a, c, g, or t
  misc_feature (1796)..(1796): n is a, c, g, or t
  misc_feature (1799)..(1800): n is a, c, g, or t
  misc_feature (1821)..(1823): n is a, c, g, or t
  misc_feature (1827)..(1827): n is a, c, g, or t
  misc_feature (1839)..(1839): n is a, c, g, or t
gacananggnnaggtgaggaggctgcgtctggctcccgctctcacagccattgcagtacattgagctccatagagacagcgccggggcaagtgagagccggacgggcactgggcgactctgtgcctcgctgaggaaaaataactaaacatgggcaaaggagatcctaagaagccgagaggcaaaatgtcatcatatgcattttttgtgcaaacttgtcgggaggagcataagaagaagcacccagatgcttcagtcaacttctcagagttttctaagaagtgctcagagaggtggaagaccatgtctgctaaagagaaaggaaaatttgaagatatggcaaaagcggacaaggcccgttatgaaagagaaatgaaaacctatatccctcccaaaggggagacaaaaaagaagttcaaggatcccaatgcacccaagaggcctccttcggccttcttcctcttctgctctgagtatcgcccaaaaatcaaaggagaacatcctggcctgtccattggtgatgttgcgaagaaactgggagagatgtggaataacactgctgcagatgacaagcagccttatgaaaagaaggctgcgaagctgaaggaaaaatacgaaaaggatattgctgcatatcgagctaaaggaaagcctgatgcagcaaaaaagggagttgtcaaggctgaaaaaagcaagaaaaagaaggaagaggaggaagatgaggaagatgaagaggatgaggaggaggaggaagatgaagaagatgaagatgaagaagaagatgatgatgatgaataagttggttctagcgcagttttttttttcttgtctataaagcatttaacccccctgtacacaactcactccttttaaagaaaaaaattgaaatgtaaggctgtgtaagatttgtttttaaactgtacagtgtctttttttgtatagttaacacactaccgaatgtgtctttagatagccctgtcctggtggtattttcaatagccactaaccttgcctggtacagtatgggggttgtaaattggcatggaaatttaaagcaggttcttgttggtgcacagcacaaattagttatatatggggatggtagttttttcatcttcagttgtctctgatgcagcttatacgaaataattgttgttctgttaactgaataccactctgtaattgcaaaaaaaaaaaagttgcagctgtttggtggacattctgaatgcttctaagtaaatacaattttttttattaagtatggtggtcctttccataggtctgaaatttttcttctggaggggaagctagtctttggctttggcccattttggaattcacatgaatttattacaggggtttatcctttcatatagttagctaataaaaagctttggtctacacacccggcatatcataatggggggtaaagtcaagtggagatagtttccatccataactggaacttccaaaatctggatcagttaagaaaatttcacatagcccatttacttttacaaactggaagagtaatcaatctactcaaagcatgggattatagaatcaaaccttttggaaagtctgtccttgaaggactaatagaaaagtttgtcctaccctttacatgaggactctattctttaactcccattaccatgtaatggcagtatattgtgcagtccccacattaaagaagacctgagaatgtatccccaaaagggtgagttaaaatacaagatgccatattaaattttggtggacataagtctcgctgaagactatgaaatgcnngctatanganngtctttcccatttatctaaannntggnctgtcaggaaangagacttccttacaagtatttcaatcacgtgggccagctttcaaacaaaaatgccctcaaaaaggtatattcccaatataggttgcccttaaaatccagtgaaggagaaaagacattggtcccgtgattaatatgaaatca

SEQ ID NO: 648994 - DNA, 581 bp, Homo sapiens
  misc_feature (304)..(304): n is a, c, g, or t
  misc_feature (316)..(316): n is a, c, g, or t
  misc_feature (376)..(376): n is a, c, g, or t
  misc_feature (404)..(404): n is a, c, g, or t
  misc_feature (437)..(439): n is a, c, g, or t
  misc_feature (441)..(441): n is a, c, g, or t
  misc_feature (448)..(448): n is a, c, g, or t
  misc_feature (473)..(473): n is a, c, g, or t
  misc_feature (476)..(476): n is a, c, g, or t
  misc_feature (493)..(493): n is a, c, g, or t
atattttaagaactgaaaccgacccaggcagcttgagggcccattattctttatattgtttgtcttagcacacgctagcaaagatagatgcctaggactttccttggctattggagtttatagaaaaaaagttcttagttgcaggttagtcctccaccagtttaatccacgcttttttccgggttagggagaaaaccaatacgttaatccttaatatgatatgggaatgtatggccagggttataaagttttgtcggtttattaaagaactgagcattcactcttcagctagggggcttgatgntcattcagcccnctatcacctagaaagactaagacctaatgtgttaactctgtctccaaaaaggaaaacccngtatattagatttgatagatccctctgncgagctcacctccggcgtagtaacatgttatgnnngnaattttnaaacccgcaagacgctctctctttnctngccggggttccttcaanaccttctccttacgtcctcttcccctactcttaggatccctctatcacttgacgcaattcctttttaaccttttcagagtatgttaag

SEQ ID NO: 648995 - DNA, 143 bp, Homo sapiens
tgacttctgctctgagagtcagatctgctcagagtggtcagtcctctaagacagtggctggaattctcctcccaaagcactttcaaggaagacttactgatctaagagcaaactggctctccagggtaacagcacaagtacag

SEQ ID NO: 648996 - DNA, 1928 bp, Homo sapiens
  misc_feature (5)..(5): n is a, c, g, or t
  misc_feature (7)..(7): n is a, c, g, or t
  misc_feature (10)..(11): n is a, c, g, or t
  misc_feature (1736)..(1737): n is a, c, g, or t
  misc_feature (1744)..(1744): n is a, c, g, or t
  misc_feature (1747)..(1748): n is a, c, g, or t
  misc_feature (1769)..(1771): n is a, c, g, or t
  misc_feature (1775)..(1775): n is a, c, g, or t
  misc_feature (1787)..(1787): n is a, c, g, or t
gacananggnnaggtgaggaggctgcgtctggctcccgctctcacagccattgcagtacattgagctccatagagacagcgccggggcaagtgagagccggacgggcactgggcgactctgtgcctcgctgaggaaaaataactaaacatgggcaaaggagatcctaagaagccgagaggcaaaatgtcatcatatgcattttttgtgcaaacttgtcgggaggagcataagaagaagcacccagatgcttcagtcaacttctcagagttttctaagaagtgctcagagaggtggaagaccatgtctgctaaagagaaaggaaaatttgaagatatggcaaaagcggacaaggcccgttatgaaagagaaatgaaaacctatatccctcccaaaggggagacaaaaaagaagttcaaggatcccaatgcacccaagaggcctccttcggccttcttcctcttctgctctgagtatcgcccaaaaatcaaaggagaacatcctggcctgtccattggtgatgttgcgaagaaactgggagagatgtggaataacactgctgcagatgacaagcagccttatgaaaagaaggctgcgaagctgaaggaaaaatacgaaaaggatattgctgcatatcgagctaaaggaaagcctgatgcagcaaaaaagggagttgtcaaggctgaaaaaagcaagaaaaagatgaagaagatgaagatgaagaagaagatgatgatgatgaataagttggttctagcgcagttttttttttcttgtctataaagcatttaacccccctgtacacaactcactccttttaaagaaaaaaattgaaatgtaaggctgtgtaagatttgtttttaaactgtacagtgtctttttttgtatagttaacacactaccgaatgtgtctttagatagccctgtcctggtggtattttcaatagccactaaccttgcctggtacagtatgggggttgtaaattggcatggaaatttaaagcaggttcttgttggtgcacagcacaaattagttatatatggggatggtagttttttcatcttcagttgtctctgatgcagcttatacgaaataattgttgttctgttaactgaataccactctgtaattgcaaaaaaaaaaaagttgcagctgtttggtggacattctgaatgcttctaagtaaatacaattttttttattaagtatggtggtcctttccataggtctgaaatttttcttctggaggggaagctagtctttggctttggcccattttggaattcacatgaatttattacaggggtttatcctttcatatagttagctaataaaaagctttggtctacacacccggcatatcataatggggggtaaagtcaagtggagatagtttccatccataactggaacttccaaaatctggatcagttaagaaaatttcacatagcccatttacttttacaaactggaagagtaatcaatctactcaaagcatgggattatagaatcaaaccttttggaaagtctgtccttgaaggactaatagaaaagtttgtcctaccctttacatgaggactctattctttaactcccattaccatgtaatggcagtatattgtgcagtccccacattaaagaagacctgagaatgtatccccaaaagggtgagttaaaatacaagatgccatattaaattttggtggacataagtctcgctgaagactatgaaatgcnngctatanganngtctttcccatttatctaaannntggnctgtcaggaaangagacttccttacaagtatttcaatcacgtgggccagctttcaaacaaaaatgccctcaaaaaggtatattcccaatataggttgcccttaaaatccagtgaaggagaaaagacattggtcccgtgattaatatgaaatca

SEQ ID NO: 648997 - DNA, 1985 bp, Homo sapiens
  misc_feature (5)..(5): n is a, c, g, or t
  misc_feature (7)..(7): n is a, c, g, or t
  misc_feature (10)..(11): n is a, c, g, or t
  misc_feature (709)..(711): n is a, c, g, or t
  misc_feature (716)..(716): n is a, c, g, or t
  misc_feature (1793)..(1794): n is a, c, g, or t
  misc_feature (1801)..(1801): n is a, c, g, or t
  misc_feature (1804)..(1805): n is a, c, g, or t
  misc_feature (1826)..(1828): n is a, c, g, or t
  misc_feature (1832)..(1832): n is a, c, g, or t
  misc_feature (1844)..(1844): n is a, c, g, or t
gacananggnnaggtgaggaggctgcgtctggctcccgctctcacagccattgcagtacattgagctccatagagacagcgccggggcaagtgagagccggacgggcactgggcgactctgtgcctcgctgaggaaaaataactaaacatgggcaaaggagatcctaagaagccgagaggcaaaatgtcatcatatgcattttttgtgcaaacttgtcgggaggagcataagaagaagcacccagatgcttcagtcaacttctcagagttttctaagaagtgctcagagaggtggaagaccatgtctgctaaagagaaaggaaaatttgaagatatggcaaaagcggacaaggcccgttatgaaagagaaatgaaaacctatatccctcccaaaggggagacaaaaaagaagttcaaggatcccaatgcacccaagaggcctccttcggccttcttcctcttctgctctgagtatcgcccaaaaatcaaaggagaacatcctggcctgtccattggtgatgttgcgaagaaactgggagagatgtggaataacactgctgcagatgacaagcagccttatgaaaagaaggctgcgaagctgaaggaaaaatacgaaaaggatattgctgcatatcgagctaaaggaaagcctgatgcagcaaaaaagggagttgtcaaggctgaaaaaagcaagaaaaagaaggaagannnagganatagaggaagatgaagaaggatgaggaggaaggaggaagatgtgaagaagatgaagatgaagaagaagatgatgatgatgaataagttggttctagcgcagttttttttttcttgtctataaagcatttaacccccctgtacacaactcactccttttaaagaaaaaaattgaaatgtaaggctgtgtaagatttgtttttaaactgtacagtgtctttttttgtatagttaacacactaccgaatgtgtctttagatagccctgtcctggtggtattttcaatagccactaaccttgcctggtacagtatgggggttgtaaattggcatggaaatttaaagcaggttcttgttggtgcacagcacaaattagttatatatggggatggtagttttttcatcttcagttgtctctgatgcagcttatacgaaataattgttgttctgttaactgaataccactctgtaattgcaaaaaaaaaaaagttgcagctgtttggtggacattctgaatgcttctaagtaaatacaattttttttattaagtatggtggtcctttccataggtctgaaatttttcttctggaggggaagctagtctttggctttggcccattttggaattcacatgaatttattacaggggtttatcctttcatatagttagctaataaaaagctttggtctacacacccggcatatcataatggggggtaaagtcaagtggagatagtttccatccataactggaacttccaaaatctggatcagttaagaaaatttcacatagcccatttacttttacaaactggaagagtaatcaatctactcaaagcatgggattatagaatcaaaccttttggaaagtctgtccttgaaggactaatagaaaagtttgtcctaccctttacatgaggactctattctttaactcccattaccatgtaatggcagtatattgtgcagtccccacattaaagaagacctgagaatgtatccccaaaagggtgagttaaaatacaagatgccatattaaattttggtggacataagtctcgctgaagactatgaaatgcnngctatanganngtctttcccatttatctaaannntggnctgtcaggaaangagacttccttacaagtatttcaatcacgtgggccagctttcaaacaaaaatgccctcaaaaaggtatattcccaatataggttgcccttaaaatccagtgaaggagaaaagacattggtcccgtgattaatatgaaatca

SEQ ID NO: 648998 - DNA, 1198 bp, Homo sapiens
agagtattagaagttgtgtcgtctgttgttgttcgtgctggtgttttggcgtattaattttgtttagtgtgatgtgttgtattgtatttgtggattttatgttggtgtgtgtttgttttgtgtgtgtgtagagtttgtagttgtgggaaatatattttgtggtaggtttatagtgctgttgggctcttagtctggagtatgagatgttgaggtgtttaatgatatgggatggtgtgttggtagtagtaagtggcgtagtagtgtgtaactagctgtttgtatgaggttgtgtaagtcgtttagtaggcgaaaatggttggtgaaagctgtattttattttgcttgtgtccatgtttgagttttgcggaattctgtatggctgggagaaagatagagtactgcgtgtatcatttgtgtggaagctatgtattgaatgtggtactgtaattgttaagtaatcggtgaaaaattctttaaaggaggttggttgagcatctgacgaggtggatggggtcattgcatggtgtcatgtgctgtgagatgttcaaggtgatggaccaaggtagcccatcggagttcgcggagcacggaagcttagttacctagtggaagtcagaggtactctaggtataatgccttccgtcggtgtccgtgggacgtctgccagaagtgatccagatcagacacctctaggataagagctctcctagagccatggaacccgtttcgtgttttgcggtcctgcattgtgcagttctgttggaatgctatgtttggccaagagtggggactgaggactaagctctgatcttctattatcgttgcccaaattccttgccaaaagatctggggagtcatgccactacaaaccatagagttctcagtcagatgagttttatttaatcctgtatatcatgacctgtggtctgccacaatcgcctttatgcttataacctgaacattgccttgctaatggatgccaggtctttagacaaatctcaaccaagctgtcaacaagagaaatgttgtaaagttgtaccgagtagcctggaagccccccgctttaagttgtcctgcctttctaaaccaaacgaatgtaatttcgttaaatgtatttgattgatgtctcatgccttcctaaaatatgataaaaccaagctgaccccagccatcttgggataactgccggaaggtgctt

SEQ ID NO: 648999 - DNA, 1952 bp, Homo sapiens
  misc_feature (23)..(24): n is a, c, g, or t
  misc_feature (1760)..(1761): n is a, c, g, or t
  misc_feature (1768)..(1768): n is a, c, g, or t
  misc_feature (1771)..(1772): n is a, c, g, or t
  misc_feature (1793)..(1795): n is a, c, g, or t
  misc_feature (1799)..(1799): n is a, c, g, or t
  misc_feature (1811)..(1811): n is a, c, g, or t
ttatggatatgtcgaccacgcgnncgagtacattgagctccatagagacagcgccggggcaagtgagagccggacgggcactgggcgactctgtgcctcgctgaggaaaaataactaaacatgggcaaaggagatcctaagaagccgagaggcaaaatgtcatcatatgcattttttgtgcaaacttgtcgggaggagcataagaagaagcacccagatgcttcagtcaacttctcagagttttctaagaagtgctcagagaggtggaagaccatgtctgctaaagagaaaggaaaatttgaagatatggcaaaagcggacaaggcccgttatgaaagagaaatgaaaacctatatccctcccaaaggggagacaaaaaagaagttcaaggatcccaatgcacccaagaggcctccttcggccttcttcctcttctgctctgagtatcgcccaaaaatcaaaggagaacatcctggcctgtccattggtgatgttgcgaagaaactgggagagatgtggaataacactgctgcagatgacaagcagccttatgaaaagaaggctgcgaagctgaaggaaaaatacgaaaaggatattgctgcatatcgagctaaaggaaagcctgatgcagcaaaaaagggagttgtcaaggctgaaaaaagcaagaaaaagaaggaagaggaggaagatgaggaagatgaagaggatgaggaggaggaggaagatgaagaagatgaagatgaagaagaagatgatgatgatgaataagttggttctagcgcagttttttttttcttgtctataaagcatttaacccccctgtacacaactcactccttttaaagaaaaaaattgaaatgtaaggctgtgtaagatttgtttttaaactgtacagtgtctttttttgtatagttaacacactaccgaatgtgtctttagatagccctgtcctggtggtattttcaatagccactaaccttgcctggtacagtatgggggttgtaaattggcatggaaatttaaagcaggttcttgttggtgcacagcacaaattagttatatatggggatggtagttttttcatcttcagttgtctctgatgcagcttatacgaaataattgttgttctgttaactgaataccactctgtaattgcaaaaaaaaaaaagttgcagctgtttggtggacattctgaatgcttctaagtaaatacaattttttttattaagtatggtggtcctttccataggtctgaaatttttcttctggaggggaagctagtctttggctttggcccattttggaattcacatgaatttattacaggggtttatcctttcatatagttagctaataaaaagctttggtctacacacccggcatatcataatggggggtaaagtcaagtggagatagtttccatccataactggaacttccaaaatctggatcagttaagaaaatttcacatagcccatttacttttacaaactggaagagtaatcaatctactcaaagcatgggattatagaatcaaaccttttggaaagtctgtccttgaaggactaatagaaaagtttgtcctaccctttacatgaggactctattctttaactcccattaccatgtaatggcagtatattgtgcagtccccacattaaagaagacctgagaatgtatccccaaaagggtgagttaaaatacaagatgccatattaaattttggtggacataagtctcgctgaagactatgaaatgcnngctatanganngtctttcccatttatctaaannntggnctgtcaggaaangagacttccttacaagtatttcaatcacgtgggccagctttcaaacaaaaatgccctcaaaaaggtatattcccaatataggttgcccttaaaatccagtgaaggagaaaagacattggtcccgtgattaatatgaaatca

SEQ ID NO: 649000 - DNA, 156 bp, Homo sapiens
tgtgaactggtatgtgggtgaaggcatggaggagggtgagtgctcctaggcccgcgaggatatggctggccagtagaaggattatgatgaggtggcgcatcggctcctatgaggacgaggatgagggagaagaataaagcagctgcctggagccta

SEQ ID NO: 649001 - DNA, 103 bp, Homo sapiens
agacaaggtgggaccgatggtataattgagttcatagaaagacagtgagccgaggtcatgccattgcactccaccctgggcaacaagagagaaactctgtctc

SEQ ID NO: 649002 - DNA, 366 bp, Homo sapiens
  misc_feature (160)..(160): n is a, c, g, or t
gtgaaaatagccagttcctgccttaactgatgacattccaccattgtgatttgttcctgccccaccctaactgatcaattgaccttgtgacaatacaccttccccacccttgagaaggtgctttgtaatattctccccacccaccccacgcccgcacccncgcacccttaagaaggtattttgtaatattctctccgccattgagaatgtgctttgtaagatccaccccctgcccacaaaaaattgctcctaactccaccgcctatcccaaacctacaagaactaatgataatcccaccaccctttgctgactctttttggactcagcccacctgcacccaggtgattaaaaagctttattgttca

SEQ ID NO: 649003 - DNA, 1283 bp, Homo sapiens
  misc_feature (5)..(5): n is a, c, g, or t
  misc_feature (7)..(7): n is a, c, g, or t
  misc_feature (10)..(11): n is a, c, g, or t
  misc_feature (1256)..(1257): n is a, c, g, or t
  misc_feature (1261)..(1261): n is a, c, g, or t
  misc_feature (1265)..(1265): n is a, c, g, or t
  misc_feature (1270)..(1270): n is a, c, g, or t
  misc_feature (1272)..(1272): n is a, c, g, or t
gacananggnnaggtgaggaggctgcgtctggctcccgctctcacagccattgcagtacattgagctccatagagacagcgccggggcaagtgagagccggacgggcactgggcgactctgtgcctcgctgaggaaaaataactaaacatgggcaaaggagatcctaagaagccgagaggcaaaatgtcatcatatgcattttttgtgcaaacttgtcgggaggagcataagaagaagcacccagatgcttcagtcaacttctcagagttttctaagaagtgctcagagaggtggaagaccatgtctgctaaagagaaaggaaaatttgaagatatggcaaaagcggacaaggcccgttatgaaagagaaatgaaaacctatatccctcccaaaggggagacaaaaaagaagttcaaggatcccaatgcacccaagaggcctccttcggccttcttcctcttctgctctgagtatcgcccaaaaatcaaaggagaacatcctggcctgtccattggtgatgttgcgaagaaactgggagagatgtggaataacactgctgcagatgacaagcagccttatgaaaagaaggctgcgaagctgaaggaaaaatacgaaaaggatattgctgcatatcgagctaaaggaaagcctgatgcagcaaaaaagggagttgtcaaggctgaaaaaagcaagaaaaagaaggaagaggaggaagatgaggaagatgaagaggatgaggaggaggaggaagatgaagaagatgaagatgaagaagaagatgatgatgatgaataagttggttctagcgcagttttttttttcttgtctataaagcatttaacccccctgtacacaactcactccttttaaagaaaaaaattgaaatgtaaggctgtgtaagatttgtttttaaactgtacagtgtctttttttgtatagttaacacactaccgaatgtgtctttagatagccctgtcctggtggtattttcaatagccactaaccttgcctggtacagtatgggggttgtaaattggcatggaaatttaaagcaggttcttgttggtgcacagcacaaattagttatatatggggatggtagttttttcatcttcagttgtctctgatgcagcttatacgaaataattgttgttctgttaactgaataccactctgtaattgcaaaaaaaaaaaagttgcagctgtttggtggacattctgaatgcttctaagtaaatacaattttttttattannaaanaaanaaaananaaaaaaaaaaa

SEQ ID NO: 649004 - DNA, 817 bp, Homo sapiens
ccaccccaccccaccccaccgcgcgggatcactgcgctgcggcgaggacgacggcgaggcgacccggccctgcgcaccagggcgcgatggctgaccatgacccagagttggaggccatcaggcagaggcgagtgcaagagctaatgggacagcgtggtggtgcggcaagcccacaaaatgcagggcaacaaaaggctcaggaagatgcaaagcaggaagctgaggaacgccgacagatgatgctttctcagatactatcttctgaagctagagaaagactctcccgcatagctttggtcaagcctgataaagcaagaggagtggaggatgttctgctgagagctgcacaaactggtggaatatctgaaaaaggtgtctgacagaacaggcttatctcacttctggagcaaatcaacagccacacaagcaaacaaaaccaaagtgacgattcagaggcgtcgcaacgtccttgacgacgatgactagttggtaagcttgatgtacgagcgaatgggtgcagcggcatttggtgcttgattcaacaaccgtcagaacctgacaaactatttgattggtcttgggttgtatatgatctggatataatttggtggggtaacatttgataacagttggatgttcgattttaccccttgaaacttctctgcgacacctttggaattgttgtgcgtcaattttatcaacgtcctattcagcataattgttaatctgccaccggttcctccttgtgcaatggtgatgtctgtctcaggttgctcctagagttcttcatgttgccacaaaaaaaaagacaagaaaa

SEQ ID NO: 649005 - DNA, 1874 bp, Homo sapiens
  misc_feature (5)..(5): n is a, c, g, or t
  misc_feature (7)..(7): n is a, c, g, or t
  misc_feature (10)..(11): n is a, c, g, or t
gacananggnnaggtgaggaggctgcgtctggctcccgctctcacagccattgcagtacattgagctccatagagacagcgccggggcaagtgagagccggacgggcactgggcgactctgtgcctcgctgaggaaaaataactaaacatgggcaaaggagatcctaagaagccgagaggcaaaatgtcatcatatgcattttttgtgcaaacttgtcgggaggagcataagaagaagcacccagatgcttcagtcaacttctcagagttttctaagaagtgctcagagaggtggaagaccatgtctgctaaagagaaaggaaaatttgaagatatggcaaaagcggacaaggcccgttatgaaagagaaatgaaaacctatatccctcccaaaggggagacaaaaaagaagttcaaggatcccaatgcacccaagaggcctccttcggccttcttcctcttctgctctgagtatcgcccaaaaatcaaaggagaacatcctggcctgtccattggtgatgttgcgaagaaactgggagagatgtggaataacactgctgcagatgacaagcagccttatgaaaagaaggctgcgaagctgaaggaaaaatacgaaaaggatattgctgcatatcgagctaaaggaaagcctgatgcagcaaaaaagggagttgtcaaggctgaaaaaagcaagaaaaagaaggaagaggaggaagatgaggaagatgaagaggatgaggaggaggaggaagatgaagaagatgaagatgaagaagaagatgatgatgatgaataagttggttctagcgcagttttttttttcttgtctataaagcatttaacccccctgtacacaactcactccttttaaagaaaaaaattgaaatgtaaggctgtgtaagatttgtttttaaactgtacagtgtctttttttgtatagttaacacactaccgaatgtgtctttagatagccctgtcctggtggtattttcaatagccactaaccttgcctggtacagtatgggggttgtaaattggcatggaaatttaaagcaggttcttgttggtgcacagcacaaattagttatatatggggatggtagttttttcatcttcagttgtctctgatgcagcttatacgaaataattgttgttctgttaactgaataccactctgtaattgcaaaaaaaaaaaagttgcagctgtttggtggacattctgaatgcttctaagtaaatacaattttttttattaaggaagaggaggaaaaaaaaaaaaaaaaaaaaaaaaaaaaaaaaaaaaaaaaaaaaaaaaaaaaaaaaaaaaaaaaaaaaaagaaaaaaaaaaaaaaaaaaaaagaggggggggggcgcgaaaataatatctctccggagggggagcgaccacatactaacaccacgccacctactttttttatataaaagagaggtggcgctctctcctatctagatggtcgtctctatatataaaggaagagacagaaggggcgtcggtcgtttttatcaaaacacacgtttggagggtgaaagaacactcgttggtggtggtactattatttttttaggagagagcacatcactcttattggttaggttgggtgtgagtaacaaaataagattgttgggagacacaacaccttcctttctgtatagcgataatatatttaatagagagacgccagcatgagtgggtggaccgtatatataagtactattacatttaggagcatggatattatctgtgttggtattattaacaacaagtgcactgtataaaaaaattcgggggcgtggtagtgagtgagaagtttgttcctaccctgcagttatagtgttatcttctcagaacgatt

SEQ ID NO: 649006 - DNA, 277 bp, Homo sapiens
ctaaagctggctccacaacacacagagagatcttctctagttataggtaattctttggacatcatggatcgtatcttccacaagaaccaatctcagggtaaagtcacctgagaaacaaaacttattatataacacagaataagttcacttattgaattatatttttcaaaatgaaagccattttttttctaaagtgtatttcaaggtattctggctccaagagatgctcctgagtagttctgcagtgaagaagtctgttgaaatttttacccacctt

SEQ ID NO: 649007 - DNA, 2003 bp, Homo sapiens
  misc_feature (5)..(5): n is a, c, g, or t
  misc_feature (7)..(7): n is a, c, g, or t
  misc_feature (10)..(11): n is a, c, g, or t
  misc_feature (1811)..(1812): n is a, c, g, or t
  misc_feature (1819)..(1819): n is a, c, g, or t
  misc_feature (1822)..(1823): n is a, c, g, or t
  misc_feature (1844)..(1846): n is a, c, g, or t
  misc_feature (1850)..(1850): n is a, c, g, or t
  misc_feature (1862)..(1862): n is a, c, g, or t
gacananggnnaggtgaggaggctgcgtctggctcccgctctcacagccattgcagtacattgagctccatagagacagcgccggggcaagtgagagccggacgggcactgggcgactctgtgcctcgctgaggaaaaataactaaacatgggcaaaggagatcctaagaagccgagaggcaaaatgtcatcatatgcattttttgtgcaaacttgtcgggaggagcataagaagaagcacccagatgcttcagtcaacttctcagagttttctaagaagtgctcagagaggtggaagaccatgtctgctaaagagaaaggaaaatttgaagatatggcaaaagcggacaaggcccgttatgaaagagaaatgaaaacctatatccctcccaaaggggagacaaaaaagaagttcaaggatcccaatgcacccaagaggcctccttcggccttcttcctcttctgctctgagtatcgcccaaaaatcaaaggagaacatcctggcctgtccattggtgatgttgcgaagaaactgggagagatgtggaataacactgctgcagatgacaagcagccttatgaaaagaaggctgcgaagctgaaggaaaaatacgaaaaggatattgctgcatatcgagctaaaggaaagcctgatgcagcaaaaaagggagttgtcaaggctgaaaaaagcaagaaaaagaaggaagaggaggaagatgaggaagatgaagaggatgaggaggaggaggaagatgaagaagatgaagatgaagaagaagatgatgatgatgaataagttggttctagcgcagttttttttttcttgtctataaagcatttaacccccctgtacacaactcactccttttaaagaaaaaaattgaaatgtaaggctgtgtaagatttgtttttaaactgtacagtgtctttttttgtatagttaacacactaccgaatgtgtctttagatagccctgtcctggtggtattttcaatagccactaaccttgcctggtacagtatgggggttgtaaattggcatggaaatttaaagcaggttcttgttggtgcacagcacaaattagttatatatggggatggtagttttttcatcttcagttgtctctgatgcagcttatacgaaataattgttgttctgttaactgaataccactctgtaattgcaaaaaaaaaaaagttgcagctgtttggtggacattctgaatgctcggaagtgcgtttctaagttagaattacaactttttttaatgagctattgagtatggtggtcctttccataggtctgaaatttttcttctggaggggaagctagtctttggctttggcccattttggaattcacatgaatttattacaggggtttatcctttcatatagttagctaataaaaagctttggtctacacacccggcatatcataatggggggtaaagtcaagtggagatagtttccatccataactggaacttccaaaatctggatcagttaagaaaatttcacatagcccatttacttttacaaactggaagagtaatcaatctactcaaagcatgggattatagaatcaaaccttttggaaagtctgtccttgaaggactaatagaaaagtttgtcctaccctttacatgaggactctattctttaactcccattaccatgtaatggcagtatattgtgcagtccccacattaaagaagacctgagaatgtatccccaaaagggtgagttaaaatacaagatgccatattaaattttggtggacataagtctcgctgaagactatgaaatgcnngctatanganngtctttcccatttatctaaannntggnctgtcaggaaangagacttccttacaagtatttcaatcacgtgggccagctttcaaacaaaaatgccctcaaaaaggtatattcccaatataggttgcccttaaaatccagtgaaggagaaaagacattggtcccgtgattaatatgaaatca

SEQ ID NO: 649008 - DNA, 442 bp, Homo sapiens
tgccccctaccacccccgaccccaccaaactggtttttcaggcatacttcagaaggcccttggccgagaggagggcccattcagtcggttggggggcttagaatgttatttttggtttacatgaaccttgtccagggccacacacccctgagtgcagagtgggcactgtccccctggtcgtggctgccgcgaagtctggcctttaggctgtgctcacagataaatcgcattttttttacttccacaaaaaacgtggacacacactcctgcaaaaacaaacacacaaaaacgcatactgacttcagaacaatagaaccatattagaataccaattcatgtttatagaaaaaaaattgtctgctaaaaaaaattatccctgttaagagtcctaaggtgtatttgggaaatctttaaatgctgtggaatagaaaagtggaaccta

SEQ ID NO: 649009 - DNA, 553 bp, Homo sapiens
ccccccccccccccccccaggagcggtcgagaacccaacatcggcaaatatcacaaaccgcaaacgcaagccgcaaacgattccgctatcggagaggggagaaggaatcggagctagatgctttagtagaaatagtagtggtaatacgtggcaggtatattcaggcgtaggtcgggtcatagggatagttaagtcgagtaaggataggcttttgtagttcagatcggggtattgtcctgcctctggctctatcttttgtcgcgttgcgtcccgttcgcgagatggtggtgtcgggttccgtcggcatgaggggtttccgggggtcccccggagcttcgggtttgctggggacgcccttctccgattcccccgtggtcgcgcgtacgcagcgacgtcgcgagggaggagacttgtcgacagaatagggggctcccggatccttcgggtaaggtcccggccggccctcttgcggacgaagtttctcctccaaattcgcccctaattttcctccaagggggggctaagttgcattagttggtttttctaccgggct

SEQ ID NO: 649010 - DNA, 1982 bp, Homo sapiens
  misc_feature (5)..(5): n is a, c, g, or t
  misc_feature (7)..(7): n is a, c, g, or t
  misc_feature (10)..(11): n is a, c, g, or t
  misc_feature (1790)..(1791): n is a, c, g, or t
  misc_feature (1798)..(1798): n is a, c, g, or t
  misc_feature (1801)..(1802): n is a, c, g, or t
  misc_feature (1823)..(1825): n is a, c, g, or t
  misc_feature (1829)..(1829): n is a, c, g, or t
  misc_feature (1841)..(1841): n is a, c, g, or t
gacananggnnaggtgaggaggctgcgtctggctcccgctctcacagccattgcagtacattgagctccatagagacagcgccggggcaagtgagagccggacgggcactgggcgactctgtgcctcgctgaggaaaaataactaaacatgggcaaaggagatcctaagaagccgagaggcaaaatgtcatcatatgcattttttgtgcaaacttgtcgggaggagcataagaagaagcacccagatgcttcagtcaacttctcagagttttctaagaagtgctcagagaggtggaagaccatgtctgctaaagagaaaggaaaatttgaagatatggcaaaagcggacaaggcccgttatgaaagagaaatgaaaacctatatccctcccaaaggggagacaaaaaagaagttcaaggatcccaatgcacccaagaggcctccttcggccttcttcctcttctgctctgagtatcgcccaaaaatcaaaggagaacatcctggcctgtccattggtgatgttgcgaagaaactgggagagatgtggaataacactgctgcagatgacaagcagccttatgaaaagaaggctgcgaagctgaaggaaaaatacgaaaaggatattgctgcatatcgagctaaaggaaagcctgatgcagcaaaaaagggagcttgtccaggctgaaaaaagccacgaaaaagaaggaagaggaggaagatgaggaagatgaagaggatgaggaggaggaggaagatgaagaagatgaagatgaagaagaagatgatgatgatgaataagttggttctagcgcagttttttttttcttgtctataaagcatttaacccccctgtacacaactcactccttttaaagaaaaaaattgaaatgtaaggctgtgtaagatttgtttttaaactgtacagtgtctttttttgtatagttaacacactaccgaatgtgtctttagatagccctgtcctggtggtattttcaatagccactaaccttgcctggtacagtatgggggttgtaaattggcatggaaatttaaagcaggttcttgttggtgcacagcacaaattagttatatatggggatggtagttttttcatcttcagttgtctctgatgcagcttatacgaaataattgttgttctgttaactgaataccactctgtaattgcaaaaaaaaaaaagttgcagctgtttggtggacattctgaatgcttctaagtaaatacaattttttttattaagtatggtggtcctttccataggtctgaaatttttcttctggaggggaagctagtctttggctttggcccattttggaattcacatgaatttattacaggggtttatcctttcatatagttagctaataaaaagctttggtctacacacccggcatatcataatggggggtaaagtcaagtggagatagtttccatccataactggaacttccaaaatctggatcagttaagaaaatttcacatagcccatttacttttacaaactggaagagtaatcaatctactcaaagcatgggattatagaatcaaaccttttggaaagtctgtccttgaaggactaatagaaaagtttgtcctaccctttacatgaggactctattctttaactcccattaccatgtaatggcagtatattgtgcagtccccacattaaagaagacctgagaatgtatccccaaaagggtgagttaaaatacaagatgccatattaaattttggtggacataagtctcgctgaagactatgaaatgcnngctatanganngtctttcccatttatctaaannntggnctgtcaggaaangagacttccttacaagtatttcaatcacgtgggccagctttcaaacaaaaatgccctcaaaaaggtatattcccaatataggttgcccttaaaatccagtgaaggagaaaagacattggtcccgtgattaatatgaaatca

SEQ ID NO: 649011 - DNA, 673 bp, Homo sapiens
  misc_feature (46)..(46): n is a, c, g, or t
  misc_feature (104)..(104): n is a, c, g, or t
  misc_feature (193)..(193): n is a, c, g, or t
  misc_feature (237)..(237): n is a, c, g, or t
  misc_feature (247)..(247): n is a, c, g, or t
  misc_feature (249)..(249): n is a, c, g, or t
  misc_feature (270)..(271): n is a, c, g, or t
  misc_feature (341)..(341): n is a, c, g, or t
  misc_feature (344)..(344): n is a, c, g, or t
  misc_feature (380)..(380): n is a, c, g, or t
  misc_feature (386)..(387): n is a, c, g, or t
  misc_feature (403)..(404): n is a, c, g, or t
  misc_feature (420)..(420): n is a, c, g, or t
  misc_feature (459)..(459): n is a, c, g, or t
  misc_feature (462)..(462): n is a, c, g, or t
  misc_feature (468)..(468): n is a, c, g, or t
  misc_feature (470)..(470): n is a, c, g, or t
  misc_feature (476)..(476): n is a, c, g, or t
  misc_feature (486)..(486): n is a, c, g, or t
  misc_feature (498)..(498): n is a, c, g, or t
  misc_feature (506)..(506): n is a, c, g, or t
  misc_feature (508)..(508): n is a, c, g, or t
  misc_feature (512)..(512): n is a, c, g, or t
  misc_feature (529)..(529): n is a, c, g, or t
  misc_feature (551)..(551): n is a, c, g, or t
  misc_feature (566)..(566): n is a, c, g, or t
  misc_feature (579)..(579): n is a, c, g, or t
  misc_feature (629)..(629): n is a, c, g, or t
  misc_feature (641)..(641): n is a, c, g, or t
  misc_feature (648)..(648): n is a, c, g, or t
attgaaaaagtacatttatatcacaaagcatcaaccaccataattncaaatacatttgctggaatgtgtacatctacactaaatactaaaaacaaaccaatttncatttctacacagaaatattaaccgtcctgatcagtagtgatagatattttgtacattttcttaaaaaaaaaaaaaaaaaaggaaacantattttaaaccaaaaacaaaattaagatcttcatcaagtcgtcncgccccccananatttaacaaagcgctctcttnnccccccccccccccgcccgcccccccccccccctcgcccccccccccccccacccccccccccccgcgcnccngcggcctcgccgcgccggcccccccccgcgcgcggnttggtnnggggataagagggggnntgtggtctataatacncagcccaggctgccactataatctggctgaccacctggnggngccccngngggggngggggctgcntgggccatgttncttgtggngntctnccgcagagccttggtanaatcaacctgtccagctggggntggaattctgctganctccttgtccatnagtttgagttgtagttggtgcacctgcaggggctgctggtggtggctgtncttgctgttganaaaagtnagcgtaataagcagcccaagctgct

SEQ ID NO: 649012 - DNA, 436 bp, Homo sapiens
cagagaggtacgagacgtcatctgaggtcacacagcagtgtacatcgccggaccagatctaatacaggggtgcttttctcatgcttcagggagagtacctggaatgagtgctgagtcctgtggctttcagcccagaatagtggaaactctacccttggtaggctaccttcttccagctgaccatgtgattcgtgaataggtgtcagacaaacttttagaacacaagaagtgttctattcaacacgtctcttctttgtggcatcaagggataatgtggtgtgtgggggccccaatcctttgctcctactctctgagcttcgggtagacaaaacaggattgattgtgtctctttcaccagttagtgtgatgactgctttcacaatcttgtcgcaaaaaccaagccactatgggatgcctccaaggtcattggctgatg

SEQ ID NO: 649013 - DNA, 443 bp, Homo sapiens
  misc_feature (75)..(75): n is a, c, g, or t
  misc_feature (109)..(109): n is a, c, g, or t
  misc_feature (112)..(112): n is a, c, g, or t
tcctatctgtaggttcatgcatccaggagcatatgcaagatactgaaacagttccgtcactacaaaagatctccngtgttgttcttctggtaaactaaatatctacccnctnttctatcacctcccctccctctctcattcctagctcctggcaaccactaatctgttcctccatttaaaaaatgttctaatttgaaaaatgttatatacataggattatacttttaaatatataaccttttgggatttgcttttttcacttagtataattccctggagattcattcaagttgttgcctgtatcagtagtttattcctttctgttgctgagttgtattcaatagtacagctgtatcacagtttatttaaccattcacttgttgaaggacatctgtgctgattccagtttttggctattacaaataaagcttttatgaacgtta

SEQ ID NO: 649014 - DNA, 173 bp, Homo sapiens
cccggtgtgggggtgatctaaaacactctttacgccggcttctattgacttgaggtttaatcgtgtgaccgcggtggctggcacgagattgatcaaccctggggttagtatagcttagtttaactttcgtttattgcttaaggttaatcactgttgtttgtgtaggtatcact

SEQ ID NO: 649015 - DNA, 178 bp, Homo sapiens
cagagatgatgccactgcactccagcctgggcgacagagcaagacttcatctcaaaaaaaaaaaaaaaaagctgttgaattcgggcagcgcttttaaattcccgggcccgggtgttttggtaacttcggggggcacccggggtgtcgtgccctttcaaagggcccgtgcaattaaccc

SEQ ID NO: 649016 - DNA, 229 bp, Homo sapiens
  misc_feature (220)..(220): n is a, c, g, or t
tctgtgacattgtattttcacaaagcacgactggacgtttcacaatgaagaccagcgagatgctggacactcatgaaagaaaaaaatatcaagttccggcatggtctaagggagacgttacatgttttcacagggacaaacacggaccaggaaatcgaaggaaagtctttagagccccattttgggtagggagggcaacacatccctttaacctcacggnaaggggaga

SEQ ID NO: 649017 - DNA, 720 bp, Homo sapiens
  misc_feature (305)..(305): n is a, c, g, or t
  misc_feature (307)..(307): n is a, c, g, or t
  misc_feature (309)..(309): n is a, c, g, or t
  misc_feature (312)..(312): n is a, c, g, or t
  misc_feature (315)..(315): n is a, c, g, or t
  misc_feature (325)..(325): n is a, c, g, or t
  misc_feature (327)..(328): n is a, c, g, or t
  misc_feature (330)..(330): n is a, c, g, or t
  misc_feature (335)..(336): n is a, c, g, or t
  misc_feature (377)..(377): n is a, c, g, or t
ggaaaaaaaaaaaaaatagcacaagaattaattgtcagtcctgggtgtaattaagtacgaggctgtcacttaccactggattccctggagttaggcggcaaagacataagcagctggacactagccagtgctgctccctcttctcacagcggaccacgtctccttgcttgggagcccatcgtcctggctccgtgtggcctcgctgggtctcggggaagcagaggactgttcacttcgctgtggctgaataatgcctgtgagtcgtgccctagacacccacgactcgcagggtccatggttccggngncngtnaanctgcttgctngnnangtgcnngcccatgctgcgggactgtgtgctcagccttcttgcggacngtaaagaagctaagtggaagagtgtttcctcctctggccgtaaagcagctgtccccgccctactccggaccgccccaaagactccatgggatggacctgacgtcatgccgaatcccatgccccttcccttgggcctgctgtggtgctggacatcatgtgacacgacggacaccaggatgaccatcagggcctacgggaggcccggggcgcttgcgaccgatgaacgtttggctgcctctccttccggcagccttatgctggctttgtcttaacactggaatcaagcactgtgcaaacgcgctggcgtccccttcttgagccaccagcggaactgcccatcgcc

SEQ ID NO: 649018 - DNA, 512 bp, Homo sapiens
ggaatgagccttcattttgctggagtagggggtagcaccgacctcaggcacctggctgtgggaaatcagttggggggctggggggttttgtcttaaagggctttatatcagaacttagctaataatcaccccttgtacatgtcctgtgtgctgccagttcctgagcctttggtgagttccacagggtgacacaggtttcttgttgacctttcctgttgttggtctaacattcagctttctcagggctgttgggacagtgactcctcacccacctctcttccagcttccaaaatttggtggccctttttctttcctgttctctttgtctttgtggatttataactgaaaaagtagctctagtgacatttcagtagaattcaggagggaaaaaagttcttatgttcaattcactatctttaccccaaatttccttaatctttatatctgagatattagtgaattaagtacatctgagggataaataaatgtttctcaaatgtttactaaattga

SEQ ID NO: 649019 - DNA, 633 bp, Homo sapiens
  misc_feature (207)..(208): n is a, c, g, or t
gggctagacctgaaaagggacgtgtgtccgtggagtcgttgtaagagggttcattcaaagcttcttgcctaaaggcgcagctcctcaggtttgaggacggagcctccaccctgtacgagtccaatccactctggggtcacttggccggcacctgtgggctttatggaaaggaccaccaggaggcagccctggtgcacatggtgaatnncggggtggaggacctccgcggcaaaaaggtctccctcatttccaccaattatgaggggggcaaggatgattatgtgaaggccctgcccgggcaattgaacccttttgagaccctgttgtcccaaaaccagggaggcaagcccttcattgtgggagaccagatttccttcgctgactacaccctgctggacttgctgttgatccatggggtcctagcccctggcggccgggaggggttccccctgctttcagcaaatgtggggggcctcagcgcccggcccaagttcaaggcctttttggcctcccctgagtaggtgcacctccccatcaatggcaacgggaaacagtgagggttggggggactttgaggggggggcagggtttgccttcctttttccaggcccaataaaatttttaagagagcta

SEQ ID NO: 649020 - DNA, 299 bp, Homo sapiens
aaccatgaggttgcaggttcgagatccccgacctcgctctgtgggttgaggatccagtgttgccgtgagctgtggtgttggtcacagacgaggctcagatcccgagttgctgtggctctggcgtagactggcagctcgaacatgcggtccatactcagtttatctgtcgcctctcttatgattataatgacaaggaggctacagcctgcatagactcacaaagccatttactttgtttttcataaagtcttaccgaagtatagttgatttatgaggttgtgacaccgcatgtgcgcttg

SEQ ID NO: 649021 - DNA, 152 bp, Homo sapiens
  misc_feature (126)..(126): n is a, c, g, or t
tctgaggatcctcttgcttgggacggcgctggtagctggagcggcatcggagcatgcggataagagcacttcggctggtgtcccacaaaggcaccagtggcacctgcggtcatgccaatgaacagnctttagcagaaagccagcgccgagta

SEQ ID NO: 649022 - DNA, 947 bp, Homo sapiens
ggcgtcagccgggttcgcagtgcagcagtcggcctctcccactgcagtcctcctcgtccgccttaccgtaccgtcgtcgatgtgtcgggtggagtagcatctactggtagtgtggtgcgtcgatgaagatcctggtagccttgcttggagcaggcgtgacgccgcttgaggatgcgcgcgtgtgcacccatgcagacgcgtagctggaccacgagatggaagctgatgggagaccagctgaatgcctgacggtagcttctctgaacagacgcatgcagcatggttgacggaagagttggatcggtgcccaggagcgtctggcggacagctttgtgcgaagctgcgtggcaacgctgcacgaatgccagtagcatgatgagtgacgagaggcgttgacatagtccattgcagcagtcgagcccttaatgaagatgcaatgaatgcttggccctttcatgggagcatccaagcttgtacacgattgcacatcgcactattgcttgaagccatgcctgagcgttcccctagtgcatgagggtgtgcccgtacaggcttgtgttcattcgttggacgacgcggaccctggaacacgttgcacgcagtgcatcggggcttgatgcttcttcgagaaatggggccgaagagttccggaccaaggcgtggggagagcaacaagagtttaaagacttagagtgggcgctccagacgcgtttggaaaatgccgtttaatatggcggcttgtgcagacaggggaaattagcaggtagcgttccgacagtacacgtgtaaggcacacggaattttcgacgcgaaacgacggaattcactatgggtccctttttccctgactgcaatgcgttggacacggcgagggcgttgtagaagatccgagggctgaggtaatggggtgagtagggttcaggttgaggtaaaaattgtagggaaac

SEQ ID NO: 649023 - DNA, 202 bp, Homo sapiens
  misc_feature (187)..(187): n is a, c, g, or t
  misc_feature (190)..(190): n is a, c, g, or t
tcttggacacattttctcgagcttcctgacctgctgtaatttggattgactgctctctataccttgggcatagctgtcatcctgtggtctccattcaccatcatctcggtgactacttttcatctttcccttgtgtttcttggattccatgttgccttccttctcaggttattccctcttatctaanggngtctttggtctg

SEQ ID NO: 649024 - DNA, 298 bp, Homo sapiens
cttaacccacagcatctatccatcatgatcctcagaatgacagcttccttagattctgtaccctaattgcctatctctatgctgcagacctagttagtggctccagcaaatatcagataaaagtagtactacttgatgtccagatatcatacaatccagcatagctcatatgatggactatgcattgggtcacggaacctcagggctctatggtaaactagtggaataaccttataagaatctctccatcttcatagctattattatccacgcgtcagtatagataggggatcctcta

SEQ ID NO: 649025 - DNA, 277 bp, Homo sapiens
ggacatcctacgccaacgtgaagcagtggctgcagagagattgaccgctatgcccgcgggaacgtcaataagctcctggatgggcaacaagagcgcactcaccaccaaagaaggtggtggacaacaacacagccaaggagtatgcagactcactgggcatccccttctaggagacgagacgccaagcatgccaccaatgtcgaaccgagcagttcatgaacatggctgctgcttggggcatgttagcgatgcacatagcggggttccaaacatgatg

SEQ ID NO: 649026 - DNA, 758 bp, Homo sapiens
  misc_feature (16)..(16): n is a, c, g, or t
gggagcggtggtgcanaggtcccaggaaggtggcgtcagcatctgcagtctgctgtcgactgttgtcgtgagcctccccacactccccatggagaagctggtggctctactgagccccaagggcctcggctggtcctggggcctgtgaagatgtgtccagtgtgcccgtatgaccaagactttcgcgagcttccggtcagagtgtgaggctgaggtgggctggaacctgacctatagcagggctggggtgtctgtctgggtgcagggcttgtggagatggatcgggacgctgcacaaggatcaatgtgccggatggactggtgcttgtgatgttgccagcctgagacactctacgactgttccttacaagtgacatttgatgtaccgcaatgaaatgggacagcaacgtcattgagacttttgaccatcgcccgcgttgacagtcaacgctgacgtggggctattactcctggaggtgtcccaaggcccttaagagaccgtgatgtcattcaccctccgggtccgtggctccccattgggcgctgattacgtcattatgagctactcagttcaagctatcccagatacccacctcggaaagacttggtccgaagctgtgtccatccagagggggaactcatccagagaaagggccaagagctgggtctaccctacttgccgtgttgcccagggccttaccgggggtgggagaaatttccgtcggtccggctgaaagttaggggccacccgtgggaaac

SEQ ID NO: 649027 - DNA, 920 bp, Homo sapiens
cgtctgacttctcggtcccttttactatatggctccccggtcgcattatgtggccccatcttgtacaacttatggttcctcgcgtcggcaagtccggttgccttcccgggctcacagatttgcgcagttaaccgggcacatggtgactctttttcaaggtaattctgctcccccccccgtgcccgtttggtcccacggactagaccgccgttgttttggttaaaaagacagagagttgtgttccctccctataaagggcccctttgtgtaccacaatccgggagagtcctttggtctttaaatcttattgcgggcccccccccccgccacgctttttgggtggtattgaaaataccatttccttagatgtgggtcgtgcagcgggccacaacccttatgggccctttttaaacgtggaccgttgttgagtgcgcccccattatggaaagtctctttgggggcggccccaatccccaccctcttaatggtttgatggcgtctgttctcccgtcttgtctgtgtgatcacccgcaaccgcctgggttcttctcccccccccgggacgtgtcgctagaccccaggaagttggagaccagttggttactaaattggccgcaaaagatccgcgttctcttttataaaaaaattgtgccatttgcgtttttggaataaattgaatcccttctttctaaatacctcgccttttataaagagcctacgaatgtaaattatggaaggataatcccaagacgctctgttattaaatacaactaagttattcgcccgagaatataagaattaagcgccacctaacctccttagttattaatacctaattttttaatcctcccccctttttatgaaaaaaaaaccttgttttttaatttcgttggaaaaaaccaattttaaagggaaaaaaa

SEQ ID NO: 649028 - DNA, 227 bp, Homo sapiens
cgtcatatgtgtgccatagtgctaatcaaaagaaaagtcactctgtgaggtgaatgcacacatcacaaagaagtttctcagaatgcttctttcttgtctttatgtggagatatttccttttccattcagaacctcgtagcagtgttctgtaatcctgtgtgagggacaaacactcagaatccagccactgtgtactggagtcctatctgtgggcacacattatggag

SEQ ID NO: 649029 - DNA, 302 bp, Homo sapiens
tatgtatcccaacacactgtaatatagtggatctatacgtgcaagaccataactcagacactggcctcaactaggaccacagtcacgacgatcacaggtctatgcagagacaacccacaaacccttcatcaccagcaacaactccaaccccgtgcaggatgaggatgctgtagccttaacctgtgaacctgagattcagaacacaacctacctgtggtgggtaaataatcagagcctcccggtcagtcccaggctgcagctgtccaatgacaacaggactccttcactctactcagtgtcac

SEQ ID NO: 649030 - DNA, 174 bp, Homo sapiens
aaagtaaagtcagtggaaccattgttgtttgagagttcagtaagactcaaagcacaagtgctgcggtctagcctcttcaagaattttatttaaggccgtgcacggggaaacccccttggaatcccagcactttcggaggccgcggggcgcggatcaccccccggtacatgcaag

SEQ ID NO: 649031 - DNA, 101 bp, Homo sapiens
aggtgggagctgaatgccatgaccacctactagcaatatcagtcgcccacatcgtctcctcccatgggtaggaggaagtttctgccacctcccctcctgag

SEQ ID NO: 649032 - DNA, 1638 bp, Homo sapiens
tgttgttctggtcacaggatttttggcgttgctagatgggtgtaacacctgtgctccgctcatggattgttgtgaccctattcaataattaaatctttggctttggtggttttttgtgcaccaacaacacgacccccaaccgctgtggtggcaaaccacacatgtttggttttaatacacccggctataatgtgtggtttgaaaccacccgtggtgataaactatttttatactgttggtgggtagttttgattagccccccccgctagttcttcccccccgctgcgggctttgtaatatgtttgctgggaaaactgttggtgggattatgataataaattgtctgggggaaatttttccttggtccattatagagatgttgtgtctcggccgtaagacccggcttttaatttgtggccttggtgtgctatagaaagagcctcttgggcccaccatgttcataatgtcccccacatcacacgggctgtgccccccactcgtgaatttctggaaatttttttgtggggggggtaaacaccaccttggtccgagacttccacacaggtggttggtgccctgattttggttgtgaaaatttgtgtttgtggtaaaaatctttggtgctcaacagcgcttggttgttgtccccttcccacacagctgagatttctgtagatttccccacgcataatatgggggagaatccttggacccacacattgtagatatgtgtgagagaatatttgtgaagaagggacacagggtgccacatataagatattgtggtgcggtttcgatgaaaagtgtgtgccctcatatgtagatagtctacgtccacacagcgcctttaaaaaagcgagatatattagcccacacacttgtgcgcgctatatttgtgagagtttataaaggtgtgtgtgtctgttgatatctctttatactgtggagaaataccccacaatggtttgtgtgacaaagaagatctctatattctgcccggggagaggttccacaatactccacggggtgtgtcaacgacgcaacaatagggggtgtataatagggcgcgtataatgtgtagtatggcgcccactttttgcagagtagattattgagatgttgtctttcctctctgagggcccctctgctccccactagtgttgtatactcctctctctccaatattggctctcggggtgattgtttaacacacacagcgctgtgtattatcacacccgcacagagatagtgtatataaggagtatgacattgagagcgttttgtctccacagctctccacacagagataaatgtgcgcacaagagttacaccccctctgtgtgtgtacacactctccacagagaaggagactctcatatataagacgcctctgtggagactcacagtggagagcttctaggcttcgtagaaaattttaaaaactaccacacagtggagttaaactcgaggcccttaaggtttcactgccacaggacacctcggagtcacccgctttgctttgagttcttcttcacaataatgtgaaatttgggctcccccagaatccaagcctatagcttggtttaaagcttgccatctgagctcttggacccaattaaattaactattgtagtgtga

SEQ ID NO: 649033 - DNA, 104 bp, Homo sapiens
ccgggccgtacccatatccgcagcaggtctccaaggacaaacgggccctcaaatttatcaagaaaagggtggggacgcacatccgcgccaagaggaagcgggag

SEQ ID NO: 649034 - DNA, 854 bp, Homo sapiens
gttctgctccggggcgcgctgtcgctcgtgagttcccatgaggcctgtcgggcaccgtaaccagcttgccgcgtacaccggcaccggcgcctgcggactccgcaggaccccgcgcccgcgccgcgctatgctgtggctgctggtgggcgttgctggccctggggctcgctgtctttgcgctgctggacgtctggtacctggtgcgccttccgtgcgcctgtgctgcgcgcgcgcctgctgcagccggcgtccgtgacctgctagctgagcagcgcttcccgggccggtgcgtgccctcggacttggacctgctgctgcacatgaacaaggcgcgctacctgcgcgatggccagattttgcgcgcgtcgcgcacctgacccgctgcggtgtgctcgggccgctgaggggaggttgcggggcgcacacggtgctggcgggcctcgtgcgcggcgccaccgccagtcggtggcttgtggagcccttcgaggtgcgcaccctgcctgcttggggctgggacgaccgggcgttctacctggaggcgcggctttgtcagcctgcgggaacggcttcgtgtgcgcgctgcttgcgctttccgggcgaggaacctcgcgtgggcacctcaccacagagcgcgtcgtgcaagcaccttgttgccaagtgcagtgttggagcccccgtgagcttgccccgcttgatcttgcagccactgggtctcctacaaaggaggccgcagcaagtttctccgattggagagttgggctcagtggtgtgccccaagacccattggccggcactttaacggttgcctgggcccatcttggtctgtgggcttgccccagtgggggttcgccaac

SEQ ID NO: 649035 - DNA, 340 bp, Homo sapiens
ggaggtgtggtgctccattgtcaactcaggcatggcagtcctggccatgagtttgaatcccagccgctcagcggctgcgaggtgaaatcactcaatcctctggcccttgctctccttctctgtacaatcggatagacttagtatttgctttatgggatggttgtgagaatccaatgagacagacattcagtgagcaccgtacacgtgccaggcacagtgtcagacagccagggctagtgtcatcaattgctcatttttttgttgttgttgcagcacggcgtctcgctctgtcgctcaggctgtagtgcagtggcacgatctcggctcactgcaagttctg

SEQ ID NO: 649036 - DNA, 185 bp, Homo sapiens
  misc_feature (162)..(162): n is a, c, g, or t
tagccccaggcttacctatgctcggtgatgtggggatgtacggatacatttcccagacactatacatgatcgcagttaatcgccataagaagtggtcgctcaggacggtcgaattccgggtgcatcatcatcatgatcgtcgcatcgatcgcctctctactntgtgtctctccacgatagtagta

SEQ ID NO: 649037 - DNA, 450 bp, Homo sapiens
  misc_feature (87)..(87): n is a, c, g, or t
  misc_feature (275)..(275): n is a, c, g, or t
gaccccttttactctggataagggcagaaacggttccccttcccttatttgtaaagttacccgctggtagctttcattatttttgcnaccctccttttatttgtatttaaatgttttaggccacctaagaaccaatgtaaaagtaaagatgcaggaaaaatgaattgcttggtattccttacttcatgtatatcaagcccagcagtaaaaccaaaacccctggatttaacttttttttaggatttttgcttttgtgattttttttttttgaaacntgcctaacatgcatgtgctgtaaaaatagttaacagggaaataacttgagatgatggctagctttgtttaatgtcttatgaaattttcatgaaccatcccagcataattgttaagaacccgtgtattaaattcatgtaagtggaataaaagttttatgaatggaaaaaaaaaaaa

SEQ ID NO: 649038 - DNA, 1245 bp, Homo sapiens
ctcgtgggagttgcagcatgtgacatcaccacggtgatgtggcgaatgctggccacggtgagtgtggtgtgcccctggtgacattgcgcagccaaggatgtgctgcaagggtgctctggcctgcgtggctgcctggtcccacgatggcactgcgtgcccagtggtcttgtgttgctggagacgtgtgcccacatgtgtgacttgtgtgactgctgtatgccactacaccgctcagcccctaggtgtgcttgggcttgtgcatgacaggtacatgcatccatgggtgatgtcaatggtgcaattgggtgctgacgaccaagacctatgtggcgatggctgtgtgctgtgcgtgctgtgatgttgacagttgaacgctactcaaggtggacggtgacgtgattgcgttgcaggtgcatgcgggcgttggacgagaagctgccattgcatgtggctgtgctagatgctgtggtgatgtgcaacaatgtgcctttccaatggaatgcccctgttgtgcccaaatgtgcccgtgggccgttctgcctggggtgccggtggctggaactgtggaatcgcccgtggtgaattcccgtggttgccccttcaacgacggtatctagagtggctttgggaatggaacggatgtggcacaaagagttcatcccggacgaccttggggagaggattgtgacatggtttgccgccgacagctagtgcatttgaccccgacatgcgtgcccaagtgaacgggccctaggggtccatgggatagaggaaaccggttgagagccatagccaaggtgcaccatttgaaccaattggtggataccctgggatggatgcacacgtgtacggaaagggttcaccacagcaaatgaaactcggccgaccgtgttcccgggagcccatttccccttgtacaaaacaacccccttattaagcggccttgggactgggtgagtcccgtgtcctgtggtccaaagaaacagcacggggggcatcgttgagtataagcgtttgtaaccatttatcacttcgccgagtcgtggcagattcggaggacggctgaccttattggggccattgcaccccgttccttggggtggacgtccgcacaggaagagcccactagtcaagcgattggtcacctctacaaaatgggcttggcttaacgccgcagcgcttacagaaatgtccgtttgtgtgacgcttgttgtcgaaaattacccgtgtgaccgattgaaacga

SEQ ID NO: 649039 - DNA, 366 bp, Homo sapiens
gatccccgttcttacagcgatatatgcaataatctagtgtacaacccatagagtgaccagagttttgaacagaccttatagagttgagccataatcttatgtcttcagactacctgtcaatcggggtacctgaatggtgaatactacccggtatcgagtattctgacttctgttcattgatagtgattgagaatcttcctttcctgtgattttaattgactgacctagaaagaaatcccagtcctttgactttactaaatgctatccctgtggtacgtgctatataccacaaataataccaagatgtgcttatatacgaatttcaccaatatgtgtacacttctgtccttcagctccccagtccaa

SEQ ID NO: 649040 - DNA, 252 bp, Homo sapiens
actgaacaacgtaaggtcttgactgacacttacaagttggatgaatctgaaataaagttggtattgtttgaagcagcccaacaatttcgaacatgctacaagaccgtcgtttgactgacaaggccttgaagtacatgactgacaacaacgtcgatcttcgcctaggcgccatggtcactggtgttgacgaaaatggcgtgatttttaaggatgactcaacttcgccaactcggttcctcattaggacaacta

SEQ ID NO: 649041 - DNA, 420 bp, Homo sapiens
agtggtgcacccgggctgcacgagttcggcacgaggggggttccagctgtcttttgcactatgcccacaggtgaagagttccaaagatccctgagcatgctgcccatgatgctgccaggcatggctgctgtgccccagatgtttggtggtgggggacatctcagtgcacccatgtgaaccacctggacttgcactgctccggcgtgtctatcaagcacaacgagtggtacggcagtgactggactgcggaagacaagccgagtggccctgatgtgtctgaacctgcaataactactataaggcctgtggcttttaacccatttctcatcccaagagtatcttctggactcatttacccatccatgttcctctcccctgggatgggcatgggtctgtcagccatgcagcgccagacctctg

SEQ ID NO: 649042 - DNA, 157 bp, Homo sapiens
gcagtcaaggaggctgtcaggctctctgtagatgtacggctggtattaccaactgcttttccatgtccgcatcacacatagcatctgacgacttgcctgagtccatatcgtggatgctgcgcgtccacttacgcgtcatactcgacgcggctcttac

SEQ ID NO: 649043 - DNA, 268 bp, Homo sapiens
  misc_feature (82)..(82): n is a, c, g, or t
  misc_feature (238)..(238): n is a, c, g, or t
atcagtactacggcgggtaggctaggattgtgggggcatgaatgaagcgaacagattttcgttcatttttgggtcctcaggntttgttataattttttatttttattgggctttggtgagggaggtaggtggtagtttgtgtttaatcaatttttaggtcgggtggatgaggaaataaggtggttaaggagttatgggggggtaaattaattggggttggggggcccaataaacgggncaatttccttaattggggggggttttatgg

SEQ ID NO: 649044 - DNA, 335 bp, Homo sapiens
ggcgtgttttggtttttgagatggatctcactctgtcacccagcctggagtgcatgtggtgcgatcctcgggctcactgctaccgtgcacctcccaggttcaagcatgtcgtcctgcctcagcctccacgagtaggatgggcagttacaggcacccaccacgatgcccagcgaagggtgtgtactaatagtagagaagggctgtccagacatgtcgaggtcatggctgatcgttcgaattctcatagaccagcacagtgataaggcgaaaatgccagtcgctaacactctgtgtgcaatgaaaacacgaaacttcgatgtgacaaaaacaatcca

SEQ ID NO: 649045 - DNA, 283 bp, Homo sapiens
  misc_feature (254)..(254): n is a, c, g, or t
tatagcacgacatgatatggttgatagagttaacttctgctgcaggaatgtacatatcttgatgtttttctgccttgctgtggagtggatgctggcaatgttgatcactatgatcagacccaaaccagggctatgcaccaaaaagaggctcacctgtaccactgaacttacggactcatgtaacacagatactgactgcacggaactccataacagctacttttacggctgtcaaaacaagagcatggattccncttttctgcagaagaagtgcatggatccc

SEQ ID NO: 649046 - DNA, 831 bp, Homo sapiens
ctcccataaatcatgaatgttcctcatggcatctggaatggtgaattctttttagaagttttccagtttactttgctgaggtccataagaggactcactgtctatgacaactatagccttacaaattgtatttcttaaataattggacttgaaagtcaaaatactccttgatccacaggctgcagaagggatgttgtgtcagcaggcatgaacactactttaaccttgtacatcttcatcagagttcttgggttatcaagtgtcttgtaaataagcagtaatattttcaaagaaatcttttattctgagcagtaggtctcaacagtgggcttaaaatatctagtaaaccatgctgtaaatagatgtgctggcacccaggcttctttgttccatttatagagcacagggaggctagatttagcataatttttcagggcccattcttggaatggaaatgagcattggcttcaacttaaagtcaccagctgcattagctcctaacaagagagtcagcctgttctttgaagctttgaaggcaggcattgacttcttctctctagctatgaaagccctagatggcatcttcttcccatagaaggctgtttcatctacaatgaaaatcttttgtttcatgtaatcaccttcatcaatcatcttagctgagtctcctggataccttgctgcagcttccccatcagctctccttcaccttgcacttttatgattatgttatcggagacaacttctttctttcaacctcttgaaccaaaccctggttagcttcctcacttccccctcagcttcatggaatgaaagagttaggtcttcctc

SEQ ID NO: 649047 - DNA, 174 bp, Homo sapiens
gggctggccatgctactctaatttaattcaggtcaaaacaaccacgctgctttctccagttaagggcaattcacgccagagtgatggagctttcatttaaacccagtcttggcatacccaggacgaagtacacttgcctccttctctgagtgtgcactaccaacaggactcaaa

SEQ ID NO: 649048 - DNA, 99 bp, Homo sapiens
cttttctgcagattttgctgtcgaccaaagattcttgagctggggtctatagaggtgagtaccggtagacttcaggggatgtctgtgactttacgttga

SEQ ID NO: 649049 - DNA, 109 bp, Homo sapiens
atgtacgcgctgctgctgcgcctgctctgcgtgacccggggggggttttggggactcctctacgacgtcgcgctgcctggcctgcacgcttggacctggcctgtcgttt

SEQ ID NO: 649050 - DNA, 1189 bp, Homo sapiens
ggcggatggaatgaatgcaggggctgggggaatgagtagaaaacagttgtctgtgcgagtgactcatgatatcatatcgttgcatctggttagactagtgactgctagtgctagttgtgcagctgaaatcatatagcatcaattgatcaactcttagagacattcacgtgggtgtgccgaggagcggagttactcatcatgtcctcaagatcatctcgaagatcatcctcgtgatataaaagggctgaagcagggtagataggaaagttcagggtggccaagtgacatttagtaaaactactagtttgatcacgttgtccgaagatcgtgggtgggaattgtacccatggggttcccctacaggtaaacttaccaaaaacatttttgtggacaggcaaaagtggatgttgacgttggtggccactcgttgaggactttagatgaagaatttgggcgtagttacccaaaatgacgaaatgcaaaatggatcaaggtgtagacatatttcagttggatacccaataggttgcgaaagcgcaatttacatatatatcacaccatatttatgggatttattaaaagcctatgggtgagaaattgtatagaattgtgtgcttgcaaatggttatactttaaatggagaggatgtagataacaaaatttgtaggtagagtcagacgagagagatcaatgagttggaaattaaggagccattaggagaagattagcgtttgattggactgggaggatgggtatataaaaacaccgcaagataatgaggaggttctactaaggcaactcccgaacacccagatgagaggggcctaaacagagcattgtaccacctgggtgataaactcccatcaccgcatggtgtagtaacctcggagagtactagggggatgtggtcgcaaaagagcaaaggaatgtgaaaaacattgcagggttgtagaaaatgcaattacgcaaaaattgtggagtacccaaattacgcgatggaatgtattgtgaagaactatggggcaaggcacaagtaatagaacgcaaatagaataatgaatgtggcgtgtgagaaagcaattcatatgtagtggggaaacatttacattaagtgtgatatttgatgtgatgtaattgaggcaccagttactaacatatgagagtaggaacttctcacagtggaaaaagg

SEQ ID NO: 649051 - DNA, 110 bp, Homo sapiens
aatcgtgtcagcagtttgtatgtttagtgggggtaatgaagtattgcaaattcattgggttttcctcaaattcgtgtaataaaaataaaaacccgacaagattgggccat

SEQ ID NO: 649052 - DNA, 102 bp, Homo sapiens
ccgggagggttggattcttttttttttttctgtttaacagaaaatgggctgtctgtcatttacctacttctttccccctaaataaaagaattcttccgttta

SEQ ID NO: 649053 - DNA, 176 bp, Homo sapiens
  misc_feature (176)..(176): n is a, c, g, or t
agcgtaccaaaaagggaagccagtcgaggacaggtgagaaagccagctgactttattgctctgggggcagggggctcaggagctcttggtggggcgggtccgcttcctcttcaccacaccaagagctcctgagccccctgcccccagagcaataaagtcagctggctttctcaccn

SEQ ID NO: 649054 - DNA, 533 bp, Homo sapiens
  misc_feature (12)..(12): n is a, c, g, or t
  misc_feature (35)..(35): n is a, c, g, or t
  misc_feature (533)..(533): n is a, c, g, or t
gtggattttttngaagaacattaataaactaaaantttcaaaaaaaaagttcccgctgcgaagggagccgccgccatgtctgcggatctgcaatggatggtcgtgcggaactgctccagtttcctgatcaagaggaataagcagacctacagcactgagcccaataacttgaaggcccgcaattccttccgctacaacggactgattcaccgcaagactgtgggcgtggagccggcagccgacggcaaaggtgtcgtggtggtcattaagcggagatccggccagcggaagcctgccacctcctatgtgcggaccaccatcaacaagaatgctcgcgccacgctcagcagcatcagacacatgatccgcaagaacaagtaccgccccgacctgcgcatggcagccatccgcagggccagcgccatcctgcgcagccagaagcctgtgatggtgaagaggaagcggacccgccccaccaagagctcctgagccccctgcccccagagcaataaagtcagctggctttctcaccn

SEQ ID NO: 649055 - DNA, 729 bp, Homo sapiens
cggactggtggctggtctgcaggttgactgcgtcaatgcgagcaggctgcaggtagtgctgagccacctgaggggtccggccgattccggctggatgcctgcatgccgcgccttgccctgagcggtgcccctggcagtgccatcgttgctcgcgggacgatggtggtggtgctacgtgtgcgtgctagcgatgtgccagtctgccgggacgtgagccagtgcgcgggttcaaagggactacataccccgacaatgcttctcatcggcaagtccatgacctgcggttctcaaggacgtgaatctgaggccggaacagactggtcggacatctgtgttcggaaatgtgctgcatgcgctgtgggaccggggacagatcatggtcccgagatcgccacaggtcactgagtatgacgatacccggagactgatgccgtattgatcgcatctgtcaaataggacgaggtgtactcctctgtgggctagcagtgcacgtgtcccaggagatacgccacggctgtgcaactcagcaaagatggtgtccgtcacatcatacgaattatgtacactaggcccattgatgcggcagtggcaatggaccgcagttgtactcccttgggcattagaacaagaaaggtgaagcccccatcgcactatgtataacgcttttcgctaggctttgacattgggacgcacagggggacctcagttcgcaacagcaaacagagatag

SEQ ID NO: 649056 - DNA, 366 bp, Homo sapiens
ggtactctgatcaagtattattcatgatggtacaaaaccatgatggatgggtaagaaaaaaaaaatctattccaattgcaagacagtccaatggatttttaatgtaataataactcaagaagttaatggatgtagttctagattccactttgcttttaaacattaacaagctatatatttgttgagtttgggtatagtatccaagaataatattcacaatggcctgaaaagctgttaaaataatctccccatttccaactacctatctctggtagaccagattttctgcatatactttaactaaagcatcagaatagacaggaacgtggaagctgagaacccagctgtcattactggatcagagta

SEQ ID NO: 649057 - DNA, 834 bp, Homo sapiens
  misc_feature (42)..(43): n is a, c, g, or t
  misc_feature (644)..(644): n is a, c, g, or t
  misc_feature (646)..(646): n is a, c, g, or t
  misc_feature (679)..(679): n is a, c, g, or t
  misc_feature (682)..(682): n is a, c, g, or t
  misc_feature (687)..(688): n is a, c, g, or t
  misc_feature (691)..(691): n is a, c, g, or t
gattccaggcagcttagcgaatcgtggtgctgctctttccgnntcaggtcgccgctgcgaagggagccgccgccatgtctgcggatctgcaatggatggtcgtgcggaactgctccagtttcctgatcaagaggaataagcagacctacagcactgagcccaataacttgaaggcccgcaattccttccgctacaacggactgattcaccgcaagactgtgggcgtggagccggcagccgacggcaaaggtgtcgtggtggtcattaagcggagatccggccagcggaagcctgccacctcctatgtgcggaccaccatcaacaagaatgctcgcgccacgctcagcagccgacggcaaaggtgtcgtggtggtcattaagcggagatccggccagcggaagcctgccacctcctatgtgcggaccaccatcaacaagaatgctcgcgccacgctcagcagcatcagacacatgatccgcaagaacaagtaccgccccgacctgcgcatggcagccatccgcagggccagcgccatcctgcgcagccagaagcctgtgatggtgaagaggaagcggacccgccccaccaagagctcctgagccccctgcccccagagcaataaagtcagctggctttctcaccngnaaaaaaaaaaatgaaaaaagagaaataaagaanggngagannaancagggggcgcgacaacacgggtgaagcacaacgggcccaggggcacaaagggtccgaggaccccgtttggggacaccacgggggaaaatggcgggatcccatatggaggcccgagataatggcagagccgagtaaccggttag

SEQ ID NO: 649058 - DNA, 92 bp, Homo sapiens
  misc_feature (66)..(66): n is a, c, g, or t
gaccaacccacagtgccgcagacgcggtcagaaagctagcaccatcccggccctccgcctcctggnctgctctatttattcgatctggttct

SEQ ID NO: 649059 - DNA, 427 bp, Homo sapiens
agtgagaactaggataacagtgacttagagtttattaagaggtctaagaattaccatatgtaagtcgtcataatggcgggaaggtaggtgggattattagtgactcatattagagatgaggcggtattctagctgtcatgctacttcctcggtctatgctgttcttctcccttgtatcgagcgccggcttggaggctttcataaggatattctcctgagtcttcttaatagcttgaaagtttgaaagtgattccagaagtgggtctggggtatatctggaattagttttatatatagtataagatcggaatctagtcctatttggcccgatatatggaacgacatttatattcaacgcttaatctatggtcatgtctattctgctgcaactacggcagctatgagatctgtgtcagattcgcggtct

SEQ ID NO: 649060 - DNA, 261 bp, Homo sapiens
  misc_feature (206)..(206): n is a, c, g, or t
agcgtaccaaaaagggaagccagtcgaggacaggtgagaaagccagctgactttattgctctgggggcagggggctcaggagctcttggtggggcgggtccgcttcctcttcaccatcacaggcttctggctgcgcaggatggcgcttggcccgtgcggattggctgccaatgcgcaggtcggggcggtacttgttcttgcggatnatgtgtctgatgctgctgagcgtgcacgagcatttttgtgatgggtccccattaa

SEQ ID NO: 649061 - DNA, 782 bp, Homo sapiens
  misc_feature (19)..(19): n is a, c, g, or t
  misc_feature (101)..(101): n is a, c, g, or t
  misc_feature (106)..(106): n is a, c, g, or t
  misc_feature (196)..(196): n is a, c, g, or t
  misc_feature (214)..(215): n is a, c, g, or t
  misc_feature (237)..(237): n is a, c, g, or t
  misc_feature (243)..(243): n is a, c, g, or t
  misc_feature (262)..(262): n is a, c, g, or t
  misc_feature (270)..(270): n is a, c, g, or t
  misc_feature (306)..(306): n is a, c, g, or t
  misc_feature (313)..(313): n is a, c, g, or t
  misc_feature (327)..(328): n is a, c, g, or t
  misc_feature (332)..(332): n is a, c, g, or t
  misc_feature (353)..(353): n is a, c, g, or t
  misc_feature (377)..(378): n is a, c, g, or t
  misc_feature (381)..(381): n is a, c, g, or t
  misc_feature (385)..(385): n is a, c, g, or t
  misc_feature (399)..(399): n is a, c, g, or t
agcggataggccgagcagngaggcccagctccctgaaacaacagtaacctacccctgtgggtcatcatcatgccctccgacctggccaagaagaaggcagncaaanaagaaggaggctgccaaagctcgacagcggcccagaaaaggacatgaagaaaatggagatgttgtcacagaaccacaggtggcagagatngaatgacggccaatggcnngagagaccacagaagtagattngctgancaaggagctagaggacttngagatgangaaagctgctgctcgagctgtcactggcgtcctggnctctcancccaacagtactgnntgtncacatcatcaacctctcactnacctttcatggtcaagagctgctnnagntganaccaaactggaatnaaactcaggccgtgcgttcatggcctcacttggtttaaatggaattggacaagtccatgctgctctctgctattgggaagcgtgaagtgcccatccctgaacacatcgacatctaccatctgactcgagagatgccccctagtgacaagacacccttgcattgtgtgatggaagtcgacacagagcgggccatgctggcataaacgaggcagagcggctggctcatgaggatgcggactgtggagaagctcatggagctctacgatgcgcctggaggatgctggatgccgaccacgctcgcagatggagggctcgcggatcttgcatggactggggttcaccgcttggcatgcacgcaagaggctgaatgcttccgtgtgggc

SEQ ID NO: 649062 - DNA, 189 bp, Homo sapiens
  misc_feature (189)..(189): n is a, c, g, or t
tgggggacaaacattcagaccccagcagcaggcttttggaatcctatgtgagtgagagtgcctggagcctacccaacctgacgcccccaaagccctcacagggtttgacctcccagcatgcacccgccccaccaagagctcctgagccccctgcccccagagcaataaagtcagctggctttctcaccn

SEQ ID NO: 649063 - DNA, 650 bp, Homo sapiens
tggcgcccatttggcacagcacagttcttctaaactttctttatatgtccccaggaacacctttttgttaaccctgccgatctctcccaaaaattgttgggccccccccgtgacagcttgagcacccgcttcctaaatttcccttctcgtaagtccttgaatgcaacaggatgctttctgttcactctcccctgacctcctctgtccccgaattatacccggcaaactccccccccggaagagtcaattcgtagttcaaacgcccatttggacttcgcctatttgttttacaacagtggacccggtgacactacggtgctactgcctgggggcaccctccactgcccgcgttaactatgagggtatacaatgatgcctgcttttacagttattgtttatgatcctcggtaaccagaactatcgtcagtaaagtagtagatctttgcaataaatgggtgtatctacagtgcatcagtttataaggaatatcatgtgccaaacaccgcgggcttcctatttgcaatcacaatatactttcttcttcgatcgaatacggattctttctgtaacaaccacaccaccaactcaactacacatctatgttcaaacaccacttcccattttcccccccatcattaatacaaacaaac

SEQ ID NO: 649064 - DNA, 152 bp, Homo sapiens
  misc_feature (152)..(152): n is a, c, g, or t
gtcccggtgagtttcagggagcgtcccttaggtttccggggggggggttgaacctccctagccccagttttcccatcccaggagacccgccccaccaagagctcctgagccccctgcccccagagcaataaagtcagctggctttctcaccn

SEQ ID NO: 649065 - DNA, 722 bp, Homo sapiens
  misc_feature (42)..(43): n is a, c, g, or t
  misc_feature (532)..(532): n is a, c, g, or t
  misc_feature (534)..(534): n is a, c, g, or t
  misc_feature (567)..(567): n is a, c, g, or t
  misc_feature (570)..(570): n is a, c, g, or t
  misc_feature (575)..(576): n is a, c, g, or t
  misc_feature (579)..(579): n is a, c, g, or t
gattccaggcagcttagcgaatcgtggtgctgctctttccgnntcaggtcgccgctgcgaagggagccgccgccatgtctgcggatctgcaatggatggtcgtgcggaactgctccagtttcctgatcaagaggaataagcagacctacagcactgagcccaataacttgaaggcccgcaattccttccgctacaacggactgattcaccgcaagactgtgggcgtggagccggcagccgacggcaaaggtgtcgtggtggtcattaagcggagatccggccagcggaagcctgccacctcctatgtgcggaccaccatcaacaagaatgctcgcgccacgctcagcagcatcagacacatgatccgcaagaacaagtaccgccccgacctgcgcatggcagccatccgcagggccagcgccatcctgcgcagccagaagcctgtgatggtgaagaggaagcggacccgccccaccaagagctcctgagccccctgcccccagagcaataaagtcagctggctttctcaccngnaaaaaaaaaaatgaaaaaagagaaataaagaanggngagannaancagggggcgcgacaacacgggtgaagcacaacgggcccaggggcacaaagggtccgaggaccccgtttggggacaccacgggggaaaatggcgggatcccatatggaggcccgagataatggcagagccgagtaaccggttag

SEQ ID NO: 649066 - DNA, 162 bp, Homo sapiens
ccttttcggggtgtcccgccatgcgcacattctttgttcccggggcccatcccgcccctggtctcccggccgcgttctatattcgcttatattgcctaggttcccagatggcccctgctgaaggaaccccctgtttcccaatctatatcataaaaggatcca

SEQ ID NO: 649067 - DNA, 383 bp, Homo sapiens
tagtcaccagtatgtgggtgatggcgccatgcatatctggtgcaagtgaagtcgcagctggattagtgacggaaatgcaggttacacttctcacaatggtaaggtttctctcctgtgtggattcgcaggtgtgctcttcagagtctgaaggtgccggaaacagggtggcacagaattacacagggatagggcttctcaccagatgtggatatgcacatgggcacgggtgtgcagccacctgtacaactctggctccgcaggtgtcgcatttgtaaggcttctctccagagctgaatctgaggtgtgagtaaacaggttggctgaccggttgagctgagccgcacaagatgtcgcgaggaataggggtatcacagcggggtgga

SEQ ID NO: 649068 - DNA, 136 bp, Homo sapiens
gacatccagattgccattgacctggctggagaagagcagcatgccccgcccctgagttcctggccagcagcccccctgacaacaatgtcccctgatgaagccaccgtggctgaccagtgagtcagaggatgacctg

SEQ ID NO: 649069 - DNA, 273 bp, Homo sapiens
gggaaagctgacgctgcggaccagggcacgacagagaggaccgtggatgagacgcggtagagcgtgcggacttcaggggagtccgacacagaggcagctcacagagagccaggctggtcgctaggcgagaagagtcatcaggagaacaagtgtcaagtaacagagccttgctagcaagcacggcggtgcatccattgtgctagccatgagtgagcaggatgaatcgaccgagtacacttagacgtgcagagctcaagaggctcaacatccact

SEQ ID NO: 649070 - DNA, 145 bp, Homo sapiens
tatggttaaatagtgtacctttgtgtttgtttgccacattttctttaccattttctgtgtgatgaacaccttagattgtggttccactattgtttagctatgtgcaaattagtactattaataaatttaggagtgtgcagatagg

SEQ ID NO: 649071 - DNA, 227 bp, Homo sapiens
gacctcattccttttgaattttttcagggcaaagaaaccaaaaccggcccatgcggtttctgtggggtccagttcagacagcacccccccttaaagggtgtggccccccgggggtcccccagcatcctgtgagcatttccccggggaagctgagcccgtgaagctccctggttttgttccaagggtattcctggtgctgaataaagggtgttgctgtccaggctgca

SEQ ID NO: 649072 - DNA, 419 bp, Homo sapiens
  misc_feature (352)..(352): n is a, c, g, or t
  misc_feature (356)..(356): n is a, c, g, or t
  misc_feature (365)..(365): n is a, c, g, or t
aagaaatgtgcatcaagccagcctgaccaacatggtgaaaccccatctgtactaaacataaaaaaattagcctggcatggtggtgtacgcctgtaatcccagtgacttgggaggctgaggcaggagaatcgcttgaacccgggaggcggaggttgcagtgagctaagatcgcgcccctgtactccagcctgggcaacagcgagactccatctcaaaaaaaaaggaaatgtgtatcaagaacatgattatccaggggtattttttaattcagatcatccaactgattatataaaagagttggctttaaaatgtttgcaaatgtctttttttttttaaaactggaagaaaaaanattntgttgtgtntcaaacagggcttaggatgtctttcccagagcttattaaaaagatgaaacctga

SEQ ID NO: 649073 - DNA, 324 bp, Homo sapiens
cgtggtcgcccagcacctctgtagcgtacgtacccttcgctacttaccactctgatgacacgtctagggaaatgggcatcaaatatgtatcctgtcgaacttttcctcatgggcgcagctgtacgaggaagggtctctttctgctttcccaagggaaacatcagaaatcacttcactcccgtttctgcaagttcaaaagccaatgaaatctttgaggcatatataggtgttagtaccttgtccactatccacccctaaggcaccgggatctatctctagaataggaagtccctcattcactgtccatagcctttttctgctgtt

SEQ ID NO: 649074 - DNA, 937 bp, Homo sapiens
gcccatgcaacgtgttgcgacctgcgtccgacaagatgtcttgccgacgtacgtgtccgttgttgattcgcctcttccttctgggagtcatacccgcacggggtgacagacccacttgtgtgctcgtggtactagaatattttgccccacaaaggagtttggtggtgccgccccgccgcttttgcgagttttgtcggtcccccacagaagccgtgtagtgtcccgcggcgggctttgtaacaccgccgcccctttgaaagttggggacaccacagtgctcaagagaccgatagtgcaatcctgggccatagtaagtgtgtcgtgttcgccggttatccctaatatacggggcgtgggtcctacgacataagaacaggtgtgcccccactcaagcgagtggttttaagtatgcttggggccgcgccttgtgcagcaccgcagtgcccccccctccgcctggggcctatttttgccgctaagttgggcgggggcccccttgcattgactgctccccgtttgccatgggcgtggaacgagcccgcgcttggccgctgccccgctctgggtttagttccctcgtattgtgaagaggcttcttgttggctgcgacacgccatgtgctctccagcttcggcacagctgttatttgcgctattagcggtttttaggccacccacttgctgcccttttgcggtctcgagaacatactcgccttttcaaaggcccctatttttagattgacgttttgtacaatgtgcccacaattgtgtttgaatagagcagacgcgttttgtataaatggcaattagacctagcgttattcctccactcagtcatcttgttaagcatcttcacgcgggggacatctgcacaacctcgtgctccgggtgatcatcaaacaaacattataaatccgtcgacggcgttctacataaca

SEQ ID NO: 649075 - DNA, 245 bp, Homo sapiens
cagcacagcacggcacagacagcacagacaggacagcactgcacagcacaacacagcacagacagcacagcacagacagcacagaacagcacagacagcacagcacagcacagcacagcacctaacagtctcacactgcagtacacaggacagcacctaacacagtctcacactgtagtacacaggacagcacctaacacacagtttcacactgtagtacacaggacagcacctaacgtcgacgc

SEQ ID NO: 649076 - DNA, 1672 bp, Homo sapiens
  misc_feature (461)..(461): n is a, c, g, or t
ggtcgcatcggggccagtggtgcgtgactaggcagaccacgtgcatagactgcaggcgctcatatggcagactcatgcccgtacgggactgctaagttacctcgggcccaccgtccaactacatgaggcgtgggttgacgaatttcacgcgtagcaacagtacatccgaggggtacctatatccatgatagcactcaccgcggtgaggcgccgcaccgttacgcgtggcgacgcagacgcaatgactattctaaggacgacacgtattgatccagtgttccctcatctgggcgacgcgtatcgtggtacggaagatgtaagatggatatgtaatacttcagaccctctgggaaggactctggcaggtcgtgtcgtctacgggactgtgtgatctgaggtaccggtggacctaagcataccaggtgcggtatggcgcacctctaaacgcacccgcgcatagncttggcgcaggagcgaaggcggcgaacacgcgcgcgaagcaagggggcagatcagacgagctcgggcggtgaggacttgcaccgctatacgtaatacgcgtgggcctgcgtcggctagataacaacaggtcaccgcaagtgtaccgttcgacgagtacacgcgagagtgttagtgcagaaacttccacctccgtggaagggctcccactcgcaactcacgcggcgtaacaccttagaaagacgaacagcgaaaccacttgaggagacctcacacagtaagaatatccaagtggccaagcgtggcttgtcaattgagcaagattatgtatacccggggggggtccttgcgtattggatttcagcaccgcgtgccccgtgacccacattgccctcgtcctggggatggtcatcctctttgggaaggctgctttgcaccgctttgtccattcccaagtcgttttggcggggaacccgcggtggggtaacctaaccgccggggcggtacaacagcggcgagatagactgtcttttcggttgaggcgcgctatacccacgtggcgtgtttttccccacttcgtgggaaccgtttgccaccctggttgctcattcatcaggttagtgggcgtgcggttccgacaaaggcgttcttatccccggtccaagcgcctataggttctctcgttccttttctaaggttcgccggttcctattgtattaccctacctttgtcagaccttcttttggcgaggtcgcccacgttacccagcttgggcgctaccttgggggcgttgcacggagaagggccaccggcgtcgcggcgcttgttagtgtatctttggggccacatatttgttgccacacggcacaactggttggggtttggcgaacctagagcttgtgtccgtgggggcaacttgggttcggtcccctaggtctcgtatactttggacactcccaagggcgggacacttagcacccagagcagtaatagcaaaagcccacaacccatatataactcgacacagccaccagagaataacaagagcccgagagcggagtgggggcgcgagacgaaaacacaaggggggatagcagcagaagagagggcgcgacagaggagacgacatcataaaaaacggaagccaggtggaggcacaccgtcgtatcttcgtggttgcgcgcaccgtgggagacagcactgagagaggcgg

SEQ ID NO: 649077 - DNA, 860 bp, Homo sapiens
attcaaattaatcttcacctataaatgttaacattgttttttatttaatgaagaggtttaaagagaaagagttatgtatatttatgtagtatgtaattataattaataatccctttataaattaattactatttgaataaaatgatgaaacctagaaaagtggtttttcatcaatatgttgttctctgtgttgcaaagtgataaactgtaggccttttttagtctaaactagttattcatactatgatgtatcacttattacactgaagctttgactttcttagaggtcacattctttataaaatggcttaatttgcttttacagcatgatttatattgagaaaatttagtttggtgaaaaataaaaaatattttcatgagaataattttgtgtgtaaagattgagctaaaggagggagaagagtaggatttgcattaatatctacaatgcatgaaaaaatggaagtggtatcttagagaaggaaattggaaatcatgaattttaaattgcatagtttatcagttaggtagcctgacaatctaaactagaaattttttgatcaggcaccatctggtgaaacaacacctatttataccagcatctgtgctatgtactatcacatctaccttgagagtctcttatcttagatccaagtaccgaacttggtcgtctgttaaccaaaagcctttgtggaggtttacctgccataaatggggcgccccgcgaaaacgttctgaaaaggccgagtttgctttagtcgaggggaacaccggatttgggatgtgccgtttaggtccctccccggaaggggggttccccagataaacggggagcgcgtgggaggacccttttggggtga

SEQ ID NO: 649078 - DNA, 183 bp, Homo sapiens
tagtctgccggcgagctagcaaatgagaccttgataggatttcgggagaattcttgaccatcaaagcagtccatagctgactttagctgaaggttggtcagcaaaggagatcgttgcctctcccttcagcttgtcagtgtccctgtcggtgtacgaattactcatggtgccatcgggaggggg

SEQ ID NO: 649079 - DNA, 1117 bp, Homo sapiens
tgtctaccgcactaaatagaacctaataatacgcatcatagtcttcgctctacctcagccaattagagcctcgccagtatgaggcatcctcgatcccacatcctcgtgagcctgcacttcggtcgtccacatcctcatagtcgtccacggtagtcactgtcctcatcactatactgcttagccgactcaacaatacgacacggcccatcatccagtcgcagatacgataaatctcttatgtgtctgaaggtcacatctccgcaacatctttcaaccgccacatatgatcaggccttcttatgtaatgcaatttcatcggtgcaccgtccttcgcataaaccatcgagcgtgagcgccctcatataatttgagcctctattgggtcagtaaatctcatcatgatgctgtagataaaccgacgttctatcctgtcctctgaatatgatcactcatcactacctttgaccagtgcaatcagagcataaggtcagtccacgggcgcgactaactctacttctacattaatggagccaacaagtacatattggaggcttcactaatccgacactcataataacaatctgtagaaaagcctctatttctaaaaactgaagataaatagcagggacgtgcatagcttcagttaacgaccttgatcccaccaattcatccctcacttactttccatcattccacgtatccatcctttgaccgttgttttttacctgctttaacacataagaagcaatccgacctccataatttcttgcaaccgaaaggcgggagtcaaacaagcccctagtgaattggctcccatttccgataaaatccacctttccacgcttaatagagcaattcaaaagaaggccctcggtttacttgctctggccatgctctcctttatgacatttaccgtatgtgtcaccagaccttcctggggaaccgaggaaggataacctagaccgagcggttaaaaaaccctgtgcacattaagccgagaatattcctcttcggcaaaaaatccgagcggcctagggaaaagaaggggcactgccggttaaaatagatggtcagggaatccagacattaggggggaatagtataacgcagcgcacat

SEQ ID NO: 649080 - DNA, 387 bp, Homo sapiens
gagcaggaacaacggccctgaagactgtccgggccatttgggttttttttgccactaatattagtattcattatgcatttctaaataacagtcattctgtttgtctttttaatgctttattcattattgacatttgtagttgagggatccgggggttcaatttattttgattttttttttggttgtttatttttgcttgttatgttaagcaaaaatcctgcaatgaaaggtactatatttgccagactctagacataagatattgtacataaagagaattttttttgcctttaaatagataaaagtatctatcagataaaaatcaggttgtaagttatattgaagacaatttgatacataataaaagattataacagtaaaaaacaa

SEQ ID NO: 649081 - DNA, 294 bp, Homo sapiens
gtcatcacctcaccccacaagatcgtgggtcccgaatcgaacgaccttgtgctgcaattgcgcaagcgcggagtgacgcaggtgatcctggccggcatggccgccaacctgtgcgtcgaagggcacctgcgcgaactcctcgaacagggcttcgaggtggccgtggtcaaagacgccacggcgggtccacgtctgcccgaaggcgacggttacctggctgcgctggtgaactttcgatacctggccagcgcggtatggagcaccgtgcaggccgtcgccatcatcggcgggagt

SEQ ID NO: 649082 - DNA, 3542 bp, Homo sapiens
  misc_feature (3)..(3): n is a, c, g, or t
  misc_feature (6)..(6): n is a, c, g, or t
  misc_feature (20)..(21): n is a, c, g, or t
aantangctagtacgaggcnnggttaatcggcacgagggatctcctgtctcagcctcccaagtagctgggaccaccatgcccagctaattttgtattttttgtagagacagggtttctccatgttgcccaagttggtctcaaactcctgacctcaagtgatccacccaccttggcctcccaaactgctgggattacaggcgtgagccactctgcccggcctgtgcatattttcttcactgacgctgtttccaagtcacagaggccttcacacgtgtctgggagggttttgcccgggcacttgcaggggtggggtgggaggagcatttctacccgtggccccttcttctgcttaaacacacggcagatccagaaatttctctccagcagaatgcagcccctcaaggatgggggccttggttacatcggtttatatgtttaacttccacccagagcttggcgtttcaggggagcctgagttgaaggcacaaatgcgtgacagttcctgctctgccctttacaagctgtgtgaccttgggcaagttactgaacctctctgtgcctcagtcaatagggatgatgacggcaccccttgcagaccttttggaaggcttaactggatgagtcaccctaagcattcggagcagtgtgggtgggggcgctctgggtggaggagaccagctctaggcgagggtgccttggactccctcatggctgcctctctctccaggccccgccacctctgttcagccagctctgggagacttggcttgcctttggctattggagagtgtcaccccatctttaaagtgcaggaagtgaaggaatcctcctctctagtcctttgtttggaaactgagccagaagaccacagcaaactgctggggtcacacagctgctgggtcagtcacagagctgggggcaaccgtgggcatcctggtctatcgagtgggtcattgtggtggctgccgcctacctaaccaaacctggtcccacgggccagctctcactgtggggcagccagctggagggacggggccagcttgccccaccccgcccctcccctccacagcagagagtgccctggctccatggggcccagcacaagctctggaggccacaggagtgcctcccctccagggcctggcaaggctggctctctgcagggctggtcaggtcagctgccttgatttccctctcccaggggcctgatgtcatcattcaggggcagcctggggacttgagggaggatgcagttcccactgccttctcccgtcctcccctccccttcccttgcttctccttctccttcctgcttccacgtcctgaccccctggccctccccagcccggccccttagcctcccctccctcccggcccctcactccccccctaccagggctgccctgtgctagcgcctgcctgtgtgaatgtctaatctccaattttattcgctgggctccagcccatttgcataatccacacagtcaccctggttttaattgcccacaactctgcagaaagatcatgtggttaagtggtaaatcataattagataaataattggtttggccacagcaagctgcttttgttacacctgccatctgctggacccgttttttcttctggccagaacaatgcggttctgatgacagagcatgctgcttctctcttctgggggggccggagggggctgaatggaggggctcggaagcagtgcctggaaaattgcccggttgctggggtccgcgcctggcctgcgcttctttctctccaagcgggcacaccacacactcgccattcattacccggcttggttaatgcatcagagtggcaaatttgacttctttgcagaaaagggagggaggaaaggggcctggaggaggagggggaccagccagggctgcccaaggcctggcctgcctgccggttgtcggtggccccgatgggccagggcaggaggcctgctgtggagggcctgggcccgatccctggggggttggggggggggggcggaggggacaggcgggcaggggttggaaccgccagacctccctgccccaccgcggtcagcttctccatctgctctccaccgaagcctcctttattttccatgccccaggccccatctgtgagccctgagtctccaggggaattgtggctccctggctggacggtcgcctggccagggccttccttggggctgctggcctgcctttcatgctgtccttccagcaagctcttagctcctagactccaggaacggtttcaaattgtccttccttcactcgctccctcacgcatacacgcacacattcattcattcagcaaacgcccgtggagcctcttcctacatcagagtgcaggttcgaacttggtctccgtgggtcagatggccgctgtgggatgtgagcaagtttctcagcctctcagagcaggtttcttcctctgtaacacaggagtcattattgtccctgccttctgggcctattaggaggatcaaaggacagaatgtggataaagtctgtcgagtgacacctgcacgaaacacaggcccagtgtctgtggctggtgagtgcgtgactgctggtcatgcccgctcccggggagggcgccagcgccgctcaccttgggcatcattggaggcccacgaggctgtgctgaacatgctgaaggaagaggtaccagtgccatgggaagggcccaggaatgaggagccttggaaagaaaccagggggccaggggaacaggcagaggggcggtaaggaagggcaggttctctggggcctgcacaggccaggacgttcctgtctctgttgagttcggactggcaggttctctggagcccacacaggccaggacgttcctgtctctgttgagtacagaccggcaggttctctggggcccgcacaggctgggacattcctgtctctctcgagtacagaccagcacatggtcctgctctctggcccctgcatcccctccagactgcgttctggaagccctgcccaggcctcacacgctgccccaagggtctttattacctggggtcttctagcattttcctctggagaaactcaggaagcatcctttctctgcatcctttctctttgggggcccagcttctccttttcagtttgacagacacagcctgaatgcccaaggcccctctgcggagacttagagacttaggctggtggagagggttgtgcctcctggctgagaacccctcagggcagatagctggctcagagtcctcatggtcttgttgatcaggaaacactggtatgttccttcctgaaaaccctctgatgcctgttgaggagcctctaggacacgttccatgtggttgggactttgtaatgccagatcttttctgtgttttaacattcctccatccatcatctacccatctacctttcatctatttctctccctccctcccttccttcctcccatccactcacccacccattcattcatgcacctattcctctctctatccccacacccaggcattcactcatccacccaagcatctatc

SEQ ID NO: 649083 - DNA, 230 bp, Homo sapiens
ctgcacatgaaaaactactcaactatcgctaatcatcagagaaatgcaaaccaaaactacaatgaagtgccatttcacaccaatcagaatggctactattaaaaagttaaaaagaaaaaaacaagaaaacaagaaacaccagttgctggtgagactgcagagaaaaaaaacacccttgcacactactggtggtactataattcagccagtagtgtagcagtgtgctcccg

SEQ ID NO: 649084 - DNA, 465 bp, Homo sapiens
gctggtgctgattagtcacagattctttttactgaatgcaaacgaaggctcatatctatctacagccaagccctccttagtgtaggtggcttaataagagtcaggagaagaaggtatatgcccagagagctatacccctgactgataatcctggcaacggcaggttgatatatttttctttttgggtcctcatgggaacacaggaatgcacttcttacatgcggtgagatcatgagcacagcctttccatcttcttttattcatcctgccttgcaagggacacatgacaatagccaaaggaaattacatccagaaatccaaaggtgaataggtgataactgtgggcctacttcccattttatgagatgcacggtcttcactagcacaattggatcttaagcccaagagagctagatgctctagaagccgtgacctttcaatttctcctccaaatccaatatcagc

SEQ ID NO: 649085 - DNA, 3329 bp, Homo sapiens
  misc_feature (3)..(3): n is a, c, g, or t
  misc_feature (6)..(6): n is a, c, g, or t
  misc_feature (20)..(21): n is a, c, g, or t
aantangctagtacgaggcnnggttaatcggcacgagggatctcctgtctcagcctcccaagtagctgggaccaccatgcccagctaattttgtattttttgtagagacagggtttctccatgttgcccaagttggtctcaaactcctgacctcaagtgatccacccaccttggcctcccaaactgctgggattacaggcgtgagccactctgcccggcctgtgcatattttcttcactgacgctgtttccaagtcacagaggccttcacacgtgtctgggagggttttgcccgggcacttgcaggggtggggtgggaggagcatttctacccgtggccccttcttctgcttaaacacacggcagatccagaaatttctctccagcagaatgcagcccctcaaggatgggggccttggttacatcggtttatatgtttaacttccacccagagcttggcgtttcaggggagcctgagttgaaggcacaaatgcgtgacagttcctgctctgccctttacaagctgtgtgaccttgggcaagttactgaacctctctgtgcctcagtcaatagggatgatgacggcaccccttgcagaccttttggaaggcttaactggatgagtcaccctaagcattcggagcagtgtgggtgggggcgctctgggtggaggagaccagctctaggcgagggtgccttggactccctcatggctgcctctctctccaggccccgccacctctgttcagccagctctgggagacttggcttgcctttggctattggagagtgtcaccccatctttaaagtgcaggaagtgaaggaatcctcctctctagtcctttgtttggaaactgagccagaagaccacagcaaactgctggggtcacacagctgctgggtcagtcacagagctgggggcaaccgtgggcatcctggtctatcgagtgggtcattgtggtggctgccgcctacctaaccaaacctggtcccacgggccagctctcactgtggggcagccagctggagggacggggccagcttgccccaccccgcccctcccctccacagcagagagtgccctggctccatggggcccagcacaagctctggaggccacaggagtgcctcccctccagggcctggcaaggctggctctctgcagggctggtcaggtcagctgccttgatttccctctcccaggggcctgatgtcatcattcaggggcagcctggggacttgagggaggatgcagttcccactgccttctcccgtcctcccctccccttcccttgcttctccttctccttcctgcttccacgtcctgaccccctggccctccccagcccggccccttagcctcccctccctcccggcccctcactccccccctaccagggctgccctgtgctagcgcctgcctgtgtgaatgtctaatctccaattttattcgctgggctccagcccatttgcataatccacacagtcaccctggttttaattgcccacaactctgcagaaagatcatgtggttaagtggtaaatcataattagataaataattggtttggccacagcaagctgcttttgttacacctgccatctgctggacccgttttttcttctggccagaacaatgcggttctgatgacagagcatgctgcttctctcttctgggggggccggagggggctgaatggaggggctcggaagcagtgcctggaaaattgcccggttgctggggtccgcgcctggcctgcgcttctttctctccaagcgggcacaccacacactcgccattcattacccggcttggttaatgcatcagagtggcaaatttgacttctttgcagaaaagggagggaggaaaggggcctggaggaggagggggaccagccagggctgcccaaggcctggcctgcctgccggttgtcggtggccccgatgggccagggcaggaggcctgctgtggagggcctgggcccgatccctggggggttggggggggggggcggaggggacaggcgggcaggggttggaaccgccagacctccctgccccaccgcggtcagcttctccatctgctctccaccgaagcctcctttattttccatgccccaggccccatctgtgagccctgagtctccaggggaattgtggctccctggctggacggtcgcctggccagggccttccttggggctgctggcctgcctttcatgctgtccttccagcaagctcttagctcctagactccaggaacggtttcaaattgtccttccttcactcgctccctcacgcatacacgcacacattcattcattcagcaaacgcccgtggagcctcttcctacatcagagtgcaggttcgaacttggtctccgtgggtcagatggccgctgtgggatgtgagcaagtttctcagcctctcagagcaggtttcttcctctgtaacacaggagtcattattgtccctgccttctgggcctattaggaggatcaaaggacagaatgtggataaagtctgtcgagtgacacctgcacgaaacacaggcccagtgtctgtggctggtgagtgcgtgactgctggtcatgcccgctcccggggagggcgccagcgccgctcaccttgggcatcattggaggcccacgaggctgtgctgaacatgctgaaggaagaggtaccagtgccatgggaagggcccaggaatgaggagccttggaaagaaaccagggggccaggggaacaggcagaggggcggtaaggaagggcaggttctctggggcctgcacaggccaggacgttcctgtctctgttgagttcggactggcaggttctctggagcccacacaggccaggacgttcctgtctctgttgagtacagaccggcaggttctctggggcccgcacaggctgggacattcctgtctctctcgagtacagaccagcacatggtcctgctctctggcccctgcatcccctccagactgcgttctggaagccctgcccaggcctcacacgctgccccaagggtctttattacctggggtcttctagcattttcctctggagaaactcaggaagcatcctttctctgcatcctttctctttgggagcttgctggaaggacagcatgaaaggcaggccagcagccccaaggaaggccctggcaggcgaccgtccagccagggagccacaattcccctggagactcagggctcacagatggggcctggggcatggaaaataaaggaggcttcggtggagagcagatggagaagctgaccgcggtggggcagggaggtctggcggttccaacccctgcccgcc

SEQ ID NO: 649086 - DNA, 270 bp, Homo sapiens
cgtgttattgagctggcatgtgacggttcaacggaaaaggaaggatatagcgatggcgtcgtgcagatgcagcacgtcgcacacagacatggtggaaactttgtgcatgcacgtcacaacccgagatgcaggcaaaacggacgtcacgggccatgtcgacgtcacacatattaaattgtcaccacaagaccggccgggcgaaaatgggcaattcacacaagacggtgatgatgtcacacacagacacagtgacaacacacaccatgacaa

SEQ ID NO: 649087 - DNA, 450 bp, Homo sapiens
ccatatcgcagggggagctttgaaggaaaaaagagaggtgaggtaactagcctccactactggacattctgattcagtaggcctggattaaagcctagaaatatatgcccagcagttttaagaagccattgatctggccaggcgcggtgactcatgcctgtaatcccagcacttcgggaggctgaggcgggcacatcacttgaggtcaggagttcgagactagcctgaccaacatggtgaaaacccatctctcctaaaaatacaagaaaaaaattagccaggcgtggtggtatgcgcctgtaatctcaactgcttgggaggctgaagcagaagaaccccttgagccccggaggcagagattgcagtgagcagaagtcacaccactgcactccagcatgggtgacagagcaagactccatctcaaaaaaaaattaaattaaaataaaaaga

SEQ ID NO: 649088 - DNA, 274 bp, Homo sapiens
aaagcagaagaagtctttggccttcacaaatgtcatagaaacaaagatgcagcccacgggaaaaagctggccaaaaaaaaaacaactacccaggtttatataggtggcgcttttaacatttgaaaggacaattgcactgaggtcaaagccagttggtgagcttgtctggcatacctttgcgaatgcacccctgggcacacttggcccaacccacagggcagcaggagcagcagctcttcttgcaggaggagcatttgcactctttgcctcgtgc

SEQ ID NO: 649089 - DNA, 1501 bp, Homo sapiens
  misc_feature (303)..(303): n is a, c, g, or t
  misc_feature (481)..(481): n is a, c, g, or t
  misc_feature (725)..(725): n is a, c, g, or t
tggcttcaaaaagctttattcccattgggcccaaggcttgtaaggataggttaaaaaagctgtgccttattgggcttggagggagaggctttaggcaaaaccccttatttactttgtgcagaggggccctttcagaaagtctcgcgtgggcctcagaaaggcctcttatagctcggtgcttgaaaagtgtgacccttttcgaaagagagaattctctcgcccagagcccagagcctctcgcggggccccaccccgagcctgtgtgtggaagggtgtggtctagcaggtgtgtgtctcccaccncaaatcttctctgtgtgaaaataagagcttctcaacttctcctctcaactcttgagagagaaaggtgtgaggtctctctccagagagaaggtctcacacaagagagactgttggggcgctcaccgtgtggcggcgacaaagataccccccagggggccatgtagaaagatctcacaanagagggcgcccgttggttctcaaagctatatattctctctcccaggggggcccagtgtgggcagggcatttcacatagtgcggcgtctcagggggggtgtttttaacccccccacctctcactctcttctcaggcctgtgggctatttctgtgagaaagtgtctcctgtgggagaagaagaagcgcgggtgtcccggcgcccacacgcggctcttgggatatattggggggcatctccttctcnagggggagagacgcgctctcctggtttatgccccctcttcgggagcggcagtatctctcccctctcggggtggcccaaagagtttttcccgcggagaaaaaagacagtggtgggggtctcacaacgcgccctttttccccaaaagaagggccccaactctcttcaaattgccggcgcgggactgccacaataatattaaagaagaggaccccccagagagaggagagaagaggataaaggtgtgtatcagggagaggggaccccctgagcacagggttacacccaccaatgtttggtgaccccgagaggatcgttgtgtttgacacgcggggagttgagcctcttcacaaacggtgtgccgggggtgggaaacaactaaacgattacccggtggaaaccggaaaaaactttgtgggggggaaggccctcccagatgagggcatcatgggtggtcttatgcgcccacacagacaagaaggggggggcccattaaaaccccccaacacaaaaacaaaaacgccgtgggcgtccccatgtggtgcagggggtcccccccccaacaaaaacacccgcagagaaaaaatgtgtggtcccccccagaaaaaaaaatatttggtgacccccccgcggggatgatgatttgttgacccaaacacagcgggagggaaaggagaaaccaactccgctcggaaagggagagaggaccacatcacagaagaggtcttgtgtagtagagacagaagaagtgtctcccgcgcgagagaagatctaagttc

SEQ ID NO: 649090 - DNA, 341 bp, Homo sapiens
atatgacgtggaaggggagtgagcagacactcgggaggtgtcttgagattatcatccgctgagggtggaaaggagagtgagcagacactcggaaggtgtcttgaaattatcatccgctgagggtggcaggggtgtgagcagacactcaggaggtgtcttgagattatcatccgctgtagcggtggaaggggagtgagcacacactcgtggaagtgtctggagattatcatccgcttagggtggaaggggagtaaggacacactcggaaggtgtcttgaggctcagggcgttatgagttatcagaatgttgttgagttgcaggaggtggctgttggcccatc

SEQ ID NO: 649091 - DNA, 491 bp, Homo sapiens
  misc_feature (290)..(290): n is a, c, g, or t
  misc_feature (337)..(337): n is a, c, g, or t
  misc_feature (365)..(365): n is a, c, g, or t
  misc_feature (390)..(390): n is a, c, g, or t
  misc_feature (465)..(465): n is a, c, g, or t
  misc_feature (478)..(478): n is a, c, g, or t
cagtacaatcataacagatcacatatatgcttctccaagaaataacttgattccaaaacaagtaaaaggtcattcctatatagattcacggttttaattttttcctattttatcatgctctccttgtatcacaccctctcattgtttcttcaaattcaaaatttgtaatatttttgttttgagacggagtctcactctgttgcccaggctggagttcagtggcatgatcttggctcactgcaacctccgcctcctgggttcgggtggttctcctgccttagcctttggantagctgggagtacaggcacacaccaccacgcctggctaatttaaagncttattgtggttttaaagttgatttgancaaatgcagcctttatgactcattnaaatgtatcacttctagagacccatctgagattgatactcagaatgtttactaatggtaatagaaagtaaaggtnaccctagcaacancaaaaaaagcaaa

SEQ ID NO: 649092 - DNA, 366 bp, Homo sapiens
  misc_feature (165)..(165): n is a, c, g, or t
  misc_feature (212)..(212): n is a, c, g, or t
  misc_feature (240)..(240): n is a, c, g, or t
  misc_feature (265)..(265): n is a, c, g, or t
  misc_feature (340)..(340): n is a, c, g, or t
  misc_feature (353)..(353): n is a, c, g, or t
tttgaaacatagtcatttttggctgggcgtggtggctcacacctgtgatcccagcactttgggagcccgaggtgggtggatcacctgaggtcaggagttcaagaccagcttgaccaacatggtgaaaccccgtctgtgctgaaaatgcaaaattagcctttggantagctgggagtacaggcacacaccaccacgcctggctaatttaaagncttattgtggttttaaagttgatttgancaaatgcagcctttatgactcattnaaatgtatcacttctagagacccatctgagattgatactcagaatgtttactaatggtaatagaaagtaaaggtnaccctagcaacancaaaaaaagcaaa

SEQ ID NO: 649093 - DNA, 678 bp, Homo sapiens
ggccatgatctcagctcactgaaacctccaactcccgggtttcaagcgattcccctgcctcagcctcctgagtagtatgggactacaggcgtattcaccatgcccggctaattttttttattttagtagaaacggggtttcaccatgttggccaggatggtctcaatctcctgacctcgtgactcgctcgcctcagcctctgaaagtgctgggattacaggtgtgagccactgcgcctggcctatatgaattttatatttacctgctcccttcaccaggagatcatgctgctgtgatgtcgagttttcttaacagcataaggaagacttgccctcttgccctatcaaagagaatagttttggaggggagaagtgggaccaaaaaagatgcagttttcatttgtattgggaaatgtgaaaataaaattgacaactcttttagttaaaaacaacaacaaaaaaggaaacgagatgtggggctgccacacgcaatatcgtgcattaaaaggatcttctactctggatgaaaatatctttgctgatgccagaccaacctaacacaaagaccttttggttttttaatgtgactgtgttttattttacaatgtgtaattcactttagaagggcaaagtacctgtctggggaagactatttaatttcctgtatttatttagaata

SEQ ID NO: 649094 - DNA, 365 bp, Homo sapiens
tgagccgagatcacaccattgcactctagcctggtgaaggagcaagactccatctcaaaaaaaaaaaaaaagggagggaaggaaaatccccctttcgggggggccaaaaattaaaaaccattgttcctcccccacggtttttaaaaaatactttttaagggccaaatttgggggttttggccttaagggaggatttggaaaaggggttggaattaaaagttttgtggaagggtttaaaaccataaactttcttaaccctccagaaggttttttttttccaggcccaagaggtttttaaacccccggcccattttacccaaaggtttccctaaggccttttaataataaaccggtccccggcctca

SEQ ID NO: 649095 - DNA, 626 bp, Homo sapiens
gtggaactggagatgctaaagccaagataagaaggcttaggcaggaatgggaggaaaagactgagcagttgtgggatgtaaacaagaattgagcaaatggaaatagaactcaaaaggctggcaacaagagaacatgaagttggctttcggagtgctcgctctgccagaatgtaccgagatgaattagatcgcacttcgagagaaagcagtcagagtcgataagcttgaaagtgaagtcagcagatataaagagagatacatgatatcgaattttatcaggcaagagtggaggaacttaacaagaagacaatcaagttttattgagaaacaaaaaccagtgtgggaagaccaactagagggaactcgtgctcgtgctgataaattacatggacttagacaaagagaccttacaagctgaaagctaaacttcatgatatggaaatggaacggagatatggctagaaccaacagatgtgacgaattactggaagacacatatgacttctggacactggcacagaaacaaagtatggatgaatcatcacatctctggtgggaactggaacagatatccagaatagtgaactttccgaagcacccagaaatcctgggcatgaggtgcatga

SEQ ID NO: 649096 - DNA, 592 bp, Homo sapiens
  misc_feature (237)..(237): n is a, c, g, or t
  misc_feature (481)..(481): n is a, c, g, or t
  misc_feature (581)..(581): n is a, c, g, or t
gctcttccagctccaccggcggcgcagcagggaaaggcgaaggcgaaggcggatcgtggagattcagccgtgaagcaagtgcagatagatggccttgtggtattcacgataatcatcacattatcaagaagaaggacaaggaactgaagcttgtgtcacggagtgcgttctgggatctggtgtgtagaagagtcggacttgagagattaccaagcgtgctttccgtttcacctcagncagcactcagaggagtgactgactgagcatcttgcatgagagatccaagtagtcacgatggagagatgattgcggatgccttcgacatgtaaacattgagtcactcttcacgtgaggctggtatcaggtccacattagctatggcgtcattgcgttacccagggacacatacctgagacatctcaggtttacgttaccgagtcattgcccattggagagaaatcgtgtccgagttctcgatttntcaatgaattcgcgcgaataagagaaacctggccacgaaggagacttcttcatctttctaccttaaaatgcgcttatttacgaagggaaaccttgggaancttccctttaa

SEQ ID NO: 649097 - DNA, 206 bp, Homo sapiens
acatctagagatccccacccgatctccattctggttacttggcatggtccctacatttaactaaacaagcaataataggtgtgaggtgatgtaaacctggctttcattcagatgcacaagcaaattctaattaggcccaccctctgttgaggttaactggtgtcttgtagtctactacaataaaggcagatccgatgggtaccgag

SEQ ID NO: 649098 - DNA, 769 bp, Homo sapiens
ggaaactgcgatatctactaaaaccgaacatacatatatatataccatgacctcacaatgccactcctacatgtatacctcccagaagtgcatgcctatgcataccaagggaagtgtgcaaaatgtgcattgtggcagtattaataatagtcaaagctggaaacagcctagatatctttctgcagtaaaatggatcagtaaatcgtggtattacatacaatagaaaaacaaaaagactacagctacttgcaactgcatggaagaatattacaaacgtaatattaagggaaccaagtcaaacataaaagggcgaaacagtatgattccatttatataaagagcaaatctagaaaacctaatctattgtgttagggatggatagttaggtgtaaactataaacaaaaagaaggattcgattattctgaacatttgaattgggctgggagtggtgtctgaagcctgtaatctcagtacttcggaaggctggagagggaggattgcttgagcccaggagtttgagacaacttgggcaacatgatgagacctcatctctaataaaagtaaagagctgaatgtggtggcatgtgctgtggtctcagctattcggaaagctgaggtggctggattggttgagcctgggatgtcaaggctgcagtgagctatgttcctggcagtggatcaagctgggcaatagaagacactgggaaaaaagaagaagacaaaaaaaaaacatttggcgggattgggccggagaatttttagaaacat

SEQ ID NO: 649099 - DNA, 394 bp, Homo sapiens
gtccttgcagagacagctcgtactgacgaagtgcatgcgctgaatgatgtacacggcagtcgttgaacacccggacggatattctcagtgtcacacagaggcagagtataaatgaagaggtagcagtagtgacgcccatctccactggcagtgctgatcctcagaaactacatctcgaatgaagtacttagcccgggtcatgcgtgggtcctctccgggctcgggagtagcatcctcaggagtagtgtagcgagcaaatactggaaagtagtcctcaaatctacgatttcccagcaaggactttctcagcgagcagatcttgcttgtagaggaacaggatcacagagatggtgcgcagccatctgttgttccagatgctcttgaagaggttcag

SEQ ID NO: 649100 - DNA, 111 bp, Homo sapiens
gatccggcacgagggcagaatccaaacccagacttttaaccccacatgctgtactgctactcctcatgtatcacaacgtgttactcattaattcacagtgtctccccagcg

SEQ ID NO: 649101 - DNA, 361 bp, Homo sapiens
tgaatactaccacataagtagtcacctttaacaattctggtgaaagtgggccgggcgtggtgctcatgcctgtaatcccagcactttgggaggctgaggcaggcagatcacaaggtcaagagttcaagaccagcctggccaacatggtgaaaccctgtctctattaaaaatagaaaaattagccgggcgtggtgcggacgcctgtaatctcagctactcaggaggctgaggcaggagaatagattgaacccgggaggtggagtttgcagcgagccgagattgtgccattgcactccagcctgggtgacagagcaagactcagtctggggaaaaaaaaatcatggggaaagtcactctcacc

SEQ ID NO: 649102 - DNA, 288 bp, Homo sapiens
ccatgaatacggatgcatgtttttttttggtttggtttttggtccagcctattttcttgttgtcccgtgttctttctaatgctggactgtctatgtttttcaatatgttaacaagtgtttagattctacaatatttgggtcataatcaattttatcaagaacagaattaatggccttcttgaagatggatcgtttactttttaacttcttaagttctttattttcagccatcatcaataaaaatattaatcgcctacttgaattcggactataggactacacatttaa

SEQ ID NO: 649103 - DNA, 195 bp, Homo sapiens
aactagcgtaagtaataggaataggacctgcggtgctatttattgtctaggtttgacggtaacttgagcagccatacatatacgcagtggacgtgccgcggcggcgattcagtacttcgcgcacgcttagaaggctgcaaattctctgcgaccgggctgcaacgtcgggagccacgagcgtaaagcgatttgcca

SEQ ID NO: 649104 - DNA, 315 bp, Homo sapiens
ctcatcacttagctctagacctgggtctcgacccgcctgtgcactgggtcctggactttctgacgggccgccccaggtggtgagggtaggtaacaacatctccaccccgctgatcctcaacactgagccccacaagggtgcgttctcagccctctcctgtactccctgttccataatgactgcgtggcaatgcactgcctccaactcaatcatcaagtttgcagacaacactacagtagtaggcttgattaccaacaacgacgagatggcctttcagggaggaggtgagggccctgggagtttggggcgttaaga

SEQ ID NO: 649105 - DNA, 307 bp, Homo sapiens
cgcgatggaagccacctcccacccgactttgagggcctccagacggtcagccagtggctgcggaccctgagcggcatgtcggcgtcagatgagctggcgactcacagtgcgcagagctgtcgacctgagcagctacacgcttcaaccgtcctgatcctgacccgggcactagcccttgcacagaagggcagagtctgaggcgatggctcctggtcccctgtccgccacacaggccgtggtcatccacacaactcactgtctgcagctgcctgtctggtgtctgtctttggtgtcagaactttggggg

SEQ ID NO: 649106 - DNA, 236 bp, Homo sapiens
  misc_feature (2)..(2): n is a, c, g, or t
tngtatgggggcagatcctcatggatagattaaccccctccctggtggggtgagttctctgttccaatgagagctggtgttaaaaagagcctggcacctcccttcctttctcttccttttcttgccatgtgatctctgcacacacaagctcccctttgctttccaccatgagtggaagcaggtgtgaggccctcatcagatgcagatgcccaatcttggacttggcaaccattcag

SEQ ID NO: 649107 - DNA, 138 bp, Homo sapiens
ctgtccctctctcacggaagaatgaataaacaaacttggtgctttcatttttttcttcttcttctttgagacagagtttccctcctgtcacccaggctggagtgcaatggcacgatctcggcttactgcaacctccgc

SEQ ID NO: 649108 - DNA, 573 bp, Homo sapiens
tgccaattgacgtgatcgcgtctctaccccgagattttcggagccctactgtcgcgttcccggggccccgttggcgcccggtcccaaaatctggggttgtcccccgtgtacaccccgggattatctgacacgcccttccgtgtgccggctttgaaggaactttttcgcgtcggacaactccgcccggtcttaccgtgtgcctttccccccgcgtgggatttgggacccgatcgcccagagactttctaacctactccctattaccacctattcaatggagggttttgcgtatccgcaacttgcccccccccctgcgggtctcctaggcaaggtcgtcgtcccccctgtggtcttacccgcctccacttttgtccccgcatttattaccactctttcttaagattataatatgctgccgcccacccaccttatcggggttccaccctctcctcgctctttttctgctaaaacttttcttgggagaacactttttttctagcaccctcctgtgccgcgcatcaattcatcgttatacaaaaagaataaaacagcaccaacaaatagatcaaacaa

SEQ ID NO: 649109 - DNA, 114 bp, Homo sapiens
aatgttggccccatcctatgaaattagagcagtggggaacaaaaacaggcagaaattcatgtgtgaggtatcaggtgaaatggttataatatacactgtcatgggtcctacgtt

SEQ ID NO: 649110 - DNA, 798 bp, Homo sapiens
gcgccgggcggaggccctggacgtgcgggggcctctcctgggtcggcggccgcagcgcctcggccctgccctctagctcccgcgttcgctcctgccttcttggctctcggggcacagcgcgcggcccggtccggagcagggcggacatgagcgccaagcagagcggctggacgcgctcacgggcacgcgcgcgtactcggctcggatctaccttccagtagcagcggagtggccaagggaccgggaccagagccgggggccgggggccgcgccgggggaggtcccggccaggtgcccaggctcaccagcccgtggggccgcggggccccgcagctgtttcctcgggggggcgtggcgtcgggggcctatcgcggcgcagtcctctttcagcatcccgaacagcagcagcggccgtaggaatcgcaggactcggtgcacagcagccctgaggatggggggcggcggaccggcggtgggctgagccccgggggcgtcctggtgatcggtccttacagtcacctctcaccgcgcatgttgaggtacggaccctctcaaagcgccgcgcccggtcataccgcggtgccgtgggcgtggccgacggaatttaccgtctcctaaaatcatcgccggaccggaggtgctacggcaagcggcggttcaacgggaaaaacggctaaaccggggggagcgggaacacggtggtcaaatagcgcccccgggccaaagagtatacgggggcggaagcttaaacccaagaccggggtgcaaacaaggtaaacacacaaggcacacaaccaa

SEQ ID NO: 649111 - DNA, 492 bp, Homo sapiens
tctagaggatcccgaggagatagcaggagacatatcatcaaacataaccattaaaatgtagtggtttgcttggctgtaatttgcaatagtatttcattgaggacaaagggtaatgcatcaagtgatagcttaggttagctgatgtctgttttaactggccgtcatattacaaactattcctgccaccatttcttctccttggccacttcttccttgcgtctccctgcatgctgctttatttgcttctccctccccaaccacctcatggtatatttaagagtgaaagggacaaactagtaggtttgtcaagtttaatataaagcactgatgtaacttgctaggtaaacggaaagataagttctaactgcctactatccaatgtcagttaattggtgtcttcccccctcatttgctctcttccctaaaatgtgtcccagatgccttcatttgctgttttacttctatgttctgcttttcctcctctctttgttc

SEQ ID NO: 649112 - DNA, 663 bp, Homo sapiens
  misc_feature (187)..(187): n is a, c, g, or t
  misc_feature (215)..(215): n is a, c, g, or t
  misc_feature (253)..(253): n is a, c, g, or t
  misc_feature (255)..(257): n is a, c, g, or t
  misc_feature (293)..(293): n is a, c, g, or t
  misc_feature (486)..(487): n is a, c, g, or t
  misc_feature (536)..(536): n is a, c, g, or t
  misc_feature (654)..(654): n is a, c, g, or t
ccgcagcattttaccaatagaaaggggccgcctatggatcaaatcaaaaatatcacccgctgcacaccttttaccaaggcattcccgccaacccactatcacctttcaacacctctcggccgtgattgattctcccactacctccctgtccaacttatccaaacgtttttattggtgggacgcgccnatacccccacacccaatttttcacatanaatctttcacctcgtttaggctacttacccttcacaancnnntccatcatccctaaaaaaaatattaactggtgcgtncatgataaggtgcgccaacttccgatatttctctaagacctcgcccctgccattgtacgatttcttgcggagtcctccgccccattgggcaggtctccacacatccccgatttacctatatcccttttattaacgccccttccctatctgaatctgggcggctccacccgctctttttccctgatccaggctnnaaaagccgccccaccctttaaaaaggccgccttaccccattcttatccntatataaaaccctctttacaaagtcttataataaagcctaaacatatccaaccctctatatattgtaactcggcgaggaggtgcttattttacaaaagcgcctcttgcaaactcttcnatcccctct

SEQ ID NO: 649113 - DNA, 184 bp, Homo sapiens
ctagtcaccctcacaagagtcccagcgcttaccagccaaggacgagggcccaaggctcagggaggagcgagttgctgtcccgcagccacacggccgcccggctgggcctctcaggtggccccgtgtgccccccggtcgtggccccgataccaggtggtgttaagagactccaccctctcgcagg

SEQ ID NO: 649114 - DNA, 433 bp, Homo sapiens
  misc_feature (1)..(1): n is a, c, g, or t
ntttgctatacaaagctctaaatatgactactatgtcgtatctgtgggagcgatcaagccttatggaccggatgggtgatcataaaatggccatggatggtataggcgtatttaaaaccttttggtctccatctgatggcgaacgttttatgcagctggctagagatatggcaaagagttactatgaagccaatgatgttacttctgctattaacataattgatgaagctttctcaaaacaccagggcctagtctccatggaagatgttaacatagcagctgaactatatatttctaacaaacagtatgacaaagctttggagataattacagatttttctggaatggtgctggaaaaaaaaaacttcagaagagggcacctcagaagagaataaggctcctgagaatgtaatctgcactatacctgatggcg

SEQ ID NO: 649115 - DNA, 362 bp, Homo sapiens
  misc_feature (356)..(357): n is a, c, g, or t
  misc_feature (359)..(359): n is a, c, g, or t
tcatccttaaaagaactcatggaacccttaaacattgcagcccagatttcccttggaggtctccttattacagaaagccgtagacccatgtgcagtggcacacgcctgtaatccccagcactttgggagggtgaggtggaaggattgcttgagcccagaagtttaagaccagcctgggcaacatggtaagacttcatctttacaaaaaaaattaaaaattagccaggcatggtggcatgcacttgcagtcccaggtactcaggaggctgaggctagaggatagcttgggctctggattttgaggttacagtgagccatggtagcaccactgcactctagctgggtgacagggtgannanctg

SEQ ID NO: 649116 - DNA, 173 bp, Homo sapiens
ccgcttctgcttctgcctcctgcttctgctctgcttcctgcttctgccccaggtcttggtgaggtttttaccatcacaagtgatgatacaatctggcttggccattgcgcccgtgcttcctgcttctgccgtctcttcaggttcttcttcgggctcttcttccacctttgcat

SEQ ID NO: 649117 - DNA, 141 bp, Homo sapiens
tatcatcctccttcaggcaactggtggtcccccgctcacgggaggtcaccatattgatgccgcacttcgtgcgtataccgatcggatagcgcactacagccagaactcctggacacacgcgatcctccagactcagcctcc

SEQ ID NO: 649118 - DNA, 311 bp, Homo sapiens
  misc_feature (44)..(44): n is a, c, g, or t
  misc_feature (126)..(126): n is a, c, g, or t
  misc_feature (190)..(190): n is a, c, g, or t
  misc_feature (192)..(192): n is a, c, g, or t
  misc_feature (194)..(194): n is a, c, g, or t
  misc_feature (309)..(309): n is a, c, g, or t
ttggaagctgtgtcgcctgcaccaggttcccacggctcgtgtancggtgcgcttctggtgttcgctgcctacagccgacacgtcgagcttcgtgcccctagagttgcgcgtcacagcagcctccgnctaccggattatcaccgtgtcatccacatcaatgaagtagtgctcctagacgcccccgtggtgngntngggcgcggttggctgacgagagcggccacgtagtttggcgctggctcccgccgcctgagacacccatgacgtcttcacatccgctacgaggtgggacgtcttcggccggcaacgnca

SEQ ID NO: 649119 - DNA, 323 bp, Homo sapiens
  misc_feature (35)..(35): n is a, c, g, or t
aatccactttgtctaaatcttttgaagtcagactnttgtctcttctctttccctatggcctcttataatggctattctatataatatcctgctataaactctgacttttataagttgcaaacttgtagtcctgtaatggaacagatggcttgggtttatagggccagttctattgttgggtttgtgaactagttattagacttcattgccgtttttccattctgactttttttcttgtcttccttgggtgagaattcgtcttactttaaaactttttttatcccatggaatattttttgtctaaggtataggtataaaaaaaa

SEQ ID NO: 649120 - DNA, 134 bp, Homo sapiens
  misc_feature (117)..(117): n is a, c, g, or t
ccctgtacttaggttagtcattaccagcacagaaattgtaaccctgaatacttactttcatggactacactcaacttcttaacttctctggctactctaaggaaaagctaaagagantatgtggtaaggaataa

SEQ ID NO: 649121 - DNA, 685 bp, Homo sapiens
gcaacgcgctggaggcgggagtgatctgcgagcgaaacctacaccatgtgaggccgggctgggcttggcggggccgtggagatggaggtggacagtttagctgaataacggtcgaaatggggtgtttttatagctgagggtagagttcctcgggcaaaagtaatgtttttccttctggggtatttgagatcgggcttggggcctcgctcggatcttgagttccggagaggggacagctttattccataacgggcatgagactctccgaggtcctgagtcttgtggaaaggaaccataaagggaaagctgagtctgatggcacatgcctggaatcccaggcctcgagaggctgatgcaggaggttcgctagttggccttggccagcttcatagcgagaccgcttccaaaagtaatagtaattttaaatggaagtggtcttatgaataaagagcttggcggggaaggaagaactgttagaaatagtgaaaagtatgggacgtaaccaggataaattagagaacctaactagagactgtcagagtagcagggtactacagtggtttggtgcgtgtttattcattgagcatatactatgtagactgttgtaagttaagacacatggtaaataaaaggtccttgctccaagggggtgggggaatctccctggtgcttgtaaaaagagtgg

SEQ ID NO: 649122 - DNA, 109 bp, Homo sapiens
gcgttgaggtgatctagaggatcccgaaaattaccaagctgtggcacgtgcatgtgtccagctactagggaggctgagatgggagagttacttgtaacccaggaaatgg

SEQ ID NO: 649123 - DNA, 178 bp, Homo sapiens
tttttttgcttgcggtgtgcagggatggcgcggatatccgtgcgagtggtgcggcacagccggcgatcaatagtgcgccgagcgcgcgctactcgactcgcctgatcggccaggctgccgtgcgtctgcgcgcagggatgccacggttttgctcaccgtatcgttgtgctcgccggag

SEQ ID NO: 649124 - DNA, 238 bp, Homo sapiens
gaaaagtttgatgtgacaacagtccggtccagatctgacgaagacggaactcgctggcatcaggcgccgacaattcctgttgtatttcccagtcaagcgacagcgccacctgcgctttgccgccgaccggaagatcgatgcgacgggccgcacttgccagacccggtggcggcggtggattttcgtcgctcagccggatgaatgcaggagccgagggagctcccgccatcccgccttg

SEQ ID NO: 649125 - DNA, 250 bp, Homo sapiens
aaatagtttcagagtataggtctagcacatccctgtcaaaagtatcccttaattttatgctattataaatggtgtcataaaatttccttttttccattgtttgttagccagtatatagcaaatacaactgcatttttctcatcatagcactttgtcatcctgagcctctcctcccttgctttgcaaaattgaatttcaaaagagcaggaacctgcaaaatttcaagcaagcaggcaactggccaagttcc

SEQ ID NO: 649126 - DNA, 136 bp, Homo sapiens
taacattgcggatgcggttgcttgcgtgaggaaactacttcatggcagcttctgtggcaacgagggtttatttttttggttatgaactggaataataacgctagcatgtttatttctatggcctactcatggtaaa

SEQ ID NO: 649127 - DNA, 926 bp, Homo sapiens
  misc_feature (197)..(197): n is a, c, g, or t
gatttttgtttctttccaagccaaaaataaggcctggcaccatggctcaggcctgtaatcctcaccctcctgagattagcctgtggcattactgtgtgtgttccacccccagcactgctgtataatttaatatttttaagcgttgatgaaaggcggttctcatccatggttggccacgtgctaggtctagaattccntgtagccttcgatgtgagtctgcaccagctcgttgggttctcccagaaaggtgttggggaattagcaggcatgacgccactcgttgcccatggctgtacacattacctgttaagagcgttacctctcagaggtctagattaacgagaaaaagccccatttgctcccattcctttttccatagttccttgaaaggatcctcattcctccgaaagaagaaatttcacgcgctatcacgattatgtttatcttaagctatcgtggtatcgattttacatggcctttcaggttttttgggggttatacaagggttttcgtagcattaagtatcgattaatcacaggccgatctaattttgcgagacgggttgttttgtcaagcttatacctattttaaagacagggtagaagaatctcgtgttgagtgggttctcaacatgtttcttgcataatattataatttgggggtgagattcattgttagccgtgttttttgcagtagctggtgattcaatactgtgttaatgttcacatctgcgagtggagattaatcttaaggtcgcgttaactatttgaccatttttgcatacaactggttgtggttctatgagaaggttaaaggactctttaagtgtagggagctgttgtatggcagcattcatggtattgcttccccaaaacaggtcccaagattaaattttgggtcaacaacttttgtttgtggaaagaaac

SEQ ID NO: 649128 - DNA, 707 bp, Homo sapiens
gctgcccaggggcattattcgaattcacctggtggctgctgcgagggctgagttccaaggacaaatatgtgaagggcctgattgagggcaagtcagacccatatgcacttgtgcgtttgggtacccagacatactgcagtcgtgtcattgatgaagaactcgaacccacagtggggagaatgacttatgagtgtcgatggtacacgaggtcccagggctaggacgattagaagtggaggtgtacgacaaggatccagaatacagatgacttcactcgggcagaatgaagctggatgtagaggaaggtgtaacacggctatcgtgctcggatgatctaggttccctctataaggtgggcaagggccatacgttgcactctgaggctagaagtgggatgtcacatttggtcaggatgcagagaaagctgggagcaggttgctagcaagtggtaattggggagtctccgtctcgaccagatcccgccgtcagcgtgccatcattagttgtctacctggatcgggcccagagagcttgcctatggtgacctctgaattgtacccaccacagctgaagaacggggaacaaggaaccccaaccctatggtacaactgtcaaatacaggactgagactcaggagagcaaggctgtctaccagtaccaaactgcccagtgtgggaaggaagcgtacccaggactccgtacgaaga

SEQ ID NO: 649129 - DNA, 837 bp, Homo sapiens
tgaaaaaaagtcatggaggccagggggtgggtcttgaaaaccagtcttgggggggtccaatccctcccttttttgttctcaaatttataattgttatccgggtcactccaaatgtggtgggtaaggggggggggcatccccataatatatagtctccactcccagggtttaggtggggggcttctctcatactaattaggacttttccgctctcaaagcgaaggcttctcaaactcagtgaaaactattaaattataccggctgttagaaaaatgaatgaccctacagatgaataaggagtgatccatggtgggtgttatgtgccattcggggatagcccgagaataaggttgcggggacatccgcggaaatggcccgaaaaaagttgttgttgtggggcaacaaaagtttaaatttatccgccccaagtaacattagtcacgtaggcagaaagtgcatttttggggcataggttttggggtcataggggtgatacccgtagacaaatggggggcaaactcgagaggaaagtagaaaccccccgctagtgtagtggcaaaaataacagcctccttagatggaaaggcacataggggggacaagttgacgctaccacacgatagtaagcgggcccgtgaaacaacacaacggtacaaaaatgaagagagattgggcaaaataccaggtggcccggttcaggccaccctagggggtaccacgacagagaattccaagggcccaaaagacctggcgagaacacatacatatggctccgagaaagtgggcacaacagcaaaaataaaagccggtgggaaagcaaaaaacatgagacagcag

SEQ ID NO: 649130 - DNA, 237 bp, Homo sapiens
gccggcggtcgtctacaggatcccagttcggtccccactcttaggtatgtatacgtaatctgtccctaagtaagttcttccgctcctttgtatcttcctttcgtgtctttcctcctacctttgtctctggtgtttgggacttttttttttttttttttttttttttttttttttttttttttttttttttttttttttttttttttttttttttggggggggggggggggggggggg

SEQ ID NO: 649131 - DNA, 150 bp, Homo sapiens
ggggacggaagagaggggatcatgggacagggaaacagtagttatattagtagtattgtgggtaatagataaatttgggtgtctaacctgggtacgagcccattagctgccaagagggaataaggaataaatttcaaaaaaggtacactt

SEQ ID NO: 649132 - DNA, 1726 bp, Homo sapiens
taaaacttgaccaattaattcaaaaaattcaaattctcggttgggcaaagtattatccgggggcagagagttgggcgatcaattcatgtcattgggcaacgcaatccactatttacctcacaacggaaatcggcctgggggtcagtactcctcgagaggcaacaggcaaaactttttaaacaccacattgttagctagtgtgtgggaggggtgacataactcaataacaatatttgtgcacagaggtgtcactaaaaacaacacaaccgagctttattacaacccagagggcacacaaaatagtgcgtaagtgcgtaatataactccctttagattcgacatttaaacgcctcaaaccgacacacttttaagagttacctataaatgtgtgcgtgccagagcagacatgtggcgccctagtgcgtgccgagcgaggggtgtgcacgcgtgtgcagaaattaacaataacacacacccgagagacgagtgcgaaacgtcccctctctatcaaaagagaaacggtggtattaccactctataagtctacaagacacgcgaccatatccaacgacagacatgtgggttgctatatgcaacgcgtctcacacaaagcgtggtctccgtgaagacacccagtgggcggagagaaagaaagacaagtgttatacactctcactatttctcacgacgaggggcgtcagacaacgtctccgcggagaaccccccattatgacaaaacatctgccgcgggaacaactacatcgcggggctgacaccgggaaacaggccgtgactattagacaccccgcgggctacaaagcgtaccaaacacacggggggaggagcctcacaacagcgacacttttgtctcgccgggggcgaacacccagcacggtacacaaagggggggccacaaagttacccctccagaaggcggggcactctaaaaaacacgtcgggccagttagaaacaggggcgcagaaccaaacacaaggctactcaccacaaacaggggcggcaaattcgcaaaacatagatatgacacaccacaatcttgggactcaacgacgcgccaaacgcataaatacagaggcggccagggaccatatgtatacgacaacaaccacagatactaacacaatccaacagctgactatcgtagacacacgagaaggggcatcaggagaaccacacatagaacaatcggaggacatacaccaaccgcgccaaaattacgccaaatgatgttagtaaggagcgtgttacacaacacggaccgaacaccgcacccgtgggtaggcggcatattacataacgacctgtataagacgctcagctgggaaaagcccgacacactgatggcgcgcaacaaggtgcggaaacagcaacgaagaggaacaacaccacaccggcgcactagaccgacgggccgctcggtggaccactcaaagtgacacgaaacacatggctacagactatgtgttgcgcaagtataaccaagcactcagtctgggaaacatgccctgacgtatgtgaacacacagagccagcgcgagcgaccacaagagcacagcaggcgcagctgctcaccgagcacaaaagtaaggcgccagcaacacacataaacgtaggccaggagtaccgacattgtggaagagacaccgataaacaacgtagaagaccaacaacgcaacgagaacacacaggagaagcagggtacagcga

SEQ ID NO: 649133 - DNA, 270 bp, Homo sapiens
gtctgttttattttaaaaaacaaacaagcccacagtggagcctgtcccctccaggagggggttaagggcccccccttcctctatcacccccggaaacctttggttttgccctggaagacacccggaatttttggacattgacaagcccttttccttcctccctccccgggaggtggtttttgttttactccccccctttttgatccatgtaaatcatattatgtgagaaatcatttgcctgaaaaaagactttgtggggatttttgggga

SEQ ID NO: 649134 - DNA, 621 bp, Homo sapiens
gctgtatctagaggatacccagctttccgattaggtacgaacactcagttaaataagaatttcagataaaaaacaaataattgtccgggataagtatgtcgccaatactgcacacaacaacactttaaaaaagcccccttggagtttctgttgcagtggaaacaaatctgactaggaaccatgagattgtgggtttgatccctggccttgctcagtgggttaaggatccggcgttgccgtgagctgtggtgtacggctcagatcccgcgttgctatggctgttgtgtaggctggcagttgtatctctgatttgacccctagcctgggaacatccatatgccatgggtgcagccctaaacaaacaaaccaaaaaaccctagaaaaaacaccttatgtactattactatttttctttttcagacccacctacagcacatggaagttccaaagccagggatcaaatctgacctacgccatggccacaggagcgctggatcctttaatccaccatgctgggccagggattgaaacggcgcctccacagagacaagccagatcattaacccactgcactacagcaagaactccccacccttattgaaagaatataaaatctgaatc

SEQ ID NO: 649135 - DNA, 291 bp, Homo sapiens
  misc_feature (13)..(13): n is a, c, g, or t
  misc_feature (81)..(81): n is a, c, g, or t
  misc_feature (114)..(114): n is a, c, g, or t
  misc_feature (242)..(242): n is a, c, g, or t
ttttgtatttttnagtggagacgggccttcaccacgctagccaggatggtctcgatctcctgacctcgagatccgcctgcntcggcttcccaaagtgctgggaccacagatgtnagccactgcactcagcccagagccatgctcttgaccacaatgctattaacagaaactagtttattacattaccaaaaattgtaatacaattacactgggaggatggggaaggaagcatgtcaggggtnggagtatagattttcctataattcctacaaccagaagtcaaatagatgt

SEQ ID NO: 649136 - DNA, 570 bp, Homo sapiens
  misc_feature (280)..(280): n is a, c, g, or t
ggcccctgtggccaaggaccagttgtggttacccgtatcattgtgtgggacatcatggccttcaatggcatcatccatgttttggacaagccccctcttggcacccccacagccccaagttgttggcgcctaaagccccacctgtgtcggcaggcgtgggggctgtgctttcccctgaaacacttcttggtttggtggccggagctttttacctccgtgcccaaggcaagcccacgggctttggtttttttgccttccaggcggaaaatgatgtttatgncgatttttccccgtggcaaaaagggaccaacccccccttggtttttgtccccaaccctttttttggcaacgaccccttttttgaacccttcgatgactccctgttggaggaggatttcccttacccccaaaggttcctcccattcaatttacgaggctggggtttaaaacaaaacgcatgcccagggaggagcccccttttttttcttttttgggtggatggggcagaaggggtttagggcctttcccaaccaataaaggtgccctcaccggatttgggccttttcccca

SEQ ID NO: 649137 - DNA, 324 bp, Homo sapiens
cctctgatcagggtgagcatcacactcaaactacgccccgatcggcgcactgcgaggagtagcccagacaatctgatatgaggtcatcctaggcattcatcctacctatcaagcattactaataagtggctcctttagacctcgccagccgtgtagtcatcacagacatagaacaccgctgattactccgtgctcaatcatgaccgctggccgtaatatgatttatctccacagctagcagagagcaggcgaacccccttcgaccttgccgaaggggagtccgaactagtctgaggcttcaaaatcgaatacgccgcaggcccc

SEQ ID NO: 649138 - DNA, 843 bp, Homo sapiens
  misc_feature (591)..(591): n is a, c, g, or t
  misc_feature (828)..(828): n is a, c, g, or t
agcggattgcagactgcgagagtcagacggagctatgtacgccctcttcctcctggccaggctcctgggccggcggctctaggccggcccggtccttggagctgaaacgaatgcaccaggggctcgggagctgtggtgccaagaactgtcgaacgacaggcgtccgaactgcggaggctaagtgaagcacgtgccttgcagaccgtatgggagactaaggccaagcagggtgaacattgcccttgcgcctggcgagcgatactgcgaaagaccgttcgtcactcgtccagtctgcgtggatcatcgcgtgcagaggcaccaatggccacatgaacggcaggcaggatccagttgctctgtacgttggcaggaaggacactgctgacgtggctctccgcaacacccgcagacgagtgatcctgcgttcgatgcagaaggagatcagctggcacttcgctatcatcccctggtcgatgccgtggacgagtcattgaacaggagataatgaggcgcgtcctggcgggatggtgctagtcatctggcttctcatagcttctagcagagtcctcgtgcgcagaagagcaaccgtangcagaagctgaaatcgagccagaagagcatggctgtgagtccgaatacaggatcccaaggatgctaggacctagtgagatgaaggctgggatggactccctttcagtgggtcaagaagtcccaatcatctcattccgtctagtccatcagggacggggccgccgtaatgcaatgccctccagccagaaaggaataatgggggacagttgagcgcaggacatgcaatacagcattggntgactgacactccag

SEQ ID NO: 649139 - DNA, 269 bp, Homo sapiens
acaggcttgtgaccaacatacacggacagtgggtctggaatggtgtactgctgcaacatggggtgtgccgatggttgacttggatttaagtgaatctgcgtgtcatacatatgtgtaaatgtctgcgatgatctgtaaatgtgtcagcctgtgtattgaatagtgctgtaggctaaacagagaggtgggtatttttagatacccgtgtagccttcgctttagacatagtcattcctgcaataaaaaagtggatcccgcattcccctcca

SEQ ID NO: 649140 - DNA, 228 bp, Homo sapiens
  misc_feature (35)..(35): n is a, c, g, or t
  misc_feature (85)..(85): n is a, c, g, or t
  misc_feature (106)..(106): n is a, c, g, or t
  misc_feature (159)..(159): n is a, c, g, or t
  misc_feature (221)..(221): n is a, c, g, or t
atttctggcaatttctacagaaacaagttgaagtncctggctttcctcgcaacgatgaacacacccttccgaggccctacacttncgggccccagcgcatcttctngcggaccgtgcgaggtatgcttccccacaaaacaagcgagggcaggttctctnggacctcttaaggtgtttttacgggattccaccgccttacggacaagaaaaagcggatggtngtttctt

SEQ ID NO: 649141 - DNA, 506 bp, Homo sapiens
actcatttttattgatagattagttttcttagtgatttttgtatcttttattttgtaagtacaaaaaacgtatcagaaaatgataaaaccttgttcaaatccttgtttgtattgtttaccaggcgatgagatcgggtttcaacaattttagcaacgccacttttcctaacgggtaacacaccaagataaatggcgtcagagcgtcttttttatgcacagaaaaaccagtagaacacattaattaatattataactacatagcatttacttgggttgaaatggtgaaaccttacctggaactgcttattgaagcatagaaataggtgcacagtggaacccaaaaagtttatcggcaactttaccttcagtgtcttgataataaggcaaacgctagggtcaattgaagaagaatttctgttaggtaaattaatagtgtcattggtattagtagaatattacccgtcgaaatagaaccaactatcgtctatcgactaatattcatactg

SEQ ID NO: 649142 - DNA, 408 bp, Homo sapiens
ggtgacatgcagctcgtctctgatgcctcgctgtagatgttcagacgtgttggagtttcttccttctggtggatttgtggtctcactggcttcaggagtgaagctgcagactttcacagtgagtattacacctcttaaggcagcgcgtctggagttactcattcctcccatgggttcatggtctcggtggcctcaggattgaggctgcagagtttcacgaagagtgttacagctcataaactcagtgtgtaccccaagaatgagcagcagcaagttatctcaaaggtcaaaaaaacaaaagtcccatagcgtgagcgtggaagagaacctgagccagttgccactactagcgcaggcagcctgtttttattcccttttctgaccccacccaaatcctgctgatgggcc

SEQ ID NO: 649143 - DNA, 170 bp, Homo sapiens
tcgagccggtcctgctgtggtcagaataggccgaggtaaacactcctggttcagcatgactcagtgagtttggagcacacatgcacaattctactcattatgtaacctggttgtgtaagatcatacttggctctcagccactattatgtgttaggagcgggggaggaggt

SEQ ID NO: 649144 - DNA, 198 bp, Homo sapiens
ctgggcaacattttcaaagctcatctctatgaaagaatacaaaaaattaaccgggcgtggtgatgcacgtcctgtggtcccagctacttgggaggctgaggtgagaggatcgcttgagcttgggtgaggtgaggctgcagtgagtcctgatcatgctgctgcactcaatcttggacaacagagcaagaccctgtctca

SEQ ID NO: 649145 - DNA, 285 bp, Homo sapiens
aatcgggctgggagtcatatctgactttaatcatagtccgtccactgatagtcaagagaccatggtcaatgatattaaacctctttgaccctcagtctcatgcagactaccatacagaatgagtacaagaattcaatcgacactgattataaagcactttgcatagtatctgagacatggggagtaagtgctcagcaaatggggactatccaatgatgatggtggcttctaaacgctaatccaagcctcaccccactactaggcctcctcctaatgttagagata

SEQ ID NO: 649146 - DNA, 720 bp, Homo sapiens
aaaaaaataaaaaaaaaaaaaaaataaaaaaaaaaaaaaaaaaaaaaaaaaaaaaaaaaaaaaaaaaaaaaaaaaaaaaaaaaaaaaaccaaaaaaaaaaaaaaaaaaaaaaaaaaaaacctgggggccggcttggcccaagcggcttttagattggggaaggttttggctggggcccgaatttggggctaattggccaatttccccttatggggggcggtttaaaattcaatggccggagttttaaaaaggccgaactgggaaaacccggggggtacccaatttaaacggcttggaggaaaatccccttttcccaagtgggggaaattccaaaaggccccgaccggttggcctttccaaaaattggccaaccttaatgggcaagggaaattgtgaggcgtaaatttttggtaaaattcggggtaaaattttggtaaaccaagttattttttaacccaatggcccaaattgggaaaatccctttataattaaaaggattccccggagaagggttggacggttgttcaagtttgaaacaaggaccccttataaagaacggggccttcaacgggaaaaggcaaccggtattagggcctaggcccatttaggggaccattcccctaataggtttatggggccagggtcccgaaggccctatttggaacttaaggggacccccgtttaaagagtttacggaaaggccggaaacgggcggagggg

SEQ ID NO: 649147 - DNA, 345 bp, Homo sapiens
tgtagcaggccagagcaggcccagctggtttcaagcctggtagccggtctagctgtctttgaaatcactgccttgtaattttctaaaaacaggtactgagtataaaacaatataaaacaatatgagaaggagtctctcttccctcaagagtgtatgacttagctgcccaggatgatcttgaactcctgacctcacgcaatataatttcttcccgactacagcctcccaaagtgctgggcattaccatcctgctccactaagccgagccaggcctagtcttatttttctagaataagactaatacctcagaaaaagacccctacatcactcagaaacgtaactatt

SEQ ID NO: 649148 - DNA, 203 bp, Homo sapiens
ggcgaagtgtgaagctatgaacattgctggtttgaattttttacagtgcagaaatgtaaaatgaaaaaggatatttccgtttcacgagtgttaccgacgaagtcatagataattgtcgtttgttccttccagcattgtaggcatatacttactttaatcaagtaatgtgttaacacgctgacaccgtgtggttgcgtgtgaca

SEQ ID NO: 649149 - DNA, 900 bp, Homo sapiens
  misc_feature (159)..(159): n is a, c, g, or t
  misc_feature (202)..(202): n is a, c, g, or t
  misc_feature (223)..(223): n is a, c, g, or t
  misc_feature (236)..(236): n is a, c, g, or t
  misc_feature (246)..(246): n is a, c, g, or t
  misc_feature (258)..(258): n is a, c, g, or t
  misc_feature (262)..(262): n is a, c, g, or t
  misc_feature (273)..(273): n is a, c, g, or t
  misc_feature (282)..(282): n is a, c, g, or t
  misc_feature (287)..(287): n is a, c, g, or t
ggcaggtttcgggcttcaggacaattcgtgatggcgggggctggttccgccgctgtatcgggggcaggaccccggtggcggggcccacaggccggaccttttcgccgaagggctgctggagttcctgcgacccgctgtgcagcagctcgactctcacgnacacgccgtcagagagagccaggtagagctccgggaccaaatngacaacctagccacagaactntgccgcataaatnagggtcaganggtggccctggntctngacccctattntaagagctncttantgcccggcgacgccgtggtctggtaacaccatcctaacagaatgctcaggaccggacttgagacggctaaaccacagttgtgtgccaggaaacagccgcagggagaggcaatgctggtctgcgggaattaccccccctggctcccccaggcaataacagatgagcctatggacttcagtaagctcaagtactgttccccagcctgcttgtttcaacagactatgcaaggatcctaggagaccagtccccaatagaccttcaggacttaaaaggggagcgtaacgtttgttggacgcactccgtttacccaatttatgtagggggcccaggagacttaacagagcagaatgagtccaaggactacattaatatggtctggttctgtcacaaatgagctgagctctacttttctaggcgtacgtgggttacttctcagaatagtaaccgaggcgcttgatgtaatgccggtaatgggcggcagagcctcccgtatctcatctggaacgggtggagcgcagaagatactgccctttgcgggtaccgcggggcttatcataaaaaaagggcgagataggcgggaagttttatcctcgttttgttatattgtagatat

SEQ ID NO: 649150 - DNA, 417 bp, Homo sapiens
taaatctagaagtattatagaatactcattgaactaattctactattgaggaatttgtaagagtctaacataggcttagctacagtgaagtatgcattgcttttgaagacgagaaaagtgctagaataaatcagattacagagaaaatttgttgttacaaccaagtgatttccagctgatgtatctcatattttttacaacaaacattatagaggtgtcatttatttacaataaaatgttcctactttacatatacaattcagtgagttatgataaattgatatacccatgtaaccaacactccagtcaagcttcagaatatttccatcaccccagaaggttctcttgtatacctgctcagtcagttcctttcactcccaattgttggcagccattgctaggaactctatcactata

SEQ ID NO: 649151 - DNA, 180 bp, Homo sapiens
acaaagcctataaaataaaaaattataacaaaccctgagaaccaaaatgaacgaaaatctgttcgcttcattcattgcccccacaatcctagtgcctaccctgccgcacgtactgcatcattctaattatcccccgcatattgactgagcaggatggagggtaccgagcatcgaaattcg

SEQ ID NO: 649152 - DNA, 134 bp, Homo sapiens
agttatctagagatcccgccgtgtagcgctcaaggtcggcaaaactcttgattatccggcggcggggacggattgtctcgttcacaccagctctgccagacacaggcgcagaggggcggggctccctcaagctg

SEQ ID NO: 649153 - DNA, 170 bp, Homo sapiens
aggttgattccagtttacgcagtgagatgtggaggcggtagtggagtgggggtgtagagggcagtgcagtctgcttatattcatgcaatccaggattgcatcagctaggccattcaaagtggggcaacatgcatcagcaagggtccacttcaggcagccgtgccaggtgg

SEQ ID NO: 649154 - DNA, 144 bp, Homo sapiens
tttagaggatcactccctagcgctagggtccctctggtcttaataaagggctctgggcatcccactctcaagtccacccgactcttgccccctacctgccaggccccgaccttgaaggcccctcttcgtgccccagcactgcct

SEQ ID NO: 649155 - DNA, 274 bp, Homo sapiens
  misc_feature (254)..(254): n is a, c, g, or t
cccaatgtgccatggggaccctgagaagagtgacacaatccaaaacatgcaggagagaataaggtgtcaggtaaggcattcaagagggatttgcacctgagctatgtttttaagaatgaatagaagtaagccaaagacaatgggccttccatgaaacttttgcccttgggaaaagcaagagtccctggggagcaagtgcatttcaaggaaagctgttacagttcccagcattaaaggattcgggtgttgagttnaaggtccccagggagattag

SEQ ID NO: 649156 - DNA, 1031 bp, Homo sapiens
  misc_feature (1031)..(1031): n is a, c, g, or t
tacaggaagtctcactctgtggccctggctgaatgcagggcgcgatcttggttcacttcaacctccacctcctgggttcaagcaattctcctgcctcagcctcctgagtagctgggactgcaggtgtgagccactacacccggctaatttttgtatttttagtagagatggggtttcgccatgtgggcaggctggtcttgaactcctgacctcaagtgatctgctgtctttagactcctgaagtgctgggattacaggtgtaagccaccttgctcggcccaaggaagaatttcttaattaaagatgtatacaatacgctaaaggattaaaaatttacacactacacaaaaattaaattctacttatcaatggtcaacattttaaaaagaaatagaacgggaggaaaacacaagaatgctgagaagcagtagtctatggcatcacaagcgtcacaagagcagcatgcttgaagaaagaggaggttgccatctgtgttcaacgtggctgagaggtggagtaagaagacagcaaagtgtgcagtggatgtggagatgcaaggcacacaggcaagcataacaagagcagcttcaacagagtaggaggaaacccagggcagtgcctggacagtgctcctctttctcctcacccttccagaaagtgccagcctcccactgcctgatgccccatcacttgcatattcatacctaccctaaaatactggattggagcggagggtctttagcggtagtccggaccgggacacggtcggctattgaactggtggttatttaaggtggttgggccaggcttgtgcactttcatcatttgtctggaattcttctccctgggaacatggagagaagagcctcattacatgtggcggggccccgcaaaataacaacagggggggggcgtaagatatcccggggggcgactgcaggcagacgtctttgagaagggtcccagaggggtcttatagcgagcgcggggcacatggcgaaagaccgcgctcttaagcgccaacatctgtn

SEQ ID NO: 649157 - DNA, 297 bp, Homo sapiens
gcgcagagaagcggcggccaggcccaggcacagttggaaaaagcaaagacaaagcccgttgcatttgcggttcggacaaatgtcagctacagtgcggcccatgagatgatgtctcagtgcctggcatggccatctcattcgaagcaaaagatttactcgcatgttaaggcaaaatttacaatgcctggtggatagggcgcttggtaaaagaggctgtgaatcggcttcattccaagcccagtcaactagaaacatgaggctccacatgaccagtgcgccagcaaggcaattctctca

SEQ ID NO: 649158 - DNA, 221 bp, Homo sapiens
caaggtcgcaccattgcactccagcctgggcaacaagagcgaaacttcatcgctaataataataataataataataataataataataataatagtaataatgcttaaggttgacaatcattggtccatcaaggttggagagaggtgttatttgcatttgcagttttcttgctgccttatcacttagggcagtatacagagggtgacgcagattatgtact

SEQ ID NO: 649159 - DNA, 506 bp, Homo sapiens
tgagtaacctggtaatccagctatcgccagtacagacgtccgtaaacgagccctacagaatagagttctgtatatgtcgactgagcgggtgcgtgattgtggctaaatattcgggatctcaacaagagactgaaataattctggccaggaataaatacttcctgaacatcttaggtcttttcaacaagaaaaagacagaggattgtccttaagtccctgctaaaacattccattgttaaaatttgcactttgaaggtaagctttctaggcctgaccctccaggtgtcaatggacttgtgctactatatttttttattcttggtatcagtttacaattcagacaaggcccacagaataagattttccatgcatttgcacatacgtatattctttttccatccacttgcacaatatcattaccatcacttttgcatcattcctcagctactactcacattcatataagggtgtctgtaaacatttttaagacaggttgggatgtcact

SEQ ID NO: 649160 - DNA, 373 bp, Homo sapiens
taacaggcttgagaagcccggtttgaagaacataagattgaaaaggatatggcgaaggccacccagctgctgaaggaggccgagaaagaatctgggtaccggtcagcatccacagccatacatcttccctgactctccggggggcacctcctatgagagatacgatggctacaaggtcccagatgggtgcttagatgactggcatccttctgagaaggcaaggtatccggattacttggccaagagagaacggtgtaagaaacggcggagggaaagcggggaccgagaggtgaagcagctgcaggaggaaacgccaccgggtggtcctttaactgaagcttggccccctgcccgaagggagggcgctgtaggt

SEQ ID NO: 649161 - DNA, 971 bp, Homo sapiens
tgggacaatttttaaaaatgttgtataacaaagcttctttaaaaaaaatgctcagcacatttaacctcaaacgtggaagtgacaagacgtttaggattgacatgtttggggcaaaaggcttgttgcctaggctttttataaaaaagtgggtacactcaagtgcctcatttataacaacgtggcataaaatcccacataatgggctaataaaaacagatacaaatacagaacatttaaagtaataacaattcaagtgtgcgtgggctttttacaacagaggggggtgataaggaaagaaagtgaaaattcacgtgcaaaccagtcgtgcgtaaacgcatcgtgtaaaggttaacgggtttaaaaaaagaaaagaagaaaacagaagaaaaaataaacgtgaaatagggcgtgccaagtggctaccaacagaggtgggttgggctattacatttattgagctctacggaacaccttacaagggcggaaaagccactagtggtgttacaggcaattcacagagaaagccacttaccagaacaagcggtctcgagaaaaaagaaggctatcttgaatgtcattatttcaaacttttccagaaactttcaattttatttaaaagcctcatagctagcaaaatatacaggaaaatttaaaactaaaagagtgtaaattaaaaaattcaagttaaaaaagcaaaaaaaaagcgatcctttgcaggttaataaagctaaggagaaagaaaggagaaacgagcgaaccaggggggaatctcccaggaacctcccaagggggggcacgaagaatggagccatagtagcaggccccgtttcgcaatgaacggaaaagcccccaactaccggccttccgaaagggacaaggtgagacgcaaagagctggaatgcccccaatcggggagaaaaacccacaccgccccacaccgaaacacaacaagcgcacaacagccgtaacag

SEQ ID NO: 649162 - DNA, 160 bp, Homo sapiens
tatatatcatgctgaggagcagattaatcttatgatagacgtcgggataagtttaggcaggagcaggagatgtgataggatcatatttacaaggatgacttcgataataatataggagatgacttggagtgcgcagaacagccattaggtagggtaccga

SEQ ID NO: 649163 - DNA, 423 bp, Homo sapiens
cagtctgcagaggccagagagagcaggaaaggaaatggaaaggaacctcaccttcatgcttggggaaaaggagaaacctgtgttaatgtgtcttcccaacatcccactctcttcagcaatcgctggaacagccatgggccatccctgctgagtcaggaaagaagctgagggaagagtcgggattgaaaagcagcagacaagggaaatgtggacacaagcacatgaagagaacaccatgtgaacataaagatggccatctacgagccaaggagagaagcatggaatggatgcttccctcatagccttcagaagaaaccaactttgccaacaccttgatttcagacttctagcctccaaaactgtgagacaataaatttctgttgtttaagccacccagtgtgtagtattttgttatgggagccc

SEQ ID NO: 649164 - DNA, 170 bp, Homo sapiens
atagagatcaaagtaggtgtcggcactgtcaggacaagtctctaggactggggcattgccacacagaaggggcagtgtcttgacccgagatgatgttctacttaagtgcatctcattttccccaaaaacctgtcacctgcagacagaggcttggacaaggtagctcagga

SEQ ID NO: 649165 - DNA, 288 bp, Homo sapiens
  misc_feature (142)..(142): n is a, c, g, or t
  misc_feature (249)..(249): n is a, c, g, or t
  misc_feature (258)..(258): n is a, c, g, or t
ggactgacttcatagtttaaacgtcaagagaaggccgggctcagtggctcacgcctgtcatcccagcactttgggaggccgaggcgggcgggtcacgaggtcaagagatcgagaccatccgggccgacacggtgaaaccccngtctctattaaaagtataaagattagctgggcgtggtggcgggcacctgtagtcccagctactcgggaggctgaggcaggagtaggacccacactttttccctatcnttaattcantttgataaccaatattgacctaggtagtaa

SEQ ID NO: 649166 - DNA, 154 bp, Homo sapiens
attcgcggccgcgtcgactttttttgatatttttgttttaaaagagtcagctgaaagagcggaagaggggatttattatatggttgttacactcggacgcagataaagacagaaatagtccataatgtgacaggtccaggggagaggaccaaca

SEQ ID NO: 649167 - DNA, 470 bp, Homo sapiens
cgacccgtgttttttggtggggttttgtttttctactcgacgcacttctggtggggtggtgtggaatagaccacgctctccttcctaggcggcgcagcgccccctggatgcggactttcttttttgtttttgtggttgtgtgttggtgctgtggggctgaagacagcgcgctctttgtttgtgtggactactcgctgtgcgccccggcgtggtgggatggggaccgccccctcagagtggtggggtcggctcttctttggtgggggggttcttctgctcggtggacgactcggctgatttcccctctcctcaggatgagtgtgtgtctcttcgttgtgtgttgatgtccgatcccccctgcatggatttgtttgttcctccaccccctcctgtcttgcaacgaatagttttttttcccccccctttgtttcccccctccccccccctagataaccctctttttttttcta

SEQ ID NO: 649168 - DNA, 814 bp, Homo sapiens
  misc_feature (258)..(258): n is a, c, g, or t
ttttttaaattattattattttttatttttgagacagagtctctctctgtcacccaggctggagtgcagtggtgcgatctcagctcactgcaacctccgcctcccgggttcaagcaattctcctgcctcagcctcctgagtagctgagactacgggcgcccgccaccatgcctggctatttttttgtatttttagtagagatggggtttcacccgagatggtctcaatctcctgacctgatgatccgcctgccttggnctcccaaagtgctgggattacaggcgtgagccaccgcgcctggctattttttttttttttttaaattatagatggggtctctgtcagccaggctggattgcagtggcagcccccaactcctgagctcaggcagtcctcccaccacagcctaccaaagtgcctgggcctcccaaagtgctgagattacaggtgtgagccaccatgcccagcagatttttttctttatatttttttcttaaagaccagtgtgcttttctgggagaaagaagaaacagaagaacagacggaacgaagaagaagaaagaaaggacggcagacaggacgaagaagagccagctgtgataatacatggcaggtgactctctctacacacagtgcgtttatttgagccaaaagttatcttccccttttctgaagtatggcgcatcctatatagactgtctctgcatggtttattttcccccattaatattcccggggatcatttctttccatttacaaggcgtgccattccttttacccacacaaagggcgcgcccaaaaatcccggaggccg

SEQ ID NO: 649169 - DNA, 360 bp, Homo sapiens
  misc_feature (40)..(41): n is a, c, g, or t
ttgaggaggtggtgtctgattgcatagagcccaaacaggnnaaacgggattgatttgaccaggtgtgtcattcacatagcaaaaagactggccctccaagcctaaccttttattatacaaatgaggcttctacctggctgtgcatgacacctgcacatgtggggacaaagaaaagggagcaggaggctgggcgcagtggctcatgcctgtaatcccagcactttggtaggccgaggtgggcggatcacctgaggtcaggagttcgagaccagcctggccaacatggcgaaatcccgtctcaactaagaatgcaaagattagccgggcgtggtggtgtgcacctgcgattccagctgctca

SEQ ID NO: 649170 - DNA, 688 bp, Homo sapiens
  misc_feature (34)..(34): n is a, c, g, or t
  misc_feature (80)..(81): n is a, c, g, or t
  misc_feature (91)..(91): n is a, c, g, or t
  misc_feature (105)..(105): n is a, c, g, or t
  misc_feature (125)..(125): n is a, c, g, or t
  misc_feature (139)..(139): n is a, c, g, or t
  misc_feature (145)..(145): n is a, c, g, or t
  misc_feature (148)..(148): n is a, c, g, or t
  misc_feature (170)..(171): n is a, c, g, or t
  misc_feature (173)..(173): n is a, c, g, or t
  misc_feature (183)..(183): n is a, c, g, or t
  misc_feature (202)..(202): n is a, c, g, or t
  misc_feature (209)..(209): n is a, c, g, or t
  misc_feature (216)..(216): n is a, c, g, or t
  misc_feature (219)..(219): n is a, c, g, or t
  misc_feature (221)..(221): n is a, c, g, or t
  misc_feature (223)..(223): n is a, c, g, or t
  misc_feature (229)..(229): n is a, c, g, or t
  misc_feature (237)..(237): n is a, c, g, or t
  misc_feature (255)..(255): n is a, c, g, or t
  misc_feature (259)..(259): n is a, c, g, or t
  misc_feature (389)..(389): n is a, c, g, or t
  misc_feature (401)..(401): n is a, c, g, or t
  misc_feature (581)..(581): n is a, c, g, or t
  misc_feature (595)..(595): n is a, c, g, or t
  misc_feature (601)..(601): n is a, c, g, or t
  misc_feature (608)..(608): n is a, c, g, or t
  misc_feature (620)..(620): n is a, c, g, or t
  misc_feature (652)..(652): n is a, c, g, or t
agggtatgtggatgagaaatgacactaggaaggnacatcaaagccccagctacaaaaagaaagttatcaagccccaaatnnttggggagcntcccagtgcacctnagaaatggggagcaacgatngggaaggagcagantggagngcncacaaagggttaggggtctttnntntttttttttnttatttttttttattaaanacatttntttaaanatntntnttttcntttatgtntgggtgttttatatagantatnagctggccatatgagcactgtgtggagaggaaaaaggacagctaaggagtcttcccaagcatcctatttgtggcttcagagatctaaagggggacagatgctcaacactcccacccaaatgggtaaagtnaacccttcaggnctcaggtccttggcccgaacaacttggaagccccaaattctcttgatgattaactacaactcccaaaactcttggggtcggcaaaaggaaaaatgggtgttgtcaatcatcaaggatttatggaaaggagcccctcccctacaagctgtcccactttccctgaatctaggcagctggganaataggtgtagcangggganaagagcncagaaggaggcngcctcctgtgctgccccaccccgcatttgagnttgccctcccaggcccaaagcccacctgctgttgag

SEQ ID NO: 649171 - DNA, 989 bp, Homo sapiens
ccctgtacacgtatcctgaaaactggagggccttcatggctctcatcgtctgctcagtacgagccggggctcaggtccgcgtgctctccgtctgcaccccacttccattttggccaaaccaaacgcatccctgaatttctccgtaaatttcctgccggcaaggtcccaggcatttgagggtgatgagtggatatctgtgtgtttgatgagcaaacagccattgcctactatgtgatgcaatagaggatgctgcggggaagtacatccagaggcagcaatgccctaggtgtgatgcaatgtgggttgagtcttgcatgattcgcgatatagtgctccccaagtacagctgcctgggtgttccccaatcttgggcatcattgcaatcattaacaaactaggtcacttgaagaaatgcgaagaggaggaagtgagtgcggacattctggggtctgcgtggatagctcttacgtatgagagacgaggcactttgtctggtgggcgaactgagtgacattggctggacatcagagttgtctgcaccctgtgtggctctataagcaggttctagagccttctttccgcaggcctttcccaataccaaacggtggttcctcaccttgcattagccaggcccagtgccgggctgtctatgggggaagtgaccactgtgtgagaagaaggccactagatgctaagaagtagggagaccaacctaataaggacacactcaggaacgagagggtccacgggaagagaagcagaagccccagctgaagcggagggggggacacaggcggtgccctggtctgagagggatggttggactgtgagcgggcgcggtgggagccagggcaggaccttgctcactggccagagtacttggtgggggataagcgcgtccagaggcacccctggggcggcaattgaggctggaggcgtggcccggtacaaaaccgaaaaacaccaaggtaggagggcaagaaagaaac

SEQ ID NO: 649172 - DNA, 232 bp, Homo sapiens
tgaacctcagacatctcgtccaggaccgagtcaagggtacattagcgtccttatgccaaagaacatacagaaacggatgtgtaagcgcgcggacaatggaattcttcggagacttcgtgaagtactacagcctcatcacaatggtcttagctgcagcacaggcttcaaatagaaagccttccccgcaagatattgcacaggctgtccttaggaacttcagtggcacggatgc

SEQ ID NO: 649173 - DNA, 303 bp, Homo sapiens
aaaaataaaaaaattagcccccccctgtggtactaactattcaggaggctgaggcaaaaggattgcttaagcccaggagtccaaggccccagtgagctatgttccccccccagccccccagcctgggtgataaaaaaagaccctgtctttaaaaacccaaatgaaatgaaaaaaacttttttaaataaaaaaccaaaatccccctgtaactgctaactgaagtatacatccagggcaacttcaatttatgcttttgggttgcaaaactcacccttggcccaaataaacctttttcttccctta

SEQ ID NO: 649174 - DNA, 223 bp, Homo sapiens
aaagactacagtttaaaaacaaccagccgtattaagcggttactcttcaggtaccacctgctggtgttctcggcgtttaccttaagcgccggatttgtgaccaccggtttaggtaaacgtattgcctatctgctgattgggaaaatcggtaacaccacgctgggtctgggttacgttacggtattcctcgatctggtactggctccggcaacaccgtctaaca

SEQ ID NO: 649175 - DNA, 631 bp, Homo sapiens
taaatgcaacatacaaactttattgaacaaaagttaaacgtggttctcagttaaactcaaacgaggacacttaagaagaaaaaactgacgtggaagaaacttttatcttaaacatcttacagtaacctacttgcgagttgcattaaacgtgagctcgtgttgctggtgaaaaatacagctcatggcacaggttatggctgaaagatttggtacatttctcaagtattcactggaatactaacctttatatacactattatactattaaatttgaaaaagatttgacgatccccagaataaacttcatatttggtggactctttgggaagaaggtcgtctaaagaagaaagaatatggtggtcctggcctcatgaatcagtgtaatgaacccagcctaaactctgtgggacaccaagtctcctccactcctcttcagacttcagatgagtttaaggtacttgtctgggaaagtactctgggtaacataacatgccggtactcgaagggtaccgtcgaagtacttgtccgagtagtaaatctgcttgtgggccaacctgctaggcgcgctgcagaaaatgaaacgaagagcgcgaagagcgcgcccagcagacaaaacacgtccagccaggca

SEQ ID NO: 649176 - DNA, 104 bp, Homo sapiens
tcatacttatgcatccccgcagctacacacacacaaaacacaggacacgcattaacacagcagacacacgagcacccagcagacagacaaagtcacagcagtgc

SEQ ID NO: 649177 - DNA, 159 bp, Homo sapiens
gatcccgcgagttcgacccactgtcccgagactcacgcccagtcggatggcccgcgatcgacccgaactccagggcgccttgggcctttgtccatgggcccgcgctgtcaaaccatctgtcccgggccacacgcgctcgggaccgatagcacgtggagg

SEQ ID NO: 649178 - DNA, 834 bp, Homo sapiens
  misc_feature (301)..(302): n is a, c, g, or t
taaaactgggtatttaatcttggattctcccttcagccctcacccctggttctcatctttctggatcaaaatctttttctggcctctgtcccctttctcttcattcttcttatagcttccccctccaacccgtgggggggcagtgtggtttggtggaagaacgccaccaggcccgtgagatttacattcgtgctcctccttctccgtggacgcccagaggagggcagcaaaaggggggtggtgctcctccaaccccccagcacgtggaggaagagaacagggggggcctctattcctcaanntttccacccctctcccttttctctcccctgtgtcccccagaggacatgtggggcgcccacttctctggtgggtgtgtggcgcacaaggtggcgtctcccccgagatattgtggtctctacacaaccgtgagagaagtgtgtttaagagaacactctcacaagacacaaaaaattttttctcttattctcaacctctatcacaaatctctgtgtggtggcttcctccaacaagaaaaagaaatcaaaaaacaaagaaacataggaaaaaaaaccctccgcgcggcgggggcactctactaaataatgtcgtcacgcgcgggaggcgcgagcagaagaacagaacgtgcgtgctaatcgagacaagctgtgcgccactcgtgctgcaacatagcggtggtttctccgagaaccccacgcttcttctcttgtgcccctcacgggggggtaaaaaaaccttgccgggggccccccccaaaaggggggcgagcggcggcaaaaaacacctgaaaaaacccccggggtatcccggaat

SEQ ID NO: 649179 - DNA, 176 bp, Homo sapiens
gacagatccctaacagaatggtctggacttactaatcgagtaagcatagacaggttgtttaacgacgcatacgctcctgagttggctcatctggtaagcgtgggatagtgagtactagcgtgaatgggaaaaccgttgcacaagcaggcccaacccattaatgtacttgtccatct

SEQ ID NO: 649180 - DNA, 2333 bp, Homo sapiens
  misc_feature (1626)..(1626): n is a, c, g, or t
  misc_feature (1942)..(1942): n is a, c, g, or t
  misc_feature (2212)..(2212): n is a, c, g, or t
  misc_feature (2262)..(2262): n is a, c, g, or t
  misc_feature (2307)..(2307): n is a, c, g, or t
gggactcgccgcagatccgctggtactatgcgtccgctacgagtatgtcaatcgcattgccgccaggcacagctgtcattcattcctctacaggacagcagcgttctccgtcaatcaacttggaggactgcattacatgttccttcgcataacataacagggatggcctgcctctcttgtctctaacagaggcttgagacacctaacgaaacaccgtgctacaacgctcgtgagacaactaggctctgcactttaggactgctctctctgggctacacaactacaactcgcatgccacagaaggaacgaaggtcaagccgagcacgaccagcctctcgattcccgcccgtgaatatgccctgtacatggtcgcgcgcgaaggcaaccttcctgccatttgcgcgtacactctgcgactggccagagacaagcgcccattttcttacgaggattaaccccccgaccggtggcaaacaacgaaagcataaccccgccaaggccacaagtgggaacacggcgcacacgaccacacagcggaagccaaaacagcacgaaccgccaaatcttagaaaaaaagcctacaggccatgtacttcacagtaaagggcttaaggaaagcctggcattcgtggcgtggaccaatggaaaagaactacacaaagattttttactaggatatttcgaattggcacccggaaacatgctgtttataagtctttatgcgaagagctgtttgattaaacgttacatcttctggcaaagttgtgcaatgggaacataacgtctggggggtccaagaaatctagtgaaaacgttactaattgggggcaggcaacacaccacgccacatgattgggcccaacgcctcccaggctaacggcggccataccctcaatcgttgggcagtggggaaaccgttatttcacgcccacactccccatttattcaatctttgggcggtcacgtctttggccaaacggcccccggtaacggtataaatcccgcccatttggtgggccggcaaacccccagattgggcggcgttttttccccaccaaccaccgggggggaaaggaagaccgtaatgccggccataaaagggcgcccacaatcctagaactggaaaagtaaggcctccccggttggctcccacatcgagcaaaggtgccattacacgatttccgaacggggcactggcttgccccatagagttgggcaaacacccacaacgcgcggggacaaacttttcgtgggggccgaacagggacaaggttttcgaccacgtggttacatcaccaaaaaggccgggcgagaaacgtcacacgggggggcacccacacagcgagcaaaacggcgggttccacacttttgggaaacgcaacgagaggggtcaacaacggtgcaaagatacttaggccggggacacagtggcgaacatcacactgggcgggcgcccagggcaaaagaaaacgacagccccgaccacccccggatatcacgacaaagctagaacccgcatagtggggggcaaaaccgccgccccgaacagataaaagccgctcgccgaccactgtatgtgatcgaaacagtggccaaacacatcgataaacgaggggcgtgccatanacagctcgcctctatgtggtggacacagaatgtgttcattagatgagatagatatagggggggcagctattatccagctattatagttatccctagaagcatagctaaaacgtcatttaagaatgcgatttttgatagtgcgagcggacacaacgcacggacgaacgacaatagcaccgacatgaacgtttttgtggcgagaaagcatgtatgtatgaatgtaggggagtggggaccaaaaaccccgaaaacaagcgcactgtatgtagatacaagaagctaggggtaacaaagagcccccgcgtttatcagctcnagcaacatcacgtcctaatcatgtgtacagtaacacgctttattatcgcaccacaagagtgatgcgccacgaactacgtgagcgagtcgtgtgggagtgcgtcacacacacattacttcgaatcacaacgaagtgcgagcaaatacgacgtgacgcagctgatggaacgacagtacgacagccgtacacatcccacgacccggcagtatagtacataagagggctacagtgatttgccgcagtccacgagaagatggctaagatagaacngacattgttgtgaagtcaacccagccccacgcaaaacgatcgatttttanaacatcgactacagaggtcgtcaagaccacaaaactacgacatcngaggcggggtggtacaagctagcacc

SEQ ID NO: 649181 - DNA, 337 bp, Homo sapiens
tacaccggaaccagcggcggccagactgggccatcggggctgcccacaccctacacatatgcctcatataactatttgccttaaccgtataactactcacctgccacctaccctggaacccgacggcctgcgcagggggtccaggtgggccacacaggggccatgatggcagaagatacgggtggggacggaagatatccacaaaggagccacagctgacgccgtaccgaaaagaaaaaagatatgtatatatataggtatctatatacacgtatatatataaagagaattcaatcaaacaggggaaagctcacaacctgggccctgttctcaaggg

SEQ ID NO: 649182 - DNA, 2263 bp, Homo sapiens
gaataccttggaccttagggctactctagttgtaatgtattagtgagttatcactagagaagttccacagtttaatattatctatacctatatctatatatctacctatatagatagatatatgttagatgcttcaacaactagggtctacacttaatatactgacatctaaggatgcggccaagaaaagctgtaattaggctgaattttattgccaaagttgttcttttttcatttagtcctttaataaaagatgatcttcataaattacagaaagtttgcttaccctgtttgaccttttgcagaaaagaacaagagggaagacagaccttcaggctgggattacaggtgtcagccaccgcacccggcctcaaatacatttttttaatggccttgtctttcctggttttaggcccttttccacaatttctgatggaaatacagaaaccttgccatcattcttactgctggtttgcatctcatttatggtgtatctgggatttcttctcatgaacagaaagattcagtggctgttatatgccttgtcaatttaatgtattgccctatcctctttttgatcaaagatagagactaagactgggaattatgacagaaaaagtcatatttttctttaaatgattttgaaatgttaaaataggccaatatgagtcaaagtgcaaattttttggtgagtaggttgacaaaaaaaaaaaaaaaaaatccaggaaaaaaagtgcaaatttttataggtcctaattcttttgtttgcctaatgaagtgttccctctattttattgtttttatatgctacaaagtcccatcttctgcagttatggaaacagtgtggctgtatgttttagtaattatttcataatctgtagcacttttcactttaagtgcaatgaatagtccagcactttgggaggccaaggtaggaggatcgcttgagcccagggattcgggaccggcttgggtaacatggtaaaaccccatctctacaaaaaacagaaaaaattacctgggcatggtgtgtgtgccttgtggatccagctacttgggaggctgaagtgggaggatcgccactgcactccagaaactaaaaaaaaaaaaaaaaaaaccttcaaaaatatatctaagccagatgtgatggcatgggtctgcagtcccagctactcagagggctggggcaggaagatcgcttgagcccaagagtttgaggctgtagtatgctgtgcagtggcgcgatctcagcttactggaatctctgcattcccagttcaagtgattctcctgcctcggcctccctagtagtggggattgcaggcgcccgtcaccacatctagctaatttttgtatttttagtggagatggggtttcaccatgttggccagtctggtgtcgaactcctgagctcaggtgattcacttgccttggcctcccaaagtcctgggattacaggcgtgagccaccgtgcccaggtgcccccacctttttttttttttgaggcagagtctcactccatcgccattgcactccagcctggacaacaagagcaaaactccatttcaaaaaaaaaaaaaaaaatctgttaaaatttgatatagtaggcactgacaaaagaggtcaaatgcaggactgatttctaagcttgcaatctatctaaatgcagatgctaatttagagtgcataattattacacaagtacagacctaggttagggcttaaatttcattatgtgcaataaaaaggttaagtgatggttaagcaaggtgtagattatccttacctctcctaatgacatgggctcacattggcattcctttcatacttttacgtataaagtgggcagttgtttctgaatgactgttgctggagcctcaggcctgctttgtgcttggtgctttccagactttctcctttattcctatcaccatatacgtactcacaaaagagcagtgtaaaccaggtattacatttccacaagggaaagtagaaccaggaatagccacacgatacttaccgaaagcttcactttccctatagagaaagcaagcaacatgaatcttctgatttggggcccagcctgctgctgtatacagaggttggcattattggtgatagaaatgtctgataggagtcttttaattatactctggagtgtggaggtggagtgcaaggctgcttcctttattactgcaagtgttattttctattatctcaggtttcgttttgtgtaataaactgcttcttgtaaaaaaaaaaa

SEQ ID NO: 649183 - DNA, 225 bp, Homo sapiens
aacaacacggccgaacctgagttcaggttaggcggccaggcgggaagtgatgatcaaccgtaacccaggtccaaccctcccaggcactggcggggagacgcgcgcgcaacctccctccgagccgagggagcggcagctgaccttagctgccgtaatagttcgctccctgagctgagccttgaggtccgagttcatgtccggctccagaagagcctaaggagcaac

SEQ ID NO: 649184 - DNA, 133 bp, Homo sapiens
tccagaggatcccagaggcggaggaagacgaggaggaggaagataaagaggaggagctggaactggaactgctagagcgcctcctctgtgctgtccacctcctctgtgctgtccacctcctctgtgctgtcca

SEQ ID NO: 649185 - DNA, 428 bp, Homo sapiens
  misc_feature (396)..(396): n is a, c, g, or t
tcggaaggtgcaagtcgggggaaccgcgaagaagccgaggagcccggagcctcgcgtgacgctcctctctcagtccaaaagcggcttttggttcggcgcagagagacccgggggtctagcttttcctcgaaaagcgccgcccctcccttggccccgagaacagacaaagagcaccgcagggccgatcacgctgggggcgctgaggccggccatggtcatggaagtgggcaccctggacgctggaaggctgcgggcgctgctgggggagcgagcggcgcaatgcctgctgctggactgccgctccttcttcgctttgcaagacggccacatcgccggctctgtcaacgtgcgcttcagaccatcgtgcgcgccggccaagggcccatgggcctgganacatcgtgcccaacacgccgagtccgcggtcc

SEQ ID NO: 649186 - DNA, 145 bp, Homo sapiens
atcatttgcacgaatagtctgtgcaacaatattggtatgttttcttaacatagcagcgtgcagtctcagagagggtgacgatcacttcatgggcaagctggcgttgcatattgttgaggctagtgtcgccacacaactttagact

SEQ ID NO: 649187 - DNA, 802 bp, Homo sapiens
catggtggtgggcgcctataatcccagctattcgggaggctgaagcaggagaatgcttgaacctgggggacggaggttgcagtaagccaagatcgcaccacttcactccaggcctgggtgaagactgaaactccataactccatctcaaaaaaaaaacacagggcgccgtgttcatgcctgtaatcccagcacgtgggaggctgaggcggggaggtcacaaggtcaggagatcgagaccatcctgctaacacagtgaaaccccgtctctacttacaaatacaaaaaaaaattagccgggcatggtggtaggtgcctgtagtcccagctactcgggaggctgaggcagaagaatggcgtgaatccaggaggtggagggcggaggttgcagtgagccgagatcgtgtgccatgtgcactccagcctgggtgatggagtgagactctgtttcaaaaaaaaacaaaacaaaaaaaaaaaaagcgggacacaacaacaaacaaacacaaaaacattttgggggggcccgcccaaaaaagttttaaaacacctctgctgtggcgcggacgagcccaagtgggtaacacgaaaccgggtccaacagggttcccaagaagacaccggcgcaccagaaggggctggctccccccaaaaaaaccgggggggaagcggtgtttcacaacccacggggcgtgctggctacgggctaacaaaggggccaggagcagatatcgcgcccgtggctaggaaaacaaaagacacgacgcgaaacggaagagagaccagacagcagcgacaactagcgac

SEQ ID NO: 649188 - DNA, 1479 bp, Homo sapiens
  misc_feature (175)..(175): n is a, c, g, or t
cccacgtgcagcggctgggcccggcgctttcaggggaccaccaggcccccagagcgccgtgctatgttgggggctagtcactagcacggggctggaagctgagatcaaagacgccaatgagccggcgtgggtggatgagtgaggcgggcaagaagcagcaccggttagcctgagngttcgctccagggccaggcctggagccagcgcccttacctgcccctggaaagtctgagaccactcggggcggggcggctgccggagggtgggctgcggctccgtggcgggttccagaggggcggagcaagggctgggcgttcccgcgggcggggcgtcccgggggcggggcgggcccctgtgtttgttgcaccgtgtcagttactttgtaacaaaagtgctgcagccgcttgctccggccggcaccctaggccggcccgccgccagctgtcgccgacatggaacccttggccagcaacatccaggtcctgctgcaggcggccgagttcctggagcgccgtgagagagaggccgagcatggttatgcgtccctgtgcccgcatcgcagtccaggccccatccacaggaggaagaagcgacccccccaggctcctggcgcgcaggacagcgggcggtcagtgcacaatgaactggagaagcgcaggagggcccagttgaagcggtgcctggagcggctgaagcagcagatgcccctgggggccgactgtgcccggtacaccacgctgagcctgctgcgccgtgccaggatgcacatccagaagctggaggatcaggagcagcgggcccgacagctcaaggagaggctgcgcagcaagcagcagagcctgcagcggcagctggagcagctccgggggctggcaggggcggccgagcgggagcggctgcgggcggacagtctggactcctcaggcctctcctctgagcgctcagactcagaccaagaggagctggaggtggatgtggagagcctggtgtttgggggtgaggccgagctgctgcggggcttcgtcgccggccaggagcacagctactcgcacggcggcggcgcctggctatgatgttcctcacccagggcgggcctctgccctctactcgtgccaggcccacttgccaggcaggagccctccccaagccttcagggctgctcggagtcacctgttggaatggactaaaaggacccttgtgtgggaacaggtgctccccaaacaccctgctgctggctgccaggcaggccctctggaagggaaggggcaggactcatcaggacctccctggacccctgcagggcaggcagcttgggcccgagcccaagcatttggctctgctgcccccaaggggacaggaagcctcttgggcctcttcccttcctggacaaggccccctgcctttgcctcacataaactgtacagtattttcattaaaagcctctttcataacttccaaaaaataatctagtaacacaag

SEQ ID NO: 649189 - DNA, 312 bp, Homo sapiens
gctcgcccgctctcgtgaactcaatcctttacactctgtgggccttctcgtccagtttatttatttagtagttactaaagtgcccagtcctgtactaaatgtgttttctatatcttctcaaattttctttccaaaattatatgcaataggttttaatattatcctctttgtgggagttcctgtcatggctcagtggttaacaaatctgactaggaaccatgaggttgtggattcgatccctggccttgctcaatgggttaaggatctggtggtgccatgagctgtggtgtaggttgcagactcagctcagat

SEQ ID NO: 649190 - DNA, 1357 bp, Homo sapiens
  misc_feature (175)..(175): n is a, c, g, or t
  misc_feature (1020)..(1020): n is a, c, g, or t
cccacgtgcagcggctgggcccggcgctttcaggggaccaccaggcccccagagcgccgtgctatgttgggggctagtcactagcacggggctggaagctgagatcaaagacgccaatgagccggcgtgggtggatgagtgaggcgggcaagaagcagcaccggttagcctgagngttcgctccagggccaggcctggagccagcgcccttacctgcccctggaaagtctgagaccactcggggcggggcggctgccggagggtgggctgcggctccgtggcgggttccagaggggcggagcaagggctgggcgttcccgcgggcggggcgtcccgggggcggggcgggcccctgtgtttgttgcaccgtgtcagttactttgtaacaaaagtgctgcagccgcttgctccggccggcaccctaggccggcccgccgccagctgtcgccgacatggaacccttggccagcaacatccaggtcctgctgcaggcggccgagttcctggagcgccgtgagagagaggccgagcatggttatgcgtccctgtgcccgcatcgcagtccaggccccatccacaggaggaagaagcgacccccccaggctcctggcgcgcaggacagcgggcggtgaggaggccgggggcggcgggagtgggggtgggggtgggcgccgcccctggtcgggccctcctctgcccacttgttgcttgcatcttttgggccaggtgtcccgctccaggaagcgttcagacccctcctgccatctccccactctccaaacacactcacacctttcgtattcattcaaggactatttcttgagcacctctagatgtgccgggaactgccaacagcagttggggtcccgcttccactcgcactcccgcaccccagacatcaggccactcacctcccccgctggcttcctcctcttctctcctctccccagccctttgcatatgctgttccctcctatttgaatgcccctccctccagtaccggcttgggaaacatctgtntccgcagttagctgtcacctctgggaggtcctttctggccagctggcaggcgccttgttagggccctcatacccacctgggcaggcttctgttaaagcatttggctccgtgtgtcttttgatcccctcgccctgccaggggactctggtgtctgaaggccagcatgagctctccacaggggacttgtatggggcagacatctgtaagtggctcttgagccactggggtgcctggggattgggggcatggcaagtagctgattcccccttcacctcaatcctctctcgccattggcaggtacaggccaaatgaacttgcagaaacgcaggtaagtccc

SEQ ID NO: 649191 - DNA, 1021 bp, Homo sapiens
  misc_feature (175)..(175): n is a, c, g, or t
cccacgtgcagcggctgggcccggcgctttcaggggaccaccaggcccccagagcgccgtgctatgttgggggctagtcactagcacggggctggaagctgagatcaaagacgccaatgagccggcgtgggtggatgagtgaggcgggcaagaagcagcaccggttagcctgagngttcgctccagggccaggcctggagccagcgcccttacctgcccctggaaagtctgagaccactcggggcggggcggctgccggagggtgggctgcggctccgtggcgggttccagaggggcggagcaagggctgggcgttcccgcgggcggggcgtcccgggggcggggcgggcccctgtgtttgttgcaccgtgtcagttactttgtaacaaaagtgctgcagccgcttgctccggccggcaccctaggccggcccgccgccagctgtcgccgacatggaacccttggccagcaacatccaggtcctgctgcaggcggccgagttcctggagcgccgtgagagagaggccgagcatggttatgcgtccctgtgcccgcatcgcagtccaggccccatccacaggaggaagaagcgacccccccaggctcctggcgcgcaggacagcgggcggtcagtgcacaatgaactggagaagcgcaggcccacttgccaggcaggagccctccccaagccttcagggctgctcggagtcacctgttggaatggactaaaaggacccttgtgtgggaacaggtgctccccaaacaccctgctgctggctgccaggcaggccctctggaagggaaggggcaggactcatcaggacctccctggacccctgcagggcaggcagcttgggcccgagcccaagcatttggctctgctgcccccaaggggacaggaagcctcttgggcctcttcccttcctggacaaggccccctgcctttgcctcacataaactgtacagtattttcattaaaagcctctttcataacttccaaaaaataatctagtaacacaag

SEQ ID NO: 649192 - DNA, 376 bp, Homo sapiens
  misc_feature (50)..(50): n is a, c, g, or t
  misc_feature (52)..(52): n is a, c, g, or t
  misc_feature (55)..(55): n is a, c, g, or t
  misc_feature (61)..(61): n is a, c, g, or t
  misc_feature (64)..(65): n is a, c, g, or t
  misc_feature (71)..(73): n is a, c, g, or t
  misc_feature (76)..(76): n is a, c, g, or t
  misc_feature (84)..(84): n is a, c, g, or t
  misc_feature (92)..(92): n is a, c, g, or t
  misc_feature (95)..(95): n is a, c, g, or t
  misc_feature (108)..(108): n is a, c, g, or t
  misc_feature (115)..(116): n is a, c, g, or t
  misc_feature (130)..(130): n is a, c, g, or t
  misc_feature (138)..(138): n is a, c, g, or t
  misc_feature (141)..(141): n is a, c, g, or t
  misc_feature (149)..(149): n is a, c, g, or t
  misc_feature (153)..(153): n is a, c, g, or t
  misc_feature (160)..(160): n is a, c, g, or t
  misc_feature (163)..(163): n is a, c, g, or t
  misc_feature (166)..(166): n is a, c, g, or t
  misc_feature (169)..(169): n is a, c, g, or t
  misc_feature (182)..(182): n is a, c, g, or t
  misc_feature (202)..(202): n is a, c, g, or t
  misc_feature (207)..(207): n is a, c, g, or t
  misc_feature (224)..(224): n is a, c, g, or t
  misc_feature (226)..(226): n is a, c, g, or t
  misc_feature (231)..(231): n is a, c, g, or t
  misc_feature (235)..(235): n is a, c, g, or t
  misc_feature (246)..(247): n is a, c, g, or t
  misc_feature (253)..(253): n is a, c, g, or t
  misc_feature (257)..(258): n is a, c, g, or t
  misc_feature (266)..(266): n is a, c, g, or t
  misc_feature (268)..(268): n is a, c, g, or t
  misc_feature (273)..(273): n is a, c, g, or t
  misc_feature (283)..(283): n is a, c, g, or t
  misc_feature (292)..(292): n is a, c, g, or t
  misc_feature (316)..(316): n is a, c, g, or t
  misc_feature (349)..(349): n is a, c, g, or t
aaagggtttgggaatatatttagagtatatttaatataaataatttatananagncggggntcnnggtatnnngcncagcctgntcttgaantcntgggctcaagcantcctccnnccttggcctcccanagtgcatnacntccatctntgtnccatccntcnggntgntaggtttcagaantatttctaaggtagttgaanccaanctgcctgtctctctcancncaccncccnctcacgtgccnntgctcncacnncaccgaantnccatnaagtgagtcnccaatgcgnctgtgagtcaccctgtaattgggnaaagttctgtcctgatagctcatacagccccgngcatttgtgctcctatatctattgccc

SEQ ID NO: 649193 - DNA, 299 bp, Homo sapiens
  misc_feature (65)..(65): n is a, c, g, or t
ccagccagctgatccccctggccaaggtaatgtagaagaggccatccccacatcatattcacatnttttaaatttcacaagcaatactttggaacaatggggttccaggccccaagaaatgatgggctagatgagggggagcaggaggctgacaatgaggtagacgaagaacgaggaaagaaggtggggggacggacagagggacggaggaagaacgacgggtgatggtgagggaaaggaagggactggacgactgaacgatgaggacagctgaagtccagctaacggggcaaggcggg

SEQ ID NO: 649194 - DNA, 238 bp, Homo sapiens
aatagcagaatatagtaataataattagcttaaaaaaataaacatataccaatataaagaacagcacaaagcagcagtgctcttcttggcttttctcgggcagactctggccatctgggggtaaagatgggcttgggcaatgttttgtagtttacaatcctgattggtatatgtaaaatgtaatgtgcaagcaccacgtggagacgcgcgggcacgggatgtaggattgcgttgcaag

SEQ ID NO: 649195 - DNA, 916 bp, Homo sapiens
tatacctcctgtgctgctttctgtagtcgtgttggttcctttgtttttttacttccctctccctttcgggtgacttttggttttctgttgtccggcttgtagttcttctccaggggactttgtgtttggtcatgctagtctgtatggtgtttcttgtgatcctacttgtgtgcctctgtgttttgtggtgcttggccagttgtgtgagtccctgtcaccccatccttttctggcattgggcaggtcagtgcacaatgaactggagaagcgcaggtgagtcccagtcctgcgctgacagcgccatgcccccaggggccactgccctctggccttccctcccctgccattcctgtggccggcataggtggggctggcactgccctccagacctcttccccacaggagggcccagttgaagcggtgcctggagcggctgaagcagcagatgcccctgggggccgactgtgcccggtacaccacgctgagcctgctgcgccgtgccaggatgcacatccaggtgaggccccccactgcgcccggactggcttgccctggtgtatggagggctgtgctatggaggggctggtgggactggggaacgagacctgaggtcagagctcaagaactgtgtgacttaggacagctctctgagcttttactttccagatccattaaatgggaagaaaagcagacaataactcagagggttgttgaggcttaaatgagttcactctataaatgttcactgttgctgttacagctgttatcacttagatcacagctgtgagaccttgggcaggttacttagcctgtctggactaaccttccctcctgtttgaggggaggcgatggctgttgaattcggccacccaggcctcgctaccaataccctggggggtttaaaactttggcacaa

SEQ ID NO: 649196 - DNA, 358 bp, Homo sapiens
aaaaacttgtaatttaccatggcaactgtagcagctacttggtactgtcgacatgcaaggatttaggcttgggactgcccttcatgctatacctctgcctggccatcctgctgaagcaccgcgaccacatcatgcgcaatgggctggattatcatgagctggaaatgcactttgaccgccttgtgagaaaacacacacctggggcgcgtactgacgccgggctagggctctctttgctgataacctgcagtcagaggtgtgggactcagaggagggggctgaggcccaagccgcatctatgatcaggctatctcaagccctcaatacggaccaacaagatctccatactttgacatga

SEQ ID NO: 649197 - DNA, 1452 bp, Homo sapiens
  misc_feature (175)..(175): n is a, c, g, or t
cccacgtgcagcggctgggcccggcgctttcaggggaccaccaggcccccagagcgccgtgctatgttgggggctagtcactagcacggggctggaagctgagatcaaagacgccaatgagccggcgtgggtggatgagtgaggcgggcaagaagcagcaccggttagcctgagngttcgctccagggccaggcctggagccagcgcccttacctgcccctggaaagtctgagaccactcggggcggggcggctgccggagggtgggctgcggctccgtggcgggttccagaggggcggagcaagggctgggcgttcccgcgggcggggcgtcccgggggcggggcgggcccctgtgtttgttgcaccgtgtcagttactttgtaacaaaagtgctgcagccgcttgctccggccggcaccctaggccggcccgccgccagctgtcgccgacatggaacccttggccagcaacatccaggtcctgctgcaggcggccgagttcctggagcgccgtgagagagaggccgagcatggttatgcgtccctgtgcccgcatcgcagtccaggccccatccacaggaggaagaagcgacccccccaggctcctggcgcgcaggacagcgggcggtggagggcccagttgaagcggtgcctggagcggctgaagcagcagatgcccctgggggccgactgtgcccggtacaccacgctgagcctgctgcgccgtgccaggatgcacatccagaagctggaggatcaggagcagcgggcccgacagctcaaggagaggctgcgcagcaagcagcagagcctgcagcggcagctggagcagctccgggggctggcaggggcggccgagcgggagcggctgcgggcggacagtctggactcctcaggcctctcctctgagcgctcagactcagaccaagaggagctggaggtggatgtggagagcctggtgtttgggggtgaggccgagctgctgcggggcttcgtcgccggccaggagcacagctactcgcacggcggcggcgcctggctatgatgttcctcacccagggcgggcctctgccctctactcgtgccaggcccacttgccaggcaggagccctccccaagccttcagggctgctcggagtcacctgttggaatggactaaaaggacccttgtgtgggaacaggtgctccccaaacaccctgctgctggctgccaggcaggccctctggaagggaaggggcaggactcatcaggacctccctggacccctgcagggcaggcagcttgggcccgagcccaagcatttggctctgctgcccccaaggggacaggaagcctcttgggcctcttcccttcctggacaaggccccctgcctttgcctcacataaactgtacagtattttcattaaaagcctctttcataacttccaaaaaataatctagtaacacaag

SEQ ID NO: 649198 - DNA, 221 bp, Homo sapiens
tcccgggtccagctggctattgtgcagagtcatgccatcactgggcactgcgaatgccatgactgaagaattaagagccacccctcaggcgcaggcccaggtgcagggtcgagctctttctaggatgttgtacgtcggaatagagtgctggccatctttccacgctgcttgccgtgcaaaggatgcagcctctgagtggtactcgagctcgaacttcagta

SEQ ID NO: 649199 - DNA, 179 bp, Homo sapiens
tttacaaaaataatttttaaaaaaagctgggcatgatgcatacctgtagttttaaatacttgggaagctgaggtgggaggatcccctgaacccaggaggttgaggctgcagtgagccataatcccccccctacaccccagcctgggcaacaaagtgagaccctgtttcaaattaatcca

SEQ ID NO: 649200 - DNA, 254 bp, Homo sapiens
  misc_feature (38)..(38): n is a, c, g, or t
  misc_feature (42)..(42): n is a, c, g, or t
gtcctgcgatgtgcgtgcatgtcacgactttgcacttngggncccgtttgtaaaatgaggattaaaatgatcccactgcacaacccggggttgctcccagaagggcagagggcagagggccgggggcaaggagagaagcaggagtgaagggtggagcccttgcctcaggggcaaccccattgccccatgactaactccttcatgcctgggagccgctggcagaagacagactcacatggcacgcgacatcgcca

SEQ ID NO: 649201 - DNA, 272 bp, Homo sapiens
catcgtggaaaaggggtgcctggtgatgtctgtctctttcctcctcttcctgcccatgcaaaggactagagcatctgtatcaaccccggaggttaagactgtggggtcctgtgtgctggtccatcaggttatggtgaggaggaggaagaaagccacagtataaggagacataaagttgggctgggcctctggcaggtgaacggttcttgaggtctttattgtctgatcagtaaacacctctgtgtgccagaagctgcgcctgggtgcggtga

SEQ ID NO: 649202 - DNA, 158 bp, Homo sapiens
cccaagatttcatcccagtactcagaaaccccccccatttaaaagttatgaattgtttatttttggaattttccatataatatttttgcccccagtttcccatggataactgaacccatgggaagtggaactgtggataaggcaggactcctgtaact

SEQ ID NO: 649203 - DNA, 138 bp, Homo sapiens
gaagggtctacatgagcaactgtagaggggagattcagtgtggtgggggactgagtgtggcaggcactccccagcagtgagggtctctctcctcctctgtgctgcctcctctgttaccctcgctctgtagctgtccag

SEQ ID NO: 649204 - DNA, 327 bp, Homo sapiens
tcacaaagtgctgttgattacaggcgtgagccaacacacccagccttgttcattaatttatttagataccgggtctagccgtgtcagccaggctggagagcagtggtgtgatcatggctcactgcagcctcaaactcctgggctcaagcaatcttcccatttcagcttccgaagtagctgggaccacaggtatgccccaccaggcccagctaattttttttcacttctttagagatgggagtcttgctatgttgctcatgctattcttgaactcctggcctcaaggaatccttctgtctcagtgtcccaagtcgaggcaaccggcag

SEQ ID NO: 649205 - DNA, 854 bp, Homo sapiens
ggtgggccatatccgaggcctctggacccgtcggcgcgattatccaacaagtgggggtgaacgtaatgtcaagggaaatagcaaattgaacttcacttagcccatatggaaaggttgatgtcatatcgcatcgctgcctgtttaacatggggctaattcctaagtggtgggcacctgggctttgtactggaacctggggacacctgatgccctgtcaccactagcgtatctaccgtattgacccattcttggaattgcctgacccaactgaggtactgattcggcgtgaccagtgtgtctagtaggcatgtgggcagtcatagtacgcaagtctcgtggaatcctcgtgagactgctcacctcttcgttatcagtggcatactccaacagttgattaggtcagtgagcgatgtatcgtatagttgacacactgtggggtgcacaatagatccatcgcaaggacgtacataatccctcctaggatatcattggccatcctgggtatggatgaactttctagaggaagagcaagttgaccgtgtcccgtgcacggaaaatacagcgtttcgttgtctcagccattccaggttgctgaggtcttcacaggtcataatgggcaagactggtacccctgaaggagaccatcaaaggattccagcagatatgttggcaggtagaatatgaccatctcccagaactaggccttctatatggtgggaccacattgaagaaagctgtggcaaaagatgataagctggctgaagagcattcattgtgaggggtctttgtcgtcatgtacatgtctctctcctcgcccctaacccaaaaagcttcatttttctgtgtagtcgtac

SEQ ID NO: 649206 - DNA, 336 bp, Homo sapiens
  misc_feature (266)..(266): n is a, c, g, or t
  misc_feature (268)..(268): n is a, c, g, or t
gagctactgagtgaaaccctaccttaaaaaaaaaaaagctgggggctggagttgccagcactcatagtaaaagctgtccacatcccataactctagacccaggccattcaacacactcttctgggctctgtgggcacctccatgccaaaagctgattcttagtcggtcattttctgagtagagtcgtaaaacatgttccctttcctggaagaggcagacctgcatatcactcagagctttctgcaattctgcaatctcttcctccntntgctgcaagttccactcaagtttatgctgggaaaaaaaaagagtagtatcgatgtcgagcgatcacgc

SEQ ID NO: 649207 - DNA, 267 bp, Homo sapiens
  misc_feature (105)..(105): n is a, c, g, or t
  misc_feature (109)..(109): n is a, c, g, or t
  misc_feature (122)..(122): n is a, c, g, or t
ttaacttttgtatatggtgagaagtaggagtccagtttcattcttctgcatatagatatccagttatcccagcactatttattgaataggaagtccttttcctanttcnatttttgtcaagnggatatccagttatcccagtgctatttattgaatatggagttctcttctcattgcttatttttgtcaactttgtagaagatcagttcattgtaggcgtgctaccttatttctggcttctccagcctgttcccacgctctatgtgt

SEQ ID NO: 649208 - DNA, 759 bp, Homo sapiens
  misc_feature (536)..(536): n is a, c, g, or t
  misc_feature (701)..(701): n is a, c, g, or t
acttcataaccagaatgtctgttggctagagctgtcacagataggcagggcacttgggatatgacctttctgtccaggtgaatcacagactagacctttcttatcctcctcctagagtttgacttgggctctagtgttaagatgatgagcccgtgcatcaggtcttctgcacttggtggaagtctcccaggttaggttccattttgtgaaacgagtggaatcgtgttccagtgataaagtttagtgacctcatcctttatttttttttctcatctggccatggtggtgtcttagatggggtttaaattggacatgaatggtgggtaatggtgggttctcagaaatgggtcatgttttggcccaaacatagcttctggctctggtctatactggactcaatacctttaggtatcgtttcagagtttgggatactagtgtaaggggtcggtggtccccactacttaatggggagaatagtgaaccaataaaggtacgcggtattaatggggcatgtcatctaagagaggggaaatagngggtaggggtcaattctgataaggacggattcgaaaggagattatggcgggtggacatcaggttcactcagatgtaccattggatttaactatctaatcagagattctatgggtacctaggtccccctgtttgcgtatcaggttgaggaaattacgaggctgtantccatacgatgactagtcgagtggagtaccatgttctgggatgtctatgcaaatatta

SEQ ID NO: 649209 - DNA, 156 bp, Homo sapiens
tgactgcggtgatctaaggatttcatcggggctttctcatcatcatgataggactgaagtccgtcttatgggacttgaggcctcaagttcatataatggcagcaaaggctgtagcaaataccaatgagaacatcacttgtgaccaaatgggcttga

SEQ ID NO: 649210 - DNA, 110 bp, Homo sapiens
cccaaacccacttccactctaccaccagacaaccttaggcaaaccatttacccaaataaagtataggcgattgaaattgaaaccttgcgcgattatgatatatggtcccg

SEQ ID NO: 649211 - DNA, 300 bp, Homo sapiens
cgtcggtgctcgagttcttctcgatgtcatagctcgtcgcccatgccgatacgcccagagcacggaggggacgcagttcctgggctcggcgtagacgcgcgaggcaggtcgaggcgctacgcggtgtggcgcagcatgtagataaggtagacgttgagctccgagaggatggttcggtggaagtctgggagcgtcgcccatcatcttgatcatgatcgtgggcgagttgctcagatcttgggcggaagctgtctcggtttgggcccgtcaagggtcgacctttctctctgagctcttgct

SEQ ID NO: 649212 - DNA, 450 bp, Homo sapiens
tcgcacaacgaataccaaggacacgatcaacgcctttaaccatctgaaccaatgtggcgcaagcacaccattgctgaagccgctgccttcattcccatcagcactgtgcgcttatacgcatatcgacttactacacgcttaactacctggtatttgcatactggtgcaatgcacgtttagcatgtaacgaattcagcaaggcaatctttgttgacgagcatgtctctggttattccaaactgggagagttccgcgagatgaatgctattaatttgcatgagccccatatcgtaggagccgttcttgtagtaagagacttttccagtcgtgccaccttcggtgcgaatgatggccttgaccaagtcgggatgcgcacggtaatgagccgctgctcggacgatgcagacctcgcgagcttggccagtaatgtgcggactaggtggggcctgt

SEQ ID NO: 649213 - DNA, 133 bp, Homo sapiens
catgtatgcaagtcaggagataaagaccagcctaaacacggggaaaccctgtttctactaaaaaaaaaatgcaaaaaattggccgggcatggtggtgggcgcctgtggtcccagcctactctaggaggctgag

SEQ ID NO: 649214 - DNA, 396 bp, Homo sapiens
tatctgggaaacccatggacctccgactcctgagcgtgaactgagcacctcccgaccctccgactcctgagcgtggaactgagcacctcccggccccccagatctaggaggggtgacaaaaccaacctatgaccctgtgagcgaggaccaagaccccttgccagcgactttcaagaggctgggcctgcggaaaccaggctgtcaccgagggctgtggctggcgaagccctacgggcgggtgccgggcaccaaggcagcgagggcaaggggggctgaggttcacgctcatcgactcggggaggagcactggtaccgagcatacggccctgcgcgcccttcctttgggcagctggccatggacgcctgtccctgcaggacgagaccccgctcaaagcc

SEQ ID NO: 649215 - DNA, 463 bp, Homo sapiens
  misc_feature (58)..(58): n is a, c, g, or t
  misc_feature (272)..(272): n is a, c, g, or t
gacataccccaagactgggacaatttacaaaagaaagggggtttaatgggaccttaanaggtccccacatgggctggggaagccctcacagtcatggaagggaagggcaaagacgggagcaagtcacatccttacatgggatgggcagcagacaaagcgaaagagtgtgtgcaagggaaactccccatttttaaaaccatcagatctcatgagacttattcactctcatgagaacagcaagggaaagacccacccccatgattcaattatcntcccactgggtccctcccacaacacatgggaattatgggagctacaagatgagatttgcctgggatcacagagccaaaccatatcagtgtccatcaatggatgaatggataaagaaaatgtgacatatgtatagatagatacatacatatatagatagatagatagatagacatatacaatgaaatactat

SEQ ID NO: 649216 - DNA, 353 bp, Homo sapiens
attcgcggccgcgtcgacttttttttttttgatggagttttgctcttgttgcaccaggctggagtgcaatggtgtgatctcggctcaccacaacctccgcctcccaggttcaagcgattctcctgcctcagcctcctgagtagctgggattacaggcatgcgccaccactaacgtgcccggccaattttgtatttccagtagagacggggtttctccatgttggtcatgctgatctcaaactcccaacctcaggggatccacctgcctcggcctcccaaagtgctgggactataggcgtgagccactgttcccagccgaggctttaactttttgtcgacgcggtcgcgaattc

SEQ ID NO: 649217 - DNA, 333 bp, Homo sapiens
ccagaaactgcctgccatagtgaccaatgagaattcatgaatgagctgggcatggcggcgcatgcctataatcctagcactttaggggctgaggctggaggatcactagaggtcaggagttcgagagcagcctggccaacatagtaaaaccccgtctgtactaaaatacaaaaatcagccggacgtggtggtgcgtgcctgtaatcccagctacttggggagcctgaggcatgagggtcacttgaacctgggaggcggaggctgcagtgagctgtaattgtgcaactgcactccagcttgggtgacagagtgagacactgtctctaaaaaaaa

SEQ ID NO: 649218 - DNA, 118 bp, Homo sapiens
caccacgaagaatagtgatgagtttgctaatacaatgccagtcaggccacctacggagaaaagaaagatgaatcctagggctcagaccactgcacaggagcaaaacctgtcgcgtccg

SEQ ID NO: 649219 - DNA, 241 bp, Homo sapiens
cactccgaaatatctagggtgaaaattacatccgcagggttcggataagaccacggtgttgcttgttcagtatctcaagcccaaaaagataaattaatccttgaaggaggcaagacaacggaggaaaaataagtgacatgcttggcccggctaaagaccaaagccagacggtgactcaggttcagcacgtcattgagacggctcagacagggacgacggtagggaacaagacgggaacgga

SEQ ID NO: 649220 - DNA, 144 bp, Homo sapiens
gctgacaggttggtcatttgttgctggaggattttcactgtcctcctgtgggctcatggtgctgtaacagctccgtgccccagttcatggcggaactttctggccgtctggcggtcgccgctgtccttcagtcgtgtcacgcac

SEQ ID NO: 649221 - DNA, 1012 bp, Homo sapiens
ccactgaatgatcctggtgtcgccatgggccgccgccccggccgttgttacccggtattgtactgaacaagccgtacccaaagtctcgcttctgccgaggtgtccctgatgccaagattcgcatttttgacctgtggcggaaaaatggcataaagtggatgaagtttccgctttgtggccacatggtgtcacgatgattatgagcagttgtcctctgatagtccctggcaccggctgcccgaattttgtgccaataatgtacatggtatcaagagttgtggcaacagatggcttccatatccgggtaagcggatccaccccttccacgatcataccgcgatcaactaagatgttgtcctgtgctgggtggctgacagtgctccaagacaggtcatgcgaggtgcctttgggaaagccccagggcactgtggccaggttcacattgggccgagttatcatgtccatccgcatccatagctgccagagaccaaggagcacgtgtgatttgagtgccctgacgcatggggcaagttcaagttttcctgtgcgccagaagatcccaatctcaaaagcaagtgggggcttcaaccaaagttcaaatgctgactgaatttgagagacaatggtggctgatacaagcggctcatcccagatggctgtggggtcaagtcccatctccagtcgtggccctctggtacaaggtggcaggggccctgctgcatcatgacggccttcaatgtgctgcccccttctttattactcaaccatgtaattctactacctggtccaaaatacaacgagatcctgaagaaacagcgcggcgtcatccaagaatctcacacagagtgccaaaatatggataccgccactctcttgacaagagggcccctatagtaatctataaaaactcacaagagagtgtttaaacataaaattggaaaaagaccatcgctctttcaaccaccactttgtgcaatatgtggacatccacgaatacagataacacatatcg

SEQ ID NO: 649222 - DNA, 300 bp, Homo sapiens
ccccccccccctcccgggggggggggttaaaccccgtgggggctttattcccacccctttttggggcccgggaaaggggcccccttccccggtggttttcccccgcccccccccaagcaaaaaattttggggggggttttttccaaaattttttgtcccccccccctttttgggggcctcccccgttttcccttccaaagggggcaattttttttttttttgggggggggaaattccttttcttccccctacctttgggggaaaaaccccggggaaaaccgggggtttttttatttttga

SEQ ID NO: 649223 - DNA, 193 bp, Homo sapiens
aaatccacaacgattcccagatcgaagcggatttccgattgaatgattctcataaacacaaaggttaacacaaagatcgagaacaccggcacaaagaacacatgaaggagaagggccggtaaaagtccaagcatagcaacagtgaacataaagattctgaaaagaaacacaaagagaaggagaagaccaaaca

SEQ ID NO: 649224 - DNA, 159 bp, Homo sapiens
cagctcggtacctatgaggctccgtccagaacacagcacagagagggtttcccgatgcccaccgctggacttgcccaagcctctgggagcccctcatctcagatcccttatctataaatgggggctgttatccccctccctgtgggatggctgttgggg

SEQ ID NO: 649225 - DNA, 261 bp, Homo sapiens
tttcctgcacttcgggaggccaggagggaggatcacttgagtccaggaggttaggctccagaaagctagtatcatgccacggtactctagcctgggcaagaaagcaatggtgctgtctctaacttacaaaatagaaaaatggaacaaacttaaccacattaggttaaaaaaagaaaaatggaataaacttaaccacattaggttacggctgtagagcacttagcatgggatctgaatacacaggaagtgcacgaaacaaga

SEQ ID NO: 649226 - DNA, 486 bp, Homo sapiens
  misc_feature (259)..(259): n is a, c, g, or t
ctgctgcctcccgcgtcagtctattccaaaacctagtacaagatgttatctgatatagcacaaaagtcacttactttaatctaaaatcaaaactgtcatgaagttctgtggaagacatcatgatccctaaacattttgaactatttgacaaattagcagacataaaaatcctacccaaaacgaatctggaagactgtaaattaaaatttactttgaaatgcgaagcaatgaacctgttacatgatggcctctcttatcnacatggaaaagcttagaggtgggcagatcattttgtaatactatatttcgtgtttgggaaatttgaaaaaggggaggctttccaaccgggatcatctgggtttggatatgttcatgctgacaatacctgctgtcttcacgaggcattccaagatagtggtagtaaattgcaagatgaataacatagaattttcaaaatttgctccatggaccactgaacaataattc

SEQ ID NO: 649227 - DNA, 200 bp, Homo sapiens
  misc_feature (31)..(31): n is a, c, g, or t
  misc_feature (65)..(65): n is a, c, g, or t
  misc_feature (130)..(130): n is a, c, g, or t
  misc_feature (175)..(175): n is a, c, g, or t
  misc_feature (183)..(183): n is a, c, g, or t
cacccccatctaccaatcccttcctggcagnatgcagtccaacaccagagatggaggtaactggncaacggagaaaggagatttagatcaaccaaagaagcctaaagccccagacaatccatttcatggncattgtttccaagtgttttgagcctcatctctacgtgtatatcgnattccaanacaagaacctcgggggg

SEQ ID NO: 649228 - DNA, 108 bp, Homo sapiens
gaggagagccattgcatgctgataatcatgtgttgagtttgcctcagtagatactaaagcaaattgctcactgacagtttttttaaatgaccacctttgcatgctctc

SEQ ID NO: 649229 - DNA, 244 bp, Homo sapiens
attaggtctgttgcgagcgatggctgttattatgctctaggatagtacagagggtggctatgtgttgtcggggtgagatgatgtgaggtatatacatagcgctagtttagagtactgggcagtctatgaccaggatggggctcgaatggcttaggagtcatagtgagtcgtaagaggtatcttactataaagctatgtgtagctagtcatattagttgtggctcagagttgatagtcttggcag

SEQ ID NO: 649230 - DNA, 141 bp, Homo sapiens
cttagtttagaagcctctaaacttagaaaggattggggggaaaaattcattaattaatacaaactattctgctgttttacccgattcctaattgtgctttttcaataagttgaaatcaaaatgtacttttttcaaacagct

SEQ ID NO: 649231 - DNA, 524 bp, Homo sapiens
  misc_feature (60)..(61): n is a, c, g, or t
  misc_feature (316)..(316): n is a, c, g, or t
gaggaggcagtggcgtggtgggaagcgcagctcgaaaagcgatgccgtattctgtgtttnncctggggctgctgtgcccacttttcggtgtagaacccatgccggccttggaaagggcccgagctcgtgcagtgctgatgggcgcccaatagaaaaaataaaccgaaacgcccggggggccttggggcctgggcctggggccctttttggcccttccagaaggggcaagccccccgccactgggggcgggcctttggcggcacggggttttttgaaacccacaagtctttttcacccttggggccaaaacgcaacnggattggaccggtggccctttaaccaaatgggcggcaaacggccctgtgggcccctaaacctcggggcaaaaggacccatgggaggatttggggggcactttttttcggcttatagagggtttcccaaaacgggaaacagggggcccctaccaccttaataaataaaatttgggcaaactattgaaccaaattaaaacccttttcccg

SEQ ID NO: 649232 - DNA, 262 bp, Homo sapiens
ccatttcctgggggattttttcccccccccccccccccctcccttttttggggaaaaacaggccctggggtcccccttaaaagggggccctcccccggctcccaggggtcctaggggtcccccccccctccgccccccatggggggttcttcccaaaaaaaaagggggggttttttttcccccaggggttgccgggcccctgacttatttttgtggaaaaaatttggggccccttccctttaataaattttgggggggttga

SEQ ID NO: 649233 - DNA, 768 bp, Homo sapiens
gtgaatgtgcctgtgtgtgtgtgtgtgtgtgtgtgtgtgtgtacatgtacgcgtgtgcattgaggagagagagactgaacagagagtactttgctgctaacgaatccagtcgttgtgactaaagttctgacaaggtctcagtttccccagttgtgcaggggagtaggtcagacagggtttgcagtgtctagatttacgctggttagatttacctctaaaatcttaacgcagatgctgaactccataagatgccaaaggagtgctgaggagctggagtgtggtgggccctaccctcgacaacagacccagggagatacatcttggactccatgggaatctggattcaagaaagatgggactgaacgacgaggagcgaccgtgctcacgccatgagtgtcgagccgagcggagaatgttccaagtcatggtcatggtcgtggtggcatccttaaaaagcggatgtcggcgcagaatgtgcagactcagaacagagaagaaacgaccagtaagcggcgaacggaggaacgaccctaccaaaggggacacattcggtcgacagcgactgagacggaggaatacgccgatacagctctaacccaccaacacaaaagaggggagacgcaagcacaaacagcccagcggagcacacgcatccccatcccccaccaacgaaccaaacacccatggcagagccagtgagaaagcagggcagaggagacggggggagccaccaaaagcgagaaggcaccacgacaaattcaacaaatc

SEQ ID NO: 649234 - DNA, 805 bp, Homo sapiens
gatcctggtgtcgccatgggccgcgccccggccgttgttaccggtatgtaagaacaagccgtacccaaagtctcgcttctgccgaggtgtccctgatgccaagattcgcattttagactggggcggaaaaaggcaaaagtggatgagtttccgctttgtggccacagtggtgtcagactgaatatgacgcagcttgtccttctgaagccctggaggctgaccgaatttgtgccaagtaattacatggtacagagttgtggcaaagatggcttccatatccgggtgcggttccaaccccgttccactgtcatccgcatcaacaagatgttgtcctgtgctgaggctgacaggctccaaagaggcatgcaaagtgcctttggagaagccccagggcgactgtggccagggttcacattggcaagttatcatgtgcatccgcaccaagactgcagtaacaaggagcactgtgattgaggccctgcgcagggcaagttcaagtttctggcgccagaagatccagatctcagagaatggtggggcttcaccacacgttcaatgctgatgaattttgtaagacattggttggctgaaaagcaggtcatccatgatggcctgtgggggtcaagtaacatgccccagtcaggtggccctctgggacaaagtggcgggcctggcactcatgagggcttccaatgtgctgccccctcttaatacttcaccaataaattctacttccctgtccagagaaagaaccaatggaaaaattttgtggactccttgggggtcggacacacaaagggttacc

SEQ ID NO: 649235 - DNA, 340 bp, Homo sapiens
tcgtgtcatcccccttcgtaaacttccccctgcgtgttcacaggtgacacttgttgtggctgctgcgggaagtctatgaagggactgcggataatgtgttaagtcttgtggaggtctgggcggctcccccggacacaagagtctactgtggccacgagtacaccatcaacaacctcaagtttgcacgccacgtggaagcccggcaatgccgccatccgggagaagctggcctgggccaaggagaagtacagcatcggggagcccacagtgccatccaccctggcagaggagtttacctacaaccccttcatgagagtgagggagaagacggtgcagcagc

SEQ ID NO: 649236 - DNA, 1127 bp, Homo sapiens
gtagctgccggagaacacgcacgcagctgacttgtgtcttctccgccaggactgtcacagaggtctccagagccttctctctccgtgtgcaacactgtggcaactcttaaggaaaaactcattggcaccagttgcggaagaagaaggcaacgagttccaaacaataagatcactgtagtggggttgtgggaacaagtgggtatggacgtgtgctatcgagcattcctggggaaagtctctggctgatgaactggcatcattgatggaatggtctgggaacgataaggcttaaagggagacaagtgatggatcgtgcaggccatgggagcattactttcttacagaacacccttaaaaattgtgcgcagattacaagattactcctgtgaccggccaatccctaagcactggtcgtgggtaacttggcaggagtccggtcagcaaagacaaggggagagttgggctcaatctgattgcagacgacgtgtccaatgtcttcaaaattccattatatccctccaagattcggtcacacgctacccagtcccttgattggcattcataaatgggtggatatccaaaaccacagttggaccattcttaacgatattgttacccttggcacacacttaagttggattaaccagaaaacaccggcgtgacttggcaaccgtggattgtcactctgggaattctggctagcattctacgccaacccattaatggctgaaaacaccctgtgcactttcaatcgccagcaagtttgccacatggagtcggatatcggggagacaccacttggcgaccctcaaggatttgcacatatgctgggactgtggtgtaaaatggtgaggcacggagtgtacatccccacagggcaattggcaccccgcgaacacgggtagccaggaaccacagccatggcacacttgcaccggcaagcctgcaaacaaatgcgtgcgacaaccatgcacatacaaggcctaacgccaagaggagtacccaccaggggcaaaagacaagcgggggcagaaactggacccgtgtagacaactccgcaccacccggagcaacagagagaagacaaaagcaaaaacccacgcacaccacgccagacggacagtacg

SEQ ID NO: 649237 - DNA, 819 bp, Homo sapiens
ctggtacgcccggatacgggattactcagtgcgcggcctaggtactgggcctatggtgccgcgtggtggcgcctccatggcggcctgtgttttgatttggatttggagacggaggaagtgcatcgagggcgaggtgcgagccagagctcatcccctgcatgcctgtgggacactatgaagagtgtggagctgactgataccagcgttgaacgttggcccagagcgcatctgggccccactgcttatgagcttgctgctgtgtgctgggcaagggtgggctatggcaaggtgttccaggatgcgaaaggtgcaagtgcaccaacttgggcaaaatatatgccatgaaagtcctaaggaagggcaaccattgtgcgcaatgccaaggacacatgcacaatacacgggctgcagccggaacattcatagcagtcaggtgaagcgcccctttatatgtggaacttgggcctatgccttccagactggtggcaaagtctacctcatccttgagtgcctcagttgactgagctgtcctgagaggcagtggctgggtctcttcatcctgtccccagcttcagccagcacagtggccatgcaaccgagtaggcgtcggtagatgtcagctgaattgaattgaatccccacggcaggctctgtgaggcaggttgccgagctcttcacgcatcttggagcgagaagggcattcttcccttggaaagatacggcctgcttctaccttgtgctgacgaatcacgctggcccttggggccatctccaactcccagtgtcatcatctacccggggactacaaggcccgagaac

SEQ ID NO: 649238 - DNA, 251 bp, Homo sapiens
gatcctctcctgaagctaattcggtgatgtagaataagatgcggattctgaggaacaggctaacctgcagtctttacattcaaaggagaactcttctaacatgaagtctctagtaaggctaaattatagctcaatatttacctgcactccttactttaatttattatttcccttaaaaccagagtcaagctctaatggcccaggcctgaagtggcccttatggcccaggctgcagatagctttaattgccc

SEQ ID NO: 649239 - DNA, 300 bp, Homo sapiens
tgtctacgaccctagacagcggaccccagccctggaccactgtcctactctgtctgtgagctgtgacagttttagatccacatatgagtaacatgcagtatctgtctttctgtgcctgggtcgtttcacttaacataatgactttgggttcatccacgttgtcacacatgacaggatctccttcgttttcatagctgaataatattcagttgtgtacacacaccacattgtcattaaacaccaaaaatttttaggttgtttccatatctcgggtattgtgaataacgctgcaatgaacat

SEQ ID NO: 649240 - DNA, 276 bp, Homo sapiens
acatcccctttccatccgaaaggatgatgaagttcaggttgtacgctggtacactgataacaggtcagcaaattggggaagtagtccaggtttacaggaagaaatatgttgatctacattgaccgggtgcagcgggaaaaggctaatggcacaactgtgcacgtagtgcattcacccctagcaatggttggttatcagtaagctaaaactggacaaagaccgcgaaaagatcctcgaacggaaagccaaatctcgccaagtatgatggaaaggggg

SEQ ID NO: 649241 - DNA, 1355 bp, Homo sapiens
  misc_feature (1150)..(1150): n is a, c, g, or t
ggtcacaaccgccgcttataaaaagttggacccccccccgcccccaagtggggggaaaagaccaaagacattggggcgtattctataacaaggggctttcaacagaggtgggtaaatatgtaattcccctctgggacaaccaccgcattccccacaagaggccgccccacaaaatttatagaggcggcgccccgcggcggcgttataataggcccccccccgctgggtgtatattttggggagatttgcgccgaccacaccacccgggggctgtttctacacaacgtttgtggacaacaatggcgcacaaagttgttttttgcccctgggagaagtccttgtaaaaaagggatgataaaaaggagatttaggagatttccgcccccgccttttttcttcggggttatatacaataaacagctcttcgtggaagtaaaagatcatgggggcgcccccctcagtatagattttgttctccttcggaggaaaggttctcctcgggcggtgatgataaattgttctctgtccacaacaacttttgtgttgtgagaataatagtgggggttctctccctttggtggccaaccaacgagccacaccacaagtagtttgtttgttttggagagagaggccgctgttcttctctacagaggactactatattctccaccaccctccttttatggtggggtgtctgccccttttgcttcctgtgtctgctgctgtgaagaatatatggagagtagcacacagcacacacagcgtttgtgcggcgcgtgtgggggtgtgtgcactactctacacaagcgcacagcgtggtgacacacacagagagagggcgctgtgcgtgtgagagccgcgccacacagggtcacaccacacagtctgtgtcccaacagagaaagctctgcacagagagaggccgctataatatgagaatatattatatctctcccctataatatacccttgcgcacaccccagcacgtctttataatacacagtgtggtgtggagatagaacaccggtgtctcacacagagacactcgtgttttggttgttgcacacattggcgcgcacatctttataagttctaatgtgagagtatacataagagactctggttgtataatgaatataccacacatgngcgacttccgtataaacacctcttcacgagaggagaaaggaggaaatgttttgtggagccacctttggtgtttcttttttgcgtgtggcacgttttaagttatattatgtttttaaaaatcacgtaactttttaaatgggaaacacaacttgagcccaaaatttgtcacagaattttgagaccccatttaaaaagtttaatgaga

SEQ ID NO: 649242 - DNA, 721 bp, Homo sapiens
  misc_feature (1)..(1): n is a, c, g, or t
  misc_feature (211)..(211): n is a, c, g, or t
  misc_feature (234)..(234): n is a, c, g, or t
  misc_feature (237)..(237): n is a, c, g, or t
  misc_feature (246)..(246): n is a, c, g, or t
  misc_feature (256)..(257): n is a, c, g, or t
  misc_feature (270)..(270): n is a, c, g, or t
  misc_feature (297)..(297): n is a, c, g, or t
  misc_feature (311)..(311): n is a, c, g, or t
  misc_feature (320)..(320): n is a, c, g, or t
  misc_feature (330)..(330): n is a, c, g, or t
  misc_feature (346)..(346): n is a, c, g, or t
  misc_feature (348)..(348): n is a, c, g, or t
  misc_feature (350)..(352): n is a, c, g, or t
  misc_feature (370)..(370): n is a, c, g, or t
  misc_feature (405)..(405): n is a, c, g, or t
  misc_feature (408)..(408): n is a, c, g, or t
  misc_feature (410)..(410): n is a, c, g, or t
  misc_feature (412)..(412): n is a, c, g, or t
  misc_feature (414)..(414): n is a, c, g, or t
  misc_feature (421)..(421): n is a, c, g, or t
  misc_feature (445)..(445): n is a, c, g, or t
  misc_feature (454)..(455): n is a, c, g, or t
  misc_feature (475)..(475): n is a, c, g, or t
  misc_feature (477)..(477): n is a, c, g, or t
  misc_feature (479)..(479): n is a, c, g, or t
  misc_feature (483)..(483): n is a, c, g, or t
  misc_feature (485)..(485): n is a, c, g, or t
  misc_feature (492)..(492): n is a, c, g, or t
  misc_feature (506)..(507): n is a, c, g, or t
  misc_feature (510)..(510): n is a, c, g, or t
  misc_feature (512)..(512): n is a, c, g, or t
  misc_feature (515)..(515): n is a, c, g, or t
  misc_feature (517)..(519): n is a, c, g, or t
  misc_feature (521)..(521): n is a, c, g, or t
  misc_feature (523)..(523): n is a, c, g, or t
  misc_feature (525)..(526): n is a, c, g, or t
  misc_feature (535)..(535): n is a, c, g, or t
  misc_feature (549)..(549): n is a, c, g, or t
  misc_feature (551)..(551): n is a, c, g, or t
  misc_feature (554)..(554): n is a, c, g, or t
  misc_feature (561)..(562): n is a, c, g, or t
  misc_feature (567)..(567): n is a, c, g, or t
  misc_feature (570)..(570): n is a, c, g, or t
  misc_feature (576)..(576): n is a, c, g, or t
  misc_feature (578)..(578): n is a, c, g, or t
  misc_feature (580)..(581): n is a, c, g, or t
  misc_feature (583)..(583): n is a, c, g, or t
  misc_feature (587)..(588): n is a, c, g, or t
  misc_feature (590)..(590): n is a, c, g, or t
  misc_feature (592)..(592): n is a, c, g, or t
  misc_feature (596)..(596): n is a, c, g, or t
  misc_feature (599)..(600): n is a, c, g, or t
  misc_feature (602)..(602): n is a, c, g, or t
  misc_feature (605)..(605): n is a, c, g, or t
  misc_feature (607)..(607): n is a, c, g, or t
  misc_feature (611)..(611): n is a, c, g, or t
  misc_feature (614)..(614): n is a, c, g, or t
  misc_feature (623)..(623): n is a, c, g, or t
  misc_feature (636)..(636): n is a, c, g, or t
  misc_feature (639)..(639): n is a, c, g, or t
  misc_feature (703)..(703): n is a, c, g, or t
nttaaacatgctctaattataaatcactgcattaaggacaatgaaaataatcaatttcggttatacaatatatacagttgtgctgcaaccaaagtaatcaggtgaatgaactgaatatcatacatctcaaaatagcatcctaagctgcatattatgttatccaccccttaacagatcacacagttactcttagtctgtgtacatgttctgngccatcatcccagatctgatggngantggcatgcnaaatgccagnntcctgcagctgcngttcatgaaacataaactttaaatatnaatagatatctacnatgtttttntttctcttanttgcttttttaatttncnannngcaaataactaagacagngtattagcagggtcgttaatataatttctcctctngtnanantnctattanttactgcacaatagcaccaaattntagactggnnatatatttcctaggtatttntntnccantnaacctgncagattagtttggnnctngngtncnnntntngnnatgaatcanctttattccttatntngcnggcaccnnggggncangaggcngncnntnacanncngntgcnggnngnttntnaagntanacataagtncactgtgcaaaanacntctgtttacttaaatctatgagaaaattaaatgaagggttcaaacagaaattaacaattagtgnaaacagatgtagtgcttt

SEQ ID NO: 649243 - DNA, 470 bp, Homo sapiens
  misc_feature (427)..(427): n is a, c, g, or t
tcaaaataaagctctgtcatcaaaattggagtatggtagggagaggatgctggcatgtgccgcaacacatccattagcgcgctggggctgcaccattttacatgtaagtacaggaactgaccacattatggttaatttacattcggaagcaaaaagtacattatctatcatagtgacatttaacttactgaggacagaatcattgttataaaactaataatacacttattattagccagataataataatctacttattatagccagatcataattatagccagaatgagctcctttgacacttcataagatcatactgctaaaggattacctagcaatgaccatgctagtgcttttggataagagcacgagtatgccatatacgctagtgacatctaaggcgtggacgaatcagtgaaactcaccncatattctactgtacaggcaatggagatgagcgatccttgatc

SEQ ID NO: 649244 - DNA, 776 bp, Homo sapiens
gtgataagccagccatgggtgggttggggattgattatctctcagcaacgtcatcctctgagagcagttggcatcaggccagcactccgagctggcagcctggtacaggccatggcccttccatggaggattcctctgctgatccatcaatggaaagcctaaagtcgtatctggtccaggttccatgagtgcagtcctggagccttctgctctggagcagcttgttaagtgcatgcagaagcagaagactagcatagcggggactaagggcaccagtgaactcctccactactgagtgccaagagtggcaagcctgggaagtgaaggcttccataagaccatgggcatgtccgggtttgcacggactgggtccacatcagttccgctcgctgtcaggagtagggcaaggcgcgcatctttcttactagatcttcatcggctcgttcacacggaggggctgtcacaggtagtttcgcaaccagggcgccgcttgagctcgtggcaagcggaaacactggttcagcacggtgcaaagccaaacagaggcacatgaatccaaatcagtggaagctctgtcggtcctcgcccgtggtggccttcctgggagggacgcagagagagtgacactggctggtgtagtctcgactccagttacttgggtatcacgcgcctctcacctttctccatcagatggcatgtcaccgcatgatcaccatggagaacgtgaaaggctgaagaaggggaaggcccgatggggactaagagcaatgggtgaa

SEQ ID NO: 649245 - DNA, 660 bp, Homo sapiens
gggcctcatttagagccttttggccccaaatattttttttggggaaaaattaattttaatttttaaactcttaaaaaaattttttatggggccgcctttatgaatcttattttatggcttctatgtttgaaaaaagaaaaattaaaatgggtttcccaccccgggggccaagggttggttccttaaccaaggggatttggtattaacctgggtaaaggggaaacccttttcacttaaatttccgggttattaaaaattaaaagaccttgggaggttttggaaaaatttcccccaattttccggtttgggcccaaaggtcaaaattcctttcccaaaataaatttggtaggggccaaccgcctcaaaaagccttttgggggtggctgccccttccccatttggaactccctttcattggtgccccaggctttttacatttcttaacccctatttatggcccccagtggaacccggcaacttttccctttagggcccggttgttttaaagaaacccccaattcaaaccatccggccccaaaaaaggggggccggggaaggttaaacaaactttccccacaattccgggcccataaaggccacgggggaaagggggcaaataaacccggaacaccccccgggtggggcctcccaaaaacccct

SEQ ID NO: 649246 - DNA, 148 bp, Homo sapiens
gatagagggactggggataatactggatagctgtgcttaggcagtaggcataggatatgtggcattcgtagtggttgcaagtggcttattgtcgcatgacacgtggttgtgactgttgttgttgcggggatccttccaaaagtctatc

SEQ ID NO: 649247 - DNA, 882 bp, Homo sapiens
tgaccagcttcatttgtcagctttgctcagatcagatcgatgggattggaatacattgtaactaaaatcttcctcaggactattaacccctgtcaaagtttctacagggaactgcctatgtgtaacaatgagaccagatttctcacttgctcttcatacttctatattgaggtaactgttgtagctatgaaatgcttatctgagaagtagtgcttgatacctgcatttctaccaattatcccattgtactgatgatttgagaggggagaaatagccagctgtatgtaaagcaaaatgttccagccaggcgcggtggctcacgcctgtaattccatcatttatgggcaggccacagctgtggcagactgcttgtagacccaggagttgaagaacgtggcagaaaccccgtatctattattgtaaaaaaattgactagaagtaagaaacaagaaaagggaaacacaaagtcgtatttaacagaagatgttgcgcaattaaattcgcgagcaagaactctctagattcggggaaactaggagcagaaatgagactcagcgacttctggttgactcctcaaaccatcgcgctacctaaagttgccactgggcagagacctcctgcaaagtgatcttaagacccctcttttatcccacaatacaccaagatataatccattgctatatatcccaaagtggtggcaacagcttcttgcttgctctggtcaactgccaactatgtttcccaagataattcatgacccactattaaatcctagtcatagtaactgttcctgcttacgatcctgctcaaggatacctcagtaagcacacggatacaccaacattctagccatatgtgccaaggtactaagtatcaaagata

SEQ ID NO: 649248 - DNA, 852 bp, Homo sapiens
ccatcaccctaacacccagcgcagagacagatgtatccctggctctaccgtgtgcttcatctacccaatgctgcctgggagggccaggtggaccaggggctgaggatgtggccgtgtggacgcgggcccagtcgcctacacgtcctggtcccggatggcccgtggccctgacacggagaacatggaggaggtggggcgctgggttggctcatcaggagcaaggagacgctggcggctgcatgctgccctgggtctgctcgcctcttccctctgtcctgggcgggacccaccagtatgcgacgtagagatccatgggccacgctctatacggcatcggccggccctgggcctagcggtagctaagctcgtgctgtgggatcggactggtgtgccgcgggaggcggcgagatctccttcttcttcctggagccctaccgctcgtcgtcctgcacctcctattcttcctgcctgggctgcttgggcggatccagggctgtggctgtgtgcctgaccagtggcacctgccacctgtgccagggcggagcccattgtggggatgacggggctggtgggtccctgctggtgctggtgcctaccctctgcccactctgcgaggagcatcgggactggccatcgcctgcacccaggaccccttctgtgagtgacggatccgatgtcctatttacgaatttacagagggtcggtgcggtggctcatgccttataatctagcgtttggagaggcccaggtgggttgtcccaggtcccgagttcgtgaccagcctggccatttggtgagaccgctgtcttcttggttccattgttgggttggtgccccttgtagtcggggacg

SEQ ID NO: 649249 - DNA, 111 bp, Homo sapiens
cgtactgaaaaagttcacaaatgtttgtgatgtgctgttagagctactgcttttaaaaggtttcataaaaccctgtctttagaaaacctctacatatacaacaggcagtag

SEQ ID NO: 649250 - DNA, 422 bp, Homo sapiens
tcccgggtcgactactactaaattcgcggccgcgtcgacggggtcagagaattccctttcctagtcaaagaaaggggttatagatggcacctggaaaattgggtcactcccaccctaatactgtgcttttccaatggactcaacaaatggcacaccaggagattatatcccacacctggctcggagggtcctatgcccacagagccttgctccttgctagcgcagcagtctgagatcaaactgcaaggcggcagcgaggctgggggaggggacgcccaccattgcccaggcttgagtcggtaaacaaagtggtcgggaagcttgaactgggtggagcccaccacagctcaagaaggcctgcctgcctctgtaggctccacctctgggggcagggactgcttcagtttcttgtcgacgcggcc

SEQ ID NO: 649251 - DNA, 325 bp, Homo sapiens
  misc_feature (16)..(16): n is a, c, g, or t
  misc_feature (20)..(21): n is a, c, g, or t
  misc_feature (88)..(88): n is a, c, g, or t
  misc_feature (111)..(111): n is a, c, g, or t
  misc_feature (138)..(138): n is a, c, g, or t
  misc_feature (140)..(140): n is a, c, g, or t
  misc_feature (166)..(166): n is a, c, g, or t
  misc_feature (184)..(184): n is a, c, g, or t
  misc_feature (231)..(231): n is a, c, g, or t
  misc_feature (251)..(251): n is a, c, g, or t
  misc_feature (266)..(266): n is a, c, g, or t
  misc_feature (276)..(276): n is a, c, g, or t
  misc_feature (279)..(281): n is a, c, g, or t
attgagatgggcaaanctcnntctctacaaagggagtaatcaagtaaatacctgttctctttcaatggactgttgcctattgagcatntgtggatgatgtgttttcagatnttccaggtgaagttctgaccctacctncntggacaaagacgtaaattgagagganaggacttcgtcttccgancaaccagcatttaacgaacagtggcttaatgcagatcactcaagagngcagcatagcaatgtaaaangaatataagtaggtnttggatgccnccnnncctagaccaggaatggggaatacataacacctgtgccaccgttc

SEQ ID NO: 649252 - DNA, 373 bp, Homo sapiens
ctataaccaccatgaggcagactgatagtcaagagaggtaagttgatatattcacacagatagtggcaaaccacgactatgaaactagaaattgcttcctagtgctctaccacaatatactgaacacacctcactcttatgaccaccatttttttttaagcagctttagatgtgacagtgtttatctgtgttggagagagaagaagatacatctctactcttaacacagcttggaaagcttattagtatcatggggactccctaatgttagagatacatctcaaacattagaaagacatcctaatatcaagcatttatttattgactgcttgctgtctgttcaacattgtggaatatcatgggaagataagtt

SEQ ID NO: 649253 - DNA, 994 bp, Homo sapiens
  misc_feature (379)..(379): n is a, c, g, or t
cttatctctgcgcgggccacccgttggtgcgtgggtcgcctgaaggcgccctccctcctggtccatatactgccgctcgatgttgatgtgcgtcgccgggtctgcttgttggctcgccgggatcactgtatgtctctttcgttagcccctgttagtctccccggcgcggtgtctcgtttgtgaaccgctccctcgtgggggcccttcgtgtcccgggggggtgttcatcaatcatatgggagccgctctttgcctgacggactctggtgtgctcggccgcccacccgcgtgtctcctttctaaggggcgccccactacacctcttctgcgcaaccacggtggattcaacaaagactgttactggcgaccagcggggggntctacccacggccgcagggggacacccgcggcacagtttggtgaacgacgccaccccgggccccacaagggggaaacgccgccccccgtagccacagaagtggtgtaaaaaatcactgcgggtgtccccctgcgcaagatggcgcgcaagggacggtatgtatctccacgacaagggtgcaagcacgcgccgccccccaaacaccgagaagtggggcgcaaacacccaggggccagcacctgctgtttagaccgcccaaaggttaagccgtcgccacagggacccacgccagatcgctaataaatatggggagactaccgccccccagagcaccacctggggtgcccacgtgcgaagagaacggataacaagtaggataaggggggcaatatcttgggacagattaaacgtcgcccacaaggaaaggcggagccgttgaaggggagcacacaggccccgtacaggcattaatcattattaaggggtcgacaatacccacaaaacaagaatgaaaagaggccagaacccaaacgacgcgggcaggcagtggtatgagggacgccccccccccacggtgcggggtctcacccaaaaccccgtcggcccaacataaca

SEQ ID NO: 649254 - DNA, 315 bp, Homo sapiens
gctcagaccacagcgattgcatcagtgtatgggtcagatggcaactaagcagaaagcttgccagctccgtaaaaaccaatgatttcagtcccttggtcgctatggagggtgaaaaagcacgttgcgcccgggctatacgcacaacaacggtgcgcactgcgcagcgtcgatgcgattataccgtgcgcccgccccatggaaatgactatagacactgcgtggtacactggtcggtaatctgtttccggaaccttagccatgcttgcgcccaaagctttcctcgatgccctgagcggccacgcctcccggtcgacg

SEQ ID NO: 649255 - DNA, 420 bp, Homo sapiens
aacgggatgcggttggtaaacaggcgaggtaagatatgcacgagttccgttatacggttatataagcgtctgcctatatgatcatgcctgtggttgggtctgacagcgagggtaataatgactatgattggttgattgtagatattggtgctgttaattgtcagtacagggtgataaactggatgcaagcgttatgtcggaggatacatgttatcatgttacgtaatactaacattagggctgctaatacgggtgatacattggtccaagtgggtgtgaggagttcacgataatatgttgtgattttttaagtcgcgcgtgtagagcttgaacgcttgcttaattggaggctgctcttaggcctactatgggtgtttaatctctgactctctctctacgtgtgtacccctagtgtcccag

SEQ ID NO: 649256 - DNA, 438 bp, Homo sapiens
tatgactagggaagggggcggtcagggacgttcctccaggaagcggtagtgggttctcatagccgtgccgctcagttcgcgcagctgtgctcctcagggtcagcatggggtccactccaccacgccatggctgatagccccgtagggcttcttcctgcgcaggagccagcatggagaggacgatgagggagcctccgcccggttccaatgatcagcagaaccgacacagcctcacggggacaccccttgtcccagctgggtgccagcgtcattccgtcttgaaatctccggatggagtggaaaaggggaaaccccctttggaaccagaacgcatttcacctttcggctcattactgttcccagcggggtatcagtcttctctatactacagggggaatgcaagcatcttgtttcatgtggaaccctttttgggaaggg

SEQ ID NO: 649257 - DNA, 451 bp, Homo sapiens
  misc_feature (79)..(79): n is a, c, g, or t
  misc_feature (105)..(105): n is a, c, g, or t
  misc_feature (185)..(185): n is a, c, g, or t
  misc_feature (250)..(250): n is a, c, g, or t
ccaccctatgcagctgacatagctgtcactcagcaatgtgagcaacaacactagagatttagtctgcaggtctctaacnatgcaagccatagggcaggtccatancactcctccactgagaaaaagacaatggcttaggctacaaggtttgggtcaccaaggaaagctgtcaaataatgaagtgngtaagcagattcctaaaaattggaaccatttcagcagcagtttcatccacagggagacagagtanatgctctctcaaatctgttctcacatctatagaaaccttactctatttatggtcttttggcatcttgctctgctatctcacttgagatcactcctatagaactaatagaggaataaatcaaaagcaaaccagtataagtagagacgcaataaaatttggatgtcttgagttctgaggggcttgcacacacttgttaaggca

SEQ ID NO: 649258 - DNA, 405 bp, Homo sapiens
gtgatggaatccaccattgatggacacccaggttgataccacgtctttgctatcgtgaacagtgctgtgattagcatacaagtgcatgtctcttttgtgtaaaattatttattgtccttagggtatatacccagtcatgagattgccgggtcaaatggtagctccactttaaattctttgagaaatctccaaactgctttccacagtggccgaaccagtctacattcccacaaacagtatataagtattcccttttctctgcagccttgccaacatccgttattttttgactttgtaataatagccattctgattggtgtgagatggcatcttattgtggttttgatttgcatttctttgatgttgatataatcaccaaaaacgtaaacatttcagttgctattg

SEQ ID NO: 649259 - DNA, 427 bp, Homo sapiens
  misc_feature (35)..(35): n is a, c, g, or t
  misc_feature (141)..(141): n is a, c, g, or t
aattaactgggcgtggtggcgggcacctgtaatcncagctaccgggagtctgaggccggagaatctcttgaagcgaagaggcggaggttagaatgaaccgagttggtgccactgcactccagtctgggcgacagagtgagncttcatctcaaaaaaaaaaaaaaaaaaagacgtcacttcacagattctaaggatttttggagttggataccaggaaaccggaagactaaatgtatacatatttcacaacatcacaattactgtgacagttttttttaaactatgttaaattacattaattgattatgttagtaattgtattagtttgctcagggtgccattgtaactacccaacatattgtccctgcccactgcctagactttatcaagacaggggaattgcaataaagagtttaattcacacaga

SEQ ID NO: 649260 - DNA, 101 bp, Homo sapiens
ccggccatgcttttcaagtgctgcagctcactgctttcctcctcacgtttccgcacagtgcccaccagaagtatgtccgacaagcctggcagcaggcagac

SEQ ID NO: 649261 - DNA, 146 bp, Homo sapiens
acacacacacagaatttaaaaaaaaaaaaaaaggcaatcattctaaatgtcctatgatagcttgttaaacgatgcaagtatgctatagaaactaaagtaattatgaacagcactactcattaacctaggaggtgtagaaatttgaa

SEQ ID NO: 649262 - DNA, 178 bp, Homo sapiens
tgggctgaaccaggggcatcctctccaccgagtataaatgctctgtgcggcagtctcaagtgttctcatcgttgaggtctcgttgcattggacagtgaaaaaggcagaccagatgaaaaccactttctacaaggcaaacaataacaacagcttctgtgaattaaacatctacggtgcc

SEQ ID NO: 649263 - DNA, 109 bp, Homo sapiens
tacatgctgttatcctacatatacctttctttcttttatatacttatccagttctcaagttattctgttatatgcaacatgaatatggactaagacaaaattggtactg

SEQ ID NO: 649264 - DNA, 123 bp, Homo sapiens
tcatggaagatctttggaaaggccatgccatccgtgcttgtactgctagaagcactttatgtttcctttatgggtgaaatggatttatgtgagtgctttaaacaagatagcaatacttataga

SEQ ID NO: 649265 - DNA, 1077 bp, Homo sapiens
  misc_feature (13)..(13): n is a, c, g, or t
  misc_feature (16)..(16): n is a, c, g, or t
agcgggcgtctgngcngctgcccggcgccggcttccgggtggtgcgagcgagatggggcggagggccggtcttgcagagtagctgcggtgagtgggcgtgtgcgccgagcggtctggcccaagggctgggggccggccgagggtcttcgggagcaggccgcagggcgcggagagatcctgggatcgccgtccgccgctgctacccggcatgtcggcggaggcctcgggcccggctgccgccgcggccccgtccctggaagcccccaagccctcgggtctcgagcctggccccgccgcctacggtctcaagccgctgaccccgaacagcaaatacgtgaagctgaacgtgggcggctcgttgcactacaccacgctgcgcaccctcacgggacaggacaccatgctcaaagccatgttcagcggccgcgtggaggtgctgaccgatgccggaggttgggtgctgattgaccggagcggccgtcactttggtacaatcctcaattacctgcgggatgggtctgtgccactgccggagagtacgagagaactgggggagctgctgggcgaagcacgctactacctggtgcagggcctgattgaggactgccagctggcgctgcagcaaaaaagggagacgctgtccccgctgtgcctcatccccatggtgacatctccccgggaggagcagcagctcctggccagcacctccaagcccgtggtgaagctcctgcacaaccgcagtaacaacaagtactcctacactcctccccaccatcctccctacctccttaactttgtactagactggcctgggcctgcccagctcagcgttatcagtctgtttcatattatttattattttaattttctattaaattattgaaataaagttaagttgagaaactggtgctggctcctggggagagggacggggagatgcctgtgttaggaggtatctggccgggcgtggtggctcacacgtgtaatcccaactactcaggaggttgaggcagaaggatcacttgagcccaggagttcaagaccagcctgggcaacaaagcaagaccctgactctac

SEQ ID NO: 649266 - DNA, 126 bp, Homo sapiens
cccgtttttgagagaggtactcacgggctcaggggccgatgcatacctcctatgtaagaatgctcttcccttgcggttattcatacacactttccacttcaaatatacccgaatatggctttcctc

SEQ ID NO: 649267 - DNA, 112 bp, Homo sapiens
ggagtattctagttgactctaggtagggcacaatctagcagtgatgactggataaactggacaactgtcactatctctctattagctccagaattccttggacacattgcag

SEQ ID NO: 649268 - DNA, 1082 bp, Homo sapiens
tgccaggcgcgctggcgtacggtccagccggctggatctggttccagccgcgccgggccggcctgggcatgcgcagtgtggatggctgctgagtgctgctaggatgtgctgctgggcctgggctggtgctgcacttgctgtggctgcatcccttgcccctgtgctgcctgtcctgtgccctgctgtggaccttgacatgcctgggtcagagtggcgaagctgtgctcagtgccctgtggctggactgcagatgccagagctgtccccagatggagcagagggtcctggaaagggaagctgaaaaaggaacggaatgaaacgaggagaggcagcgtctgcgggaggcaggccttgtggcccagcacccgcctgccaggcgctcgggggccgaactggccctggactacctctgcagatgggcccaaaagcacaagaactggaggtttcagaatgacgaggcagacgtggctcctgctgcacatgtatgacagtgacaaggttcccgatgagcacttctccaccctgctggcctacctggaggggctgcagggccgggcccgagagctgacggtgcagaaggcggaagccctgatgcggggagctggatgaggagggctctgatccccccctgccggggaggggcccagcgcatctgacaggtgctgcagttgctctcctagtgggttcagcggcgttgcgggccgttgccagtgcagggctgctcagaccaacatggtgcagctctcggcgtgtgtgggcgtgttcacaagcagggcagctggtgagcaagggctttcaggtcctcggtggtggggcgggatcccagcatcagagcttcgaagtggcccttcctcctcgaaccttcttggcgtgtcgcctgtaccggtatggcgggtcacgggctttcgggacagggtgatttcttgacttaccggaccgtgctttgaggccccacgcacgacttctttctgggagttatattccgggcaaataggatgggcgagtgtccccgtgaaagctcgtttcaccctgtgtatacaccatcgaggcggtggtttaccaacacacgtggcgcacgatct

SEQ ID NO: 649269 - DNA, 439 bp, Homo sapiens
cccctcgtggcctctggaatgtgtctcgacttgttggctccttgcttctagcactccaaggctcatagatcgattgtgtcttaaactagaagaatacgttttccattatctcaagtagcagaacatgttccatatgcttcaaagaaaattctaaaccatcacagctgtagatcatgcacttgatacactgctttttttcaacccccacatcctcaccacctgcttctttgatcaccaataaatagtgtgggcttccagggctcggggcctacacagccttcatactagtgttggcccctcgcgccactttatgcactcttgtctcatctgttttgactcgccggacttcatagtcccacagcctggggtgggtctgatcacccaacattctggcgccatgatgaggcacgacacccagtgaggacatagggtgtgtaaa

SEQ ID NO: 649270 - DNA, 131 bp, Homo sapiens
  misc_feature (89)..(90): n is a, c, g, or t
gacatttttacagtatttttttgtaaagcaaactattttttcccttgaatttggtatatgtgtattagtgaacattgtaaaggtgaacnnctacctctgtatctaaatgtataccatccacttgtaaatga

SEQ ID NO: 649271 - DNA, 976 bp, Homo sapiens
gtggggggggggggggggggggcgctctgctccttgcgcattttgtgccctgctcgtttggggcgttggtggtgccggttggcgtcgcgtggcgtgtgcgctggtgtgggggtcgcccgcgcgtccgcggcgccctctgctcgcgcgcgcttgtgtgtggtctgttgtggtgtgttcgcggcggcgcgcgcgcgggcactggactggcgcgcggtcgctcgtcgtgtggcccctccgcggctcttgtgtgtgtggggtctcggcggctcgctgtccggcccgctgcgctgttgtgtgtgtgtgttgtgggcggtcgccccctgcgcgtcgctctctctctgtggagggcgctggcgcggcgcggccgcgctctctctctctctccgcgcgcagatgtcgtctcgcgcgtctctccttggtgtatgatcggtgggtgtgtgtctctctctctctctcgctccctctctcgcgctcgcgcgctacgccctcaactaactcgcgtattaattctgatgtctgcaccacgtcttccgagcattctcgtctcactccactgtcgttttttctatgatggagaggagcacatcgggcctcacatgttgtgtggtttccccgatagcatgatgattgtccctggcgtgaggagctgtgtgtgtgtgtgagagagaagagtgcaacaaatgatgattggctcgatacaaccacatttcacctcttttcaccgagctactcccgacccgattcccggttagtatatattattttggttcgcacaccccatcgcaggtgtatcgttgactcaatagaaaacatgaaattagtgaagaggtgataatgggaaaaggaatgagaacctgtggctctacgcgcgcacgcttacagaagggaaatcatcatatatatagagcctatggatttatttcatgaacaggaaaaggataaaaaccagtgcatttaattagaacaaggaaagagg

SEQ ID NO: 649272 - DNA, 488 bp, Homo sapiens
  misc_feature (69)..(69): n is a, c, g, or t
acctctagacgagtgtgcatattgtctgtgtgcttgacacagcaagtcatctctgactgcacatctgtngctgcacatggtatcagttaaccctgcactgcatttaacttttctctgagttctttgagaaggggacctggctcatgggccctttggtatggcatccaatgtgtgttagaatctaaacagttagataattatcaacctgtgcctgaagactgccatgaatcaatatgtaaatgaatcagggcactggtcagtcttccagccccacttgatattaaagactcagtgaagatggttagcaaagcagaggacagcaaatgggtctccggcagctgtgaagcaccagagtttatccaaaggggggacgtgcggtctagagactcatctcaaagttgcattttcataacaaatacactgggtttttttttttatagctatattgggtatttgttggggcctaatggaaatttaggaggacccaa

SEQ ID NO: 649273 - DNA, 254 bp, Homo sapiens
atgcaccatttgccctcataatctgcagcatggcccagtgccgtgggcacacagcagggcctgcaggcaagtgtcttccatgtcaccatgctcctgcaaaactcacgtgcatggccagccgtggcagcttgcttggctggcatgttccagttatgcctatggaggcttccccttcatagcccagccgtcatgcagggtgccagtttatctcgtgtgcaggcagcacagcagccttgtctgctgcaaaatccatg

SEQ ID NO: 649274 - DNA, 670 bp, Homo sapiens
aataataactttttaaactgtatttttatgtctcaaaattactgatggtaatgtggaaactgtcactttttgaatttcagggtttatcaataaacaaaagtaatggcatgtaattacatatgaaatgatgctatttcagttgtggcatgcttctattataattatttccaaagctcactaataggtcaccagttaaaaattacttttcattaattctgtaaatgtgtaacctaatttacctttcttttcacagtcaaaaggcagatagttgaatagcatgagaaaggttaggagagatacctactttctgcagcttaccttagttgaaacccttattacctcatgcgttaagcttgaaccagcctctcttcctttaagctttcatcacttttcttgatattgttactagaactgtgttttaaaaatatctctttatggtgtcattccagcatacaaaggcattctgagattctccatttcctaattgataaattccaaattgttagcttgatatgaaggtttctaaaaatgtggcacagactatttcttactatcttcccccataattttcaaaaaggcattaggctatagcagggtggtactattgaagaacatgattattctttccattgattttgatcaggtgcttaagactggaggcttaaaatta

SEQ ID NO: 649275 - DNA, 610 bp, Homo sapiens
  misc_feature (552)..(552): n is a, c, g, or t
  misc_feature (568)..(568): n is a, c, g, or t
  misc_feature (579)..(579): n is a, c, g, or t
  misc_feature (596)..(596): n is a, c, g, or t
caggaaagtacctgtgcagatgctggcacttaaggcctatggagaaaacatcaggtgttatagagagtctgttgtagggaattaacgaaaagaccactgagttaagtcaaagaatggtctatttgagtttaggtggtctggtttatggggaccctggctaaggagcatactccaaattcttggtgttaaccctctcagtagtcataagaatagtctccctggtgcactgtattctctcaaaggttttaaatgtttgcatgaagccatctttagaacgtcagatggtctctcttcaactggaatgacaagagctgaaagaaatgtgtgaccacgaggacaccgaaaccgatgagtgacatgctgagactggaaatccaaaatgatagtaacggagagtggcgctaacatcctaagttttggtcacactcttgcctaagtgacaacctgacaaagggggaattttttaaactgatgggaggccattgttttggactgagcactatgtcccaacagaccccgaaccacacatgggtcctagaatagaccaggttntgtttttctcttgcanacaggactttncagcataaggtggtatnctcctcgtccttgt

SEQ ID NO: 649276 - DNA, 1083 bp, Homo sapiens
gctatagagagatttttacaagtcagattttatgttccccaaatcttttaaatgaagccagtgactcccagattctcaacacatggccccagtcaagacagaacaccatggaaaaaaccctgtaagtattatggcactctccgaatcctcctgaaggcatttcctctacagacatagtgttacaggaagtgcaaatgcaaatgtgcaatttatttttaaaggcagcttattaaacaaagtcacatcaatacattggtgtctgagaacatcagttgcctatattctaagcatttcatcaaggctgcagatatagcacgcattggacttcagattcatgctagccatgtaaagagtggtggactattaaaaccagtaagaggtatcattacaagtcacctggaacagactcaaagaccaggttctatatgggcaacagacaacgcaagaatcaagttctgtgctagtcccgagcagtgtgtactgagtaccataacactggaagtagctgcttaagtctagggacgtagatagatagtgactactataacaaataagcatagactgacaatgagagcagaagaccttcggaagcacatagtgtaacataaaatgtactccacaatggacagtccacatagctatctattacataatacagaggcttcatttacaatgctgtgataaaatgatgtagaacattaagacaacggaaagaccatagataacaagaggcgaacgagataccggaacaaaaataaacacgacaaacaacacgaaaaaagaaatcaccaaaacccagaacaaaacagcacagcacgcaaagaaagagagacggagacaaagaagagaccaagagaccaaaagacgaacacaaaacacgaacagacccacacgaggtcgagccaaacacgtacaaaacaacggcacaacagagaaacaaaacaaaccgagaacaagaagaagaaaaaagaagaagaaaagaaaagacaaaacgacatgaagaggaaggagcacagaagatacacagaacataacaacgaccaaaaagagacaagaagaagacacgaaaacacaaccttataa

SEQ ID NO: 649277 - DNA, 94 bp, Homo sapiens
ccaaggaggatacacagagaatggcttcctgttgttttgttttcttaacgtgtacagatggaaacttcatttaaaaataaaaacaaaacaactc

SEQ ID NO: 649278 - DNA, 140 bp, Homo sapiens
  misc_feature (80)..(80): n is a, c, g, or t
gccagttggggcccggcgagcacccccagccctgtatgtaaaccccatggacaaatcccgaatatattgtcaatgaaganaattggcttggccccagttcttggctatttgaattattgaaggaggattttaataattgc

SEQ ID NO: 649279 - DNA, 412 bp, Homo sapiens
  misc_feature (4)..(4): n is a, c, g, or t
  misc_feature (20)..(20): n is a, c, g, or t
  misc_feature (32)..(32): n is a, c, g, or t
  misc_feature (55)..(55): n is a, c, g, or t
tggnaacccctgggtgcagnaaactggtcganaacccaaaggtccctccccaaanatctggaaactgggcatagatttctcaagaaggaagactccccctgcctccccagggcctctgctctccctgggagacaaagcaataataaaaggaagtgtttgtaatcccagcactttgggaggccgaggtgggcggatcacgaggtcaggagatggagaccatcctggctaacacggtgaaaccccttatctatgcgcctgtagtcccagctacccaggaggctgaagcaggataatcgcttgaacccgggcggcggagattgcagtgagccgaggtcatgccaatgcactgcagcctgggcgacagagcgagattctgcctcaaaaataaacaaataaattttaaaaataaata

SEQ ID NO: 649280 - DNA, 405 bp, Homo sapiens
gctcatgcctgtagtctcaactatttgggaggccgaggcaggtagattgcttgagcccaggtgtttgagaccagcctgagcaacatggcaagaccctgtctttacaaaaaatacaaaaaaatttatccagatgtggtggcaagttcctgtaagccaacgcttcgggaggccgcaggaggtggattgcttgagcccaggaattcgataccagcctaagcaacatggcaagaccccatctttacaaaaaataccaaaaaatctagccaggtgtggtggcaagttcctgtagtcccagctacccagggggctaggtgggaggattgcttgagctgggaggttgaagctgcagtgagccatgatcacaccactgcattccagcctagtcaatggtaagaccctgtctca

SEQ ID NO: 649281 - DNA, 92 bp, Homo sapiens
tttctgccttacagggctgtccctgaggctggatttgttacaaatgagtcatgacatcatactgtaataaaaacagcttgttttttgcttga

SEQ ID NO: 649282 - DNA, 270 bp, Homo sapiens
tggtgattagagatcttgaagcatctaacaggtcctgcactaatcaaaaaaacaaaactactagccatggatgtcatggcacgtttgttcgttggtccaaaagcctccagtggctttccattgcggattggcacggtctagactcagcgatcaaaacttccaccagtgattgctttaccaaaacatcttccctaattcctgttgtgaataccacctggtttacttattatctctggcttgcactaatctgggcagggactgcttgccggg

SEQ ID NO: 649283 - DNA, 84 bp, Homo sapiens
  misc_feature (24)..(24): n is a, c, g, or t
aagttcttccaggagaaagccatnttcagttgagccaagatgtcaagccaatggacaagcggagagttcactcccatttccacc

SEQ ID NO: 649284 - DNA, 409 bp, Homo sapiens
  misc_feature (45)..(45): n is a, c, g, or t
  misc_feature (79)..(79): n is a, c, g, or t
  misc_feature (282)..(282): n is a, c, g, or t
  misc_feature (297)..(297): n is a, c, g, or t
  misc_feature (337)..(337): n is a, c, g, or t
  misc_feature (368)..(368): n is a, c, g, or t
  misc_feature (383)..(383): n is a, c, g, or t
tcgggaggtgaaataagtcctcacgaaaagctgatggttttcgantgtggcacttccccctgctccccgcctcctgacnaccatgtaagatgtgcctgcctccacttccacccatgatgattcactgagctacactaaggactcagggaaaggctaatcagagactcagaagaatgcaactgcttgtctcttatctacctgcgaccctggaagcctcttacttcgagttgctctgcctgactggactgaaccaatgttcatcttacatatattgactgatgncttacgtatccctanaatgtataaagcccagctgtgtcctgaaaaccttgggcanatgttatcaggacctcctgaggctgtgtcanaggtgtgtccttaancttggcaaaaaaaactttctaaattg

SEQ ID NO: 649285 - DNA, 151 bp, Homo sapiens
tctagaggatctccattggatagcggatagggcgggagcagtcttccagaaacaggtgggagcagcgctcattttcatagccaagggtccaggagctcccaggagctcggcaatgggctggtccatggtgggtgaggggccagagcgtctg

SEQ ID NO: 649286 - DNA, 411 bp, Homo sapiens
tggccggaggaaaactttattatttaatgaaccacgtcttatgaacaggtggggggtaaaccacccaggacaattatgcgggttggattatgtctccagaaaatggaggctactttatttgattaggggggttctccaaaaacaaatttttccaagtggggtggggggaaaaaaatcaccattctaactttgcttctgactttaaatcttaaaatggctttggctttctaaccctttactacatgggagggactttgatagtttctattcgggaatattctattatttcctgctagttccatttaattccatcccactccactccacttaatttcattccattctcatttcatttataaaaggacgggcaggactcatgaaactgatctcatggcccactaataggttgca

SEQ ID NO: 649287 - DNA, 453 bp, Homo sapiens
tcagagcaccgcggggccacagaccagtacctctgtggctgttaggaatgggctgcacggcaggagatgagcagtgggctggcgagcattaccaccagagctctgcctcctgtcaggcggtgcaggattagattctcacaggagcgcaaacactattgtgaactacgcctgttagggatctagcttgtgagctccttttgagcatctatctaatgctgattatctgaggtggaacagtttcatcccgaaaccatcgcccccatctcctgccaccatccatgtcaaaactgtcttccacgagaccagttcctggtgccaaaaagtttggggactgctgttacaagatgaactgcactgtgacagctagtactgacgacagcaagaagccatctgtgtaacaggatcttgattatatacttctattaacactgggaaaagagacacaatgctcac

SEQ ID NO: 649288 - DNA, 123 bp, Homo sapiens
cacgtagctttatctacataaagtgacatcagtgcaggactggtgattttgctctactgtgtgacagatatcagagagacaccaaacaagccaggacaaagtccaccctaccaggagttagat

SEQ ID NO: 649289 - DNA, 796 bp, Homo sapiens
gcggcacgccttgagagcttcagtgtgccccaggattagaatcccaaagataatcagatgggatctcggggattgctgctcacctggagaagggatggaaataacttcacagcaatttgtgctgtaaacaacttcctccttgtaacctgagtaacagaggacctgttacagaatccatacttcagccaagacttctcctgaatctctcacagatatgtggatgagagtgggttaagcctcaccctagcaaaggagctaggctcaggcatggaaggaagttcgactgcataagaaacatggttgaggtctgagatttgtacacagagtcattcaagagttgcttgtggactactatgtgaagatacaagacacaaatgtaagttctgaggacaaaaagtttcatgagacccttgaacaggggctgttgtaactgaactgatgcggctcttaggtcctagccaggagagggagatacctccactgctggggctggagaaagcggagcttctggaagtcatgccatctcagaggatttgtgtggatgagggctcggtacagcagagaagtagaggagcaggttcaaaagagaaatgtttcactctggtctgtactatgattccaattcagatgctgacagtgaaaccgtggaaggcagaaaggtgtggaaaactcgcagaggtcctggtgggtgagcagaagcagtgcaggatgccaagagcagagaaggagcagatgttgtgctgggaagagagtgctgttactcgaggtgttctcggggctcatttgcgagaggctc

SEQ ID NO: 649290 - DNA, 989 bp, Homo sapiens
caaataaaaatatctcacataccgacatgtaggtacactcttcagatattttcccttataccattgctggtgaacttattcgaaaattcattccacagatgcacaactcttgtttaactccacaacctggctatcaccgctttctctgctttttccgctcaccctccccccactatcccccttatctttgggacaccccacctatcacccgtggctccagcccacaaattggaccgtggtctaacacttcgccagcttccatactataccccacgcaacccacgtaattgcaccctttgttggcaagccccttatcttcccacggtttcaccaaaggatttccgcgttgtttttccaaggaacccaccttcccccttggaatattgttggcaaaagcccggtgtgtctgctaggagaggctttttcaaaccccctcgccgccctcctttgtatgttacatgatcgcccccctggggcgagacattctcttccgcggtaatcctcccaccggggggggtgttcacccctcggtggggtaacgagtctctttgtggacaaaaatcccccccgtcttgccatgggccgtcgcgcccgcgataattccccgcccttcccctccaccatatgggggggccctggcgccacaacaccccattaacgtcgcgtttgtggatatactaacccaacactctctacatcatcggcacattacattactaccttctgtagaggcactgcgaaactcatttgttccccgaacaccacgaaagagttaaccaactggctcaaccactccttggtatcttaatcgtggtctctgtccccttctatgtcattttgtgcgttcttattgaacccttttactacccgcaccccgtaacacacgactttataagattcccctgcgggatttcttttaaattcttttcccgaaaaaaaaaaaagcccttttggggggcccacaaaacaaaaaacacaaaacatagaaa

SEQ ID NO: 649291 - DNA, 838 bp, Homo sapiens
ggttccaaagacctttgtttaacaccgccctttgtgctgacacagacgcctgtggatctcttggtcgcttgtgtgagttcacccacagacggttcctccctatatgggttttagggcgcctcccctcccatgctgatgtgattggacccccctttgtttaagggggaaccgcctcttggggtgcccaacggtggaccgccccccacaggggcccccttgttaccccacggaaaagggggttgccccttgggcccacaaggtccacaccctgggccgtgtcttataggcccccacgaagccccaattgctcccaagacgcttgcggtcctccttccccggaagccttttgggaatttaaaaccaccaaggggggaaccatcttggccgctttttccaaccgttttccccggcccgacaaatcccagacttgtgttgttccgcccatggtaaaatacttgaggaatgcctgggcctggtctgtctccctgtctccaggaattctgggcaccccagacctggcccagacctagaagactgtcacagaagggtcggagtctgtaaacccgcataccgtttggcttttttcaccatgatcacttttatatggaattaaaagatcctcgcatttatggtgtagcttctgagtcctgagactttttttgcgtgatggctatgccctgcaacacaaggtgttggtgatggggctgcttgagatgccttttgaaggtacatcgtttgccaatgtcagtttcctctcctgtccgtgtttgtttagtacttttataatgaaaagcaacaacagattgtttgggatttggaagttaagatttttaaccca

SEQ ID NO: 649292 - DNA, 616 bp, Homo sapiens
atagcatgagattatcttctctttaaaggtttagttaactcctgtaagaaaccacctggatttaatgactttttcaaaaaaaaaaaaaaaaaaaaaaaaaaaaaaaaaaaaaaaaaaaaaaaaaaaaaaaaaaaaaaaaaaaaagggggggggggcgaaaatttccccgggggggcctgggcacttttttgggaaaggggggctccctcaataatgaggctgacatatatttaattaacgacaaagacgcgggcggcggggtatataaaacaagagcgtgaagtagtgggagaaaaacacgtcaaacattggctaggaatcttcttgggaagaaacgaacgaaccactctatcttcgtgggggggggggaagcaaacatatgggtggggaacatcacactacaccctacacagaggagatatattaatgaagctcactcgaaggagggaataattatacaactaattatgaagggtcgagtattaggaggtggtggaaaacagccagcgtacatatgatcttggctggatgagaagaatatttgtggcctcaagcgaagcatgtagtatattagaaaaatatttatttacccagaggatctcttgtgataatagag

SEQ ID NO: 649293 - DNA, 224 bp, Homo sapiens
tgtggttctgtttctcaggctggaatgcagtatgcaatggtaggatcttggctcactgcaacctcctcctcccaggctcaagcaatcctcccatctcagcctcctgagtagctgggactacaggtgcacgccaccacacccggctgccttttgcattttttgtagagacggggtttcgccatcccggccaggctggtcttgaactcccgagctcaaacgatctg

SEQ ID NO: 649294 - DNA, 553 bp, Homo sapiens
cccctcagcttagcagctcataggtcggagcccctgtcctacagagctccagccgggcctgtcgttgccttatgctggaacgtctcgtggaatcttgtgccctttctttctgtgttggctgtgtcggggtggtctttgggaagcactatcatccaatggtccctcagtccgtttgtctcatctcgtctgtcccttccatgtctgagcatgcatgttatgttccggtgtacacatctctggagctgcatatgaggaggagggtaatcgtgcaagaaaacgtacacatggtgatagtcgttccgtgtcattataatgcaaagggccctagacccatgagtactcatacagatccttgttcacactatgggactttacttggatcctggcactgctctcgggtgaggatgaccactgtgccagtcaaatttgccaatgcatactgtacaacataagtggtgtagatggggctggagacagcgatgtaatgttgaagaggcccgtcaaccaagtaggaacttaagtcctgactgaggatacactggaaccatgagtt

SEQ ID NO: 649295 - DNA, 126 bp, Homo sapiens
ttttagtgacaaagaatttactacaacttctcttgctgtttctctgacccctcctttgcccttgcgtatggtcattctctaaatatttccttagtcttctgctcttctcccattgcaacacggtct

SEQ ID NO: 649296 - DNA, 119 bp, Homo sapiens
gtaaacttgttatccgctaatatcattggacattctgctggatccatggtatcttctcaaaatgaaagtccttccactatcgagtacagtgtctgaacgcagctgcgttacacttccga

SEQ ID NO: 649297 - DNA, 394 bp, Homo sapiens
  misc_feature (27)..(27): n is a, c, g, or t
  misc_feature (31)..(31): n is a, c, g, or t
  misc_feature (170)..(170): n is a, c, g, or t
  misc_feature (387)..(387): n is a, c, g, or t
agggtgcggagtttatggccaaattgncccnaaaacttacaatattttattcacgacaagatttctaacgattccaaatggagggaagtgcaaatcatattttctggccatgaagttccaggtgaaggtgaacacaagatcatgaactttataaggcatttaaaatcccnaaaggatttcaaccagaatacgagacattgtatttacggtcttgacgcagatttgattatgctgggtttgtctactcatgggccacattttgcgttattgagagaagaagtgacatttggtagaagaaatagtgaaaaaaaatcgcttgaacatccaaatttctacttattacatctttctttattaagagaatacatggagttggaattcctgcancccgggg

SEQ ID NO: 649298 - DNA, 289 bp, Homo sapiens
tccccaggttttggggcctagtttctgtttgtaaatcccaaacttgcctgaaagctgtgaaaaaaaaaaaaacccctggcctttgggcccggaggaattttttttttgaatcccccccggaactccctggcagtggattgtggggggctttttcttcccctaatcagggtgacctgggccttttgggcaggatcccagggtgaacccccctttgaacttttaagtccctagtccccctgggggccggggggcttccagtgtttgggcgaaaaaaagacttttggcccca

SEQ ID NO: 649299 - DNA, 418 bp, Homo sapiens
cacgagggggggtctctcacgcgtgtgaaatgcgccctttcttttccgagaatgcggcgtgaacactctcccggccacaacacaagagagatgagctttctacagcgcaaccaatgtgaatgcccacccaagaaagataccacccgacacagaggataagctcgaagaaagggaaatgggcgccatccaaagcgccagaaaccccgggataaggcctggggcgcgccatgtggtgcttggtcacagaggagaaagcatttggtcggaccagatccgcacacccgttaagggtcctgtggaaacacggaccagacgaagaggtgaaccctgccagaaggagactcccttaagggttccggtacccgatctctctcccggaatgactggttcaccgttctggtcatagacccgctgtggc

SEQ ID NO: 649300 - DNA, 892 bp, Homo sapiens
ggagagaactagtctcgaatttttttggttttttttttaggtttgagggggaatgctggaaatggtaaggggttatggaaacttgtcatataacgtaatgctagggtgagtggtaggaagttttttacataggaggtgtatgagtgggtcgtagcggaactcgggggtatgctgtccgaatccataagaacagggaggttacaagtagggtctgggtgaccaaatatgttgtgtagagttcaggggaagatgtggctgttcattttgttgtgccctaaggacaaattggtatctgggttagacgggtggtctcattcatcacataatggttggtgtgtatcccggctaatagaacgaatagggcagaagggcgcctgcgcggtattcgactgttagaagcctggagactagttcggaatccccccttacggcaaggtcccacaacgggggtccggtagaggcctctggacaacggagtgggcagataaaactcatattaggggcccacagggcccatagacggggccgagaagtaacacagagggtgccccccagccgtagcagcacaacgcggtcggaccaagggtacacaacaaggagcaacacaactaatcagagaatgtccgaacccgcaacaaactgaactagcactcaagggagaaacacccataatgaacaaatgtcactgggcaccaaactgcccccgccacgaacgcaccaacccagagacgacagaccacgaagtagaagaggcacacccatgatacagaaaatagatgaaacgcgagcagccaacaggtgggcacaacaacacctaagcagaccaaaccactaggagtcggcacaggagcacgaccatcggacgacgtgactacagataagcgccgtgtcc

SEQ ID NO: 649301 - DNA, 730 bp, Homo sapiens
  misc_feature (123)..(123): n is a, c, g, or t
  misc_feature (474)..(474): n is a, c, g, or t
  misc_feature (477)..(477): n is a, c, g, or t
  misc_feature (700)..(700): n is a, c, g, or t
  misc_feature (720)..(720): n is a, c, g, or t
aaagttagtctaactattagactgtcagactctgaagtgtttcttattttggaaaggtgaagacttgctttagtttgttcatagtttccttggcagctgctgatggttttgatggagattcanatggatttggaactaatgctaacttctgcttggtgaagatgctaaccaagttagatactcttcagtgaattctggtactgtgtacgattaatcctcatccacagtattacgctgtgcaaggctatatatacacaggattaatctttccatgatttccactgccctgaaggaaattagaatgtagtctggctccaagaaaacactagaaactacttcagctggtgatggaaaatagtggaattctatacatcctttgagacaatggaagcagcaaaccagcgttctttggattggggaatatttttggtactaactgaaaaacatcattttaagcctgggccctgcttaaanganacttgttttctcttccctctctccctctcttccttttttccctccttcctctttttctttcctcctttccttcttgtctccctcccttctccttccttccttcttcctctttttctttcctccttccctccctccctcccttccttccttttttcctttctcccctccttccttccttttttttcttccttccttcctccctccctccccttcttttcctccnttcttcctttggcccccctnaaacttgggg

SEQ ID NO: 649302 - DNA, 808 bp, Homo sapiens
ctaaagggaacacgtgtcctcttagttaaaggttcaatggagcgcaggtcaagtccaaaattcaagccacgtgatgtactccagacgtgttaatggacatctctggccgctatacatccagagaaagctacacccttacgcattaacgaacaagaaggtagtgaccttgcgtccagaagaacagcttgagacaagtttaaatatgcttacatgtaacctggatcctccatcttgataaggtacatcaataactgcagaaacatatgcaacaataacgcacgtgtgatgacgacatggtaacaaactagagcaaaagtcttaagcgagcactaatcatgaatatcctcagtgccagaaaaaaacagggaaattccgtaaatttcagttgccagcaagagggcttagcttattagttgactgcgatagaaatgaactgcgtatggcacaaacattcctgaacagctcttgcacgcgaagggctacgtctccactatacaacgctcagcaacattcatgaaacaatcatgcaactttttaacacaacacactctcaatactgagtacccgaaacggccaatcagaccattagcacgatacacctaggggacgcagccaatagttcaacaccaaagacggggtaccaaaaacagcaaccatcacagagactacctggcaacgcaaatcaatcaacctactacacaacgcaccacacgcacaacagtccatgcatcgcaccaagatcgacagacaacacgcagcccaataaagtataacaacaacaacaaccacatcagaaccgggaaacgaa

SEQ ID NO: 649303 - DNA, 438 bp, Homo sapiens
atgcactcccaggagggagggttctatggggctgaagtaccacagagggaaattatgacagcacaatacttggcccacaatcagtactcaaaaatggtagctaatatttccatttgaataacagcttggcgtgctggacagacactaggctagtcaccagaggtctgtgagggcatataacataacatgcataaaagcaagttgatttcttccttaacaagatggttgatacactttaaggccatattaggatattacctggaaatcctatagccctgtggggctaaatacatactagatacctaaaagccagtaaaccatggaagctaggcttggtttcaagctattacttacctttccaattcactgcaagagaaacttagtaatattatcctggaacaaacgactgttcagcagtatagacttcatttttcttta

SEQ ID NO: 649304 - DNA, 224 bp, Homo sapiens
accccgaccgccccagcgaacaccagttgcccctgctcaagggccacgagaagaacgagctggggatatggatcaataccgccaaccagttgctggcctccatcgagcgcaatacccacttgcgtcacgaggcggaaaacagcctgttgcgcatggcccagtacgacttcctcaccggcttgccaaaccgccagcagctgcaacaacagctggacaagatcctg

SEQ ID NO: 649305 - DNA, 306 bp, Homo sapiens
  misc_feature (266)..(267): n is a, c, g, or t
acacatgcgacggactgatcaactgttatccccacctctgatgattcctcagatgtccagaccaatgattgaacctgtccctccatgttcttcctgtcaactctgtaggcctcccttgctctcagcctgactcctcacagccagtgcttttataaggagaaggaggtcctggtgaagtgacagacatgagtcccctgtctgcgcttcagtgattgcctcctggtggtgattgtcccaatgcccccctccacttgtgatgcttgtcnncagatcagctcctgttctgcgattgtttgtggttacctg

SEQ ID NO: 649306 - DNA, 306 bp, Homo sapiens
acttgagctaaacagacactgtacatttcacctggtcagtatgaccatctttattctgcggtggtggaaggaagggcaaggtgactgtgtaaagcacagatgtgggaagtagaaatattgttactagacattataaagtcatggtgcctagaatagctgcgagtcatgcataggctaagggggaaaagactacactccaactttagaaaattaatttagaaggctaggggcagagattaagtcattgcagtttaacatgaaaaatgcacatgttatagaatggagcacaatggaggattcataaaa

SEQ ID NO: 649307 - DNA, 330 bp, Homo sapiens
cgaccttaccagagagagaatgccatgaaaacattggctgaaacatgaaatactacagaatatttctgtttcttattctgaatacgctgctaagactaaaggtcattcggtacctgtttgtgtggtagcgtaactggagattcgggcaattccatgtaatgtaagattcgggatgaagcagccttttgggctaccggtcactgggcagattgggttgaaagaagccccacaagcattttcaacggacagacatggggggattcaaggtctaacatgaaaagactgctggaaaatctttacaataggttctttacatcaaaattcaggcaa

SEQ ID NO: 649308 - DNA, 1050 bp, Homo sapiens
tcgacccacgcgtcgcccacgcgtccggtgtgtgcctgtaatcccagctactcagcaggctaaggcaggagaatctcttgaacctgggaggcggaggttacagtgacccgagattgcgccactgcactccagcctgggtgacagagactctgtctcaaaaaaaaaaaaaaaaaaagggaaatcttatgggtcacaccccaaaaacccttactttcagtgaagagagtgtggaaaattttccaaatagtgcccatgtgaggttaaactattataccggggcatttttcccattcttctataaataccaccttccagttttttccagggtactttagtgaaccttaaactttcttaccactctcgggttgagggggctgagggtggttgggagaaaaacacgtttggactacctcggataaaagccaccaattaatgggggtttggcacactcttaaggtaagacgctcaaccccgggctggccatattacaggtaaatggggtactcatatatgggcggggaagtaaaatctctttctcaagcacaattattttccaggaattgggccgtggtatgaaagggctggtttcccccaaggtttattataaatacccattcttgttggccgggggcagcggggtggagctcaccgcctagggtaattcccaagacctttgcgacacaggcttggaggcaaagcaagatacaaccctgagggtctgcacgtgggagaccagccgtgaccaccttggggaacgccagtgctctgctggaaggtacaaaatacgccggggggcgggggcggccatcctgggacgtcccagcatacttgggaggctgaggcagggacgattgctgacccgggaaggcgtagtgggggtgacgagatcgccatggacactcacctgcggaagacgcgacctcgtttttaaacaaaagacaaaaagggcgcgcaaaaatccagggggccaactacggccacatctgacaggccacaaggcacaaaacagcggcggcaacccgcggaacgctgatcgagccacgggcagcc

SEQ ID NO: 649309 - DNA, 892 bp, Homo sapiens
ctagtgggaactggtaagcacccattctgcaggaaggtggggtgcccatggtgggaactgtgcaggaagattactaagcctctgagatcgttgggctaacagctgcttccctgttgctggagagtcctggcgtctcctgtgcaaaagcatgggtcctaataacaggtggggacgctgtggctgagaatgcgccggcgcttagcatgcgaaggaatttctatcctgtaacgggcgcaggtagcatggtgctttcgttcgctgaacagaaaggtgtggagtactaccctggggcagagtgagtctggggaagcgccctgggccaggagggcactcccctccgaggagctgacacaggcagactggagaagctgctgcaagtgacgggcagacaggtaatggcaagcgggtgttcgactggatagaggacatactctgagtgagccagcagatagtatccaacaccgtgagttacggagcccgtcatgacggatgtcgtgctatgctgcaatttattttgagactcccctccgagctggacgttgcagtgctgaaaagcgcgagcgaagctgctgcagaaatacctgtgtgacgagcagaaggagctacaggcgctctacgccctccaggccttgtagtgaccttagaacaggctcccaacctgctgcggatgttctttgacgcactgtatgaccgaggacgtggtgaaaggaggatgccttctacagttgggagagtagcaagggaccccggttgagcagcagggcagggggttgggccttaatctgtcacagcttcttcagtgctcgggcagcaaagagagattgacacaactgaggggtggggggcgggaactggagccctgggaacagatggccgggtacgctgaacgcgg

SEQ ID NO: 649310 - DNA, 256 bp, Homo sapiens
cagggagacaattcctggagattcgtgtcatgactgtttctctctccaaacctgtttctgctggattgcgcaggtctgatgaccctggagctcttggcttccatacgtgtctcagacagcatactcttcccctttaaatattaaacctcagcatcgtctttggagaaaggcacagaccacagattgtttatatgattctgtgttttttccttccaacttgtccttaatcttggcaaaataaacttctaaattgaaa

SEQ ID NO: 649311 - DNA, 389 bp, Homo sapiens
aatgtttgtaaatcatacacctgacaagggatttttatccagacaactcaacaataaaaagccaaataacccaatttaaaaatgggcaaaggattcgcatagacatttctccaaagaagatacacaagtggctaacaagtacataaaaaaaagctcaacattaattaattaataaccgacatcattggttattagggaaatgctcatcaaaaccacaatgaaataccactttataccaatgaaaatgactaatatcaaaaagacaaacagggccaaccatggtggctcacgcctgtaatcccagcactttaggaagtggaggccggcagattgcttgagtccaggagttcaagatcagcctgagcaacacagtgagcccctgtctctac

SEQ ID NO: 649312 - DNA, 320 bp, Homo sapiens
tgagtcggtccctcgttattcatcggcaccactaccaacaccaccacctaccagcaccaccaccagcacactaacacctgcacaccaacatccacaccaacacctgcacaccaacacccacaccgggtgccgatgaatagcgagctattcatcggcacccatgtccatgtcctcctactcggtggtcagcacgggctccctgcaatgtgaagaccttgcagacgacacggttgccgatgaaagcgaggtgccgatgaatagcgagaggtgccgatgaatagcgaggtgccgatgaatagcgaggtgccgataaatagcga

SEQ ID NO: 649313 - DNA, 404 bp, Homo sapiens
  misc_feature (19)..(19): n is a, c, g, or t
  misc_feature (24)..(24): n is a, c, g, or t
  misc_feature (61)..(61): n is a, c, g, or t
  misc_feature (66)..(66): n is a, c, g, or t
  misc_feature (194)..(194): n is a, c, g, or t
  misc_feature (209)..(209): n is a, c, g, or t
  misc_feature (372)..(372): n is a, c, g, or t
aaccctggttaccctagtnggttnaaacctgataatatcccttcctggaaaagtcctcccnaatgnaaaagtaaaaatcctacagcccttttaaatggatatgaaaatggaggaaaataggcccgggtgccaggggcttacgccttgtaatccccagcactttgggaggcctcaggtgagagcatcgcttgagncccaggagtttgagnccagtccagacaacatagtgaggccccatctctacaaaaacttgaaaaaaaaaattagctagcatggtggcgtacatctgtagttccagctactctggcagctgaggtgggaggatcagttgaccctgggaggtggaagctgcaatgtgccatgatcacaccnccacactccaaactgggtgacagagtgagact

SEQ ID NO: 649314 - DNA, 236 bp, Homo sapiens
aaaacaacggcacgtgatatgaaattagcagcaaccatgatagcagaatgagttaacacaagacacttgtttcaaaaagggaaacaagtacagagactgattaactggaaggtgccgatgaatagcgaggtgccgatgaatagcgaggtgccgatgaatagcgaggtgccgatgaatagcgaggtgccgatgaatagcgaggtgccgatgaatagcgaggtgccgataaatagcga

SEQ ID NO: 649315 - DNA, 684 bp, Homo sapiens
  misc_feature (14)..(14): n is a, c, g, or t
  misc_feature (37)..(37): n is a, c, g, or t
  misc_feature (172)..(172): n is a, c, g, or t
  misc_feature (341)..(341): n is a, c, g, or t
  misc_feature (468)..(468): n is a, c, g, or t
  misc_feature (517)..(517): n is a, c, g, or t
  misc_feature (651)..(651): n is a, c, g, or t
  misc_feature (659)..(659): n is a, c, g, or t
atccccaaaaatgngactcaggcgtagttttttttantagcgcaagtggtcaaaagtggtcaaaatggtcctcattcctcgatggtctcttttttaccagtctcttgcccttcaaacagaggataccgggcctccacatcagcccatgtgatgttgccatgggctaggtctnggactatgctgggcagctcagagatctctgctcttatctgccgcattgagtcacggtcccctcagagttgcagtgtggggggtcttgttcactgtgtcaaagtcaatggtgacaccaaaagccacgccaatctcatcagtcctggcatagcgccttccgattgacccanaggaaatcgtctactttgtgagatactcccatgcctggtccagggcttcccgataattcccttgacaaatggcatgaactccctggtttttggctccagtgggaaggaacggaaacattttgaaatnggaaccaacttacagcaagggaaaactgaaaaatgttcctctgttccanctccttcctccgtacatggaatgttatgtttccaaatacccgtatacatgatcctaccccaagccgaaagaaaggttccaattacattccggaacaacttccttcccacatataatgttttcctggaatccccntcccattngatcatgttccttttggttaactga

SEQ ID NO: 649316 - DNA, 984 bp, Homo sapiens
  misc_feature (652)..(652): n is a, c, g, or t
  misc_feature (655)..(657): n is a, c, g, or t
  misc_feature (659)..(659): n is a, c, g, or t
  misc_feature (667)..(667): n is a, c, g, or t
  misc_feature (674)..(674): n is a, c, g, or t
  misc_feature (692)..(693): n is a, c, g, or t
ggtctacgctgtgcgcggcggacgtcggaggcagcggggagcggagcggggccgccggggcctctccagtggccgcagcggcagcagttgggccccccgccccggccggcggaccgaagaacgcaggaagtggggccgggggtgaccccgccccctggccggcctgcatgccatgaacctccaacgtggagaacctacccccgcagatcatccgccgtggtgtacaaggacggtgacgacactgaccgagacccacacccgatggcatcaaggtctttcccaacgaggaggacctcaccgactccaggtcaccatcgagggccctgaggggacccccatatgctggaggtctgttccgcatgaaactccgtgctggggaaggacttccctgcttccccaccccaagggctacttcctgaccaagatcttccacccgaacgttgggcgccaaattggcgaagatctgcgtcaaccgttgctcaagagggaactggaccggctgagtctgggctatccggacacgtactgctgacccatccatgtgcctgcttgtatccaccttaaccccgagttctgcactcaacgaggcaggcgggccggctgctctttggagaacctacgaggagtatgcagctcgggccgtctgctcacngannntncacggggncgccggnggcccagcggcagggccnnaagccggtgtgcctgccagtggtataagtttctccacgacctgggccagggggcccgaagaggcttgagggtccacctggcgaaacttggtggaacgcaaaagagttggggcagacaagagggaaagcggcgccgggggagagtgggccgtcctcttcccggacgccgttttttgctccctcaactgtttctagtttaatataggggcggcggaagggcgggcacggtgctttactggcgggaaaaaaaaaaaagcggcgctgccacgcctatgctggttaatcgacacgg

SEQ ID NO: 649317 - DNA, 223 bp, Homo sapiens
gcccttatcggcactcgctatcatcggcactcgctatcatcggcacattagctctagaggtccatgcatacttaatattatacttgaattcaatacgggtgccgatgaatagcgaggtgccgatgaatagcgaggtgccgatgaatagcgaggtgccgatgaatagcgaggtgccgatgaatagcgaggtgccgatgaatagcgaggtgccgataaatagcga

SEQ ID NO: 649318 - DNA, 317 bp, Homo sapiens
  misc_feature (160)..(160): n is a, c, g, or t
  misc_feature (193)..(193): n is a, c, g, or t
  misc_feature (202)..(202): n is a, c, g, or t
  misc_feature (273)..(274): n is a, c, g, or t
  misc_feature (292)..(293): n is a, c, g, or t
tcactgccatgtcacaacacatctctcaacttcttgctcctctcaccaaaaaccatcaaatggggagttttggcaccttcaccctggacttccctgccgcctggaaactgctaacatagcttctcgaaactggacaccctgtgggcttcacgggagcgcnctttgaacgcccctgagttcttgtacagacccnccggccacnttctctcgctaccctctcactaggcacgcttctctcctctagtgaatacacgcttgcacgctctcgcattnnctggacttgtatccactnnccttgtggcacatggcgcccgtga

SEQ ID NO: 649319 - DNA, 399 bp, Homo sapiens
  misc_feature (81)..(82): n is a, c, g, or t
  misc_feature (153)..(153): n is a, c, g, or t
  misc_feature (166)..(166): n is a, c, g, or t
  misc_feature (181)..(181): n is a, c, g, or t
  misc_feature (198)..(198): n is a, c, g, or t
  misc_feature (227)..(227): n is a, c, g, or t
  misc_feature (259)..(259): n is a, c, g, or t
  misc_feature (367)..(367): n is a, c, g, or t
  misc_feature (394)..(394): n is a, c, g, or t
agagtccccggatctgttcagcctccgaccgccctccgatttctctccgcttgcaacctcgggaccatcttctcggccatnnctgcttctgggacctgccagcaccgtttttgtggttagctcttcttgccaaccaaccatgagctccagatncgtcagaattatncaccgacgtggtagnagttgaaaactgcagtnccagtgccacggaagtgtgaattggagcntgcagataatgctcagccatcctcccatcttnactttagccagctgcagggcgggaaggcaaggaaagctgcttccctggaagtgtatcactttctccggcagctgggaagtctagaaccagccagactgggttaagggnttgtcaagcaatagcagaggtttcacncggca

SEQ ID NO: 649320 - DNA, 353 bp, Homo sapiens
ccgttgtcagtgaaaatccgtttggtaatggttaatatattggtatatataggagacggagtgttgctctgtcactcagtctgcagtacagtggcgccatcttggctcactggcaacctccgcctcccaggttcaagcgattctcgtgccttagccactcatgtagctgggataacaggcgcctgccaccacgcccagctaattatggtatataagtagagacggggtctcaccagtgttggccagtgctgatcttgaactcctgacctcaagtgatccacccgcttcagcctcccaaagtgctgggattacaggcatgagccattgacaagggcctcaccacttgacaacga

SEQ ID NO: 649321 - DNA, 1203 bp, Homo sapiens
gttctagtgctgcaggcagctcgaggacccgcggccccgcccctgtgctctgtgcctgtgcatgatatgcagatgtgcagcatgtgcctgtgcctgtgtgtgtgtgtgcactgtttgcttgtaactcatgttgtgcccagtggtgacttgttactgtgtgtgacatgttgcaccattgtgatgtgtgctgtgtgcccctgcacgtggttgacaaccacttgccttgcacgttgtgccttgatctgagtacgcatccgtgcgtcactacatcacatatcaggtgtgctgcttaccttgccctcattgtgttgacagcactcatcgcacgaccacttgccgctccaacactacgactgctgacaccactcactcaccaactgccacggacctaacgccaccaaacgctgcgcttccacaaacccccagcagcctgctccacacgaggcaccgacgatctcccacgcgcgcgcccccgggcgcactcgcgacccactccccacgcccctgccctgctcccctacgcgccacacgcactccactgctacccctctcctctccgcgcgcgcgccctcacgcacgaccacgcccatggccgcgccccacttctcaccaacacccacctgcgccccctctccacacccgcccctccccacctaccactacggccaccccacctgccccactggcgcaccctcctctactcctgcgtaccacaccctgcgggcccacgccccctttgcccacctgccatcgcgcaccgcgcgccccctctcccaaccctccactggctccacccacacttggtccttgctcccgcccccgccttccacccgactttcgctactagactaccctctcccgcgacgctgtgcgcccgcattggccccagaaaccactggccctccgtccggcgcggcaccacgctatccccccacttttcaccaccaccacacccttgccacccactcctctcaccccttcgccacacccccgcccaactctcccgcaacgcgttcctccctggcacctaccccccgatccacctttggacctgtggaccttttgcggcctttggcgcccccttgggctcgcccccgccagcgagcttccccagcgttcggcctatgcccccttgcgaaggtgtctcggcctgccccctgccaacgccaccaccacttcccgtcgccccctctactcgcgcta

SEQ ID NO: 649322 - DNA, 196 bp, Homo sapiens
catgcttacatcgggatgtctgatccaacaatagtgtttacgacctcgatgttggatcaggacataccgaggtgccgatgaatagcgaggtgccgatgaatagcgaggtgccgatgaatagcgaggtgccgatgaatagcgaggtgccgatgaatagcgaggtgccgatgaatagcgaggtgccgataaatagcga

SEQ ID NO: 649323 - DNA, 152 bp, Homo sapiens
gagatctatggtagcatgagctcatgcatgaagcctctccactgattagctactcgtaacaacggcacaaggctggagagaggctaaatgtactttacctatggcatgtcctcacacagatctcctgacaaagggatatatacagtaaaaca

SEQ ID NO: 649324 - DNA, 220 bp, Homo sapiens
  misc_feature (10)..(10): n is a, c, g, or t
  misc_feature (37)..(37): n is a, c, g, or t
  misc_feature (95)..(95): n is a, c, g, or t
  misc_feature (129)..(129): n is a, c, g, or t
  misc_feature (190)..(190): n is a, c, g, or t
  misc_feature (202)..(202): n is a, c, g, or t
gttgtgaggnttcaaagggatgaagagtacagcagtncctagcagatagtaaatggtcaataaatgggtactgtggcaaggtggctctcgcctgnaatcccagcattttgggaggctgaggggggaggntcccttgagcccaggagttcgagaccagcctggggaacatggtgagacctcatatctacanaaattacaaaanttagctgggtttacaggt

SEQ ID NO: 649325 - DNA, 204 bp, Homo sapiens
attcgcggccgcgtcgacatcagtgaagcttcggattactactttgtcaaaatgagtgatatctgtctatcatgcagtaaatctgcgtttggccggagtctgtgccacggacacatggcgaatgtgtctatcttctgaatctctggcttcaccaaagtcatttgtggccctcaatgattgagtgaattgactccttagaccgac

SEQ ID NO: 649326 - DNA, 189 bp, Homo sapiens
ctattgatcggcacacacatccttgttaagcgtcagctatggggcaaacccagcctaaaacagtaacattctacagcttggtacccagtagacacttggtgccgatgaatagcgaggtgccgatgaatagcgagaggtgccgatgaatagcgaggtgccgatgaatagcgaggtgccgataaatagcga

SEQ ID NO: 649327 - DNA, 194 bp, Homo sapiens
gcggcccggtgtgttgggagtagagagaaaaagtgactgccttataacctacaggttgtgaaacctggggtgccgatgaatagcgaggtgccgatgaatagcgaggtgccgatgaatagcgaggtgccgatgaatagcgaggtgccgatgaatagcgaggtgccgatgaatagcgaggtgccgataaatagcga

SEQ ID NO: 649328 - DNA, 212 bp, Homo sapiens
ctcgctattcatcggcacctcgctattcatcggcacttcgctattcatcggcacctcgctattcatcggcaccgggattcggcgagtgctgctgccgggggggctgtaacactcggggggggtgccgatgaatagcgaggtgccgatgaatagcgaggtgccgatgaatagcgaggtgccgatgaatagcggtgccgatgaatagcgagtgt

SEQ ID NO: 649329 - DNA, 920 bp, Homo sapiens
gcatacaaagttatgtacactatggtgcttaatagagtcgagccgtagctcagtgtgctaacctttcaaagggtcgtgaccttcaaattgtgctgtatggtaaatgtattttgtttaaagatatggtgtgagttagactagcattaggttaaagaagtgctaaaggcctgggtttggtttcaaaagttcatgtaatattcctgataaaaatcagaaatatgagccataagagtctggattatagataaaaccatatgcatattcatatattaagagctcatgtcatcagcaagatctgggaatagaaaatagtgagagtagctattttgaaagatatcattctccagtaaggttatacactctaatatgcgttggatggctatgcaccaaaactagtatcgcgtgtatctctttaattcttgtgacatgtagatataactatatatatactatcacctgtgccataagcagatgcgaagagcagctcaggtgagataagattgctagaattaccatctgttgcctagcccgccacagatggggggcttcacaaacatgtgaactgatgcacgccatggactcagtctaccaagatgggtatccaaccgaagacattcgaggagctagcagatcggagaggtgtccctccaaaggagccgattggacagttcgcgtactcggaagatagctctacgcactggacatcctgctcatggaccggtggcgtcccggacaaatggcggaccaggtattgaggcacagaggtctaattgcttgcgcaaacggtccaagacatgaacggtaccgctgggcccatgacagctggccacaaaccggtcgcgcgcacgcacaaaacgcgggcaaaacaacggccgccccacacgaaaccggaggaccaacccaccaaatcaagcacacga

SEQ ID NO: 649330 - DNA, 161 bp, Homo sapiens
catcggcacccagaccccagaaaaggtgttggttgatatagtcagcaggacggtgccgatgaatagcgaggtgccgatgaatagcgaggtgccgatgaatagcgagaggtgccgatgaatagcgaggtgccgatgaatagcgaggtgccgataaatagcga

SEQ ID NO: 649331 - DNA, 260 bp, Homo sapiens
agcagcaagacagtaatcttgagcataggtctcaataggtgcttctatcagtaaaccaattgtaaacagatgtgctgtcatccaggcttgtgtcgtcatttatagcacagaaacataatagatttaacaaaattcttaagggccttataatttttggaattgcaaataaacactggctcatataagtcagctgattagtcccaaacaagagagtcagcctgtcagttgaagctgtgaagataggcattgacatctctgca

SEQ ID NO: 649332 - DNA, 280 bp, Homo sapiens
gagcggtggagcggcctccgccacgaggggcaatggtcgccggggcgaggcccgggtcagcgccgggagcttcgcttaatggctgcggttcggtttccggacgtgcggcgcccctccactgagtgttttttcgccccacaccccctgcctctgggctgcgggtccgtgcccctcagtccgggcgtcctctggcgccggctgtatccgacccttgttccccgccaggccggctcgcgcctatgggccattccagggcccggcccttggtgggcgatgtaca

SEQ ID NO: 649333 - DNA, 883 bp, Homo sapiens
ggagaaggttgcgcagacagtgtgcccggagtctagaggcgcagaagaggaagccatcgcctggccccggtctctggaccttgttctcgctcgggagcggaaacagcggcagcagagaactgttttactcatggacaaacaaaactcacagatgaatgcttctcacccggaaacaaacttgccagtggtgtatcctcctcagtatccaccgacaggtattccaagggacctccaggatatacgtgggctaccctggggccccaggtcatgttacccaccccccacagcgcggcattcaggtccctgccccagttgctttcctgtcccaaatcagccagtgtataatcagccagtatataatcagccagttgtggagctgcaggggtccccatggtatgccagcgccaaagcctccattaaactgtccacctgggattagaatatttacgtcaggtaatttcaaagacacaaaaaatactcattaaaaaagagaactgtgcttccagttgtgtttacccgagattagcaaatgactaattcaccaaatgtctgaaattagcaaaactgtatttcgggctaaacaagattactctaatttcttactaggtccggtcaaatattaaagcaaaatacagtggcttagaaaaatggggattttcctgtgatctttaatacactctatgtgatatggcacatagcacacttttatttagccctgtgtctgccttgttgatgccgaacatgttactcttaatcttgggaacgggagaaaggcccttttcacacaaacaacgccccaggtttactcccgggggagcaaagcgcaaaggtttccccagggcggggggggccacaacacgcttggaaaaatttgtttggcccg

SEQ ID NO: 649334 - DNA, 132 bp, Homo sapiens
tttaagttgagtagtaggaatgcggtagtagttaggataatataaatagttggtgccgatgaatagcgaggtgccgatgaatagcgaagcgaggtgccgatgaatagcgaggtgccgatgaatagcgagtgt

SEQ ID NO: 649335 - DNA, 296 bp, Homo sapiens
cggcgtggcctgagccccttctccagggcaggtagaaaggaaaacttggtctctgcctcgggaagcaggaggcgggctagaagcacgtccctccccacctgcccagagctccaggccagaacagacattcctgaggccaatgtcaccaaagttagattgaatgtttactactctttctttttccttttacccttattgactggatgacctcttgcacctggattcctttccataaaccacgttaaagtatggcccgacccatttaagaaaaacaaccatcacgacgcgaggctgca

SEQ ID NO: 649336 - DNA, 2536 bp, Homo sapiens
cataattttctatctatggtacccttggcttctgcctggcttctgaggcttagggaagggaggaagggacctacaaagagccagggtacacctgcctcttgtgctgagggcacgtgccagcttctctgccagtaagccttttgctagctaacatttcccaccctcccaaggcccctaacctgccctcccctctccactatgttagtatatctacctctgtttctgactctgaggaagggtcaggccacacggagggaacagtagtgggtaccagcctcccctctgctgtccagtccaccacatcaatctcttcctcttcagagctggcaggaagtgagcctagtagttcagagtgaccagatacctccttgcctgccttgggagaagggtataataactcatctgtagtcaaggagacttccagcccagtctccacccagtttgagcagggaggtgagaggtccccataagacctctggggagtatcaagggagctgacatggagaagtttgtcttcctgaccatccagtggctgggagctggtaatttcaaggtctggtgtccaacggcctcctactgaaagcacttcactcacctcagagggcatgacaagggggctaaggagctcagttggccctctgttctcaccagcaggttccttttccaattctgtgagctccctgggccagagttccatgtctggtagacaccattcttccccttcaatccagttctttcctgtttctgtcagatggtaggtaggcgttctgcagccctcagcccctggactctccagagaccctataggtggttcaatgtctgagccacagagcatgaagtccaggatctcctccagctcactggtggcagcagcacttgtgattcggtactcctcagcctcacagggctgctccagcagagctgtgtcaaatgcatagggttctctgcagtcaatagccaacataggttccttctctaccagttctggactggactcaaactctgacttcaccactgggtggtctggggagtggctagcagagaccagaatgtcttgtagcttagtgcacatgggggagtcctgacacagttctgttctagtaggtgacatttcctgctcattactggagaatggctgagttcctgaaggctcttggaagtctcctccgggatctgggatctgggggctatcttgagtgtttttgagaggagtctcttgtaccacttcccagcaagtcccattgacaatcttcctaagtttaactctcccaacctgcccctcctctgcagagtctgagttaggtgccctgacttcagggctccgcttcctgctcccacctgtctttcccagaccagatgggtttggggtgctctgcagaggactagctctgcctggttttggcttgtcctctggtgtttctttatttacactcctctgccgccaaagacgccggccaggggttgcaggcactgagctagatccacttaaaatgctggaaggctttgatgtacagataccaggagatggctttgagcgactgagcctgatctttctgggcaacaggtgtttgtccacagaggggtacaagctgggtggggagagcactgtaggatcaagggcagtgtcattcttgttctctctaggctcttgactatggcttgatggtgaagagtttttttttcttgtggagttgggcaggctctggccttcctcttgagcagaagagtgccagacaaattgtctgcattctgtcggttgttttcctgagggaatggaggaggcgaccgttgttatcgagctggcctctcccgctccaggcgctctgtgaagaaggggctacaagctgacaggatgcagcagtgagctggaactgcctcacctgaagggaaacccaaatacttttgttatcaggtagactggcatgttcatgggctaagcatagacattactacccaaatgtactgccccttcttttattttccttccatgggacttcaagtaaaagaaaaaaattattcttctgcctgcctggaaccttctgccattaccttttgcctagctatttttttttttttttttgagacagtctcgcttggttgcccaggctggagtgcagtggtgcaatctcagctcactgcaacctctgcctcccgggttcaagcaattctcctgtcttagcctcccgagtagctgggattacaggcgcatgctgccacacccggctaatttttgtatttttagtagagacggggtttcaccttgttggtcaggccggtctcctgacctcaggtgatccacccgcctcggcctcccagagtgctgagattacaggcgtgagccaccgtgtccagcccgctaccttgtttctttattctcaaaatctacctttgtcatcacttccttcagaaagcctcctggggctgagtgcagtgccacatgcttgaaatcccaactgttaggtaggctgaagcaggagaattgcttgagtccagggctttgaggctagcctggggaacacagttataccttgtctcc

SEQ ID NO: 649337 - DNA, 137 bp, Homo sapiens
  misc_feature (18)..(20): n is a, c, g, or t
  misc_feature (25)..(25): n is a, c, g, or t
  misc_feature (27)..(27): n is a, c, g, or t
  misc_feature (30)..(30): n is a, c, g, or t
  misc_feature (32)..(33): n is a, c, g, or t
tcgctattcatcggcacnnnggacngnatngnnagattcatcggcacttcgcgtattcagcgaggtgccgatgaatagcgagaggtgccgatgaatagcgaggtgccgatgaatagcgaggtgccgataaatagcga

SEQ ID NO: 649338 - DNA, 376 bp, Homo sapiens
acgggagagagtagtagagcttaggggagattccccctagggaccctaggcgtatccacggcatactactagggatcagtagtacggaacctcacccgccctgaggtagtagttagtagggagtaggataggagcgggccaggcagcccctacaagaaggagcccaggacctcttgccatctgggcaatctcctaagctgggcccaagccccacagctgtattctacttactaactggttcttcagtgaaatatcccctgagggaccttgggtgggagtttttggcacagagcaggcctgccaggagaaccatgcgattggtcaaaactggggccttgcccttagtggggagaaagcccagtccctggcctaccat

SEQ ID NO: 649339 - DNA, 138 bp, Homo sapiens
gattttttaccccccccccaaataaaaaaaaaaagtattttaaaagggcgaaattagaaaaaattttttgaaaaaaccttttggcgggcaatttagattttatagggtaccccgcaaggggggaaaaaaaaaagatgg

SEQ ID NO: 649340 - DNA, 703 bp, Homo sapiens
  misc_feature (25)..(25): n is a, c, g, or t
  misc_feature (479)..(479): n is a, c, g, or t
agcggaagtgtcggcgccgccactngtccggccacagcctaacgctcttcgctgtcgtttgcggtctcgcgcagggcggccccggttctggtgtttggcgtcggaattaaacaaccaccatgtcgagcaaaaaggcaaagaccaagaccaccaagaagcgccctcagcgtgcaacatccaatgtgtttgccatgtttgaccagtcacagattcaggagttcaaagaggccttcaacatgattgatcagaacagagatggcttcatcgacaaggaagatttgcatgatatgcttgcttctctagggaagaatcccactgatgcataccttgatgccatgatgaatgaggccccagggcccatcaatttcaccatgttcctgaccatgtctggtgagacgttacatggcacagatcctgaagatgtcatcagaaacgcctttgcttgctttgatgaagaagcaacaggcaccattcaggangattacctaagagagctgctgacaaaccatgggggatcggttctacagatgaggaagtggatgagctgtacagagaagcacctattgaccacacggtgaatttcaattagcatcagcttacacccatcttgaagccatgagccgccatagatgcgtgaacgaactttagcttttttcaggtacatcgacttactatgtttaatttttagacgcttcctcccctt

SEQ ID NO: 649341 - DNA, 196 bp, Homo sapiens
gtctacagctcccagcgtcagcgacacagaagacgggtgatttctgcatttccatctgaggtgcaacaacgagagtgagtggtcccagatccacgagaacatcatccgaaagtccagtgccaagtactctgcccccagcgccagccatggtcttatcatttctctgcagcttcttcgtggagacatggaacagatt

SEQ ID NO: 649342 - DNA, 828 bp, Homo sapiens
  misc_feature (25)..(25): n is a, c, g, or t
  misc_feature (479)..(479): n is a, c, g, or t
agcggaagtgtcggcgccgccactngtccggccacagcctaacgctcttcgctgtcgtttgcggtctcgcgcagggcggccccggttctggtgtttggcgtcggaattaaacaaccaccatgtcgagcaaaaaggcaaagaccaagaccaccaagaagcgccctcagcgtgcaacatccaatgtgtttgccatgtttgaccagtcacagattcaggagttcaaagaggccttcaacatgattgatcagaacagagatggcttcatcgacaaggaagatttgcatgatatgcttgcttctctagggaagaatcccactgatgcataccttgatgccatgatgaatgaggccccagggcccatcaatttcaccatgttcctgaccatgtctggtgagacgttacatggcacagatcctgaagatgtcatcagaaacgcctttgcttgctttgatgaagaagcaacaggcaccattcaggangattacctaagagagctgctgacaaaccatgggggatcggttctacagatgaggaagtggatgagctgtacagagaagcacctattgagaagaaaggggaagtttcaattacatcgagttcacactgcatcctgaaacatggagccaaaagacaaagatgacttgaaagaactttagtaaaatcttccagttacattgtcttactctctttgacattctcagaacacttcccccagcctcatagaaacctgttgcatgcaacgttagtttcacagctttgcctctgcttttgatgtatctattccagacctttctgacacttagcacttgtataatcaagactggggat

SEQ ID NO: 649343 - DNA, 492 bp, Homo sapiens
tgcagtagagatgcagttccttcagggcaggggctcatctaattaatgttgtatctcaaggctttgcatagccttggcatacagctggcattcattaaatattcaaataatgaatagctaattagacctttctcatccttttcctttgtctttctaccttctctctcagttttctttccccaccctgttcctcccacctctgtatcttttctacccatgttctcttctctttctgatcctttatcatttctcctttgaaatgggaaaagagtaaaattccccagagaagattgtgtgtgtgagcaataacaaaagtaagcgagtgggagagagaaaagaagtgagtataaggcaaaaagggtatgagcagaattctgtggctctccagaaataagagaggaacatagcatgtattctgtgccactgatgggacaggaagtttgacagtttataaaactcggtccaaattaccccaagtactcattagaaata

SEQ ID NO: 649344 - DNA, 2883 bp, Homo sapiens
  misc_feature (25)..(25): n is a, c, g, or t
agcggaagtgtcggcgccgccactngtccggccacagcctaacgctcttcgctgtcgtttgcggtctcgcgcagggcggccccggttctggtgtttggcgtcggaattaaacaaccaccatgtcgagcaaaaaggcaaagaccaagaccaccaagaagcgccctcagcgtgcaacatccaatgtgtttgccatgtttgaccagtcacagattcaggagttcaaagaggccttcaacatgattgatcagaacagagatggcttcatcgacaaggaagatttgcatgatatgcttgcttctctagggaagaatcccactgatgcataccttgatgccatgatgaatgaggccccagggccgattggtcttttttgacagggtgctgattggtgcatttacaatccctgagctagacactgagtgctgattggtgtatttataaaccttgagctagacacagagtgctgattggtgtgtttacaaaccattagctagacacaagagtgctgattggtgtatttacagtcccttagctagacataaatgttctccaagtccccatcagattagctaaatacagagcactaaatgttgtatttacaaaccttgagctagacacagagtgctgattggtgtatttacaaaccttagctagacacagagtgctgattggagtatttacaaccccttagctagagataaatgttctccaagtcctcactagactcaggagcccaactggcttcacctagtggatcctgcaccagggccgcaggcggagctgcctgccagtcgtgcaccgtgagcccacactcctcagcctttgggcggtcaatgggactgggcgccgcggagcagggggcggcgcttgtcggggaggctcaggccgcgcaggagcccatggcgaaggggaggctcaggcatggtgggctgcagatcccgcgccctgccccatggggaggcagctgaggcccagcaagaatttgagcgcagtgctggtgggctggcactgctgggggaaccggcacaccctccgcagctgctggcctgggtgctaagcccctcactgcctggggccagcagcgctggctggcagctccgagtgtggggcctgccgagcccacgcccacccagaactcgtgctggcccgtgagcaccacgcacagccccagttcctgcctgtgcctctccctccacacctccccacaagcagagggagccggctcaggccttggccagcccagagaggggctcccatggtgcagcagtgagctgaagggctcctcaagcagggccagagtgggcgccaaggccaaggaggtgctgagagtgagcgagggctgcaagggctgccagcacgccatcacctttcactgccactgacagtacctgggaaactgcagagccccacacacatgtgcactgactgtaacagcaggaatacagccagcacctgcagccctggctggtgtccacaggactgagtttcagtcccatagccttgacttacctgtgatgttggacacgttggtctcctccagccttgttttctccatctgtgaactgggccaacgctcctctgctgtgagctgatgcgaagccacctcagataacctctgtgctcagtgctctgtgccatggccgtcgcccgtcgctttactgaggctattgcagaagtcagcgtgggctctgggcttccgcaccaaggtgcgagatgctcaccccgtggaatgaggttgctctgacagcaggaccatggccgtgctcatgcccagctccgccttcgtgggacaccacgcatgggcactccctctggttggggaaaaactgtcatactggattgtgttccttttttgccttaaattattagctgccatttttgctcatcaaaaaagtggcattaggcacttccacatggatcgaagggccctgtcactagtgggttcctgctcagagcgtcttgtgtgatgtttcatcttgatgctttgacaggttaacaaccttctcatcaggatcattgttaggtccttcaggtgtggtcctggggaccggtgatgagggacacccccattgcatctcagctacggctcttggaccatgggcagcggtgctgaaatgacaatcctggagccacagccttcctccgtccacagccagtgtgctcacggacgacacaagtaattgtggacaccactttgccaccacgactgtttatgctgcagccccaggggccacagcagcagctggtctctcctcaatgatggttcagcgccgagtgcattggcggcacggtccatttctctgccgagcgcttgtgttgtgcctggggtctgagccacagcggcaggtggatgggagagattccctcggaacaggtgtctggagcaggtgggttgcggggccactgtcaagcacgtggggactgtgcctgtggcttcatccctgcgtggactcagtcctccccttgttttaagtggtccctgggtcctttgtgcacatcagtaattgcagaggcgggacgcgcactctctgagcggagcagcttggctgggcttgtccctttaatttgcgatgcatcacaacaaatgattgtaatcagtcaccgcccgacggcggcctgctcttccatgaccacccttcagtgagccggcagctgagcgacacggacaaagccgcctggctcagggttggggaaaacactctttagtcagtagagttaaaccacctgatttattccatattgtggaaggtcagtctgatttaaggaaatgtcagtttgatagaatgttttgaaagaaatgcagctcataaatactgcgctgaaagctcagccttgatacaagctcacttggtaaaataacttaataaaggaaactttcgattc

SEQ ID NO: 649345 - DNA, 605 bp, Homo sapiens
gggtggcacacacctgtaatcccaggtactcaggagactgaggcagtagaatcacttgaacctggaagatggaggttgcagtgagccaagatcacaccactgcactccagcatgggtgacagagtgagactccgtctcaaaaataataataataatagagttgtagctgggtgcagtggctcaagcctgtaatgccagcacttcagagcctgaggtgggaggattgcttgagccctggagtttgagaccagcctggaccacatggtagaccccatccctacaaaaaaaaaaaagtcgggtgtggtggcacacgccttgtagtcccagttactcaaagaggctgaagtgggaggatccctagcccaggaggtcaaggctgcagttgagccatgatggcaccactgcaatcttggggtgacaaagactctgtttaaaaaaaaaaaaaggtgtcaggggttaaaagtgatcctcaagaggtgctattctccagtaggaagaaacttttattttattaattgagattggggagtatattaatgttttacgttgatagagtatgtgggagataatgacctaggtggatttaatgtgaaatgtgtaaatgc

SEQ ID NO: 649346 - DNA, 3380 bp, Homo sapiens
  misc_feature (25)..(25): n is a, c, g, or t
  misc_feature (198)..(198): n is a, c, g, or t
  misc_feature (206)..(206): n is a, c, g, or t
  misc_feature (532)..(532): n is a, c, g, or t
agcggaagtgtcggcgccgccactngtccggccacagcctaacgctcttcgctgtcgtttgcggtctcgcgcagggcggccccggttctggtgtttggcgtcgggtgagtcgcgctcgactctgctcgcgagacccctcgggccgccgtctccgtacccccgcgcccccctcccgtcgcgcgcctgcggccggacccngcccaggncggcaggcggcggcaggacctgtcagactggctgagaaggaggcgcggggccggaggtggagggaggagggttgctggcgaggccctggcccggacgtccaggtgccgggaggctccaggcgatggagccggtctggggagacgccctgctggagaagtggccgggtcccggccgtgcgtgggccggccctgcgccacctgggtgacctcagacacctgggccttggacggccggctgcccggcggcaacgcctgccctcccggcgccgcggcgggtctggcggtggattggggccgacccgggcgtgttcgtgtggagcacctgncctgtgcccaacactatcctagatgctttggagggtggaggagcctcctgttgcacggtcttgcctaagaattaaacaaccaccatgtcgagcaaaaaggcaaagaccaagaccaccaagaagcgccctcagcgtgcaacatccaatgtgtttgccatgtttgaccagtcacagattcaggagttcaaagaggccttcaacatgattgatcagaacagagatggcttcatcgacaaggaagatttgcatgatatgcttgcttctctagggaagaatcccactgatgcataccttgatgccatgatgaatgaggccccagggccgattggtcttttttgacagggtgctgattggtgcatttacaatccctgagctagacactgagtgctgattggtgtatttataaaccttgagctagacacagagtgctgattggtgtgtttacaaaccattagctagacacaagagtgctgattggtgtatttacagtcccttagctagacataaatgttctccaagtccccatcagattagctaaatacagagcactaaatgttgtatttacaaaccttgagctagacacagagtgctgattggtgtatttacaaaccttagctagacacagagtgctgattggagtatttacaaccccttagctagagataaatgttctccaagtcctcactagactcaggagcccaactggcttcacctagtggatcctgcaccagggccgcaggcggagctgcctgccagtcgtgcaccgtgagcccacactcctcagcctttgggcggtcaatgggactgggcgccgcggagcagggggcggcgcttgtcggggaggctcaggccgcgcaggagcccatggcgaaggggaggctcaggcatggtgggctgcagatcccgcgccctgccccatggggaggcagctgaggcccagcaagaatttgagcgcagtgctggtgggctggcactgctgggggaaccggcacaccctccgcagctgctggcctgggtgctaagcccctcactgcctggggccagcagcgctggctggcagctccgagtgtggggcctgccgagcccacgcccacccagaactcgtgctggcccgtgagcaccacgcacagccccagttcctgcctgtgcctctccctccacacctccccacaagcagagggagccggctcaggccttggccagcccagagaggggctcccatggtgcagcagtgagctgaagggctcctcaagcagggccagagtgggcgccaaggccaaggaggtgctgagagtgagcgagggctgcaagggctgccagcacgccatcacctttcactgccactgacagtacctgggaaactgcagagccccacacacatgtgcactgactgtaacagcaggaatacagccagcacctgcagccctggctggtgtccacaggactgagtttcagtcccatagccttgacttacctgtgatgttggacacgttggtctcctccagccttgttttctccatctgtgaactgggccaacgctcctctgctgtgagctgatgcgaagccacctcagataacctctgtgctcagtgctctgtgccatggccgtcgcccgtcgctttactgaggctattgcagaagtcagcgtgggctctgggcttccgcaccaaggtgcgagatgctcaccccgtggaatgaggttgctctgacagcaggaccatggccgtgctcatgcccagctccgccttcgtgggacaccacgcatgggcactccctctggttggggaaaaactgtcatactggattgtgttccttttttgccttaaattattagctgccatttttgctcatcaaaaaagtggcattaggcacttccacatggatcgaagggccctgtcactagtgggttcctgctcagagcgtcttgtgtgatgtttcatcttgatgctttgacaggttaacaaccttctcatcaggatcattgttaggtccttcaggtgtggtcctggggaccggtgatgagggacacccccattgcatctcagctacggctcttggaccatgggcagcggtgctgaaatgacaatcctggagccacagccttcctccgtccacagccagtgtgctcacggacgacacaagtaattgtggacaccactttgccaccacgactgtttatgctgcagccccaggggccacagcagcagctggtctctcctcaatgatggttcagcgccgagtgcattggcggcacggtccatttctctgccgagcgcttgtgttgtgcctggggtctgagccacagcggcaggtggatgggagagattccctcggaacaggtgtctggagcaggtgggttgcggggccactgtcaagcacgtggggactgtgcctgtggcttcatccctgcgtggactcagtcctccccttgttttaagtggtccctgggtcctttgtgcacatcagtaattgcagaggcgggacgcgcactctctgagcggagcagcttggctgggcttgtccctttaatttgcgatgcatcacaacaaatgattgtaatcagtcaccgcccgacggcggcctgctcttccatgaccacccttcagtgagccggcagctgagcgacacggacaaagccgcctggctcagggttggggaaaacactctttagtcagtagagttaaaccacctgatttattccatattgtggaaggtcagtctgatttaaggaaatgtcagtttgatagaatgttttgaaagaaatgcagctcataaatactgcgctgaaagctcagccttgatacaagctcacttggtaaaataacttaataaaggaaactttcgattc

SEQ ID NO: 649347 - DNA, 569 bp, Homo sapiens
gtttacagcactgactttggcttttcttggagaacatggtcaggctcagggccgcgacatttcatggtattggatactccccacattcccgaggaatagtccaagtgtttcaagccgtatcccgccaagtcccgtgattctattcgaatctagctatcccctgtgtaccttgtcattgggagattagacttctatgttgcttttgcaaacccggatattaaagtagacagatttcaagtctcttccgaataggcgttcacccagaattttctcccaacctgaaaggatcgatcaagcctatgggatgatcgcctatgggataattcccactgtgacccgcacctatataccatagtggccaaccctcacatttgtagtatctgtttgtcatatttatccatgatgactctttcattgtgaaaagccctccttccctccctgagagctagtgaaaataaattggatattggccattaaggaaaaccaagcaaggaagggaaatagcgaatcgtcagagaatgttcttgaaggaacaattctttggaccccttttcctcgaggattcacca

SEQ ID NO: 649348 - DNA, 648 bp, Homo sapiens
  misc_feature (25)..(25): n is a, c, g, or t
  misc_feature (424)..(424): n is a, c, g, or t
agcggaagtgtcggcgccgccactngtccggccacagcctaacgctcttcgctgtcgtttgcggtctcgcgcagggcggccccggttctggtgtttggcgtcggaattaaacaaccaccatgtcgagcagtttgccatgtttgaccagtcacagattcaggagttcaaagaggccttcaacatgattgatcagaacagagatggcttcatcgacaaggaagatttgcatgatatgcttgcttctctagggaagaatcccactgatgcataccttgatgccatgatgaatgaggccccagggcccatcaatttcaccatgttcctgaccatgtctggtgagacgttacatggcacagatcctgaagatgtcatcagaaacgcctttgcttgctttgatgaagaagcaacaggcaccattcaggangattacctaagagagctgctgacaaaccatgggggatcggttctacagatgaggaagtggatgagctgtacagagaagcacctattgaccacacggtgaatttcaattagcatcagcttacacccatcttgaagccatgagccgccatagatgcgtgaacgaactttagcttttttcaggtacatcgacttactatgtttaatttttagacgcttcctcccctt

SEQ ID NO: 649349 - DNA, 203 bp, Homo sapiens
tgttatcacataccttagaatgtgcgtgtatttagacccaacaattcagaatagtaggaatttaacccaagtcagatgaagtgatgcaaagtttatatctcatgtggatgtacgtcgcttagccatttatactacagaaaaatagaagctgttcttggtgtttaataatgggaggttaattgtatatccgtatgattaactgt

SEQ ID NO: 649350 - DNA, 342 bp, Homo sapiens
cgggagcgcttacatcctcttcatcatcgctatcttgcatttcatctagcgcagaagctggcaaggagccagcatcaatagccgctctaagagcctgtattttgagactatcctttttagtaggttgttctcgaataacactagccatttcttcatctccagcatgattgtcctcgtccggtaatctgatagcacctgtacctatatcaagatcatctggttttcttctgccccggagtgctttgctttgtgttgctgctcgggatgtagagtatgcgattgctaggaacgtgaagatagctccgactacaatcatacttgtttgagctccctccgctcgtg

SEQ ID NO: 649351 - DNA, 275 bp, Homo sapiens
atcctgattgaggtaattgattacttgcagccacgccgttggaaacaaaatctccaggaatgtctacatctagaaagctccctaggcaattctaacatccaacacagcccagcctagagcagcatagagctttgggaactaactagcccgtgtgacatttaatggccagtttggctctgagccttcccctagagctccctggagcaggaaccgacccacagatccagttctagcacaaagtaagtgatcaagaaacatagcatgcgtgacgatcc

SEQ ID NO: 649352 - DNA, 550 bp, Homo sapiens
  misc_feature (493)..(493): n is a, c, g, or t
  misc_feature (550)..(550): n is a, c, g, or t
gccgctcctgtatatatccgagttacacaaaccgggacctgactacatacattcttgtcaactcacccttatccgcgttcttgtatgaatccctatgtagttaattacaacagcctccacatacctccgggaacatcacacttggcgtgggggacattctattttctctgggtatccagacagtgcttggtgtgcattcgggttcgcggaccctgcaaaaactacagtccacaggctgggagctgctggcttagcctttagttgcctagaaagctacattactgtcagttttggtaaggcagaaaatttgtttaatttaaacctctcatctttttttaagcactcactgaaaatgaccgagacagccagtcgccgttgaggaatcctctgttgtcaacatcgagacccctggttttcgggaaacccaatggcacgtacctcttttcattgttgctttcccctgcataccactgcagtggcgggaggcaccggngtttgcctcaatccttctcttgtaggagcctttgtctttccctttcgtccaatgaan

SEQ ID NO: 649353 - DNA, 391 bp, Homo sapiens
  misc_feature (370)..(370): n is a, c, g, or t
cccgctcactgccatccacgatgtcctctgacagtgtgaggatgtactgtcccttgcagtacgacgtgcagaatgtggactgcagagtgaagatgacatcctccttcttgatgctggtgatttcactaatctcattgatggtgatctgtggcctctccccgctctccgacttcagccccatcaggatctccaggatggtctgggaccagtagcttcgataggataggaggccaaggtctgagaggggcttctcaggggtccctgttttcccttccactttggtgagttcatagcatcccgtctccattgctgtctgagttccaagactgagtttcttcaagcatccacttgtgctaccaggctgagaagntctgaggatgtgaccccatct

SEQ ID NO: 649354 - DNA, 416 bp, Homo sapiens
  misc_feature (180)..(180): n is a, c, g, or t
  misc_feature (183)..(183): n is a, c, g, or t
taaactagtagaagaggataagcataaatcagaggaagaaaaggagaaagaaattaaattactaaaattaaaatatgatgaaaaaataaaaaatataagggaagaagctgagagaaatatatttaaagatgtttttaataggatttggaagatgctttcagaaatatggcactgctctcnctncacactgcgcaacccggcccgctacgttactgtgatttgttaatggatgaattgtattttgtaaagatagttagagaaatacctccttccccttagctttattaaggtatcattgataaataaaaataaaatatgtttaatgtatataatgtgacccccaaatatatatatatatatatatatatacacacatagtgaaataatgaaataaaggtaattaacacatctaaaaa

SEQ ID NO: 649355 - DNA, 737 bp, Homo sapiens
  misc_feature (185)..(187): n is a, c, g, or t
  misc_feature (189)..(190): n is a, c, g, or t
  misc_feature (195)..(195): n is a, c, g, or t
  misc_feature (198)..(198): n is a, c, g, or t
tatagtgtgagtgtatagtccgtgtgggtgacaagtcccacgaggctgtgaagtctttcttcagtcactggatctgcagccctagaatctcgaaatgttgcccattctgtttctttttcttctcttcacttttttttctgacactttacatctttcctcaaactgggtgaaaatttaataatacnnntnngtaanccncaagaaaagagcccgttcaaactgtctacaagagattagaaataattgtaaatgttttcattgctgatgactcagagtaaatccttgttgatagcttagttccccacaaccatgtacatttgggaatgtgctatagtcagacccggccctgattccattcaagactgacctggacaccctttgctgttagtgtagatagacacagactctgagggtcttgcccaagctatgtaaattctttggtggcatggaacatctgagccctaaggatggcagaccttccaggaggttctaaatgctgcctaaaattctgttaagtagggagcttagaaatggggctgtggaacctggaccatggaaaaacagtcattgcatacctgctgagtagaaggtgcacttttagctgcagaaatcctgctttcatgcagtttattataggaatgagaacgtgtaaaaggctctaacagaaggtttcctcccagcctgggaaacatactgagaccctgtttctttttatgttttctgtcatcatagtcacc

SEQ ID NO: 649356 - DNA, 471 bp, Homo sapiens
  misc_feature (132)..(132): n is a, c, g, or t
  misc_feature (214)..(214): n is a, c, g, or t
gccccggcccgcttttgggggttttgtttccttttaaaaaaaaaaaaaaaatttttcgggggggttttttttttggggcggggggttttaaagttccccccccgggggggaaaattttggggtttggttggnttttttcttccgggggggcccccccccttgttcgcggggttccggggcctttccccccccgggggtttttcccccgttttanaaaaaattgggggcccggccccggcccccccccccccccttttttttttttggggggggggggttttgggccccccagtccccccggcggggttttaaaggttttcccgacccccggtttatttttcccttcccccccggggttttgggcggtggggcccaccccgtttttcccccccgggggcccccccctttttttttgggggggggcccttttccgggggggccccccttttttttggggggcccccgggttta

SEQ ID NO: 649357 - DNA, 527 bp, Homo sapiens
ttttgacatttaaaaaatattaatttatttaaaaagaataactcattatatggtaacagaaataatactttcgtggaaaaacaaattttccaaaacaataaagtctattagataagtggcattggttttcattttgaagatctctttaatgtcttggcttaatcacagagctggattcgtttatgtgcttctgcattcagtctgtcgcactattacaggtcacagaacgctggaaactgcagtgtccactccataatgtaaaaaattgtctttgggggcagatctccagagtattacggtgctaacgagtactctggttagggaaggttctgggcttcctgaagaaagccaggtatggaggactcctgctgagtagaaggtgcacttttagctgcagaaatcctgctttcatgcagtttattataggaatgagaacgtgtaaaaggctctaacagaaggtttcctcccagcctgggaaacatactgagaccctgtttctttttatgttttctgtcatcatagtcacc

SEQ ID NO: 649358 - DNA, 951 bp, Homo sapiens
  misc_feature (344)..(344): n is a, c, g, or t
cgatgataaggataagtcatgcgacataccaaacatacgtcgttgttaccactagtctgccaaaatcccatactgagacccgctattaaagggtcttctttatctgcaccgctcccctgtggtgccgtcccagaaatattctctgtgaattgccatataaaaaggctttattaataatactatatatttcttctatgagactagatcacaccccccctgtaattcttatcggttcttccttgccctattgccccaggctatccatgagttgcttatgtgtcttcagcccgcttgctcccccgctgagcgtcgagggcgctgttcctcctctccagctccgggtnaactcgtgaaccccccaagggcctcactttctgcttataaacccttcaaccccctatgtccccgcccacataaggaaaaacgcggctgttgcttccacccaagcggcacgcccaatccgcctcgcctgtatacttagagacaattgccctcccgaggtggtcacgcccccaacaggtacatcacaaaatttctgcctcctcgagggaatatcttttttataagacaacacggtctttaaccacagttgctctcaaagcaatcttccgatgtccttctcatctcgtacaacagcaatttggcgtgtccccgttcttatagactcagcgaggtgacattctccctccgctatgctacaaaaaaggtgactcacgcggttgtcatgcccaaaagattcgacttgctccgccaaagatgacctcttgtggttttcaagagagtgggcattcctcccaccttcatcggagtctaacagtatggaatggcagcagtgcactttaggcaatatgatgagtagcgcgggcggaaaaaaaagaagggggggagacaaaaaaaaacccaaggaaaaaaaccccgttttaccacaaaaaaaaaaacagaacaaaaaaa

SEQ ID NO: 649359 - DNA, 409 bp, Homo sapiens
ttttgacatttaaaaaatattaatttatttaaaaagaataactcattatatggtaacagaaataatactttcgtggaaaaacaaattttccaaaacaataaagtctattagataagtggcattggttttcattttgaagatctctttaatgtcttggcttaatcacagagctggattcgtttatgtgcttctgcattcagtctgtcgcactattacaggtcacagaacgctggaaactgcagtgtccactccttgaaagtccatattcttttcactctgttagtcccagtaattcagctttcttccaaacttgatgtcacgtctccctttgcaaatctgaaactgtagtcccagctactcaggaggctgaagtgggacgatcgcttgagcccagaaggtcagaggttac

SEQ ID NO: 649360 - DNA, 304 bp, Homo sapiens
cagagagccgtgattgcgccactgcactccagcctgggccacagagcgagactccgtctcaaaaaaaaaaaaagaaaaaaaaatacaaaatattagccggggcttgattgtggatcccccttgaggatctggctccccaagaagcacttatttgaccctttcctcacggcctcccgaaaccggatttcctccatggcgcgtgtgcccccacggagctcgctttggccccctttggtacccattggggacccagcccacccgaaacccttaatataagaaacccacagggggaacccttcataga

SEQ ID NO: 649361 - DNA, 248 bp, Homo sapiens
  misc_feature (52)..(53): n is a, c, g, or t
  misc_feature (63)..(63): n is a, c, g, or t
  misc_feature (66)..(66): n is a, c, g, or t
  misc_feature (84)..(84): n is a, c, g, or t
  misc_feature (87)..(88): n is a, c, g, or t
  misc_feature (90)..(90): n is a, c, g, or t
  misc_feature (100)..(101): n is a, c, g, or t
  misc_feature (108)..(108): n is a, c, g, or t
  misc_feature (117)..(117): n is a, c, g, or t
  misc_feature (132)..(132): n is a, c, g, or t
  misc_feature (152)..(152): n is a, c, g, or t
  misc_feature (186)..(186): n is a, c, g, or t
  misc_feature (200)..(200): n is a, c, g, or t
  misc_feature (203)..(203): n is a, c, g, or t
  misc_feature (213)..(213): n is a, c, g, or t
  misc_feature (217)..(217): n is a, c, g, or t
  misc_feature (227)..(227): n is a, c, g, or t
  misc_feature (232)..(233): n is a, c, g, or t
  misc_feature (246)..(247): n is a, c, g, or t
cagagtacttcgagtctcccttcaccatttccggcgggatctacggctcaannttttttgtancgngggcttccgcggacttcncgnnantattggctcnnctttccncactatctncttcatccgccggcnaatatttcacttttcatccnaacatcactttggcttcgaaaccgccgccggatnctggcggtttgtanatntggtttgacnattnctgtatgtcncgggnnattaatgagggcnng

SEQ ID NO: 649362 - DNA, 984 bp, Homo sapiens
  misc_feature (201)..(201): n is a, c, g, or t
gttccttctcgcctaacgctgccaacaatggtgttgcaggcgcttcgtggattgttggccagggtggcctaatgtctccgtttggaccatcatgccgtgcaagaattgagtcgctgatttgtagactgttcttgagtcaagaatcagaggctttggtcatttggacacttgcagctcattaccgtgatggagacaggccantgccttttcaacgtgcagtgcactcgtcactgattgtcagtcctgcaaggtttcacgcagctagtagcccagccagatagtattgtccgatcaaggcctgggcagagaggcatgacatctatacggaatgggcagccgcacgatgggccaatgaagattgaaagccagtagaaaggatgatgccctgagtgacggacttttgatcgttttacagttctgaaggccctgagcatgaggaacagatataatcagagaatgaggtgttagaagcttctccaggcagttctctcctgtaaagcttctcccaataaagcacctggtactaagggtactgctgcatgcttgctgttgatgctgtgtgctgctgcttgtgctgctaaagttccatgcatgaaagatcaccggcaggagataaataaggctccagaaccgagaaggttgctgtccagaagaggtcacaggtcaagtaaagctagctgactgctccatctagctcatgacagcggtcaagcatggttccagtccagaaaggagctgttccagaaggcatcttggcaagaaaatgcatcaggtgggcatcattaagaagtagtcaaaggttacattgtgaccgtgttgacaaatgttatataaggcgtttgggattgtaaaggctggtgaaggatagaagttagaggccagatgaataggagggactatggataacattaaatatcgtgaaaagaaataagaacaaaggtataaaagacgtttcgggccgagtgcgcgaaaattatagagagc

SEQ ID NO: 649363 - DNA, 120 bp, Homo sapiens
tccagaggagttatggaggaatactatttgcgtggaggaatcttttgcttttcctctcaagtctcagagatgtgtgtgttaggttcctcttttgccatcgagcatcctattcccacctca

SEQ ID NO: 649364 - DNA, 223 bp, Homo sapiens
aaacaacaaccacagcaaataacaactagctgtggtgtgttggcacatgcctgtaatcccagctacttggggagctgagctgggagtatcacctgagcccaggaagtggagagctagccgtgcagctgtgatcagctaaacacacaagacaggttcactggctcccatcccaacccggaacagctcccataggtataacacactcgacatgccatgtggtttt

SEQ ID NO: 649365 - DNA, 1025 bp, Homo sapiens
ggctgctctgaaaaagcccatctttgcattgttccgtcatccgcctccttgctcgccgcatgccgtctccgccgcgcgctcctccgccgccgccggactccggcagctttatcgccagagtccctgaactctcgctttcatttttaatcccctgcatcggatcaaccggcgtgccgaccatgtcaagacgcggccgtagacaccagctccgaaatcaccaccaaggacttataggagaagaaggaagttgtggaagaggctgaaaatggaagagacgcccctgcataacggtgaatgctatgtgaggaataatggggaagcaggagtgctgacaagttgaggtagacgacagaagaggaatacggtggtggaggaagatggagagagtgacagtaacgacaggtgatggtgagagaagcaggatgtagatgatatgatagtctgctggtcagatagatggattgcgtcgcttgcatgagagatggccgatgatgccggatgtcgatttcagcaagtattagatactgccgaggcatgcactagatcaagacaaaagggtatcagtgacacttcgggatgggtatctcatgttctactcaattagagccctgattagccggctgagtgattaagatctgagtcagcttccgaggttcagagagccgagcgtcccacgtaggcttgagcaccccgtgatggaaatctcactgtcgccataaaagccatacgattggaattctcacacgggaggaaaccgcagccgcatcttccagacgcgcgtaaaatcgtcaaagtcgttaacaggcaacatggtggcctccaacaccattaactagggccaatggaggggccgcaattaagagtcctgagtccaacaagcttcgacgtccgcaccgcatccatactgtggagccgtcttacccaggaagaacggagagagatgacgacacctttcgaccacatgggtcatcgaacagtcagaacacaatccacatcacacgcgagtacaacatgtaacacactat

SEQ ID NO: 649366 - DNA, 120 bp, Homo sapiens
tgtatcctgttaccgtaactagtggaggctgaaagtagcgaagcaaagcggctgggcaatgatcacaccggcaatgagggcaggagcaggacttgaatgtcatcctcacatgccactcaa

SEQ ID NO: 649367 - DNA, 511 bp, Homo sapiens
agatggctaccaaaagagtacagagtacacagagaagagattccatataaaagtaattctgtgagtaacttccacttagctacatctaaaaaatacttgaattcaaattctccttaatatacttctgatcatgtttcacttgaatcagtagcctccttcgctcattcaattctgcaccctttctctctggtttctattacctgtcagagaaagtcagatggccttggtattagctaccttttggtatcaattgaagacatgaaaaccacattcaaacacagttctacattcatttccccctctcaacctcttctgacccattcttgtctcaggccctgcctcatagaacacccaaaggtgccctcacttccctcatacaggtagcttttactctgagactaggaatgtctttgatgactaatccctacgcaaaaagatgtgccatcacttagcaaaatagaaagtaagaaaggtgagagggtgatgaccactccagtctagtgtggctgta

SEQ ID NO: 649368 - DNA, 429 bp, Homo sapiens
aggaagactcccagcatatgcaccgtgggaccgcctttggatctctgtggccaggtaccacatcgaggtgaaccgtgttcctgcgggcaactgggttctgattgacaggtgttgatcacccaattgctgaagacagcatgcatcaccgaaccccgcaggcaatgaggaggctcaaagtttttccgacccgttgaagttcaagtaacgcacatcctgttattagagttgctgtggaggccggttcaaccccttccgagctgccccttattcttgatggtcttgcgcaggtccacgggagctatcctttcctcccccccatggtggcggggtccggcgagcgtgttatccttggcactggggagctctacctttactgtgtgatgcctgatttgcggaagatgtactctgagatcgacttcttggtgggtc

SEQ ID NO: 649369 - DNA, 459 bp, Homo sapiens
gatgagatattctacacattaatctacttatctggaatcactttgcctctaaaggccagagaaaaatcacagcttccttatcggaggggaaaaggacaggtgatctggggaaaacgcagctacacctggagcaaggtctcttcccggcttggcaatctcagctgtgccggcgctacgggacccgagccgtcccagaaaccaaagggcaggcacggcagcaaacgcctgagtgctgctgccttcggtgactatatgagaatggaaacttctaaggaagccaggttgttagaattgttaccccccatctcagcctggataatctatgttatctctgagtaaagggggtaacaattattatccaggctgagatggaaaacaagccctttattgaattttcaacacagactccctgcttctcatctccttaataaaatttcattaaaatccccttaaaatccc

SEQ ID NO: 649370 - DNA, 210 bp, Homo sapiens
aagactgcatctaaaaaaaaagaaaattaaaaattgtattctgggctaggcatgaaggtttgcccctgtaatcctagcacttttggaggccaaggtggagcattgcgtgaggccagaagatcgggaccagtctgagcaacatagcaagaccccacctctacagaaataataattaacataaaaagttctactctaacttgttgtaaggtc

SEQ ID NO: 649371 - DNA, 133 bp, Homo sapiens
taccctaataatatgaacttatgcatctctacttcatggaactcgctctacactccttccagttgggcagtaggcggcttgaataaaattgtacaaaacttttgaaaagatacatattaatttagggttgatg

SEQ ID NO: 649372 - DNA, 332 bp, Homo sapiens
aaagcattgctatggagaagacctatactgtttgaaaatgcaggccgggcgcggatggctcatgcctgtagtgccagcactttgggagggcgaggcgggaggatcacgaggtcaggagatcaagaccatcctggctaacatggtgaagccccgtctctactaaaaatacaaaaaaaacaaaattagccgggcgtggtggtgaacgccggtggtctcagctactcgggaggttagggcaggagaatggtgtgaacatgggagatggagcttgcggtgagccaagatacacaaactgcacaccagcatgagcaaaagagtggaactctatctaa

SEQ ID NO: 649373 - DNA, 130 bp, Homo sapiens
tctcgctataaactcgtgcattagttattaacactggcagccacagtaactaagtcatatgttatatcttcgttcgaaaccatacttatccccaccttggctctcatcacccgatgaggcaaccagccag

SEQ ID NO: 649374 - DNA, 857 bp, Homo sapiens
  misc_feature (854)..(855): n is a, c, g, or t
tctggtcagaagctgatattataactttcctcttccattacccttgaagggttcaagggattctcgtgcctcggcctccagagtggctgggaatgcgggtgcccaccaacaccacgcctggtaatttttgtgttttttttagtagagacggggtttcaccatttgggccagactgtctcgagctcctgacctcaagtgatccccacccgccttgctcccaggtgctgggattgcaggcgtgagccccaccgtgcctggccccaaatctgtatctttatttgatgatgcgtatcatataatgtgtttttggagacggagtctcgctctgtcacccaggctgaagtgcgagtggggcgatctcagctcaatgcaacctccgtctccggggtcaggcgattctcctgcctcgggcctcctgagtagctggattacaggcgcccacgaccatgcccggtattttggtggttcagtaacgagccggttgcccatttggccaggctggtctctttgggcagggttggtctcgaaccccttgactggtggtccgccatttgtggctcccgggatgcgggattgcggggtgagcacaagcccggccaaaacattgtcttaaataaggttcaatgataacctatccttgaatgcttcacaatggaccccaaggttgcgcttctaactcaatatggacggaaagacatgtccgggtcctgtcaaatacccgctcttgggaacacactgtgggagtcaagaccgtgtcggcaaaatatcgagaaagctaaacaatgtggagcctctctcgatcgacgtttttctctctgcatctttgttatctgcttgttgtgtcttgggtggtnngc

SEQ ID NO: 649375 - DNA, 578 bp, Homo sapiens
tacttttccacagggcatcacatggtgaggggactaacgagagacagccacattggcttttattacagacccactcttgtgctaactagccccttctctgaataacccattaatctgagaatggctcaagcacttcctaaaggtctcgcctcttaacacgcctgcattgggcaccaagtatccaacagatgaacttctgggggacacattcaaatcgttgcggggtattaaagcgaagtacaaagaagagagatttgctgtcaagtagtttgcattaaacttggaaataaatatgaattggtaggttacctattaaacaagtgtgttagagtagcctagcagttttcaaagtgtagtctgtggaatcctagagaatagactcctttcatggagtctgtgagatcagaatagtttcataataatactaagtcatcatttgccttcttccctgtgttaacatttgcagtgatatccaaaagcaatgctgattaaaacgttagcataaccctgagcaatagcaccaaactagtagcaggcattgtgttattgtcatgcagtttaaatttgcagtaaaaaaa

SEQ ID NO: 649376 - DNA, 178 bp, Homo sapiens
attgccggaggctcaatggccggaggcgttgaatggcccgtaggcgttgaatggcccggaggcgttgaatggcccaaagccaattttccggaagaaggctaagaccacaaagacaattgtgctattggctgcaatgtgtcgagcctaactgcagatccaagaggatcctggccattca

SEQ ID NO: 649377 - DNA, 175 bp, Homo sapiens
actccggcagctgctcatggatcggcttggtgctcgaaaggacgttggcatcgtcctcattagagctcagcactcgcatcaacttcgaaggctgcacaccgtccagcggggaacaggctgatataatcctcaatgtcttcgcggctgctcctctctcttctgcgcggcgctgcga

SEQ ID NO: 649378 - DNA, 260 bp, Homo sapiens
taaggccttcgaacatctaagatctggttctagcctaggggcgggctgcagaggaggcggtgccaggcacagtatgcaagccctagcccagctcaacagaatctttctccagacaagagctattcggatcttctccaaagactattcaaacgggtacaaggcgggaccccgagggtgggcaagatttccttcagtccaaaactccagagctacattggaacctcgcggggcctcatcctaccgggcatctggtccacggt

SEQ ID NO: 649379 - DNA, 179 bp, Homo sapiens
gcgtaccgggggtaggaccacttcactgtcggacctctggcctgcttgttctgtctcattctcacctctcttccacccaagtgtcagaagtggtagcataaccagttggtgacgagtaggcctgtactccttcagttagtcggtctctcagttggctctccatgctttcgtgtgtgtct

SEQ ID NO: 649380 - DNA, 293 bp, Homo sapiens
tcgtcattgagtttgacctcaatgggcagcgccgacataccagtggagcggcacttttccgatagcttgagggtcaatgggttcaacatcaaactaccgactggcgaatgggtgctgctcgccaatcaagctatcaagcttcctcaagcttccggcatggcctatttccttggcaaagtggagggcaaacgcttgattggtggcatgcggctattcgccctacgcagcaacgacagcgcttcggcggagttaacgcctcttaagggttgccagcctgatgacccgggcctgat

SEQ ID NO: 649381 - DNA, 1132 bp, Homo sapiens
tggctttatggaccctttattttccatgtgattccggtacatagggatttatgaaattaccccttttacaattgggaactattttactagaacattggaccaaaccttgcaccgggttattcggatggtgattccacgggagtttaacgcttcaaatccagccaaaaattttggtcacaatctctttcagcttggctatctgatggtcctgagatctttccatcagccctggatatgtggcccaaacaagggtctagggtggctgggctggacagactatggaagacaaagaacagctattctacaaatctttggtcaatcctggctggggctccagtttatcaagagatatccctcttaacacccggcataaggataccaccgccccttggtctcttacaataagccctaggggaaagacatcactgggtgccttggtttccaagccacatcacgatgtttaaagacggcatggccaacaggatctacacaacatgttcggctgagatgtggggcacgctatacgaagtgtcaagacaccggacttgggcgccacaacagcgagcaaccttcaaggatcatctggacccaatatatcccatcgtctttcaatggggcaaccctgggtattacctctgggttatacatcacgcccctggtgttttgggggcaagggagatccgagagcaacaggagatcacaggaactaaagacgcaagtgtacatttgcgcagggggcggagataacccctttttggtaacaaaacacattctctggttttccccacaaaaaacacgattctttgctccctgtacattgttgatgtggcaaaattggcacccttttatggttcggagacattgtgtaaacagccaaaacacacatattaacaacccaagggcctatgagggcttacccacaataaaaacgtggcgacacaaaacgcactgctcccaggagacgccacaccgacaccaacacgagcaaactcgcgtccaaatatataggcgacgagacaccatctcaccaggcaaacccggggaaagtaggtagggaaacaaaacaaatttacacaaagagactaaggcctacaacaaccaaggggggcacggggggaacaaaccagaacat

SEQ ID NO: 649382 - DNA, 490 bp, Homo sapiens
aatgctggcgtctgctcctccgtctcccagaatcctgccctggaaaaaaccagcgccaaccgccggtttaactgaggacggatttaaggcattacgaaagacagctttcccctttgctcggctctccttctctctcctgctgccctgtgaagaggtgtcttctgccataattgaagaggaagacagagctcttaccagggggaggcagagatggcacagcaagagacatgcccccagaatgccaccaatgccccaggacaggcccacccatgggaccaggttatcgggataacctgggaggatggggtggaatctgaggggtgagccttcttccccaggctggaagtgggcgacacgagactggcacctctacatctgattgtcccccaaacccagcatttatgtcgtgagcaaagaaagaaatcatgttacttcttccaaaaaaaaaaatataattattataaatttaaaaataaaatatatatttata

SEQ ID NO: 649383 - DNA, 124 bp, Homo sapiens
aatgagctggtaccgctcaccgatggggtgcactggtgatctgttgctgaactacaagcctcaggttggggcacgcatcctcaggaccgtcatctcctggaactatcaggtcagcctggatcat

SEQ ID NO: 649384 - DNA, 610 bp, Homo sapiens
attctataggccaggcgagcggcatgttatagaagctacgtaagaagatggttcgtcgcaagtgggcaggtgccgtgtgcttatgagcaccatcagggcacatcagccacggattctttgaattatatacctaagtgtctctaattcttaagcagagttctttgaggtgatctgcaactctttcaccatctggtaatgcggagatgcaggaagtcggtgtgggcctatatcccagatatctcttgtgctacaatcggcagactgtgaccccaactgtacgattgtgtacaatgggccccacctcttactgcgagcagtccgagacatcgagggtgggagaggagctcaccatctgctacctggatatgctgatgaccagtgaggagcgccggaagcagctgagggaccagtactgcttggaactgtgactgtttccgttgccaaacccaggacaaggatgctgatatgctaactggtgatgagcaagtatggacggaagttcaagaatccctgataccccattgaagaactgaaggcacacctggcacgtgggagcagggttgtggccatgtgccaggcgatcatacgcagcaattctgaacgggttacc

SEQ ID NO: 649385 - DNA, 203 bp, Homo sapiens
cgtcgaccatgagtcaggagtgcgtcgaccacgaggttcaggagtgcgtcgaccagtcaggtcaggagtgcgtctaccataggtcaggagtttgagaccagcctggccaatatggtgaaaccacgtctctattaaaaatagaaaaattagccaggcgtggtggtgtgtgcctgtattcacagctgcttggatggctgaggcag

SEQ ID NO: 649386 - DNA, 317 bp, Homo sapiens
gactctagcaggatccttatacccggttctgggtataatgccaggtaaggcacagtggtgagtctgtataaggctttacaaagcttctataggaaaaaacaaaccagatttgatttcggattagcagtaagagtgatgaagacgaaccagggggatggagtgatgtcttgacggtgggagatgatcttagggtggccaggaaaggcctttctgaagaagtgagatttgaattaagatctgaaagataagaaaccagtcatgagaagaattgggactggggaggctgggcgctttggctcacgcctgttatcccagca

SEQ ID NO: 649387 - DNA, 134 bp, Homo sapiens
  misc_feature (5)..(5): n is a, c, g, or t
  misc_feature (65)..(65): n is a, c, g, or t
cacantactgacttcagcaccagcggctcgtcaacaagcttcccattcacatatgtctcagctcncttcacaaggctccagagtgaccaccacttctccatctggctgggggatgctccggaacagacagtgtt

SEQ ID NO: 649388 - DNA, 1445 bp, Homo sapiens
  misc_feature (366)..(366): n is a, c, g, or t
actagttctagatcgcgagcggccgctcgtgttgttgtatgattggagagttggtatagatgaaggagcaagggcctcatgtatataagtgtgatcctgcaggctgtgggtactgttggggtcctaaatgccacgtgcagtctgggagattaaatgaaatctgagatcaatccagtgtatccattgaaggtgaaaagtgaagaagaaagtgggacttggagcatttgaacggacagctggaaactgcaagttacgatgccatggtctacatgtactagttcaaatcgatcttctaaagacattctagaaaatgaggaagttaggagctaggtggacaagattgcaaaatctctagagattccaggnattcttgacagaagactgagaggattgactggctgtcgacgcgttgataggcatcataagcagacgatgacgactgtaagacgagttggtcggtacacgatagtataccaggaatccggctgaatgcccactggttaccgtggtggtgatacgggtaagccaacaaatctcagagggatcgagtcgcgcaggtaccccgggggcattggagagccctgcgacgccaatctacctcacataaactaacctgaaacaggcggaaaaggcgggctcacggacttctattattaaaactcaaagggaaccaaggggctaaaaaggcacaaccacacactacaacacacacgcaccaccacaaaaacaacacaacacaaacccaacaaacacgcacaccccacacaaacgaacaaaaacaaaagcaagacacaacgaaaaaaccagaacatcgacaacacagacgaaaaacagacaaccaccaacaaggaagaagagcgggacggggcagcacacaacacaacaatacccagcgcgcggaggagggcgcagaaaaaaccgaacgggagccagagaaagagaaagcaaccaccaccccgaccccacaggcccgagaatgaacacagaaagcacgaacacgcggcgcgcacgccaccaccaccagcgaagcagacggacaaacaaacacacagagacgcgagcaggtgcccgcgcgcaaccacacccagacccatgggagcggagagaaccaaccaacagacacacacacacaacgaaagcacgccggcccagacgacacaaaaagcccaaggagcgaggcgccacgagcaccaacaagcccacggccgcgggcaacgaaaccgcgcgggcgcgtgaaaaaaacccaaggccgcgacacaggcgacacagcggcagccggcagcgcgcgcggcaggccgcggggcggcccccgcccggcccggcacgcgggccgcccgacgcacagaccgaccaggcccgcgcgcacacgcacaagccacgcgcacggagcaaccagacgaagagcgacgcgcacgagcagagacggagacaaggaggaaggacat

SEQ ID NO: 649389 - DNA, 190 bp, Homo sapiens
cctagttttagaagtttcaatagcacttagctctgctctgatctttttatattatttcctatctgattttaggtttagtttgttcttgcttttcgagttccctgaggtgcagtagttaggttgtttatttgaaacatttctactttttagatgaaggcatttattgctattgataacttctaaaactagg

SEQ ID NO: 649390 - DNA, 747 bp, Homo sapiens
agcggagacgctgcagaggcacgaggcactagtggatcgttccgcatggtattgtggactgtatacagagtgccgccacggagcccgccgtatccaccgttcctgctgctgccgccgctgcccgaatcggaaccgtcgggccgcgagaccgccggcaatgccgcgaaggaagaggaatgcaggcagtacgttcagatggaaccgaagattccgacttttgtctacatgatctcggagcacacagacagttcagacagtgagtggcacatcccgacgatctgctcgagtcaccccgctccgtcagtcctacggctagggccacgagttctcaaagattccagtcctgttcgaaatctgcagtcttttggcacttgaggagtcctgcttactctacctagaagatgtgacgccgtagtcagcagcatgcctaccccagtgactccgaaataaataccctcttcggcagactcgttcatctggttcagaaactgagcaagtggttgatttttcatgatagagacactaataatacggctgatcactgagtgagtcgccgactcgaactccaactggaaatgcgccttcttctgagtctgacatacgacatctccagcgcccaatgtatctcacgatgaggagcattgccgaggcactatgtccctgaaggactcaggcagtgatctctctcatcgccccaagcgccgacgttccatgaaagctacaaccttcaatatgaagtgtctacac

SEQ ID NO: 649391 - DNA, 130 bp, Homo sapiens
gtcagcttgtgttcgcctgttgtgcgagtgctggtgtttcacacagctggagcacctacatctcatcccgtctgaatcgcctgctgttcagattggggacggtatgtcgttgtgtttattgttctgagct

SEQ ID NO: 649392 - DNA, 348 bp, Homo sapiens
ccacacactgcgcccgtgcatgtgatctgggaaccatggcgccttctaaatgccaacaacaaggtaaatcaaatatgcaacaaacagaaataacggcattgacatgtgccatggaaaggcctatacagatgactgcagttcactgccgacgtcatcaaaggggtcactcttaaataataaatttcagacgccacggcccaaattgctgcttaaggagtggaagtcctccacatgcctctgcttccttcggtacctctttattagctctgccgatgtccttccctggtggcacatttcctttctttctttcttcctttcgagactgagtcttgcgctttcgcccaggcc

SEQ ID NO: 649393 - DNA, 118 bp, Homo sapiens
ccgagatggcgccactgcattccagcctgggtgacagaatgagactctcccaggaaaaaaaaaaagtgagaaacataggaaatacaaaaaagaaaaaagtttgctataatctaccgtg

SEQ ID NO: 649394 - DNA, 106 bp, Homo sapiens
ctcactggttacggaaaataattgggggagtggattacaagggtgttcgcgatctcttaaaagtgattttggagaagattttgacgattcctaatacagtgagctc

SEQ ID NO: 649395 - DNA, 765 bp, Homo sapiens
ctagaactagtcggcatcgtgggctataatctactcgtcaagtatttatatctctgtgtctttcataagcagacgtcagaagttatgatgtctatgaaatcatgaaagccaagtacaagagtttacgaatctgggggttatacccttctcatccggggattgatccactcagacagatggagagagtccttggtttgctgttagaaagacattaataaaagtcatggtcccttccaaagaagaactatggtgactgtatacaaggagccctccttcatcaagatgtgaacacagcttggaatttgtatcaggaattgataggtcataatctcatccctccgttggaaactctaaaagccttctttgattatggcaaagacttaaactgatgatcactattcagacaaactcctggacatacttttgtatctaaggaataatcagctgtatcctggagagtcatttgcacacagtataaaaacgtggttgaaagtatccctggaagacaatggaaaggacagttcaccaagcaattcagaaaagtggccagtgctcaggctgtggtcagaactatagagcctattcatctgagtccagaagagtatgagtttctgaaggaaaaaatcatgagggatgtgatagatggcgggaacagtatacgaagagatctcaggaatggaagagatacgagagctttgtgactcctgtctcctttgatatcgttattgatggctcatggttgcaaaatgtttctaaggtggaatc

SEQ ID NO: 649396 - DNA, 5672 bp, Homo sapiens
aatggtttcaaagagagagaatattgccacccatcatttatatcaggcatgggatcctgtcccttctctgtctccggctactacaggtgccctcatcagccacgagaagctgctgctacagatcaaccccgagcgggagctggggagcatgagctacaaactcggccaggtgtccatacactccgtgtggctggggaacagcatcacacccctgagggaggaggaatgggacgaggaagaggaggaggaggccgacgcccctgcaccttcgtcaccacccacgtctccagtcaactccaggaaacaccgggctggagttgacatccactcctgttcgcagtttttgcttgagttgtacagccgctggatcctgccgtccagctcagccaggaggaccccggccatcctgatcagtgaggtggtcagatcccttctagtggtctcagacttgttcaccgagcgcaaccagtttgagctgatgtatgtgacgctgacagaactgcgaagggtgcacccttcagaagacgagatcctcgctcagtacctggtgcctgccacctgcaaggcagctgccgtccttgggatggacaaggccgtggcggagcctgtcagccgcctgctggagagcacgctcaggagcagccacctgcccagcagggttggagccctgcacggcatcctctatgtgctggagtgcgacctgctggacgacactgccaagcagctcatcccggtcatcagcgactatctcctctccaacctgaaagggatcgcccactgcgtgaacattcacagccagcagcacgtactggtcatgtgtgccactgcgttttacctcattgagaactatcctctggacgtagggccggaattttcagcatcaataatacagatgtgtggggtgatgctgtctggaagtgaggagtccaccccctccatcatttaccactgtgccctcagaggcctggagcgcctcctgctctctgagcagctctcccgcctggatgcagaatcgctggtcaagctgagtgtggacagagtgaacgtgcacagcccgcaccgggccatggcggctctgggcctgatgctcacctgcatgtacacaggaaaggagaaagtcagtccgggtagaacttcagaccctaatcctgcagcccccgacagcgagtcagtgattgttgctatggagcgggtatctgttctttttgataggatcaggaaaggctttccttgtgaagccagagtggtggccaggatcctgccccagtttctagacgacttcttcccaccccaggacatcatgaacaaagtcatcggagagtttctgtccaaccagcagccatacccccagttcatggccaccgtggtgtataaggtgtttcagactctgcacagcaccgggcagtcgtccatggtccgggactgggtcatgctgtccctctccaacttcacgcagagggccccggtcgccatggccacgtggagcctctcctgcttctttgtcagcgcgtccaccagcccgtgggtcgcggcgatcctcccacatgtcatcagcaggatgggcaagctggagcaggtggacgtgaaccttttctgcctggtcgccacagacttctacagacaccagatagaggaggagctcgaccgcagggccttccagtctgtgcttgaggtggttgcagccccaggaagcccatatcaccggctgctgacttgtttacgaaatgtccacaaggtcaccacctgctgagcgccatggtgggagagactgtgaggcggcagctggggccggagcctttggaagtctgtgcccttgtgccctgcctccaccgagccagcttggtccctatgggcttccgcacatgccgcgggcggccaggcaacgtgcgtgtctctgccatgtggcagaagtgctctttgtggcagtggccaggcagggagtgtctgcagtcctggtggggctgagcctgaggccttccagaaagcaggagcagctgtgctgcaccccatgtgggtgaccaggtcctttctcctgatagtcacctgctggttgttgccaggttgcagctgctcttgcatctgggccagaagtcctccctcctgcaggctggctgttggcccctctgctgtcctgcagtagaaggtgccgtgagcaggctttgggaacactggcctgggtctccctggtggggtgtgcatgccacgccccgtgtctggatgcacagatgccatggcctgtgctgggccagtggctgggggtgctagacacccggcaccattctcccttctctcttttcttctcaggatttaaaatttaattatatcagtaaagagattaattttaacgtaactctttctatgcccgtgtaaagtatgtgaatcgcaaggcctgtgctgcatgcgacagcgtccggggtggtggacagggcccccggccacgctccctctcctgtagccactggcatagccctcctgagcacccgctgacatttccgttgtacatgttcctgtttatgcattcacaaggtgactgggatgtagagaggcgttagtgggcaggtggccacagcaggactgaggacaggcccccattatcctaggggtgcgctcaactgcagcccctcctcctcgggcacagacgactgtcgttctccacccaccagtcagggacagcagcctccctgtcactcagctgagaaggccagccctccctggctgtgagcagcctccactgtgtccagagacatgggcctcccactcctgttccttgctagccctggggtggcgtctgcctaggagctggctggcaggtgttgggacctgctgctccatggatgcatgccctaagagtgtcactgagctgtgttttgtctgagcctctctcggtcaacagcaaagcttggtgtcttggcactgttagtgacagagcccagcatcccttctgcccccgttccagctgacatcttgcacggtgaccccttttagtcaggagagtgcagatctgtgctcatcggagactgccccacggccctgtcagagccgccactcctatccccaggacaggtccctggaccagcctcctgtttgcaggcccagaggagccaagtcattaaaatggaagtggattctggatggccgggctgctgctgatgtaggagctggatttgggagctctgcttgccgactggctgtgagacgaggcaggggctctgcttcctcagccctagaggcgagccaggcaaggttggcgactgtcatgtggcttggtttggtcatgcccgtcgatgttttgggtattgaatgtggtaagtggaggaaatgttggaactctgtgcaggtgctgccttgagacccccaagcttccacctgtccctctcctatgtggcagctggggagcagctgagatgtggacttgtatgctgcccacatacgtgagggggagctgaaagggagcccctgctcaaagggagcccctcctctgagcagcctctgccaggcctgtatgaggcttttcccaccagctcccaacagaggcctcccccagccaggaccacctcgtcctcgtggcggggcagcaggagcggtagaaaggggtccgatgtttgaggaggcccttaagggaagctactgaattataacacgtaagaaaatcaccattcttccgtattggttgggggctcctgtttctcatcctagctttttcctggaaaagcccgctagaaggtttgggaacgaggggaaagttctcagaactgttgctgctccccacccgcctcccgcctcccccgcaggttatgtcagcagctctgagacagcagtatcacaggccagatgttgttcctggctagatgtttacatttgtaagaaataacactgtgaatgtaaaacagagccattcccttggaatgcatatcgctgggctcaacatagagtttgtcttcctcttgtttacgacgtgatctaaaccagtccttagcaaggggctcagaacaccccgctctggcagtaggtgtcccccacccccaaagacctgcctgtgtgctccggagatgaatatgagctcattagtaaaaatgacttcacccacgcatatacataaagtatccatgcatgtgcatatagacacatctataattttacacacacacctctcaagacggagatgcatggcctctaagagtgcccgtgtcggttcttcctggaagttgactttccttagacccgccaggtcaagttagccgcgtgacggacatccaggcgtgggacgtggtcagggcagggctcattcattgcccactaggatcccactggcgaagatggtctccatatcagctctctgcagaagggaggaagactttatcatgttcctaaaaatctgtggcaagcacccatcgtattatccaaattttgttgcaaatgtgattaatttggttgtcaagttttgggggtgggctgtggggagattgcttttgttttcctgctggtaatatcgggaaagattttaatgaaaccagggtagaattgtttggcaatgcactgaagcgtgtttctttcccaaaatgtgcctcccttccgctgcgggcccagctgagtctatgtaggtgatgtttccagctgccaagtgctctttgttactgtccaccctcatttctgccagcgcatgtgtcctttcaaggggaaaatgtgaagctgaaccccctccagacacccagaatgtagcatctgagaaggccctgtgccctaaaggacacccctcgcccccatcttcatggagggggtcatttcagagccctcggagccaatgaacagctcctcctcttggagctgagatgagccccacgtggagctcgggacggatagtagacagcaataactcggtgtgtggccgcctggcaggtggaacttcctcccgttgcggggtggagtgaggttagttctgtgtgtctggtgggtggagtcaggcttctcttgctacctgtgagcatccttcccagcagacatcctcatcgggctttgtccctcccccgcttcctccctctgcggggaggacccgggaccacagctgctggccagggtagacttggagctgtcctccagaggggtcacgtgtaggagtgagaagaaggaagatcttgagagctgctgagggaccttggagagctcaggatggctcagacgaggacactcgcttgccgggcctggccctcctgggaaggagggagctgctcagaatgccgcatgacaactgaaggcaacctggaaggttcagggcccgctcttcccccatgtgcctgtcacgctctggtgcagtcaaaggaacgccttcccctcagttgtttctaagagcagagtctcccgctgcaatctgggtggtaactgccagccttggaggatcgtggccaacgtggacctgcctacggagggtgggctctgacccaagtggggcctccttgcccaggtctcactgctttgcaccgtggtcagagggactgtcagctgagcttgagctcccctggagccagcagggctgtgatgggcgagtcccggagccccacccagacctgaatgcttctgagagcaaagggaaggactgacgagagatgtatatttaattttttaactgctgcaaacattgtacatccaaattaaagggaaaaaatggaaaccatcaa

SEQ ID NO: 649397 - DNA, 152 bp, Homo sapiens
tgctcgagagaattctatcggaagctgcttcgccatcatgtggggtgctgtatgccgtggatagctacaaccaggcggaatgccaacatctcctacgctttcgacacccataccaacacacagatcgtccccaggctgcttgttcgacgaac

SEQ ID NO: 649398 - DNA, 499 bp, Homo sapiens
aatttttttgtacagcacaggtcttgttttgttacccgggctggtctggaactccgaggctcaagtgattctcccatctaatccttccaaagtgctggaattacacagtgtgagccaccacacctggttcccatttatttgtatttacttgcctctttgattagggcattttggtagaaaactctacagcacatgactcagattagataatgcagttggcaattgaaataatccatggatgtagaacactgcaattaatttaacacatattttcattcttggaacaacatcatttgagtgcctactgtgtgccagttctagagacacagcagtgaccaagacataaaccaccaggtgtctttatagcatgtacattttcccctctaaacaccgtagtgtatcatggagtggctgtcacttcatacaaccacctgaacacaattttggggaccccctcagatcctggcccgcaccttgggaaatcacagtgcggggtgtc

SEQ ID NO: 649399 - DNA, 203 bp, Homo sapiens
cagtatgttaaggaagccaaaatggagagaagcctcgaacctccgcacctgcactccagcaagccgtccatatatcacagaacaaatgtaaaccctctcaaggcctttccacagaagaaaacctgtcttcctccatcaccaaacaacctattcatcaaagggaaaatatcataccattacttgtgacaagcaattctgatcag

SEQ ID NO: 649400 - DNA, 119 bp, Homo sapiens
ctgctaggattacaggcgtgaaccaagcgcacctggccaagactgtaatttctttttctttttttttgttgtatgagacgaagatatacctatttgtcgacccacggctggacgtgcaa

SEQ ID NO: 649401 - DNA, 477 bp, Homo sapiens
  misc_feature (477)..(477): n is a, c, g, or t
cagaaacccataaacttgtctaagaccaccgaagttgtccaaaggcctgataagtcacaaagaacgtttttagagcgcctccaggaggcttatcggatttacaccccttttgacccggcagctcccgaaaatagccgtgctcttaatttagcatttgtggctcaggcagccccggatattgaaaagaaactccaaaaactagaaagatttgctagaataaatatcagtcagcttttagaaatagcccaaaaagtttttgacaatcaaaagtttaataaacaaaaacaagcaacacaggcagctgaaaaggccgctgataaagcattcaaaagacaaacaaaaatcttagtggcagctatccaagaagtacagaatgaaatagcccattaatttagcattaactgaagcccctgctttagccttccctaatatctccatgccaaggagttgctgacgtgcttactcagactctgcctn

SEQ ID NO: 649402 - DNA, 176 bp, Homo sapiens
tccatctacctgcgcttatgctcctgaagaaaattatgcaacaatctaagtgtcgtcagactgaaaacagggatccagtctgtatgtcatgctacggactcagtgagtgcagagcgagcatgtgataccaggaaggtccccatcctctgccctgatgggcaagccctctagatggc

SEQ ID NO: 649403 - DNA, 228 bp, Homo sapiens
  misc_feature (166)..(166): n is a, c, g, or t
ggatctcggtgcatgatgtgggcaagttatgcagagagtatatttgaggagatcatatgatctgtgagagttgtcttctaatatggtctgtggggagtgtgatgctggagtggagatactgtttccatactcgtgtaaatgtccacaaaaaataacactcactgtntgcgaaaattaaaaaataagcctagggatgataaggttcctctgatccaagtctttggaagt

SEQ ID NO: 649404 - DNA, 239 bp, Homo sapiens
gattctagcaggatccttaagtcacccgcgtagtgctcccaggatttgtcacagccgcttttgaaggctgtaatcaacgcacactcttcctgactccttgtaggaagacacaacaacaataaccgtccttctgtagcccctgggcgcggaaatggagtgcgcgatgaagttcacagtaaaaaccctgcttgcctgttcttgcatgactgcatgccttaccctaagcgccgtcagccttg

SEQ ID NO: 649405 - DNA, 408 bp, Homo sapiens
tggtcgtctagaggatcccgagcgagatcacatcacaccattacgatgactactatcaagaaaacaagtgtggcaaagatgtggagaaactgggagacttgtgcactcttgggggtaatgtaaaagggtacagccattatggaaaatagtatggcagttcctcaaaaagttaaaaacagaattaccaaatgatagggcaattccacttctgggtatataaccaaaagaatttaaaacagggtctcagagagagagagagagatgcccatgtacacagcaacattattcacattagctaaactgtggaagcaacccaagtgtctatggacagataaatgcataagcaaaatgtggtatatacatgtaatgtaatattattcagccttaaaaaggaaggaatttctttct

SEQ ID NO: 649406 - DNA, 831 bp, Homo sapiens
  misc_feature (132)..(132): n is a, c, g, or t
  misc_feature (139)..(139): n is a, c, g, or t
  misc_feature (141)..(141): n is a, c, g, or t
  misc_feature (168)..(168): n is a, c, g, or t
  misc_feature (217)..(217): n is a, c, g, or t
  misc_feature (233)..(233): n is a, c, g, or t
  misc_feature (263)..(263): n is a, c, g, or t
  misc_feature (340)..(340): n is a, c, g, or t
  misc_feature (343)..(343): n is a, c, g, or t
  misc_feature (351)..(351): n is a, c, g, or t
  misc_feature (712)..(713): n is a, c, g, or t
ggtggggtttgacccccttagcctttccccattcaaactgggcccccataagccattctctggcctctgcaccagacagactccgccaatctgcgagtatgggattctgccaaatcccactcgctcacttcntagtctncngggtgacccaatccagtgggtgcagcnccacccgcgctcaacccactatgtggacagacacatggcaaatatgganctgaagcccgtctggnctggagcacatctggttgttgttgggttgnagtcgtcttgcagttagatgattcaggttactccagggcaaagcatgatcttgatgacacccggcggaaaagcaggntgnagcctcgnaagagctggccctgcacactcaggtacttccagcagtgaatccaggatttgaacactggggagtaaggggggagcacagcttgcagcccgcagttgttcacagccatgaggtcgccaactagcaggaaggggtaggtcagcatgctcactgcaatccccatcacgaacttggtatagctccggatggccagggcctggctgaactgtgaacctggattcttggtcgtatcccagcccccctgtggtgtctctcacgctgtcatccaccaggtaggcattgatgaagtgggcccagcaggttacagcccccacaagaaaaaccacatcgcccaagggaggtgagggataatccaacgaaganncccagcagcccttccttctttgaacaatcttccccaaattggagctcaagaaacaccactgatacttggcctcccgtcccacaaactggaccatgcagcgcattgcactgaccacggg

SEQ ID NO: 649407 - DNA, 884 bp, Homo sapiens
  misc_feature (132)..(132): n is a, c, g, or t
  misc_feature (139)..(139): n is a, c, g, or t
  misc_feature (141)..(141): n is a, c, g, or t
  misc_feature (168)..(168): n is a, c, g, or t
  misc_feature (217)..(217): n is a, c, g, or t
  misc_feature (233)..(233): n is a, c, g, or t
  misc_feature (263)..(263): n is a, c, g, or t
  misc_feature (393)..(393): n is a, c, g, or t
  misc_feature (396)..(396): n is a, c, g, or t
  misc_feature (404)..(404): n is a, c, g, or t
  misc_feature (765)..(766): n is a, c, g, or t
ggtggggtttgacccccttagcctttccccattcaaactgggcccccataagccattctctggcctctgcaccagacagactccgccaatctgcgagtatgggattctgccaaatcccactcgctcacttcntagtctncngggtgacccaatccagtgggtgcagcnccacccgcgctcaacccactatgtggacagacacatggcaaatatgganctgaagcccgtctggnctggagcacatctggttgttgttgggttgnagtcgtcttgcaggtgtcccaaggtggtcaggcctcacccaccgtggccaggttgagaccgtgtttttagatgattcaggttactccagggcaaagcatgatcttgatgacacccggcggaaaagcaggntgnagcctcgnaagagctggccctgcacactcaggtacttccagcagtgaatccaggatttgaacactggggagtaaggggggagcacagcttgcagcccgcagttgttcacagccatgaggtcgccaactagcaggaaggggtaggtcagcatgctcactgcaatccccatcacgaacttggtatagctccggatggccagggcctggctgaactgtgaacctggattcttggtcgtatcccagcccccctgtggtgtctctcacgctgtcatccaccaggtaggcattgatgaagtgggcccagcaggttacagcccccacaagaaaaaccacatcgcccaagggaggtgagggataatccaacgaaganncccagcagcccttccttctttgaacaatcttccccaaattggagctcaagaaacaccactgatacttggcctcccgtcccacaaactggaccatgcagcgcattgcactgaccacggg

SEQ ID NO: 649408 - DNA, 167 bp, Homo sapiens
acatgttactcatgcacacatacatacacacatgcatacacaccaatacacatatatcacacatgtgcacccatatacatacatacaacaggcccctgtgaattctcagcagggcatccattggcctgggccatgccctccatgccctctatgccctccatgcccat

SEQ ID NO: 649409 - DNA, 632 bp, Homo sapiens
  misc_feature (310)..(310): n is a, c, g, or t
tggccgaggcatagaagaactccatggtctgtcgtttaaggacgcccacctttgcaggaggagcctactccgttgaaccagtcattccttgagcagagcactgactaagcaccgtgcgacacttcaattcctcacaatctgcgcatggacctgtaagtgagagaagctgccagagtcgtcttgccatgatgcccctgtgttaacttggctcacattgtatctacagatcttgctctacagacggtgttactgctaaggattcggagtgcgaatgcagataccggtgtgtagcataccagcacgttatgangaaggctcttgtagtctgatgtgagagctccgccgctgcaccgtgctgtcacaaaggactgagacagacaatgcagtcttctgacccttgagcgcagggcctgtaacgctgttgcccatactcgatgtaatatcacctcctacaaaagagctattccttgacaccgtgactcaagatgttctctagtttcagacaagtgtaatagacatcttaagcttgctatacaatgcagagctagctactcacatctgccaatactgtattcgctatacatttaacgtgaccgcgtttgacaagttgaagagggggatacccgggagtg

SEQ ID NO: 649410 - DNA, 450 bp, Homo sapiens
  misc_feature (313)..(313): n is a, c, g, or t
  misc_feature (375)..(375): n is a, c, g, or t
  misc_feature (393)..(393): n is a, c, g, or t
  misc_feature (407)..(407): n is a, c, g, or t
  misc_feature (420)..(420): n is a, c, g, or t
tttcttttgttttttgagacagggtctcactctcttgcccaggctggagtacagtgatctcagctcactgcaaccatctccctcccagttccagctattctcctgcctcagcctcccaagttgccagtgtgccactttccattattacttttttttttttaagagaaagggtcttactctgtcacccagggctggaataagtggcatgatcatagctcatttcagtctgggaactcctggggctcaagcaatcctcccacctcggcctccccagtagcggggactgcaggcaggcgccaccatgcctgggctnactttattaggtaattcactggctacaaagtgaggagcagcttcccgggggcacaggaactnccccacacctggcagggntgccccgcagcccncaggccccacacntgggtttttgttccttcaagttccggggat

SEQ ID NO: 649411 - DNA, 117 bp, Homo sapiens
gatgatctacaggagcttaaacacgcaatctcaaccccatctcggtataaaaatacagaaaaaagttagctgggtgtggtggcagtgcgcctgtaattccatgctactcatggaggc

SEQ ID NO: 649412 - DNA, 4309 bp, Homo sapiens
agggcaatcctttctttcagctggaagtgctcctcaggagccagccccacccttagaaaagatgttttccatgaggatcgtctgcctggtcctaagtgtggtgggcacagcatggactgcagatagtggtgaaggtgactttctagctgaaggaggaggcgtgcgtggcccaagggttgtggaaagacatcaatctgcctgcaaagattcagactggcccttctgctctgatgaagactggaactacaaatgcccttctggctgcaggatgaaagggttgattgatgaagtcaatcaagattttacaaacagaataaataagctcaaaaattcactatttgaatatcagaagaacaataaggattctcattcgttgaccactaatataatggaaattttgagaggcgatttttcctcagccaataaccgtgataatacctacaaccgagtgtcagaggatctgagaagcagaattgaagtcctgaagcgcaaagtcatagaaaaagtacagcatatccagcttctgcagaaaaatgttagagctcagttggttgatatgaaacgactggaggtggacattgatattaagatccgatcttgtcgagggtcatgcagtagggctttagctcgtgaagtagatctgaaggactatgaagatcagcagaagcaacttgaacaggtcattgccaaagacttacttccctctagagataggcaacacttaccactgataaaaatgaaaccagttccagacttggttcccggaaattttaagagccagcttcagaaggtacccccagagtggaaggcattaacagacatgccgcagatgagaatggagttagagagacctggtggaaatgagattactcgaggaggctccacctcttatggaaccggatcagagacggaaagccccaggaaccctagcagtgctggaagctggaactctgggagctctggacctggaagtactggaaaccgaaaccctgggagctctgggactggagggactgcaacctggaaacctgggagctctggacctggaagtactggaagctggaactctgggagctctggaactggaagtactggaaaccaaaaccctgggagccctagacctggtagtaccggaacctggaatcctggcagctctgaacgcggaagtgctgggcactggacctctgagagctctgtatctggtagtactggacaatggcactctgaatctggaagttttaggccagatagcccaggctctgggaacgcgaggcctaacaacccagactggggcacatttgaagaggtgtcaggaaatgtaagtccagggacaaggagagagtaccacacagaaaaactggtcacttctaaaggagataaagagctcaggactggtaaagagaaggtcacctctggtagcacaaccaccacgcgtcgttcatgctctaaaaccgttactaagactgttattggtcctgatggtcacaaagaagttaccaaagaagtggtgacctccgaagatggttctgactgtcccgaggcaatggatttaggcacattgtctggcataggtactctggatgggttccgccataggcaccctgatgaagctgccttcttcgacactgcctcaactggaaaaacattcccaggtttcttctcacctatgttaggagagtttgtcagtgagactgagtctaggggctcagaatctggcatcttcacaaatacaaaggaatccagttctcatcaccctgggatagctgaattcccttcccgtggtaaatcttcaagttacagcaaacaatttactagtagcacgagttacaacagaggagactccacatttgaaagcaagagctataaaatggcagatgaggccggaagtgaagccgatcatgaaggaacacatagcaccaagagaggccatgctaaatctcgccctgtcagaggtatccacacttctcctttggggaagccttccctgtccccctagactaagttaaatatttctgcacagtgttcccatggccccttgcatttccttcttaactctctgttacacgtcattgaaactacacttttttggtctgtttttgtgctagactgtaagttccttgggggcagggcctttgtctgtctcatctctgtattcccaaatgcctaacagtacagagccatgactcaataaatacatgttaaatggatgaatgaattcctctgaaactctatttgagcttatttagtcaaattctttcactattcaaagtgtgtgctattagaattgtcacccaactgattaatcacatttttagtatgtgtctcagttgacatttaggtcaggctaaatacaagttgtgttagtattaagtgatgcttagctacctgtactggttacttgctattagtttgtgcaagtaaaattccaaatacatttgaggaaaatcccctttgcaatttgtaggtataaataaccgcttatttgcataagttctatcccactgtaagtgcatcctttccctatggagggaaggaaaggaggaagaaagaaaggaagggaaagaaacagtatttgccttatttaatctgagccgtgcctatctttgtaaagttaaatgagaataacttcttccaaccagcttaattttttttttagactgtgatgatgtcctccaaacacatccttcaggtacccaaagtggcattttcaatatcaagctaccgggatccagtaagattttttctgtttattgcgatcaagagaccagtttgggaggatggcttttgatccagcaaagaatggatggatcactgaattttaaccggacctggcaagactacaagagaggtttcggcagcctgaatgacgagggggaaggagaattctggctaggcaatgactacctccacttactaacccaaaggggctctgttcttagggttgaattagaggactgggctgggaatgaagcttatgcagaatatcacttccgggtaggctctgaggctgaaggctatgccctccaagtctcctcctatgaaggcactgcgggtgatgctctgattgagggttccgtagaggaaggggcagagtacacctctcacaacaacatgcagttcagcacctttgacagggatgcagaccagtgggaagagaactgtgcagaagtctatgggggaggctggtggtataataactgccaagcagccaatctcaatggaatctactaccctgggggctcctatgacccaaggaataacagtccttatgagattgagaatggagtggtctgggtttcctttagaggggcagattattccctcagggctgttcgcatgaaaattaggccccttgtgacccaataggctgaagaagtgggaatgggagcactctgtcttctttgctagagaagtggagagaaaatacaaaaggtaaagcagttgagattctctacaacctaaaaaattcctaggtgctattttcttatcctttgtactgtagctaaatgtacctgagacatattagtctttgacatttttataaagatataccaagggccattcagtacatcaggaaagtggcagacagaagcttctctctgcaaccttgaagactattggtttgagaacttctcttcccataccacccaaaatcataatgccattggaaagcaaaaagttgttttatccatttgatttgaattgttttaagccaatattttaaggtaaaactcactgaatctaaccatagctgacctttgtagtagaatttacaacttataattacaatgcacaatttataattacaatatgtatttatgtcttttgctatggagcaaatccaggaaggcaagagaaacattctttcctaaatataaatgaaaatctatcctttaaactcttccactagacgttgtaatgcacacttatttttttcccaaggagtaaccaatttctttctaaaacacatttaaaattttaaaactatttatgaatattaaaaaaagacataattcacacattaataaacaatctcccaagtattgatttaacttcatttttctaataatcataaactatattctgtgacatgctaattattattaaatgtaagtcgttagttcgaaagcctctcactaagtatgatctatgctatattcaaaattcaacccatttactttggtcaatatttgatctaagttgcatctttaatcctggtggtcttgccttctgatttttaatttgtatccttttctattaagatatatttgtcattttctcttgaatatgtattaaaatatcccaagca

SEQ ID NO: 649413 - DNA, 4725 bp, Homo sapiens
agggcaatcctttctttcagctggaagtgctcctcaggagccagccccacccttagaaaagatgttttccatgaggatcgtctgcctggtcctaagtgtggtgggcacagcatggactgcagatagtggtgaaggtgactttctagctgaaggaggaggcgtgcgtggcccaagggttgtggaaagacatcaatctgcctgcaaagattcagactggcccttctgctctgatgaagactggaactacaaatgcccttctggctgcaggatgaaagggttgattgatgaagtcaatcaagattttacaaacagaataaataagctcaaaaattcactatttgaatatcagaagaacaataaggattctcattcgttgaccactaatataatggaaattttgagaggcgatttttcctcagccaataaccgtgataatacctacaaccgagtgtcagaggatctgagaagcagaattgaagtcctgaagcgcaaagtcatagaaaaagtacagcatatccagcttctgcagaaaaatgttagagctcagttggttgatatgaaacgactggaggtggacattgatattaagatccgatcttgtcgagggtcatgcagtagggctttagctcgtgaagtagatctgaaggactatgaagatcagcagaagcaacttgaacaggtcattgccaaagacttacttccctctagagataggcaacacttaccactgataaaaatgaaaccagttccagacttggttcccggaaattttaagagccagcttcagaaggtacccccagagtggaaggcattaacagacatgccgcagatgagaatggagttagagagacctggtggaaatgagattactcgaggaggctccacctcttatggaaccggatcagagacggaaagccccaggaaccctagcagtgctggaagctggaactctgggagctctggacctggaagtactggaaaccgaaaccctgggagctctgggactggagggactgcaacctggaaacctgggagctctggacctggaagtactggaagctggaactctgggagctctggaactggaagtactggaaaccaaaaccctgggagccctagacctggtagtaccggaacctggaatcctggcagctctgaacgcggaagtgctgggcactggacctctgagagctctgtatctggtagtactggacaatggcactctgaatctggaagttttaggccagatagcccaggctctgggaacgcgaggcctaacaacccagactggggcacatttgaagaggtgtcaggaaatgtaagtccagggacaaggagagagtaccacacagaaaaactggtcacttctaaaggagataaagagctcaggactggtaaagagaaggtcacctctggtagcacaaccaccacgcgtcgttcatgctctaaaaccgttactaagactgttattggtcctgatggtcacaaagaagttaccaaagaagtggtgacctccgaagatggttctgactgtcccgaggcaatggatttaggcacattgtctggcataggtactctggatgggttccgccataggcaccctgatgaagctgccttcttcgacactgcctcaactggaaaaacattcccaggtttcttctcacctatgttaggagagtttgtcagtgagactgagtctaggggctcagaatctggcatcttcacaaatacaaaggaatccagttctcatcaccctgggatagctgaattcccttcccgtggtaaatcttcaagttacagcaaacaatttactagtagcacgagttacaacagaggagactccacatttgaaagcaagagctataaaatggcagatgaggccggaagtgaagccgatcatgaaggaacacatagcaccaagagaggccatgctaaatctcgccctgtcagaggtatccacacttctcctttggggaagccttccctgtccccctagactaagttaaatatttctgcacagtgttcccatggccccttgcatttccttcttaactctctgttacacgtcattgaaactacacttttttggtctgtttttgtgctagactgtaagttccttgggggcagggcctttgtctgtctcatctctgtattcccaaatgcctaacagtacagagccatgactcaataaatacatgttaaatggatgaatgaattcctctgaaactctatttgagcttatttagtcaaattctttcactattcaaagtgtgtgctattagaattgtcacccaactgattaatcacatttttagtatgtgtctcagttgacatttaggtcaggctaaatacaagttgtgttagtattaagtgatgcttagctacctgtactggttacttgctattagtttgtgcaagtaaaattccaaatacatttgaggaaaatcccctttgcaatttgtaggtataaataaccgcttatttgcataagttctatcccactgtaagtgcatcctttccctatggagggaaggaaaggaggaagaaagaaaggaagggaaagaaacagtatttgccttatttaatctgagccgtgcctatctttgtaaagttaaatgagaataacttcttccaaccagcttaattttttttttagactgtgatgatgtcctccaaacacatccttcaggtacccaaagtggcattttcaatatcaagctaccgggatccagtaagattttttctgtttattgcgatcaagagaccagtttgggaggatggcttttgatccagcaaagaatggatggatcactgaattttaaccggacctggcaagactacaagagaggtttcggcagcctgaatgacgagggggaaggagaattctggctaggcaatgactacctccacttactaacccaaaggggctctgttcttagggttgaattagaggactgggctgggaatgaagcttatgcagaatatcacttccgggtaggctctgaggctgaaggctatgccctccaagtctcctcctatgaaggcactgcgggtgatgctctgattgagggttccgtagaggaaggggcagagtacacctctcacaacaacatgcagttcagcacctttgacagggatgcagaccagtgggaagagaactgtgcagaagtctatgggggaggctggtggtataataactgccaagcagccaatctcaatggaatctactaccctgggggctcctatgacccaaggaataacagtccttatgagattgagaatggagtggtctgggtttcctttagaggggcagattattccctcagggctgttcgcatgaaaattaggccccttgtgacccaataggctgaagaagtgggaatgggagcactctgtcttcgaagtgggaatgggagcactctgtcttctttgctagagaagtggagagaaaatacaaaaggtaaagcagttgagattctctacaacctaaaaaattcctaggtgctattttcttatcctttgtactgtagctaaatgtacctgagacatattagtctttgaaaaataaagttatgtaaggttttttttatctttaaatagctctgtgggttttaacatttttataaagatataccaagggccattcagtacatcaggaaagtggcagacagaagcttctctctgcaaccttgaagactattggtttgagaacttctcttcccataccacccaaaatcataatgccattggaaagcaaaaagttgttttatccatttgatttgaattgttttaagccaatattttaaggtaaaactcactgaatctaaccatagctgacctttgtagtagaatttacaacttataattacaatgcacaatttataattacaatatgtatttatgtcttttgctatggagcaaatccaggaaggcaagagaaacattctttcctaaatataaatgaaaatctatcctttaaactcttccactagacgttgtaatgcacacttatttttttcccaaggagtaaccaatttctttctaaaacacatttaaaattttaaaactatttatgaatattaaaaaaagacataattcacacattaataaacaatctcccaagtattgatttaacttcatttttctaataatcataaactatattctgtgacatgctaattattattaaatgtaagtcgttagttcgaaagcctctcactaagtatgatctatgctatattcaaaattcaacccatttactttggtcaatatttgatctaagttgcatctttaatcctggtggtcttgccttctgatttttaatttgtatccttttctattaagatatatttgtcattttctcttgaatatgtattaaaatatcccaagcaaaaaaaaaaaaaaaaaaaaaaaaaaaaaaaaaaaaaaaaaaaaaaaaaaaaaaaaaaaacaaaaagcaacaagagtagagcggcagcagagaggcacaaggaaggtgtcgagcacccccggggggggcgaggggacaccaagggaggggagaggtggacacaagggtgcacaaaaagaaacatccggacaaaaacaatggggagagactctaccaaaaaaaaacacgcgcgggggaacacaaagagtgagagagaacagccacagaagagctctcgagggaacaacagggagccacataagagatgaagaggacggcctgaaaaagagtcgcgg

SEQ ID NO: 649414 - DNA, 191 bp, Homo sapiens
aaatagtgtacatgtcatttatgcgagatgaaggatgacaagtaagcctgaggatgtctatgattgtgtagtatgggttgaaggtgatttacactcgtgaatgcgacgtgatccctaagggtgttgtttgtggcaataaaaatgattaaggatactagtataagatatcaggttcgtcctttattgttgtg

SEQ ID NO: 649415 - DNA, 4429 bp, Homo sapiens
agggcaatcctttctttcagctggaagtgctcctcaggagccagccccacccttagaaaagatgttttccatgaggatcgtctgcctggtcctaagtgtggtgggcacagcatggactgcagatagtggtgaaggtgactttctagctgaaggaggaggcgtgcgtggcccaagggttgtggaaagacatcaatctgcctgcaaagattcagactggcccttctgctctgatgaagactggaactacaaatgcccttctggctgcaggatgaaagggttgattgatgaagtcaatcaagattttacaaacagaataaataagctcaaaaattcactatttgaatatcagaagaacaataaggattctcattcgttgaccactaatataatggaaattttgagaggcgatttttcctcagccaataaccgtgataatacctacaaccgagtgtcagaggatctgagaagcagaattgaagtcctgaagcgcaaagtcatagaaaaagtacagcatatccagcttctgcagaaaaatgttagagctcagttggttgatatgaaacgactggaggtggacattgatattaagatccgatcttgtcgagggtcatgcagtagggctttagctcgtgaagtagatctgaaggactatgaagatcagcagaagcaacttgaacaggtcattgccaaagacttacttccctctagagataggcaacacttaccactgataaaaatgaaaccagttccagacttggttcccggaaattttaagagccagcttcagaaggtacccccagagtggaaggcattaacagacatgccgcagatgagaatggagttagagagacctggtggaaatgagattactcgaggaggctccacctcttatggaaccggatcagagacggaaagccccaggaaccctagcagtgctggaagctggaactctgggagctctggacctggaagtactggaaaccgaaaccctgggagctctgggactggagggactgcaacctggaaacctgggagctctggacctggaagtactggaagctggaactctgggagctctggaactggaagtactggaaaccaaaaccctgggagccctagacctggtagtaccggaacctggaatcctggcagctctgaacgcggaagtgctgggcactggacctctgagagctctgtatctggtagtactggacaatggcactctgaatctggaagttttaggccagatagcccaggctctgggaacgcgaggcctaacaacccagactggggcacatttgaagaggtgtcaggaaatgtaagtccagggacaaggagagagtaccacacagaaaaactggtcacttctaaaggagataaagagctcaggactggtaaagagaaggtcacctctggtagcacaaccaccacgcgtcgttcatgctctaaaaccgttactaagactgttattggtcctgatggtcacaaagaagttaccaaagaagtggtgacctccgaagatggttctgactgtcccgaggcaatggatttaggcacattgtctggcataggtactctggatgggttccgccataggcaccctgatgaagctgccttcttcgacactgcctcaactggaaaaacattcccaggtttcttctcacctatgttaggagagtttgtcagtgagactgagtctaggggctcagaatctggcatcttcacaaatacaaaggaatccagttctcatcaccctgggatagctgaattcccttcccgtggtaaatcttcaagttacagcaaacaatttactagtagcacgagttacaacagaggagactccacatttgaaagcaagagctataaaatggcagatgaggccggaagtgaagccgatcatgaaggaacacatagcaccaagagaggccatgctaaatctcgccctgtcagaggtatccacacttctcctttggggaagccttccctgtccccctagactaagttaaatatttctgcacagtgttcccatggccccttgcatttccttcttaactctctgttacacgtcattgaaactacacttttttggtctgtttttgtgctagactgtaagttccttgggggcagggcctttgtctgtctcatctctgtattcccaaatgcctaacagtacagagccatgactcaataaatacatgttaaatggatgaatgaattcctctgaaactctatttgagcttatttagtcaaattctttcactattcaaagtgtgtgctattagaattgtcacccaactgattaatcacatttttagtatgtgtctcagttgacatttaggtcaggctaaatacaagttgtgttagtattaagtgatgcttagctacctgtactggttacttgctattagtttgtgcaagtaaaattccaaatacatttgaggaaaatcccctttgcaatttgtaggtataaataaccgcttatttgcataagttctatcccactgtaagtgcatcctttccctatggagggaaggaaaggaggaagaaagaaaggaagggaaagaaacagtatttgccttatttaatctgagccgtgcctatctttgtaaagttaaatgagaataacttcttccaaccagcttaattttttttttagactgtgatgatgtcctccaaacacatccttcaggtacccaaagtggcattttcaatatcaagctaccgggatccagtaagattttttctgtttattgcgatcaagagaccagtttgggaggatggcttttgatccagcaaagaatggatggatcactgaattttaaccggacctggcaagactacaagagaggtttcggcagcctgaatgacgagggggaaggagaattctggctaggcaatgactacctccacttactaacccaaaggggctctgttcttagggttgaattagaggactgggctgggaatgaagcttatgcagaatatcacttccgggtaggctctgaggctgaaggctatgccctccaagtctcctcctatgaaggcactgcgggtgatgctctgattgagggttccgtagaggaaggggcagagtacacctctcacaacaacatgcagttcagcacctttgacagggatgcagaccagtgggaagagaactgtgcagaagtctatgggggaggctggtggtataataactgccaagcagccaatctcaatggaatctactaccctgggggctcctatgacccaaggaataacagtccttatgagattgagaatggagtggtctgggtttcctttagaggggcagattattccctcagggctgttcgcatgaaaattaggccccttgtgacccaataggctgaagaagtgggaatgggagcactctgtcttctttgctagagaagtggagagaaaatacaaaaggtaaagcagttgagattctctacaacctaaaaaattcctaggtgctattttcttatcctttgtactgtagctaaatgtacctgagacatattagtctttgaaggagacgcaatcattgagtcttatcgaaacagttacatagttacatgttacacggttattggtatggtatctgtatggacattagcttcggtgcgtgtttttacaaattttccataacagatcatcacctaattgggcctattcgacgtcacgattccaggaaagtggcagacagaagcttctctctgcaaccttgaagactattggtttgagaacttctcttcccataccacccaaaatcataatgccattggaaagcaaaaagttgttttatccatttgatttgaattgttttaagccaatattttaaggtaaaactcactgaatctaaccatagctgacctttgtagtagaatttacaacttataattacaatgcacaatttataattacaatatgtatttatgtcttttgctatggagcaaatccaggaaggcaagagaaacattctttcctaaatataaatgaaaatctatcctttaaactcttccactagacgttgtaatgcacacttatttttttcccaaggagtaaccaatttctttctaaaacacatttaaaattttaaaactatttatgaatattaaaaaaagacataattcacacattaataaacaatctcccaagtattgatttaacttcatttttctaataatcataaactatattctgtgacatgctaattattattaaatgtaagtcgttagttcgaaagcctctcactaagtatgatctatgctatattcaaaattcaacccatttactttggtcaatatttgatctaagttgcatctttaatcctggtggtcttgccttctgatttttaatttgtatccttttctattaagatatatttgtcattttctcttgaatatgtattaaaatatcccaagca

SEQ ID NO: 649416 - DNA, 3889 bp, Homo sapiens
agggcaatcctttctttcagctggaagtgctcctcaggagccagccccacccttagaaaagatgttttccatgaggatcgtctgcctggtcctaagtgtggtgggcacagcatggactgcagatagtggtgaaggtgactttctagctgaaggaggaggcgtgcgtggcccaagggttgtggaaagacatcaatctgcctgcaaagattcagactggcccttctgctctgatgaagactggaactacaaatgcccttctggctgcaggatgaaagggttgattgatgaagtcaatcaagattttacaaacagaataaataagctcaaaaattcactatttgaatatcagaagaacaataaggattctcattcgttgaccactaatataatggaaattttgagaggcgatttttcctcagccaataaccgtgataatacctacaaccgagtgtcagaggatctgagaagcagaattgaagtcctgaagcgcaaagtcatagaaaaagtacagcatatccagcttctgcagaaaaatgttagagctcagttggttgatatgaaacgactggaggtggacattgatattaagatccgatcttgtcgagggtcatgcagtagggctttagctcgtgaagtagatctgaaggactatgaagatcagcagaagcaacttgaacaggtcattgccaaagacttacttccctctagagataggcaacacttaccactgataaaaatgaaaccagttccagacttggttcccggaaattttaagagccagcttcagaaggtacccccagagtggaaggcattaacagacatgccgcagatgagaatggagttagagagacctggtggaaatgagattactcgaggaggctccacctcttatggaaccggatcagagacggaaagccccaggaaccctagcagtgctggaagctggaactctgggagctctggacctggaagtactggaaaccgaaaccctgggagctctgggactggagggactgcaacctggaaacctgggagctctggacctggaagtactggaagctggaactctgggagctctggaactggaagtactggaaaccaaaaccctgggagccctagacctggtagtaccggaacctggaatcctggcagctctgaacgcggaagtgctgggcactggacctctgagagctctgtatctggtagtactggacaatggcactctgaatctggaagttttaggccagatagcccaggctctgggaacgcgaggcctaacaacccagactggggcacatttgaagaggtgtcaggaaatgtaagtccagggacaaggagagagtaccacacagaaaaactggtcacttctaaaggagataaagagctcaggactggtaaagagaaggtcacctctggtagcacaaccaccacgcgtcgttcatgctctaaaaccgttactaagactgttattggtcctgatggtcacaaagaagttaccaaagaagtggtgacctccgaagatggttctgactgtcccgaggcaatggatttaggcacattgtctggcataggtactctggatgggttccgccataggcaccctgatgaagctgccttcttcgacactgcctcaactggaaaaacattcccaggtttcttctcacctatgttaggagagtttgtcagtgagactgagtctaggggctcagaatctggcatcttcacaaatacaaaggaatccagttctcatcaccctgggatagctgaattcccttcccgtggtaaatcttcaagttacagcaaacaatttactagtagcacgagttacaacagaggagactccacatttgaaagcaagagctataaaatggcagatgaggccggaagtgaagccgatcatgaaggaacacatagcaccaagagaggccatgctaaatctcgccctgtcagaggtatccacacttctcctttggggaagccttccctgtccccctagactaagttaaatatttctgcacagtgttcccatggccccttgcatttccttcttaactctctgttacacgtcattgaaactacacttttttggtctgtttttgtgctagactgtaagttccttgggggcagggcctttgtctgtctcatctctgtattcccaaatgcctaacagtacagagccatgactcaataaatacatgttaaatggatgaatgaattcctctgaaactctatttgagcttatttagtcaaattctttcactattcaaagtgtgtgctattagaattgtcacccaactgattaatcacatttttagtatgtgtctcagttgacatttaggtcaggctaaatacaagttgtgttagtattaagtgatgcttagctacctgtactggttacttgctattagtttgtgcaagtaaaattccaaatacatttgaggaaaatcccctttgcaatttgtaggtataaataaccgcttatttgcataagttctatcccactgtaagtgcatcctttccctatggagggaaggaaaggaggaagaaagaaaggaagggaaagaaacagtatttgccttatttaatctgagccgtgcctatctttgtaaagttaaatgagaataacttcttccaaccagcttaattttttttttagactgtgatgatgtcctccaaacacatccttcaggtacccaaagtggcattttcaatatcaagctaccgggatccagtaagattttttctgtttattgcgatcaagagaccagtttgggaggatggcttttgatccagcaaagaatggatggatcactgaattttaaccggacctggcaagactacaagagaggtttcggcagcctgaatgacgagggggaaggagaattctggctaggcaatgactacctccacttactaacccaaaggggctctgttcttagggttgaattagaggactgggctgggaatgaagcttatgcagaatatcacttccgggtaggctctgaggctgaaggctatgccctccaagtctcctcctatgaaggcactgcgggtgatgctctgattgagggttccgtagaggaaggggcagagtacacctctcacaacaacatgcagttcagcacctttgacagggatgcagaccagtgggaagagaactgtgcagaagtctatgggggaggctggtggtataataactgccaagcagccaatctcaatggaatctactaccctgggggctcctatgacccaaggaataacagtccttatgagattgagaatggagtggtctgggtttcctttagaggggcagattattccctcagggctgttcgcatgaaaattaggccccttgtgacccaataggctgaagaagtgggaatgggagcactctgtcttctttgctagagaagtggagagaaaatacaaaaggtaaagcagttgagattctctacaacctaaaaaattcctaggtgctattttcttatcctttgtactgtagctaaatgtacctgagacatattagtctttgacatttttataaagatataccaagggccattcagtacatcaggaaagtggcagacagaagcttctctctgcaaccttgaagactattggtttgagaacttctcttcccataccacccaaaatcataatgccattggaaagcaaaaagttgttttatccatttgatttgaattgttttaagccaatattttaaggtaaaactcactgaatctacctagtgacttgagagattacactatatacatgccattatatacatatgatatgctttgatgacaatcagaggagaaactcttctaataatgaacatcttaacttcctgactgatgcatattttcagagacatttttaccataaa

SEQ ID NO: 649417 - DNA, 238 bp, Homo sapiens
aatggaaatattggatttttactgagtagcgctagctctgctacccggggcgcatgcgcatcacctgggcggaacccgcggaactgcgcctgcgcggccttgggccttccaaggtccgttccacgagggcaagcgcgccccagacccactcgtgcgccgttcttaatgtccccgcggtcgaaaacggtcacatacgcccccaagaaaacattgccaaggatccacacaggtcctggag

SEQ ID NO: 649418 - DNA, 4724 bp, Homo sapiens
  misc_feature (3008)..(3008): n is a, c, g, or t
  misc_feature (3014)..(3014): n is a, c, g, or t
  misc_feature (3023)..(3023): n is a, c, g, or t
  misc_feature (3029)..(3029): n is a, c, g, or t
  misc_feature (3032)..(3032): n is a, c, g, or t
  misc_feature (3034)..(3034): n is a, c, g, or t
  misc_feature (3060)..(3060): n is a, c, g, or t
agggcaatcctttctttcagctggaagtgctcctcaggagccagccccacccttagaaaagatgttttccatgaggatcgtctgcctggtcctaagtgtggtgggcacagcatggactgcagatagtggtgaaggtgactttctagctgaaggaggaggcgtgcgtggcccaagggttgtggaaagacatcaatctgcctgcaaagattcagactggcccttctgctctgatgaagactggaactacaaatgcccttctggctgcaggatgaaagggttgattgatgaagtcaatcaagattttacaaacagaataaataagctcaaaaattcactatttgaatatcagaagaacaataaggattctcattcgttgaccactaatataatggaaattttgagaggcgatttttcctcagccaataaccgtgataatacctacaaccgagtgtcagaggatctgagaagcagaattgaagtcctgaagcgcaaagtcatagaaaaagtacagcatatccagcttctgcagaaaaatgttagagctcagttggttgatatgaaacgactggaggtggacattgatattaagatccgatcttgtcgagggtcatgcagtagggctttagctcgtgaagtagatctgaaggactatgaagatcagcagaagcaacttgaacaggtcattgccaaagacttacttccctctagagataggcaacacttaccactgataaaaatgaaaccagttccagacttggttcccggaaattttaagagccagcttcagaaggtacccccagagtggaaggcattaacagacatgccgcagatgagaatggagttagagagacctggtggaaatgagattactcgaggaggctccacctcttatggaaccggatcagagacggaaagccccaggaaccctagcagtgctggaagctggaactctgggagctctggacctggaagtactggaaaccgaaaccctgggagctctgggactggagggactgcaacctggaaacctgggagctctggacctggaagtactggaagctggaactctgggagctctggaactggaagtactggaaaccaaaaccctgggagccctagacctggtagtaccggaacctggaatcctggcagctctgaacgcggaagtgctgggcactggacctctgagagctctgtatctggtagtactggacaatggcactctgaatctggaagttttaggccagatagcccaggctctgggaacgcgaggcctaacaacccagactggggcacatttgaagaggtgtcaggaaatgtaagtccagggacaaggagagagtaccacacagaaaaactggtcacttctaaaggagataaagagctcaggactggtaaagagaaggtcacctctggtagcacaaccaccacgcgtcgttcatgctctaaaaccgttactaagactgttattggtcctgatggtcacaaagaagttaccaaagaagtggtgacctccgaagatggttctgactgtcccgaggcaatggatttaggcacattgtctggcataggtactctggatgggttccgccataggcaccctgatgaagctgccttcttcgacactgcctcaactggaaaaacattcccaggtttcttctcacctatgttaggagagtttgtcagtgagactgagtctaggggctcagaatctggcatcttcacaaatacaaaggaatccagttctcatcaccctgggatagctgaattcccttcccgtggtaaatcttcaagttacagcaaacaatttactagtagcacgagttacaacagaggagactccacatttgaaagcaagagctataaaatggcagatgaggccggaagtgaagccgatcatgaaggaacacatagcaccaagagaggccatgctaaatctcgccctgtcagaggtatccacacttctcctttggggaagccttccctgtccccctagactaagttaaatatttctgcacagtgttcccatggccccttgcatttccttcttaactctctgttacacgtcattgaaactacacttttttggtctgtttttgtgctagactgtaagttccttgggggcagggcctttgtctgtctcatctctgtattcccaaatgcctaacagtacagagccatgactcaataaatacatgttaaatggatgaatgaattcctctgaaactctatttgagcttatttagtcaaattctttcactattcaaagtgtgtgctattagaattgtcacccaactgattaatcacatttttagtatgtgtctcagttgacatttaggtcaggctaaatacaagttgtgttagtattaagtgatgcttagctacctgtactggttacttgctattagtttgtgcaagtaaaattccaaatacatttgaggaaaatcccctttgcaatttgtaggtataaataaccgcttatttgcataagttctatcccactgtaagtgcatcctttccctatggagggaaggaaaggaggaagaaagaaaggaagggaaagaaacagtatttgccttatttaatctgagccgtgcctatctttgtaaagttaaatgagaataacttcttccaaccagcttaattttttttttagactgtgatgatgtcctccaaacacatccttcaggtacccaaagtggcattttcaatatcaagctaccgggatccagtaagattttttctgtttattgcgatcaagagaccagtttgggaggatggcttttgatccagcaaagaatggatggatcactgaattttaaccggacctggcaagactacaagagaggtttcggcagcctgaatgacgagggggaaggagaattctggctaggcaatgactacctccacttactaacccaaaggggctctgttcttagggttgaattagaggactgggctgggaatgaagcttatgcagaatatcacttccgggtaggctctgatgnttaatnttttccttncttttntcntntttttttttcacttcttttttttctnttttttatttttcctttgaggaaggggcagagtacacctctcacaacaacatgcagttcagcacctttgacagggatgcagaccagtgggaagagaactgtgcagaagtctatgggggaggctggtggtataataactgccaagcagccaatctcaatggaatctactaccctgggggctcctatgacccaaggaataacagtccttatgagattgagaatggagtggtctgggtttcctttagaggggcagattattccctcagggctgttcgcatgaaaattaggccccttgtgacccaataggctgaagaagtgggaatgggagcactctgtcttcgaagtgggaatgggagcactctgtcttctttgctagagaagtggagagaaaatacaaaaggtaaagcagttgagattctctacaacctaaaaaattcctaggtgctattttcttatcctttgtactgtagctaaatgtacctgagacatattagtctttgaaaaataaagttatgtaaggttttttttatctttaaatagctctgtgggttttaacatttttataaagatataccaagggccattcagtacatcaggaaagtggcagacagaagcttctctctgcaaccttgaagactattggtttgagaacttctcttcccataccacccaaaatcataatgccattggaaagcaaaaagttgttttatccatttgatttgaattgttttaagccaatattttaaggtaaaactcactgaatctaaccatagctgacctttgtagtagaatttacaacttataattacaatgcacaatttataattacaatatgtatttatgtcttttgctatggagcaaatccaggaaggcaagagaaacattctttcctaaatataaatgaaaatctatcctttaaactcttccactagacgttgtaatgcacacttatttttttcccaaggagtaaccaatttctttctaaaacacatttaaaattttaaaactatttatgaatattaaaaaaagacataattcacacattaataaacaatctcccaagtattgatttaacttcatttttctaataatcataaactatattctgtgacatgctaattattattaaatgtaagtcgttagttcgaaagcctctcactaagtatgatctatgctatattcaaaattcaacccatttactttggtcaatatttgatctaagttgcatctttaatcctggtggtcttgccttctgatttttaatttgtatccttttctattaagatatatttgtcattttctcttgaatatgtattaaaatatcccaagcaaaaaaaaaaaaaaaaaaaaaaaaaaaaaaaaaaaaaaaaaaaaaaaaaaaaaaaaaaaacaaaaagcaacaagagtagagcggcagcagagaggcacaaggaaggtgtcgagcacccccggggggggcgaggggacaccaagggaggggagaggtggacacaagggtgcacaaaaagaaacatccggacaaaaacaatggggagagactctaccaaaaaaaaacacgcgcgggggaacacaaagagtgagagagaacagccacagaagagctctcgagggaacaacagggagccacataagagatgaagaggacggcctgaaaaagagtcgcgg

SEQ ID NO: 649419 - DNA, 910 bp, Homo sapiens
taaaatgttcagcttttaattagaacatgtatatagaaagaggtttagccaaaaaaaccaaagcccatgtcatctatcaaactcctcggatccttcttttcttggtctcttcacttttcttccttctcctctcatgctgtgagagcagcacgaagtgtggagggggacaggaccctcctgtgctgagatgcaagcaccaagcagtgcgtgagaacgcagtatccaccgggcccctatacattgtgcaaatatgatggctctcccaatgtgtgtgactgtgtgcgccagaggccttatgtgaccaacaccaaacagcacagggcacacaaaaagcggctctcaaacattataacccgcacgagacagtgcttttaaactgatgagggagacattgtgatctctgtatatctctctctcgctgtagtaaaacagtgttcccacctactcatctctgtctgcggagacaaaaaaagtgaaggggcccagaaagtttacaatgtggccgaggagacgacaagaccttgcgggaaagaaacacagaaatggccccagtggggcgccgcgagaggccgacagagtgtatagcgggatagtgagaacggcccttggcgcgagacaccgggccgagggggcaatagaaactgcacagcgcgagaaaaactaacagaagtgttgtaagggagcacccaactcaacacccaccaaaagcggacagagccaacaatatagcagcgatactcaccaatcgaggacagagggggcaacgagaaagacaacaccgccgggagcagagctattgggctcaaagtcacgagctgaaacccagtttcacacccactcgaggagcagggggaaccgacaaaagagtcggaggccctcaaacgtgagcagtagatggtgggggaccccc

SEQ ID NO: 649420 - DNA, 4337 bp, Homo sapiens
agggcaatcctttctttcagctggaagtgctcctcaggagccagccccacccttagaaaagatgttttccatgaggatcgtctgcctggtcctaagtgtggtgggcacagcatggactgcagatagtggtgaaggtgactttctagctgaaggaggaggcgtgcgtggcccaagggttgtggaaagacatcaatctgcctgcaaagattcagactggcccttctgctctgatgaagactggaactacaaatgcccttctggctgcaggatgaaagggttgattgatgaagtcaatcaagattttacaaacagaataaataagctcaaaaattcactatttgaatatcagaagaacaataaggattctcattcgttgaccactaatataatggaaattttgagaggcgatttttcctcagccaataaccgtgataatacctacaaccgagtgtcagaggatctgagaagcagaattgaagtcctgaagcgcaaagtcatagaaaaagtacagcatatccagcttctgcagaaaaatgttagagctcagttggttgatatgaaacgactggaggtggacattgatattaagatccgatcttgtcgagggtcatgcagtagggctttagctcgtgaagtagatctgaaggactatgaagatcagcagaagcaacttgaacaggtcattgccaaagacttacttccctctagagataggcaacacttaccactgataaaaatgaaaccagttccagacttggttcccggaaattttaagagccagcttcagaaggtacccccagagtggaaggcattaacagacatgccgcagatgagaatggagttagagagacctggtggaaatgagattactcgaggaggctccacctcttatggaaccggatcagagacggaaagccccaggaaccctagcagtgctggaagctggaactctgggagctctggacctggaagtactggaaaccgaaaccctgggagctctgggactggagggactgcaacctggaaacctgggagctctggacctggaagtactggaagctggaactctgggagctctggaactggaagtactggaaaccaaaaccctgggagccctagacctggtagtaccggaacctggaatcctggcagctctgaacgcggaagtgctgggcactggacctctgagagctctgtatctggtagtactggacaatggcactctgaatctggaagttttaggccagatagcccaggctctgggaacgcgaggcctaacaacccagactggggcacatttgaagaggtgtcaggaaatgtaagtccagggacaaggagagagtaccacacagaaaaactggtcacttctaaaggagataaagagctcaggactggtaaagagaaggtcacctctggtagcacaaccaccacgcgtcgttcatgctctaaaaccgttactaagactgttattggtcctgatggtcacaaagaagttaccaaagaagtggtgacctccgaagatggttctgactgtcccgaggcaatggatttaggcacattgtctggcataggtactctggatgggttccgccataggcaccctgatgaagctgccttcttcgacactgcctcaactggaaaaacattcccaggtttcttctcacctatgttaggagagtttgtcagtgagactgagtctaggggctcagaatctggcatcttcacaaatacaaaggaatccagttctcatcaccctgggatagctgaattcccttcccgtggtaaatcttcaagttacagcaaacaatttactagtagcacgagttacaacagaggagactccacatttgaaagcaagagctataaaatggcagatgaggccggaagtgaagccgatcatgaaggaacacatagcaccaagagaggccatgctaaatctcgccctgtcagaggtatccacacttctcctttggggaagccttccctgtccccctagactaagttaaatatttctgcacagtgttcccatggccccttgcatttccttcttaactctctgttacacgtcattgaaactacacttttttggtctgtttttgtgctagactgtaagttccttgggggcagggcctttgtctgtctcatctctgtattcccaaatgcctaacagtacagagccatgactcaataaatacatgttaaatggatgaatgaattcctctgaaactctatttgagcttatttagtcaaattctttcactattcaaagtgtgtgctattagaattgtcacccaactgattaatcacatttttagtatgtgtctcagttgacatttaggtcaggctaaatacaagttgtgttagtattaagtgatgcttagctacctgtactggttacttgctattagtttgtgcaagtaaaattccaaatacatttgaggaaaatcccctttgcaatttgtaggtataaataaccgcttatttgcataagttctatcccactgtaagtgcatcctttccctatggagggaaggaaaggaggaagaaagaaaggaagggaaagaaacagtatttgccttatttaatctgagccgtgcctatctttgtaaagttaaatgagaataacttcttccaaccagcttaattttttttttagactgtgatgatgtcctccaaacacatccttcaggtacccaaagtggcattttcaatatcaagctaccgggatccagtaagattttttctgtttattgcgatcaagagaccagtttgggaggatggcttttgatccagcaaagaatggatggatcactgaattttaaccggacctggcaagactacaagagaggtttcggcagcctgaatgacgagggggaaggagaattctggctaggcaatgactacctccacttactaacccaaaggggctctgttcttagggttgaattagaggactgggctgggaatgaagcttatgcagaatatcacttccgggtaggctctgaggctgaaggctatgccctccaagtctcctcctatgaaggcactgcgggtgatgctctgattgagggttccgtagaggaaggggcagagtacacctctcacaacaacatgcagttcagcacctttgacagggatgcagaccagtgggaagagaactgtgcagaagtctatgggggaggctggtggtataataactgccaagcagccaatctcaatggaatctactaccctgggggctcctatgacccaaggaataacagtccttatgagattgagaatggagtggtctgggtttcctttagaggggcagattattccctcagggctgttcgcatgaaaattaggccccttgtgacccaataggctgaagaagtgggaatgggagcactctgtcttcgaagtgggaatgggagcactctgtcttctttgctagagaagtggagagaaaatacaaaaggtaaagcagttgagattctctacaacctaaaaaattcctaggtgctattttcttatcctttgtactgtagctaaatgtacctgagacatattagtctttgacatttttataaagatataccaagggccattcagtacatcaggaaagtggcagacagaagcttctctctgcaaccttgaagactattggtttgagaacttctcttcccataccacccaaaatcataatgccattggaaagcaaaaagttgttttatccatttgatttgaattgttttaagccaatattttaaggtaaaactcactgaatctaaccatagctgacctttgtagtagaatttacaacttataattacaatgcacaatttataattacaatatgtatttatgtcttttgctatggagcaaatccaggaaggcaagagaaacattctttcctaaatataaatgaaaatctatcctttaaactcttccactagacgttgtaatgcacacttatttttttcccaaggagtaaccaatttctttctaaaacacatttaaaattttaaaactatttatgaatattaaaaaaagacataattcacacattaataaacaatctcccaagtattgatttaacttcatttttctaataatcataaactatattctgtgacatgctaattattattaaatgtaagtcgttagttcgaaagcctctcactaagtatgatctatgctatattcaaaattcaacccatttactttggtcaatatttgatctaagttgcatctttaatcctggtggtcttgccttctgatttttaatttgtatccttttctattaagatatatttgtcattttctcttgaatatgtattaaaatatcccaagca

SEQ ID NO: 649421 - DNA, 276 bp, Homo sapiens
ctccatctcaaaaagagaaaaacaaagtcctttaaaactgtctttgtgcctggtctgcagtgatccatgcctgtaatcgcagcactttggcaggccaaggtgcgaggatcacttgagctcaggaatttgaacctagcctgggcaccataaggagacctcatctctacaaacaaaatacgaaaactgtttcttgttatatagaaactcaatccgtcttcatatggtgtctctatagctaatatacggttccacaaaccatggccactcccgtaccag

SEQ ID NO: 649422 - DNA, 374 bp, Homo sapiens
ggtcgcaggatgagcaatattaaatcatagaacaaacaaaaggggccgctgataacacgtgcatagagccggcggacacctgggtcagctgggtttactctagaatttcactggtcggtcccaccccacttcttccaccccacttcttccttcaccaacatgcaagttctttccttcccggccagccagatagatagacagatgggaaaggcaggcgcggccttcgtggtcagtagttctttgatgtgaaaggggcagcacagtcatttaaacttgatccaacctcttggcatcttacaaagttaaacagctaaaagaagtaaaataagagggcaaggctggtggaaggtacagggcatatgggctgcacccgg

SEQ ID NO: 649423 - DNA, 3792 bp, Homo sapiens
agggcaatcctttctttcagctggaagtgctcctcaggagccagccccacccttagaaaagatgttttccatgaggatcgtctgcctggtcctaagtgtggtgggcacagcatggactgcagatagtggtgaaggtgactttctagctgaaggaggaggcgtgcgtggcccaagggttgtggaaagacatcaatctgcctgcaaagattcagactggcccttctgctctgatgaagactggaactacaaatgcccttctggctgcaggatgaaagggttgattgatgaagtcaatcaagattttacaaacagaataaataagctcaaaaattcactatttgaatatcagaagaacaataaggattctcattcgttgaccactaatataatggaaattttgagaggcgatttttcctcagccaataaccgtgataatacctacaaccgagtgtcagaggatctgagaagcagaattgaagtcctgaagcgcaaagtcatagaaaaagtacagcatatccagcttctgcagaaaaatgttagagctcagttggttgatatgaaacgactggaggtggacattgatattaagatccgatcttgtcgagggtcatgcagtagggctttagctcgtgaagtagatctgaaggactatgaagatcagcagaagcaacttgaacaggtcattgccaaagacttacttccctctagagataggcaacacttaccactgataaaaatgaaaccagttccagacttggttcccggaaattttaagagccagcttcagaaggtacccccagagtggaaggcattaacagacatgccgcagatgagaatggagttagagagacctggtggaaatgagattactcgaggaggctccacctcttatggaaccggatcagagacggaaagccccaggaaccctagcagtgctggaagctggaactctgggagctctggacctggaagtactggaaaccgaaaccctgggagctctgggactggagggactgcaacctggaaacctgggagctctggacctggaagtactggaagctggaactctgggagctctggaactggaagtactggaaaccaaaaccctgggagccctagacctggtagtaccggaacctggaatcctggcagctctgaacgcggaagtgctgggcactggacctctgagagctctgtatctggtagtactggacaatggcactctgaatctggaagttttaggccagatagcccaggctctgggaacgcgaggcctaacaacccagactggggcacatttgaagaggtgtcaggaaatgtaagtccagggacaaggagagagtaccacacagaaaaactggtcacttctaaaggagataaagagctcaggactggtaaagagaaggtcacctctggtagcacaaccaccacgcgtcgttcatgctctaaaaccgttactaagactgttattggtcctgatggtcacaaagaagttaccaaagaagtggtgacctccgaagatggttctgactgtcccgaggcaatggatttaggcacattgtctggcataggtactctggatgggttccgccataggcaccctgatgaagctgccttcttcgacactgcctcaactggaaaaacattcccaggtttcttctcacctatgttaggagagtttgtcagtgagactgagtctaggggctcagaatctggcatcttcacaaatacaaaggaatccagttctcatcaccctgggatagctgaattcccttcccgtggtaaatcttcaagttacagcaaacaatttactagtagcacgagttacaacagaggagactccacatttgaaagcaagagctataaaatggcagatgaggccggaagtgaagccgatcatgaaggaacacatagcaccaagagaggccatgctaaatctcgccctgtcagaggtatccacacttctcctttggggaagccttccctgtccccctagactaagttaaatatttctgcacagtgttcccatggccccttgcatttccttcttaactctctgttacacgtcattgaaactacacttttttggtctgtttttgtgctagactgtaagttccttgggggcagggcctttgtctgtctcatctctgtattcccaaatgcctaacagtacagagccatgactcaataaatacatgttaaatggatgaatgaattcctctgaaactctatttgagcttatttagtcaaattctttcactattcaaagtgtgtgctattagaattgtcacccaactgattaatcacatttttagtatgtgtctcagttgacatttaggtcaggctaaatacaagttgtgttagtattaagtgatgcttagctacctgtactggttacttgctattagtttgtgcaagtaaaattccaaatacatttgaggaaaatcccctttgcaatttgtaggtataaataaccgcttatttgcataagttctatcccactgtaagtgcatcctttccctatggagggaaggaaaggaggaagaaagaaaggaagggaaagaaacagtatttgccttatttaatctgagccgtgcctatctttgtaaagttaaatgagaataacttcttccaaccagcttaattttttttttagactgtgatgatgtcctccaaacacatccttcaggtacccaaagtggcattttcaatatcaagctaccgggatccagtaagattttttctgtttattgcgatcaagagaccagtttgggaggatggcttttgatccagcaaagaatggatggatcactgaattttaaccggacctggcaagactacaagagaggtttcggcagcctgaatgacgagggggaaggagaattctggctaggcaatgactacctccacttactaacccaaaggggctctgttcttagggttgaattagaggactgggctgggaatgaagcttatgcagaatatcacttccgggtaggctctgaggctgaaggctatgccctccaagtctcctcctatgaaggcactgcgggtgatgctctgattgagggttccgtagaggaaggggcagagtacacctctcacaacaacatgcagttcagcacctttgacagggatgcagaccagtgggaagagaactgtgcagaagtctatgggggaggctggtggtataataactgccaagcagccaatctcaatggaatctactaccctgggggctcctatgacccaaggaataacagtccttatgagattgagaatggagtggtctgggtttcctttagaggggcagattattccctcagggctgttcgcatgaaaattaggccccttgtgacccaataggctgaagaagtgggaatgggagcactctgtcttctttgctagagaagtggagagaaaatacaaaaggtaaagcagttgagattctctacaacctaaaaaattcctaggtgctattttcttatcctttgtactgtagctaaatgtacctgagacatattagtctttgaaaaataaagttatgtaaggttttttttatctttaaaaaaaaaaaaaaaaaaaaaaaaaaaaaaaaaaaaaaaaaaaaaaaaaaaaaaaaaaaactctggggggggctccggaacccaaatcccctatagggggccttaaaccaatagatggcccgtaaaaaaacacctgggggggggccaaaacccctggtaccccccacaaaggagtcgcgttttaaataaccacgcggcctttatctaaaaagggctatacagggac

SEQ ID NO: 649424 - DNA, 125 bp, Homo sapiens
accctcagccagaaatatagatgaaattcaaagctgttctgttttcagaaccacctgcctctgatgtagaccaagaaattgctggtagctttctaagtgttgagtttgcattggttttttcccca

SEQ ID NO: 649425 - DNA, 154 bp, Homo sapiens
ccactcacggcaattagatagatctcatagcaaactctagcacactggggatgagatggtgatagatcacgcctttgaggatagactaaatgaatcagcgagggactttatggtcctccttcgtgaggccgacggatgttatagctgtgtcctg

SEQ ID NO: 649426 - DNA, 747 bp, Homo sapiens
gtctgtacatgtgtgctgtaacagaaaatactgggtatgcattacttgaatacttgaaaactgacattaataagatgtattacataatgaattagatttctctgaaacagtttttaccactgaaaactcttcatttctggatgtgcacgttggaccacctggaactgaagacctgaattattatgggtagaaaaacaaccttatgactacgtgcttatacacgaacctgtaaacctgttttataacacctcttggtgtatgacgcatcaaacctgtcaacgtctttctcgtaacgtttcctctcctgacaaacttttcttctctcttctatacctttatgcacttactatactcctgatgtaataacaagagccgggttaaaaatatgtgtatctggtattcattgtgaatccctgtacgcttttctagttacgccaaaaaaatcgctttctaacaatactcttaatacccatagttataggtataaacatcttacccattagtagtatcttcacaatgccattaaatcactatttaggtacacacacctaatgttataataaaacaatttggacacaccattaccatcacttgtcttccacaaacttaattacagttgcacgagtaccgaacaaaaaacactagacaaagaagaatgtgtagggggactgcaattcagttaaatttcaaaaagtcactccataaaggacacgtcagcgattgttgcaacccagggatccgtaataa

SEQ ID NO: 649427 - DNA, 2832 bp, Homo sapiens
  misc_feature (2821)..(2821): n is a, c, g, or t
agggcaatcctttctttcagctggaagtgctcctcaggagccagccccacccttagaaaagatgttttccatgaggatcgtctgcctggtcctaagtgtggtgggcacagcatggactgcagatagtggtgaaggtgactttctagctgaaggaggaggcgtgcgtggcccaagggttgtggaaagacatcaatctgcctgcaaagattcagactggcccttctgctctgatgaagactggaactacaaatgcccttctggctgcaggatgaaagggttgattgatgaagtcaatcaagattttacaaacagaataaataagctcaaaaattcactatttgaatatcagaagaacaataaggattctcattcgttgaccactaatataatggaaattttgagaggcgatttttcctcagccaataaccgtgataatacctacaaccgagtgtcagaggatctgagaagcagaattgaagtcctgaagcgcaaagtcatagaaaaagtacagcatatccagcttctgcagaaaaatgttagagctcagttggttgatatgaaacgactggaggtggacattgatattaagatccgatcttgtcgagggtcatgcagtagggctttagctcgtgaagtagatctgaaggactatgaagatcagcagaagcaacttgaacaggtcattgccaaagacttacttccctctagagataggcaacacttaccactgataaaaatgaaaccagttccagacttggttcccggaaattttaagagccagcttcagaaggtacccccagagtggaaggcattaacagacatgccgcagatgagaatggagttagagagacctggtggaaatgagattactcgaggaggctccacctcttatggaaccggatcagagacggaaagccccaggaaccctagcagtgctggaagctggaactctgggagctctggacctggaagtactggaaaccgaaaccctgggagctctgggactggagggactgcaacctggaaacctgggagctctggacctggaagtactggaagctggaactctgggagctctggaactggaagtactggaaaccaaaaccctgggagccctagacctggtagtaccggaacctggaatcctggcagctctgaacgcggaagtgctgggcactggacctctgagagctctgtatctggtagtactggacaatggcactctgaatctggaagttttaggccagatagcccaggctctgggaacgcgaggcctaacaacccagactggggcacatttgaagaggtgtcaggaaatgtaagtccagggacaaggagagagtaccacacagaaaaactggtcacttctaaaggagataaagagctcaggactggtaaagagaaggtcacctctggtagcacaaccaccacgcgtcgttcatgctctaaaaccgttactaagactgttattggtcctgatggtcacaaagaagttaccaaagaagtggtgacctccgaagatggttctgactgtcccgaggcaatggatttaggcacattgtctggcataggtactctggatgggttccgccataggcaccctgatgaagctgccttcttcgacactgcctcaactggaaaaacattcccaggtttcttctcacctatgttaggagagtttgtcagtgagactgagtctaggggctcagaatctggcatcttcacaaatacaaaggaatccagttctcatcaccctgggatagctgaattcccttcccgtggtaaatcttcaagttacagcaaacaatttactagtagcacgagttacaacagaggagactccacatttgaaagcaagagctataaaatggcagatgaggccggaagtgaagccgatcatgaaggaacacatagcaccaagagaggccatgctaaatctcgccctgtcagaggtatccacacttctcctttggggaagccttccctgtccccctagactaagttaaatatttctgcacagtgttcccatggccccttgcatttccttcttaactctctgttacacgtcattgaaactacacttttttggtctgtttttgtgctagactgtaagttccttgggggcagggcctttgtctgtctcatctctgtattcccaaatgcctaacagtacagagccatgactcaataaatacatgttaaatggatgaatgaattcctctgaaactctaaaaaaaaaaaaaaaaaaaaaaaaaaaaaaaaaaaaaaaaaaaaaaaaaaaaaaaaaaaaaattttaaaaaggaaaaaaaaaaaaaagaaaaaaaaagagagaaaaataaaaaaataaattgtaaaagggagtttaatgaaattttttggcacattaataaaaaattgtttggaggcccattcctggggaaacttttaaaattccccaagaaatcccctccctgcaaatacccattttaatggcaaagaggccctttaagagggcccaaaaaaaaaaaaaccccaactgtttaaaaacatgaaagcggaaaaaaaattgtgtggccaaaaataaagttaaatttggaaaaaacccttttttaaataaaccaaaagtaaaaaaagggccaaacattttcttaatcaaaaaaattgccacaagtatggggcgagtgtgaattaaggggggaacaaaatttgaaaaaaaagccaattattctccaacgaaaacagcaatttttaacaaaaaaaggcgagctgtcaaagttcttgtaaaaataaaagaaaaaaaccgtaagggggtgttgttggcccaaaccaaaaaacgggagngcccccaaagg

SEQ ID NO: 649428 - DNA, 2285 bp, Homo sapiens
agggcaatcctttctttcagctggaagtgctcctcaggagccagccccacccttagaaaagatgttttccatgaggatcgtctgcctggtcctaagtgtggtgggcacagcatggactgcagatagtggtgaaggtgactttctagctgaaggaggaggcgtgcgtggcccaagggttgtggaaagacatcaatctgcctgcaaagattcagactggcccttctgctctgatgaagactggaactacaaatgcccttctggctgcaggatgaaagggttgattgatgaagtcaatcaagattttacaaacagaataaataagctcaaaaattcactatttgaatatcagaagaacaataaggattctcattcgttgaccactaatataatggaaattttgagaggcgatttttcctcagccaataaccgtgataatacctacaaccgagtgtcagaggatctgagaagcagaattgaagtcctgaagcgcaaagtcatagaaaaagtacagcatatccagcttctgcagaaaaatgttagagctcagttggttgatatgaaacgactggaggtggacattgatattaagatccgatcttgtcgagggtcatgcagtagggctttagctcgtgaagtagatctgaaggactatgaagatcagcagaagcaacttgaacaggtcattgccaaagacttacttccctctagagataggcaacacttaccactgataaaaatgaaaccagttccagacttggttcccggaaattttaagagccagcttcagaaggtacccccagagtggaaggcattaacagacatgccgcagatgagaatggagttagagagacctggtggaaatgagattactcgaggaggctccacctcttatggaaccggatcagagacggaaagccccaggaaccctagcagtgctggaagctggaactctgggagctctggacctggaagtactggaaaccgaaaccctgggagctctgggactggagggactgcaacctggaaacctgggagctctggacctggaagtactggaagctggaactctgggagctctggaactggaagtactggaaaccaaaaccctgggagccctagacctggtagtaccggaacctggaatcctggcagctctgaacgcggaagtgctgggcactggacctctgagagctctgtatctggtagtactggacaatggcactctgaatctggaagttttaggccagatagcccaggctctgggaacgcgaggcctaacaacccagactggggcacatttgaagaggtgtcaggaaatgtaagtccagggacaaggagagagtaccacacagaaaaactggtcacttctaaaggagataaagagctcaggactggtaaagagaaggtcacctctggtagcacaaccaccacgcgtcgttcatgctctaaaaccgttactaagactgttattggtcctgatggtcacaaagaagttaccaaagaagtggtgacctccgaagatggttctgactgtcccgaggcaatggatttaggcacattgtctggcataggtactctggatgggttccgccataggcaccctgatgaagctgccttcttcgacactgcctcaactggaaaaacattcccaggtttcttctcacctatgttaggagagtttgtcagtgagactgagtctaggggctcagaatctggcatcttcacaaatacaaaggaatccagttctcatcaccctgggatagctgaattcccttcccgtggtaaatcttcaagttacagcaaacaatttactagtagcacgagttacaacagaggagactccacatttgaaagcaagagctataaaatggcagatgaggccggaagtgaagccgatcatgaaggaacacatagcaccaagagaggccatgctaaatctcgccctgtcagaggtatccacacttctcctttggggaagccttccctgtccccctagactaagttaaatatttctgcacagtgttcccatggccccttgcatttccttcttaactctctgttacacgtcattgaaactacacttttttggtctgtttttgtgctagactgtaagttccttgggggcagggcctttgtctgtctcatctctgtattcccaaatgcctaacagtacagagccatgactcaataaatacatgttaaatggaaaaaaaaaaaaaaaaaaattttttggggcgccgggcccaaaaaattttttaaacccttcttggggcgccggggggaca

SEQ ID NO: 649429 - DNA, 175 bp, Homo sapiens
atgcactgcttcttacccttttactgggtctctcttttaccctcctacagcctccgagtacttcgagtctcccttcacatttccgacggctctacggctccacccttttttgtagccccaggcttccccggacttcccgtccttattggctccaccttttctcactatctggttt

SEQ ID NO: 649430 - DNA, 3701 bp, Homo sapiens
agggcaatcctttctttcagctggaagtgctcctcaggagccagccccacccttagaaaagatgttttccatgaggatcgtctgcctggtcctaagtgtggtgggcacagcatggactgcagatagtggtgaaggtgactttctagctgaaggaggaggcgtgcgtggcccaagggttgtggaaagacatcaatctgcctgcaaagattcagactggcccttctgctctgatgaagactggaactacaaatgcccttctggctgcaggatgaaagggttgattgatgaagtcaatcaagattttacaaacagaataaataagctcaaaaattcactatttgaatatcagaagaacaataaggattctcattcgttgaccactaatataatggaaattttgagaggcgatttttcctcagccaataaccgtgataatacctacaaccgagtgtcagaggatctgagaagcagaattgaagtcctgaagcgcaaagtcatagaaaaagtacagcatatccagcttctgcagaaaaatgttagagctcagttggttgatatgaaacgactggaggtggacattgatattaagatccgatcttgtcgagggtcatgcagtagggctttagctcgtgaagtagatctgaaggactatgaagatcagcagaagcaacttgaacaggtcattgccaaagacttacttccctctagagataggcaacacttaccactgataaaaatgaaaccagttccagacttggttcccggaaattttaagagccagcttcagaaggtacccccagagtggaaggcattaacagacatgccgcagatgagaatggagttagagagacctggtggaaatgagattactcgaggaggctccacctcttatggaaccggatcagagacggaaagccccaggaaccctagcagtgctggaagctggaactctgggagctctggacctggaagtactggaaaccgaaaccctgggagctctgggactggagggactgcaacctggaaacctgggagctctggacctggaagtactggaagctggaactctgggagctctggaactggaagtactggaaaccaaaaccctgggagccctagacctggtagtaccggaacctggaatcctggcagctctgaacgcggaagtgctgggcactggacctctgagagctctgtatctggtagtactggacaatggcactctgaatctggaagttttaggccagatagcccaggctctgggaacgcgaggcctaacaacccagactggggcacatttgaagaggtgtcaggaaatgtaagtccagggacaaggagagagtaccacacagaaaaactggtcacttctaaaggagataaagagctcaggactggtaaagagaaggtcacctctggtagcacaaccaccacgcgtcgttcatgctctaaaaccgttactaagactgttattggtcctgatggtcacaaagaagttaccaaagaagtggtgacctccgaagatggttctgactgtcccgaggcaatggatttaggcacattgtctggcataggtactctggatgggttccgccataggcaccctgatgaagctgccttcttcgacactgcctcaactggaaaaacattcccaggtttcttctcacctatgttaggagagtttgtcagtgagactgagtctaggggctcagaatctggcatcttcacaaatacaaaggaatccagttctcatcaccctgggatagctgaattcccttcccgtggtaaatcttcaagttacagcaaacaatttactagtagcacgagttacaacagaggagactccacatttgaaagcaagagctataaaatggcagatgaggccggaagtgaagccgatcatgaaggaacacatagcaccaagagaggccatgctaaatctcgccctgtcagaggtatccacacttctcctttggggaagccttccctgtccccctagactaagttaaatatttctgcacagtgttcccatggccccttgcatttccttcttaactctctgttacacgtcattgaaactacacttttttggtctgtttttgtgctagactgtaagttccttgggggcagggcctttgtctgtctcatctctgtattcccaaatgcctaacagtacagagccatgactcaataaatacatgttaaatggactgaatgaaattcctccgaacaaaagaacaaaacataaaacacaaaacacaaaaaaacacgttgttgcggcgcgccgcctcgggcgccccggagaagaggcttttttaacacccattttcgctgagtgtggagccgcgcgcgcgggcccacagagggtctaggcgagaaccgtggtgcaccatgcgggtgtctccaccccagggagaaaaacctcagggggcacagcgacagacaataggagcgatagggatctctctacccacgcaatacaaagaaagacgcacaccggggggaggaaacaaccaagacggcaggtcagtacggacaccaaacaccagcaagtagcgagggaggatactcagagagggcgacacgatcaaaaggggggaagaacataacatacaagcgagcgcgagaatcaacacagacgagaggaagagcagccagagaaatcatacaaaaagtagcaacagccccaccgagaaccaacggggagagcagagaggagaagaagacagagcaagagcgaagaaagacagacgaagcaagaacaggaaggaaacaagcaagtaagaacaagagcaaagacaaaccaaaagagaagagcaaacgacacagaagagaacagaagaggacagaccggaaacacaaagaatgaaagagaaaggaaagaaagacagaagcgaagcagggaagaggaacgagggggagaggacagcagacagaggagagagaggacgagagcgagagaggaggaacgcgagaaagagaggagggggggagaggcggacgaagacaacgcagggagagaggaggagagaagggagggacgagagaaagaaggagagggaggaaagcaagaggcgacggagagagagaagaagagagaaagagcgagaagagagagcgagaccgggaggaagaggaggaagagcgagaggaacaggagacgaggagaggcagggagcagaccggagcggaggaggggcacagaggggcgcaagagcaggagagagagaaggaggcagacggagagcgggagcacaggacgaggaccgaaggagaagagagagacgagcgacagggcgaaaggagcggaggaggggcgggggggaagcaggtgagagggacgggcagggagaacagagagggggaagaaaaggaaggagagagacgaggacagacaagagcaagagacaagagcacagaaggcagggaaagcgcgaagagagagggacgagacaagaggacgacaagacagcagagacggacaaagagaagagacgagaaacgaagggagcaagaggagggagagaggacgaagcagaagaggagaagagagaacagagagagagcaagagcgcacgaagaagaacagacaggcagagacaaacgcgaactgcgaagcaaagacgaaaccagctgagacaagcgacgcagcagagagcaagcagcagagagagagagcgagcgcagacagcgacgacgagaaa

SEQ ID NO: 649431 - DNA, 363 bp, Homo sapiens
tggagacaaagtcttgctctgtcgcccgggctggagtgcagtggctcaaccttggctcactgcaacctccgtctcctgggtttaagctattctcttgcctcagcctcccgagtagctgggactacaggcacatgccaccatgcctggctaatttttgtatttttagtagagatgggatttcaccctgttggccaggctggtcttgaactcctgatctcaggtgatccacctgcctcagcctcccaaagtgctgggatttacaggcatgagccaccacacccggcccagatgtgcttgctctttagtaaacagattggaaggaacaccaaaacaaattgcataaaagggggttatggtgagagt

SEQ ID NO: 649432 - DNA, 344 bp, Homo sapiens
agtcgccggcagcacatacttataccaccagaaagtccggctctactgcacaccctctttgggtcccgcttgctcagcaagacctttcttccgactgaacctctctctcctgctgcagtcaccggctgagttgggccaggcacaatctccccaaatacttaaatgaaggcccacttgaggtttgggcctcaccgctaagctgagatgaaacatgcaaggcattccggccccttccccttctggtcccagctgaccttccacccacagcacttacactcagataaagaaaagtcactccctgcaagtgaaaaaaaaaaagagaaaaatggccctccttggcctca

SEQ ID NO: 649433 - DNA, 653 bp, Homo sapiens
gagaaaggtaatagaatgcaagagaaatgtacttaaaatggtaacaggaataggtgatgggtttgactggggaataaggcagagagaggcattatgaataacccaaagtaaaataaggagaaaaagaggctattaaatatgattttttaaaactacttatcaaaaagccataattattctgataggcaaaatggtaaagtcacttcaggaaaaagaaagggatgttacttatttagattattactcagtattgctcttgatgttttagcaactcagagaagaccaccaaataagtgctattcatattgtaaaagaagtgatcaaattatttctttttcttatagtgtgattgtacattaagaaatcacaatagatttttaaaaaaataaaatactagaattgaggacttctacttccagaaagaagtagtaaacagggtagatgtattttccctattcatctctggaaaaaatatataaacaaaacataagaagacccagaaagttgaaaagaagatgatgtattctctagggaacttggaaccaaggaatcaacatggaggtaagttccctgtgttttctttttgctgcatacatcctagaccagatgctagagaaactggcaaactggaaacaccaaagggcacagacaaa

SEQ ID NO: 649434 - DNA, 162 bp, Homo sapiens
ccaggcaaggaggcgccatcatggggagttggacatccgccataacaagggaccgcaagtttcggcgcaaggagccaagagccaggatatcttactcaggctgttggtcaagtatacaggttctggcagaggaccactcacatcaccaggttgttttgaagg

SEQ ID NO: 649435 - DNA, 123 bp, Homo sapiens
  misc_feature (120)..(120): n is a, c, g, or t
ccgacaccatagaatgtctaccgaattatagctttacaaaatacaacaattttatatttcacaaatatttgaactcaaataaatcaattcttacaaagtacactttctcattctatggtngct

SEQ ID NO: 649436 - DNA, 386 bp, Homo sapiens
  misc_feature (386)..(386): n is a, c, g, or t
gagagagagagagagagagagagatagagagagagagagagagagagagagagcgagatagagagagagatagagagagccacagagatagagagagaccttgtgagcgtcttacctacttcgttccttttactctatttctacccgttcttctgtctccttccatccatcacctatctaagtgctctttctgccatgttgttttcttgactattgtgcttaccgcttctcttgcgctcatctcttcctgctcactctcatgctctctcctttccctcatgtacctttacatactgccccgctccttttccattttttcgcttttgtcctatttcctctgttttgggtatttctgccttctcatgaccagcttttgtctcttttcn

SEQ ID NO: 649437 - DNA, 3181 bp, Homo sapiens
gaattcgcggccgcgtcgacccagaagcaaaagtccatggaggctgaacgactgaaacagaaagaacaagaacgaaagatcatagaattagaaaaacaaaaagaagaagcccaaagacgagctcaggaaagggacaagcagtggctggagcatgtgcagcaggaggacgagcatcagagaccaagaaaactccacgaagaggaaaaactgaaaagggaggagagtgtcaaaaagaaggatggcgaggaaaaaggcaaacaggaagcacaagacaagctgggtcggcttttccatcaacaccaagaaccagctaagccagctgtccaggcaccctggtccactgcagaaaaaggtccacttaccatttctgcacaggaaaatgtaaaagtggtgtattaccgggcactgtacccctttgaatccagaagccatgatgaaatcactatccagccaggagacatagtcatggtggatgaaagccaaactggagaacccggctggcttggaggagaattaaaaggaaagacagggtggttccctgcaaactatgcagagaaaatcccagaaaatgaggttcccgctccagtgaaaccagtgactgattcaacatctgcccctgcccccaaactggccttgcgtgagacccccgcccctttggcagtaacctcttcagagccctccacgacccctaataactgggccgacttcagctccacgtggcccaccagcacgaatgagaaaccagaaacggataactgggatgcatgggcagcccagccctctctcaccgttccaagtgccggccagttaaggcagaggtccgcctttactccagccacggccactggctcctccccgtctcctgtgctaggccagggtgaaaaggtggaggggctacaagctcaagccctatatccttggagagccaaaaaagacaaccacttaaattttaacaaaaatgatgtcatcaccgtcctggaacagcaagacatgtggtggtttggagaagttcaaggtcagaagggttggttccccaagtcttacgtgaaactcatttcagggcccataaggaagtctacaagcatggattctggttcttcagagagtcctgctagtctaaagcgagtagcctctccagcagccaagccggtcgtttcgggagaagaaattgcccaggttattgcctcatacaccgccaccggccccgagcagctcactctcgcccctggtcagctgattttgatccgaaaaaagaacccaggtggatggtgggaaggagagctgcaagcacgtgggaaaaagcgccagataggctggttcccagctaattatgtaaagcttctaagccctgggacgagcaaaatcactccaacagagccacctaagtcaacagcattagcggcagtgtgccaggtgattgggatgtacgactacaccgcgcagaatgacgatgagctggccttcaacaagggccagatcatcaacgtcctcaacaaggaggaccctgactggtggaaaggagaagtcaatggacaagtggggctcttcccatccaattatgtgaagctgaccacagacatggacccaagccagcaatgaatcatatgttgtccatccccccctcaggcttgaaagtcctcaaagagacccactatcccatatcactgcccagagggatgatgggagatgcagccttgatcatgtgacttccagcatgatcacctactgccttctgagttagaagaactcactgcaaaacagtttaccccatttaaccttagttgcatgttaaccccaagtttgaattaatacctggcaaaaatagaaccaaaatttccataaaacccacggggtagtgggtccctttgtgtggctttccctaattaactccaaattgaatttccccccaccttggccacagggtgctttcaaatatttttaaaattaattttaaaaaaaaaatttattgatttaaccttttaaataaccaaaataattaattaactccttgtctatttggggtttggcaaaagaaccccctattcaaaggaatgtcgcctgttcgctataaaaaaaatggttccaaaattttccataaaaccgtgaaaactgaatgttcttcttcattttgctcccgtgttaccaacctaaattgctgcacactttggggggcttcggttttttttttttttcccccccttcaaccccttcaaaattctccccaaaaggaaagttttcctctcccccccccgcctatattaaacccacacttaaactgaacccccccaccccccccctctaaaaaaaaccaaatggttttttggttcgaccatctaaagcatctctgctcataacaaattccttttttttccagggcaaagctattaccttgtaggatgctctaatcatattggcatttaattttattttgcaacagtgaccttgtagccacatgagaaagcactctgtgtttttgttcggtctcagatttatctggttgagttggtgttttgtttggggtttttaattttgcgtgtttgcatagcataaaatcagtagacaacaccactgaggtcgttacgatcaacgatatccacagtctctttttagtctctgttacatgaagttttattccagttacttttcatggaatgacctattttgaacaagtaattttcttgacaagaaagaatgtatagaagtctccctgaaataaatttcccaaagttaaaaatttttttaaataggactgtgggaatttttaaagattaattatgaaaatggagctcagggtccgtttgggggtaagaaaagctgtaggggaaagccctgtttgttttttaaacactaggtggaaggtttcaataaaaaaagcctgctgctcacagcacagaaaatggggcagggggagcctcaagcacaatttagctgtcctcctaaagaatttgtaatgctcaatccccttgggtttctcccggcgctgtcgggaggctgtgctggtggttgtgtagaggtccttttcctttcaaatggtgcagagagagaggacctttcctccttgttcagttgcaattcagtattttcacggatatgaatgtaaaatatataaatatataaacctgaggatttaacaaatgtaaaacaaccttttgaattagttccgagtatagataattaaatt

SEQ ID NO: 649438 - DNA, 339 bp, Homo sapiens
ttgatgtttaggttcttgagttcttgatatactttggatgtcagctctctgtcagatgtggagttggtgatcctattccactctgtaggctgccattgtttcctttgtctcatggaagcttttcagttttataaggacccatgtattaagtgttgatctcagtgcctgagctgttggtgttctgttcggaaagttgtctcctgaccaatgtgttcaaggctgttcctcacttactctcctatcggatttagtgtatctggttttatgttaaggtctttgatccacttggacttgagttttgtactgggtgacagatatggttctatctgcagtcgacgc

SEQ ID NO: 649439 - DNA, 142 bp, Homo sapiens
cggcttggtagagtagaagagaaggagcatccgtaacattgatgaggagtttggctggtgatcgctggagagcgagaaactcgctcgctttcagcaagacagatacctccttactattgctctacatttgaaccttgctggg

SEQ ID NO: 649440 - DNA, 566 bp, Homo sapiens
  misc_feature (151)..(151): n is a, c, g, or t
  misc_feature (467)..(467): n is a, c, g, or t
tatatttccagaccagttggtatagggttggcttctcacccgaagaccccttccctggtttggtggaaagggtgattttagctttgtttcctaaaaaaagagagggtcccttggggggcccctttcccgtgtttgccagggggccctttgnccaccccttgttatagccacatggagaaagctttgtggatttatccctggggggtttcccctgtttgccacccctttagggaaggggggggccctttttatttaaaagactttttgcccccttttgcccaaggggatagattgggggggttccccctttattttcccccctttttttcccttcccttgtgatggggtcaaaccccgtgaaacccttccgtcatggtatggggtttaattggggttccccctttttggtttttttggggggggccccccctcccccttttttttaattaaaaacaggccttttttangggggggttggggcattcccccttttttggcctccggggggggcccccttttttttttccccttgccccccccccccggttttgggggggggtttttta

SEQ ID NO: 649441 - DNA, 330 bp, Homo sapiens
  misc_feature (321)..(321): n is a, c, g, or t
gatatgtatcaaagcaacatatcacgacacacagaatgcaaaaacagatgtggaatccagttgtcttctattgaaatagactttaggccagacacagtggctcaggggtgtaatcccagcacttatgaggctgaggtgagaggatcacttgaagccgggagtttaagaccagcctgggcaacatagcaagaccccatctctacaaaaacaagacttaaaagagatttacaaaaatgtgaaagaaggccattcttcttactgttttgtttttataaaaaaaatgtttttcataaaaatgtcatacatgctgcatacgaaggnggatggaca

SEQ ID NO: 649442 - DNA, 1624 bp, Homo sapiens
  misc_feature (607)..(607): n is a, c, g, or t
  misc_feature (624)..(624): n is a, c, g, or t
  misc_feature (987)..(987): n is a, c, g, or t
gagccgcttgcttgaggtggcgtcgtcggcatgtctgccctcgactgttgcccccgtgccatggtcaggcgcactttgcgtcaatggaccaacacgcatcatcatacattacatatgaaactggcccttcttgcgaggcgtcctgcagcctgcagcacccggagacgagagtggccgaaggacttgggcttttccaatactcaacttcgcactcccagcgtgcataatactggaagaccaagcaaccttgagatccccagtttgtatcttcatttctagtctttccagagggaagcctttgcgaagggtctgggggagacccatgtatttggactggatcgccccaagtgaagaagggggagaacagtcaaacatacacgacagttttctgattcgcagaggtttcggcggcatatgttcccctttgttcgtcgttccaagaggaataggcctatgctttgtgggacacgtatagtctcacacgacgcgtttagccctcgcataattctatttgtgggagacacgtcgtggggactcacgaactcagtagagttatccccgtgatgtgatattcgatatagagctctgtctaaagagacgtaagaanctcctagaatctaaaantacaacgcagaagggacacacggacactttattggaaaggggagagaacgtttgggcggcaaaatcgcatcaaaaggctttgtcctgtcccctggtttgtccccaaagtaccgggaacagccctaagggccgtttgggtgccttgaggccccctaaatttgcggcacctattctggaatggtggcccccttttcgtttgtgggcccccatgggtggaagtggtccgttttcgcccttttggggaatacgccgcagaaagaactgggctgagaggaatccttagatactaaagcgccgacaacgttttttacgcccaaagaggggggggctgctcctccaggtttgtgccgccctcttgttgtnataggagccaccaagacgccgaagagtgtccgcccttttttcccccgtttggattttgaagaggaggcactcccccccatattattaaggcgcacacgaaggttggtgttacccttctctaagggggacacaaaccacggcggccgagggcgaactctccccctagaaaccacaattctttcttctgtcccaccaacagcgcactctttttgacacggggcaactgccgcgtttttcttacaccaaggaaggcgttctgggatttagggacatctacctttattagggtgtttacaatctacgacggcgtacaccgctcttcttcttgcggacccaccacacaccgtgctgtcgtgggcgccaactccccccacaacggaaatacggcggtgtatggcgcttttttaccctgattggggcgcccctgtggttgttgagccacccacctggcctcgggcgcggcgtatacagcgccctttaggggcggctttggggggttacaacaaacccccacacacggtgttgtggtgcgggcttttggcgtttatattccctttacacttgcccgtgcccgtttccctttcaccttcacgtttcacgtctttcttatcgtgctcaagggagcagcgggggcacc

SEQ ID NO: 649443 - DNA, 923 bp, Homo sapiens
gggctgtttggaaagacccaggagaagccgcccaaagaactggtcaatgagtggtcattgaagataagaaaaggaaaatgaacacgttgttgaccaggcaacataacgggactactccaacagagaacgaacgaaacaacgtgacaaccgactctgtgaaagactgctgccaagaacgggccagacaggatgtctgcataggttctggccaaggagactgatcaggtcaacggaaggctgtgacgcaacgctgtatgcatccaaagcacacatgtaactcagtgctcatggggatgaagaaccagctcgcggatcttgcgagtggctggttccctgacagaagagcaacaaggaagtgatgaaggccatgcaaagtcttgtgaaagattccagagattcaggcacaccatgacgggacgttggtccaaagaaatgatgacaggctgggatcatagacggagatgttagagggacacttatagaacaagcaatggacggaatcaggacagacaactgggcaggaagcaagcaagaaaactggaacaaatggacaggagattcatcattaaagaacattacccaagcacggggacccttgggacacaacagcacccaaagataaaagatgagactgaaatggcaacgaaaccaaagacagcacaaaaaaaccaatacaaagggaaaggcgcacagggaaaggacaacacaaaaggggaatgcgaagcgaagcgaaggagaacgggaacaacagagaaaccaagaacaaagcacaaagagacaagaaagacagggaaataaaaaccagagcaaatcaaagaaaaacaaaaagagggacacggacaaaaccgcctgaaaagaaaatgaagaaaaaaaaaaagagaacgatgaatcaaaagaaaacaggaaaaaacaaaacataaaag

SEQ ID NO: 649444 - DNA, 2440 bp, Homo sapiens
  misc_feature (2222)..(2222): n is a, c, g, or t
agggcaatcctttctttcagctggaagtgctcctcaggagccagccccacccttagaaaagatgttttccatgaggatcgtctgcctggtcctaagtgtggtgggcacagcatggactgcagatagtggtgaaggtgactttctagctgaaggaggaggcgtgcgtggcccaagggttgtggaaagacatcaatctgcctgcaaagattcagactggcccttctgctctgatgaagactggaactacaaatgcccttctggctgcaggatgaaagggttgattgatgaagtcaatcaagattttacaaacagaataaataagctcaaaaattcactatttgaatatcagaagaacaataaggattctcattcgttgaccactaatataatggaaattttgagaggcgatttttcctcagccaataaccgtgataatacctacaaccgagtgtcagaggatctgagaagcagaattgaagtcctgaagcgcaaagtcatagaaaaagtacagcatatccagcttctgcagaaaaatgttagagctcagttggttgatatgaaacgactggaggtggacattgatattaagatccgatcttgtcgagggtcatgcagtagggctttagctcgtgaagtagatctgaaggactatgaagatcagcagaagcaacttgaacaggtcattgccaaagacttacttccctctagagataggcaacacttaccactgataaaaatgaaaccagttccagacttggttcccggaaattttaagagccagcttcagaaggtacccccagagtggaaggcattaacagacatgccgcagatgagaatggagttagagagacctggtggaaatgagattactcgaggaggctccacctcttatggaaccggatcagagacggaaagccccaggaaccctagcagtgctggaagctggaactctgggagctctggacctggaagtactggaaaccgaaaccctgggagctctgggactggagggactgcaacctggaaacctgggagctctggacctggaagtactggaagctggaactctgggagctctggaactggaagtactggaaaccaaaaccctgggagccctagacctggtagtaccggaacctggaatcctggcagctctgaacgcggaagtgctgggcactggacctctgagagctctgtatctggtagtactggacaatggcactctgaatctggaagttttaggccagatagcccaggctctgggaacgcgaggcctaacaacccagactggggcacatttgaagaggtgtcaggaaatgtaagtccagggacaaggagagagtaccacacagaaaaactggtcacttctaaaggagataaagagctcaggactggtaaagagaaggtcacctctggtagcacaaccaccacgcgtcgttcatgctctaaaaccgttactaagactgttattggtcctgatggtcacaaagaagttaccaaagaagtggtgacctccgaagatggttctgactgtcccgaggcaatggatttaggcacattgtctggcataggtactctggatgggttccgccataggcaccctgatgaagctgccttcttcgacactgcctcaactggaaaaacattcccaggtttcttctcacctatgttaggagagtttgtcagtgagactgagtctaggggctcagaatctggcatcttcacaaatacaaaggaatccagttctcatcaccctgggatagctgaattcccttcccgtggtaaatcttcaagttacagcaaacaatttactagtagcacgagttacaacagaggagactccacatttgaaagcaagagctataaaatggcagatgaggccggaagtgaagccgatcatgaaggaacacatagcaccaagagaggccatgctaaatctcgccctgtcagaggtatccacacttctcctttggggaagccttccctgtccccctagactaagttaaatatttctgcacagtgttcccatggccccttgcatttccttcttaactctctgttacacgtcattgaaactacacttttttggtctgtttttgtgctagactgtaagttccttgggggcagggcctttgtctgtctcatctctgtattcccaaatgcctaacagtacagagccatgactcaataaatacatgttaaatggaatgaatgaaaaaatnaaaaaataataaaaaatgaatttacaaaaaaaaaacatgaaaaaacctcgagttttttttttttttttttaaagttttaaaactttttattggcatattaaaaaaatggtgctttccaataattaaaactcatttgaacaaaaaaactgggtttaactttaaattcacttggggcccaccccaatttttcccccccactttttccttaaccaacatga

SEQ ID NO: 649445 - DNA, 229 bp, Homo sapiens
agaatgagctgggtccagcggacagcaagagatgccccaaagaagctgggcgcggtggctcgtatctgtaatcccagcactttgggaggccgaggcgtgcgggtcacctgaggtcaggagttcgagaccagcctggccaacatggtgaaaccccatctgtactaaaaatacaagaattagctgggtttatagtgagcgcctgtaaccccagctactcaggaggctgagg

SEQ ID NO: 649446 - DNA, 4643 bp, Homo sapiens
agggcaatcctttctttcagctggaagtgctcctcaggagccagccccacccttagaaaagatgttttccatgaggatcgtctgcctggtcctaagtgtggtgggcacagcatggactgcagatagtggtgaaggtgactttctagctgaaggaggaggcgtgcgtggcccaagggttgtggaaagacatcaatctgcctgcaaagattcagactggcccttctgctctgatgaagactggaactacaaatgcccttctggctgcaggatgaaagggttgattgatgaagtcaatcaagattttacaaacagaataaataagctcaaaaattcactatttgaatatcagaagaacaataaggattctcattcgttgaccactaatataatggaaattttgagaggcgatttttcctcagccaataaccgtgataatacctacaaccgagtgtcagaggatctgagaagcagaattgaagtcctgaagcgcaaagtcatagaaaaagtacagcatatccagcttctgcagaaaaatgttagagctcagttggttgatatgaaacgactggaggtggacattgatattaagatccgatcttgtcgagggtcatgcagtagggctttagctcgtgaagtagatctgaaggactatgaagatcagcagaagcaacttgaacaggtcattgccaaagacttacttccctctagagataggcaacacttaccactgataaaaatgaaaccagttccagacttggttcccggaaattttaagagccagcttcagaaggtacccccagagtggaaggcattaacagacatgccgcagatgagaatggagttagagagacctggtggaaatgagattactcgaggaggctccacctcttatggaaccggatcagagacggaaagccccaggaaccctagcagtgctggaagctggaactctgggagctctggacctggaagtactggaaaccgaaaccctgggagctctgggactggagggactgcaacctggaaacctgggagctctggacctggaagtactggaagctggaactctgggagctctggaactggaagtactggaaaccaaaaccctgggagccctagacctggtagtaccggaacctggaatcctggcagctctgaacgcggaagtgctgggcactggacctctgagagctctgtatctggtagtactggacaatggcactctgaatctggaagttttaggccagatagcccaggctctgggaacgcgaggcctaacaacccagactggggcacatttgaagaggtgtcaggaaatgtaagtccagggacaaggagagagtaccacacagaaaaactggtcacttctaaaggagataaagagctcaggactggtaaagagaaggtcacctctggtagcacaaccaccacgcgtcgttcatgctctgaagtggtgacctccgaagatggttctgactgtcccgaggcaatggatttaggcacattgtctggcataggtactctggatgggttccgccataggcaccctgatgaagctgccttcttcgacactgcctcaactggaaaaacattcccaggtttcttctcacctatgttaggagagtttgtcagtgagactgagtctaggggctcagaatctggcatcttcacaaatacaaaggaatccagttctcatcaccctgggatagctgaattcccttcccgtggtaaatcttcaagttacagcaaacaatttactagtagcacgagttacaacagaggagactccacatttgaaagcaagagctataaaatggcagatgaggccggaagtgaagccgatcatgaaggaacacatagcaccaagagaggccatgctaaatctcgccctgtcagaggtatccacacttctcctttggggaagccttccctgtccccctagactaagttaaatatttctgcacagtgttcccatggccccttgcatttccttcttaactctctgttacacgtcattgaaactacacttttttggtctgtttttgtgctagactgtaagttccttgggggcagggcctttgtctgtctcatctctgtattcccaaatgcctaacagtacagagccatgactcaataaatacatgttaaatggatgaatgaattcctctgaaactctatttgagcttatttagtcaaattctttcactattcaaagtgtgtgctattagaattgtcacccaactgattaatcacatttttagtatgtgtctcagttgacatttaggtcaggctaaatacaagttgtgttagtattaagtgatgcttagctacctgtactggttacttgctattagtttgtgcaagtaaaattccaaatacatttgaggaaaatcccctttgcaatttgtaggtataaataaccgcttatttgcataagttctatcccactgtaagtgcatcctttccctatggagggaaggaaaggaggaagaaagaaaggaagggaaagaaacagtatttgccttatttaatctgagccgtgcctatctttgtaaagttaaatgagaataacttcttccaaccagcttaattttttttttagactgtgatgatgtcctccaaacacatccttcaggtacccaaagtggcattttcaatatcaagctaccgggatccagtaagattttttctgtttattgcgatcaagagaccagtttgggaggatggcttttgatccagcaaagaatggatggatcactgaattttaaccggacctggcaagactacaagagaggtttcggcagcctgaatgacgagggggaaggagaattctggctaggcaatgactacctccacttactaacccaaaggggctctgttcttagggttgaattagaggactgggctgggaatgaagcttatgcagaatatcacttccgggtaggctctgaggctgaaggctatgccctccaagtctcctcctatgaaggcactgcgggtgatgctctgattgagggttccgtagaggaaggggcagagtacacctctcacaacaacatgcagttcagcacctttgacagggatgcagaccagtgggaagagaactgtgcagaagtctatgggggaggctggtggtataataactgccaagcagccaatctcaatggaatctactaccctgggggctcctatgacccaaggaataacagtccttatgagattgagaatggagtggtctgggtttcctttagaggggcagattattccctcagggctgttcgcatgaaaattaggccccttgtgacccaataggctgaagaagtgggaatgggagcactctgtcttctttgctagagaagtggagagaaaatacaaaaggtaaagcagttgagattctctacaacctaaaaaattcctaggtgctattttcttatcctttgtactgtagctaaatgtacctgagacatattagtctttgaaaaataaagttatgtaaggttttttttatctttaaatagctctgtgggttttaacatttttataaagatataccaagggccattcagtacatcaggaaagtggcagacagaagcttctctctgcaaccttgaagactattggtttgagaacttctcttcccataccacccaaaatcataatgccattggaaagcaaaaagttgttttatccatttgatttgaattgttttaagccaatattttaaggtaaaactcactgaatctaaccatagctgacctttgtagtagaatttacaacttataattacaatgcacaatttataattacaatatgtatttatgtcttttgctatggagcaaatccaggaaggcaagagaaacattctttcctaaatataaatgaaaatctatcctttaaactcttccactagacgttgtaatgcacacttatttttttcccaaggagtaaccaatttctttctaaaacacatttaaaattttaaaactatttatgaatattaaaaaaagacataattcacacattaataaacaatctcccaagtattgatttaacttcatttttctaataatcataaactatattctgtgacatgctaattattattaaatgtaagtcgttagttcgaaagcctctcactaagtatgatctatgctatattcaaaattcaacccatttactttggtcaatatttgatctaagttgcatctttaatcctggtggtcttgccttctgatttttaatttgtatccttttctattaagatatatttgtcattttctcttgaatatgtattaaaatatcccaagcaaaaaaaaaaaaaaaaaaaaaaaaaaaaaaaaaaaaaaaaaaaaaaaaaaaaaaaaaaaacaaaaagcaacaagagtagagcggcagcagagaggcacaaggaaggtgtcgagcacccccggggggggcgaggggacaccaagggaggggagaggtggacacaagggtgcacaaaaagaaacatccggacaaaaacaatggggagagactctaccaaaaaaaaacacgcgcgggggaacacaaagagtgagagagaacagccacagaagagctctcgagggaacaacagggagccacataagagatgaagaggacggcctgaaaaagagtcgcgg

SEQ ID NO: 649447 - DNA, 193 bp, Homo sapiens
atgtcttgcatctcatcacccgcatgagccatcagcacagatgacctataactcaggcatatacttcctattctacaccctagtaagctcccttcccctactcatcgcactaatttacactcacaacatccctagtgctcactacaacattctactactcaccactcacatgcccagagaactatcagaactc

SEQ ID NO: 649448 - DNA, 898 bp, Homo sapiens
  misc_feature (233)..(233): n is a, c, g, or t
  misc_feature (341)..(341): n is a, c, g, or t
tgcggtgtgctgccggagtatgagtgctggtcgagaagcccagttgtccgggttcccggtctggggagaacccggttacccccctgtgcgcgtgcttaccgccgcgcccgatgtttgtgtaacccgccccccttatgcgccttcgtctcccccctccggttgtgccgggtccccccagtgtctcttgtgccggggagcccgcccccaataacgtttggttgtggcgctcaccncctaattcgcagttccctcgttgcccctggtcctcgggcaatatttccgcccgtggggttgttcgcgccctttccctgcccggggggccccccctcccggacaccggngcttatttcaattgcgcgcctctctaccggagtgcccggtccctccttttccggcacggccccctgtggtgctgcgtccctccttcgccccctcggtacgagtgctgccacacttcttgggaccacaccccccccccgcccaccccttctgtgacaccccaaccctctgcgggcgtcacacccccaggggggccacctccttctaccccaaaacgtgccggggcaccaccggcgtttttcttatcaccacaccccacgacctcccgggaggccaagggcccctcccgtggggccagatgaagcttgcgccggggcccactgcgtcagagacgacgcgcccaacacctggccccagaagcggccccctgcccagagagcgcgggccacgatcttgcggaacaaatcgaggaccccacaagattggcctcacccttccacccaacatggggcacgtactgcgcattcaaccagccccccccgccaggagcaccccccaccccccccctcgtccgctccccgcgaaaaaggggaaaaaaccccctccccccccacaaaac

SEQ ID NO: 649449 - DNA, 4672 bp, Homo sapiens
agggcaatcctttctttcagctggaagtgctcctcaggagccagccccacccttagaaaagatgttttccatgaggatcgtctgcctggtcctaagtgtggtgggcacagcatggactgcagatagtggtgaaggtgactttctagctgaaggaggaggcgtgcgtggcccaagggttgtggaaagacatcaatctgcctgcaaagattcagactggcccttctgctctgatgaagactggaactacaaatgcccttctggctgcaggatgaaagggttgattgatgaagtcaatcaagattttacaaacagaataaataagctcaaaaattcactatttgaatatcagaagaacaataaggattctcattcgttgaccactaatataatggaaattttgagaggcgatttttcctcagccaataaccgtgataatacctacaaccgagtgtcagaggatctgagaagcagaattgaagtcctgaagcgcaaagtcatagaaaaagtacagcatatccagcttctgcagaaaaatgttagagctcagttggttgatatgaaacgactggaggtggacattgatattaagatccgatcttgtcgagggtcatgcagtagggctttagctcgtgaagtagatctgaaggactatgaagatcagcagaagcaacttgaacaggtcattgccaaagacttacttccctctagagataggcaacacttaccactgataaaaatgaaaccagttccagacttggttcccggaaattttaagagccagcttcagaaggtacccccagagtggaaggcattaacagacatgccgcagatgagaatggagttagagagacctggtggaaatgagattactcgaggaggctccacctcttatggaaccggatcagagacggaaagccccaggaaccctagcagtgctggaagctggaactctgggagctctggacctggaagtactggaaaccgaaaccctgggagctctgggactggagggactgcaacctggaaacctgggagctctggacctggaagtactggaagctggaactctgggagctctggaactggaagtactggaaaccaaaaccctgggagccctagacctggtagtaccggaacctggaatcctggcagctctgaacgcggaagtgctgggcactggacctctgagagctctgtatctggtagtactggacaatggcactctgaatctggaagttttaggccagatagcccaggctctgggaacgcgaggcctaacaacccagactggggcacatttgaagaggtgtcaggaaatgtaagtccagggacaaggagagagtaccacacagaaaaactggtcacttctaaaggagataaagagctcaggactggtaaagagaaggtcacctctggtagcacaaccaccacgcgtcgttcatgctctaaaaccgttactaagactgttattggtcctgatggtcacaaagaagttaccaaagaagtggtgacctccgaagatggttctgactgtcccgaggcaatggatttaggcacattgtctggcataggcaccctgatgaagctgccttcttcgacactgcctcaactggaaaaacattcccaggtttcttctcacctatgttaggagagtttgtcagtgagactgagtctaggggctcagaatctggcatcttcacaaatacaaaggaatccagttctcatcaccctgggatagctgaattcccttcccgtggtaaatcttcaagttacagcaaacaatttactagtagcacgagttacaacagaggagactccacatttgaaagcaagagctataaaatggcagatgaggccggaagtgaagccgatcatgaaggaacacatagcaccaagagaggccatgctaaatctcgccctgtcagaggtatccacacttctcctttggggaagccttccctgtccccctagactaagttaaatatttctgcacagtgttcccatggccccttgcatttccttcttaactctctgttacacgtcattgaaactacacttttttggtctgtttttgtgctagactgtaagttccttgggggcagggcctttgtctgtctcatctctgtattcccaaatgcctaacagtacagagccatgactcaataaatacatgttaaatggatgaatgaattcctctgaaactctatttgagcttatttagtcaaattctttcactattcaaagtgtgtgctattagaattgtcacccaactgattaatcacatttttagtatgtgtctcagttgacatttaggtcaggctaaatacaagttgtgttagtattaagtgatgcttagctacctgtactggttacttgctattagtttgtgcaagtaaaattccaaatacatttgaggaaaatcccctttgcaatttgtaggtataaataaccgcttatttgcataagttctatcccactgtaagtgcatcctttccctatggagggaaggaaaggaggaagaaagaaaggaagggaaagaaacagtatttgccttatttaatctgagccgtgcctatctttgtaaagttaaatgagaataacttcttccaaccagcttaattttttttttagactgtgatgatgtcctccaaacacatccttcaggtacccaaagtggcattttcaatatcaagctaccgggatccagtaagattttttctgtttattgcgatcaagagaccagtttgggaggatggcttttgatccagcaaagaatggatggatcactgaattttaaccggacctggcaagactacaagagaggtttcggcagcctgaatgacgagggggaaggagaattctggctaggcaatgactacctccacttactaacccaaaggggctctgttcttagggttgaattagaggactgggctgggaatgaagcttatgcagaatatcacttccgggtaggctctgaggctgaaggctatgccctccaagtctcctcctatgaaggcactgcgggtgatgctctgattgagggttccgtagaggaaggggcagagtacacctctcacaacaacatgcagttcagcacctttgacagggatgcagaccagtgggaagagaactgtgcagaagtctatgggggaggctggtggtataataactgccaagcagccaatctcaatggaatctactaccctgggggctcctatgacccaaggaataacagtccttatgagattgagaatggagtggtctgggtttcctttagaggggcagattattccctcagggctgttcgcatgaaaattaggccccttgtgacccaataggctgaagaagtgggaatgggagcactctgtcttctttgctagagaagtggagagaaaatacaaaaggtaaagcagttgagattctctacaacctaaaaaattcctaggtgctattttcttatcctttgtactgtagctaaatgtacctgagacatattagtctttgaaaaataaagttatgtaaggttttttttatctttaaatagctctgtgggttttaacatttttataaagatataccaagggccattcagtacatcaggaaagtggcagacagaagcttctctctgcaaccttgaagactattggtttgagaacttctcttcccataccacccaaaatcataatgccattggaaagcaaaaagttgttttatccatttgatttgaattgttttaagccaatattttaaggtaaaactcactgaatctaaccatagctgacctttgtagtagaatttacaacttataattacaatgcacaatttataattacaatatgtatttatgtcttttgctatggagcaaatccaggaaggcaagagaaacattctttcctaaatataaatgaaaatctatcctttaaactcttccactagacgttgtaatgcacacttatttttttcccaaggagtaaccaatttctttctaaaacacatttaaaattttaaaactatttatgaatattaaaaaaagacataattcacacattaataaacaatctcccaagtattgatttaacttcatttttctaataatcataaactatattctgtgacatgctaattattattaaatgtaagtcgttagttcgaaagcctctcactaagtatgatctatgctatattcaaaattcaacccatttactttggtcaatatttgatctaagttgcatctttaatcctggtggtcttgccttctgatttttaatttgtatccttttctattaagatatatttgtcattttctcttgaatatgtattaaaatatcccaagcaaaaaaaaaaaaaaaaaaaaaaaaaaaaaaaaaaaaaaaaaaaaaaaaaaaaaaaaaaaacaaaaagcaacaagagtagagcggcagcagagaggcacaaggaaggtgtcgagcacccccggggggggcgaggggacaccaagggaggggagaggtggacacaagggtgcacaaaaagaaacatccggacaaaaacaatggggagagactctaccaaaaaaaaacacgcgcgggggaacacaaagagtgagagagaacagccacagaagagctctcgagggaacaacagggagccacataagagatgaagaggacggcctgaaaaagagtcgcgg

SEQ ID NO: 649450 - DNA, 4643 bp, Homo sapiens
agggcaatcctttctttcagctggaagtgctcctcaggagccagccccacccttagaaaagatgttttccatgaggatcgtctgcctggtcctaagtgtggtgggcacagcatggactgcagatagtggtgaaggtgactttctagctgaaggaggaggcgtgcgtggcccaagggttgtggaaagacatcaatctgcctgcaaagattcagactggcccttctgctctgatgaagactggaactacaaatgcccttctggctgcaggatgaaagggttgattgatgaagtcaatcaagattttacaaacagaataaataagctcaaaaattcactatttgaatatcagaagaacaataaggattctcattcgttgaccactaatataatggaaattttgagaggcgatttttcctcagccaataaccgtgataatacctacaaccgagtgtcagaggatctgagaagcagaattgaagtcctgaagcgcaaagtcatagaaaaagtacagcatatccagcttctgcagaaaaatgttagagctcagttggttgatatgaaacgactggaggtggacattgatattaagatccgatcttgtcgagggtcatgcagtagggctttagctcgtgaagtagatctgaaggactatgaagatcagcagaagcaacttgaacaggtcattgccaaagacttacttccctctagagataggcaacacttaccactgataaaaatgaaaccagttccagacttggttcccggaaattttaagagccagcttcagaaggtacccccagagtggaaggcattaacagacatgccgcagatgagaatggagttagagagacctggtggaaatgagattactcgaggaggctccacctcttatggaaccggatcagagacggaaagccccaggaaccctagcagtgctggaagctggaactctgggagctctggacctggaagtactggaaaccgaaaccctgggagctctgggactggagggactgcaacctggaaacctgggagctctggacctggaagtactggaagctggaactctgggagctctggaactggaagtactggaaaccaaaaccctgggagccctagacctggtagtaccggaacctggaatcctggcagctctgaacgcggaagtgctgggcactggacctctgagagctctgtatctggtagtactggacaatggcactctgaatctggaagttttaggccagatagcccaggctctgggaacgcgaggcctaacaacccagactggggcacatttgaagaggtgtcaggaaatgtaagtccagggacaaggagagagtaccacacagaaaaactggtcacttctaaaggagataaagagctcaggactggtaaagagaaggtcacctctggtagcacaaccaccacgcgtcgttcatgctctaaaaccgttactaagactgttattggtcctgatggtcacaaagaagttaccaaagaagtggtgacctccgaagatggttctgactgtcccgaggcaatggatttaggcacattgtctggcataggtactctggatgggttccgccataggcaccctgatgaagctgccttcttcgacactgcctcaactggagagtctaggggctcagaatctggcatcttcacaaatacaaaggaatccagttctcatcaccctgggatagctgaattcccttcccgtggtaaatcttcaagttacagcaaacaatttactagtagcacgagttacaacagaggagactccacatttgaaagcaagagctataaaatggcagatgaggccggaagtgaagccgatcatgaaggaacacatagcaccaagagaggccatgctaaatctcgccctgtcagaggtatccacacttctcctttggggaagccttccctgtccccctagactaagttaaatatttctgcacagtgttcccatggccccttgcatttccttcttaactctctgttacacgtcattgaaactacacttttttggtctgtttttgtgctagactgtaagttccttgggggcagggcctttgtctgtctcatctctgtattcccaaatgcctaacagtacagagccatgactcaataaatacatgttaaatggatgaatgaattcctctgaaactctatttgagcttatttagtcaaattctttcactattcaaagtgtgtgctattagaattgtcacccaactgattaatcacatttttagtatgtgtctcagttgacatttaggtcaggctaaatacaagttgtgttagtattaagtgatgcttagctacctgtactggttacttgctattagtttgtgcaagtaaaattccaaatacatttgaggaaaatcccctttgcaatttgtaggtataaataaccgcttatttgcataagttctatcccactgtaagtgcatcctttccctatggagggaaggaaaggaggaagaaagaaaggaagggaaagaaacagtatttgccttatttaatctgagccgtgcctatctttgtaaagttaaatgagaataacttcttccaaccagcttaattttttttttagactgtgatgatgtcctccaaacacatccttcaggtacccaaagtggcattttcaatatcaagctaccgggatccagtaagattttttctgtttattgcgatcaagagaccagtttgggaggatggcttttgatccagcaaagaatggatggatcactgaattttaaccggacctggcaagactacaagagaggtttcggcagcctgaatgacgagggggaaggagaattctggctaggcaatgactacctccacttactaacccaaaggggctctgttcttagggttgaattagaggactgggctgggaatgaagcttatgcagaatatcacttccgggtaggctctgaggctgaaggctatgccctccaagtctcctcctatgaaggcactgcgggtgatgctctgattgagggttccgtagaggaaggggcagagtacacctctcacaacaacatgcagttcagcacctttgacagggatgcagaccagtgggaagagaactgtgcagaagtctatgggggaggctggtggtataataactgccaagcagccaatctcaatggaatctactaccctgggggctcctatgacccaaggaataacagtccttatgagattgagaatggagtggtctgggtttcctttagaggggcagattattccctcagggctgttcgcatgaaaattaggccccttgtgacccaataggctgaagaagtgggaatgggagcactctgtcttctttgctagagaagtggagagaaaatacaaaaggtaaagcagttgagattctctacaacctaaaaaattcctaggtgctattttcttatcctttgtactgtagctaaatgtacctgagacatattagtctttgaaaaataaagttatgtaaggttttttttatctttaaatagctctgtgggttttaacatttttataaagatataccaagggccattcagtacatcaggaaagtggcagacagaagcttctctctgcaaccttgaagactattggtttgagaacttctcttcccataccacccaaaatcataatgccattggaaagcaaaaagttgttttatccatttgatttgaattgttttaagccaatattttaaggtaaaactcactgaatctaaccatagctgacctttgtagtagaatttacaacttataattacaatgcacaatttataattacaatatgtatttatgtcttttgctatggagcaaatccaggaaggcaagagaaacattctttcctaaatataaatgaaaatctatcctttaaactcttccactagacgttgtaatgcacacttatttttttcccaaggagtaaccaatttctttctaaaacacatttaaaattttaaaactatttatgaatattaaaaaaagacataattcacacattaataaacaatctcccaagtattgatttaacttcatttttctaataatcataaactatattctgtgacatgctaattattattaaatgtaagtcgttagttcgaaagcctctcactaagtatgatctatgctatattcaaaattcaacccatttactttggtcaatatttgatctaagttgcatctttaatcctggtggtcttgccttctgatttttaatttgtatccttttctattaagatatatttgtcattttctcttgaatatgtattaaaatatcccaagcaaaaaaaaaaaaaaaaaaaaaaaaaaaaaaaaaaaaaaaaaaaaaaaaaaaaaaaaaaaacaaaaagcaacaagagtagagcggcagcagagaggcacaaggaaggtgtcgagcacccccggggggggcgaggggacaccaagggaggggagaggtggacacaagggtgcacaaaaagaaacatccggacaaaaacaatggggagagactctaccaaaaaaaaacacgcgcgggggaacacaaagagtgagagagaacagccacagaagagctctcgagggaacaacagggagccacataagagatgaagaggacggcctgaaaaagagtcgcgg

SEQ ID NO: 649451 - DNA, 1200 bp, Homo sapiens
  misc_feature (726)..(726): n is a, c, g, or t
ggacttgggagctaagcccaagtgtgaaatctctggatcctatggatttggtttcttcccacagtttatctgtatgttctacgtgtggctggacgccccggtatctccgtccagcttggagaacactgtcacctcggtacgcttgagggtgctacgatcctgcatgtggtgtcctagcctcccgccgtccgcccatgtccggtcgcatcacgagttggcctcagcgggtccagacattcagaccgaagcgctggtgcgctcctaggcgatctgttggcgagcatagtcactagacgtggttgctgttatataaaagtagaaacttcgcattatggctagtgcattgcgtcagagagaagatgctcaggaaattctaataagtcagtattgtccaacgcatatagatagagtcgcgtgcatgtggccctagtgactctccacgacgattaagctgctattgcgcgctgagccccttgtaggtccacctagtgatgttgcagctttgaataccgcgcgatgacgtgcatgtggtccttgcgcgccaggcgctggtcccttggcatgtacgcggaagccacataccgcaagttcggcgtcctgatggagtaccaagtggagcgttagtgatgcccatagtggcacttcagcgtacgcgtgttgggcaagaggtggcaataagaccagaagaaccatgtatcacgtgaatggacgcgtcgaggattcccnatgtgagagcccttcagtcttgggcatgcttggccaccggaacaggcccttgggctccctgtgtcgcccggaccccccatagcaggcccctggcgctggccgcttggtcggtcctcttgtccaaagggaagagccccctgtggtgttcagggagggcttgccccgaggtgggctgctcagggccagactagaccgaaggtaggagacccagagcctgttctaggaagggctagtcctgttggctgtactgagaacactgcgctttggactcacaaaggaagacccagggctgaggcccctccagggccagggtcctgggggcagagatctccagggaagcaagcaaggcccaggcctcctagcgactcacaaacaaggggcatgtgtccgcgaaggaccctggaagtgcagaattccccttggaaaggttcttggttaagtctgacgaaagtttgaaggccgaatgaagaccct

SEQ ID NO: 649452 - DNA, 689 bp, Homo sapiens
  misc_feature (608)..(608): n is a, c, g, or t
  misc_feature (619)..(619): n is a, c, g, or t
  misc_feature (649)..(649): n is a, c, g, or t
  misc_feature (668)..(668): n is a, c, g, or t
agtgaactcccattcacaattgctacaaaaagaataaaatacctagcaataaaacttacaagggatgtgaaggacttcttcaagaagaactacaaaccactgctcaaggaaacaagagaggacacaaacaaatgaaaaacattccatgctcgtggataggaagaatcaatattgtgaaaatgggcatactatccaaagtaatgtatagatacaatgctatccccatcaagccgttgttgattttcttcacagaattagaaaaaactactttaaatttcatatggaaacaaaaaaagagcccatatagtcaagacaatcctaagcaaaaagaacaaagctggaggcatcatgctacctgacttcaaactatactacaaggctacagtaaccaaaacatcatggtactgatgccaaaacagatatgcagaccaatggaacataacagaggcctcagaaataacactacacatctacaaccatctgatctttgacaaccctgacaaaaacagcaatggggaaaggattccctatttaataaatggtgttgggaaaactgcctagccatatgtagaaaactgaaactggaccccttccttaaacctacacanaattaactcangaggattcaggacttaaatgtaagaccganaatcattccctaggcctangcaggaccattcagggacatg

SEQ ID NO: 649453 - DNA, 4643 bp, Homo sapiens
agggcaatcctttctttcagctggaagtgctcctcaggagccagccccacccttagaaaagatgttttccatgaggatcgtctgcctggtcctaagtgtggtgggcacagcatggactgcagatagtggtgaaggtgactttctagctgaaggaggaggcgtgcgtggcccaagggttgtggaaagacatcaatctgcctgcaaagattcagactggcccttctgctctgatgaagactggaactacaaatgcccttctggctgcaggatgaaagggttgattgatgaagtcaatcaagattttacaaacagaataaataagctcaaaaattcactatttgaatatcagaagaacaataaggattctcattcgttgaccactaatataatggaaattttgagaggcgatttttcctcagccaataaccgtgataatacctacaaccgagtgtcagaggatctgagaagcagaattgaagtcctgaagcgcaaagtcatagaaaaagtacagcatatccagcttctgcagaaaaatgttagagctcagttggttgatatgaaacgactggaggtggacattgatattaagatccgatcttgtcgagggtcatgcagtagggctttagctcgtgaagtagatctgaaggactatgaagatcagcagaagcaacttgaacaggtcattgccaaagacttacttccctctagagataggcaacacttaccactgataaaaatgaaaccagttccagacttggttcccggaaattttaagagccagcttcagaaggtacccccagagtggaaggcattaacagacatgccgcagatgagaatggagttagagagacctggtggaaatgagattactcgaggaggctccacctcttatggaaccggatcagagacggaaagccccaggaaccctagcagtgctggaagctggaactctgggagctctggacctggaagtactggaaaccgaaaccctgggagctctgggactggagggactgcaacctggaaacctgggagctctggacctggaagtactggaagctggaactctgggagctctggaactggaagtactggaaaccaaaaccctgggagccctagacctggtagtaccggaacctggaatcctggcagctctgaacgcggaagtgctgggcactggacctctgagagctctgtatctggtagtactggacaatggcactctgaatctggaagttttaggccagatagcccaggctctgggaacgcgaggcctaacaacccagactggggcacatttgaagaggtgtcaggaaatgtaagtccagggacaaggagagagtaccacacagaaaaactggtcacttctaaaggagataaagagctcaggactggtaaagagaaggtcacctctggtagcacaaccaccacgcgtcgttcatgctctaaaaccgttactaagactgttattggtcctgatggtcacaaagaagttaccaaagaagtggtgacctccgaagatggttctgactgtcccgaggcaatggatttaggcacattgtctggcataggtactctggatgggttccgccataggcaccctgatgaagctgccttcttcgacactgcctcaactggaaaaacattcccaggtttcttctcacctatgttaggagagtttgtcagtgagactgagtctaggggctcagaatctggcatcttcacaaatacaaaggaatccagttctcatcaccctgggatagctgaattcccttcccgtggtaaatcttcaagttacagcaaacaatttactagtagcacgagttacaacagaggagactccacatttgaaagcaagagctataagagaggccatgctaaatctcgccctgtcagaggtatccacacttctcctttggggaagccttccctgtccccctagactaagttaaatatttctgcacagtgttcccatggccccttgcatttccttcttaactctctgttacacgtcattgaaactacacttttttggtctgtttttgtgctagactgtaagttccttgggggcagggcctttgtctgtctcatctctgtattcccaaatgcctaacagtacagagccatgactcaataaatacatgttaaatggatgaatgaattcctctgaaactctatttgagcttatttagtcaaattctttcactattcaaagtgtgtgctattagaattgtcacccaactgattaatcacatttttagtatgtgtctcagttgacatttaggtcaggctaaatacaagttgtgttagtattaagtgatgcttagctacctgtactggttacttgctattagtttgtgcaagtaaaattccaaatacatttgaggaaaatcccctttgcaatttgtaggtataaataaccgcttatttgcataagttctatcccactgtaagtgcatcctttccctatggagggaaggaaaggaggaagaaagaaaggaagggaaagaaacagtatttgccttatttaatctgagccgtgcctatctttgtaaagttaaatgagaataacttcttccaaccagcttaattttttttttagactgtgatgatgtcctccaaacacatccttcaggtacccaaagtggcattttcaatatcaagctaccgggatccagtaagattttttctgtttattgcgatcaagagaccagtttgggaggatggcttttgatccagcaaagaatggatggatcactgaattttaaccggacctggcaagactacaagagaggtttcggcagcctgaatgacgagggggaaggagaattctggctaggcaatgactacctccacttactaacccaaaggggctctgttcttagggttgaattagaggactgggctgggaatgaagcttatgcagaatatcacttccgggtaggctctgaggctgaaggctatgccctccaagtctcctcctatgaaggcactgcgggtgatgctctgattgagggttccgtagaggaaggggcagagtacacctctcacaacaacatgcagttcagcacctttgacagggatgcagaccagtgggaagagaactgtgcagaagtctatgggggaggctggtggtataataactgccaagcagccaatctcaatggaatctactaccctgggggctcctatgacccaaggaataacagtccttatgagattgagaatggagtggtctgggtttcctttagaggggcagattattccctcagggctgttcgcatgaaaattaggccccttgtgacccaataggctgaagaagtgggaatgggagcactctgtcttctttgctagagaagtggagagaaaatacaaaaggtaaagcagttgagattctctacaacctaaaaaattcctaggtgctattttcttatcctttgtactgtagctaaatgtacctgagacatattagtctttgaaaaataaagttatgtaaggttttttttatctttaaatagctctgtgggttttaacatttttataaagatataccaagggccattcagtacatcaggaaagtggcagacagaagcttctctctgcaaccttgaagactattggtttgagaacttctcttcccataccacccaaaatcataatgccattggaaagcaaaaagttgttttatccatttgatttgaattgttttaagccaatattttaaggtaaaactcactgaatctaaccatagctgacctttgtagtagaatttacaacttataattacaatgcacaatttataattacaatatgtatttatgtcttttgctatggagcaaatccaggaaggcaagagaaacattctttcctaaatataaatgaaaatctatcctttaaactcttccactagacgttgtaatgcacacttatttttttcccaaggagtaaccaatttctttctaaaacacatttaaaattttaaaactatttatgaatattaaaaaaagacataattcacacattaataaacaatctcccaagtattgatttaacttcatttttctaataatcataaactatattctgtgacatgctaattattattaaatgtaagtcgttagttcgaaagcctctcactaagtatgatctatgctatattcaaaattcaacccatttactttggtcaatatttgatctaagttgcatctttaatcctggtggtcttgccttctgatttttaatttgtatccttttctattaagatatatttgtcattttctcttgaatatgtattaaaatatcccaagcaaaaaaaaaaaaaaaaaaaaaaaaaaaaaaaaaaaaaaaaaaaaaaaaaaaaaaaaaaaacaaaaagcaacaagagtagagcggcagcagagaggcacaaggaaggtgtcgagcacccccggggggggcgaggggacaccaagggaggggagaggtggacacaagggtgcacaaaaagaaacatccggacaaaaacaatggggagagactctaccaaaaaaaaacacgcgcgggggaacacaaagagtgagagagaacagccacagaagagctctcgagggaacaacagggagccacataagagatgaagaggacggcctgaaaaagagtcgcgg

SEQ ID NO: 649454 - DNA, 2141 bp, Homo sapiens
agggcaatcctttctttcagctggaagtgctcctcaggagccagccccacccttagaaaagatgttttccatgaggatcgtctgcctggtcctaagtgtggtgggcacagcatggactgcagatagtggtgaaggtgactttctagctgaaggaggaggcgtgcgtggcccaagggttgtggaaagacatcaatctgcctgcaaagattcagactggcccttctgctctgatgaagactggaactacaaatgcccttctggctgcaggatgaaagggttgattgatgaagtcaatcaagattttacaaacagaataaataagctcaaaaattcactatttgaatatcagaagaacaataaggattctcattcgttgaccactaatataatggaaattttgagaggcgatttttcctcagccaataaccgtgataatacctacaaccgagtgtcagaggatctgagaagcagaattgaagtcctgaagcgcaaagtcatagaaaaagtacagcatatccagcttctgcagaaaaatgttagagctcagttggttgatatgaaacgactggaggtggacattgatattaagatccgatcttgtcgagggtcatgcagtagggctttagctcgtgaagtagatctgaaggactatgaagatcagcagaagcaacttgaacaggtcattgccaaagacttacttccctctagagataggcaacacttaccactgataaaaatgaaaccagttccagacttggttcccggaaattttaagagccagcttcagaaggtacccccagagtggaaggcattaacagacatgccgcagatgagaatggagttagagagacctggtggaaatgagattactcgaggaggctccacctcttatggaaccggatcagagacggaaagccccaggaaccctagcagtgctggaagctggaactctgggagctctggacctggaagtactggaaaccgaaaccctgggagctctgggactggagggactgcaacctggaaacctgggagctctggacctggaagtactggaagctggaactctgggagctctggaactggaagtactggaaaccaaaaccctgggagccctagacctggtagtaccggaacctggaatcctggcagctctgaacgcggaagtgctgggcactggacctctgagagctctgtatctggtagtactggacaatggcactctgaatctggaagttttaggccagatagcccaggctctgggaacgcgaggcctaacaacccagactggggcacatttgaagaggtgtcaggaaatgtaagtccagggacaaggagagagtaccacacagaaaaactggtcacttctaaaggagataaagagctcaggactggtaaagagaaggtcacctctggtagcacaaccaccacgcgtcgttcatgctctaaaaccgttactaagactgttattggtcctgatggtcacaaagaagttaccaaagaagtggtgacctccgaagatggttctgactgtcccgaggcaatggatttaggcacattgtctggcataggtactctggatgggttccgccataggcaccctgatgaagctgccttcttcgacactgcctcaactggaaaaacattcccaggtttcttctcacctatgttaggagagtttgtcagtgagactgagtctaggggctcagaatctggcatcttcacaaatacaaaggaatccagttctcatcaccctgggatagctgaattcccttcccgtggtaaatcttcaagttacagcaaacaatttactagtagcacgagttacaacagaggagactccacatttgaaagcaagagctataaaatggcagatgaggccggaagtgaagccgatcatgaaggaacacatagcaccaagagaggccatgctaaatctcgccctgtcagaggtatccacacttctcctttggggaagccttccctgtccccctagactaagttaaatatttctgcacagtgttcccatggtgtgctagactgtaagttccttgggggcagggcctttgtctgtctcatctctgtattcccaaatgcctaacagtacagagccatgactcaataaatacatgttaaatgga

SEQ ID NO: 649455 - DNA, 2153 bp, Homo sapiens
agggcaatcctttctttcagctggaagtgctcctcaggagccagccccacccttagaaaagatgttttccatgaggatcgtctgcctggtcctaagtgtggtgggcacagcatggactgcagatagtggtgaaggtgactttctagctgaaggaggaggcgtgcgtggcccaagggttgtggaaagacatcaatctgcctgcaaagattcagactggcccttctgctctgatgaagactggaactacaaatgcccttctggctgcaggatgaaagggttgattgatgaagtcaatcaagattttacaaacagaataaataagctcaaaaattcactatttgaatatcagaagaacaataaggattctcattcgttgaccactaatataatggaaattttgagaggcgatttttcctcagccaataaccgtgataatacctacaaccgagtgtcagaggatctgagaagcagaattgaagtcctgaagcgcaaagtcatagaaaaagtacagcatatccagcttctgcagaaaaatgttagagctcagttggttgatatgaaacgactggaggtggacattgatattaagatccgatcttgtcgagggtcatgcagtagggctttagctcgtgaagtagatctgaaggactatgaagatcagcagaagcaacttgaacaggtcattgccaaagacttacttccctctagagataggcaacacttaccactgataaaaatgaaaccagttccagacttggttcccggaaattttaagagccagcttcagaaggtacccccagagtggaaggcattaacagacatgccgcagatgagaatggagttagagagacctggtggaaatgagattactcgaggaggctccacctcttatggaaccggatcagagacggaaagccccaggaaccctagcagtgctggaagctggaactctgggagctctggacctggaagtactggaaaccgaaaccctgggagctctgggactggagggactgcaacctggaaacctgggagctctggacctggaagtactggaagctggaactctgggagctctggaactggaagtactggaaaccaaaaccctgggagccctagacctggtagtaccggaacctggaatcctggcagctctgaacgcggaagtgctgggcactggacctctgagagctctgtatctggtagtactggacaatggcactctgaatctggaagttttaggccagatagcccaggctctgggaacgcgaggcctaacaacccagactggggcacatttgaagaggtgtcaggaaatgtaagtccagggacaaggagagagtaccacacagaaaaactggtcacttctaaaggagataaagagctcaggactggtaaagagaaggtcacctctggtagcacaaccaccacgcgtcgttcatgctctaaaaccgttactaagactgttattggtcctgatggtcacaaagaagttaccaaagaagtggtgacctccgaagatggttctgactgtcccgaggcaatggatttaggcacattgtctggcataggtactctggatgggttccgccataggcaccctgatgaagctgccttcttcgacactgcctcaactggaaaaacattcccaggtttcttctcacctatgttaggagagtttgtcagtgagactgagtctaggggctcagaatctggcatcttcacaaatacaaaggaatccagttctcatcaccctgggatagctgaattcccttcccgtggtaaatcttcaagttacagcaaacaatttactagtagcacgagttacaacagaggagactccacatttgaaagcaagagctataagagaggccatgctaaatctcgccctgtcagaggtatccacacttctcctttggggaagccttccctgtccccctagactaagttaaatatttctgcacagtgttcccatggccccttgcatttccttcttaactctctgttacacgtcattgaaactacacttttttggtctgtttttgtgctagactgtaagttccttgggggcagggcctttgtctgtctcatctctgtattcccaaatgcctaacagtacagagccatgactcaataaatacatgttaaatgga

SEQ ID NO: 649456 - DNA, 403 bp, Homo sapiens
  misc_feature (259)..(259): n is a, c, g, or t
gacaaatataaatacaggcaattgtctgttctagagttgcttaacattgagaggctaatgaaaagctcaaatcagataacttttactggtatgtgtggctataggttttaaagtgaactttttcttcttctctggggaaagtatttttgtgtatgttttatagttcttgcttgaatgaagaaaccactttgctaaaaaactttgagacttggatttttaactgaaacagcctagatatacttagctaacttactgatanaaggataaaatagaaggaagcgagataaatttggagggccaggctggtctcacactgctgatctcatgatccacccgccttggcctcccaaagtgctgggatcacaggcgtgacgaccacacccggcctgtatgtctcattttt

SEQ ID NO: 649457 - DNA, 215 bp, Homo sapiens
cgtccagtatcttccctaagccatctgataatgttccagcaaacttggcagcagagtttgatactccgtgtgttacatttctgatgaggccccctacatttccatattttatcagtccagtaaccccttcagaaacttcattcaaaagcaagaaaaacggatatttacaaacttccatcgccagcttttttgttggattgacaagtggatcgatc

SEQ ID NO: 649458 - DNA, 262 bp, Homo sapiens
  misc_feature (48)..(48): n is a, c, g, or t
  misc_feature (74)..(74): n is a, c, g, or t
  misc_feature (165)..(166): n is a, c, g, or t
  misc_feature (185)..(185): n is a, c, g, or t
  misc_feature (227)..(227): n is a, c, g, or t
ccaggctcttgcctataatcccagcactttgggaagctgaggcggganaattatttgagcccaggagctcaagnccagcccgggcaacatggggagaccctgtctctacaaaaagttagccaggtgtggtagcgcatgctgcggtcccagccactcgggaggctnnggcgggaggattgcttganccacctcaaggtgggtgcagtgagccatgaccgtgccactgnactcccgcctgagcaatgaaggaagaccctgtctc

SEQ ID NO: 649459 - DNA, 120 bp, Homo sapiens
attaatgaggcatttattgaaatggcaaccacagaggatgctcagcgccgcagtggattattacacaaccacaccagcgttagtcttttgcaagccagtacagagttcatttatcccaga

SEQ ID NO: 649460 - DNA, 141 bp, Homo sapiens
gaggatctccggaaggcgcactgcaacacatcaatgttggtaagggatgctcaggtctcggttggcaatgtgcttgaggagtgtggtcttgcccttgcaattgggtcctaccagcccgtagcggcggccggctacaatgta

SEQ ID NO: 649461 - DNA, 1031 bp, Homo sapiens
aggagaaatataggcttaggtcaacttgtgttaatcggcacgagggaagcgcagcgcaccttcgtcatgttcttcgcgcctggtgtggtgaacactgccagcggctgcagccgacttggaatgacctgggagacaaatacaacagcatggaagatgccaaagtctatgtggctaaagtggactgacggcccactccgacgtgtgctccgcccaggtggtgcgaggataccccacttaaagctttcaagccaggccaagaaagctgtgaagtaccaggtcctcgggacttccagacactcggaaaactggatgctgcagacactgaaacggaaggagccagtgacaccagagcctgggaaagtgggaaacctggccagtgcccccgagctcaatgcaaggggctgtattgaggcttcttcaagcaagcaacttttgagacttgcacgtttgcacaagggtggaaccacttttatccaaagttcttcgcctcctcgtgggttgtgggttcacttagaaaggccctgggttccaaacctggggagcaagctggctctgggccttgaacattccgaaaactgtcaaggatttgcgcaaggttgaattgtacaccagcactatgaactctgctccgggaaaaccaggttcgttggtaatcccactctatctctggttcccgagatgcgaacaaaggtggatcaagtacaaggggaaagcgggatattggaggtcacttgaggggagtacgttgggagtcgcaggcttgcctgctgcacagaggacttgagcgaccggagacctgtccacggccttcaagaaggccccgtgtggtttggcaagcttggagccctgagtgttgtacaaggggcgcctgttttttggcactcacttgaggatagttcgatgacaccctctgggcgcaaggataacctttaatccaagtttattggcacagggtgggcacttgtaagaaccggggccaattgggcggaagctctcaaggatccctggacttggggggcaaaaaccgaaaa

SEQ ID NO: 649462 - DNA, 204 bp, Homo sapiens
  misc_feature (189)..(189): n is a, c, g, or t
  misc_feature (199)..(199): n is a, c, g, or t
gctacaagaggaccccggcaggcaggttcgtcggcaggcaggtgaaaggctggaacactcctgtcactcactgtcggctgctgaacagtggagccaaggccagcaggattgagggtgtgaaccgagggcttttggaggaggtggtgtacgtggatgacatactcgtgggtagaccgtggtgtttctcanaagatcacanaagat

SEQ ID NO: 649463 - DNA, 376 bp, Homo sapiens
cttcatcgcagcctctcttagctttcacttggactgaccctgacgccattaggctcagcaaattacctgggctgtactgccgcaaggcttcacagacagccccattacttcagtcaagcccaaatttcatcctcatctgttacctatctcagcataattctcataaaaacacacgtgctctgcctgctgatcgtgtccgactaatcccccaaacctcaatcccttacaaaacaacaactcctttccttcctaggcatggttcgtgcggtcagaattcttacacaagaggcaggactgcaccctgtagcctttctgtccaaacaacttgaccttactgtattagcctagccatcatgtctctaatagtttatgctgt

SEQ ID NO: 649464 - DNA, 535 bp, Homo sapiens
acagacctcagagagtttcccatccattgcgtgtctcgtcatctctgctcggacaagaccctatctgtcaaggccgcactgggtgtaagtgtcggcgtgcatcgcatggcgagctatggtgcggaggccctggagaggactgttcctgtccttccccaccatccaagacctacttcccgcacttcgacctgagccacggctctgcccaggttaagggccacggcaagaaggtgcgctcgacgcgctgaccaaccgccagtgggcgcacagtggaccgacatgcaaccaacgcgctgtccgcccgtgagcgacgctgcacagcgcacaagctatcagggtggatcccggtcaacttcaagctctaagccactgccatgtctggtgaccctggcacgcccactctccccgcacgagttaccccctgcaggtgcacgcctacctggacaagttcctggcttctgtgagcaccgtgctgacctccaaataccgttaagctggagcctcggtagccgttcctcctgcccgctggataccc

SEQ ID NO: 649465 - DNA, 102 bp, Homo sapiens
atgcttgggccgtgatgctcgtgacgcattcgcttggcctatctctgggtgtagcccctcctaaacaatggccacaggcagtggcctcggccccagctgcgg

SEQ ID NO: 649466 - DNA, 148 bp, Homo sapiens
  misc_feature (20)..(20): n is a, c, g, or t
  misc_feature (50)..(50): n is a, c, g, or t
  misc_feature (80)..(80): n is a, c, g, or t
cgaaacgcagcatcgccttnctgcacagctcgacagcgactcgggggctnctgctcgggtaccagcacgatgatatcggngtagtgcgcctgattttgcccggtccagataatctggatgcggaaatagcgctggtcgccgctgccgg

SEQ ID NO: 649467 - DNA, 218 bp, Homo sapiens
  misc_feature (19)..(19): n is a, c, g, or t
  misc_feature (57)..(57): n is a, c, g, or t
  misc_feature (65)..(65): n is a, c, g, or t
  misc_feature (85)..(85): n is a, c, g, or t
  misc_feature (133)..(133): n is a, c, g, or t
tgcatgtgctgtaggcagngttgaaagtcactgttagaagtttgactgaaatgttcnaagggaanggaagtaagaactcaaatanatgggaagaactgactgaccattcacttcaagtatcacataatccctnatcacaaaccgttccttttcagctctctttacctggctggggagtccacggatgagctctttgtagtgggaacatctcgacccct

SEQ ID NO: 649468 - DNA, 115 bp, Homo sapiens
gactacaggagctttcgaatcgacggtttctcctgtattgcagttaggagtagtctcatctaatttccttctctttcttcttcctctcacatgcttcagcatgtggttctctatg

SEQ ID NO: 649469 - DNA, 250 bp, Homo sapiens
actttgagaggatgaggtaggaggatcacacttgagcccaggagtttaagaccagcctgggaaacttaaggaaacccgatatctattaaaaatttaaaaattaagccacgcttaggtggcagacacatatagtcccaggtaacaaaagagattgaggtgggatgataactagagtctgggaagtcaagaatgcagtgagacataataatgggaaaaaactgtagactgggtgacacaacaaactatgtaa

SEQ ID NO: 649470 - DNA, 100 bp, Homo sapiens
gtagcggcggcaacagcaacaacagcaacaccagcagtatacaccagcagcaacagcagcaacaggcggctcctccccaaccccagccgcagaaagcgct

SEQ ID NO: 649471 - DNA, 134 bp, Homo sapiens
gccagggcgctactcggcgaggtcgacgccgaagtggtgcgcagcgcgcaaccgtgtggcgctgaagatcaagatcaacgaaggcacgtcgccgccatccagcacatcaacatcgtggcacaacgtgtcgagag

SEQ ID NO: 649472 - DNA, 770 bp, Homo sapiens
tgctccaaaaaatttttttttggggaataaggccctcaccccccgtcgctaattctctctgacagctggacccccttactcaaggcctgtgccttcaggtataaaagaggtttcctgaagacacgacctgactgtgacaacagcagaggaacccacgcccactgtgataacaaggtaaccgttatgttgattcttacaatgggagatggtgagttagaaagttccccggacatgggcgatggggagggaagaggcaataagaaagtcacgaggtagaattaggggcccttgaaatatgaccaaactctgagggaaaccaaagaccaatgtggaaagaataacttaattttaattcccatctcccgagagatttgaggtgtatttaagatgaaaaccggatactcaccaagaaacggaaactcaggagttcaagacccagcctaggccagatggccacatcccgtctctaccaaaataatttttaaaaattagcccagcatggtggcatgtgcctgtggtcctagctacttgggaggctgaagtgggaagatcacttgagccccggagttcaaggcttccagtgagccctgatggtgcccctgcactccagcctgggggacagagtgagaccctgtctctttaaaagccagaaaagaaagagaagactgagaataagaagatctctttgaaaattaaataagactgctaaaagtatttggtataccgtctggaaaataaagttgaggggatctctcccagattaagagcca

SEQ ID NO: 649473 - DNA, 105 bp, Homo sapiens
gcagtcctaaacaatcacaattacactgtactacccaagaagactgttgcttctctttttttagatatttttctatctctcacttctcagggatgaaaaatatct

SEQ ID NO: 649474 - DNA, 93 bp, Homo sapiens
gcggccgcctactactactactgctcgaattcaagcttctaacgatgtacggggacatgactccaaaaaaaagcacaaaaaaagttgtactgc

SEQ ID NO: 649475 - DNA, 362 bp, Homo sapiens
  misc_feature (2)..(2): n is a, c, g, or t
  misc_feature (359)..(359): n is a, c, g, or t
cngccgccactgtgctggaaagccatggagggatgcaactagggatggctgtcagctcatccctgcagatgaagaaagttatctcttaaagggggatcaagagaccacctttattgctgctacagtgagcatgccgacagccagagatgtctgggctcacgtttattgagcctgcccccataaatataaacagtccactacgtctttggaaagagacaaatacttgctacctccattcctcacctagcgcttctagtccagtgtggagagggttgtttctcaatatgatattcaaagaattgctgcttctgctcatggactatgatctgaacacagctccctctctctctctctctctntct

SEQ ID NO: 649476 - DNA, 265 bp, Homo sapiens
gctctgctgacagcactggaacacccaaaaggccctgaggacctcactgggaatacaacacacagggaagggaggccagaggtggcactgccacctcccaacaagcctgctgctgcccacgcacatggtcaggaaccacggcccgacaggcaacccagagccacactaactgctcagcgtttgacgtgcagaagttcagatgggctctaagcatgaaagactcaccagagtacaaatcttagtgatcctcccgcacaaaagcatt

SEQ ID NO: 649477 - DNA, 270 bp, Homo sapiens
catacggtaagacagtcgaccaggtagtagaggccacagaaagcagagatcatagctactagaataccagcaagggtaacaaagtagagacctatacccaaaaatataactatacgacgggctagtacacaccaccctagaataaaaaggcccagccaagaagtaatagtacaacagtagtaaaacaaagatagcaggggctacaaacaatagcgagtactagcctaaactaaaacgatagggtataacatatactagacgaaagcacgc

SEQ ID NO: 649478 - DNA, 122 bp, Homo sapiens
gatgtgtacaggtgtagcactgtgccggctaaccagaattcttatacctcttgctttaagtgttgggagaaaatggaaaaaaaaaaaagttagagctttagtactggtacacttcggggcag

SEQ ID NO: 649479 - DNA, 267 bp, Homo sapiens
tggagctgtagttggcgtgtgtgagggtgtacctgcggaactgtttattggcgagacatggtttgtttaaaaactgttttcacggcagctgtgtaatgcatatgctatgtctacagtaacggtttggacagggtagtctgtcctggtaagtcggagaaagaaccagattgcgtggctctatggagggggtgctggtgcctctgcttgagtagtactgtgacccgcacttcagctgtgatgtagagaatcctagtagctactggtatg

SEQ ID NO: 649480 - DNA, 235 bp, Homo sapiens
tggtatcaaccacttcgtcgcctaaaggcaactcgtcatcagctctcagccttagaatcccggatttgcctaagattccagcctaccaccttaaacctggacaaccaacgccaggcttggctaaccttctccgtccctccatcgcaataactgggagtacaggaatattaaacctgtttccatcgactacgcttttcagcctcgccttagggaccgactaaccctgcgtcgaata

SEQ ID NO: 649481 - DNA, 296 bp, Homo sapiens
agtctacagtaaaatctctacactaacagtttaaaggccggcagctgaagcattcagcctctgcagtgtagactactcgactgtagtagaggcatttggatacttacaagtcaagtgctgtggctccagttacccggctcccaccctaacatccatactatgttgtctggagagccatggacacataattattttcagcaaccagctgcagtaactccattacagcaacccatagtataaaccacaatgctcattgtaatggatattgaggtcattgagaattctaggttgcatgt

SEQ ID NO: 649482 - DNA, 993 bp, Homo sapiens
catatggctaagactgggcaaggcgtcggagtgacgggtcgatattttctggcattgtggtctactgctgagccagtttctcagtctaccacttctgattatcagtgggatgttagccgtaatcaaccctatatcgatgatgaatggtctgggttaaatggtctgtcttctgctgatcccaggggtgattggaatgcaccagcagaagagtggggcaattgggtagacgaagaaagagcttcacattctacagtcccaggaaccaatccctgatgatcaaaaggtctcagatgatgatacaacgaacagggagagggagctcttccaactgggaaatccaaaaaagaaaaaaaagacaaacgaagaagcacggtgaagataactctactgcacaggacacagacagactccagaaccacagagattagcgaagaccttccagtgaatcacctctaaaaaccgtccaacaaccaggaaaaagcttctgccttgaagaccataaagcactagtgatccagcgaagtactcgtcgaacaaatagccagcctatcaagactcttccagctgctactactaccgagcatctgtcatcttatccaaacaagtgattcttgacaggagctcgtaccaagtgccgcacatactcgaagaagacagataactcccacggtcgaataacaagcaaataggtgtgctctttacagacagtggggaataagcggattccctgccactacaaagagaaacagcgagcagaacggaagttgtcgcggatggcatggtcggagccctgtctgaagaagtcggagcacatagggacagtacgaggacagacgtaacagctcgagccagggagcctcactgcggacaacacggaaagaaacgccgaatcgcgggcaatggacgtctatcacaacgccggacggaacgcgacacggcacagagaagaacggcgcagtgccgaccaagacaccagcgaatcctgatcccgtt

SEQ ID NO: 649483 - DNA, 331 bp, Homo sapiens
tacaagatattaataggtattctttgaaaaagaggtgctggaaataaatacttagaaaatactgatttcacccataatcccagcactttgagaggctgaagtgggaggatcacttgaggctaggagttcaaaaccagcctagtcaacatggcaaaactccatctctacaaaaaaaaaaaaaaaaaaaaaaaaaagccaggtgtggtagcacacacctgtaatcccaactacttgggaggctgagacacgagaatcccttgaacccagaaggcagagattgcagtgagccgagattgtgccactgcagtccagcctggatactctgtcttaa

SEQ ID NO: 649484 - DNA, 537 bp, Homo sapiens
  misc_feature (8)..(8): n is a, c, g, or t
  misc_feature (70)..(70): n is a, c, g, or t
  misc_feature (72)..(72): n is a, c, g, or t
  misc_feature (89)..(89): n is a, c, g, or t
  misc_feature (92)..(92): n is a, c, g, or t
  misc_feature (95)..(95): n is a, c, g, or t
  misc_feature (125)..(125): n is a, c, g, or t
  misc_feature (129)..(129): n is a, c, g, or t
  misc_feature (134)..(134): n is a, c, g, or t
  misc_feature (137)..(138): n is a, c, g, or t
  misc_feature (141)..(141): n is a, c, g, or t
  misc_feature (148)..(148): n is a, c, g, or t
  misc_feature (160)..(160): n is a, c, g, or t
  misc_feature (162)..(162): n is a, c, g, or t
  misc_feature (176)..(176): n is a, c, g, or t
  misc_feature (179)..(179): n is a, c, g, or t
  misc_feature (195)..(195): n is a, c, g, or t
  misc_feature (197)..(197): n is a, c, g, or t
  misc_feature (214)..(214): n is a, c, g, or t
  misc_feature (218)..(218): n is a, c, g, or t
  misc_feature (222)..(222): n is a, c, g, or t
  misc_feature (241)..(241): n is a, c, g, or t
  misc_feature (256)..(256): n is a, c, g, or t
  misc_feature (262)..(262): n is a, c, g, or t
  misc_feature (300)..(300): n is a, c, g, or t
  misc_feature (306)..(306): n is a, c, g, or t
  misc_feature (309)..(309): n is a, c, g, or t
  misc_feature (312)..(312): n is a, c, g, or t
  misc_feature (338)..(338): n is a, c, g, or t
  misc_feature (378)..(378): n is a, c, g, or t
  misc_feature (385)..(385): n is a, c, g, or t
  misc_feature (390)..(390): n is a, c, g, or t
  misc_feature (396)..(396): n is a, c, g, or t
  misc_feature (401)..(401): n is a, c, g, or t
  misc_feature (407)..(407): n is a, c, g, or t
  misc_feature (460)..(460): n is a, c, g, or t
  misc_feature (473)..(473): n is a, c, g, or t
  misc_feature (495)..(495): n is a, c, g, or t
gttctggngtttagggcatagttagaaaagatttaagatgtcctttcccaacattctttccaatccattngngtagaataactccagtnccnggntgttccagtattgtagtttcaaaaaatggnagangtacnggnnggnaaagtcngggggggttccngngaatttaagccccngcnatagaatctcttctgngngcataataatggggtcngggnatcngcatcacgccgggcctccngctttagttgggggnatttgngcggggtccagccaaaaactccacagtagagtagaccnagagangtngcngtaagggccaggaggacaaaaagggnaatgtgaagcttggggtccagatggcttagtcagctttangataatnagaangacagntgggncccagnagaaaaagaaggccactgggtagaagcgcacccgttggtccacaatgtaaaanactgcccactgtncaatccccagaaagccagttgncttcacaaacttcttatacaatgtcagggctcggataagtaa

SEQ ID NO: 649485 - DNA, 472 bp, Homo sapiens
  misc_feature (56)..(56): n is a, c, g, or t
ccataacttgatggttttatctcgagatccagagacaatctgacggttatcagagnagaaggcaacactcagtacatccttggtatggcctacaaatcgtcttgtggtggtgcccgttgtgagatcccagaggcgaagggttccgtcccaggaccctgagagggcaaactggccatctgaagatatgaccacatcactaacgaagtgggagtgaccccgaagagctcgctgcgggatgccatagttggtctcatccctagtcagcttccacatgatgatggtcttgtctcgagaggcggacagtatcatgtccgggaactgcggggtggtagcgatttgggtaacccagccattgtggcccttgagggtgccacgaagggtcatctgctcagtcatggcggcagcgggtgcgagtgtcgccgcagcgacgaggatggcaccggatagcacagagagcccagcagcgctgcca

SEQ ID NO: 649486 - DNA, 655 bp, Homo sapiens
ggtggcaactatactctataagagaaattgctgctgcacccatgcgggcctggtccgtagaaatgctccttgctctggaggtacctcatacacgggctcctataactagctgcccagacatagaggagtgctgggcgccggctcctcaagagggagatctagccctagaagcttgagataggcagcacttagctctactgccaaagtgggtctctggttgagtgagctgcttctggaggaaggggctccctcagcttgcaaggcagagaattggaaaaggaggtaggaggacattaggccctctccttctgcttgaaaattctccctcgggtgcacggaagactcctggtcatttccggttccttgaaaccacttcttggttgctggtcccacgtcctcttggggggctggcctcggtaaccctgctcctgatagcgctgctcccggcgtgcagcctcacgctgctcaggctcccggcgctcctggtccagctgccgctgtgcctcctcggcccgccgcttttcctccagccgacggtctcctcctccttctctgcttgggccagaagctggctttacaaccctttaatctcagacaggcattgtcttctggtaccagagccacttgggcttgggtcccgtctggagcggcatcc

SEQ ID NO: 649487 - DNA, 247 bp, Homo sapiens
attcacgcacacagactgtaatacatacctcaaagtaaaaaacatataaaatctccttctacttcacatccctctccagacacgaccctacttctctggctccacattatacacgcctaaacttaagaagaattgtctactatcctagtaacccggagtcctctccctacttattgtctcaagatatactcccagtctgtctttcatccacaccagtcactccacccaaagctgatctggggatcct

SEQ ID NO: 649488 - DNA, 347 bp, Homo sapiens
tgcagtggttgcggtagatttagcacagtactcatcactctggatagattgagatgttctttcacaacagatgaacgatcagtatcactgtaagacacggatctttacaactgtttaatcagttttatttttgtacagtattagtgacccaagttattttgttgtcccgtttttgtaaatcaaatgaaattattaaagaggattctgacagtaggtatcttgtacatatgtatatatgttgtccaaataaaaacaataaatgataaagattgacttgctccacgccgttatgtgttgtaaaagggccatactttggtcataatgggcattgtgacacggtctctcaa

SEQ ID NO: 649489 - DNA, 101 bp, Homo sapiens
tgctatcaattcatgctttcccagttcaataaatagcaactcctatctttctagtgttgtcaggccaaaaaccttgtgtcttatagccattgattgaaagc

SEQ ID NO: 649490 - DNA, 375 bp, Homo sapiens
agattatactcgcatataccatatcactcttaggagtactcgaatatcgctcacacctcatatactccctactatgcctagaaggagtaatactatcgctgtgcattatagctactctcataacccttaacacccacttcctcttagccaatattgggcctataggcatactagactttgcgcggctgcggaagcaacggtgggcctaaccctactaggctcaatcttcaacacatatgggctagactacgtacataacctaaacctacttcaatgcgtctaatcgtgccaacaattatattactaccactggcatgacttttcaaacccctactattttttaacctcaacaacaacctatatgctgtgcccccc

SEQ ID NO: 649491 - DNA, 1340 bp, Homo sapiens
ggcctctgggtcctcggtcggtacagtctctgcacctcgcgctccagcaggtaaactaacattatggattttcttcaagctacccaaaactactcgatgaagcatccagaaagcacactttggcttatgtgcactggggctctcacggacctgtggcttacagcctgctgcacatgcgcgggctgcaccccctgctcctgcccctgcgctgacgcagctgcgccaccacgccgcccctctgcctctggccgacgattccttcgcactcgcgacgcggctgcccctggcctccctattcacggctgctctgcacagccaccctccctggctgctgctcttgcttgccccactcctgctacttcgccacctgggctcacacccccttcttctgctcccagcccttgccctcccttggcccacttactgcgcgcaccccactccccctgccactgcgctaccttcacccagcaccctctccgcctcccgcgagataattccacgccatccgctcccaggacccccccacaacgccaattccttatccatttcccacccaagcacgggacgccttaacaccccgctgcatcctggcctccttttaggcccacggaggaacttattccacccacttgcgcgcacctctctacccacccgtttgcccaaacacacacccccctacgcgcgcgctctgccgtaacggtcccactaggttcaaccttgggccagccgaccaccccctttcaacttggcgacacctctggtccaccgctcgccgaaaccatcccgccctataactcccacagccaccacccaaagtcacttggataacccccccccaacggaaaacacccacgcacgcgacccccctggctagccctctacccactttggccttcccacccctgtggccccctctacttgcctccccctcctgccccggctcgcttccttgcgcgccctctcgccctcccgcgcggctcgtctccccggccgtccacgctttccgcccccgccctcgcccccccgccttggccccgtctgcggttccacacctccgacacccttcctcacccttcacacaccccttcctcgccccccctcctcccctcctactctcacacctgttcccacacaactctcttcaattccccctatctactccgcaccttccacaccgaacaccaccctaccttacaaaacccctttaacaccccatcttcccttttccacaacaccatcactttcccccaccccatatcacccgcattctctcagctaatgtctccccccctacccaccacccctcatcacacacaactaccttcacacccacacacaca

SEQ ID NO: 649492 - DNA, 514 bp, Homo sapiens
  misc_feature (10)..(10): n is a, c, g, or t
  misc_feature (35)..(35): n is a, c, g, or t
  misc_feature (51)..(51): n is a, c, g, or t
  misc_feature (57)..(57): n is a, c, g, or t
  misc_feature (59)..(59): n is a, c, g, or t
  misc_feature (61)..(61): n is a, c, g, or t
  misc_feature (77)..(77): n is a, c, g, or t
  misc_feature (87)..(87): n is a, c, g, or t
  misc_feature (94)..(94): n is a, c, g, or t
  misc_feature (104)..(104): n is a, c, g, or t
  misc_feature (133)..(133): n is a, c, g, or t
  misc_feature (150)..(150): n is a, c, g, or t
  misc_feature (152)..(152): n is a, c, g, or t
  misc_feature (157)..(157): n is a, c, g, or t
  misc_feature (184)..(184): n is a, c, g, or t
  misc_feature (208)..(208): n is a, c, g, or t
  misc_feature (222)..(222): n is a, c, g, or t
  misc_feature (227)..(227): n is a, c, g, or t
  misc_feature (231)..(231): n is a, c, g, or t
  misc_feature (240)..(240): n is a, c, g, or t
  misc_feature (257)..(257): n is a, c, g, or t
  misc_feature (289)..(289): n is a, c, g, or t
  misc_feature (295)..(295): n is a, c, g, or t
  misc_feature (297)..(297): n is a, c, g, or t
  misc_feature (308)..(308): n is a, c, g, or t
  misc_feature (316)..(316): n is a, c, g, or t
  misc_feature (320)..(320): n is a, c, g, or t
  misc_feature (329)..(329): n is a, c, g, or t
  misc_feature (333)..(333): n is a, c, g, or t
  misc_feature (338)..(338): n is a, c, g, or t
  misc_feature (343)..(343): n is a, c, g, or t
  misc_feature (377)..(377): n is a, c, g, or t
  misc_feature (409)..(409): n is a, c, g, or t
  misc_feature (437)..(437): n is a, c, g, or t
  misc_feature (444)..(444): n is a, c, g, or t
  misc_feature (453)..(453): n is a, c, g, or t
  misc_feature (491)..(491): n is a, c, g, or t
taaaaaaaanaaaaaccttcaaaaaaaaatttaantaaaaaaaattttgantgaaantnantaaagggggggcaccnagtccttacnctgaaancaaaaaaccngccaactgggggctttcaccagccccgtngggtatcttaccgcaanancaaanaggaggctcagccttccccagtccccngagttcacattgattcaattctanagcccactagaccngcccnaganagggccaancaatgtcccgggggggnagagagggggggggggccacacttagccaaanggaaananagttttctcanaagagggnaggncttttttgngggngaggncgccnagctttcagtcctaaaggaagtgatttccctggnaaagggaaggggattttgccaaggctggggtntaaaggaagaaggaactgtctttcaggngtctccngcagacccnctacagacccgtgttcctgaagggagagtcctgaaggnagaatacccctgtgggagtggca

SEQ ID NO: 649493 - DNA, 242 bp, Homo sapiens
tgggttggacgcgacggcgtgcggcgagcatgaacgcccctccagccttcgagtctgtcttggctcttcgagggcgagaagaagatcaccattatctaggacaccaagggtacccaatgcctgtttattcaccatcatctaagaagaccacacactgggaaatcatcatttaatcacaactcctaaaagacccgcaatgtgctatttgctggctacaaagtcccccaccccgtcgggtggag

SEQ ID NO: 649494 - DNA, 321 bp, Homo sapiens
gcaatccccaatgcaaggagttcaaaccacgttccttctctctaggcgaaagccttctactaccccagcttcatcctcggcctcaagcacaacctagacccatctatggtgggtcatcaacaggcaactccagtttatactcagcctgtttgtttggcaccaaatatgatgtgtccagtcccagtgagcccaggcgtgcaacctttatacccaaatacctatgatcgcccttgccagtgaatcaatgccataggacatatagagcaggtaaagttaaatacctagaattggaattgctgaggtatgtacgcaaatatgccc

SEQ ID NO: 649495 - DNA, 744 bp, Homo sapiens
  misc_feature (244)..(244): n is a, c, g, or t
  misc_feature (407)..(407): n is a, c, g, or t
tttgtatataaagcctgttagagtggacataaatgagtatggccccttccccttgccctataagaactgttaacattctttcagtaccagtatgccattaatatgtatgtgaaaaagcccatcccagtttggttgataaagcacactagacagtctcccaagtagagcatcagcctcttggtaagatatgacgtataccagagctgagtgatagagtccacattaggcgctcgtacgccggcanagcctagtgctcatgcactaggtatgtcagatggtctgctatagtagagttagagctgcttttaagtccaatccgtaactcctgtttgagcttccaagtgtatatacacacggtgttgaaccgagatagcttgtaagagtgtaagttcattcgatattcttanactacttcacagatacaaaaaaggcacatcgtacacctggtttccttaccagtagcggctttcagctacacactagcttgtgcagagtttaaagatatgcagtagcattagtggtgcaatatccattcatacatggtatcaggagcagtgtctagtaaaaagaataagagcttgccagcaaaggtttactatagcaaggttctatgcagtagaattcatacaaagactgtaggcagcatgggggttgttagcgagtgagctgctgggaagatctgcattctgagttatcgtgaccattatcatgcggttttctccatgaagacgtatggtcttctcc

SEQ ID NO: 649496 - DNA, 165 bp, Homo sapiens
  misc_feature (147)..(147): n is a, c, g, or t
atccgggtattcgtggttcacccccacaagatgaccctctctctgaaaatgaacaaaaaaacgacgatgatatcctgtttgggaccaagattcctgaagttgaccaagaacactttttgaactcattctggctgcaaactacttaanaactcaaagtgctgagct

SEQ ID NO: 649497 - DNA, 251 bp, Homo sapiens
aaactaactgacattgattgtttactaagtgccagacactatggttagggttttatatcatttaactcatttagtctttactacaaccctctgaagataagacttttcaatcttcattttccatatgaagaaactgaaaagcttagattgttgaaagaacctgtccaagacttcataattaatagggtgagacaggaatttgaatctctatgtcggacgacagagccgcagttgttaggagctagttcttt

SEQ ID NO: 649498 - DNA, 523 bp, Homo sapiens
atcagacggcccaccgtttccgggtacagatcgcagccagtacgggacggtacattatacagaatttgcggcaggtcagtatgctcagcgatggcttcgaagtgctgatacaaaccttcttgcgacggacgattgtagtaaggggttaccgtcaggcagccgacgataccactgtcattgaagcgctgcgtcaggctaatggcttccgcagtagcgttagcgccggtcccggcaattaccggaatgcgcccatcagccagatccagcgtcatcatcaccacatcagcatgttcgtcatgatttaaggtagcggactcgccagtggtgccaacagaaacgatcgccgaagtaccgctggcgacatgataatcaatcagttttttcaagctagcccgacagacattacctttttcatccatcggagtaacaatcgcgacaatacttcccgtgaacatgggccatcctctgtgcaaacaagtgtctcaatggtacgtttggtatggcattaagagcaagcagacag

SEQ ID NO: 649499 - DNA, 491 bp, Homo sapiens
  misc_feature (22)..(22): n is a, c, g, or t
  misc_feature (145)..(145): n is a, c, g, or t
ctttccggcccctttgtggaancctttttccaagccaagggggcggccgccgccccccgggtggttcccctggccccctccgggggggggttttcccaaaacccgggttcctttccttgcctggttcaagggtttttttcccacnaccttccgtgtgggtgggggggcaatgggccccccggaaaaaatttcaagacccccccttccgtgttggggtccggggggtcctttttttttttttgccagccccccgtgggcaaaagcgggggggccccggggggggttttttttttttcctttttgggtgggggtttgccccccccctcccccccaaagggccttttccttttcccggggtaattggttgggggggcggccggccccccctccccgggttttttgggttggccgggggtttttggggggggccccgttttttttttttcccgggcccccgcctgggatttaagccccccccccttccctgggga

SEQ ID NO: 649500 - DNA, 223 bp, Homo sapiens
cggcgctctgacgatccctcataggtcgcaggcagctattaaatgtaaaaacggaccgtggtaaaagtgcttcataacaatatataattgtgtcttatgcctgtgagaaagaaaggctttttttttttttaaacaaaaggtgttatttccaggctacatgcaacaggggttggtataccccagtatttcatccctttccggatccggcccggcaaccctatga

SEQ ID NO: 649501 - DNA, 911 bp, Homo sapiens
gagcggatctggccggtcggcgcgggcgtgtcaccctggacactgtgatgcgcatgggcaaggccagcgcccggggcttctgaaccgagcggggtgttcattttttatgcatatatatcccatgatcttaggctcccaagtctttgactgccttcccatggcgatctataacgttgaacagatttttattcttgtataaactcacctacatgactgatggaggtttaacagtaaacccggtgcaagaccctttgggaacacaaaaaaaaaacagaaaacgaaacagacagaaacaacaacagaaccactcgctcgcacaagccggggggaagaaaagtacccgagcgacataaaaggggcggccaagaccatccctcacaccaaagacgagggcgagcccagccaggtaaacacaacgagatatagttaggcggacacccccaatacaagcagcaggccggcgaggataaacaacaccaccaagcagcaccgatacgagagaacgcatacaaacaacacgagagggcgggagcaacacagcaggagcggagggacgggaacatcgccgccgggagggaatgcagcgaaacaaaagcagagcgatgcaacacacacgaaggccgcgccgaccacagacacacaaatggatactgctcgcacccggacgacaaacaaaaactgcatcgagcgagccgagcacaaaagaaggcgggggacggagccgagcggatcaaacgagacgagaccgacaccggacgagcagcgagcgcaacaagaaacgacgaagaccaaccaggccagaacggcagccatacagactgcagatgacaggaccgcacgacgcgaggcaagcacagcagcagcacagagacacgagagaccagactgacggactagcgaaagtagcaaca

SEQ ID NO: 649502 - DNA, 141 bp, Homo sapiens
ggggggggggggggggtttttgcccttattatttggggtaaggttggctgggatcatgggttagaaagaattccctggggcccttaccccagaggcagactttttttggaagattttggtaataaaaccctggaacttcca

SEQ ID NO: 649503 - DNA, 3062 bp, Homo sapiens
  misc_feature (2977)..(2977): n is a, c, g, or t
ccgcctaccccaaaaccgagaacggaactgcccggtcccccgaaaaagaagggcggaacatttcggccaagtcctcagactaccgaaccggagagctccgaaaggggactacctgcgcctgcgcaccgccatcttgttaaaagagcccgcctctccctcggccggtcactctttcgccacgggcggggttgcaccatccggcagggcggggcccggccatggcgaccgcggagcccagcgggcgcgcgttgcggttgtctaccccgggaccccggcccagcggggctcgggaccgcgcgccgggagctgcggggccaccctccgggcagatcggtaatagagccctccgtctgggggagcgcacccccgcggccgtggaaaagcgggggccatacatggtgacgcgcgcaccctccattcaagccaagctgcagaagcaccgggacctggccaaggccgttctgcggagaaaaggcatgctgggggcctcgccgaaccgcccagactcttcagggaaaaggtcagtgaagtttaacaagggctatactgctcttagccagagtccagatgaaaacctggtgtccctcgactctgacagtgatggggagctgggatccagatactcctccgggtattcatctgcagagcaggtgaaccaggatgtgagccggcagctgcttcaggatgggtatcacctggatgagattccagatgacgaggacttggacctcatcccccctaagcccatggcctcttcaacatgctcctgctgctggtgctgtcttggggactcttcttcctgtaccctccagtagacattaccctccaaggtgggccctgctcaccatgaggcctacagagccctgttggccactcatagctcacacagtgcagtgagcactgaagtcactgacccctagaaagtgacctgcaggtagcccttacctgttgcttctcaggccagaggcccccatctgggctgtgggctgataggtagaattctgtagttttcctctgctgttggagcagagtttggagaagtcactttaataagggcaagacagaaaattctggttcttatggtgggtgacaaaggtggctaaggaaaacacttgcagacagcttgattggtatttgtcatagtgcttcagggaggcaaaaagggagctcttgtgcccaggctgtgctagatagtgttgaatggaggcagaaaatagcactttatggtttattatagctggcaatccaaaaaagaaactgtttgagaccagttcgagaaattccatttgctctattcttcctagctctaagatggtttgcaggcttgaccttcaagacagcataaagtgagtccttttgtccctcttcaggttgcacctgtctaactatgacagggatcatagcaggttgcttaatgatacagcaggatcctggcttccagaatccctggacctggggcatccccaactggtccaaccgtccgggtgagtttagtgattctggtttgcccttccctagttagagaaaaactgctctgacatgttcatatttatttatttgtatttccttggtctgggtgagtttcttcacccagtctttgagctaaagattaggtcgaaggtactggggctggccccagaagcctgcagtttttattattaccagcagagggagctacagggagcagtccggtgccttcctattgtttactttttaaacttttgagaagtagcaatggactcgtgagagtgggtatacagctgtgtgggctttgtcctagactgaggcttacagacaggaagggtaagagagacctaagccagctcctagacccttgcctgaggaaatcagtccaccagtgtagagggcctcccttcactccagcatggaccattctattgccagattcttctggtcacagcatgggccttactggatactcaggattgggctttaagcagacctctgggtgtgacacagcctctttcagcccccagcccaaacagcagaaataggcataatttctgctgtgacaccccctacccacaaattggagagtatatcttgctatactctataccaagcctctttctagaatttttccaacaggttttgttttgttttttggcttaactcagaaccatggtgagcgttctgctttgttttgttggagacagggtctctgtcacccaggctggagtgcagtggtgtaatcacagctcactgcagcctcaacctcccaggcccaagcagtcctcccacatggtgagctttgaatgggcatagacagggttcccagcccaatagtcgggattggggtataggttctacatgggaaagtatccagtctcttgctttactcagtgtcctgtgaccaccagaggcatgagagggacaacacactcttttcgctctaccacaaggggtgactagaagatgagcaagtctaataaaaagatacggccttatttgttatttgtctgacaaccatccttacgatggtaatcctgtgagtgcctgatggacatctatctttgtgtttttctcaaaccatggaaggttgagaggaatatacagtatctgggggctgacttactctactagctaggagcatcacagcagagagataggacagagaccagagtcatgccagcttggggtcttgggaagagaggcagatggttactctgttctggaatgggactctgcagctctatgcagtggccaacattctgagcactttgtgcaaatgcttgtagagctcaagaacatctccatccagaaccccttccccatctgcagagaccatgtccaggcctttcttgtgtctgcagaggtgaagtgcacatgtggaaagggatcaaatgtagcacagtgtaaagaaagacagcaacacaggtagagggacccagtgtgtgctgggaggtggctgtggaaggtaagtatagacctacatctttgtttggggagtggtcanggcacaaatggcctgggggtttagctgtttctagcgtgagaggggcagctcctcagaccaagggcgcccccctctgagtcgaatt

SEQ ID NO: 649504 - DNA, 3158 bp, Homo sapiens
ccgcctaccccaaaaccgagaacggaactgcccggtcccccgaaaaagaagggcggaacatttcggccaagtcctcagactaccgaaccggagagctccgaaaggggactacctgcgcctgcgcaccgccatcttgttaaaagagcccgcctctccctcggccggtcactctttcgccacgggcggggttgcaccatccggcagggcggggcccggccatggcgaccgcggagcccagcgggcgcgcgttgcggttgtctaccccgggaccccggcccagcggggctcgggaccgcgcgccgggagctgcggggccaccctccgggcagatcggtaatagagccctccgtctgggggagcgcacccccgcggccgtggaaaagcgggggccatacatggtgacgcgcgcaccctccattcaagccaagctgcagaagcaccgggacctggccaaggccgttctgcggagaaaaggcatgctgggggcctcgccgaaccgcccagactcttcagggaaaaggtcagtgaagtttaacaagggctatactgctcttagccagagtccagatgaaaacctggtgtccctcgactctgacagtgatggggagctgggatccagatactcctccgggtattcatctgcagagcaggtgaaccaggatgtgagccggcagctgcttcaggatgggtatcacctggatgagattccagatgacgaggacttggacctcatcccccctaagcccatggcctcttcaacatgctcctgctgctggtgctgtcttggggactcttcttcctgtaccctccagtagacattaccctccaaggtgggccctgctcaccatgaggcctacagagccctgttggccactcatagctcacacagtgcagtgagcactgaagtcactgacccctagaaagtgacctgcaggtagcccttacctgttgcttctcaggccagaggcccccatctgggctgtgggctgataggtagaattctgtagttttcctctgctgttggagcagagtttggagaagtcactttaataagggcaagacagaaaattctggttcttatggtgggtgacaaaggtggctaaggaaaacacttgcagacagcttgattggtatttgtcatagtgcttcagggaggcaaaaagggagctcttgtgcccaggctgtgctagatagtgttgaatggaggcagaaaatagcactttatggtttattatagctggcaatccaaaaaagaaactgtttgagaccagttcgagaaattccatttgctctattcttcctagctctaagatggtttgcaggcttgaccttcaagacagcataaagtgagtccttttgtccctcttcaggttgcacctgtctaactatgacagggatcatagcaggttgcttaatgatacagcaggatcctggcttccagaatccctggacctggggcatccccaactggtccaaccgtccgggtgagtttagtgattctggtttgcccttccctagttagagaaaaactgctctgacatgttcatatttatttatttgtatttccttggtctgggtgagtttcttcacccagtctttgagctaaagattaggtcgaaggtactggggctggccccagaagcctgcagtttttattattaccagcagagggagctacagggagcagtccggtgccttcctattgtttactttttaaacttttgagaagtagcaatggactcgtgagagtgggtatacagctgtgtgggctttgtcctagactgaggcttacagacaggaagggtaagagagacctaagccagctcctagacccttgcctgaggaaatcagtccaccagtgtagagggcctcccttcactccagcatggaccattctattgccagattcttctggtcacagcatgggccttactggatactcaggattgggctttaagcagacctctgggtgtgacacagcctctttcagcccccagcccaaacagcagaaataggcataatttctgctgtgacaccccctacccacaaattggagagtatatcttgctatactctataccaagcctctttctagaatttttccaacaggttttgttttgttttttggcttaactcagaaccatggtgagcgttctgctttgttttgttggagacagggtctctgtcacccaggctggagtgcagtggtgtaatcacagctcactgcagcctcaacctcccaggcccaagcagtcctcccacatggtgagctttgaatgggcatagacagggttcccagcccaatagtcgggattggggtataggttctacatgggaaagtatccagtctcttgctttactcagtgtcctgtgaccaccagaggcatgagagggacaacacactcttttcgctctaccacaaggggtgactagaagatgagcaagtctaataaaaagatacggccttatttgttatttgtctgacaaccatccttacgatggtaatcctgtgagtgcctgatggacatctatctttgtgtttttctcaaaccatggaaggttgagaggaatatacagtatctgggggctgacttactctactagctaggagcatcacagcagagagataggacagagaccagagtcatgccagcttggggtcttgggaagagaggcagatggttactctgttctggaatgggactctgcagctctatgcagtggccaacattctgagcactttgtgcaaatgcttgtagagctcaagaacatctccatccagaaccccttccccatctgcagagaccatgtccaggcctttcttgtgtctgcagaggtgaagtgcacatgtggaaagggatcaaatgtagcacagtgtaaagaaagacagcaacacaggtagagggacccagtgtgtgctgggaggtggctgtggaaggtaagtatagaccaaaataccaccaatgtgcccagggccaaactgccttaattctgagtgctgtgtgttctgcaggtgacagtttcctgaggagaggggtgtatccaggcttacctcccagcaggagtggtaccatatggtgtttatgtactactctatagaactcttggcttgcacttctacagctctgtacatttataagaataaatgcaatcacact

SEQ ID NO: 649505 - DNA, 3070 bp, Homo sapiens
ccgcctaccccaaaaccgagaacggaactgcccggtcccccgaaaaagaagggcggaacatttcggccaagtcctcagactaccgaaccggagagctccgaaaggggactacctgcgcctgcgcaccgccatcttgttaaaagagcccgcctctccctcggccggtcactctttcgccacgggcggggttgcaccatccggcagggcggggcccggccatggcgaccgcggagcccagcgggcgcgcgttgcggttgtctaccccgggaccccggcccagcggggctcgggaccgcgcgccgggagctgcggggccaccctccgggcagatcggtaatagagccctccgtctgggggagcgcacccccgcggccgtggaaaagcgggggccatacatggtgacgcgcgcaccctccattcaagccaagctgcagaagcaccgggacctggccaaggccgttctgcggagaaaaggcatgctgggggcctcgccgaaccgcccagactcttcagggaaaaggtcagtgaagtttaacaagggctatactgctcttagccagagtccagatgaaaacctggtgtccctcgactctgacagtgatggggagctgggatccagatactcctccgggtattcatctgcagagcaggtgaaccaggatgtgagccggcagctgcttcaggatgggtatcacctggatgagattccagatgacgaggacttggacctcatcccccctaagcccatggcctcttcaacatgctcctgctgctggtgctgtcttggggactcttcttcctgtaccctccagtagacattaccctccaaggtgggccctgctcaccatgaggcctacagagccctgttggccactcatagctcacacagtgcagtgagcactgaagtcactgacccctagaaagtgacctgcaggtagcccttacctgttgcttctcaggccagaggcccccatctgggctgtgggctgataggtagaattctgtagttttcctctgctgttggagcagagtttggagaagtcactttaataagggcaagacagaaaattctggttcttatggtgggtgacaaaggtggctaaggaaaacacttgcagacagcttgattggtatttgtcatagtgcttcagggaggcaaaaagggagctcttgtgcccaggctgtgctagatagtgttgaatggaggcagaaaatagcactttatggtttattatagctggcaatccaaaaaagaaactgtttgagaccagttcgagaaattccatttgctctattcttcctagctctaagatggtttgcaggcttgaccttcaagacagcataaagtgagtccttttgtccctcttcaggttgcacctgtctaactatgacagggatcatagcaggttgcttaatgatacagcaggatcctggcttccagaatccctggacctggggcatccccaactggtccaaccgtccgggtgagtttagtgattctggtttgcccttccctagttagagaaaaactgctctgacatgttcatatttatttatttgtatttccttggtctgggtgagtttcttcacccagtctttgagctaaagattaggtcgaaggtactggggctggccccagaagcctgcagtttttattattaccagcagagggagctacagggagcagtccggtgccttcctattgtttactttttaaacttttgagaagtagcaatggactcgtgagagtgggtatacagctgtgtgggctttgtcctagactgaggcttacagacaggaagggtaagagagacctaagccagctcctagacccttgcctgaggaaatcagtccaccagtgtagagggcctcccttcactccagcatggaccattctattgccagattcttctggtcacagcatgggccttactggatactcaggattgggctttaagcagacctctgggtgtgacacagcctctttcagcccccagcccaaacagcagaaataggcataatttctgctgtgacaccccctacccacaaattggagagtatatcttgctatactctataccaagcctctttctagaatttttccaacaggttttgttttgttttttggcttaactcagaaccatggtgagcgttctgctttgttttgttggagacagggtctctgtcacccaggctggagtgcagtggtgtaatcacagctcactgcagcctcaacctcccaggcccaagcagtcctcccacatggtgagctttgaatgggcatagacagggttcccagcccaatagtcgggattggggtataggttctacatgggaaagtatccagtctcttgctttactcagtgtcctgtgaccaccagaggcatgagagggacaacacactcttttcgctctaccacaaggggtgactagaagatgagcaagtctaataaaaagatacggccttatttgttatttgtctgacaaccatccttacgatggtaatcctgtgagtgcctgatggacatctatctttgtgtttttctcaaaccatggaaggttgagaggaatatacagtatctgggggctgacttactctactagctaggagcatcacagcagagagataggacagagaccagagtcatgccagcttggggtcttgggaagagaggcagatggttactctgttctggaatgggactctgcagctctatgcagtggccaacattctgagcactttgtgcaaatgcttgtagagctcaagaacatctccatccagaaccccttccccatctgcagagaccatgtccaggcctttcttgtgtctgcagaggtgaagtgcacatgtggaaagggatcaaatgtagcacagtgtaaagaaagacagcaacacaggtagagggacccagtgtgtgctgggaggtgacagtttcctgaggagaggggtgtatccaggcttacctcccagcaggagtggtaccatatggtgtttatgtactactctatagaactcttggcttgcacttctacagctctgtacatttataagaataaatgcaatcacact

SEQ ID NO: 649506 - DNA, 113 bp, Homo sapiens
cggcacgaggcgcagctcaagtaaaggaggaaaaaaaaaaggggaaaaatagaaagcggcggcggctgcagcagcgatccgccgccggactggcccaagccgggcggcggccg

SEQ ID NO: 649507 - DNA, 3447 bp, Homo sapiens
  misc_feature (2921)..(2921): n is a, c, g, or t
  misc_feature (3193)..(3193): n is a, c, g, or t
  misc_feature (3447)..(3447): n is a, c, g, or t
ccgcctaccccaaaaccgagaacggaactgcccggtcccccgaaaaagaagggcggaacatttcggccaagtcctcagactaccgaaccggagagctccgaaaggggactacctgcgcctgcgcaccgccatcttgttaaaagagcccgcctctccctcggccggtcactctttcgccacgggcggggttgcaccatccggcagggcggggcccggccatggcgaccgcggagcccagcgggcgcgcgttgcggttgtctaccccgggaccccggcccagcggggctcgggaccgcgcgccgggagctgcggggccaccctccgggcagatcggtaatagagccctccgtctgggggagcgcacccccgcggccgtggaaaagcgggggccatacatggtgacgcgcgcaccctccattcaagccaagctgcagaagcaccgggacctggccaaggccgttctgcggagaaaaggcatgctgggggcctcgccgaaccgcccagactcttcagggaaaaggtcagtgaagtttaacaagggctatactgctcttagccagagtccagatgaaaacctggtgtccctcgactctgacagtgatggggagctgggatccagatactcctccgggtattcatctgcagagcaggtgaaccaggatgtgagccggcagctgcttcaggatgggtatcacctggatgagattccagatgacgaggacttggacctcatcccccctaagcccatggcctcttcaacatgctcctgctgctggtgctgtcttggggactcttcttcctgtaccctccagtagacattaccctccaaggttgcacctgtctaactatgacagggatcatagcaggttgcttaatgatacagcaggatcctggcttccagaatccctggacctggggcatccccaactggtccaaccgtccgggtgagtttagtgattctggtttgcccttccctagttagagaaaaactgctctgacatgttcatatttatttatttgtatttccttggtctgggtgagtttcttcacccagtctttgagctaaagattaggtcgaaggtactggggctggccccagaagcctgcagtttttattattaccagcagagggagctacagggagcagtccggtgccttcctattgtttactttttaaacttttgagaagtagcaatggactcgtgagagtgggtatacagctgtgtgggctttgtcctagactgaggcttacagacaggaagggtaagagagacctaagccagctcctagacccttgcctgaggaaatcagtccaccagtgtagagggcctcccttcactccagcatggaccattctattgccagattcttctggtcacagcatgggccttactggatactcaggattgggctttaagcagacctctgggtgtgacacagcctctttcagcccccagcccaaacagcagaaataggcataatttctgctgtgacaccccctacccacaaattggagagtatatcttgctatactctataccaagcctctttctagaatttttccaacaggttttgttttgttttttggcttaactcagaaccatggtgagcgttctgctttgttttgttggagacagggtctctgtcacccaggctggagtgcagtggtgtaatcacagctcactgcagcctcaacctcccaggcccaagcagtcctcccacatggtgagctttgaatgggcatagacagggttcccagcccaatagtcgggattggggtataggttctacatgggaaagtatccagtctcttgctttactcagtgtcctgtgaccaccagaggcatgagagggacaacacactcttttcgctctaccacaaggggtgactagaagatgagcaagtctaataaaaagatacggccttatttgttatttgtctgacaaccatccttacgatggtaatcctgtgagtgcctgatggacatctatctttgtgtttttctcaaaccatggaaggttgagaggaatatacagtatctgggggctgacttactctactagctaggagcatcacagcagagagataggacagagaccagagtcatgccagcttggggtcttgggaagagaggcagatggttactctgttctggaatgggactctgcagctctatgcagtggccaacattctgagcactttgtgcaaatgcttgtagagctcaagaacatctccatccagaaccccttccccatctgcagagaccatgtccaggcctttcttgtgtctgcagaggtgaagtgcacatgtggaaagggatcaaatgtagcacagtgtaaagaaagacagcaacacaggtagagggacccagtgtgtgctgggaggtggctgtggaaggtaagtatagacctacatctctgttggggaggtggtcagggcagaatggcctgggtgtttagcagcttctaggggtgagggtggcaggaccccaaaaccaaggccctctgcatcgttgttgtaataatcagctctggcatattcagctgcaactgtccctgaagaagaggtttctgagctggctgaccccatgtaggagggtgttaccttgtagaaaaagctggagggacctggtgggacagtgcagtgaggcagggtagaaatggtcagttgtttagggccagtggccacataccaaaataccaccaatgtgcccagggccaaactgccttaattctgagtgctgtgtgttctgcaggtgacagtttcctgaggagaggggtgtatccaggcttacctcccagcaggagtggtaccatatggtgtttatgtactactctatagaactcttggcttgcacttctacagctctgtacatttataagaataaatgcaatcacactagttaaaaaaaaaaaaaaanaaaaaaaaaaaaaaaaaaaaaaaaaacaaaggaggggggcgggggcgcctcccaaagaatctacccccggggggggccccacagttttagcgcgcgcgcccccgattttttggtcaaagggggggccccctaaagggggagagcgcgcgttatataaaagacggcagaggcccggaggcgcgcggcgttttaacaacaaccgggcgggcagaggggaaaaacacagctgtggatgagggtggggaatctcttggggaggaggagaacccccntctactgctagcgggagggggcgacaaattagtgtggggaacaacacatatcctagaggggagtttatataaggcgtactagaagggaatatattacagaaattggaggtggtataatgagggggtgtaaacacgaagggagaattttggatgcgcagtgggttagtagaagttgttggagctagagcgggggatgtttgatctgttaggaaaagtattattatacgaggggcttgtgctagtatataagatgn

SEQ ID NO: 649508 - DNA, 117 bp, Homo sapiens
tacctgtgtttggtgtgggatgactatcttatgagtgtgactgttgttgtgtggggtgactattttatgagtgtggtgaggtgactggtgtgtctgtgtgtgatcgtggggttgtaa

SEQ ID NO: 649509 - DNA, 3360 bp, Homo sapiens
  misc_feature (2834)..(2834): n is a, c, g, or t
  misc_feature (3106)..(3106): n is a, c, g, or t
  misc_feature (3360)..(3360): n is a, c, g, or t
ccgcctaccccaaaaccgagaacggaactgcccggtcccccgaaaaagaagggcggaacatttcggccaagtcctcagactaccgaaccggagagctccgaaaggggactacctgcgcctgcgcaccgccatcttgttaaaagagcccgcctctccctcggccggtcactctttcgccacgggcggggttgcaccatccggcagggcggggcccggccatggcgaccgcggagcccagcgggcgcgcgttgcggttgtctaccccgggaccccggcccagcggggctcgggaccgcgcgccgggagctgcggggccaccctccgggcagatcggtaatagagccctccgtctgggggagcgcacccccgcggccgtggaaaagcgggggccatacatggtgacgcgcgcaccctccattcaagccaagctgcggtcagtgaagtttaacaagggctatactgctcttagccagagtccagatgaaaacctggtgtccctcgactctgacagtgatggggagctgggatccagatactcctccgggtattcatctgcagagcaggtgaaccaggatgtgagccggcagctgcttcaggatgggtatcacctggatgagattccagatgacgaggacttggacctcatcccccctaagcccatggcctcttcaacatgctcctgctgctggtgctgtcttggggactcttcttcctgtaccctccagtagacattaccctccaaggttgcacctgtctaactatgacagggatcatagcaggttgcttaatgatacagcaggatcctggcttccagaatccctggacctggggcatccccaactggtccaaccgtccgggtgagtttagtgattctggtttgcccttccctagttagagaaaaactgctctgacatgttcatatttatttatttgtatttccttggtctgggtgagtttcttcacccagtctttgagctaaagattaggtcgaaggtactggggctggccccagaagcctgcagtttttattattaccagcagagggagctacagggagcagtccggtgccttcctattgtttactttttaaacttttgagaagtagcaatggactcgtgagagtgggtatacagctgtgtgggctttgtcctagactgaggcttacagacaggaagggtaagagagacctaagccagctcctagacccttgcctgaggaaatcagtccaccagtgtagagggcctcccttcactccagcatggaccattctattgccagattcttctggtcacagcatgggccttactggatactcaggattgggctttaagcagacctctgggtgtgacacagcctctttcagcccccagcccaaacagcagaaataggcataatttctgctgtgacaccccctacccacaaattggagagtatatcttgctatactctataccaagcctctttctagaatttttccaacaggttttgttttgttttttggcttaactcagaaccatggtgagcgttctgctttgttttgttggagacagggtctctgtcacccaggctggagtgcagtggtgtaatcacagctcactgcagcctcaacctcccaggcccaagcagtcctcccacatggtgagctttgaatgggcatagacagggttcccagcccaatagtcgggattggggtataggttctacatgggaaagtatccagtctcttgctttactcagtgtcctgtgaccaccagaggcatgagagggacaacacactcttttcgctctaccacaaggggtgactagaagatgagcaagtctaataaaaagatacggccttatttgttatttgtctgacaaccatccttacgatggtaatcctgtgagtgcctgatggacatctatctttgtgtttttctcaaaccatggaaggttgagaggaatatacagtatctgggggctgacttactctactagctaggagcatcacagcagagagataggacagagaccagagtcatgccagcttggggtcttgggaagagaggcagatggttactctgttctggaatgggactctgcagctctatgcagtggccaacattctgagcactttgtgcaaatgcttgtagagctcaagaacatctccatccagaaccccttccccatctgcagagaccatgtccaggcctttcttgtgtctgcagaggtgaagtgcacatgtggaaagggatcaaatgtagcacagtgtaaagaaagacagcaacacaggtagagggacccagtgtgtgctgggaggtggctgtggaaggtaagtatagacctacatctctgttggggaggtggtcagggcagaatggcctgggtgtttagcagcttctaggggtgagggtggcaggaccccaaaaccaaggccctctgcatcgttgttgtaataatcagctctggcatattcagctgcaactgtccctgaagaagaggtttctgagctggctgaccccatgtaggagggtgttaccttgtagaaaaagctggagggacctggtgggacagtgcagtgaggcagggtagaaatggtcagttgtttagggccagtggccacataccaaaataccaccaatgtgcccagggccaaactgccttaattctgagtgctgtgtgttctgcaggtgacagtttcctgaggagaggggtgtatccaggcttacctcccagcaggagtggtaccatatggtgtttatgtactactctatagaactcttggcttgcacttctacagctctgtacatttataagaataaatgcaatcacactagttaaaaaaaaaaaaaaanaaaaaaaaaaaaaaaaaaaaaaaaaacaaaggaggggggcgggggcgcctcccaaagaatctacccccggggggggccccacagttttagcgcgcgcgcccccgattttttggtcaaagggggggccccctaaagggggagagcgcgcgttatataaaagacggcagaggcccggaggcgcgcggcgttttaacaacaaccgggcgggcagaggggaaaaacacagctgtggatgagggtggggaatctcttggggaggaggagaacccccntctactgctagcgggagggggcgacaaattagtgtggggaacaacacatatcctagaggggagtttatataaggcgtactagaagggaatatattacagaaattggaggtggtataatgagggggtgtaaacacgaagggagaattttggatgcgcagtgggttagtagaagttgttggagctagagcgggggatgtttgatctgttaggaaaagtattattatacgaggggcttgtgctagtatataagatgn

SEQ ID NO: 649510 - DNA, 170 bp, Homo sapiens
gggccagaactccccaatgttttattgaaaagtcaggccttcagctcagctgtctccattgggctcagcttgggtggggggccctgcccatagtagactgagcaagatcttcctgcaggcagctgggctggactccctcactggctacccttcccttctgtcgtcttctc

SEQ ID NO: 649511 - DNA, 441 bp, Homo sapiens
cagaccccgacgcagctaagtcatgctgcttggagggaacagacgaggggccccctgaagtcttcctggcaggaatctgtctaccactgtgggtcagcagcacacagcatattggtggtgactacagagccgtagtagtggggctgctgacactcccggtggaaaatcagcttcacaacagtcatcttcagctgctcctgatagagataggcggtagaatcctcttttccaacgccagtgatctcacaggttgtgccaaactgaggatcgtaatacatctagggcaggcagatgggctgtatactccgtgatggctgcgcactcctgccctcctaggaacggatcttccgcaaggcaacgtcgtggtggtcagcaagcttgtcagcgcagtagtccttgtgtaggatgaggtcaccacctcaaacttcttctccccatgct

SEQ ID NO: 649512 - DNA, 779 bp, Homo sapiens
ccgcagtgtcgtatgcagccatggcggcccagccggaatggcatggtcttgaagccccacttccacaaggtacttgcagctggcgcgtggtcgatcatggttcaaccagccggctcctgtaatgatcctgcaggaacgtataggcccggtcaagccaaggcgcgccggtgatcgctcccgcgccccgctgtctgggtcccatccggcccattcgtgcgtctgtccccacggttcgtgtaccacgacgaagggtgcgcgccgtgtcctgctggcttcgagcctggaaggagctcgagggtggccgagcattccactagaaaagagggtgtggtcctccggaaccactcggcactttctagtgggatccagaggagatggcggaacaaagtcgcaccggcatgtcctcgtggcattgccgaagcgtagtcagtcaggcttgacaggtagttaccgacttcacaatagcatcaatctctcgttccccgaggagatgccccttcggactcgcccaggaagggagacagtctctgtatgaagaactgagaattgtgacacccagctgagcggaccggtcatgcccggtccggaacggtctataagacggggaaagctcggagtcatcactgaggaagagaagaatttcaaagctcgttcgctaagtctccgaatggcccggtgcagacgcacggctcttcggcatacgggcaagaagagcaaggaagccgagaaaggttttgaaggaaataagccccgggcttgatcacagaaaaaaaaagttg

SEQ ID NO: 649513 - DNA, 1190 bp, Homo sapiens
gcagaaaagccttattttgtggagtacctagttcccttttgggtttgtctcttgactgctacgggcattgcccagggaaccatgacagtgaagatgactggccaagcttgtggactggccagcaagcttgggctgcctgagacgctttgaaatggctgccttctgagttggtcttgagggtgaagactgaccacccttctcacctgcacagtcacagtccctctcctgctggcctgactgcagctgtcctcccagctggccacctgaccagagaccaggagagaggccacagctccagaccctccagagtcccacggagcggaggaagaaggcttaccagagagaccctctgatgcatgagccaggccccagcccttctccctgcatccaggtgtgtttccaccgcaaaatgcctccacacaatgagcgactttggccctgcgtgggtcagcatgtggtctgaggtaaccctcaaatgcctccaccacacatctgtccacctgcacgggttcaaggtgagcacttgcccccttctctcctccagaccagtcgcctgaaattctgagcaacattccttcaagactatcatgtaacccttggtgatgctgagtccagacaggaaatgcagacttgggacccacctgtatcagcagaaagaggccttgtgccccgtttgtccgagtcccagaacggagcaaatgagaaaaccggcgagctgtcccccgaggagctgtagggagattggtttttagtataaattacaataaaattttgtgtatgtgtacagctgtgttcacatccacagtgtaagctgtgatatggtttggatgtttgtcccctccaaatctcatgttgaaatgtgatccccagcattggaggtggggcctgatgggaggtgattgggtgatgggggaagttgcctcatgaatgacttggtgccctcctggaagtgatgagtgagttctcgctgagctcactcaagatgtggttgtttaaaagagtgtggcacgtccctcccccaactctccctctcactcccgctctcaccatgtgacacacctgctcccccttcgccttccaccatgattggaagcttcctgaagcccttaccagaagcagatgccagccccacacttcctgtaccacctgcagaaccataaaccaaaataaagctcttttctttatcaaaa

SEQ ID NO: 649514 - DNA, 3030 bp, Homo sapiens
  misc_feature (2504)..(2504): n is a, c, g, or t
  misc_feature (2776)..(2776): n is a, c, g, or t
  misc_feature (3030)..(3030): n is a, c, g, or t
ccgcctaccccaaaaccgagaacggaactgcccggtcccccgaaaaagaagggcggaacatttcggccaagtcctcagactaccgaaccggagagctccgaaaggggactacctgcgcctgcgcaccgccatcttgttaaaagagcccgcctctccctcggccggtcactctttcgccacgggcggggttgcaccatccggcagggcggggcccggccatggcgaccgcggagcccagcgggcgcgcgttgcggttgtctaccccgggaccccggcccagcggggctcgggaccgcgcgccgggagctgcggggccaccctccgggcagatcggtaatagagccctccgtctgggggagcgcacccccgcggccgtggaaaagcgggggccatacatggtgacgcgcgcaccctccattcaagccaagctgcagaagcaccgggacctggccaaggccgttctgcggagaaaaggcatgctgggggcctcgccgaaccgcccagactcttcagggaaaaggtcagtgaagtttaacaagggctatactgctcttagccagagtccagatgaaaacctggtgtccctcgactctgacagtgatggggagctgggatccagatactcctccgggtattcatctgcagagcaggtgaaccaggatgtgagccggcagctgcttcaggatgggtatcacctggatgagattccagatgacgaggacttggacctcatcccccctaagcccatggcctcttcaacatgctcctgctgctggtgctgtcttggggactcttcttcctgtaccctccagtagacattaccctccaaggtgggccctgctcaccatgaggcctacagagccctgttggccactcatagctcacacagtgcagtgagcactgaagtcactgacccctagaaagtgacctgcaggtagcccttacctgttgcttctcaggccagaggcccccatctgggctgtgggctgataggtagaattctgtagttttcctctgctgttggagcagagtttggagaagtcactttaataagggcaagacagaaaattctggttcttatggtgggtgacaaaggtggctaaggaaaacacttgcagacagcttgattggtatttgtcatagtgcttcagggaggcaaaaagggagctcttgtgcccaggctgtgctagatagtgttgaatggaggcagaaaatagcactttatggtttattatagctggagtgcagtggtgtaatcacagctcactgcagcctcaacctcccaggcccaagcagtcctcccacatggtgagctttgaatgggcatagacagggttcccagcccaatagtcgggattggggtataggttctacatgggaaagtatccagtctcttgctttactcagtgtcctgtgaccaccagaggcatgagagggacaacacactcttttcgctctaccacaaggggtgactagaagatgagcaagtctaataaaaagatacggccttatttgttatttgtctgacaaccatccttacgatggtaatcctgtgagtgcctgatggacatctatctttgtgtttttctcaaaccatggaaggttgagaggaatatacagtatctgggggctgacttactctactagctaggagcatcacagcagagagataggacagagaccagagtcatgccagcttggggtcttgggaagagaggcagatggttactctgttctggaatgggactctgcagctctatgcagtggccaacattctgagcactttgtgcaaatgcttgtagagctcaagaacatctccatccagaaccccttccccatctgcagagaccatgtccaggcctttcttgtgtctgcagaggtgaagtgcacatgtggaaagggatcaaatgtagcacagtgtaaagaaagacagcaacacaggtagagggacccagtgtgtgctgggaggtggctgtggaaggtaagtatagacctacatctctgttggggaggtggtcagggcagaatggcctgggtgtttagcagcttctaggggtgagggtggcaggaccccaaaaccaaggccctctgcatcgttgttgtaataatcagctctggcatattcagctgcaactgtccctgaagaagaggtttctgagctggctgaccccatgtaggagggtgttaccttgtagaaaaagctggagggacctggtgggacagtgcagtgaggcagggtagaaatggtcagttgtttagggccagtggccacataccaaaataccaccaatgtgcccagggccaaactgccttaattctgagtgctgtgtgttctgcaggtgacagtttcctgaggagaggggtgtatccaggcttacctcccagcaggagtggtaccatatggtgtttatgtactactctatagaactcttggcttgcacttctacagctctgtacatttataagaataaatgcaatcacactagttaaaaaaaaaaaaaaanaaaaaaaaaaaaaaaaaaaaaaaaaacaaaggaggggggcgggggcgcctcccaaagaatctacccccggggggggccccacagttttagcgcgcgcgcccccgattttttggtcaaagggggggccccctaaagggggagagcgcgcgttatataaaagacggcagaggcccggaggcgcgcggcgttttaacaacaaccgggcgggcagaggggaaaaacacagctgtggatgagggtggggaatctcttggggaggaggagaacccccntctactgctagcgggagggggcgacaaattagtgtggggaacaacacatatcctagaggggagtttatataaggcgtactagaagggaatatattacagaaattggaggtggtataatgagggggtgtaaacacgaagggagaattttggatgcgcagtgggttagtagaagttgttggagctagagcgggggatgtttgatctgttaggaaaagtattattatacgaggggcttgtgctagtatataagatgn

SEQ ID NO: 649515 - DNA, 282 bp, Homo sapiens
gggggggggttttttatccaccgccctttttttttccgcccccgtttcccggggggccccccccccccttttttttcccccctttaaaaccccgggggggttcccccccccggttttttattgtggcccgggggggggttacttttttcccccgggaaccctttttcccctttggccttttttggggccccttttaacccgtttttttcccaaaacccggggggggccgggccgggttttcccgggttttttttcccccccgccccccggggggggggggga

SEQ ID NO: 649516 - DNA, 165 bp, Homo sapiens
  misc_feature (2)..(2): n is a, c, g, or t
  misc_feature (126)..(126): n is a, c, g, or t
  misc_feature (131)..(131): n is a, c, g, or t
tngagatcaccagtgtgtggctttcagagcctcctttctggctttggaagcatgtgattccatcttgcccgctcaggctgaccactttattttctttttgttcccctttgcttcattcaagtcagntcttnttccatcctacccacaatgaagggcccttttttt

SEQ ID NO: 649517 - DNA, 2175 bp, Homo sapiens
  misc_feature (1649)..(1649): n is a, c, g, or t
  misc_feature (1921)..(1921): n is a, c, g, or t
  misc_feature (2175)..(2175): n is a, c, g, or t
ccgcctaccccaaaaccgagaacggaactgcccggtcccccgaaaaagaagggcggaacatttcggccaagtcctcagactaccgaaccggagagctccgaaaggggactacctgcgcctgcgcaccgccatcttgttaaaagagcccgcctctccctcggccggtcactctttcgccacgggcggggttgcaccatccggcagggcggggcccggccatggcgaccgcggagcccagcgggcgcgcgttgcggttgtctaccccgggaccccggcccagcggggctcgggaccgcgcgccgggagctgcggggccaccctccgggcagatcggtaatagagccctccgtctgggggagcgcacccccgcggccgtggaaaagcgggggccatacatggtgacgcgcgcaccctccattcaagccaagctgcagaagcaccgggacctggccaaggccgttctgcggagaaaaggcatgctgggggcctcgccgaaccgcccagactcttcagggaaaaggtcagtgaagtttaacaagggctatactgctcttagccagagtccagatgaaaacctggtgtccctcgactctgacagtgatggggagctgggatccagatactcctccgggtattcatctgcagagcaggtgaaccaggatgtgagccggcagctgcttcaggatgggtatcacctggatgagattccagatgacgaggacttggacctcatcccccctaagcccatggcctcttcaacatgctcctgctgctggtgctgtcttggggactcttcttcctgtaccctccagtagacattaccctccaaggtgggccctgctcaccatgaggcctacagagccctgttggccactcatagctcacacagtgcagtgagcactgaagtcactgacccctagaaagtgacctgcaggtagcccttacctgttgcttctcaggccagaggcccccatctgggctgtgggctgataggtagaattctgtagttttcctctgctgttggagcagagtttggagaagtcactttaataagggcaagacagaaaattctggttcttatggtgggtgacaaaggtggctaaggaaaacacttgcagacagcttgattggtatttgtcatagtgcttcagggaggcaaaaagggagctcttgtgcccaggctgtgctagatagtgttgaatggaggcagaaaatagcactttatggtttattatagctggcaatccaaaaaagaaactgtttgagaccagttcgagaaattccatttgctctattcttcctagctctaagatggtttgcaggcttgaccttcaagacagcataaagtgagtccttttgtccctcttcaggttgcacctgtctaactatgacagggatcatagcaggttgcttaatgatacagcaggatcctggcttccagaatccctggacctggggcatccccaactggtccaaccgtccgggtgacagtttcctgaggagaggggtgtatccaggcttacctcccagcaggagtggtaccatatggtgtttatgtactactctatagaactcttggcttgcacttctacagctctgtacatttataagaataaatgcaatcacactagttaaaaaaaaaaaaaaanaaaaaaaaaaaaaaaaaaaaaaaaaacaaaggaggggggcgggggcgcctcccaaagaatctacccccggggggggccccacagttttagcgcgcgcgcccccgattttttggtcaaagggggggccccctaaagggggagagcgcgcgttatataaaagacggcagaggcccggaggcgcgcggcgttttaacaacaaccgggcgggcagaggggaaaaacacagctgtggatgagggtggggaatctcttggggaggaggagaacccccntctactgctagcgggagggggcgacaaattagtgtggggaacaacacatatcctagaggggagtttatataaggcgtactagaagggaatatattacagaaattggaggtggtataatgagggggtgtaaacacgaagggagaattttggatgcgcagtgggttagtagaagttgttggagctagagcgggggatgtttgatctgttaggaaaagtattattatacgaggggcttgtgctagtatataagatgn

SEQ ID NO: 649518 - DNA, 1366 bp, Homo sapiens
  misc_feature (10)..(10): n is a, c, g, or t
  misc_feature (75)..(75): n is a, c, g, or t
  misc_feature (84)..(84): n is a, c, g, or t
  misc_feature (840)..(840): n is a, c, g, or t
  misc_feature (1112)..(1112): n is a, c, g, or t
  misc_feature (1366)..(1366): n is a, c, g, or t
atatataatnacatataccatatacattccatctttttttctttttaatatattcatatttaaactcttttcttnaattttacncttcatctctattcattttccaacattctgagcactttgtgcaaatgcttgtagagctcaagaacatctccatccagaaccccttccccatctgcagagaccatgtccaggcctttcttgtgtctgcagaggtgaagtgcacatgtggaaagggatcaaatgtagcacagtgtaaagaaagacagcaacacaggtagagggacccagtgtgtgctgggaggtggctgtggaaggtaagtatagacctacatctctgttggggaggtggtcagggcagaatggcctgggtgtttagcagcttctaggggtgagggtggcaggaccccaaaaccaaggccctctgcatcgttgttgtaataatcagctctggcatattcagctgcaactgtccctgaagaagaggtttctgagctggctgaccccatgtaggagggtgttaccttgtagaaaaagctggagggacctggtgggacagtgcagtgaggcagggtagaaatggtcagttgtttagggccagtggccacataccaaaataccaccaatgtgcccagggccaaactgccttaattctgagtgctgtgtgttctgcaggtgacagtttcctgaggagaggggtgtatccaggcttacctcccagcaggagtggtaccatatggtgtttatgtactactctatagaactcttggcttgcacttctacagctctgtacatttataagaataaatgcaatcacactagttaaaaaaaaaaaaaaanaaaaaaaaaaaaaaaaaaaaaaaaaacaaaggaggggggcgggggcgcctcccaaagaatctacccccggggggggccccacagttttagcgcgcgcgcccccgattttttggtcaaagggggggccccctaaagggggagagcgcgcgttatataaaagacggcagaggcccggaggcgcgcggcgttttaacaacaaccgggcgggcagaggggaaaaacacagctgtggatgagggtggggaatctcttggggaggaggagaacccccntctactgctagcgggagggggcgacaaattagtgtggggaacaacacatatcctagaggggagtttatataaggcgtactagaagggaatatattacagaaattggaggtggtataatgagggggtgtaaacacgaagggagaattttggatgcgcagtgggttagtagaagttgttggagctagagcgggggatgtttgatctgttaggaaaagtattattatacgaggggcttgtgctagtatataagatgn

SEQ ID NO: 649519 - DNA, 221 bp, Homo sapiens
gggtgattgtatgtttgttcgtgtgtttgttgtggcaagagtcctcactccgtcactcaggccagagtgcagtggtacgatcttggctcactgcaacctccgcctcctaggttccagcgattctcatgtctcagcctcctgagtagctggaattacaggcgcacaccaccatgccctgctaatttttgtatttttagtagaaatgggttttcaccatgttg

SEQ ID NO: 649520 - DNA, 1089 bp, Homo sapiens
ccgcctaccccaaaaccgagaacggaactgcccggtcccccgaaaaagaagggcggaacatttcggccaagtcctcagactaccgaaccggagagctccgaaaggggactacctgcgcctgcgcaccgccatcttgttaaaagagcccgcctctccctcggccggtcactctttcgccacgggcggggttgcaccatccggcagggcggggcccggccatggcgaccgcggagcccagcgggcgcgcgttgcggttgtctaccccgggaccccggcccagcggggctcgggaccgcgcgccgggagctgcggggccaccctccgggcagatcggtaatagagccctccgtctgggggagcgcacccccgcggccgtggaaaagcgggggccatacatggtgacgcgcgcaccctccattcaagccaagctgcagaagcaccgggacctggccaaggccgttctgcggagaaaaggcatgctgggggcctcgccgaaccgcccagactcttcagggaaaaggtcagtgaagtttaacaagggctatactgctcttagccagagtccagatgaaaacctggtgtccctcgactctgacagtgatggggagctgggatccagatactcctccgggtattcatctgcagagcaggtgaaccaggatgtgagccggcagctgcttcaggatgggtatcacctggatgagattccagatgacgaggacttggacctcatcccccctaagcccatggcctcttcaacatgctcctgctgctggtgctgtcttggggactcttcttcctgtaccctccagtagacattaccctccaaggttgcacctgtctaactatgacagggatcatagcaggttgcttaatgatacagcaggatcctggcttccagaatccctggacctggggcatccccaactggtccaaccgtccgggtgacagtttcctgaggagaggggtgtatccaggcttacctcccagcaggagtggtaccatatggtgtttatgtactactctatagaactcttggcttgcacttctacagctctgtacatttataagaataaatgcaatcacact

SEQ ID NO: 649521 - DNA, 897 bp, Homo sapiens
agataggcgacacgccggggttcgtttgaggcgggaatggctgctgtactgcagcgcgtcgaggcgggattgtccaatctgagtctgtgccgtgttgtgtgaggctttggttaaccccgtgtgggtcccatttgaccccttccagagggcaccaaaacgacacatacccttaaggtgtggggagaacccgggccccccaaggggaggaacattcccttctatttggaccaaatcttggggacatgaaaccccagggcaaaattttccccaggaatattaactatttccaagggtctgtgttttaacaacacggccatggcggcccttccttaacaactttgggaagtttttgtgaaccacgcactcaaggggacaaatttcccccaagggtggaacaaatcttttggggtcaagggtttggaccttcccaacctgttgggtgacagcccccggggaacaggagctcaccaattttccttttgggggaacacggggcccattttacggcgggaacgcgacttaactctcgtcgcgttaccacagagcaggcacttttttcaaatattacaaaagtgtcgcaacgcggatcctgttaacgcccctttaaagttttggcgcctattttttcaacgagcacacagcagagtgtttccccaccaaatcggggggacaagatcttccccctttccagaaggaacggacacggtccacagcgaggaaagacaagttttacaacttgtacggggccgggaaacaacttgtgtggaggcaacgcgagaactggcacaactgcgaaactgtcatagtgttgagttatcaaaaaatctctgtttggtcaacaagagagcattgtgggcggaaggaatttgtggtggaacgttagtacacgagaacctg

SEQ ID NO: 649522 - DNA, 199 bp, Homo sapiens
cctcaaagatagcccctccttttcactggctcttctgctacacatcacagtcgcgtccagcctccagtgagtgacttcaagagcgtctggtatttctttctgaagggcccggcatgtgtctgcgtccctgtaagcattctgtgaggaggtggagagacagcccaccctagtgtccactgtgagcaccctcctcttacga

SEQ ID NO: 649523 - DNA, 273 bp, Homo sapiens
  misc_feature (14)..(14): n is a, c, g, or t
  misc_feature (75)..(75): n is a, c, g, or t
  misc_feature (100)..(101): n is a, c, g, or t
  misc_feature (103)..(105): n is a, c, g, or t
  misc_feature (123)..(123): n is a, c, g, or t
  misc_feature (138)..(138): n is a, c, g, or t
  misc_feature (149)..(149): n is a, c, g, or t
  misc_feature (157)..(157): n is a, c, g, or t
  misc_feature (163)..(163): n is a, c, g, or t
  misc_feature (184)..(184): n is a, c, g, or t
  misc_feature (186)..(186): n is a, c, g, or t
  misc_feature (203)..(203): n is a, c, g, or t
  misc_feature (218)..(218): n is a, c, g, or t
  misc_feature (239)..(239): n is a, c, g, or t
  misc_feature (247)..(247): n is a, c, g, or t
atgtgaggcttaanaggagtcacaggcttcagagtacaagtcccctctgcctcccagctggacagtgcctagaanccaaggagttgagaatctcctgatnnannncctatccttacttcaccnccaggcctcttggcnccaggcaagancttagagnatgtcntggagaggtgggggtaagaancntcagcaaaactgtcacnctaagtagagccagnagttacgggtctgataaaaanagtactgnactaaagtaaagcccaagctgtgagc

SEQ ID NO: 649524 - DNA, 660 bp, Homo sapiens
ggacgattggcaggcagcaccctccacctttgccacctatttcttgttgtaaaacagatgtttgtttctaaaatataatgaattaatgattatcaaagtacaggcatacctcattttattgcagtttgttttattgtgtcttgcggatattgcattttttacaaactgaaggtttgtggcaggcctgtgttgagcaagactatcagtgccattttttttcaacagcatgtgctcatttcatttttctgtgtcttacacagaaacttaaaatatttcaaacttttcattatatgtgttttggtgattagtgacttttatgtttctattgtaattgttttggggtgccacagactgcatccatctaagacagtgagcttagttgatgtgtgtgtgtgtgttctgattactccactaactgatggttccccatctctctccctctcctcagacctcactattctctcagacacaacagtattgaaattagaccaattgataaccttacaaacacctttaagtgttttaagtgaaaaagtcacatgcctctcactttaaatcaaaagctagaaaatgattaagcttagtgaggaaggctaatgtcaacagctgagataggccaaaagctagactgcttctgccaaacagtcaagttgtgaatgc

SEQ ID NO: 649525 - DNA, 240 bp, Homo sapiens
  misc_feature (234)..(234): n is a, c, g, or t
gaaattgaagaccagcctggccaacatagtgggaccccatctctacaaaaattaaaaaagaaaaaaattagttaagcgtggtggcatgtacctgtagttccagctacttggaaggctgaagtgtgaggatcacttgaacctgggagttcccaactcccagtaagctggaatcacaccactgcactcgagcctggacaacagagtgagaccctgtctcaaaaaagaacttgaatnggatcg

SEQ ID NO: 649526 - DNA, 467 bp, Homo sapiens
  misc_feature (467)..(467): n is a, c, g, or t
gtggccggggaaaggccacaatttctggcacgtaaatttaggcgggggcaaaacaagggcctttccttggggtttttccctttgggtgtggaggaacgggccggcacccgggggaggggaggccccggggtttaacctttaatttttccacagcttttgtacacccagccgagaggaaacaaggggggcccccaaacgaaaggtgccccccaaaggggggcgccatttttactatatatcacaccccagtttctttctctacaatataacactcacacataggagacgcagcggacgtcacaacagcaatatccgtgggggggcggcggggccctttttcccccaagggaacccaaaacggacaacgggggaaaaaaccctttttccatttccggaagcgggttacctggacggggcgacggcacgcgttgcgccttgagagttaactctacagtgtgccgcatttn

SEQ ID NO: 649527 - DNA, 317 bp, Homo sapiens
  misc_feature (23)..(24): n is a, c, g, or t
  misc_feature (82)..(82): n is a, c, g, or t
  misc_feature (130)..(130): n is a, c, g, or t
cacaggatctgttcacgtgtganntgctgcgctacacatcagtgttaactccctacagattacactctatcccgctgctccngaggagcggctttgctaaatcgggtatatagtatatgcctttttcctngtcaaactgcctaagtaggggttcgttctctccctgaagcacttgttcaactcctgttaaagccgcgtgcctcaaggggaggctggaccccaagtgtttacccacttaaatatgttctggggtttcaggtaaatgtttgtgggtttttttttccttacatgaataagtttggttttgattttttttt

SEQ ID NO: 649528 - DNA, 411 bp, Homo sapiens
cctccatgccgggctaatttttgttaaatacaattctttaaccttaaatcagctcaacaaatatataatcagcaatttagctgtataagattaaagatccattactttatcttaaataaaatatgttttaggccaggtgtggtgactcacacctgtaatcctagcactttgggaggtcaaggtgggcggattgcttgagcccaggagtttgagaccagcctgagcaacatggcgaaaccccacctctacaaaaaatataaaaattagccaggtgtagtggtgtgcacctatagtcccagctactcaggaggctgaggtgggaggatcgctggggcccgggagttcgaggctgcagtgagccatgatcatggcactgtaatccagcctgggtgacagagggagaccatgtct

SEQ ID NO: 649529 - DNA, 547 bp, Homo sapiens
cttgaccgaaagctatacagaaaacagctatagcaggaaaatcataaccagtaaacattattagacggtactcagtttcatgcgaataagaggttggaacgagaggaatatatggctagaaacaggtgagagagtcacactctgtcacccaggctggattgcagcggtgcagatctcggctcacggcaaacctccgcctcccggattcaagcaattctcgtgacctcggcatcccaacgtagctaggattacacggtgtgcgccaccacagcccacgctcaatttttgatattattttgtacgagccagggttttcaccacttttgcccacggctggtctcaacatggtaggcctcaagtgatccgactgccttggccttcacaaatcgctgggattacaggcaagagccaccacgcccagaccaccccttcccttgtttggagacagtttcatccctgttgcctaggctgcagtgtggtggcacaatcacagctcactgcagcctctacttcccaggctcaggtgatcctcccatctcagcctcac

SEQ ID NO: 649530 - DNA, 782 bp, Homo sapiens
  misc_feature (12)..(12): n is a, c, g, or t
  misc_feature (64)..(64): n is a, c, g, or t
  misc_feature (97)..(97): n is a, c, g, or t
  misc_feature (123)..(123): n is a, c, g, or t
  misc_feature (161)..(162): n is a, c, g, or t
  misc_feature (176)..(176): n is a, c, g, or t
  misc_feature (221)..(221): n is a, c, g, or t
  misc_feature (243)..(243): n is a, c, g, or t
  misc_feature (261)..(261): n is a, c, g, or t
  misc_feature (273)..(273): n is a, c, g, or t
  misc_feature (282)..(282): n is a, c, g, or t
  misc_feature (294)..(294): n is a, c, g, or t
  misc_feature (298)..(298): n is a, c, g, or t
  misc_feature (332)..(332): n is a, c, g, or t
  misc_feature (366)..(366): n is a, c, g, or t
  misc_feature (438)..(438): n is a, c, g, or t
  misc_feature (492)..(492): n is a, c, g, or t
  misc_feature (534)..(534): n is a, c, g, or t
  misc_feature (572)..(572): n is a, c, g, or t
  misc_feature (712)..(712): n is a, c, g, or t
  misc_feature (744)..(744): n is a, c, g, or t
ctggggttgaanaagtggggtgggaatccctggggcatcagtccacaggaggtgggggccagcnatggcttcaggggtgatatttccaatatatatnagccctgggcactctcgccctgctgntcacagcatggtcctcacaccagaagcctccgccttanntgggagcttgttanaaatgcaggatctcccagatctattgagttagaatctgtattaanaagatccccagtgatttttatnaaaaataaagtttgtaangaaaagctgaanaattctgantgcaggaatgangaanccctgggtaggtgtggttaaaaggaatggaaaangaggatgtgaagaggggatgatgaaagacatggnaaaagggagaagaccctaaacagctgtctttgttagtccccgcccacctggccgggatgaaaaaaacaaggncacctgcagtctgccctgcccttcctcccctcagtggctttgaaggaaggtgtncttgaagctaagctctgctggctgcaggtaaaaccacaggcnggggagttctctgagacctaggagctggggtgtacggngaagcggggccctggggagcctcggagattcctggtgggaaggcctgggcagaacagaaggcttgtcaagtcagagggccacctcttcctcctcaattctgccagagaaagctcctgtgctgggctctgaaccccttgcngggaggggtgcaggttatccctcttggagctngagggctgggtgcttggtatttaaacctaagagcttag

SEQ ID NO: 649531 - DNA, 166 bp, Homo sapiens
atataactgaactcctcacacccaattggaccaatctatcaccctatagaggagctaatgttagtataggttacatgaaaacattctcctccgcataggcctgcgtcagattaaacactgactgacacttacagcccaatatctacattcaaccacaggtcattat

SEQ ID NO: 649532 - DNA, 122 bp, Homo sapiens
agaacagacggatgaggaagtgccatctcctgggattgttgatagcccaatcccaggagaagggaaaacgatacgaaccagacggatgaggaagtgtccatctcctgggatggggctatcaa

SEQ ID NO: 649533 - DNA, 680 bp, Homo sapiens
  misc_feature (410)..(410): n is a, c, g, or t
tggtcccaaaaggggttttgggttggacccggaactgggaacaggacacacagcaggatgcggaccagggtcaaatgaggccaaaaggggggggggaacgggtctccgaggggccccaaagtgaggcgtgaggggcgtgggccataggctccgcgaggtggggctcagctcgtgggacccttctcgggggcgtgtggtgggaaaggggcgtggggcgccaaaaggctccaggaggaggctgcacgacagaaagtggcgtgaaacccaggggttcagggaaggcccaggctccgggaatcgggggtccaccggatactacgggagagactcccctgggcccccggggaacaccactagcgggtggaggggcgaccacggctctctgagagggaactcagtggcgttccccncaaaggggcgggcggaaaggggtctggaggggacccccccgtagtggcccctcccataaaaattcaaccccgaaagagtctggggccccgggacccccaaacaggggggggaatcccccagaagctcggggggcggccaaccacgaggaatgcctacgggcgcggccaaaaaacccgagggcagtatgaaggcccgaaacccactcaaggaaaccgcggggtcctcagaagaaacaccccttgggggaaacagacggacaaggggccgcg

SEQ ID NO: 649534 - DNA, 1239 bp, Homo sapiens
ggcagaggtttctggggagccaagagtggtaatggcgtctgtatgatcttcggagcctgttgcatcggacctcgcgccaagtcataacacagatgacaatcagcagccaggccaagcttggaacctgccagaggtggacggggacacggagacggtgattggagccaactttcaaagcagtattcaagcagagacctaccctctcatacaaagataaagatacagaccagacctactacaggatgcccctgaagaggttcgaaaccggtgaccttcaggacgcgacgtgggacacgaacacgacgacgaggaggcgtgctgccaagaagagacccacatacggggatcgtcccaacccggagaaccattaacaacctcactctttcagtggtcaaaaacaggccacggttaagaccagatttcctgtgccggccaacgcttgattgcaagattgacccctcctaaacagatgatggcaccgactgccacgattattggagagaaaggaaacagttgcactgcactgactgcattccctggcacgggctcttcctgtgccacaaacctggggacaccaacttcaaaccacaaggacacagagctggaacgacgccagtgcccacggacacggacccacggaaccaaaaacacgcctggaccgcaaagaagcaggggcatcccgcgaagtggggacacaacaattagcatggaagccgggaacacccgcttccgacccgtcaaatactgcacactggggcgcccagatgccaaggccctccaaggcgcgaagactgtacacacaggctacaaacagacaggggtgtggcacatcgacaggcaacgataaggcctcgtcaagcaaaaggtgggccacaacacccggtgggtagcactggccccagcgacagcgacgcgcaccacaccaacgagtgggggctacagataccgacaccgggcgcacctgggacatactcccacagaacagcggtaaaggggggagcaaccaatagtagcacacacagcgacaacgcaacataaggcccagccgacacaaaaagacgacgggtacaaacgagaagagggcaacaaacaacaccatacaaacatagcagacacagataacagaagccacggctaccacaggtagctcgggccccacacaggaagaaacacaaacagttaatgaacggtagccaccaagaccaaagcatgacgaaaacaaccccaggagaaacaacg

SEQ ID NO: 649535 - DNA, 376 bp, Homo sapiens
  misc_feature (256)..(256): n is a, c, g, or t
  misc_feature (269)..(269): n is a, c, g, or t
  misc_feature (345)..(345): n is a, c, g, or t
  misc_feature (365)..(365): n is a, c, g, or t
ggatccggttgcagtgagccgagatcatgccattgcactccagcctgggcgacacaatgagactccatctcaaaaaaaataaaattaaattaaattaaaagtaagagctaaaactataaaactcttagaggaaaacagagagataaatctttgtaaccttggatttggcaagggattcttagatatgaaaccaaaaggataagcaactaaatgtaatcaattggacttcatcaaaacaaaaacttttgtagttcanaggacattagcangaaagtgaaaagacaactcacagaatgggagattaataattggggaatcacatatcttgataaggaggacttggtntctagaattttgtaattgancacatacaact

SEQ ID NO: 649536 - DNA, 1237 bp, Homo sapiens
  misc_feature (1237)..(1237): n is a, c, g, or t
gcctcttttccgtggcgcctcgaaggcgttcatgctgcttcaagatgaagctgaagatactccttgccatgcgcgactgcgtctgtcctagacaagctcattgaagtggcacgtatggaacgcggacttcgttacttgctatgagacagctgtatgggccacagtaagtagctgctgacggtctgggtgatgaatggcaaggggtaatgtgggtccgaatcagtgctggagaacgagctagactaatggttccaccgcattgagagcaggggatgtcttatgacaccagtgggtcgtgtccgtcgtgcatacgtgatgtaagggggcattcgcatgttactaggatcgcaagggtaggaacgtagggaagaacagaaagtgaaaagtgcaagtttcggtaggtctagcactatggtgggagtggcagagatgcgtcgactgcgtgtactcaaacttgtgggtgaatatagtcaatagagaaaagggaggacgagagggattatatttcctagttgacctgacttagaatgaattatcgaggatagcacttccgccacggtcactggggagtcgctcgcgagaaatatgaccgcttaagcgaagacatccccgcaaaacactcttgttcaatattcttcctccataaggatgacatgagttgcacttgatccagaccaggattaattgatatggttgacctgcacacaggcccgcttaaccattggagaggaaaaggggtaggggcacaaccccgtaaagggaacccctaaaaggggcaccccaacattgtgagtatccaatcgccgatcccctatggtgttgactccaccacctgttttgcatccgttggcacagcaagcgaaagaacccgggctgggcagtataatttggctttccttggaaaggacaagatgccatggccggtatatctccagaggtaacatacatatttacgccgcacaaaggacagaggccatgggcggctcacattacttggcccttggagagccctttgatgggagcgcggcagtgaggaactcttgcacaggggcaagggccctacaaggggtgacgcaaacaccgccgacccaagggaatgacacagtgcataggcccggacaatcgagcgtatatgtcacatggaagcggtctcgacgccactacttctcttgcgcagagggcctagaccgtatagcgtgaacctaacatgttttcttgtgaaccaattcccgcagtn

SEQ ID NO: 649537 - DNA, 841 bp, Homo sapiens
  misc_feature (23)..(23): n is a, c, g, or t
  misc_feature (142)..(142): n is a, c, g, or t
  misc_feature (223)..(223): n is a, c, g, or t
  misc_feature (230)..(230): n is a, c, g, or t
  misc_feature (235)..(235): n is a, c, g, or t
  misc_feature (321)..(321): n is a, c, g, or t
  misc_feature (328)..(328): n is a, c, g, or t
  misc_feature (351)..(351): n is a, c, g, or t
  misc_feature (453)..(453): n is a, c, g, or t
  misc_feature (490)..(490): n is a, c, g, or t
  misc_feature (497)..(497): n is a, c, g, or t
  misc_feature (517)..(517): n is a, c, g, or t
  misc_feature (535)..(535): n is a, c, g, or t
  misc_feature (635)..(635): n is a, c, g, or t
  misc_feature (651)..(651): n is a, c, g, or t
  misc_feature (660)..(660): n is a, c, g, or t
  misc_feature (685)..(686): n is a, c, g, or t
  misc_feature (698)..(698): n is a, c, g, or t
  misc_feature (705)..(705): n is a, c, g, or t
  misc_feature (708)..(708): n is a, c, g, or t
  misc_feature (715)..(715): n is a, c, g, or t
  misc_feature (725)..(725): n is a, c, g, or t
  misc_feature (734)..(734): n is a, c, g, or t
  misc_feature (738)..(738): n is a, c, g, or t
  misc_feature (742)..(742): n is a, c, g, or t
  misc_feature (753)..(753): n is a, c, g, or t
  misc_feature (756)..(756): n is a, c, g, or t
  misc_feature (760)..(761): n is a, c, g, or t
  misc_feature (763)..(764): n is a, c, g, or t
  misc_feature (766)..(766): n is a, c, g, or t
  misc_feature (817)..(817): n is a, c, g, or t
agccttgactcaccttgccgaantcctgaagaatggaaaaaagacaaatgaatcttcaatatcggtttttcacctcaggaaattatttattaaaagttttcatcattattatttaggtatcttgattctccatgcttcaagncaaaaaaatcttcagcgttaagtccgtatctctctagagcttcattcagcttcactggaggctctaagttatgctcatttnctaaggnaaaanttccccagtgaattgccatagatttctttgtttggacatcagtgtgaatccttacagcttcttctgggtctacatgctggtatttnataaacnacctcggttcataagctccgatnggaatagactgaccaggtcaaaagatccaaatctttttcctatctcttcaaaagcagggcaataaccagtatctcctgcgaaaaaaaatcgattccaaggcnccaagacagaccagctgccccatagcaccttgttgtnatccatnagagtccttttacaccagtnctgggaaggtgtaaaganaaaagtgaccttatcatgtccggggacacaattctcctcccaccagtccaactcaatcacattctcacagccacatttttgcatccagtcaaggagaccnaaaggaacaaaccatntcaactcantaccaaatcgctcattcaaagcaannaaaaaattgtantacaaanggncatagtngttgtgactnataaggaangcanctanaaaaaaaaatnacntatnntnnanggggaacgacgaactcgctttggacccctgttctgcgatggtgaagcacgngagctaaagatgggatccgtgaga

SEQ ID NO: 649538 - DNA, 278 bp, Homo sapiens
gtagtgttctagaggatcccggaacacaaaagcggtggtctccgccgctggaaaccactccaaacgtttctccttcgcggagaaggctgatttggcctgaagaagccctgtgtgcactggccctgtgcaaccgaccccagagccagctcgggagggccccacctagggcctagctccgaaaccgcacaaaacgcgctgctaggagctgcattctgcaaagggaaactgggctcggggaacaaacctcagccccgatgcggcttggccgcttttgtgtt

SEQ ID NO: 649539 - DNA, 385 bp, Homo sapiens
cacatctgactctcttatctttagcgcttgaggtgtggcgcgcgcctagatgagcgagcccagagactattcagtaccacaggaaacgtccctggcagtcactatgatacctactttgtttgccaaacaatcccaatgtcaacagggcaccaatgcgagtacactgacagggaacaagagacattagcttttctagaaagcccagactctatgaagtagtgtagagattctcgaggaaacagcgacatctcactcactgaaaatgtacagcgcaagcaagccaggacaaggagaagagcgagaagaagaggaagaagagcagatcagtgagagtgagagtgaagatgaagagaacgagatcatttacaaccccaaaaacctgcca

SEQ ID NO: 649540 - DNA, 351 bp, Homo sapiens
  misc_feature (43)..(43): n is a, c, g, or t
attagtggcatttaactcatatatgaccttcctttaggaagcnttgactggtaagggaaaaactcctccagtgaacacgtgcacaacttcagtaaaaacactgcacatgcgtcccctcccaagtgctggcaggccactgtgcatgcagacagcccgccccaaagaaaaatcagaggaggagaaatggaaaccccggaacaatgccaatgtataaaaccccaagtcaagggcctaccaaggcaattggatctctcaagtcacccgcttggctctcttcaagtgcactttgcttccttttgttcttgctctaaaacttttactcctgctataaaacttgccttggactatcat

SEQ ID NO: 649541 - DNA, 108 bp, Homo sapiens
gagacatataagaagtatattgctgcatatcgtgccatggtcatcatttaagcacgaaagaagggccctcgcagggcacctgtctcaaagaataagaacgaaccataa

SEQ ID NO: 649542 - DNA, 137 bp, Homo sapiens
tattttttaagaatatgattaggagggatagatgtttagttggccaaccggatctaaacttttaattttggctaaacagaattggtagcatttagagctatatgctttagaattttttcgggggtacggagctcgaa

SEQ ID NO: 649543 - DNA, 428 bp, Homo sapiens
cgtgtgaccagggggctctcgctgcccggccagcacctgcccccggcctgctcccgcgggcagggcgcggactcaccaggaagtcctcctggcagtacaccttctcgcccacgctgtagaaggccttcccgcggagccggcgcccacaggagtcacaggtgaagcagtcggtgtggtacaggctccccatggcctggcacgcctgcctcgctccgtagatgccaagcccacacttgatgcaaatgcctggacagtgtctccttagtgcctcttcctctaccacccatggttcttcttcttgttccaacttgaaaatcacatcaggtttggtgaatgggtagcccactgtgattaagttgttatagttctctagcatcacgttccggtagagattcctctgagtgggatccagctgcttccattcctcc

SEQ ID NO: 649544 - DNA, 1035 bp, Homo sapiens
ggcggcctgccaggcccaggactgaggccgggggccgggaccctccccctcccacaaccaccacgaccacccgtgtgagaccagggcatcgtaggggcgtgatggcgtggggtaagggagccaagggatccatctttgcccaggacaaacgccgaggactgacgatgaccaccagaaagggacgaggacccatctctcggggacatgaggtgggtggagaagaggggacctcttccccctactctgcccccttcctgcacacccttgcgctggaggaggggagggggcaccgcctcccagccactgagggcaggcagggcttgtggggagggacaccaacagggtttcaaggggaccaggagtcagaatgtggggagacgcctctgccaaggcccatcccaggccctatgctgccatcccccagggctccccatcacccgagaggagaggacgccccaagtaagccccggtggccctcgggactacccgagtggccggctgcaaccaggactcatctccagggtaggacagcttgaggaatcttattatataatttatttacccaaatttgaaatagtctgtagggttgggggaaggaggtggatgctagccccaagccttcacagatgtggacaaaaccctgagttgcaaggcagaagggcgcccaagtacactcaacaaatcggactgggacagtcgagcacatcagagcacatgaactgtaccctggtcgctactgaccatctcaaggcttctcaacactgggacggagcgccgggcggtgctattacgaaccgggcagtaaagaagactgcagctaagccaaaaagaggagaaggcacagaccaacacagcacggcggcgcgcaaagatcccaccgggagccaggcagaagcgcccaggtagagaaagcgcaaagagggacaagcaacagggggcgccaaacacccgctacgcgagcaagcaggagtaggaagaactagcaggacaaaaccgagagacgcgtacacaagagcaacagaccgacgacaatac

SEQ ID NO: 649545 - DNA, 377 bp, Homo sapiens
gatgatatcaagattacttttcacaaaataggcacattatatcaacactttgctctgctttgtaaatttgccatccaggattttggggtggtattcatgtgaaattaaagcagattctttagcagtttcctatagctacagtttttttttttcattgcttctaattggatatagttcctatcagtccgtgcaacactgatgctattgtaataaagaatttgtgccctctagcttttaatcatttggtcttgcaccaaaatcgtttgtgtatgtggtagccatctagtagtgtgcatcagtgtcaatatttcaggtggtgctttgttccgtagtccagttttgctttgagtataatcacatttcatttcttgttttaa

SEQ ID NO: 649546 - DNA, 778 bp, Homo sapiens
gtgtactgacttcctgatccagccttctcccacctgtctgggagagcgtaactatgggatggtcctgcagagagagagggacctgaacacgttgcagctcgcatcggccagtaccctggtgaaacagaacagtgtatgatggaggagaacagaagctggatagccctgcgttgggctcagccaaggaggagatttgatacctcagacaccaggtgaacttgcgggatgagctcctccagctctactcagattctgatgaggaggatgaggatgaagaagaggaggaggaagagaaggaggcagaagaggaacatggaagaagaagaagcagaggaagacctgctaagatgtgctcatccctgtgatgcccctaagctgatacgcgggaggcattgtgcacacagtacaaaatggctcacagctggaagcctgtgcaggagaagctgaggctgctggaggaggagaatcattagctgagagacgagtgaatctcaaagtcgaaatcttgaggatgaggaacagatgctctaatactggagtgtgtggagcagatttattggaaggcagtcaacaagatggttgagctgttcggaggtgcttgggtgcatcagtgctggaaaattatgtaaggggaaggaaggaggagggtcgacggatgtaaggggcaggtgaatgaacatgaaacaatgttggcggaaggagaatttgactgttaaggagaaatgatgagagatcgaaagttctaggaggtgattaaacttggataatgaaagattaa

SEQ ID NO: 649547 - DNA, 355 bp, Homo sapiens
ggatcctcgcagtactcaacacagattgacatgaggcccgttgcttgcattcatcctgaagtggcttcggttagacctatatttccagagacaaccgcctgagacgaactgcacttaattctccgactgcataggaactccatctcaggaaacttgaccagctatttcttcaaatgaggaggtcaagaactacaactttccaaaatatacaccacagcgctctaattaaccacgcacccagcatagactctgatggaattgaggtgataacagaagttcttcagtatgaatctaagacaagaccttcagctgaagagtgcatgaaacatgtgtactttcgaagtctgggaccaag

SEQ ID NO: 649548 - DNA, 1270 bp, Homo sapiens
  misc_feature (143)..(143): n is a, c, g, or t
gatagctttctacaatccgttcgtctggcgcgcggagcccaggtaggtgagtgatgcattggtatcactaggctgcttatcctaagtacagtccttggttcatgacttacgttgcttgcatcttacttcaactcaaataaacnacacacgcgccggggcaaggcagaccccgttcctgtgtccttgaactcacaatcactagcgatttgtcatgtgacgtgggcacgtgtcccatttgacattcgtgcatcttaaattcaagagcaagtgcgcaaagtcgctagaggcctgcaggcatcatgcattaattcttatacatgtctcacgggccccccgtgggcccgttggaaaaagagaaagaatagcaaatacaacaaaaacacaaaaaaagaaaaaaaaaacagaaaaaaaaaaaacacagacaagaacacgaaaagaaagcaaaaagaaaaagagagagactaaaaaacaagacacaaaacaaaacagaagaacaaagacaacaaatacatatacaaacgacgacaagacaagaacaaagagaagaacgacgaagtagtgaagaaggagagacgaaaggcgggacggcgcgagacgcgctacggaagtgaaggacgaggagagacagagagagagaagagacagagagcggaaaagaagtgaacgaagaggagcgagaagcgagagagaaaggagaggagagaggagacgagaggaagaagagaaaagaggagagaggaagggaataggatgagaaggagggacagagagggcaccgacagaggacgaagagggaggagagcgggccgggagccggggagagcgaggctgctcgggaacgcgggagaggcggcggaggggaggtgcggggcgggaaggagaagaggggggaggggcgacagaggaggagagggggaggagagagggagcgacaagccaccgagcgaccgaagacatcaaaaacgcctgagagccgccaccggacgcacacaagggctcgcggcagagaaccaactgagaagacacgacggaagacagaccgagagacactcgaggagggctaggcgaggcagagagtagaggaagagacgaccgagacgaccagagagacgcgaagcagcacgacgtggcgaggcaggcgaggagagggaacgagcgccgagccgcgcactagacgagcagaagacagatccagcagcagagagagagtgaagcccgagagcacgaacgaggagataggtagtctcagcagtcagcgaggagcggtagc

SEQ ID NO: 649549 - DNA, 896 bp, Homo sapiens
gtacatgcaatggggtgatgtagggcttaataaccgtgccagtgaagaaaatgtatgctattctctaactgatgttacacaaaaatcaacgcagatctacctcaatgatagctcttgtcatccacttgaccacctctcgtaggaaggataactgtgagcgctagtactcacgacatcatagtgttacttcgatagatgtactgtcaagcatctgtctcctgaggccgtagcccgattgaagtcgttctgtaacttgcgtccgtggctagtatgggtaataggaccagtagtcatatagggatgtagacacccataaaatggatattcgggggcggtggaattgcggtcgtgttgcccaggttggggttcacgtgcttcattttgcggctctattgcagtcgtcgtgtctcccctgtgtgttccaacgttgatatctcctgggctcagtctcggctgggtgcgctggggtttgctgagtcttttggatggtgccatcatgggagaagtctgatatgggcaagtagagacggggggtccaaggtccttggggagaggtcgagtgtattgcaatggctctgcatcctgtgctccatcttgccatggtgcggccccaaaggaagcccggaacttccggggtcgtaccgcacggggggggacccaggaattcatgcttagccggaaccagaggatggacacagcgtggcccccggtgggcccgaggtgataggctcagtgtgacaacaggcttggttccccagtggcgaagtacctcggcaattggcgcgaatatggaaatgaaaaggcctttacacagaggccggacaaggaaggtgcaagctagcaaggacaagagacaccggggcctttatcacgtaaaacagaggagcgagataaaa

SEQ ID NO: 649550 - DNA, 500 bp, Homo sapiens
ctgggcgtatgtactagcatgtgagacaagagatgcatctgatcgctccaagaagatacacattttagacaatatatccatcttcaattctgtcgaaagttgatgtaaatggcaaggcgcagttgtgttgtaccttccgtgacttcatgcgcattcgcttgtggaggtctggatcaagcatcctgagacacgtccttcatcgcataatagtgctcctctatataccgttctggaccgttccatgcggttcaccgtcagaccaagtatctgagatggaccgatgccgaagagtctccacttcttggtgaaatcgatacaaaggatcgcgtaaggccaatcttggctgggaagaaacgggattcgtaattatgtacatgacgtaacagaattagttcttatcatagagatgcaacataccagtacttccgagcatctactttaacagcctcaatttctcaacagcatacccgagactatttaccaatacggccaggttagca

SEQ ID NO: 649551 - DNA, 615 bp, Homo sapiens
  misc_feature (1)..(1): n is a, c, g, or t
  misc_feature (139)..(139): n is a, c, g, or t
  misc_feature (146)..(146): n is a, c, g, or t
  misc_feature (186)..(186): n is a, c, g, or t
  misc_feature (241)..(242): n is a, c, g, or t
  misc_feature (244)..(244): n is a, c, g, or t
  misc_feature (265)..(265): n is a, c, g, or t
  misc_feature (267)..(267): n is a, c, g, or t
  misc_feature (280)..(280): n is a, c, g, or t
  misc_feature (306)..(306): n is a, c, g, or t
  misc_feature (575)..(575): n is a, c, g, or t
nccaaaatcaaaactaaagaagaacacttagaaaaaagggtggaagtgtatttttccttccctggggaaaccagttaggcagaaattctaacgaagcttggttttttccataggactagtttatgcaacagaatttctnttcagcnttttctctatgttagttttatctacctggcaagaaaaaanaaaaacaaccccaaaacaacccccccccacagaaacaacaaaaaaaaagggaatnnanaagttagagaaaacctttaanangtttctgtaaaancctttctgagggggttaagtacaggnactacccatcagcaacttagcggccaggggagttggtgcagaagcgctttgggtgaattcataccagaaccaccgggtgtgaatgggctacctcttccaattaccaaagggagggcttaaaattgaatttcagttttagcagaaacttcagaattacctgagcaataacatagaaaatgtactcgttatatagtagagaggtgtaattaacaccagaagaaataccggtcccaagaggaacgtttacaccatccagactaatgttagcngaaggatcaggggtagttttgcccaaacctttgacactgt

SEQ ID NO: 649552 - DNA, 366 bp, Homo sapiens
cccacctcagcttcccaaagtgctgggattacaggcatgtgcaccacacccggctgcatcagtgcttttaatagaaaggtctgagtaggagcagacctgtcccacagtatgtagtaaaggcctagttggaatgctagcgttgtgcctgggcgtttttttcactactgctaaaagtaagtgctgcggatttaccaggtgtaagccaccggggcccggccttggctgccttgttgtttaccccagccattttcccaagcgccatacggggcaacaatggtgacccaaggggggccaatttcccttgcccccaaattcaacccttgaaattgttcaacggggtaccgaagcttcgaaatttcggtaatt

SEQ ID NO: 649553 - DNA, 194 bp, Homo sapiens
  misc_feature (124)..(124): n is a, c, g, or t
tagagacggggtctcactatgttgccctggctggtttcaaactcctggccccaaactcctcccagcggagcctcctgagcagctgggattacaggtgtgagccaccatgcccagctccaacgtnaagttttgaagagttctttttatctcaggccctgatcccaaggatcgaagtaccactggagagagaagaa

SEQ ID NO: 649554 - DNA, 1016 bp, Homo sapiens
tcattgaataatcataatggctatagcaataaaactaggaatagccccctttcacgttctgagtcccagaggttacccaaggcaaccctctgacatccggactgcttcttctcacatgaggaaaaactatgctccgcctatctcgaatcatatagcagatctctccctcactagacgtaagccttctgctcactctctcaagcttatcgcatcatagcaggcagttgaggtggattaaagtcaaacccagttacgcagaaatcgtagcgatactcctcaatttacgccagcataggatgaatcatagcgagttctagcggtacaaccctaacataaccattcttaattcaatcgtatttattattatcctaactactaccgcatgccgtactactcgaacttacaactccagcgaccagcaagccctactagctatctcgcacctgaaacaagctaacatgattaagatctcttaatttccagtccaccctccttctccctaggatggtctgccccacggtaaccgggtttttgcccgaaatgggccattatcgaagaattcccagaaaatagatagcctcatcatgccccatcatcatagtcaccatcaacctccttaactctagttctacctagcgcctaatctacatccgagctcaaatcacaactaagtccccaagaaaaagaataacaagcaaattcttacgtcctacctgttgcgacccggatgggccccgcgaaaagagttcgtcctgaggaccccagggatggggacgcgggagcgccctccacgtaggcgtatcggccaagacaccgcggcccggaagcgcggttccccacaggaagagaaccctggggcgccacacaaccaccgcgcgggtgggctcctccacccaaattaagagcaaggccccggggacacagccccgtggtcgtagcagaacacccacgcaggggcacccgcaagggccacagcggcgcaaacgcaacggaggccacgcagaccaagtaagacg

SEQ ID NO: 649555 - DNA, 170 bp, Homo sapiens
aaaggattgacatacaccctgtcgtcagtcacgtgcttccacaagctggcctctgcctatgggtgcaggcagctgcaggctactggcaagctctttgccatcctcctcccccaggagcgcctcgtgcccagactgccccttggaccgtgtagtgccgtatgcaggtggcc

SEQ ID NO: 649556 - DNA, 139 bp, Homo sapiens
gatctagaggatcccgtaatattcagtccaaagttgcggtatacgtcttttggctttcatgagaatacgcaagcctcaaataaactagttttgttcactgtggttttgctcaatgttgtttcatgtaatgttagagata

SEQ ID NO: 649557 - DNA, 312 bp, Homo sapiens
taactcactggatggctgctgaggcagaacagcgtgggagacaggctctttcctgctcttatgtgagatcgtcgttctgcatcagacaacatgctgactactcagcagcctggaggctctccggagcccaggtgagcttgtacaacagccccagtgtgcccagccagctaggagtggtgggggcagtggctttcctctcaaaacagggtatctttgaggaggatgatgatgatgactgggatgactgggacgacgggatgcacagtggtggaggagccacgggctggtgggctgggcaccaacgggcacccc

SEQ ID NO: 649558 - DNA, 1745 bp, Homo sapiens
  misc_feature (789)..(789): n is a, c, g, or t
tcggcgtgggggccgttggctccagacaaataaacatggagtccatcttccacgagaaacaagaaggctcactttgtgctcaacattgcctgaataacttattgcaaggagaatattttagccctgtggaattatcctcaattgcacatcagctggatgaggaggagaggatgagaatggcagaaggaggagttactagtgaagattatcgcacgtttttacagcagccttctggaaatatggatgacagtggttttttctctattcaggttataagcaatgccttgaaagtttggggtttagaactaatcctgttcaacagtccagagtatcagaggctcaggatcgatcctataaatgaaagatcatttatatgcaattataaggaacactggtttacagttagaaaattaggaaaacagtggtttaacttgaattctctcttgacgggtccagaattaatatcagatacatatcttgcacttttcttggctcaattacaacaggaaggttattctatatttgttgttaagggtgatctgccagattgcgaagctgaccaactcctgcagatgattagggtccaacagatgcatcgaccaaaacttattggagaagaattagcacaactaaaagagcaaagagtccataaaacagacctggaacgaatgttagaagcaaatgatggctcaggaatgttagacgaagatgaggaggatttgcagagggctctggcactaagtcgccaagaaattgacatggaagatgaggaagcagatctccgcaggnctattcagctaagtatgcaaggtagttccagaaacatatctcaagatatgacacagacatcaggtacaaatcttacttcagaagagcttcggaagagacgagaagcctactttgaaaaacagcagcaaaagcagcaaacagcagcagcagcagcagcagcagcagcagcagcagcagcagcagcagcagcagcagcagcgggacctatcaggacagagttcacatccatgtgaaaggccagccaccagttcaggagcacttgggagtgatctaggtaaggcctgctcaccattcatcatgttcgctaccttcacactttatctgacataagagctccatgtgatttttgctttacattattcttcattccctctttaatcatattaagactcttaagtaaatttgtaatctactaaatttccctggattaaggagcaaggttaccaaaaaaaaaaaaaaaaaaaaaagctagatgtggtggctcacatctgtaatcccagcactttgggaaaccaaggcaggagaggattgctagaacatttaatgaatactttaacataataatttaaacttcacagtaatttgtacagtctccagaaattccttagacatcatgaatatttttctttttttggggtgacagggcaaaactctgtctcaaaaaaaaaaaaaaaaaaaaaagggctggacacggtggcttacgcctgttatcccggcactttgggaggccaaggccgatggatcacctgaggtcaggagttcaagaccagcctggccaacatggtgaaaccccatctctactaaaaatacaaaaatttgctgggcatggtggtgggcacctgtaatcccaggaggctgaggcaggagaatcacttgaacctgggagcggagattgcagtgagccaagattgtgccattgaactccagcctgggtgacaagaccaaaactccatctc

SEQ ID NO: 649559 - DNA, 1386 bp, Homo sapiens
  misc_feature (789)..(789): n is a, c, g, or t
tcggcgtgggggccgttggctccagacaaataaacatggagtccatcttccacgagaaacaagaaggctcactttgtgctcaacattgcctgaataacttattgcaaggagaatattttagccctgtggaattatcctcaattgcacatcagctggatgaggaggagaggatgagaatggcagaaggaggagttactagtgaagattatcgcacgtttttacagcagccttctggaaatatggatgacagtggttttttctctattcaggttataagcaatgccttgaaagtttggggtttagaactaatcctgttcaacagtccagagtatcagaggctcaggatcgatcctataaatgaaagatcatttatatgcaattataaggaacactggtttacagttagaaaattaggaaaacagtggtttaacttgaattctctcttgacgggtccagaattaatatcagatacatatcttgcacttttcttggctcaattacaacaggaaggttattctatatttgttgttaagggtgatctgccagattgcgaagctgaccaactcctgcagatgattagggtccaacagatgcatcgaccaaaacttattggagaagaattagcacaactaaaagagcaaagagtccataaaacagacctggaacgaatgttagaagcaaatgatggctcaggaatgttagacgaagatgaggaggatttgcagagggctctggcactaagtcgccaagaaattgacatggaagatgaggaagcagatctccgcaggnctattcagctaagtatgcaaggtagttccagaaacatatctcaagatatgacacagacatcaggtacaaatcttacttcagaagagcttcggaagagacgagaagcctactttgaaaaacagcagcaaaagcagcaaacagcagcagcagcagcagcagcagcagcagcagcagcagcagcagcagcagcagcagcagcgggacctatcaggacagagttcacatccatgtgaaaggccagccaccagttcaggagcacttgggagtgatctaggtgatgctatgagtgaagaagacatgcttcaggcagctgtgaccatgtctttagaaactgtcagaaatgatttgaaaacagaaggaaaaaaataatacctttaaaaaataatttagatattcatactttccaacattatcctgtgtgattacagcatagggtccactttggtaatgtgtcaaagagatgaggaaataagacttttagcggtttgcaaacaaaatgatgggaaagtggaacaatgcgtcggttgtaggactaaataatgatcttccaaatattagccaaagaggcattcagcaattaaagacatttaaaatagt

SEQ ID NO: 649560 - DNA, 641 bp, Homo sapiens
tagaggctgtaaatatttcaggtaaagagtactgggctatgcagtgtggagggagaaagtttcgtcggtggtggtgacgtgtattagatgataaggtgtgctagtgtagcgaatttatgtcccatgttttgcggtcttagattaagctgagcaaatattagtagctttccttgatgaagtaattactgataagtcctttctgtaaccaatattcacttcttatttcgtcaaattttcaaaagattcttatagtgatatttcttatgacacagtagtcatctcaaaggtgccagtcacttttcctggaaaatcataggaagtaatactaggcagaaagtgtgcaactgttaaattctttcacatcaccaactttttcacaatcaaagtatttgcttcgtagagtgcttagcaatgtccattatgatttcttttttccattggcaattttgggcttccctcacatcatggaagttagaactggaagggacatgagatcattgggtttattctctgatgtaatcgtttgtgacactgatggccaaaaaaataaatgattgtgccgaagtcgtacgtagctagtataacattggacatccaaagatgggcatcttgactcatagatgatccatgatttctcttct

SEQ ID NO: 649561 - DNA, 1015 bp, Homo sapiens
  misc_feature (18)..(18): n is a, c, g, or t
cctaagatcagcacttcnatattttaaagtaatctgtatcagactaactgctcttgcattcttttaataccagtgactactttgattcgtgaaacaatgtattttccttatgaatagtttttctcatggtgtatttattcttttaagttttgttttttaaatatacttcacttttgaatgtttcagacagcagcaaacagcagcagcagcagcagcagcagcagcagcagcagcagcagcagcagcagcagcagcagcgggacctatcaggacagagttcacatccatgtgaaaggccagccaccagttcaggagcacttgggagtgatctaggtaaggcctgctcaccattcatcatgttcgctaccttcacactttatctgacataagagctccatgtgatttttgctttacattattcttcattccctctttaatcatattaagactcttaagtaaatttgtaatctactaaatttccctggattaaggagcaaggttaccaaaaaaaaaaaaaaaaaaaaaagctagatgtggtggctcacatctgtaatcccagcactttgggaaaccaaggcaggagaggattgctagaacatttaatgaatactttaacataataatttaaacttcacagtaatttgtacagtctccagaaattccttagacatcatgaatatttttctttttttggggtgacagggcaaaactctgtctcaaaaaaaaaaaaaaaaaaaaaagggctggacacggtggcttacgcctgttatcccggcactttgggaggccaaggccgatggatcacctgaggtcaggagttcaagaccagcctggccaacatggtgaaaccccatctctactaaaaatacaaaaatttgctgggcatggtggtgggcacctgtaatcccaggaggctgaggcaggagaatcacttgaacctgggagcggagattgcagtgagccaagattgtgccattgaactccagcctgggtgacaagaccaaaactccatctc

SEQ ID NO: 649562 - DNA, 283 bp, Homo sapiens
taagatgggtcagatggaccctggggtaacaggagtggtacgagggctggggccccctcagtttgtgtaaccatgagttcctgatcacacgcataatttcctatctgtatctatggggtcctagactattaatagtaggcatcgcccaatctgcccatacctcatatacacaagaagaatcttgtgcaagacataggtcggacacatgggcacaccccagatatacccatagcttctaggaggtccattagatggtaatcacttacacacagtgctactacag

SEQ ID NO: 649563 - DNA, 1542 bp, Homo sapiens
  misc_feature (789)..(789): n is a, c, g, or t
tcggcgtgggggccgttggctccagacaaataaacatggagtccatcttccacgagaaacaagaaggctcactttgtgctcaacattgcctgaataacttattgcaaggagaatattttagccctgtggaattatcctcaattgcacatcagctggatgaggaggagaggatgagaatggcagaaggaggagttactagtgaagattatcgcacgtttttacagcagccttctggaaatatggatgacagtggttttttctctattcaggttataagcaatgccttgaaagtttggggtttagaactaatcctgttcaacagtccagagtatcagaggctcaggatcgatcctataaatgaaagatcatttatatgcaattataaggaacactggtttacagttagaaaattaggaaaacagtggtttaacttgaattctctcttgacgggtccagaattaatatcagatacatatcttgcacttttcttggctcaattacaacaggaaggttattctatatttgttgttaagggtgatctgccagattgcgaagctgaccaactcctgcagatgattagggtccaacagatgcatcgaccaaaacttattggagaagaattagcacaactaaaagagcaaagagtccataaaacagacctggaacgaatgttagaagcaaatgatggctcaggaatgttagacgaagatgaggaggatttgcagagggctctggcactaagtcgccaagaaattgacatggaagatgaggaagcagatctccgcaggnctattcagctaagtatgcaaggtagttccagaaacatatctcaagatatgacacagacatcaggtacaaatcttacttcagaagagcttcggaagagacgagaagcctactttgaaaaacagcagcaaaagcagcaaacagcagcagcagcagcagcagcagcagcagcagcagcagcagcagcagcagcagcagcagcgggacctatcaggacagagttcacatccatgtgaaaggccagccaccagttcaggagcacttgggagtgatctaggtgatgctatgagtgaagaagacatgcttcaggcagctgtgaccatgtctttagaaactgtcagaaatgatttgaaaacagaaggaaaaaaataatacctttaaaaaataatttagatattcatactttccaacattatcctgtgtgattacagcatagggtccactttggtaatgtgtcaaagagatgaggaaataagacttttagcggtttgcaaacaaaatgatgggaaagtggaacaatgcgtcggttgtaggactaaataatgatcttccaaatattagccaaagaggcattcagcaattaaagacatttaaaatagtcttctaaatgtttctttttctttttgagtgtgcaagtatgggacatgtctaaagttagggcataggtgcttggatcttgtgtgacagaatagcggagttgctcctcgccatacaggctaaaaccatttcttgtgttaaaaatcgcacgggtttcca

SEQ ID NO: 649564 - DNA, 189 bp, Homo sapiens
tatgtgctcaagagaaactgaaacaaatgtgcatccaaaaaaacttggatattatgaaccctgtttcattctatccaaaaagtataaacaacccaatttttcaccaactgaggaatagacagattacatgtggtatcttacaatgtaatattgtttgataataaaaaggaatgcggtactgacacaatg

SEQ ID NO: 649565 - DNA, 1063 bp, Homo sapiens
  misc_feature (7)..(7): n is a, c, g, or t
  misc_feature (18)..(18): n is a, c, g, or t
gcaacanaccctggtggncacctgtgaccaaaggagtgttcaagaattacatccctcctctgtccccaggccccagacttcttcccagggccaccagccaagcccagaagtgcccagtcagaggtaccagccagcccttttacccatcatctctcccagcgtgcccaatgggtgccaagaccagacactctttacttaaacgccaaagtagaggaaatggaagtggatgacttctatgatggaatcaaacggctctataatgaagataatgttctcagaaaatgtgggttctgtgtgtggcactgatttatcaagacaagagggacatgcttccccttgtccacctttgcagcctgtttctgtcatgtagtttcaacaagtgctacctttgagtgtaaactaaggtagactactttgggaatgagaacatgcaaaatcaggaaaggctgtagaaggaaatataccttaacaggctgatttggagtgagccagaaaaaaaaaataaaactctcattatttgtgtggctaattataattcagcgttatttaagcacataaagaccaaaaaaaaaaaaaggaattccaaaagatccaaactttttttaaactttaaaaaattctcttgggtagtatggtcagttggcactttttttcgtggccataatgtgtaacggtagcttggccccggtcaaaaatttcatttaaaatttcatgggccagcaattcctggttccccctcagaatcctgatttaaatttccctggtggctttggctggcttctcccatttaatagttactggaactttatggcattgtggatctatattggatttccactggcggttgattgaccaatttatttcagtggtgacagccatgactcaggtcccaattagtctggaaagggtccttgggaattggtcccatattattcagagatgcgcaaaaaggtctcttttcccgcgtgttgggtcccttcaaattttattcaactttgggttcctttgggtgacctaagggggttaaggggcggttcgactaggttgtggacttcgcttgtta

SEQ ID NO: 649566 - DNA, 357 bp, Homo sapiens
  misc_feature (77)..(78): n is a, c, g, or t
agacggagtctggctctgtcgcccagactggagtgcgtggcgcaatcttggctcactgcaagctccgccttccgtgnncaggccattctcctgcctcagcctcccgagtagctgggaccacaggcgcctgccaccacgcctggctgactttttgtacttttagtagagacggggtttcactgtagacaggatggtcttgatctcctgaccctgtcatccgacagcctcggcctcctaaagtgttggatcacaggcgtaagccacggcgcccggcctctcttactttttcttacgtgtaacactttattcccagagtcgaccaaacacttagaaaggacctaggaatacctgtcacat

SEQ ID NO: 649567 - DNA, 1414 bp, Homo sapiens
  misc_feature (7)..(7): n is a, c, g, or t
  misc_feature (18)..(18): n is a, c, g, or t
gcaacanaccctggtggncacctgtgaccaaaggagtgttcaagaattacatccctcctctgtccccaggccccagacttcttcccagggccaccagccaagcccagaagtgcccagtcagaggtaccagccagcccttttacccatcatctctcccagcgtgcccaatgggtgccaagaccagacactctttacttaaacgccaaagtagaggaaatggaagtggatgacttctatgatggaatcaaacggctctataatgaagataatgttctcagaaaatgtgggttctgtgtgtggcactgatttatcaagacaagagggacatgcttccccttgtccacctttgcagcctgtttctgtcatgtagtttcaacaagtgctacctttgagtgtaaactaaggtagactactttgggaatgagaacatgcaaaatcaggaaaggctgtagaaggaaatataccttaacaggctgatttggagtgagccagaaaaaaaaaataaaactctcattatttgtgtggctaattataattcagcgttatttaagcacataaagaccaaaaaaaaaaaaaggaattccaaaagatccaaactttttttaaactttaaaaaattctcttgggtagtatggtcagttggcactttttttcgtggccataatgtgtaacggtagcttggccccggtcaaaaatttcatttaaaatttcatgggccagcaattcctggttccccctcagaatcctgatttaaatttccctggtggctttggctggcttctcccatttaatagttactggaactttatggcattgtggatctatattggatttccactggcggttgattgaccaatttatttcagtggtgacagccatgactcaggtcccaattagtctggaaagggtccttgggaattggtcccatattattcagagatgcgcaaaagaaaaagttctcatataccaggtggattgtggtctcatttccaaattttaatttaaaattatggtttcattttgtgtttaccttaaagtgatgcttaaaagtggcctgtaatcaggacacttaggtttgtcgaaagcatctcggactttgtttaacagattgtgataactattcaggtgctcaccaaagaactgtttacaattaattcaaattttctatgaaagttccatcattttatccagcagggagatgtctagatgtggggacgcatgattagtcgcaatgttcatgattagacctattgtagtaagattttataattacccctgtccagctatgttttaagagcggccgacttggtgaaagtttgtcatgttgtgaaaccgggcaaaggtaaaaaaaaaaatgcggcgataaatggcggaaatgcaagacgttaagccgcatgtcctcaacttgctataa

SEQ ID NO: 649568 - DNA, 381 bp, Homo sapiens
  misc_feature (180)..(184): n is a, c, g, or t
  misc_feature (196)..(196): n is a, c, g, or t
  misc_feature (198)..(198): n is a, c, g, or t
  misc_feature (200)..(200): n is a, c, g, or t
  misc_feature (223)..(223): n is a, c, g, or t
  misc_feature (245)..(245): n is a, c, g, or t
  misc_feature (247)..(247): n is a, c, g, or t
cctttgtccttcccttggggattacaagccagacttatcgtccctgcggctcccacatatgcctgaccccagccttaaacatagcccctgccagaggccttgctgggtggagcctctgtgtgactccataatcatcccaccacaacactcatctgtcaaacaccaagcaatctcagcctnnnnnccttcagctatnancnttctggggctaacttctctgccnttgtggttggagcctgaggccncntggaactcttgctaacctgttcagagccaggaaggagactgcacagttttgaaagcacagcccgtcaggtccggctctaaaaaaaactctctgcagcctgtgtaagctattataattaaaatggttttccggga

SEQ ID NO: 649569 - DNA, 1056 bp, Homo sapiens
acagattataatctagtccggtacctgtcatggtaactgtgaactcagtgagttcagattacatcctcgtgtttaccaggccctgacttcgtccaaggacgaacagctggccaatagtgccagtcagaggtagatgcagccttttgcccatcatctcccatgctggcagtgggtgcaagcatacgtctatgagacgcagggtggatgtaatggaagtggatgacttctatgatggaatcaaacggctctataatgaagataatgttctcagaaaatgtgggttctgtgtgtggcactgatttatcaagacaagagggacatgcttccccttgtccacctttgcagcctgtttctgtcatgtagtttcaacaagtgctacctttgagtgtaaactaaggtagactactttgggaatgagaacatgcaaaatcaggaaaggctgtagaaggaaatataccttaacaggctgatttggagtgagccagaaaaaaaaaataaaactctcattatttgtgtggctaattataattcagcgttatttaagcacataaagaccaaaaaaaaaaaaaggaattccaaaagatccaaactttttttaaactttaaaaaattctcttgggtagtatggtcagttggcactttttttcgtggccataatgtgtaacggtagcttggccccggtcaaaaatttcatttaaaatttcatgggccagcaattcctggttccccctcagaatcctgatttaaatttccctggtggctttggctggcttctcccatttaatagttactggaactttatggcattgtggatctatattggatttccactggcggttgattgaccaatttatttcagtggtgacagccatgactcaggtcccaattagtctggaaagggtccttgggaattggtcccatattattcagagatgcgcaaaaaggtctcttttcccgcgtgttgggtcccttcaaattttattcaactttgggttcctttgggtgacctaagggggttaaggggcggttcgactaggttgtggacttcgcttgtta

SEQ ID NO: 649570 - DNA, 728 bp, Homo sapiens
  misc_feature (700)..(701): n is a, c, g, or t
ggccccgggagagccgggtggggcctcgggatgcagccgccggtgcccgggcccctgggcctgctggaccccgcagaagggctttcgaggaggaagaagacgtcgctctggtttgtggggtctctgctgctggtgtccgtcctcatagtcaccgtcgggctggctgccaccaccaggacggagaatgtgaccgttgggggctactacccagggatcattctcggctttggatctttcttaggaattattggcatcaacttggtggagaatagaaggcaaatgctggtggcagcgatcgtgtttatcagttttggcgtggtggccgccttctgctgcgccatcgtggacggcgtatttgcagcacagcacattgaaccgaggcccctcaccacgggaagatgccagttttactccagtggggtggggtacttgtacgatgtctaccagacagaggtgagcaggagcactgagattcatgtgggttttgctcagctaaccccgccgaccccacgcggttttccctgcacataggcgtggtctgaatattttgattctaatagttcctgggggtcacccctgcagctggtgaaccgttgatgccccctgtgtttgggaccttgacatttcgatgtgctgtatttcactctggagtcagagttctggacttgcttcattaaatcacaacagtctcagaaaacanncgcacatatcaccgttacacagggggg

SEQ ID NO: 649571 - DNA, 443 bp, Homo sapiens
ccgcagtactgctcgagagatacaaaatcaatgtgcaaaagatcacaagcactcttatacaccaagtaaacagacaaacagagaagctaaatcatgaatgaactcccatacacaattgctatcaaagagaaataaaatacctaagtaatccaacattacaaggagacgtgaacagacctcgatcgacggagaacaacaacaccactgctcaacacaaataacaagaggatacaaaccacatggaagaacattccatgctcatgggtaggaagaatcaatatcatgaaaatggccatactgctcaaggtaatttatagattcaatgccatccgccatcaagctaccaatgactttcttcacagaattggaaaaaactactttcaagttcatatggaaccaaaaaagagcccacattgccaagtcaatcatgagccaaaagaaca

SEQ ID NO: 649572 - DNA, 487 bp, Homo sapiens
ccaccccttccaacagacactcactgggaagtgcgaccggcccggcgcacctgcgtgggagcaagagccgtcttaggcctcggcacggtcgttggcaggtccatgttggctgctctgagccagattttcgagaagacaggacaggtgatgttgcagagatgcctgcccaacgccagcagacgcacctgctgctcagtggttgaggttcttgagctcggctttggatctttcttaggaattattggcatcaacttggtggagaatagaaggcaaatgctggtggcagcgatcgtgtttatcagttttggcgtggtggccgccttctgctgcgccatcgtggacggcgtatttgcagcacagcacattgaaccgaggcccctcaccacgggaagatgccagttttactccagtggggtggggtacttgtacgatgtctaccagacagaggtgagtgagatgcggggagtaatgacccgcgggcggccgc

SEQ ID NO: 649573 - DNA, 781 bp, Homo sapiens
cttccaagcactggaaacaacacgatggagagcaatgtgaggcgtcactgcaaacaggccgtagtaactcaggcaaatgacaagttgacatactgactaggtcctgtggtttcgctgaatggagtcgggtgcagtgaaagaagatcagtcgtgcccagtgttagggggaaggaagcagtcttcgaccgtgttgtttgtgggaggactagttgaggcaggtgaggatgcatgagagggtctccagaagcttccactgactgctgtgggcgtgcaccgaggcaacagggtctggcgtctgtctaccacagtgctggagtgcgaagtggtagtgatctcggctcatgtgcgaacgctcgtgcctcccaggttcgaagcgattctccgtgcctacagcctcaccgagatagcgtgggattacaggtccagcatgggagctctccgatctccaggagggcaagagtccaaggccatcagcgactcggacgggggtgaactagccctggtacggcgaacaccacagagagctgcaccatgcgtggggccccaggcaagagggactccaaagttcatcatcagcatgaatgagcaactttgagcccagcgtcgacatgggccgtgcccgtcagcgagagcaacgtggccaagctcaccaacatcgtaccgggaccagagctgcaccactggctggatggccaccaatgaactccagcaaacgacatgatcagtcctgcgagacgcgtgcactggcgcatgcagctcagcactcgaggtgaaccacaaa

SEQ ID NO: 649574 - DNA, 205 bp, Homo sapiens
  misc_feature (189)..(189): n is a, c, g, or t
ctgaggtgagtctagcaggatccgcaaaccctaatatagcatcattgtcatgcatcttcatgcaggtcaaatgttcttaccttcatttaacatacatatgttaaagcttaagcagtcttaagcagtttaacatcacatttgctgaaggcccacaacagctcaggcacagttcacagcattccagtcatntggtcacatcaggcac

SEQ ID NO: 649575 - DNA, 506 bp, Homo sapiens
ggccccgggagagccgggtggggcctcgggatgcagccgccggtgcccgggcccctgggcctgctggaccccgcagaagggctttcgaggaggaagaagacgtcgctctggtttgtggggtctctgctgctggtgtccgtcctcatagtcaccgtcgggctggctgccaccaccaggacggagaatgtgaccgttgggggctactacccagggatcattctcggctttggatctttcttaggaattattggcatcaacttggtggagaatagaaggcaaatgactaagaggagaggtaaagacataaaaccaggagggagcccccggttcacatggcagcaatgcagagtgaaatccagacactgcctgtccatgatgttcgtggcaacagcgatcaggttcagctggaagtctgttttgttgatgcactgttttggggactataactttaaaaacaaaaactggctaattttgtcagttcgcggtggcagccttcagataaaatg

SEQ ID NO: 649576 - DNA, 128 bp, Homo sapiens
gtaactctagaggatcgccctgggtgctgcatgtgcacactgcccgttgtggggacatggaccagacccccgcatatccctctttcaccgctccaagcacccaaacagtgacctgaatgtatggacaa

SEQ ID NO: 649577 - DNA, 209 bp, Homo sapiens
catgtcgcgtcgtggcggcttaccccgagtatgttttccttgatttgcggtatgtgctcaaattagttgttagctatttcatagagctatagtaagatttttggaactaaattttcaaatctaatttaatttttaaattatttagattcctactgagctctggggcactgtgcttggagctgttggaaaagaaaaggaatttggtcttg

SEQ ID NO: 649578 - DNA, 107 bp, Homo sapiens
  misc_feature (89)..(89): n is a, c, g, or t
  misc_feature (100)..(100): n is a, c, g, or t
gcggccgcctactactactaaattcgcggccgcgtcgacgaccttactcaactgattatcaccctccctgtcatacaatacttcctggnctcgatttccntgggggg

SEQ ID NO: 649579 - DNA, 355 bp, Homo sapiens
cctgacagaggagtattcgtagatgtatacaggtgctacattatctcctttcaggatggcatatctgcagatgatttttagtgtctggtgccaagggcatcatatttttggattgaatgttttctgttgtaaaatggttggtgtggacagacgataagctccaccattacccctgaagcttgtggactggggccatttgggtgaggggcttgttacacaccgactcattgtctgatctttcacaataaatagcagacaggtgaagagctttttagagaagtggaacgttggtacccttggatttgcctggtttctgattttcttttgttgtctttaagtggaggttcattaagtt

SEQ ID NO: 649580 - DNA, 134 bp, Homo sapiens
gatcgacgaggaaaacagaggggtttttttttacgccaaaatgggcctgtggacctcctctgttttcccaatgagtccgaggctaccggaagttatcttagggcctctcctgtgtgcattaagtgtggcaagac

SEQ ID NO: 649581 - DNA, 156 bp, Homo sapiens
actatacacagttatggggagagtgagcaggagatcaccggcagaaacgccggtagtaagccgaggccacggcggctgctgggcgacagcttcgcaagcttcagagatgctgcgcctgacgaggagcagatccaaacttccattcttcattatgac

SEQ ID NO: 649582 - DNA, 1640 bp, Homo sapiens
ttgaacagggcgttgcgcgagtgcttcccggtttgttgggcgtatgttcctcaggggagtgtcatgcttgttatattgtgttggaagccgtgttggtgtagtggtgtgtggtgtatgcgggttgtttgtcggtgtcgatggggatatctgtcgttttgggcgtttcgggtgatgttctagtgtgggtgcgtttttgttgggtggtggatcctttgtggcccggttgtgggtgtgctggggtatggagttgggtttgcgctatagctcgtgttgtgtttagttgccagccatggtagtgtttaagttattgtttttttgagatatcctttgtgtgtggataaagggtgaatatgtttgtaagccggtttgtggtttgttggggccggtgactatggtgtgtgccgacgtggggagttccggggtgttgcatggatgttggcggctggcacgtagatgcgtgtggcggtgtgaggccgcggtttcgtgttgctaggtgtgggggaagtttgggtgtggatgctggtaatgttgggtgcagaattgggcgttcctctttctagcgtgggatagtgcctcctttgaagttcggctccgtttgtcgatgggttattggtgtcgtgcgaggcgttgagggtggtgtgggcgctgtagcggcgccggtgtgcgaggtgggagttggtttatagtctcctcttttcagttggggcttcagtcgggaggctctcttctggtgcgtatcggcgcgtgttgcgtggaagttcctcccctgggtcttagggtgtaaagcggggttagtctaggtgatagggggttagggctgcgttcccctgactagtttctttggtgaaatgggtttggtggtggataatggggcctgcttggtagttgattgagtgtggggagataagttttgttatcagggtggggcaatttttgattgtgtgagtgattgagaagcgactggggttaataaggttcgtagtaggggcgggcaagtggggagggggaaaaagcgttggtgaatgctcgtgtgcttgatcgtgcatggtgggtgcgttgggctgagatatgcgcgggtttgtctcttggaggtctcgcgcgtagttgcgtggcggttgtgttggatgggagagatgtagggtgggatggacgggtaggtctcgtgtggttctcatgcattgcgcgcaggactctttgaggcagtccgtggtgtatgggttgcagtgtgttatggagactagatcgctgcagttagtctatgagagggagtcagtgtcatgaggcttagtcaatatgtctcggggtgcgtagtgaggtctgcaggcgcttttacctcatttcagcagtagcagccagtgcagcaggcgtgtgagaggtgcgaggtcgtgtagtattgcttgggtaaatatgttagatgtgccagttctaacttagccgcaaattagtgcatgaatgtcattctcgcttgttgagatagttaggactctgtataatagatagtctctattctagctaccaaccactccttgatcctgtccgcttcattagtggctgttgtttgttgtacttccgtttagacaattgttcttaatggcttgtacgtacatatggattactcgaatatgtgtgttaatcaaatt

SEQ ID NO: 649583 - DNA, 462 bp, Homo sapiens
tgactgtagtacaagcaaactatgactatcccattattctttcccagtgataagtggaggggtcatcatatgagccagtttgggttaatgagacataacaggaagtctgatgtggcagtttgggaaaagttttatctgataaaaggagagagagatgtggaaaaggctatatccctttttcttctggctggggacattctcatgtgaaaagctgatccagagacctgatctggctggaacgggtgacctagccaaacctgaactacctacctcgggacttttaaggagaaagcccatatttttccaagccacgttaagtaacatatgctggttatatataggcaagggcaacctcaataacacagggggacacggcgtaacgtatttcagttcatagctttaacttaaggtaattaaactttatacttggtatccccctaaaggtcccaggtagagagccgg

SEQ ID NO: 649584 - DNA, 428 bp, Homo sapiens
  misc_feature (17)..(17): n is a, c, g, or t
cccaaaggggccccccnaaaaagaaaatggtgggccaaagttttttttttttaaaagaaggggggcggaaaggtggttttttgaaattccccttttttttaaatccgaagagggtggtaatcaaggaaataggaaggtttgttctccccgcgccccattttcttaaaaagatttttcatatccaggataataagacccaagctagtggctgcactgttggtctgctgcttatttgtatttgttgggcttctgtttatgttgtagaagctgaaattctagcaacatgcttcaattctgttattttgatacttatgaaaatgtattaggttttactatattgggcttttgaaagccataactcttaagaactttgtttttgcatattgtttgctaattctttactttaataaacctcaaaacctgaaaaa

SEQ ID NO: 649585 - DNA, 613 bp, Homo sapiens
gcagcactttgctatttacagccggggctcccgaggcggcagaaagttccggccactctctgacgcttgggttgggcgaagcgaggaccgtgccgcgccatcgctcgaggatatggagctactgtctccaccgctccgcgatcgtatgaccatgagcgggccccgagggatctctctgtcgtccttatgccgacatagcggacgacttgctatgacggacccgtgttgtcgactccccggacctgcgctatcttcgaagaccttggacccagacagcctgtatgcacgtggcgtcgcgctcctggaaacccgaagagcactcgatacttccccggcgggcgagtgacatcccaggacgctccggaagcgtcagcggtgcaggacggaggcaatgatgcagcgctgccctaggcgggcactcactcaggccgggccgctggcctaactagtgggcctgcaagagtgtgcaatgcgcaagaccaccaacgccgaccgccgcaaggccgccaccatgcgcgagcggcgccgcctgagcaaagtaaatgaggcctttgagacactcaagcgctgcacgtcgagcaatccaaaccagcggttgcccaaggtggagatc

SEQ ID NO: 649586 - DNA, 603 bp, Homo sapiens
aaacagctgccagaggcggataaagtccgttacaagaatgaaatcaaatcgtgggaggagcacatgatggagatcggaagagaagatcttttgcggagaaagacgaagagcgccctcaaagccaaagccaaaaccaaaaccatagccactaaaaacaggaaaaagacatccaaagtgacagtgataaaggcaaaagcgcccaaaaagaagaaagatgctagtggaaaagctgtgtatttctaggactctgatcaacagagtgtgttgtataaaaaccacaaccgtcctcaatacagtctgcgcttttccgttcttagagctgcatttatatagtgttcatgaaggttttaaaacctgtgaagatgccttcttcatcttttcaataaattcctctttttgctggtttttctgaatcatgcaagcgatatttgacctccccatgactgctttcatagtattatattgtataaagtgatataacatttcttaaattgtactttactgacacgcgtttgcttagaatgagtttgctttaaaagaggacgccatgttgtttgtatgtctttacttacaaaataaacatccactttttctataaaagca

SEQ ID NO: 649587 - DNA, 513 bp, Homo sapiens
  misc_feature (371)..(371): n is a, c, g, or t
gactctcgagtatccacacctcctaccccacgatttgagattttctgcagggctccctagagagttctctcagcaaattcacaggccccagtgagaatggggaatttgggaaggccactggaaatcacagttctcatatatatctccatggcttaccctttaggagagcaggaatttggaactgctagtcctctcttaggagagtgcccagagaagaattcatcatttaaatagcttcaggggtcagcagatcatgggattgaaggctgcagagagggctggggactggagtctaccagagtccaagtcttgagtgaaggcattcaaagtaccatgccagttaaacacagcctcctgtgggcagaatttgngatttgccagttggtgatgccgcgcaagagtgagtaaaaagggatggaggtttcatataccagaatatgaaggatgggaaaggttgggattgaaaaaggaatttgtcagtgaggaaggtaccgggggtaggaggtgggtacc

SEQ ID NO: 649588 - DNA, 139 bp, Homo sapiens
cacgaggaaaacaccaaatggcggatgaccccggtgcagcgggggggcccgggggccctggaggccctgggatggggaaccgctgtggcttccgccgaggtttcggcactggcatccggggccggggtccccgtcgtgg

SEQ ID NO: 649589 - DNA, 102 bp, Homo sapiens
gctctcgaggatcccggctttgtatgattatgggcgtgattagtagtagtactggttgaacatgtttgtgggtgtatatagtgtaattggaggttatggcat

SEQ ID NO: 649590 - DNA, 113 bp, Homo sapiens
tacagactctaaccactgttcgtcacgttccgcaggcttaaggagcgtggatacctggctccgagtgcttgccaagccccagaacacagctgaggttcagaaggtccagctca

SEQ ID NO: 649591 - DNA, 265 bp, Homo sapiens
tgtgaccgagcatctggtagagaggggcttttattcttaggagacaaagccggtttctgtgggtgtaggattctccagggtctccaggctgtaggacccagaggcttaatcagaattttcagacaaaactggcacctttcttttttcccgttggtttatttgtagtccttgagcaaaccaatgtctctgttcgaaagagggaaaataaaccaaccggaagaagaaaatgatccggatcattttcttcttccggcaatattaaccc

SEQ ID NO: 649592 - DNA, 263 bp, Homo sapiens
gatgttataataagccgtgcaccatttgtatgtaaatactccggcatcttcttatccatcaaaaatcactttaactttactggtccctttactcttccacataaatggtatatacaaccactcaggtccaaggaaaaagccggttagtcatatcatgggacttacatggaattggtagatatagaaaaaacagatatctttatgagtcttcctcatcataaaaatagtatgtctccatttcacttatgtctttaagtgtatta

SEQ ID NO: 649593 - DNA, 1540 bp, Homo sapiens
gatgtctgtcgaacggctgtgggcgtcttgctgcctctgggtaggggcgttaaaatccgttcttgcagaggcacacgtctctgtgcgacgcagcataatgcagtttagctcttgcagcaagtgacgcttgtagatggacaaaacgacaagaggacgcacacacagaccgagcaactgctctgacggaacagcaaaccaaggaaaatttacacagatgcttttgttgaaactaacttcggcatagcagggaccaaaacggatggaaggcatattagcacttaatccattgacacttacccacgcgctggccacatggaagcaacgccccttgggcgggctttcggaattgtctaccgacaacacgcctgcatggttacctggcaacgaactttccctttacacacgcattcccttagacccacggacgggaaaaggccccaccaatgtgggaaatacaatccaccccttttttggaccaggcactcttttcaaacgtggcaaccggctttgcttgagcaccgaaccttgggagctaccttttgggccatcgcgacggacttcccccccagttgagtgagggaccacacttaccctcacgaagtgggcccatttttatgcaggcccgctacaatttgggcaatggcagttggacctgcacgtcctccaacgggggtagcagccaacttaacaggcccttgtgtcgggacacacctttgtgggccggaagccggcatggtttggccttgagaaaggacaaacctttgggcggcgtttgcacaccgacactcactttggacagcttggcacgtccgtaaaacgggtatacgccttttcctgctacgccctgtagttggcacgtttcgtgtcacacacgaacatagcttctggggcaccgccaaacgcaggcaccatctgcggttggacacatttccggcctaggaaataactttttataccactcctcagctggacaacgcgggaacggtctttcccaacactatcggcgtcgttacatctgtacattctgcacgctttggggcagtgtgaacacaacactcattcatcacacaccgggcacataaatcttatactcctacaagggcgacacgttaccaaccaccccagcatttcagtcggcaacaacgttgtggtattagtcacagcgtgtctttcacacccacaggtccgtttgatattttactttcacactaacatatacttcattggactgaccctcatgtgctacactcgacccccacttgatctgtggcaaccaacacctaaaaccgaaacgcccaatccaacacttatacactatatcactatcattgtataaattcccccttcaataaaaaggcgacacctccatcacaacgacattactagtcgcacagtaccgttaaaactaactccactttccctatgcattacttatctgatccatcatcctttgtcctatacatcactcctatctctacccatattagttaacacctgaccaacagactgcgacagacccacctattattcacgtctcaca

SEQ ID NO: 649594 - DNA, 80 bp, Homo sapiens
  misc_feature (31)..(31): n is a, c, g, or t
ttcaaaactctttggccaatttcgggttganctcctcgggagaccgccgccgatgacatggtcatcgggtctgtgtggct

SEQ ID NO: 649595 - DNA, 443 bp, Homo sapiens
  misc_feature (297)..(297): n is a, c, g, or t
  misc_feature (352)..(352): n is a, c, g, or t
  misc_feature (372)..(372): n is a, c, g, or t
  misc_feature (391)..(391): n is a, c, g, or t
gaacagggtcagcatccacggcaatggtgccattccagacactgcatgtgtcagcctcatgactacaaaccagaccagatgggcttggctattgtcatgcccaagaagccacagctcagagaggtttggtgacctggccatgaggacagagctggtagtagagctggggctttcagacccagggcagcccagcccttttccatggagctggagttcttctggccttctggccttctccctttccaagcttctgcccatgtgtgtgggccagtcagatggtgaaggaattaaaccacntaaaaaaggccagacaagggccggggtgtggtgggcttcacacctgttaatcccngcactttgggggaggccganggagggcagattcacttgnagattcaaggagtttcgaccagcccttgggcccatgggttgccccccccctt

SEQ ID NO: 649596 - DNA, 864 bp, Homo sapiens
  misc_feature (232)..(232): n is a, c, g, or t
tggaagttgtccaggaaagaccgaggcagacgtggctccctgctgcaacgatgtgatagacaggctgacaaaggttccccgatgagcaagggtctgccaacccggcactggcactacaggggacggggctgacaggcccggccgcgagaggctgaacgggtgcagaagggccggaagccctgatgcgtggagctggatgaggaagaggctcgtgatccgccccccttgccgngggagggcccagcgcatccgacaggcagctagcagctgactctcctagtgggttcagcaacaggggcggggccgctgcccagtgcaggactgcctcagaccaacacagggcgcagctcctcccggcggtgggggccagggttcaccagcagggcagcggctgagcaagggcatatcagcgtcctccggtggtgggggccgggatcaccagcaccagagcctcgcaagggccccttccctcctccagaccttccttggccggtgacggctgtgacagtgatggcaggttcagtgccttcagcgcagagcgtggatgctctggaatcacccggacacctggccttggagggaccctccagccaccaggaatctgctttggagggaaatgtctattatttctaccgggaatattttagagacttggggcatggctggctcctcccgccagccatgcaaacctgcaccttccgcttgattcccgatccccctgcgtgggccgcattcctggtcccatgcctgcgtccatagatggggcctggctagtgtcgtgtcttcatttgaccccaaacagcgtcaatgcgggttatggggagccttggtggagcattattgagatcggatatcgatcagtgc

SEQ ID NO: 649597 - DNA, 362 bp, Homo sapiens
cccggggcacaccatggaggtctcctgttgaatggcctttcgagcctatccgagggacccatccctcacctgggcaggaccaacatgggcatggccggaggttcagaagtcgaataaagagaaagggacagagagaatattgggagaaatattctatcggatggggggaaaactttccaattttgatgaaagacaatataaccatctaagaaaatcaacaaaattcaagtaagactttgagcatcccacttttgagattgtgtaccagccgcaagcccttatgacacactttttccccaaagtagagggctctgacaatgttgatcccaagagagatgggaaagagcattgaatgaggattc

SEQ ID NO: 649598 - DNA, 467 bp, Homo sapiens
ttgctctagaaggatccctgccttgatgtactgctaccaggaggcaaggcagaatgaatcgcttgaacccgggaggcagaggttagagtgagccgagatcgcgccactgcactccatccagcctgggcaacagagtgagactccgtcccacaaaaaaaaaaaaaaaaaaggcggccttggataatacatacccaggaggggtggtgtgtcaataaattttatcctagaaccacgcggggggcagatctggccatagtgggccaggcccccaaggctaaggtatgctaccatgtattcttctacccaatccagtctaagagcacgctgatatattggacctccatgggttccctcttcccagttaaaatccccccattcgcccaaggtggggggtccctaccatcccaataaggaggctctcacattatgaacccagtccggggttaaaccccctgtgaggccagttg

SEQ ID NO: 649599 - DNA, 1064 bp, Homo sapiens
ggggggcctcgcctgagagagtgaggaccggctgcgtggaggagctgcaggactgaggtacagagtgccagtgcgcccaggacaggacccagcctggacttgactccctgggatcccaggaatgggcacaccctttcctcaccaccctgagtgaggcgctgccccctcacatgagacctctttgccccctgtggccaggcagatgcaggctgctgctggtccggggaggggcccacatggaggttggcacgtgcccggtgaagcaggatggcctgatgggcctggcgctggactcccctgtgtgcacccgcttccggacgcttccacctgtgtggctgactgcgccggtgccccgctggggactggctgctgggtgctcgctcctgcgccctgttcgccggggacttggctcgcgtgcccgacgggtgcagcaccaatggagcagcatgttggaggctgctgggtgctggaaccaggtatcctgagcgcctgctgcccggtcgacaccgcaaggccctggcgtgtgcccagcctggcagcccgcataaccgggggaggaccgccgtgtggaccatgctggagggagcctcatggggggccagccaatgtcattccccccggattgcgttcgcacaaggacacggaggtgctgcctcacgtgattctgacctgccatgtgcacccattggagtgaccaacaagttgctggcacacagggcgcgcccatgtggcggcactgcactcccctatatgacacggaaacacagaccccctatgtcgcttaagggtgtcgtccagtagctgctccttgtcgtcggtgattttccgccataggtattggtttgacgtcactcatacacaagtgatagggatgttcaccctgtacatgatcacctccggtattggtacagaccacatgtggtcccttggaccggtcccatataccgctatactgtgcctgggatgatccacacagttacgctgtccactcgcgtgatattgtctggtgtaacaaaacgatatccgtatatatatccggagcatatcatcgtcatgtggattgc

SEQ ID NO: 649600 - DNA, 1787 bp, Homo sapiens
  misc_feature (1091)..(1091): n is a, c, g, or t
cgggcacttgctgaaaaattccccaggtgctattgtgtactcgtgtcggtggcgctggggacctctcctgtaaaggcagagcggcagggcggcccggaagttcgtgtgtagctcgagaatcttgccctgggtactaagtccatgttgcggcgttggcaggctgcatgacgcgaagctcgggcgacccagagtgacgtggagctcgactgcggagtgcagcgtgcacctggggattgcgttggcgccatgcgtggcgccaggggggacactacgcaagtcactagcaatcatgggacgttctctatgttgtgaggaaggcgttctgtcaataggcagagagtaggtaggttcaccaatgggtgagcgcatagaagacaatctgtatcgtagaaaagcaagagactggtctcctaattccgatctagacgtcgacgttgtgtgtacctcgtgtagtagagagactaagattgcaccacacacttaagcaataggtagagagcttggttgtttccctcctgtacacagtagtggaaccccattcgtgacctaataacgaagtcgcgtatgggggtaaagcgccaggtgactctctctctctctacgcaagagttggaggtcatataatctcgaccgtgttgcagatgccgttgggggctgagtgcaatgcccattgtgttaatggaggaccccgagaaggcggattggggttccacacgacatggcgacttaggtggggatccaacaattgtggacccgttttcaacgggtggcacaccaaaacgcgaacctgtgctgcgtaaggggggatcttttgaacgacattaggttacctagccgggttcgacactacaggcgtgcacaccacaacgctgggctcacaatgtagcgcagcagagaccaagtgggggccatagcaccccctctgggtgcccttgggattaggtggaacggggaaaaaagaaaaacctgtgggtaagattccaaccacggtttgttgtggcggggtaaaaaaaaaggccctcaaccaccttctccaactcacttttcggcgggcccaatttttctttaaatggcgtggagaggaagaacgntcatggaggaaggtgtggcctgggcccggagaatatcaattgacaccaaaggcttaaaacaaagttccttttgtacagtatattatggcacagggatttatagtgcgctggcaaggttgttaaaacccccaagggggagagattccactccctttaaaattgcgggagacgccaccagtattctggtcccaagcggacacaggcacaatgttttggtgagttgttcgcacaagagcgcgaaagaaagatgtacttgggggagaacagggggtatgtcgaacggggggtgtgtagtggaacaaaagaatgtggtggggagtcttataaagtggcgccacggctgtgtgtcacgcacctgtgtgactaactgacaaaacccccaccaagtggagaccggcgccgcacgtagtggtaaccggcgtgaggaacaagacagcgcaccagtggcggcggaacacacaagggccggggaaaaagggcgacaccaatcttacgtggacagaccaatggccaggcaggagagtgaggccacaaaccacagggcgacgacacaactaaacagaagggagaggacgagaggactaacaataggtataagtgacgcagaacaatacgcggctagcgagcatatgagaaacgaaccgcgatcagactgatataatgaaaggcagaagagacttaagcaaagcgccgacc

SEQ ID NO: 649601 - DNA, 412 bp, Homo sapiens
  misc_feature (88)..(88): n is a, c, g, or t
  misc_feature (90)..(90): n is a, c, g, or t
  misc_feature (100)..(102): n is a, c, g, or t
  misc_feature (104)..(104): n is a, c, g, or t
  misc_feature (106)..(106): n is a, c, g, or t
  misc_feature (109)..(109): n is a, c, g, or t
  misc_feature (118)..(118): n is a, c, g, or t
  misc_feature (125)..(125): n is a, c, g, or t
  misc_feature (130)..(130): n is a, c, g, or t
  misc_feature (136)..(136): n is a, c, g, or t
  misc_feature (143)..(144): n is a, c, g, or t
  misc_feature (155)..(155): n is a, c, g, or t
  misc_feature (185)..(185): n is a, c, g, or t
  misc_feature (190)..(190): n is a, c, g, or t
  misc_feature (199)..(199): n is a, c, g, or t
  misc_feature (214)..(214): n is a, c, g, or t
  misc_feature (221)..(221): n is a, c, g, or t
  misc_feature (250)..(251): n is a, c, g, or t
  misc_feature (262)..(262): n is a, c, g, or t
  misc_feature (265)..(265): n is a, c, g, or t
  misc_feature (283)..(283): n is a, c, g, or t
  misc_feature (285)..(285): n is a, c, g, or t
  misc_feature (385)..(385): n is a, c, g, or t
cccccacaaatggggccttaaaaataaaggtttttaggttttggtttttggtcataattttttctccccgttccccttttgttttttngntttgtttttnnncngnccntgtcaaaantttgtgntgganggaacntgtttcnntatggcctccnttgcccaagttgaaacaggggcccatcatnatgtntgtttccanaacagtgccttggtnatcccanatccccggaccccgcctgggacccccaanntgtgtcctatnaangggtgtggggtaaggtantnaaaagggcggtagttggtggtggaacccaaaaacggacgccggtgcttggaggggttcttaaattatatttaaaaaagtaactttttgtataaataaaanaaaatgggacgtgtcccagctccagga

SEQ ID NO: 649602 - DNA, 468 bp, Homo sapiens
  misc_feature (11)..(11): n is a, c, g, or t
  misc_feature (464)..(464): n is a, c, g, or t
cgtagcagcgngcacacataataaagaagaagataggaagcgagtttccagatgagtgccggctgggggagctggggtgggatttagtctgtgtgtggaggtacggagtgagtgatccctcgagtctgatagttcgttcgcctcggagtggtgggttgggttggatcgggggccagtggtttcgtggatgggcgagtaaggggggtagcgtccagtttggaattttaggcgagttaaccgagtaggcaggtcgaggcgatgagtggggagtgttcagatggagttggatgggggattgctgtgaggtcggctatggtgtacctggttaaaggtagccgaggaaggtgatgtggtatttcgaagtgggggagaggagtgcgtgcggtgtgggaagctgtagggatggaggtagtgtggaccggtcgagttataagggtttgctggcattgatgtggctgcgctgntacg

SEQ ID NO: 649603 - DNA, 466 bp, Homo sapiens
  misc_feature (413)..(413): n is a, c, g, or t
  misc_feature (423)..(423): n is a, c, g, or t
  misc_feature (444)..(444): n is a, c, g, or t
  misc_feature (452)..(452): n is a, c, g, or t
ctttctgaccccatagatttgcctcttctgaacatctcatataaatggaatcatacaatatgcagccttttgtgtctgactttttccacttagcataatggaaggttttcaaaattcattcatgttgtagcatgtatcactgtttcattcctttttatggctgaatactctctcattgtatatatactgctttagttaccttttcatcagttgatggacatttaggttattatcactttttaactattacgaataatgctgctacaaatgttcatttacaagcttttgtgtgagcatatgctttcagttttcttgcaaatatacttagggagtaggaatttctggggtcgcatgggtaaacatttgggtggcactttgtcctctctgtatgttttaccattttggagggaacngttaggatcntttcccaaagcaccggcaccnttttatcntcccaacagcagct

SEQ ID NO: 649604 - DNA, 261 bp, Homo sapiens
  misc_feature (11)..(11): n is a, c, g, or t
  misc_feature (257)..(257): n is a, c, g, or t
cgtagcagcgngcacacataataaagaagaagataggaagcgagtttccagatgagtggggagtgttcagatggagttggatgggggattgctgtgaggtcggctatggtgtacctggttaaaggtagccgaggaaggtgatgtggtatttcgaagtgggggagaggagtgcgtgcggtgtgggaagctgtagggatggaggtagtgtggaccggtcgagttataagggtttgctggcattgatgtggctgcgctgntacg

SEQ ID NO: 649605 - DNA, 1342 bp, Homo sapiens
  misc_feature (474)..(474): n is a, c, g, or t
  misc_feature (547)..(547): n is a, c, g, or t
  misc_feature (586)..(586): n is a, c, g, or t
  misc_feature (633)..(633): n is a, c, g, or t
  misc_feature (652)..(652): n is a, c, g, or t
tgatgttactaacagaagcacagaagaactagtgaacactagtaccttacttattgggccgtcctgaacatgagacgtgcttaggttacaaactacgtacaggccgtcactataagttctgcatccctcagtgtgtggcacgacgtgctaggcctagaggcgtgtacgtatcgctatagcagaccgcgactagtcatatcacaccggtcagtccgcttccaccaggcacacgactgcctactattgctaatagtcacacttcattttctttcctattcatgaacattacacgccattgcactagagtaccgagaggagacattctgagccacaacatgtatctagcctacgcgctccctatgggtaattcaggttgtgcgcgcgcaggaatagtgtgtcagatgctcacgcactgggagataccatacacaacactatagacttatcttcgaggtcttgtagcggcatcacacntcggtcgatctctatagcgatcacttgctggttagcagcatcttgacataataagcgcttgcgatcgcgtacntgtgcacgccgagagatcactccgtgttgtggcaatgancgattcctagacccaatcacacgtctatggcaagtgtggaaactaangttcccccgaaaaactgcnataggccagggcacgttccccgcattatgatctcgttcaccaacacgagatccctattcctccgcgtgtaatcggagctcgtttacgactaatgggatggggttcctacgcttacttaataacctctaaacgggagtgaacacgagtgccataattgtttccactacaatccaccaacaagagtatgaatttgaaaatttatgtacaaatacctaactcctctcagccacttgaaaggaacggcacacttagacgcattaagggcgcctctcccatactcatcgggtgccaatgactttcctctgttctttgaacgtacaagaagtaaggtaccgattcccaataccactttgtcttctccgtacatacgtgcgtccacactagagtgcgcttatcgccttttgcctaggggaattctggatagcaaatcacaataggataaatctggggaacgctcggtggacaagcatgcgggaaaccagcggaaggcttgtagcctcgttcaggaaccccccgcgccgggacgcattgtggagaggggagtgtaatcgggccacaaatggcgattgaatatgggcaaacgaacgcaataagtttctggtggaaggtaaaatgccggtgtgcccaatctgtcaatgcaatgggggttgaggtaatgtgcggtgaaaagtgggataacgaaggggggac

SEQ ID NO: 649606 - DNA, 377 bp, Homo sapiens
  misc_feature (171)..(171): n is a, c, g, or t
  misc_feature (269)..(271): n is a, c, g, or t
  misc_feature (313)..(313): n is a, c, g, or t
agccatttttctccccaggggcaggagggggagacttccaccagcaacatggaatcttcagtggatgcagctgaccaaccctcctgacttctcagtcttttcccaccactgctcaccctttatgttcagatgtattcagcactagataaccatacttattacctataagtnatgtgtgtgtgtgtatgtggggggggggataattttgtactttaagaataaatatatataagctatatgtgtaacccctttcaaacaaaaaaactatnnntctgtgaaaaaaatcagcattatatttcggcaggctgtggtntttagattggtggagctcctgaccagctggaaatccctgtccccactttgaccgtattccctca

SEQ ID NO: 649607 - DNA, 539 bp, Homo sapiens
cgaacccaccaacgacaccaagcacttgccgggcagaccaggcgtcgtggaggcgcccgcagcccccccatcccccccgcaaggacgcataccgagagtgcgtaatgcttggcgcggtgaccagaactgtgcgcttcctgactgctcagtagcatgatgccacactctggatcccaggccgggtccctgatggattctgggagggagcgtcctcttttttgcctcccagatctcgggctctctgataaccctgaggctgggttttaaaatcacggctcttccaagttacacgaagagtccatggtcaagggtcaagggctggtcttcgacccatcgggatcgtctttcttgagaaatgcctgagagctaagcctaggagctgcccagggacaggattgccaaagagctggagccgagcgcgaagggctgggaggcgcgtgggaggccccttacacaccggaccggggctcctcaaattgtttctgtgtctgttgattacgctgtctattattaatcagtatcgtcccctgttttactaa

SEQ ID NO: 649608 - DNA, 1519 bp, Homo sapiens
  misc_feature (1413)..(1413): n is a, c, g, or t
taaacaaacccggtcctggggggggtgtgggtattaactactaacgttgagatgatattcttttaccgggggaaggcgcttggtgaagtaggccttatttctctggttcctttcgatccagggcaggaattgtgaagtagactagaaaccgaccgggattacctccggctcgtgaactcagaatcacgttaggcacttataatcgattgaacacaaagcgaaaccttttaatagcggcgtgccacccatggggaagtgttccgtgaatccaacattcgaaggtgcgtaaaccacatatgtggtggaatagtgagacctcatagaaaatagagatgtgcgccgtggtaaatccccctagggtatacactgtggtcacccgagtggggctcaaaggttactgtggactcaagtgtgagctatatagatagctccggcattacgcacgttgcgcatgaacagctcgtaaaaccatgtgtatacgtgctctcagaaaaagagcatgtgcgagtcacactagcctcccaaaaggcatcccccccacaaaacctgaaaacaattaacaaaaagagcaagagctaaccaggtaccaacatataacgagacccgagaaagggagaaatagcgggaaaaaagcgacaacaccagaaggatgagagacacattaaacaagaccaacaacacatcacaacaggacaacccacacacacaagagacgaaccactcacagatcacgcccaacaatgacggcccacggagagattacaaccatagccccccccgcgcacaccctcatcaacccaatcagccgacaggcaaggagggatcacaccaacctcaacacacctcagcggcaatcaacaacaacaatcagcacacaacagaacacagacgatgacaacagcccacatccagagagacgacaacgacccaactgaccatacaaaacacacagatgaatcccccaacaaacacttatacagctgcaaaacccaacaagagtgaaaataacatgcaccacacaccccctcgatggacaacacggagagtcataagtggggatcaaagcggacagacaaacaggagagaacactaagaatgacggcaccccactcgagactgcaagccacgcaaagcacaccaacgaccacatagtaccagcaggcacgacacaacaacggcaggaaacatagtcgccagcactcatccgtgtgtccaacgcgctgtttgtgggcaacagcaccaaaacacggacaaaaacacgacggcacctggtctccgatatcactacgagctacttgcacctccgactacaccacaaaggagaagacaatgcatcacactgaacggaccacacagacaacgaagacacacaaacgagaacacccagacgacacaaccagtaccctcacatantgtctacaagaacaaactaaacagtgaaatagtatactaggtaaagctaaagatgagacaagaggagcacgactaaccgcacgaagtcgagcacaacgaaaacacc

SEQ ID NO: 649609 - DNA, 128 bp, Homo sapiens
ttggtggcatattcataagcatgttgtcatgcatcaggtggtttggccctctccggtgcgatgtcatctgtggtgttccttgtaccatttacccagcaatgatatgatagggatggtttttttttctc

SEQ ID NO: 649610 - DNA, 347 bp, Homo sapiens
  misc_feature (78)..(78): n is a, c, g, or t
tggcccatatgtcatgcctcaagttcttgataatgtgtgtcagaccagacagttagcgtttatccaaatggtgtgaanaattcatactcatctttctttaaccgaaagtgtctagatccaatgtggctcaggttcacctcattctcctcaaataagcgcaatcctttggcgatcgcagttgtcttcaatatagctgtgtttccgtgtccaaagtcagagagtttcctgcacaagcttgggttttccaggacccatgtgcacattctgcgctccccgagagtgaggtctctgcgctttataggcgcctcaggcacagacatgttcgcacacagcacgtgggtctagag

SEQ ID NO: 649611 - DNA, 457 bp, Homo sapiens
ttttttttccttggtatgtatgtctgacaattactagaattaaaaatgaatcccagcagttccaactggccagaatttgaggagttagagatgtccagccgctgtactatactcagctatcattcgagtgtagtctgtgggtggttgttttattaaaagttgtaagtgaaggccaggaacagtgactcatgcctgtaatcccagccctttggggggctgaggtggtcagatcacttgaggtcaggagttcaggaccagcccggccaacatggtgaatccccatctttgctggagatgcagcaattggccggacatgggggtacatgcctgtggtcccagctccttgggaggctgggtcgggagaattgcttgaccctgggaggcggaggtttcgttgggccagggtcgcacctctgtacttcagcctgggcgacagagtgagactctgcctcggtca

SEQ ID NO: 649612 - DNA, 923 bp, Homo sapiens
gctccagcagcaatggcagtgacggctgttgtgctgtgcgcggacgtggcttgtgctgtgtggtggctgtgagtgaccatgcaatgccacgcggcttctgtgctctggatcagtccgacgaatgtcgaccgtgtggctgctggtgctccatcctgtggaacgcctggtgtggtgccttctggaaatgagagatgcatgtgctgaagatggaacagatatttccaggtgaggctcacctggtgtcccaagtccagcccatggatctcccaatggactatccaatccattaaacttgccaatcgcaccacaccacgattcctacgctggtgccatatgggccgcaccacatcaccccaacagaattcccggtgcccgcaatccagtataccgctaagcccatttgatagtcccgaccgtagccacggtatagtggacactcccagtttacactgcacaacaagtatcagagacaccaccaaaacggtttccaccggaaggagtctccaaaacgaaaccacaggcgtcaaactcctccatttactcattaccactctacccgcgatggaagatactacctcagagtcagtgctgaagacaacaccccgagactatcttcggaaaatgtgtctagaatcccgacacgcaccaaacgttatagcatacccagccacatgaattcccgctcgacccattacaccaccatgtaaacacccctcataacgcgtcatacttaccatcgacctcggccacgccgttaaagaacatggcaaagcccatgcatgcactatcaagggatacatccagtgtgatacataggacacaccgaaaatccgaaaagaagatgacaggatgatgtggacgctgggtcattgagcacgcataactacatgcatcggaaaccacatcctctaaaaggactaaca

SEQ ID NO: 649613 - DNA, 467 bp, Homo sapiens
  misc_feature (10)..(10): n is a, c, g, or t
  misc_feature (20)..(20): n is a, c, g, or t
  misc_feature (35)..(35): n is a, c, g, or t
  misc_feature (54)..(54): n is a, c, g, or t
tgcgaacaantaaatgaatnccaatcctaaccgcnaaccgctggccaactgccnaagcaagcaaggtcaaaaagcgccgaaaagcaagcaagaaactgttgcgaagcgttcccatcgaatgccccagcggcgccttcgtccctgttccagaccgtaccagcgttgttcgggtttaagctgaggtaacaaccatttctcatagccgtcgagctggttctcgttgccgccgaatttataacgccaggtgacccgactccccggctgcacggctccggttttatcgacatccgccagattcatcatcagacgcggagccatctggaaggggttaaaaccggaatccggttcctgaatcacttctccggcaatccgcaaaggtgcatcgcccacgtcaatggtgtcgcccgttttcaggttaagcagtccatcaggcgtggggccagcaatacgctgcccgctgcggttta

SEQ ID NO: 649614 - DNA, 207 bp, Homo sapiens
  misc_feature (153)..(153): n is a, c, g, or t
cgatctagaggatcccagtacaagaaagaacggtgacacccgtcaggtgcgtaccatgtggaagaggtcaggatggcaaggtcatctcctcccgcgagcaggtccacagaccacccgctgaggactcagctaccccggccgccacccaggagncagggaggcagcctgcccatctgccccacagtctccggcctctccagcctcagc

SEQ ID NO: 649615 - DNA, 322 bp, Homo sapiens
  misc_feature (52)..(52): n is a, c, g, or t
  misc_feature (277)..(277): n is a, c, g, or t
  misc_feature (279)..(279): n is a, c, g, or t
gggcttgcagactgcaaatgaaaaaagcatgaagcatgaatcctgccaaacnctgcagcctgaagcgcagaaaaaagccgaggcagccgctgcggcactgaagaagaaagcggaagggtcagaagcagctgcagctgaagcaagaaagaaagcggcaactgaagctgctgaaaaagccaaagcagaagctgagaagaaagcggctgctgaaaaggctgcagctgataagaaagcggcagcagagaaagctgcagccgacaaaaaagcagcagaaaangnggctgctgaaaaggcagcagctgataagaaagcagcggcagaa

SEQ ID NO: 649616 - DNA, 157 bp, Homo sapiens
gagcgagaaacatggcaaactgctctgtgctttcaaaccaaagtgtaccccccaaccccaaatttgtctaaacactggccagactgttgtgggcattgttttctacaaccaaattctgggtatatatattctttcttaaaaacatagatagttacag

SEQ ID NO: 649617 - DNA, 145 bp, Homo sapiens
  misc_feature (44)..(46): n is a, c, g, or t
tccgatgctgacttagatatgagctttgactaaaggccttccannnctcattacactcatagggcttctctggtgaggaatcctcttgatgctgaaccaacgatgagcaccccactagcaaaggccttcccagactcattacacg

SEQ ID NO: 649618 - DNA, 349 bp, Homo sapiens
gtgagcccaggggcgctttgcttaccgtcctgccggcccagccgtcgctagaggccgcgggccctgcggaacctcctaaacctggcggcgggaactggctcatggccccgcggcggtccgtcctccttggccgtcaggctcaagccccgccgcgacacccacctcgtacggcgtcttctgcaaggggctctcccgcaccctgctcgccttcttcgagctggcctggcagctgcgcatgaacttcccgtacttctacgtcgcgggctcggtgatcctcaacatccgattgcaggtacatatttagagccatgactaagctaacggcctccggggccagcatgatggccgc

SEQ ID NO: 649619 - DNA, 201 bp, Homo sapiens
  misc_feature (55)..(55): n is a, c, g, or t
  misc_feature (94)..(94): n is a, c, g, or t
  misc_feature (187)..(187): n is a, c, g, or t
aatgcgggtcacggcgccccgaaccgtcctcctgctgctctggggggcagtggcntgaccgagacctgggccggctccactccatgaggtattnctacaccgccatgtcccggcccggcgcggggagcccgttcattgcagtgggctacgtggacgacacccagtcgtgaggttcgacagcgacgcngcgagtccgatggc

SEQ ID NO: 649620 - DNA, 259 bp, Homo sapiens
  misc_feature (16)..(16): n is a, c, g, or t
ttccaatgttaaaaangccggcgccttcttgtcacatgtgcccttggggccttgagccaaatgctggagaacctcgtacggcgtcttctgcaaggggctctcccgcaccctgctcgccttcttcgagctggcctggcagctgcgcatgaacttcccgtacttctacgtcgcgggctcggtgatcctcaacatccgattgcaggtacatatttagagccatgactaagctaacggcctccggggccagcatgatggccgc

SEQ ID NO: 649621 - DNA, 979 bp, Homo sapiens
agcggaggccgccgccggggctcgctagtcgcaggcgccgcgtacccgtcgccactcgcgccagcccgtgcgccctcggcgcgtaccctgtggtgctcgcatcccatgctgtcggtcgaggtgtgcgctcggctggccccggatgagtgtcccgatgtcgtgcttccgggacgtattggtgacctcgcatgcggatacagcacgcgcttcccggggagtcatacaagctggttgcgcaatcgagggcctcggacgggccctctcgggtcacgcaaggtattcgaccgttctcctactaatatcgccgcgccgggtctagccagggtacacaggacgtgtaacatgactagttttaagtaccgagctaaggtggcaaccaaatagtggagcagtacccgaccgtttgtttaggcctatgaaatagtcaggcaatcaataaagcccgggggaaagtttgccccagtggaggtcgaagaaacggtcgaaatcgttaagggcctcactacatagttaaccggttatagatacggagatgaaagaagaacgtttcaattccggaggagcttgcagagcgcttcgccaagaggcactcgcggagaaaggagagcacagatggaaccccggttgggtttacaatgcggcacgagtccagatcccaggaaaatgtgaccacacgatagaggagacgattcccggtggacttccaggtgaacctccgcgcaagcagaagccttgcataggcaacagaattgttccaattcggaaagtaaacctgaagtcttaaatcgaaaacgcggcgttcgcgagaaagcccaaaagttaaccgaacttgccccaaatataccggaagtataaaccccccacaagtgccaccccggatcaaaatatacactaagaccacgcttttgcccaacaatagtgttacagtctgtgccccattgaattccccccacggagggagacactaaagtgataacag

SEQ ID NO: 649622 - DNA, 143 bp, Homo sapiens
tatctacagtcgaactatactctctgtgctgctgagctgtcacactactgtaagtcagatgcaaagcgctcaaggctgtgagagagtcagttcagatagcgtgcagacgtgttgtgtgcggactcaagctgagagtgtgtctt

SEQ ID NO: 649623 - DNA, 512 bp, Homo sapiens
  misc_feature (312)..(313): n is a, c, g, or t
  misc_feature (467)..(467): n is a, c, g, or t
ctttccctttggaaaaaggggtttgggggctttttgcggaaaacgggtggaaaaacccaaagcccccccgggaaatgggggcacctttggtttcggaaatggggcccggactcccttgtcgccacgcagctccatggactagatgtagcgtatgctggctggagcctagccctgtgagggcagccttagcagccatctactcaggcctcctgcggaggctccaggccgagggctgcctgcccccttccctgacttcagttgtggtaatcgtgtgtggaggcaacaacatcaacagtctcgagaagtgcatgnncaccggcccctatttggaaaaaagcccacctttgggaccagtgttcttgaagggggttacccatgcctggccccaaagacccctgagaggcccatggacagtcctgtgtctggatgaggaggactcagtgctggcagatggcagtggaagctgncctgtgcaactgtgctgctgcctcaatacgccagccctcctgact

SEQ ID NO: 649624 - DNA, 203 bp, Homo sapiens
  misc_feature (7)..(7): n is a, c, g, or t
  misc_feature (18)..(18): n is a, c, g, or t
  misc_feature (36)..(36): n is a, c, g, or t
  misc_feature (45)..(45): n is a, c, g, or t
  misc_feature (49)..(49): n is a, c, g, or t
  misc_feature (55)..(55): n is a, c, g, or t
  misc_feature (57)..(57): n is a, c, g, or t
  misc_feature (78)..(78): n is a, c, g, or t
  misc_feature (91)..(91): n is a, c, g, or t
  misc_feature (99)..(99): n is a, c, g, or t
  misc_feature (101)..(101): n is a, c, g, or t
  misc_feature (114)..(114): n is a, c, g, or t
  misc_feature (121)..(121): n is a, c, g, or t
  misc_feature (123)..(124): n is a, c, g, or t
  misc_feature (147)..(147): n is a, c, g, or t
  misc_feature (153)..(154): n is a, c, g, or t
ctccgtngcgcacacttnaccccttataaggcactnggggtcctnttgngtcttngnataaaaaataaatggcaaaanaggtccagcttanaaccaaangnacaccttggagantggaggncnnttggaggagaacacaccctttgngtattnnaggaatatgcagtaaaatctgtcaagctagctccaaggagcctttccct

SEQ ID NO: 649625 - DNA, 163 bp, Homo sapiens
  misc_feature (144)..(144): n is a, c, g, or t
tcctcccgcgttacgctcgctggacttggacgactggccaagggagctgaccctcgtgctgacgtgctattggcaacgagggggccaaccgcgtgtgggaaatgcgacgcgcgaggcctgtgccaatgccctcgctgggactcnttcgctggtaatgcgtgag

SEQ ID NO: 649626 - DNA, 506 bp, Homo sapiens
cataatagtgatgagtaagatgggtgtgtgtggggagaagggaggaagaggagatggggaatcaggaaattagggggcatgttgaactcaaaatggctcctggtgtaccaaagagaagaaggcacatagttggggaggtcatacaggagtctggcacgtgtgtctgtgacggtgtaaatacaaccctctccacggttgtccggtgaatgcttttttctcatggtatcaagggcagagggttctgaatcaaatatccgtctgacactttgcacagaagcagaaactgttggcaatgtgtgtacaaggagtgatgtcagtatttcatagacggatgaagtgtgcccatttcaacaaaaaattgagggatcactgctgtaaaaagtatggcccctggaaatcagagtgactggtcactgtacttcctgtctcgagtccagcgcaatgttgcagagctcgacgttttacgtaaatcagggattcctagagggcctgggacacccctcgtg

SEQ ID NO: 649627 - DNA, 192 bp, Homo sapiens
caatttcattttgtgattctatatcaatgaagttagagatatgcaatacaatagtggttgaaattttgttttctataactagccaatgatataccccaaacaaaaaatataagtagagaacagattttacagtgaaaacatttttattttgacaaaaatataacctttaaaaattaaccaaattaacctttt

SEQ ID NO: 649628 - DNA, 139 bp, Homo sapiens
tgccttacacactcagggagacctcgggttgtacctaggcctagtggacaaactttggtagagggttcggtacgacttacgacacctggccctacgtcatagtccgtaccctcagtaacagtgtagtagctcttcctgt

SEQ ID NO: 649629 - DNA, 419 bp, Homo sapiens
acctctcaccatgtagcgtcacaggctgtgcactcacctagtgtgagccccataagagcagggtttgcttctgcttcagctaccgccatgtcttccctcaaatgtgtggtcaccaaatgtttgccaacagggtctctagctatttatcttttgggcacataaagccctttcaacatcacttctgcacctatctttatactcagatctcacctcgtctacaacaaagttttctgtgggtacatgcgcacacatgcaaaggtacagtcgtcattcagtgcagtctgcacacttctacttcatcaaagcacaccagagtgctggctggtgagcccaatgcttctcatgctcccttctgtcacactgcagcatgtctctttaaactctggctcatccatcggttagttatctgtcagcaaact

SEQ ID NO: 649630 - DNA, 112 bp, Homo sapiens
tctggtgggtgaagcggagagtaagaagatacctgctacaactatagtagcttgagtaggagtagggctgagactggggtggggccttctataggctagaggggagtcaggg

SEQ ID NO: 649631 - DNA, 358 bp, Homo sapiens
tagcttagtgcacggcatttgttatcaaaagcttttacttaaggacagctccagcctgcatttattagcaagttagggttatatttatttttattttgaaaaacaaaagtgggagaaaggtttggcttttttgttttggaaataatagagaaattagaaagcattgcctctttggaaaattgtccacatcccttcttcctttgccgaaagcaggctgtgatgggaatagattccacttgtgagcgacattggctcagacaaaaagttgctctccttggcattggaacaaacgggtagtaacgtccctttatgcttgtacacacatttccaaaacactttcagatctcgtttgttgcta

SEQ ID NO: 649632 - DNA, 799 bp, Homo sapiens
gcgtggagcgggctgggccagctgttgagtggaatgtcatggccagctcctcagacagtgaagatgacagtttcatggctgctggaccaggaagacactgtgctggaagggacaatggatcaagatgaggcagccccacccagtattggcaggctgaggagactagacataataggtccatgtcggacgctgccagcaagaggttatcggagtatatcctgtactttctctcaccagtctcaggaacacaaaactgcggcccttgtctagcaaacagtggtatcgacttatcaacggtgtagcccatcagtgtaatcatggtaacatgacaggctgtccagcgacggaaacattcacatggcgacagccgtacctatcctatatcctggaaccccaatcacctcagcgctatctcgccacacgtgcatgctatacctgatgcatatcaagtcctatgtaactgtgcaacgacacgcgctgctagccgcgaagacagatggaactggctacgctcacccatcgacacatcctgaagacctctgacacctagagcgagcacagccagtggaatcccgaccccgatgggcgatacaagagcgccaatacgcgtagcacgcacagccctctgacagcgcagctgctgggcgccgagcgaccacgcggagatatgggatagcttgctggactgcgcgcgctggacctccgcgccagcgcgcgttacgtcgcgtaaagtccgggatcgaagaagattgcttagagagacaacagcacccctgactcacaccagagaacaatggta

SEQ ID NO: 649633 - DNA, 899 bp, Homo sapiens
gaactactgcattattttataaaccatagaacatatacttagagtcacatggattattaagttggttcactaattcttattctattctttcctgtaatgtgaggatacttgtctctcgccttgtttttcaattgccttagtgtgcaattgtatcttacaattatcttattaattttttatataccaaacctagaataatactgtatacatagttggttgtccacagtagaaattaaattgaagtctttttttccgtgcatgatatggttaggcaggtaagcaaaataagaatgataaatatcgtttatattttgtccttaatcacaggacagcagaaacttttggatacaaggaacagcggcttaagtggagaacgttcctttttttcctaactacacctatttgggagcttatttagagacgagccaaactagagaaagttctctccatgaggagctgatcctttcatcccaaagaatgcaacagaattgtttacattttggcattgagccttctagtcagtttgttttcctgtaactaactatactacacatgtatatgatatattaatataaatgagaatatatgattcggcgcctttcccaaagtactatccttcaggcatatcatgtttattttttgacgttagtttgaattagctgctcagtatttcattatgcataggccttttttgtctttttcttctctgtaggacaggtctctctctgaggtccggctggagtggcgaccggtcctggtccactggacctctggctccctggtaagtggaccccgggtcgacccttggttttgggcacgggggcgccccccccgggatttggttccgtggacggggacccgcccgggttttaccttggggcgtgttgccaggccccggg

SEQ ID NO: 649634 - DNA, 262 bp, Homo sapiens
gcagctggagcaggcgcaggccatcgacgacctcatgcctgcccagaagtgaagccgcggcccacacccgacaccagccctgctgcgtccggacgtattgtgctggcagtgcgcaccatgcacccctgatgtgtcccgtctggcgagcccgttagccttggtgtagaacttgcgtcacccgtggtagagtgtatgtttttgagggctaagatactgctgatgctgaaataaactagggttttggccgtgaaaaaaaacaaaa

SEQ ID NO: 649635 - DNA, 114 bp, Homo sapiens
ctcaaattttgtctggctagtaactccaccgcttctccaatggattcatccagtttcttggagaaccatatagactaatgacagcatctggagcacacggacgtatcaaggatg

SEQ ID NO: 649636 - DNA, 283 bp, Homo sapiens
ctattggctttttaatacccataggatgtatcatgatgtcgcttctctccttcctgatatttaaaagacttactgagttttaaatggtataaatttctggcatctggcaggtgctaaataaatgtttcctggatcgaaatctacagtctcaaggagtcaaggctacaattcttaagttgcttcagatgactggttctatctatttatcaatacatccatcgatacactcatcgcccttaccacgctactcctacctatctccccttttatactaataatctta

SEQ ID NO: 649637 - DNA, 292 bp, Homo sapiens
cgacccagcttattatacagttatcatctgtaccaatgtcaaatgtttggtacaacaatagtaatttccatgcatcgaagatccatcgtgtacagttggagtcacttctccaattgtgactcacagtgagcctgaattctagtacatctggaaacaaagaaaatggcgcagacatatttttatataatgctaataggatacctgttatttcattaaatcaagcatcaataactagcttactcacagcgttagattggtatcccaatactttgctccgaacaatggagccttg

SEQ ID NO: 649638 - DNA, 355 bp, Homo sapiens
  misc_feature (76)..(76): n is a, c, g, or t
tttaaaaaccagcgtgtagaggctgcctaccgtaaagagctggtttatggtgaagacgatgccacgcgcgcgacgncgcctacggtacgcgagctgtttagcgccgtacggaaaaactatttccgcctctattttcactatatgtatttcaacatcgcccgcattctctatttgcaggtcgataacgttttcggtttgttcttgctgtttccgtcaattgttgccggtacgattacgctcggcctgatgacgcagattaccaacgtttttggtcaggttcgcggtgctttccagtacctgattaactcatggccacactggttgagttggatgtctatctacaaacgtctgcgca

SEQ ID NO: 649639 - DNA, 585 bp, Homo sapiens
tcttccagatttttatgagccttgttacccactggcagcccttagcacacaatagctcgccttccccaaatttgttatgcgaacgggtgtaactcatgtggcccccccgcataatccaagggctagtcatcttccgcagctaaatactctccccggtagaatgttcccaactttctcgtaaaacacagtccgtattatcttcgcatacaggagttatgcaatgcacctggaggctttcaccatgagttctgaatagaaaaggagcaagccgagaatcctagatatattgcacatgcacgtgtcttacttacatatatttagctagggttctctatttttatcacctcaactagcatacgcctacagatgtagcttgcgagtgactcacgcttcagccattttccggatcggcatctccagcgctcaacatttgtttgtagtccacaggtcttccaaatcggaccttcacgtcactctaatggctcaactttccatcactatctgacttatccgccaactaatatttcagctttacagccaaacatcactttggcttcgagcaaattcctaccagctggaacatga

SEQ ID NO: 649640 - DNA, 223 bp, Homo sapiens
  misc_feature (2)..(2): n is a, c, g, or t
  misc_feature (106)..(106): n is a, c, g, or t
  misc_feature (136)..(136): n is a, c, g, or t
  misc_feature (166)..(166): n is a, c, g, or t
antttatttcacacattgacattaaatttttatggacacataataactgtacatatatatggggtagaatgtgatgttttaatacatgtactcaatgtgtaatgancaaatcagggtaatttgcataatgattttnctgtagggagaaaattcaaaatctactctnctggctattttcaaatatataatatgttattgttaacctatactcatccctacctat

SEQ ID NO: 649641 - DNA, 196 bp, Homo sapiens
gctcctgctgaggggccaggcggacctggaggaacccgcaaataagttttttccttttggaaggatagagattattccacctccttaaaaaatttagccaataggttcctaagatatggctaaccgttaagttttaaacgtatttttattagctaaggattttaagagaaaatttgaggccttagaggagtgcctt

SEQ ID NO: 649642 - DNA, 613 bp, Homo sapiens
ccacgccgtcgctagttctagatcgcggcgccgcccttttttatattattttttttttggggtgaacaaagtcttatggaaagtcccatcacctccaaagcggggggcccaccctcacatcaacaacccctccctagaaaccaacccttcatggcagatcaacccaccagcgagatggaaggtacggcatcgccgggtacccatcagaaagagacgaaggagtaacactccggacaactcgagtaggcacaaaacctcaagcgcgggtcaggcaactcacacaaatcagggacagtccaacaacacacagacagagagaatggcaagtagctggaccgtgcaggcacccggaaaggacacagaccaaaccgagtcgaacaaagagtgggaataaacatcatggaagagcgaacaacccacaacatgaggatacctcagagaggaacttagtcccaagcagcaataaaaacaaatacagccggacaaagtaatagtgaacaaagaagataaaaacaaaaggaataagagtacaatcgacaaaaagagagaagatgaaaaaacacattaacaatgaactagacaacacagcaaaaaacggagagatacaccaaca

SEQ ID NO: 649643 - DNA, 150 bp, Homo sapiens
atgatttccgcgcctgcctgatctccatgggttacaacatgggagaagcagaatttgcccgcatcatgagcattgtggacccaaccgccttggggtagtgacattccaggccttcattgacttcatgtcccgcgtaacagtttacaaatt

SEQ ID NO: 649644 - DNA, 588 bp, Homo sapiens
  misc_feature (42)..(42): n is a, c, g, or t
  misc_feature (65)..(65): n is a, c, g, or t
  misc_feature (69)..(69): n is a, c, g, or t
  misc_feature (74)..(74): n is a, c, g, or t
  misc_feature (77)..(77): n is a, c, g, or t
  misc_feature (79)..(79): n is a, c, g, or t
  misc_feature (82)..(82): n is a, c, g, or t
  misc_feature (84)..(84): n is a, c, g, or t
  misc_feature (99)..(99): n is a, c, g, or t
  misc_feature (110)..(110): n is a, c, g, or t
  misc_feature (125)..(125): n is a, c, g, or t
  misc_feature (131)..(131): n is a, c, g, or t
  misc_feature (133)..(133): n is a, c, g, or t
  misc_feature (139)..(140): n is a, c, g, or t
  misc_feature (152)..(152): n is a, c, g, or t
  misc_feature (154)..(154): n is a, c, g, or t
  misc_feature (156)..(156): n is a, c, g, or t
  misc_feature (158)..(158): n is a, c, g, or t
  misc_feature (178)..(178): n is a, c, g, or t
  misc_feature (184)..(184): n is a, c, g, or t
  misc_feature (199)..(200): n is a, c, g, or t
  misc_feature (210)..(210): n is a, c, g, or t
  misc_feature (220)..(220): n is a, c, g, or t
  misc_feature (222)..(222): n is a, c, g, or t
  misc_feature (224)..(224): n is a, c, g, or t
  misc_feature (236)..(236): n is a, c, g, or t
  misc_feature (239)..(239): n is a, c, g, or t
  misc_feature (256)..(256): n is a, c, g, or t
  misc_feature (272)..(272): n is a, c, g, or t
  misc_feature (339)..(339): n is a, c, g, or t
  misc_feature (365)..(365): n is a, c, g, or t
  misc_feature (380)..(380): n is a, c, g, or t
  misc_feature (388)..(388): n is a, c, g, or t
  misc_feature (518)..(518): n is a, c, g, or t
  misc_feature (520)..(520): n is a, c, g, or t
  misc_feature (522)..(522): n is a, c, g, or t
  misc_feature (528)..(528): n is a, c, g, or t
  misc_feature (556)..(556): n is a, c, g, or t
gccagactccagggatggagctgctattgttggttccaaaangggtgacactggcgaaggctttnttcntcagnttntncantngctggaactttccantgttgagtttnctgctcttgatggtntgtgtnanttcttnngggaagcgtttntntntnttccacagggaccagccgtncttttnatagtgctcccaganntttggcagtnccacagtgtntntnttctctttggtnttntttcgctttttttcttncatcacaaaggttctnttgggcaggtgagcgaaggggtccttggccttgggctcagcagccagcgcctgctcacattcatccntctcctcctcaggagcaggggcagcngcctttttctcttcnttccactnagcctggggcttctgcttctcttcccgtgaacccttctctttccgtggtgtgtcctttttaggttgggtctctgcaaactttttagcatcaaactgggccatcttctcacacagtttcacttcccccaananancccggnactggggctggttaatgcaggtgaggancagcggttggtattgggaaaggctggcggaaa

SEQ ID NO: 649645 - DNA, 1003 bp, Homo sapiens
  misc_feature (422)..(422): n is a, c, g, or t
  misc_feature (515)..(515): n is a, c, g, or t
  misc_feature (641)..(641): n is a, c, g, or t
ccctggctgacatggtgaaaccccagctgattttttaattttttgtggagatggggtcttgctgtgttgctcaggctggtctcgaactcctaagctcaggcaatcttcctgccttggcctcccaaagtgttgggattgtaggcatgagccaacccacctggctggttttttccattttgatgaggtccagttgatcagtttctcttttatggatggtattttcatagtatctacaaaattgttgcctagcccaagatcactcagattttctcctcattttcttctagaacattatagtttgaggtcacatttgggtatgcaatgtagttcatctttgtatgtagtgcatagtatggagcgaggttcaattttttgcatatgggcatttggctgttccagtactatttgttgaaaatactacnttttaatgtttttcttttgaaaatgtaatacataaacagaaaaattcaaaagtataaaaagttcacggtgaaaattcagtatctcacattttncccccagttccttttttccagatgcaatcattgttaccccaaagagattccatgcttacacttgtctccctgctgctactttttttggaacagtgtcttttagtaggctcaaagtgaccttgttanaaagttaggttggtttacatatccacacttccccctctgtctcactgccttcatctcgtatggctctcctagttcctctctagccatcctgccctctttgcttctttcacacacaccaagtatgtttcccccctcccccagggtttttgtgcttcttaatcttttttgcttggaatcgtttttctgtcaggtatctgtaagacttgcttctttacacttttttaggcttcattcaaatttcaccttcttggtgaggtctagtttaaagctgtaaattgtgtcccccaactttctgtcgtctttcctgctttattttcctccatttcagttgtcaccttgtaagcatgatgaagtaagagatt

SEQ ID NO: 649646 - DNA, 383 bp, Homo sapiens
gtcggagtggcgagctggcagtacgggctctggagcagtttgccagtgtggtggaggccaagctgataagaacacacgaaggggattgtcaatgaacagtttctgctgcagcggctggcagacggtgccatcgacctctatgccatggtggtggttctctcgagggcctcaagatccatgagtgagggccaccctacgggccagcatgagtgctctgtgacacctggtgtatcgaggatgcatctaggatccgagagggcatggacgccctgcagtctgacccctggtacgaagagctctaccgcagcttcattggcttctgaatactccggacagagactgtttcaatattgtgtctcgtataagacacggttttcctttcg

SEQ ID NO: 649647 - DNA, 406 bp, Homo sapiens
ctcggtagctgtgactagcggcttgatctggctctgatctcaggcctgaccgggcttgccggatccttcgtacctagttcccaagaccaaggcccagtagaggagaagtgcacgcgttggcggcggtggtgcttgctgtgtgcgggtttgctgggagtggctgcagggatagcagggtgactgttccttcctgtcggcgggcatgttgatgttgctgagcagcttcgtcattaggacagagatgcccactaccttagaaatcagacgctttttggcttctggaagctttggcaccatgttgggggctggatgccggacgccggggcggggctgggtttctgctatctgagcctctctcactatgttcctcgaccgcctggcttgtgggtgccgaggctgttcttct

SEQ ID NO: 649648 - DNA, 87 bp, Homo sapiens
ctagaagattcagcaaagtacttttgtgctcttgggccccttcccctcatgggggatacgacgctgagctacaccgataaactcact

SEQ ID NO: 649649 - DNA, 164 bp, Homo sapiens
ataggaagaaatatacttagatagtacttagggaaatagaggtacaactatcatgactctgtttctttcctcgcagtctctctccttgggtgtctgagtgcctatgaaaatttttaagggcttgctagtttatgtggacctgaataaggtaggacctatagagt

SEQ ID NO: 649650 - DNA, 2423 bp, Homo sapiens
  misc_feature (7)..(7): n is a, c, g, or t
  misc_feature (19)..(19): n is a, c, g, or t
  misc_feature (121)..(121): n is a, c, g, or t
ctattanagactgttttanaataagttattaatatttgttgaaatggttccagataacaagaaatatgatgcaataaaacctgataaataaaagcaatataaagattagaatggttttgantaggtagtggaataaaaagttaagttggtagttgcattaaaaaggtcaaacatggggaataattggtagaatgttgtgtatataatatatattgttacgggtgcaataaatattcaggggaaacagagctgctgaaagagaatgaatgcttagaaggaatgttgccttaaaggcttttctaaaactttttaggtaaaggacaaattctgggaggacgaaagataataagtaggactagttacatagagacttaggatgtccatagtctttcaagaaattgcccaacctttgcgagaaggtgttatggtaatatattgatgttgggttaaagcaaattttttcagatagggtagatttttatacatttataaagtaaaggggagtaggaaagattaaagatagatcaaagaaaggaataattgatggaacaactttctggaagagattagagggtatgtgtcttttgaactctggaagacttgattttagagaggataaaggaagaaagtggataattctagaattaaacaccaaaaggttctatgtgtctggcaccatgtgaagcaacttacctattatttcatttcatttcatttcatttcatttcatcctataacagtcctaagagatcaaataatttgtccacgattacacagtcagtatgtagcagggccagcattcaaatcctcatctgtctatcaaacccatattcccttctattatgctatactgttttcaagttgaaggaaatcaaaccaagaatttctgttttttcactgcgattataaggaaaaatattatttttctgaaatgagacatattgatgtttaagaccttgaggtgacaggtaaaatttggaatatctgtgatgggaaaatgcaaaaaggaaggaatgggtaaaagatacctattaccatctatgccctggtatttcacttcttccattgcacagcatagactttagattggccatggattaaaaatttgagaattctgacaaaaaactaaatagaaaggagtttgttttttaagtaggtatatgatgggtcaaatataaacttactactaacaaaactttaaacaattccctaaatgccaaacttttataaacaaaaatcaaacaaaccatcaagcaaaagagtccatagccagcagaccaaatgttgaaatctctgggctaatttgtaagatctatgttttaaaactccttagtgaagaggggcaagaaaacctctcctctttttcctctcttggtggaaatgttttgttgttgttgttggttttttcctatactatatgtaatttctatattgttgttttgtgtattttggtattataaaattatacttcttagattccgttaagaatactttctggggtgtgagccacctgagttattagttagcaaaatgaacctggggaagtgggaagagctagtattctcaattggcaagggattgattcttcaatgggttcagcatttcacttccctctgaaattaagtggcaaagtaatagcatcccttaaaaaacaggacattggtgagaggtagaatagcaggaggaattttgaaacatggagggatggctactggaaaagaactgatgaagtgcagagtctctccagacaatggtagaaaccacaggactacattaagattgggcccaaatactagtttagaaaaaggtaaataaaactagctttacttaagagtacagccagcttaattactggctagtggacatatttcagacaaatctaactggagagaaaaacagaccaggagagaaagcgaagttacaaggaaatggaactagagaaacctcacaaagggataaaggaggtaattaaaggttaaagccagatagcctcgagctcaaaggagaaatattggaggccagataggaaagtgccttcctactcagggggttatggatccagggtggctaaagaatagaagtagagttccacccagggccagagggaacaatctgggattcagacacagcagtggtgccaacgtgaatctacctcgtgctagagtctgagtagcctagtctatcacccaacacagataagactggacaggggctcccaggaaccaacatctaagaagggagtttggagaggggctaaaagaaagcaggttaagccccaaatgtaactgaatgatgaccagggataactatttactagtgcttttatgatttattgtaactctgtaactttcccagtatttgttaattttttaacttctgtttctcctgtacttacgagcagtaaaagttgttcaaaacataaa

SEQ ID NO: 649651 - DNA, 953 bp, Homo sapiens
tgaagagcaagtgggatgagtccatcttcacgaaaggctgcatccaggcgactggaaagctggtctcccgcggtaacatttacattgtggctggcgtcttcatcgccatctcgctgtttgcagatattaggcatcttcctggcaaggacgcctgatctcagacatcgaggcagtgtaaggccgtgccatcacttctgaggagcagaagttgagggagccgagctgagtccacgctgggaggccagagcctttctctgccatcagtccctacgtccagagggatgatggagccgacaccccctagagccagtgccccatcttaagcatcagcggtgacgtgacctctctgtttctgcgttgcataggtgcatgaaagaccaagggtcccccttgttacctgccacaaatcttgtgactgcatccctctggtagtctacccagagacagatgaatgtgtctttatgtagggacgtggtgactctgaaagacagtagagggtctcctgtggctgtcaggacgggcttgaatcagaccgccctgacagactcaagcatgtctgcagtgacaccctggtcccctcatccactggcatccagacatctgcttggggtcatccacatctgtgggtgggccgtgggtagaagggacccaacaggtgtggaccagggcatctctctcacgatcaatgcaaagcagcatgggggcctgccgtaacgggagtgcggacgtggccgcgaatgggaccatctgagtgccagagcagacatgcgtgggacatgcacatatcaggggcgacgtaaggccgggatgcgtcagaccaggatcaagtagaaagaaagcctgacaccaagagcgtggacaggtagccagagggagtggccagacacagggccccgggggcacacaagagcaacacgggacccggacggcgcggacggagaggagaagccggg

SEQ ID NO: 649652 - DNA, 1033 bp, Homo sapiens
aaagattagggaggaaaagtcgcttaaaaatatatatatagaaacacataaacaaattctacaaacattcatgcttacggctataactgaaaaaacggatgagccatcatagtattcctatcttactgaaagcgaagggttatttgtctaatctaaggcaaaaatgagggtggaaattgagtacaaagaaagatatctgggccctaagcatgctctaaaatcccaccatccaataaatcctgcaacttcattttccaatttcattatcactctcttaagtatttcaaaagatcagcatcgtcaatatcagtgtcccaatgactcaccagctctgacagcctcattctccaggacaaccctattaaaaataaaacggatatatttggaggggacaggcgttctagggccctctttgcccaacaagtgtagaatcttagtagccagaacagtgtgttcacagtcctcaatgaattcacaaaggtgggctaggcctgcttctttactctcagggttctcttccacaatgctgattatacagtccacaatggcccgcttgtactcaaagcctccctggcaaaaaagaagataaaactgccattcattctagggacacattttggagaaatgcttacactccaaggtttatgcttataatattcaaatttcatttcccaccttttatgaaagaagcaaaagtgtttttttctccaagtggggaaagcaaagcaatggcatgtttagtaataagacagtaaccagacttagtgtactacttgagaggcatactgagatgataaggaaatcttaaaacactatggtatttcatggcaatcctaagaatttaagacagcaacttcctatgattaaaaagtagtctacctacatcatctcggagcatgttggagaggaaagtcatcatgacactgtgctttcgagggtatttctgacagagagcactaattgcctgtacaaccaccaccttgaactcatctgagatttcagacacaaaagaagatatctgcttcatgagccc

SEQ ID NO: 649653 - DNA, 4271 bp, Homo sapiens
  misc_feature (7)..(7): n is a, c, g, or t
  misc_feature (19)..(19): n is a, c, g, or t
  misc_feature (121)..(121): n is a, c, g, or t
  misc_feature (3684)..(3684): n is a, c, g, or t
  misc_feature (3742)..(3742): n is a, c, g, or t
ctattanagactgttttanaataagttattaatatttgttgaaatggttccagataacaagaaatatgatgcaataaaacctgataaataaaagcaatataaagattagaatggttttgantaggtagtggaataaaaagttaagttggtagttgcattaaaaaggtcaaacatggggaataattggtagaatgttgtgtatataatatatattgttacgggtgcaataaatattcaggggaaacagagctgctgaaagagaatgaatgcttagaaggaatgttgccttaaaggcttttctaaaactttttaggtaaaggacaaattctgggaggacgaaagataataagtaggactagttacatagagacttaggatgtccatagtctttcaagaaattgcccaacctttgcgagaaggtgttatggtaatatattgatgttgggttaaagcaaattttttcagatagggtagatttttatacatttataaagtaaaggggagtaggaaagattaaagatagatcaaagaaaggaataattgatggaacaactttctggaagagattagagggtatgtgtcttttgaactctggaagacttgattttagagaggataaaggaagaaagtggataattctagaattaaacaccaaaaggttctatgtgtctggcaccatgtgaagcaacttacctattatttcatttcatttcatttcatttcatttcatcctataacagtcctaagagatcaaataatttgtccacgattacacagtcagtatgtagcagggccagcattcaaatcctcatctgtctatcaaacccatattcccttctattatgctatactgttttcaagttgaaggaaatcaaaccaagaatttctgttttttcactgcgattataaggaaaaatattatttttctgaaatgagacatattgatgtttaagaccttgaggtgacaggtaaaatttggaatatctgtgatgggaaaatgcaaaaaggaaggaatgggtaaaagatacctattaccatctatgccctggtatttcacttcttccattgcacagcatagactttagattggccatggattaaaaatttgagaattctgacaaaaaactaaatagaaaggagtttgttttttaagtaggtatatgatgggtcaaatataaacttactactaacaaaactttaaacaattccctaaatgccaaacttttataaacaaaaatcaaacaaaccatcaagcaaaagagtccatagccagcagaccaaatgttgaaatctctgggctaatttgtaagatctatgttttaaaactccttagtgaagaggggcaagaaaacctctcctctttttcctctcttggtggaaatgttttgttgttgttgttggttttttcctatactatatgtaatttctatattgttgttttgtgtattttggtattataaaattatacttcttagattccgttaagaatactttctggggtgtgagccacctgagttattagttagcaaaatgaacctggggaagtgggaagagctagtattctcaattggcaagggattgattcttcaatgggttcagcatttcacttccctctgaaattaagtggcaaagtaatagcatcccttaaaaaacaggacattggtgagaggtagaatagcaggaggaattttgaaacatggagggatggctactggaaaagaactgatgaagtgcagagtctctccagacaatggtagaaaccacaggactacattaagattgggcccaaatactagtttagaaaaaggtaaataaaactagctttacttaagagtacagccagcttaattactggctagtggacatatttcagacaaatctaactggagagaaaaacagaccaggagagaaagcgaagttacaaggaaatggaactagagaaacctcacaaagggataaaggaggtaattaaaggttaaagccagatagcctcgagctcaaaggagaaatattggaggccagataggaaagtgccttcctactcagggggttatggatccagggtggctaaagaatagaagtagagttccacccagggccagagggaacaatctgggattcagacacagcagtggtgccaacgtgaatctacctcgtgctagagtctgagtagcctagtctatcacccaacacagataagactggacaggggctcccaggaaccaacatctaagaagggagtttggagaggggctaaaagaaagcaggttaagccccaaatgtaactgaatgatgaccagggataactatttactagtgcttttatgatttattgtaactctgtaactttcccagtatttgttaattttttaacttctgtttctcctgtacttacgagcagtaaaagttgttcaaaacataaatgtgatgtgtgtgcttatttctgtgaaaactgggtaacagttacgaatattgtgcactgaacatgagaagagaagaaatcaaggaggaaaatgatgatggggggaatcaagtagaataaatacttgacattcaccttcccaagtctccaaataagtaaatactactattggcactagttggctgtcttttaggggctatttctccaccctgcaaagactgcatatgggtcaaggagggaattaaaagcccttcttaatgtggacacacatggttggctaagctactcactaggctgagacatgctctcagacaccagccttatgctacaggaccttcaaaaatgatgtattttaaaatgccaacaatctactacataaccaagttctatctaactagatagaaactttgaggagaagagggtcaagattcttcacaggagaccaggtatatgaactctcacaagtggtcacattattccaacagaaagcttgagttcctttttgtgctactgctatacacactcagtttctcttttaagattaagtgttcagcaaattttactcagagatttagttttaaaattaatatttctgcagcagtaaaccattttataaatatatatattcacacacacacaaacacacacacacaaacactcatcattaaattctagaaaagcatcacattcttaaactgagcatttgaagagttgaagagctcacaaggaaatgcattctgaatcacgtatctcctcccttctgagggttagtacctgctgtagggtcatcatcaggcaaacgaacaagagtgtaacatattcctggttggttataaggaaggctgggggctgggatacaagacagcacttcataggaatctgatggctccatctgcactgtcactttttccagcagctggtcattgagagtgttggtgcagtcaaactggaacacgatgtgattggtaaacatgtgcttgatacatcgaacaaaatattctgtctctgcttctgtaagttgaacaggctcagaagacttgaacaagggtcctatattcagaaactcaggaatggcagccaattgttcttggaaaatgtcttgcctggaaggagccaacttctctggcttagtagccacaagtgtgatttctgctttctgttcaaagacaggagccatagcaagaggaattgatttcatgtcaaacggtttttctgaaggctccaacgtgtactggtgtaaggctttttccatccctggtacngagaccgtcaaaccattaaagatatatgtggcatttagtgccatctgcctctgctgcngcacattcagatagaaggtagctctgtctcgtacctcgtcatcagtatccatcatacacctctgtaagagtacaaggatgcttgggagaagactctcattctgagccccaaatttagccaaagcactcacagcagcagctctgacagcctcattctccaggacaaccctattaaaaataaaacggatatatttggaggggacaggcgttctagggccctctttgcccaacaagtgtagaatcttagtagccagaacagtgtgttcacagtcctcaatgaattcacaaaggtgggctaggcctgcttctttactctcagggttctcttccacaatgctgattatacagtccacaatggcccgcttgtactcaaagcctccatcatctcggagcatgttggagaggaaagtcatcatgacactgtgctttcgagggtatttctgacagagagcactaattgcctgtacaaccaccaccttgaactcatctgagatttcagacacaaaagaagatatctgcttcatgagccc

SEQ ID NO: 649654 - DNA, 4584 bp, Homo sapiens
  misc_feature (7)..(7): n is a, c, g, or t
  misc_feature (19)..(19): n is a, c, g, or t
  misc_feature (121)..(121): n is a, c, g, or t
  misc_feature (3684)..(3684): n is a, c, g, or t
  misc_feature (3742)..(3742): n is a, c, g, or t
ctattanagactgttttanaataagttattaatatttgttgaaatggttccagataacaagaaatatgatgcaataaaacctgataaataaaagcaatataaagattagaatggttttgantaggtagtggaataaaaagttaagttggtagttgcattaaaaaggtcaaacatggggaataattggtagaatgttgtgtatataatatatattgttacgggtgcaataaatattcaggggaaacagagctgctgaaagagaatgaatgcttagaaggaatgttgccttaaaggcttttctaaaactttttaggtaaaggacaaattctgggaggacgaaagataataagtaggactagttacatagagacttaggatgtccatagtctttcaagaaattgcccaacctttgcgagaaggtgttatggtaatatattgatgttgggttaaagcaaattttttcagatagggtagatttttatacatttataaagtaaaggggagtaggaaagattaaagatagatcaaagaaaggaataattgatggaacaactttctggaagagattagagggtatgtgtcttttgaactctggaagacttgattttagagaggataaaggaagaaagtggataattctagaattaaacaccaaaaggttctatgtgtctggcaccatgtgaagcaacttacctattatttcatttcatttcatttcatttcatttcatcctataacagtcctaagagatcaaataatttgtccacgattacacagtcagtatgtagcagggccagcattcaaatcctcatctgtctatcaaacccatattcccttctattatgctatactgttttcaagttgaaggaaatcaaaccaagaatttctgttttttcactgcgattataaggaaaaatattatttttctgaaatgagacatattgatgtttaagaccttgaggtgacaggtaaaatttggaatatctgtgatgggaaaatgcaaaaaggaaggaatgggtaaaagatacctattaccatctatgccctggtatttcacttcttccattgcacagcatagactttagattggccatggattaaaaatttgagaattctgacaaaaaactaaatagaaaggagtttgttttttaagtaggtatatgatgggtcaaatataaacttactactaacaaaactttaaacaattccctaaatgccaaacttttataaacaaaaatcaaacaaaccatcaagcaaaagagtccatagccagcagaccaaatgttgaaatctctgggctaatttgtaagatctatgttttaaaactccttagtgaagaggggcaagaaaacctctcctctttttcctctcttggtggaaatgttttgttgttgttgttggttttttcctatactatatgtaatttctatattgttgttttgtgtattttggtattataaaattatacttcttagattccgttaagaatactttctggggtgtgagccacctgagttattagttagcaaaatgaacctggggaagtgggaagagctagtattctcaattggcaagggattgattcttcaatgggttcagcatttcacttccctctgaaattaagtggcaaagtaatagcatcccttaaaaaacaggacattggtgagaggtagaatagcaggaggaattttgaaacatggagggatggctactggaaaagaactgatgaagtgcagagtctctccagacaatggtagaaaccacaggactacattaagattgggcccaaatactagtttagaaaaaggtaaataaaactagctttacttaagagtacagccagcttaattactggctagtggacatatttcagacaaatctaactggagagaaaaacagaccaggagagaaagcgaagttacaaggaaatggaactagagaaacctcacaaagggataaaggaggtaattaaaggttaaagccagatagcctcgagctcaaaggagaaatattggaggccagataggaaagtgccttcctactcagggggttatggatccagggtggctaaagaatagaagtagagttccacccagggccagagggaacaatctgggattcagacacagcagtggtgccaacgtgaatctacctcgtgctagagtctgagtagcctagtctatcacccaacacagataagactggacaggggctcccaggaaccaacatctaagaagggagtttggagaggggctaaaagaaagcaggttaagccccaaatgtaactgaatgatgaccagggataactatttactagtgcttttatgatttattgtaactctgtaactttcccagtatttgttaattttttaacttctgtttctcctgtacttacgagcagtaaaagttgttcaaaacataaatgtgatgtgtgtgcttatttctgtgaaaactgggtaacagttacgaatattgtgcactgaacatgagaagagaagaaatcaaggaggaaaatgatgatggggggaatcaagtagaataaatacttgacattcaccttcccaagtctccaaataagtaaatactactattggcactagttggctgtcttttaggggctatttctccaccctgcaaagactgcatatgggtcaaggagggaattaaaagcccttcttaatgtggacacacatggttggctaagctactcactaggctgagacatgctctcagacaccagccttatgctacaggaccttcaaaaatgatgtattttaaaatgccaacaatctactacataaccaagttctatctaactagatagaaactttgaggagaagagggtcaagattcttcacaggagaccaggtatatgaactctcacaagtggtcacattattccaacagaaagcttgagttcctttttgtgctactgctatacacactcagtttctcttttaagattaagtgttcagcaaattttactcagagatttagttttaaaattaatatttctgcagcagtaaaccattttataaatatatatattcacacacacacaaacacacacacacaaacactcatcattaaattctagaaaagcatcacattcttaaactgagcatttgaagagttgaagagctcacaaggaaatgcattctgaatcacgtatctcctcccttctgagggttagtacctgctgtagggtcatcatcaggcaaacgaacaagagtgtaacatattcctggttggttataaggaaggctgggggctgggatacaagacagcacttcataggaatctgatggctccatctgcactgtcactttttccagcagctggtcattgagagtgttggtgcagtcaaactggaacacgatgtgattggtaaacatgtgcttgatacatcgaacaaaatattctgtctctgcttctgtaagttgaacaggctcagaagacttgaacaagggtcctatattcagaaactcaggaatggcagccaattgttcttggaaaatgtcttgcctggaaggagccaacttctctggcttagtagccacaagtgtgatttctgctttctgttcaaagacaggagccatagcaagaggaattgatttcatgtcaaacggtttttctgaaggctccaacgtgtactggtgtaaggctttttccatccctggtacngagaccgtcaaaccattaaagatatatgtggcatttagtgccatctgcctctgctgcngcacattcagatagaaggtagctctgtctcgtacctcgtcatcagtatccatcatacacctctgtaagagtacaaggatgcttgggagaagactctcattctgagccccaaatttagccaaagcactcacagcagcagctctgacagcctcattctccaggacaaccctattaaaaataaaacggatatatttggaggggacaggcgttctagggccctctttgcccaacaagtgtagaatcttagtagccagaacagtgtgttcacagtcctcaatgaattcacaaaggtgggctaggcctgcttctttactctcagggttctcttccacaatgctgattatacagtccacaatggcccgcttgtactcaaagcctccctggcaaaaaagaagataaaactgccattcattctagggacacattttggagaaatgcttacactccaaggtttatgcttataatattcaaatttcatttcccaccttttatgaaagaagcaaaagtgtttttttctccaagtggggaaagcaaagcaatggcatgtttagtaataagacagtaaccagacttagtgtactacttgagaggcatactgagatgataaggaaatcttaaaacactatggtatttcatggcaatcctaagaatttaagacagcaacttcctatgattaaaaagtagtctacctacatcatctcggagcatgttggagaggaaagtcatcatgacactgtgctttcgagggtatttctgacagagagcactaattgcctgtacaaccaccaccttgaactcatctgagatttcagacacaaaagaagatatctgcttcatgagccc

SEQ ID NO: 649655 - DNA, 207 bp, Homo sapiens
  misc_feature (78)..(78): n is a, c, g, or t
  misc_feature (109)..(109): n is a, c, g, or t
  misc_feature (130)..(130): n is a, c, g, or t
  misc_feature (166)..(166): n is a, c, g, or t
tgtgtgtatgtgtcttcccgggaatccaaaccaccccaccctcctcctgtcccgtggtttcatcatatctctttgcanaccccatgtcttccccagttgtcccctggantttggggggacatccccctcnggcatccttctcaaggggaagccaagagaggcatcnggatgggtgggtttctgattgtggcaacgtttgcaaccgtt

SEQ ID NO: 649656 - DNA, 1001 bp, Homo sapiens
ccgggacgcgtgatgggtgtcgggcgtgaccaggcctgagctccctgatctctcctcagtgacatcgtctttaaaaccctgcgtggcaatccctgacgcaccgcgtgatgcccaggaagacagggcgagctggaagtccaactacttccttaggatcatccaactattggatgattatccgaaagtgttgttattgtgggagcagacaatgtggggtctccaacgctagatgcatgcatgatccgtcatgtcccttcgctgggaaggctgtggtgctgatgggcaagaacaccatgatgcgcaaggacatcgccgagggcacctggataagacaacccatgctctggagaaactgtctgtgctcatatcgcgggggaatgtgggtctttgttgttcaccaaggaggacctcactgagatcagggacatgtgtgctggccataaaaggtgccagctgctgcccgtgctggtgccatggccccagtgtgaatgtcactgtgccagccagaacactggtctcgggcccgagaagatctccttttatccaggctttaggtatcaccactacaatctccagggcaccagtgaaagtcctgagtgatgtgcagctgatcaagactggagaaaagtgggagccaggaagcacgctgtgaacatggtcaaattccccctttttctttggggtggtcgtcagcaggtgttcgacatgggtactatagaacctgaaagtgctgatataccgaggaaatctgcttctcggctctggagggggtcgaaggtgcagtgtcgccgcaatggtaccactgtggtcgtacccaatattacagcggaaacagaaccggctgcgggaaggatacctcccctctgaaggacgctctggggcactgactggggcgccgtgttgcaccactctgttttgcctagcacagcgtcgcgcacgagcgtctcaacccacctcagctaacagggtccccctccattcgcggcgtgactatttcatca

SEQ ID NO: 649657 - DNA, 2683 bp, Homo sapiens
  misc_feature (7)..(7): n is a, c, g, or t
  misc_feature (19)..(19): n is a, c, g, or t
  misc_feature (121)..(121): n is a, c, g, or t
ctattanagactgttttanaataagttattaatatttgttgaaatggttccagataacaagaaatatgatgcaataaaacctgataaataaaagcaatataaagattagaatggttttgantaggtagtggaataaaaagttaagttggtagttgcattaaaaaggtcaaacatggggaataattggtagaatgttgtgtatataatatatattgttacgggtgcaataaatattcaggggaaacagagctgctgaaagagaatgaatgcttagaaggaatgttgccttaaaggcttttctaaaactttttaggtaaaggacaaattctgggaggacgaaagataataagtaggactagttacatagagacttaggatgtccatagtctttcaagaaattgcccaacctttgcgagaaggtgttatggtaatatattgatgttgggttaaagcaaattttttcagatagggtagatttttatacatttataaagtaaaggggagtaggaaagattaaagatagatcaaagaaaggaataattgatggaacaactttctggaagagattagagggtatgtgtcttttgaactctggaagacttgattttagagaggataaaggaagaaagtggataattctagaattaaacaccaaaaggttctatgtgtctggcaccatgtgaagcaacttacctattatttcatttcatttcatttcatttcatttcatcctataacagtcctaagagatcaaataatttgtccacgattacacagtcagtatgtagcagggccagcattcaaatcctcatctgtctatcaaacccatattcccttctattatgctatactgttttcaagttgaaggaaatcaaaccaagaatttctgttttttcactgcgattataaggaaaaatattatttttctgaaatgagacatattgatgtttaagaccttgaggtgacaggtaaaatttggaatatctgtgatgggaaaatgcaaaaaggaaggaatgggtaaaagatacctattaccatctatgccctggtatttcacttcttccattgcacagcatagactttagattggccatggattaaaaatttgagaattctgacaaaaaactaaatagaaaggagtttgttttttaagtaggtatatgatgggtcaaatataaacttactactaacaaaactttaaacaattccctaaatgccaaacttttataaacaaaaatcaaacaaaccatcaagcaaaagagtccatagccagcagaccaaatgttgaaatctctgggctaatttgtaagatctatgttttaaaactccttagtgaagaggggcaagaaaacctctcctctttttcctctcttggtggaaatgttttgttgttgttgttggttttttcctatactatatgtaatttctatattgttgttttgtgtattttggtattataaaattatacttcttagattccgttaagaatactttctggggtgtgagccacctgagttattagttagcaaaatgaacctggggaagtgggaagagctagtattctcaattggcaagggattgattcttcaatgggttcagcatttcacttccctctgaaattaagtggcaaagtaatagcatcccttaaaaaacaggacattggtgagaggtagaatagcaggaggaattttgaaacatggagggatggctactggaaaagaactgatgaagtgcagagtctctccagacaatggtagaaaccacaggactacattaagattgggcccaaatactagtttagaaaaaggtaaataaaactagctttacttaagagtacagccagcttaattactggctagtggacatatttcagacaaatctaactggagagaaaaacagaccaggagagaaagcgaagttacaaggaaatggaactagagaaacctcacaaagggataaaggaggtaattaaaggttaaagccagatagcctcgagctcaaaggagaaatattggaggccagataggaaagtgccttcctactcagggggttatggatccagggtggctaaagaatagaagtagagttccacccagggccagagggaacaatctgggattcagacacagcagtggtgccaacgtgaatctacctcgtgctagagtctgagtagcctagtctatcacccaacacagataagactggacaggggctcccaggaaccaacatctaagaagggagtttggagaggggctaaaagaaagcaggttaagccccaaatgtaactgaatgatgaccagggataactatttactagtgcttttatgatttattgtaactctgtaactttcccagtatttgttaattttttaacttctgtttctcctgtacttacgagcagtaaaagttgttcaaaacataaaaaaaaaaaaaaaaaaaaaaaaaaaaaaaaaaaaaaaaaaaaaaaaaaaaaaaaaaaaagtcccctggcccgatttttccaacgtggggactgggccctggggttccccaattttaatcgcctggaagcggatacccctttggcagctggcgtaatagccaatgaggccctaccgtttgccctttccagcagtttgcgcacctgaatggcaaatggcaccttgtaagcctttatattatgttatgcccgttagattttggt

SEQ ID NO: 649658 - DNA, 711 bp, Homo sapiens
cggacgcgtggggtctcgctttgtcgccaggctggagtgcagtggcgtgatctcggcttactgtaacctccgcctcctgggttcaagcaattctcctgcctcagcttcctgaatagctgggactacaggcgcctgccaccaccacgcccagctaatttttgtatttttagtagagacggggtttcaccatattggccaggctggtctccatctcttgaccttgtgatccgcctgcctcgacctcccaaagtgctgggattacaggcatgagccaccgctcctggcccacttttttatacaaacagcttaggtagagtaagccattcttttttttctttctttctttttttttttttggagacagggtctcaccttggttgcccaggctggagtgcagcgggctcaaacatggttcgctgcagcctcaacctcccaggctcaagcggtcctgctgcctcatcctccaaagtagctgggacccacagacattgcaccaccattgaccccagctgattttggcagagatgggtttggccatgtggcccaggctgggccttgaactcctgggctcaagtgatcctctcacctgtggcctaccaaagtgctggcgtacccgggtgtgagccaccatacccggcccgagtgagccattcttatctctaagggcatggtgggaaccctcctggagtctatgtccttagacaccaccag

SEQ ID NO: 649659 - DNA, 131 bp, Homo sapiens
ctttctctggtatcatgcttgtgtattccttccccttgagtgtgggtggactgtgacttgcttctaaccaagagaacacagtgaagtgtatgcgatgtgatgtcatcattcctgtagttacgttacagaag

SEQ ID NO: 649660 - DNA, 643 bp, Homo sapiens
tactgggtcataccacttttatttatatggttatctatgttacatggtttattcaatatagaaaaaatatgaatacattcatagtattctcttttaattgggtaattccacattgtcaaatattgactgtttttatatggggtgtcctacccaattaaaaaaaaaagaggaagaatgacggggcagacagttctgtgtgtgtgccagtgtaatggatataacagcaatatcatatatgtctcttttttgaaacacctagtttgcgaaacgaccaagtgattaaactactgtttacgggctcagggaactgtttctcaagacaatagcaaattaattcattctttccccaagaaaaactcttaaggtgaaacctctctaaaaaacctctatgtgatcgcaggagagaactatgtgtatctccttaaacaggggcgtcagtgctgacacagaaatgttggcttggtagaccccatcggcaccaagggttctggcaccaaaagaaaatctgaggaccattttaaccatcaatttatgttcggagagcacagaaaagaccacatttagaagtccaggttccttctaaaacactccttgttcacaaatacgactcacatggattatatctcagactcatcaagcgtca

SEQ ID NO: 649661 - DNA, 446 bp, Homo sapiens
tgctgtttacatccgtactgacgctggaagaacatccaatggacaagatgctattgacgccacacccagcctaatggccgaggaacctgggcatcgccagctcttgtctccagtgccctgtctccttaggacctcaatctgatcccaaatctggctgtgtcccacagggtgtgtgggaagtggggggaacagtagaggatggctcgatgtcaagcagctacctctttgccccgatgtttcttaaaagcacaaattacactgcctgaagtaagcagttcccactttccctggggagccccaagaacagagtcaggcaaagggtggggagtccagggatcttggggacccctcctacgagagctgcagtctcttccctcaggggaacataccagaatgcatatcgatcagctctcagccaggcttcgacaatctcgcaggccccacta

SEQ ID NO: 649662 - DNA, 243 bp, Homo sapiens
tcgcttggtggctccgtctgtctgtccgtccgttgcgggtgccatcatggcggacgcggccagtcaggtgctcctgggttccggtctcaccatcctgtcccagccgttcatgtacgtgaaagtgctcatccaggtgggatatgagcctcttcctccaacaataggtcgaaatatttttgggcggcaagtgtgtcagtttcctggtctctttaattatgcttctaagcacatttcattcccctt

SEQ ID NO: 649663 - DNA, 160 bp, Homo sapiens
tgagatcgtagagagggataataaaatttacagctccatatttataaacttctggtctagggtggggcaagaactctaaagatgatcattctctcggctcgggatgacatcagatcaatggtgatggaacccacagtggtatccaggcatggtcatccct

SEQ ID NO: 649664 - DNA, 197 bp, Homo sapiens
tcacgagcaactactaactccggtctgatcaagtcccctcgacagcttacattttccttctacaaatccttgccctcccatggatatatgaacaaactccggtttctcatgatacgttagtacggttagctctgtacagtgatcacattggccagtggaaggactaaagagggatcctcttagtagtcgagcctgca

SEQ ID NO: 649665 - DNA, 373 bp, Homo sapiens
accggcgtgccgttccgcgtggtggtgggcgaccgcggcctgaaggaaggcaagctggaattccggggccgccgcgacgaagccgccactgccgtggcaccggccgatgtgctggctacgttgaaagcgcgtctcgcgcagtaatggagctgacccgcatgcgccgctacctgtctgccagcccgatagccgctgtgctgtgcgcaggggcgttgctcgcgggcacgcaggcggcgtgggcgggggcccagaaagaggagtacctggcggattcggtgcgcagtgcgctgtccgctgccgtggctgacagccggccgctgcgcccggtgttcgcgaacaatgacgagcaactcggctatctgcgctggcgggt

SEQ ID NO: 649666 - DNA, 615 bp, Homo sapiens
  misc_feature (1)..(1): n is a, c, g, or t
  misc_feature (430)..(430): n is a, c, g, or t
ntcatgactggagacagctagggttagttatctcctcaagaaacaaagcaaaacaaaacaataaataaacaaataaaaagagagtacatgtagggttgaactggagaagttagagggatcatgaaaaaaaattccatcttccatagctgaacaatataattaaaaaaaaaaacaaaaaaacatcagttttccagaaggacccatttccgggtcttcaagattttcttcagccaattaaagaaaaaaagacagaagactttcccccattcttatataattcggatataaataaaggcatactggttatgtaaaaagtataggtgtgtgagtgtattataagtatccattacagattatatagcataacggggcgttatagcacacaatacattataacacaaaaagtgtctaggaattataacatttgggnataagttttcccctttttaaaattgcactataaacagacttgagaattggggttcattataaaaataaagaactaactcttataccaaagtatcatgaagttatggttacacaaaatatggcccagcccacaaaatacagacaaggggaaccaccggtgttccccttggtctggtcccttgatct

SEQ ID NO: 649667 - DNA, 137 bp, Homo sapiens
gtgatgtatgcgagggcatgatgatagcgtgagaggaaacaaagagttaatgtatcgctgatggaatagtgcaagaaaggagctgccccacccatagtgtatcatctacaagtaggtactccggaggaaaggacccc

SEQ ID NO: 649668 - DNA, 144 bp, Homo sapiens
acacaccgatatcgagctggtaccgacgaaggcgatcctgtgtggctacaaggagccccttgtcctgcctcatcatcatgtgtgaacaaattccaagtattccatcttccttggaagatcttcctctgtgccctactgatatag

SEQ ID NO: 649669 - DNA, 834 bp, Homo sapiens
cccggagacgtcgaacaatgtaaacatgaaatgaggagagtagacaaacagaggagacgatcgaaaacaaagccaaggacagtactgaccatgagaagaccctcgtacgaaagacccagcgaatagtaggagaacatggataccacggcagaacatgacaaagaaaaacacaacacaatagaacataaatacaaaaaagcatagcaaacaaaagaaaatacaacgaaggaacaaaacagaaacaacagaaacacaccaaaacgaaaaagaatgacacaaagaaaaaagacacaaacaaacatacacgagagagaaggcatgaacacacagatcacaaaaagacagcaaacataacaaaatcaaacaaacaacacgaaaataaccaaaagagctgcacaatgatgaaacacaaaaacgccatagacaaaaagagcaaccgagacaggacccaaccaacaagacacaacgaacccacacaaaggaacaaaaggaaaaaagaaacacacaccaagacacaccaacaacacactcgaacaaaaaaagccaagaacagcaccaatgccagcgaaaaacaaccaaaacgtgggcacgaaaccaaccaaacaaatagagaaacaagaatgcaaagtagaaaacacggaagcaaaaaacaacacaaaagggaaagaaccaatggacaaaagcagaacaaaatgcaaacagaaaggaacagcaccaacaacaagacaaacaaaggggcacacaccaaagcacgaaagcgacacagacgaacagaaaagaacgtaacagacacagagaaaaaacaaaaaacaacacaggaatgaaagacaccaa

SEQ ID NO: 649670 - DNA, 338 bp, Homo sapiens
gtgtgctcgactgcaagctcaagagggtgtcaaagggaccaagaaaggcaccacccctgtatggtggcaggcaaaggcgttaaatagccactaaaccatggtcgctccactttcaggagaggaagggcatcctctcccaaagaagcaggtgacagtgcctgcctggccttggggaccacggctgtgcttccactccgcgccctgtttcacagacagaagtgctgctgtggtgggcacgtgggaatggtccatacgagaaccacacaggggtttctgagccagaccaaggtgccagctggacacttcccctccggggcacataaagggtccctgtccat

SEQ ID NO: 649671 - DNA, 227 bp, Homo sapiens
gttatcgatgccaccatttcctccatcacgatctggctgaatcacttcttttatacttggtctagagtagaggtctagcacgccgcagcaaatttccctgtagctttatctatgatccctggtaggcagatcatgatccataggcgagatcaaagttagtttccgaacaaggaggcaacgacggacatcacgagaggtgtaggctgaattctcatgtcttccttcta

SEQ ID NO: 649672 - DNA, 392 bp, Homo sapiens
tcacccccctcagcctcccaaaatgctgggattacaggtgtgagctactgggcctggctgggacaaggcctttaaccattatacactacccctctttgtctcttttaaccactgttgctttaaagtttattttgtctgatgtgagaatagctacccctgctcgcttttggtatccatttgcatgaaatgcttttccacccctttactttatgtgagtccttatgtgttagatgaatcccctgaaggcagcagatagttgattggggagttcttatccatctgtggttctgtatcttttttttctttttttttttttttttgagacggagtctcgctctgttgcccaagctggagtgcagtggcgcaatctcggctcactgcaacctctgccc

SEQ ID NO: 649673 - DNA, 1061 bp, Homo sapiens
aacaatggcaggtcgaggccgggtttaagtcggccgaggggcaaatggtagctttaaaccaaatgtgtcagcaagcatattaatgtaagtggaatgcaaactccaattaagtgtgttagattggatagacaaaacccagctatgttcattcacaggcttcacatatcgagtccaaggatgcagagtgaatgcgagaggccagaagccaggcaccacccacacatctgctacagctgttcacatctgacagcacggcctcaggcaggaggactcattagagatggagggacagctcagtgaccaagtggtgaggttaatgggatgacacaacaatgctaaacataaaagcaccaaagaacacaactccaaaatgtgactggaacagaaagaactaagaggagaaatagacaatcacagtgagagatctgaacacttgcctcagcagcaaataaagtgagtgttgttccagaatgtgtcctgactgaccactccctctggccccagtgaccatcctgccggacggccgtctcctccctggttgagcagccttgagcaagggtagcagtgggcagtgtgtggaggccagaggcctctcacgtccacccaccccaaaggcactgccctgggggacagctgagtgaggagagagggagacacccttgaagcagggaggggagagttggagggagtcacatgtgggagtgaagcccaggagaggaggaggggcagagcatgtgccgctgggggcagacaggctgatggagggagagggggagggctctgagcccagggtgagaccatggctggtacacattggctttacagaccatctttctatgtttggtaacccacttccttattttaaaatcggcaaatagaaaagacaaaacaaaaaaccggacttttttcggggcgaaacagattagggccgagtatatgtccgacccttctgtaagggggaatggggcccaatggagatatcaacgcgtctagggggccggggagaaggcgaactcgagacgaccccaatacgtagctacatcaactcatcgcagcgccca

SEQ ID NO: 649674 - DNA, 305 bp, Homo sapiens
  misc_feature (75)..(75): n is a, c, g, or t
gccaggtctagacgactgtgtggggccgtccccatgcacataggggatagagatattgacgcgctcgcgaccgcncgcgcacttctctatgatgcacgagaagtgctggcggggaccagcactgacgccgaccgtactgacaacttcgactgctcaacctgccgcgcccccgcacggattgccacagtggtggctgtccctttgccgatcctttcgttttttcggaggatgttgcgaagacatgtctgtctttgtcccagacccgcccttctaaaacagaaaagtaacccaaccgcaacaagaca

SEQ ID NO: 649675 - DNA, 176 bp, Homo sapiens
tgacactaccgtctctaccaaaaacaaaaaaaattagccaggcatggtggggcatgcctgtagtcagcagctgctcggggggctgaggcacgcgacttgcttgaactgaggcagggttgcagtgagcccagatcgtgccagtgcgctctaacctgggtgacagaaagagactccat

SEQ ID NO: 649676 - DNA, 402 bp, Homo sapiens
gcccgtgtgtatgactctagacggatccccccgcttgtatggaggcgaaaaattacgaagacgacttgcaaagttgagaagctcaaaccattagaggtagagctgcgacgccttagcagacctttcagaatctatgttcatgattttgcctacatgaggaagcgagaagaggagatgcgtgataccaacgagtcaccaaacactcgggtcctatacttcagcatcttttcactgttctgtctcattggactagccacctggcaggtcttctacctgcgaccgctcttcaaggccaagaactcgattgagtaatgactgaggcatatactcctcccaccttgtacctcagccagcagaacatcgatgggacgtgcctggactaaggaaatccaaagcaagcta

SEQ ID NO: 649677 - DNA, 122 bp, Homo sapiens
tgatctagaggatccgggggatgcgtgtttatcagaccaaagcgccgggccgcccccggcgggcgagagggctgacgggtggtttgatctgataaatgcacgcatccccccgggaggcgggg

SEQ ID NO: 649678 - DNA, 865 bp, Homo sapiens
  misc_feature (781)..(781): n is a, c, g, or t
  misc_feature (823)..(823): n is a, c, g, or t
caccaccaggccttccttgcaagagttcctgaaggaagcactaaatatggaaagaaaaaaccattaccagccactacaaaaacacactgaagtacatagaccaatgacactataaagcaaccacataaacaagtctgcaaaataaccagctagcatcatgatggcaggatcaaattcacacataacaatactaatatcaaatgtaaataggctaaatgccccaattgaaagacagagaagtgcaagctggataaagagccaagaccgattgatacgccatgtttaagagacccatcacatgtgcaaagacacacataggctcaaaataaagggatggaggaaaatctaccaagaaaatggaaatcagaaaaaagcaggagtcacaatcctagtttttgacaaaacagactttaaaccaacaaagataaaaaaaaaagacaaagcaaggcattacataacagcaaagggttcaacaagaagatctaactattctaaacatatatacgcacccaatagcagaggacccagattcataaagtaagttcttagagacctacaaagagacttagactcccacacagtaatagtgggagactttaacactccattgacaatattagatcattgagataaaaaattaacaaagatgttgaggaccttaactcagctctggattaagcagacctgatagatatctgcagaactcttcactccaaaacaacagaatatacatttttctcatcatcacatggctcttaaaaatgatcacataatcggagtnaacacttcttagcaaatgcaaaagactgaatcatacagtctntagaccattgcacatcaattgactcagattagaaatccccaa

SEQ ID NO: 649679 - DNA, 117 bp, Homo sapiens
  misc_feature (20)..(20): n is a, c, g, or t
  misc_feature (22)..(22): n is a, c, g, or t
  misc_feature (31)..(31): n is a, c, g, or t
  misc_feature (39)..(39): n is a, c, g, or t
  misc_feature (104)..(104): n is a, c, g, or t
ttcagggataaaatgggatngnggactaaanaatcaggntctggtccaatctgccagtcttcctgaaaaatcgaaaatacaccaggctgctatatcagagccancctggccagcact

SEQ ID NO: 649680 - DNA, 90 bp, Homo sapiens
gtaactttgaaaacattttatgtgcagccccctttaaaggatgcccatgtgctaatccatgaacctgtaaatacgtttacttccatggca

SEQ ID NO: 649681 - DNA, 161 bp, Homo sapiens
cgatacgactcgagctcggtaccgaatctcggacaggtggtgcagtcacagaaggaggagtgattcaatgtgcccgaaaggaagaacacatggcagaagtaagagaagacatgtatgtttatcagaagtgttctgagacgaaagagagacccaggcggtcc

SEQ ID NO: 649682 - DNA, 746 bp, Homo sapiens
taaccctgcaaaaacccttttttaacttttggagagcgggtccgctataacggaaaccttgtatgtttccaaacatcttgtagagtgtttcggggcgcaatctgggcttattggtcggcccgatgaaaaagcacatcactgggcgcactgcagaatgccatagactgaaggatattaacatgccacccctcaggcgcaggaccaggtgcagggtcagactcttcctggagatgtgtacaccaagaaacgagttgcggccattcttctcccagcgtgctttgccgtgcaaagattgacccctcgtgcgtggctcgggggggatcgcctttcttaatcttgggatttctgggcctccacattttcccagtggttgctcacgggggcctcccaccctccagagttgagtggctcttgtcacccggcatagagggggctcttccaccaaaagaactcggtcatataccacccctcttaagaacgccaggacaccagggtcgccggggtccaaacctcccttcgtggaatgttcgctagccgaaacaaaaattccggcccaatttccccagtgtctttgaccgtgcaaaaaatagagccccgtgcagggcccgagaaggaaatgcctcctaaacaccgggacctgggcccttccacatttctccaaaaaggggacacaggggcctccactacaaaggaagaaggcctagccggacaagggcatccaaaaaaaaacgtgaaaaccacactaa

SEQ ID NO: 649683 - DNA, 81 bp, Homo sapiens
ttctccggaacacagtttttctttaatttcagatttcaactattgcagaaagtgaagattcacagtcagtggatagtgtaa

SEQ ID NO: 649684 - DNA, 150 bp, Homo sapiens
cccaggcgtatgttaccctaatcactggtggtgatcagccaaactctcaggaacatccccagtttcaggcgattggccttccatttatggtaacaacatctaaaatccagtgccctctgattttttggtggtggtggtggtggtggtttg

SEQ ID NO: 649685 - DNA, 219 bp, Homo sapiens
  misc_feature (3)..(3): n is a, c, g, or t
  misc_feature (10)..(10): n is a, c, g, or t
  misc_feature (61)..(61): n is a, c, g, or t
ccngggtggncgggtcgcctggggccgggaatttggggccggactggccgatatggtgaanacctgtctctgctgggaatgcagtaattggccagacatggtgacgcctgtggtcccggctgctcggggggctgggccacgagaattgcttgaacccggaaggtgggggttgtagtgggctgggattgtgccactgtactccagcctgggcaacggagc

SEQ ID NO: 649686 - DNA, 449 bp, Homo sapiens
actctagagcatactatgctatgtgggtcagagcagaaggaggctggtttacctagagatcattcacttgcaggggagtcacaatgagcacaagctacctcaaggctgtgtgaggaccaggggctcctcaccatggtcagggtcttaagccaggagttctaaatcttgctttttgctcaagccagaagagccccttgccatctacctacattcatatagtcatttgacagacacacatagggacaggttcagaaacactggacactggtgcagtcacacagcaataaggccactatggctgggacctgtccccaaggcccgactagctccagagctagttgggccactcttcccggctgtccacagggctgtagcagatacgaggcctggggaataaagatatgagggaaactggctgggcgcggtggctcacacctgtaatcccaggc

SEQ ID NO: 649687 - DNA, 873 bp, Homo sapiens
gatgatcagtaacggctaaaaccaggcttatcccataaatcccgctgagcctgtcatagctatcaaattatacccagataaagcttctggtggctaatgacatggccatcacccatcgaggacacgggcaggaggggctctccgggagcatatggtcatgcggaggagacactgatcatatggaggctctgaagtactaatgtaggtcgatgccatacaacgacacttgtaaactctataaccaagtaaatgaatgacttatgtataaataatgaaattaatgcagaaatggacaagttcttcgaaactcatgagaacaaagatacaacatatttcaatcagggggacacatttaaccgcagtaactggacggaaatctctagcactaacgctaaacgccagcataaaaaagctcgaaagaggtgcaggttagcccggattaaataaattgacgcactcatatataagcaatctataattgttaaaacaaatctctatctctagaggtgaaagaaaccctacttttacgatgacgaaatgtcgcttgtacttaactgcacgaacaggcatataaaatagaaaagttatagaacccgccccacacgccctttatgattaaaaagtaccagtgtaacggtagtttatggcacgcctccccaccaaagatacctgaaaaagttcccctaaatggacttgtctcctatccatccgccgacagccaaccctacttttataatcccttaacggctttgattgtcatatgtaataatctcgctgggtctgcctatatactctcctcaagcactcatccgagatgtccacaacctcgcgaaacctactcctgctctcgtttaaaacgcactgcacccctcg

SEQ ID NO: 649688 - DNA, 168 bp, Homo sapiens
ataaggttaaaacttatataagtaaccccccccctatctgggattttcaatttttttttaaaacggcttttcccaatatgagactatgttaaagaccctattcatgcctcttagtttcttgctttctctgtgatgggggtggattaaaaagctctgttttggccgcca

SEQ ID NO: 649689 - DNA, 813 bp, Homo sapiens
accacttctcctactgccctcctctccccctgtcttgcctagtttataagacaggagaaatgggagaaaacaaaaagtgagaaagaaacagaagataaatagccagatgaccttggtgccatcacctggccctggtgttaataatatcaacccctaacctaaactacttgtgttatctgtaaattccagacattgtataagaaagcattgtaaaactttctgttctgttagctgatgcttgtagcctccagtcatgttctccatgctttcccagtctatcataataaccctttcacgtggaccctttagggttgtaagcccttaaaagggccagtaatttcttttatgaggagctcagctcttaagacacaagtctgccaaagctcccagccaaataaaaccccttccttctttaaaaaaaaaaaaattcatcttaatatactatttaacatatttttctcttataaaactctttataacaaaaatatctttaggtggggtcctcgtcccaatcttccttttggggggtatttttacaaattccagggcatttgctttttattttctttctcgggaaaatctctttctttattctcaattttatgtgctatgtcatttcttcgtcctttttttctagttatgttttttattcataaatgtccgctcttttattctctttttctaaacattaagcaaatacctctctttctcaaatgttaaaattggaacaggctacattttccttttaaatccctgttaatacatttcgtttatttatatatttttctatccttaagtggtgaaatcgtctaa

SEQ ID NO: 649690 - DNA, 257 bp, Homo sapiens
tatggaagactttatgactctcggaacgatcgtatacagagagatcaggttgtaccaagtatggagtgcaagcgcagattacatttggcctatacccgtgtggtctgtgattgcccttacgtaggcgtgtgagagtaatcagagctggattctcccgagttgctactgttccgtaatacaaaagtggtcactagactactagctgagcataatccctagatagcatctgttccagtagggtacagagccctaactac

SEQ ID NO: 649691 - DNA, 211 bp, Homo sapiens
gtcgtctctagcaggatcccccccggacataaggttagaggcggaacctacaattctggcctcctcctgttttttattttgtttcgttttttttgttttttcgccatgaagtgtgaacattacagaaggagctggcccctggactctggccactgctttggcccccgttgccctgtgctgtagcctcgctggctcgtgcctagtcgacacc

SEQ ID NO: 649692 - DNA, 716 bp, Homo sapiens
gccaggtctctgactgcgggcttgtcgctggtggcgtcggagccgaggcggactggtcaggatgatcacggacgtgcagtcgcgatcttcgccaacatgctgggcgtgtcgcgcttcttgcttgtcgtccctctatcactacgtggccgtcaagcaatcgccaagaagcaggattgaaagtggcgctttctccgcccagggttccaggacatagtctgaggcaagatggagggtatgaggggccttcacacttcacttcatccgttctacccatcagaagatacaaagcagtacacctggatttttccaaagcaagtttatttcctcagagtcttccttaatgcctatggaagaagaaggctgccactgaatagggcccagttataggggcttggtttttctactccctccccccaatataaaagtatagacgttgttttggtggtcctaaaaaattataggaacatgagcaagaccaaacgatttttttccggccgcttagccccgcagaaagtgtttctcagccatctcgtgtgtgccggcgccgcccacaagtgggacgatagccttgagccacgcctggccaaaggaacccccggcactcaccacgggtggggttgctcccaataaaaccgggggcccccaggtcttgaccacccccagaggagggtcgcgccacggtttcaccgggccacgggcaataatcagcggggggc

SEQ ID NO: 649693 - DNA, 768 bp, Homo sapiens
tgctggtttctccctagtggttcctgtcaccatgagctgcaggtggagctacctgccagtcccacgccctgtgcccacactcctcagcccttggctggttgatgggactgggcgctgtggagcagggggcggcgctcggggaggctcaggccgcacaggagcccacggagttcggggaggctcaggcatggcgggctgcaggtcctgagccctgccctgtgggaaggcagctaaggccctgtgagaaattgagcacagcagctgctggcccgggtgctaaaagcccctcactgctccggcggtggggccagctggctgctccgagcgcagggtccgctgagcccacgcccacccggaactcgcactggcctgcaagcactgtgcgcagccccggttcccgcccatgcctctccctccacacctctccacacctccccgcaagctgagggagccggctccgccttggccagccgagaaaggggctcccacagtgcagcggcgggctgaagggctcctcaagtgccgccaaagtggaagcccaggcagaggaggtgctgagagtgagtgaggggtgtgagggctgccagtgcgctgtcacctctcactaattatcccttagtttatttcttcgttcaaaatggagtttcgctcttgtagccaggctgcagtgcatggcaaatctggatcatgtactcaactctaagtcagcattcgtgctcaagctccatactgggacagccccacggattgtttaaaaaggacgaccgg

SEQ ID NO: 649694 - DNA, 174 bp, Homo sapiens
tttggcggcactcaaagcgattgcgagatgggggtattcaaaaaggccacatgacaatgcactatcgcgccctagctttgcaggttggcgcacgtgacgatgaaattgccactttggttacacaattacaggcggcggaacaagtagatgcagccgtcgcaacagacctactaa

SEQ ID NO: 649695 - DNA, 248 bp, Homo sapiens
tgacatatagaatcgagctggtacccccgatagccgacagtgccacattcaattacaatgtctcgacaggagtctgtatgttatattgccgtcgctacctcccctgggctggggaggtgtgtaattagcgcgcctgtctgctgtccttgtcgtgtggtagccgaaagtgaggctctctctctggaatcgactcgtgatactccggtatcggtgttcaccagtggtaagcacggcgagtagcatccggt

SEQ ID NO: 649696 - DNA, 921 bp, Homo sapiens
  misc_feature (524)..(524): n is a, c, g, or t
gatttcaccctgttggtcaggctggtcttgaactcctggcctcgggtgatccacctgcctcggcctccctaagtgctgggattacaggcgtgagccaccatgcccggccagaaggtattttaaatttataggctgaagctaaagttgtctgggttaccttatatgacctttttaacggttgggatcggattcttttccaacagaacacttgattatcattagaaatagttcacgccattgtccccagctcatgaaacgggtcgctgctcgagaagatgaggcacactgtcctcccatgaacaatgatgcacgaaacttcagccaggctagagcgcgcaacgctagcatcgcgtctgaggcctgaacgcgcatgaccatacaaggttcaggagaactctgggctcgtgcgaacacgtataatggcagggctacaacgagtcgatgcacaaccgagccacgtgaccggctctctcgctcctttcccctcctatcttcctctcttagactgcttgtgcctctagcgntgctacagaaaccaggggcagggcctgaactctacgcgctggcacgaagggagctggcgaactacgccaccacaccccaccccacgggccagcgaactctctccgcctctcccacccctctgcgttaccctgcacccctacccgacacagagccagcaccacccaaatcctggcactccagcaaacagcggcgacacccacacacccccctacaacccacgccaccccggcgcaaacgccgccacaccccgcgcaccccacccccaacgcggcccccccaccccgcaccgcccccctcacgccgccaccaacccgcccctcgcccccacaccacatgcacgcacccgccagacgcgggcaccacgcaccacctcccccccgacgccctacccacccc

SEQ ID NO: 649697 - DNA, 130 bp, Homo sapiens
ccgactagccggacaggggcggggggtacgtggaagactcctacctaccgagctcacaggcgctcgggtttgataaacaagagagctggagaggctgccctcaacagtgcgctgtcgggctagtcggggg

SEQ ID NO: 649698 - DNA, 373 bp, Homo sapiens
  misc_feature (368)..(368): n is a, c, g, or t
taatgctggctggtctggcctgagtaactgcttggtctgccagacctggctctggccctactctgccctggcatacccttgcctggctggagcccggtcctggtccttgtcctgccccagctgtggccctggcctgccctgcctgtgccctcttctatcctgggctggccctgccatggcctggtcttgccattgccctgccctagcctgctctgcttgtgccctagatctgccccggcctttgcccctgtcttggttctagccttgactcagccctggaccttccctgaccttgcctcagccctggcactaccctggccttgacttggcatttgccctactctctctatggcctggctctggtcctnccctg

SEQ ID NO: 649699 - DNA, 379 bp, Homo sapiens
  misc_feature (46)..(46): n is a, c, g, or t
  misc_feature (85)..(85): n is a, c, g, or t
  misc_feature (96)..(96): n is a, c, g, or t
  misc_feature (98)..(98): n is a, c, g, or t
  misc_feature (103)..(103): n is a, c, g, or t
  misc_feature (112)..(112): n is a, c, g, or t
  misc_feature (116)..(116): n is a, c, g, or t
  misc_feature (118)..(119): n is a, c, g, or t
  misc_feature (121)..(121): n is a, c, g, or t
  misc_feature (125)..(125): n is a, c, g, or t
  misc_feature (127)..(127): n is a, c, g, or t
  misc_feature (136)..(136): n is a, c, g, or t
  misc_feature (138)..(138): n is a, c, g, or t
  misc_feature (170)..(170): n is a, c, g, or t
  misc_feature (172)..(172): n is a, c, g, or t
  misc_feature (174)..(174): n is a, c, g, or t
  misc_feature (178)..(178): n is a, c, g, or t
  misc_feature (200)..(201): n is a, c, g, or t
  misc_feature (217)..(217): n is a, c, g, or t
  misc_feature (230)..(230): n is a, c, g, or t
  misc_feature (256)..(256): n is a, c, g, or t
  misc_feature (258)..(258): n is a, c, g, or t
  misc_feature (262)..(262): n is a, c, g, or t
  misc_feature (272)..(273): n is a, c, g, or t
  misc_feature (280)..(280): n is a, c, g, or t
  misc_feature (282)..(282): n is a, c, g, or t
  misc_feature (292)..(292): n is a, c, g, or t
  misc_feature (307)..(307): n is a, c, g, or t
  misc_feature (339)..(339): n is a, c, g, or t
gcaggcaggaggacatcctcctctctgctcaggaccaccacggganttctaggcactccacctcactgttcttcagaaagctgtnatgtgagcagntnctatntcggtaatnaagntnncnaaantnaaccatgcnanacccttcctcctagtccccatgctctcctggnancntggnagctctgcttacttccgtttgnnttttttcttttgttanttacattgctgtnctctttggtccttcttcatccttgantncacnaccttgaaannacctctnantccagcaggncggggaaattaacgnaccacaacatttatgagcatacaaaatagatnaaatggcgtaaatcaaagccaagcacagccttcttgttga

SEQ ID NO: 649700 - DNA, 108 bp, Homo sapiens
gatgcaaagaactcttataaataaaaaatactagcagacttatttttttctttattttttgagagagtcgcgctccagcctcggcaacatgagtgaaactccatctca

SEQ ID NO: 649701 - DNA, 603 bp, Homo sapiens
  misc_feature (5)..(5): n is a, c, g, or t
  misc_feature (185)..(185): n is a, c, g, or t
  misc_feature (221)..(221): n is a, c, g, or t
  misc_feature (230)..(230): n is a, c, g, or t
  misc_feature (279)..(279): n is a, c, g, or t
  misc_feature (300)..(300): n is a, c, g, or t
  misc_feature (310)..(310): n is a, c, g, or t
  misc_feature (315)..(315): n is a, c, g, or t
  misc_feature (334)..(334): n is a, c, g, or t
  misc_feature (344)..(344): n is a, c, g, or t
  misc_feature (372)..(372): n is a, c, g, or t
  misc_feature (600)..(600): n is a, c, g, or t
gcgcntgattccgggctctcatataggagagaaactgcccagggatctcagccaggacacctttagccaatctagccatgcccagtatgtggttcccactcctgtcaatataatccctgaatggcacaaactgcacaatgtctctctcagcatattttcccctagaggagactcttacatcaccnccatccaattcgaccattgcatcaaattctgccggnccaacaccnaccataattattgacattggaagttttgagggattaactatggactccnttagtctgggccatatctganaaaacaccanctgtnataataagaagcacaaaanactgggagcnatcctttacagaagaagcataccttgcnacatgattaattacaggagcaaagtgggggggcccatatagttgtacagatttaagactcctgtaataagcctccatgaacccctcaatgccatcacagttggggttttgaggattccatttaaagcaaatacgtgagaaatccttccatctggagggagttttgcaccaaatcctagagctggaaacattttatcactgttataatcttgaacaatttctcccactncct

SEQ ID NO: 649702 - DNA, 285 bp, Homo sapiens
ccccacaaacccaaccccctggtcaacctcaacctaggcctcctatttattttagccacctttagcctagcggtttactcaatcctttgatcagggtgagcatcaaactcaaactacgccctgatgggggcactgggagcagtagcccaaacaatttcatatgaagtcaccctagccatcattttactatcaacattattaataagtggctcctttaacctttccacccttatcacaacacaagaacacctttgattactcctgccatcatgacccttggccata

SEQ ID NO: 649703 - DNA, 152 bp, Homo sapiens
ggccccccccccctggggggggggggggaaaatttttttttaaaagggggccccttccccccccccccccccccccaaaaaagggggggggcccctttcccctttttttttttttttttgggggggggggttttttttttttttggggggta

SEQ ID NO: 649704 - DNA, 442 bp, Homo sapiens
agcaggctttatgtctcctcgaaagactggccatcgttactcatgtcatcgttaatggctgttactggtctaggctgagctcagagttccttcagcctggctgctgcttgtcaaggtggagggtcctgagcccagggagcaggtgggagtgccagccctgccccttctcctttattgggccagtggtcctcacttgtcttctggatgtttcaagagacccagtttcttcttttgtctgcatccttttcctgtttgttatgagtgaaacagtattgttgcaatcccagcactactcagaattaatcatcttttatccagctattgaggtttggtcaggaaggaagaaaaacacctgctctttctgtttctctagtgtggggcaaaatgggggctataaactctggccttcaggatgatgcctggtgcagggaatggcaaaaaa

SEQ ID NO: 649705 - DNA, 597 bp, Homo sapiens
gccccgcgttcaaacaaggttcccaaggagtgccccttctgttgggcactgcattttccgacgccggcggttacaaaaaaagctcgcccccacgcacggtttctaatgagcgtcccctgccccctaagtgtagaaatggactgttcatccccggctgttgttcctcatggcgcggcacatttccgcacacaggacctgggtgaaatgacccttccctagtcagcgaagcctactgttcatcaaatgagggctctggcccaaacaagaggaacacctcgtcgtaacaccagaccccatagaaagtgcggagatgtgctaacacccacactgggtttctccatagacacagctcctcctataacattttcttagagttctttcacaagaaccccccataattatgtctcaactttccctcccactatgataaagcactacctcacgctcagacatgataacccccgaacctccatcccctcttttgtatttatcagcaactttctcgcctccgagacaagaaggtttttaagggcccactttgcccccccccttccttcaaaagcgaccaacaaattggtaaacataaacaacataatc

SEQ ID NO: 649706 - DNA, 210 bp, Homo sapiens
tggtacctgcctcagctcctgagtagctgggatagaggtgccatacctgggtaatttttgcatttttagtggagagggagtttcaccatgttggtcaggttggtcttgaactcctgaactcaggtgatcctcctgcctcgggctcccaaagtgctgggattacaggcatgagccaccgtgctcagccgcaaaattctttatgaattttac

SEQ ID NO: 649707 - DNA, 346 bp, Homo sapiens
  misc_feature (179)..(179): n is a, c, g, or t
  misc_feature (216)..(216): n is a, c, g, or t
acatacacgtctcctaatccctcctaagaacccccctagattagcctttgtaaccctccttttacaaatgaggaaactggctgggtgtggtggctcacaccctataatcccagcactttgggaggtcaaggcaggagaatcacttgaagcccaggagttcaagaccagccctgggcaanaaaatgagaccctatctctacaaaaaaatttaaaganctaccttacaggcctatagtcccagctactcaggagactgaggtgggaggatcacttgaacccaggaagtcaaggctgcagtgagctgtgatcatgccactgcactccagcttggataacagagtgagac

SEQ ID NO: 649708 - DNA, 229 bp, Homo sapiens
tctgcccacctgagctgccgctgtgcgcctctgtgaccttgctgtggggcctgaccgctggctatgaactggcccggatatcaggcgccctgctggcactccaccttgactcttggctaacctgctcctagcaggaggtcctggcgggcagcctgctcccgggggctctgctcgcctccctggttggtggcttcctcattgactgcttatggaaatgactgctatggca

SEQ ID NO: 649709 - DNA, 744 bp, Homo sapiens
  misc_feature (655)..(655): n is a, c, g, or t
cagaacacactgacccgctggaactgacttgttgcttcaacattattttggacagaacaaagacgaagactactctgccaacctactatccgcctacaattgcctattctcttgctacctacaccaccattttaccatccatctcctgcttttgggacctgccatcaccgtcataggagatcgctgcttatctataaccaaccattagctacaaaatcccacacagttattccaacgaagactaggcagccaaacccaccctgatcactttgtacctgcatgacttgtacacaatacatatttatatgctgctatactaaccgccactatgcagctctgtaacgagagagccactacttccaccatttggacaaggtgaatcactagggctaccttcgtatactgaacatgctgaaacggcgctgcatacagcactctcttacaggcacttttgacaccggtctggaatgagtacggtgaaaccccggacgccatcaaagctgccatggtcctgcataaaagcagaccttggcctttcaatgctgatggcctaccttatgcccgactgacccaccactctgagactactgagaaccccttcccactgaggaaccgatctctcgacatgagtggtgatccctgaccaacctcactngtgagggggccgaagaaatcctttcaactttttttcaaaaggttatttcaccttgttaaactttcctttggccacatgggcgtttttat

SEQ ID NO: 649710 - DNA, 104 bp, Homo sapiens
tggggatagaagacttagcagttagaatctgaactctgaatgctgccctctgagttcctctacccaggacgagctaggctgatgtgtaaatcacagggtgaaga

SEQ ID NO: 649711 - DNA, 175 bp, Homo sapiens
agccgctggatgcaagaattctacttgtcgtgcttagttgctagacattacgtcagtctaatggatcatgcgtgtttgagctcagcactgtgcgtttgggcgaagacgaaggaccaaggcatagcatcccaaagagcctacggatctatagatgacggtacccacgtacggtacg

SEQ ID NO: 649712 - DNA, 133 bp, Homo sapiens
gccggcccaatttgacatgagcattgcgtgtgattatttggacagttagacttgccacgtggggtcagttttagaaattgtttctagctagagggactggtgtccttctaagtctagcatttggggtatggaa

SEQ ID NO: 649713 - DNA, 177 bp, Homo sapiens
ggcaacagaataagactccatctcaaaaaaaaaaaaaaaaagaaagaaaatccctcaagggaatgaaatatctctaaccaaaaatgatttgattacttgtgtctaaggtaacctctaatccgtctaaatttctataaatccatatgtgaattccccacgtgcatcatctttgggtgt

SEQ ID NO: 649714 - DNA, 795 bp, Homo sapiens
gcgcgtaacctccttggcctgtgtgcgaagctgtgtggaccaagcaatgtcagtgagtgtgtgccatgtattcttgagcatgtgctgcccagagggcccacactctactgtccccaccatcagccaacaatgccacctttgccctgtgtgtgccatgtggcaacctacaccaactcctcacaacccttcctgtgctagtgagatgctgcatgctttagcctgtgcagtatgcccaacattatatgccgaccctgcgctcatccaacatgatgacccattccttgtgagaacctgtgtgcccatgcagcactgtgtgtgcatgttgtgatgttgggatgtgaatggaagcttgtgttgaaacttggcatgccttgatgtgatgaaatggttgctttgtgttgttgttgtgtgcactccttgttccaatgtggccaatttgccctgtcttgcgagccacctccattcccttgcgtgtggcatgtgtctattgggctgatgggatggcaacaagccttggctccaccgcaaggccctccttcgtgagggtaaaataacattacatccccaggactgacgacgcttgggtctatgtgaagattgacacttgcaggctggtaattcacaatcttacaaaatgtgcacccgatttgaacctgtcgttcaacacgcttgggtttactggtggcacttgtcctttggcttgtgttcttgcgctcccgttgagcacgactgaccgggacaggctacttggttggagtgactatttgctattgctgaacctttgctccccagaag

SEQ ID NO: 649715 - DNA, 188 bp, Homo sapiens
ggtcggaccatgcgacggactgatcctgggctgaagcgctgacgaagggagcgagacgatgagcgaaacccaaggccaaggccctgccaagcgctggtatgtcgtgcatgcctactccggcatggagaaggcggtcgagcgcaacctgcgtgagcgcatcgagcgcaggatcagtccgttcgcatgtt

SEQ ID NO: 649716 - DNA, 983 bp, Homo sapiens
  misc_feature (423)..(423): n is a, c, g, or t
ggtcccgtgtgtttcgctgtggtgcttcttgtgtttgctgtttttttttgtgtgtttacccttctgttttttttgtgcggctttttttgtctctttcttgttcgtttgtcgaatttccgggtttggcttcgccggtttttgacgtgctcggttctgaggttctgccggttagagtagggtcatgcctattagtttccagtcgttttgtgtttatcgagtttctgtttaagggacctgtcgtgttataatgattttttatttagatcgtgttcgatgtacagatcggtatcgataatttatgtgcgatatatgggaatcgggattccatagtatattagttatatgatctatactgtgtcccgatgttgtagatgaaagaagatgctatttccgatcggtaagataaccttgataatgtataanctccgagagttaatgtaagcctgctttattccatagtgcggccctttaagaatttgtggaaaatttcagagaacgaaagtaaaacccgggaatatgagaaagtaatgctgtcaagagaagaagaaatgaagaagagatatatggcctaaacgaagctattcgactataagaattcttagaagactatgatgatgactagtatatgaccccaatattacagttggaagtgctcttcaacgaaaaggttgcgtgatagagtaaaggtaatggaagcagtatgaacgagttatggtagagagagaaggaggagcttgaggaaatcaggcagcgccttctggcagaagggcatcctagatccagatgcagggctccagaggatggaacaagaggctgagaggcgcagtcagccacaaatgaagcaagagagagagcgagagagggaacgggagcgagaaagtagaataaagacacaaacgggaccgagaagaacgccgcaaagaagatgcatacgaacgaagaaaacttgaaagaaaattccgagtgaaagtagcctgggctta

SEQ ID NO: 649717 - DNA, 539 bp, Homo sapiens
  misc_feature (50)..(50): n is a, c, g, or t
  misc_feature (81)..(81): n is a, c, g, or t
  misc_feature (86)..(87): n is a, c, g, or t
  misc_feature (89)..(89): n is a, c, g, or t
  misc_feature (98)..(98): n is a, c, g, or t
  misc_feature (105)..(105): n is a, c, g, or t
  misc_feature (143)..(143): n is a, c, g, or t
  misc_feature (148)..(148): n is a, c, g, or t
  misc_feature (151)..(151): n is a, c, g, or t
  misc_feature (154)..(154): n is a, c, g, or t
  misc_feature (163)..(163): n is a, c, g, or t
  misc_feature (165)..(165): n is a, c, g, or t
  misc_feature (172)..(175): n is a, c, g, or t
  misc_feature (196)..(196): n is a, c, g, or t
  misc_feature (199)..(199): n is a, c, g, or t
  misc_feature (217)..(218): n is a, c, g, or t
  misc_feature (220)..(222): n is a, c, g, or t
  misc_feature (230)..(230): n is a, c, g, or t
  misc_feature (232)..(233): n is a, c, g, or t
  misc_feature (235)..(236): n is a, c, g, or t
  misc_feature (241)..(241): n is a, c, g, or t
  misc_feature (243)..(243): n is a, c, g, or t
  misc_feature (250)..(250): n is a, c, g, or t
  misc_feature (252)..(252): n is a, c, g, or t
  misc_feature (280)..(280): n is a, c, g, or t
  misc_feature (294)..(294): n is a, c, g, or t
  misc_feature (308)..(308): n is a, c, g, or t
  misc_feature (339)..(339): n is a, c, g, or t
  misc_feature (352)..(352): n is a, c, g, or t
  misc_feature (360)..(360): n is a, c, g, or t
  misc_feature (363)..(363): n is a, c, g, or t
  misc_feature (388)..(389): n is a, c, g, or t
  misc_feature (391)..(391): n is a, c, g, or t
  misc_feature (396)..(396): n is a, c, g, or t
  misc_feature (399)..(399): n is a, c, g, or t
  misc_feature (446)..(446): n is a, c, g, or t
  misc_feature (464)..(464): n is a, c, g, or t
  misc_feature (471)..(471): n is a, c, g, or t
  misc_feature (504)..(504): n is a, c, g, or t
cggccgagcccagctctccgagcaccgggtcggaagccgcgacccgagcngcgcaggaagctgggacgggaaccttggggnacgcnngnccacgcaantcacctncggaggtcaccagcaccctcggaacccagaggcccgcnctctnaangtnacccccctngngaggaannnnatgggccctgcgaggacgatnggncgcgcccgcctcgccccnncnnncatccctncnntnnccttntngcttctntncacgctcggcctccagggcacccaggcngggccacgcccgcnccccctgggttgcncgggggagccgactgcctgaacagttttacngccggggtgcctngtttcgtnctngaaaccaacgcttcggtcagcaacnnanctacnttnttggagttccccaccgtgcgccggggttgggactgcgtgcgcgcctnctgcaccacccagaattncaatttngcgttagtggagttgcagcccgaccgcggggangacgccatcgccgcctgcttcctcatcaattgctt

SEQ ID NO: 649718 - DNA, 253 bp, Homo sapiens
caaatgtctgggctcaagttcctttctttgaactgctgttaccccacctgtaaaatgaagatggtgaattccacttcctagaaattatctggggggcagatgtctgtactgtgtgagtggccacagtaatcatcactataattcaacgccaccacctacgatttgttggaatgttctctcccagatacactgtaatcgcctgcctgttgtgtctcctgtctgtgccgatctctattaaaggactccctcttaa

SEQ ID NO: 649719 - DNA, 461 bp, Homo sapiens
ttatgtcatatgctgtttccctgttaaaactgaaattctacgatttagacttgtgggagtggtcaactcgagcaacagcgggcgttcagtgctgcgtctcgctgggcggagtgtgtgttgagttcatcaaactcccggcctgtgaaagctttttgactgtcacgtcctcatcctgcccgaagatgcctgatgcggctgacatgatgtgccacagcatgtgcccttgttgtccccagtgatcatgatgaccctggatgcctgcttgcctggcacagcttcacggagtgagtgccacctcgattctcggagtgatccagcatgcccacgcagccaacgaagtgtcagactggtctcatatttaataaagttggcagagtcctcaatgtgcatttcttctcttctcagtgggttgtcatgagttggcataccaggcatcgcagtgtgtcgctgccactacccca

SEQ ID NO: 649720 - DNA, 334 bp, Homo sapiens
gaggatccccccgccagcgcttaaccttagtggttggattaaaatgaacggattcgaggagccaagatggccgaatagaaacagtttcggtctacagctcccagcgtgagcgacgcagaataagggtgatttctgcatttccatctgaggtaccgggttcatctcactagggagtgccagacagtgtgcgcaggccatagggtgcgtgcaccgtgcgtgagccgcagcagggcgaggcattgcctcacttgggaagtgcaaggggtcagggagttccctttccgagtcaaagaaaggggtgtcggacgcacctggaaaattgcgtcactcccac

SEQ ID NO: 649721 - DNA, 423 bp, Homo sapiens
tcgatctagaggacctggtcatttcagttcttaattttgcttgcgtgagctcctcatttgctctgctcatatctttctgggtctgatagtaaggatgcacttacttatacagtggggtaacagttctaagctagtcctgacaaggaagaataaaatcagaatagggtgccctgcaatcccagtgactcaggaggccaaagcaggagaatcacttgaggccaggaatttgaaatcagcctggacaacacagcaagaccctgtctctaaaagaatagaaaaaaattagccagcatggtggcgtgtgcctgtagtcccagctatatgggaggctgaggcaggaggattgtttgagcccaagtgttccaggatgaagtgagctaagatcactccactctactccagcctgggagacagtctctttaa

SEQ ID NO: 649722 - DNA, 155 bp, Homo sapiens
ctctttaaacatatcaaggcatgttcctacctcagggcctcaacacccgctattaccttggcctggactgctcctctccagacatggtgaaaccccgtctctactaaaaatacaaaaattagctcggtgtggtagcacacacctgtcatcccagc

SEQ ID NO: 649723 - DNA, 505 bp, Homo sapiens
  misc_feature (1)..(1): n is a, c, g, or t
  misc_feature (372)..(372): n is a, c, g, or t
  misc_feature (409)..(409): n is a, c, g, or t
  misc_feature (421)..(421): n is a, c, g, or t
  misc_feature (439)..(439): n is a, c, g, or t
  misc_feature (452)..(452): n is a, c, g, or t
  misc_feature (472)..(472): n is a, c, g, or t
  misc_feature (495)..(495): n is a, c, g, or t
nctaaatgtcctccctctgacgtttccttctctccaactctcaacacccgctttgtccatttgttagatacatttaatgcaacaacgcttttagatctactttcacttttttaaaaggcaaaatttaatataagttattaacaagaaactatatcctaatttgtaatgaatttcaggggagattatattggatgttgttagtttgggaaagagctttggaacaatcacttgtggagacacaagattcctgggaggacagatatcacatctactaaaattgactttaaagccatctaacactgtactttggcttagatagggaatatacggaaattcttgggtcattaatactgatttagagtcatttgttcnttttcaaggattatcctctaggagtccatttaggagnttaatttgttcnttttcaggattatccacnttttttggggaanggatccacaggctttccggnggtggttttaaaggggaaaggcncggtatttgg

SEQ ID NO: 649724 - DNA, 156 bp, Homo sapiens
cgtctcgatcgacggtttctctggttgactgtgcgtgtctagtgctgtgacttctcttgcttgttggtgcaggtgtcttccttgcattcaagtgggccttagagatgctggagaagaacaaatggaattgctcgtctgcataaactgtaacggtgc

SEQ ID NO: 649725 - DNA, 462 bp, Homo sapiens
  misc_feature (25)..(25): n is a, c, g, or t
tatacttgaaggatgtgctctactncttgctcagaagcatcataatgactcatggcatgttcagcatccagctgatgagggtaagatggtctgccttacagatgaacgtgatagtcatcaggggccttgttcagttcactcagttcctttagatgacgtcgcggacagtctatcaggctatggtcgacacttggaatggcctatggtacaacaatagtgatccgctctggtatactcacagatgctggatcaccgagccattacgatgaagtttggcaggacagcaagtctgagtcatcatggttcggcaatctgcagtcgtgaaagcagcttggtatatgccacacagtcttcctggctcttagtacagcactctaagagcccatcaagtccttggatagtgctgtcattgttggtgtcggcactactagcgccgtctagggctaccgtcgtgcaggtctc

SEQ ID NO: 649726 - DNA, 420 bp, Homo sapiens
gacttttaagctaatattttaagattggcagacttaaaaatggtaaaggcatttctctgttaccattaactacgacttccatgttgcccgctctttccactcacaggccaacttaaaactagagtattttaacattcgcatccgaattttccaatgctagtataatatatatatatgcattagcctggtaggggttttcggtagagtgcaatgcacaaaaagaagatgtgtctataaccttttgcccatttccaaacagaggtgaattggacccgtcctgttgtgtgccttccggcttcctttggagtcacagagggataggagagctaaggctgagaatgtgatttcaggggataaaaattaatatgatcaggtcagagtctcatagccaggttttatgctacattaagcgtcgacgcg

SEQ ID NO: 649727 - DNA, 108 bp, Homo sapiens
atgtctgcagcctccagccaacagacctcaggaaatgaggggatgaacttgcagactctgctgcttgagatcttcaaacaagcatcagctgttttccactggcttcct

SEQ ID NO: 649728 - DNA, 120 bp, Homo sapiens
cagcgtacgtcgaatagcacaacagctatacagcgtcagaccggtagcccgcaaccagtaccaattacacgattaatcaaaacgagagggaacgaaacagaaggggggccacaggagcat

SEQ ID NO: 649729 - DNA, 364 bp, Homo sapiens
cacacttgaaaaatctcattccagagtttcctccagacagctctaatatatatgaagacccttctctcgaacttcatatccatggcacttagagtttaagacccaacacttgcaaattaggtctggaatggtctatgccattaaatgaatccattgtgctcaccaatatcattccatagaacacaccacacgtttaatacagtgccatatgcactctcctttttccaagccatatcacagattcgcaatattcctataggctctgtgcacaaaaacacatgtcatctatattctgtagtaacacacacactattgtggctctctaagattgatacacatgacacacatgtactctctcgtgcca

SEQ ID NO: 649730 - DNA, 774 bp, Homo sapiens
cagtattggggatatctcacaggacccacccctagaggtctccaagcctggacgagaagtcctgcaacgtgcctcctgctcaaagtcacaacagatggcctccgtgaccgagtctcttcaggcgtccagctggccccggcccatgcttggggccctcataggtgtctcatccttacgggggagactgggagataccttcatcgctgacctggttgtcggaggctctaccactgggccagatccagactggtgccccttggcccgatctgagcgcttggcccagtaccaacccagctctctccagaattgaagaggacgtgggccacccaggctaagtttgcccggccaggaacattccagaaacccccttggcccagtaagctgtgggccaggccaaccccttctggtcaccctgttggctatcacagacccctcccctcgtgtcagctcaggcagcttgaggcccccgagcccacacttgccggggtccctgctaatgttatgcgcccccccgccgctggaggttcgtaccgcttccttatgatcttttcccgagagcccagctcccctggaggccctgttggccagctctagcctttgccgtcgtgtaattggccccagatccttgtttttctcgcctcactttccccccagtgttctagagtcatgtgagcctcgtgtcatctcccgggtggcccccggctagatccccggtggttttgtgctccaaaattaaaagcctccgtgacccctgaggtaaaaataaaaaataaa

SEQ ID NO: 649731 - DNA, 1137 bp, Homo sapiens
tggaatctgaagtctggtgtttaactaatggaaaaaaaaaatacaaaaaaggtttggtctctcagtggcttgcccaccgaagccgtggcactaaaacagcccagcgcctcacttcggctgggagaaatatccttggctctttgggacatcaggctggagggtatcacggccaggttctccagccagctggggcacactttccccatgtgtttgtgctcaggtgaacgtggaaggcctgtgaacatagttcctcaaaggtctcattccaacaagaggggccaacggggcgggctcattttacgaggtgactctgtgccgaagaaataccctttattcactcaagtggattaaaagaggccccgtgaaagcgagaagtgcctttcattcgagccctttatagagaaccgccattaattcctgtggagccagagtgggtgccgcttctgcgggctcgtgatataccaagaggaatgtgtttcatgtgggtctccacagttccctccgtgtggttcctagagggtgttttgtgacccagggctagaagtgaccagaaggtgagaaattccaagagaagagcaccaattcactgggcgcagtgagagtttccttaaatttcttctggcgcctatcactggaagcgcaatggatctccgggggggcacacaacgggtggaacgtccaagagggggtacacacacgaagaaccacaacattattttccttggtgagtcaagcaccagggtggatattctgttaaatgtgagccattggggctaaacagcgtgtgggttttgaaagtgggggcgccatggtgtgccccaattttacgcatttcccttgaaaaatttttcttattagaaggtccccaaaaagttgcgaatataaccctttttaaatggggaaggggcggataaaaaatcccccgcggggggccccggtataccgggacccaggctcgtgcacaagggggcccaaaagggagcgcataaaaaaaagaggaggccgggtaaacaccgcacggcgacaacatactgggcttcgtacgagaacaaaccgcgcggagaccgacgaacacccagaagagcgggtgaaaaacgtcggcgaacgcacgcgccaggctacacgccagcagtgagg

SEQ ID NO: 649732 - DNA, 826 bp, Homo sapiens
tggggtggtggtcccaggatttatggaaaataatacagcactacaaaaaaaattacaaacgggtccccgaggggtttggaaattcatcccaagcggtgggcggggggaccggagggtgggacagaagcggggcgaagtctccaaagagcttctcagcaatttctccttatgaggtggtcggggattctacttctcaaataatttcctcgcgggactccaggggcgtgagaacctcgagggaacataagtgggtctctcctttttctctctcctcctcgcgggcagcttggagggaggaatacctctatagggggcctcctcggaaattccgactctcaaccagaagtggcggtgacaataaccgcgggcatactcgtgggtgcggcggagacttagagggcggggggagtagggggggatctcctcgcacacagacgcttgggtccggtggtggaaagtcgatgggcccagggcgcggtgatagtacctattctctagtgagtgaaccggggcctgcctatcatttcaggggttttgtggagtggcagacactgccggccccatggtgggaggtggctccgtgggaggacggtgcactggcaagcacagagtccctgacacactaagatcctgtacactgcggtgggggccccaagcacagggcttcccagggagtggccagggaacgcccccatatatattgggtcttcgtggggaaacaagcaagaaggggcccaaataaaatccgggggtagaaatcccaattgaagcggccctggggtggctgtgacaagggccagctgggagaacaagaggaatcccggag

SEQ ID NO: 649733 - DNA, 126 bp, Homo sapiens
aggaccttaattgaggtcgtgtgggcgggcgggcgacgagggagaacaggctcaatcgtcacccaggagactgctagcttctgggttaagcactgctgctctgaagacgcctctataacgtttgac

SEQ ID NO: 649734 - DNA, 145 bp, Homo sapiens
ctgattcttgaggtaccccaatgcagcggaatctggaggtgtctggtgccatgtatgatcagcaacagtggctggtggctaggccagtgacagtgaccagagtcagggcaacgggacagagcatgtgcaatggccatgggtaggt

SEQ ID NO: 649735 - DNA, 196 bp, Homo sapiens
  misc_feature (57)..(57): n is a, c, g, or t
gttttcaagccaaaccaggcctcccaacatgacatgtgccgcttccactccgaggantacattgacttcctgcaaagagtcagcccccccaatatgcaaggtttccccaaaagttttaatgccttcaacgtaggcgatgactgcccagtgtttcccgggctttttaagttttgctcgggttacccaggcatgctca

SEQ ID NO: 649736 - DNA, 426 bp, Homo sapiens
gtcgtctaaggatcccccgccacagcttctccgccgccactcgtgcccggcgccacgcttctccttgctgtcacgctacgactttactcgctcggccgatgcgtgcgtgaacgctgtacgcctgctctctggtgagtcatctgtcagttatgtcctctgtcagcgtccggccatcccggtccagtcgcaatatgccctggtgaagggcttacccctcgtgatatggtacagtatgggtaagcccgttcaccggtagtctatcacgattccagtggtacggccagagagcgtacagggatacgcacatcctgaatagcaacgatacatggctgcggtgttgaaggtctcaaacatcatcagattcatcttctcatggttgaccttctgtgtcaggcgggcctcagtcggcagcacgagaagtaccga

SEQ ID NO: 649737 - DNA, 238 bp, Homo sapiens
cagagctgaaagcatgcagtagctcagactctgatagagtgaggtagattgtggcagcgtgcaggtaaccgtctgcagttcgcataacagaattagaaggtgggggtgtcatggaatcttaggagccctgcatttcaatttgccaggctttgctgaaacacaggcaccctagtctcacctgagtgtcacccaccaatggggatcattcccttcagaaattcaactctcaggtattcgg

SEQ ID NO: 649738 - DNA, 803 bp, Homo sapiens
  misc_feature (10)..(10): n is a, c, g, or t
  misc_feature (62)..(62): n is a, c, g, or t
  misc_feature (102)..(102): n is a, c, g, or t
  misc_feature (156)..(156): n is a, c, g, or t
  misc_feature (171)..(171): n is a, c, g, or t
  misc_feature (194)..(194): n is a, c, g, or t
  misc_feature (221)..(221): n is a, c, g, or t
  misc_feature (252)..(252): n is a, c, g, or t
  misc_feature (272)..(272): n is a, c, g, or t
  misc_feature (298)..(298): n is a, c, g, or t
  misc_feature (302)..(302): n is a, c, g, or t
  misc_feature (304)..(304): n is a, c, g, or t
  misc_feature (319)..(319): n is a, c, g, or t
  misc_feature (343)..(344): n is a, c, g, or t
  misc_feature (370)..(370): n is a, c, g, or t
  misc_feature (412)..(412): n is a, c, g, or t
  misc_feature (426)..(426): n is a, c, g, or t
  misc_feature (452)..(452): n is a, c, g, or t
  misc_feature (508)..(508): n is a, c, g, or t
  misc_feature (531)..(532): n is a, c, g, or t
  misc_feature (552)..(552): n is a, c, g, or t
  misc_feature (777)..(777): n is a, c, g, or t
aaggggttgntgtgaaagtctcgggcgtgagcaggtacctgcttttgccgcttctggttttngcggacatccactactccccggctggttacaccaacttgnatgaaacgacttctcttgtgaactatcaaggggccgccagaatcacctctgcangttttggggtcagcntaggggctcactcctccagtacnaaggggccggggggtgaccacctctgngatgtccttgactttgtcatagcctggggcnttttgggcatctctctcacngctgcctttcttatccccattcttgntgtngncctccttccgtgtcngctttttctcctcctcagaccccnncggggctttgatatcctgtgcggggngcagctcttccttttgttgctggcaagtggtagttgggggangcctcaaagctcgngttgttccctcggtgcggggggggcngatgggcctggtagtctggccctatttcggcttattcttgggcttgatcggggcgncgtcgtggtcctttttttctggnnttcctgcttcttttttcccnttggtgttgttgttggggtgggatgggactacttctatctccaggtcccgcttctcccctcctacgctgaccttgattgagtgttccttgtcatccacagtgaaacaatgtgctgctgtcagcacaaagtactcagacaccacagcccccatacagctctcgtgtccctttgaagggcgaatgactgagatcttggcctgccatggttgcttgtggtaatcggtnccttcctgtgttcccaaaccatgcca

SEQ ID NO: 649739 - DNA, 657 bp, Homo sapiens
  misc_feature (339)..(339): n is a, c, g, or t
  misc_feature (470)..(470): n is a, c, g, or t
  misc_feature (525)..(525): n is a, c, g, or t
ggcacgagaagaaacttaggctctcattgttcagtaatacttccttaggtcttaagaggtccttgtgtctgcatctggatttcatacatgctcagcctgatgtgtgcttttcatttacttgccttggtgaactacttctcagccttgtgttgagatgtcctttcttctaaaaagtcttccccaatatctgcaaagtatttttttaacttttattttaagttcaggtgtacaagtacaggtttgttacataagtcatagggtttgatgtacagattatttcatcacccaagtattaagcccagtacccattagttatttttcctgatactcatcctgttnctaccctgcaccgtctgaaaggccccagtgtgtgttggtcccgtctacgtgccatgtgttctatcattagctccactcgcagtgaaatatgtcatatcccttattgcattagcatctgcattggactagtngctgctcgctaatctgaggaagagcctgtttcatgaatagatccctgtactctcngcattgagatgccattcaccggttagcttttaatgatgaagcttacacttatggagtttctttgaaatcccggaatggccttgaaatttttccgaaacgtttaaccgtgatggccctggtccctttctttcg

SEQ ID NO: 649740 - DNA, 1350 bp, Homo sapiens
gttgctctgcggcgtgggcgcggggctcttgcgcgctcgctgtgggcggtggcgcggtcttcgcgtctgggcggtccttgggcttggccggttattggctctgtcttgtcgtgcggcgttttggtgtttcgtctggcgtttcggtggcgcgggttggtgcggggtcctgctcggtccttcctgggcggttcggtgggccttcctttgtgctcgtgggcccgtgtcccgtgttggtggctcgttttcgtttgtttgtccggcgtcgcgctgtgtggtgcgtggcgtggggcttgcgggcaacgtttctcgggggtgggtgcgtgcggttctttgtcgcttgcggtgcctgggccctgttcgtcggggtgctcggtatggctgctttgtttggggtgctggtggttgctctgcttggtttggggtgggtggttgggtggctcttgtcgtgtcgcgcggtggtgtgcgtggcctctgttagggttgggtcttgctgcccctggttgtgccgcgtgctaggacggggtgcgctgcctgtgggccccgcgtgcctcgtgctgcgtgcggccgctagggatgccgttctgggctttcccagtcggttgttttccttggctctcgctcttgtgtgtgcgtccggtggtctgctgtgctggtcgtccccttggtcgtcggggtgagggtcgcgcggtgacttgctccgagtgtttgcttcgtctgcgtgcccccctggggcgcacgtgccttgtcccgtctgggactgtcgtgtcgtccgagttggacggtctgcccttggacggggaggtctatgttgtgcctgacgtggtgttcggtatgcttgtggacgtctcggtccttgggatggctgtcgcttgaggccatgttttcccgctcatgttagcgcgcgtttaggtaatcgtatgtgtggtactggagcacgctcgggagtcacgcttcgcttgagtcaaggagagagagatcaggtcctcggtgggcctgagggagcgccgagcgtcacggagtccaccggctgcagggaacttagaactctcggatggagaaacagctggcagctggaccaggatgctacagagtgctacatgaaccgcggaagaagaacgctacaacgacagcatgctgtatcgcgcaggactgacggaccaaggtcctggagtgaagactggtgcgatttggtcaaccagagagatgcccgtcatccgcttccaggaggagcgcaggctcagcgagctggccattgggaaaggggccctgggctagacgaggctgggccgatctgacttgtcgttcccatcaaagaaagcacctcaccccagcacatatgccacccgtgtt

SEQ ID NO: 649741 - DNA, 152 bp, Homo sapiens
tgcttgatgagcatgtgtgtgtatgtttgtgtgtgtgtgtagtatgtgtgtagtgtgtgtgtgtatttttggatgtgcgtgtatgggtgtgtgtgtaatgtgtagtgtagtttgcgcactgtgtgtgttgatttgcggtgtgtgtgtgtacc

SEQ ID NO: 649742 - DNA, 136 bp, Homo sapiens
cggagatgtcccagcaggaaaaggcagtcaaacacaggaggggcagtctcgagccaagcttcagccccagagcggcctgtccagcttgagagcagcagtgaggtgcagagcgagccagcagtgcccaagccggaga

SEQ ID NO: 649743 - DNA, 296 bp, Homo sapiens
atgcaggagaagaaggatgccaaactaagtcaaaaaaacggaacgcaaataaaaggaatgagcacggttacaaagtcacaggatgagtccctgggatctggggcgggagaaggggtgaatcaagaatgacttgagcttgttactccctagcaggctgagggcgtgacacagcagctcgatgacaaagaggtctattatagtttctaacactacaacgctaacttttggaacgtatctacttctagcatgtagacagatctctaatcgcctgccagacggtaagccgcaggaatgcg

SEQ ID NO: 649744 - DNA, 526 bp, Homo sapiens
  misc_feature (103)..(103): n is a, c, g, or t
  misc_feature (509)..(509): n is a, c, g, or t
catgtacagtagtgcaacatatagcgatatatgtcgcggtaccgcccgacgcgtgatgcgagttttctcggcatactttattgttggtcagaacacacgcccngagcgagctctgtatcgcatacagtgtaacaccagtaccgcgatatattatgaagtccctccagtatagaatatatattgatactgatatatataatatcgcgaaatcgcggttatatgagaatagcaaatagaaagagatagcgtagtactgtagtgacccacctttataccccgatgaagaaatatgaatgagtatttgtcctcgacatgatcagatagcgacatttgatggcctagaagactgtaatcacgtgttttttattattataattatcaagcgctacccgtaccagtcgcgcacgccgcgtacgttgccagcggcgctcggcgcatttaattttatataccaggcgcccgtacatacgctgctcaatattcgtagatatagcgagttacccagcacnccccgcgatcttatacg

SEQ ID NO: 649745 - DNA, 2150 bp, Homo sapiens
  misc_feature (1266)..(1266): n is a, c, g, or t
gtccggtttgtgcgtgcagggggcgcgccgcagggcacagcgttggtgtcgtcgtgctgcactggttgtggtcgcgcccaccagggtggggttggtgggttgtgcttgcgcacctgccggtggccgtgctgtggtccgcctgcggtcgggtgatcgcatggccggtgcgggggggagaacacggggggtgggggggaatctgttgtcgtgcggtggggggtcgcaaccatatgtctctggtgggcggtgcgtgttgtggctgtggttggcttgcctcaccaggcggcgcgcccgtcggttgtggtgtgccgcgggggagagcagtcttctgttgtgttgcggggggtgtgggctctcgctggggtggggtggcgcctcgtgcatgttagtttagtttctcgcgtgcgttgtgtgggggttcgtagcctgtgtttgtgtatgtgtggttggctgtgttgcgtggtggggggttcggcttcgtcgatgattctcgtgtgagggggggggcgctagctcggctccgcgtccacagcgtgggtgctgcgcgcccgccttgttggtttgttgtccgtcgtggtgtgggttggggctctgctgcgagcgggtggtcgcgcccacctggttggtggtggctggtgctcggcggtcaggtgtgggtggtccgcaggcgcacgggtcggtcgcaccacgtcgtgcgtgggctcgatgtctcttcgtcttcttggtggtgagtgttggggccgcccctctcggccgcgtcgcctgctgggtgggcgacagaacccgccgtccgccgtcggtcgtctggtgtgtgctggctggtgtctgctggtgtgtccgtccacctacggacggtttgggtggttttgctgacttgcattatccttctcctccggctgtcgcgtcgcggcgtccttcgggtgtggcgagctgtcatcggtcggctggcgtgcgtgctggtgcgtccgatcacagacggcaggggtggcggcggcgtccgcttcgctgcgtggtctgttgttggatgtagtgaccgctcgtcgtcctgcgcggcgctgttgccggaagcaggcgtggagctgtggttgggtagatgtggtgtccggctgtgtcggtgtcgcgccctccggcttcctcgtccgccggtgcaggtggtggtggggcagcactcttcctcgccggcggtaatgtggggctgcggcctcccccgcccagtggaggagtgatgatgattgggtgggggacggactacttgtaggtcgtctntgtaacagacgatgcgtcgcaccggccgcggtcgttggtcctcgtcagtgtttggctccggccgcgacgcgagcgtctgcttcgcggcggctactcgagcgcgtgggggagtcgacggcgtggcggccactcctctccgctgctcgcttgcgtcgcgtctgccggcctcctctgcgtcgtgtgtgacttcgcggcggcgggttgattttgcggcggcgcaccacgcgtcgccgcgtggtggggctcgctacactcgtcgcgtcgcgcgcgcatgtgcgtcgcgcgcggtggcggctctatatgcgcgtgcgcgcctcaacacgtctggtctgcgctctctcggcgcgtcgcgtgcggcctctcctcgcggtggagggagcgcgcgacgacgcgtgcggtgcggggccgttgtcggctgtgcgccgcgcgccgccgctgtggtcgcgcgcgcgtggtgggtgtgttgtttgatagaagttgtgggtgtgaagagagtgtgtggagtgagagaagataacctctgagttcatagagagtgtgttgtgtgtgtgtgtggtctcgtctgatgtgtgtgtgtgtgttgtatagatgtgtgtgagacacacagcagacaacactgggtgggtggtggtcacaaccgcagagagtatattgttgtgtgggaatgaaaatgtctgtgcacccgcgcggtgtcgtgtgtgttgtgtgtggaatagtgtgtgggcctctctccccacctgtgtgtcgccacgatcacaatataatatggtatgaaagcacgcgcggcggtattaaaaaaaaagaaggagaaaaaaaataatcgctgaggcaagatgatcgtgcttggggcgtgagaatgatggatctgattcccttgtgctgga

SEQ ID NO: 649746 - DNA, 938 bp, Homo sapiens
ctttgtgccccttaagcaatatgtggccggaaatctagttctacccggacatctttgcgctataaaaagttgggcccaccttatgttcttcggaccaaattctcccattttggcccgaagaaatttccctccatatggggaaatctccccgtgatctccctcgtttgcaataaagggcattctttctgtaaagccccttgaccacacaggtaattttccgcagccgcgacagacgtttccatattctgtcatgaaacacagcccgttgcccccaggaggcaacccggataggggggcgcaaaaatgtgtaaaacaatcgtgtgtggcttacaaaagttaagatcaagacgcctctcctctagcgttgttacactggcggggacccctgttttagggggagaaataatttcccgccaggatatttttcgttaagcagacccccttctgttaaactggtagttatacccacgccccgaggggagcgctgccgagtataaacgttttggggccccaccagatgtggctataataaaattgtgccgacaagttcatccacccgctctagcggaataggagggtgggacaattaattcccctgctgaggaaaggtggggctttatacagtcaccacccccacaccacaaaatgggggaccaccagcatacagttgtagtttctagaaaagaggaggttcccctgcaacatcattgtggtgctcaactatgcaatacagatacagcagtagaaataatatcccttgtaagcactactgcatttgcggtgaaaaattctctaaccccgtatcccccagaaaattagggagaggcacctttttaggtccatcccaggaggtttgttatcaaaaagtgcgaccacccacccccttggtttttattagcccccaacaaaggcaaaattattttccgcaaaccaaaaca

SEQ ID NO: 649747 - DNA, 300 bp, Homo sapiens
  misc_feature (45)..(47): n is a, c, g, or t
  misc_feature (51)..(53): n is a, c, g, or t
  misc_feature (59)..(60): n is a, c, g, or t
  misc_feature (96)..(96): n is a, c, g, or t
  misc_feature (145)..(145): n is a, c, g, or t
  misc_feature (195)..(199): n is a, c, g, or t
  misc_feature (215)..(215): n is a, c, g, or t
  misc_feature (223)..(223): n is a, c, g, or t
  misc_feature (226)..(226): n is a, c, g, or t
  misc_feature (245)..(245): n is a, c, g, or t
  misc_feature (263)..(263): n is a, c, g, or t
  misc_feature (295)..(295): n is a, c, g, or t
  misc_feature (299)..(299): n is a, c, g, or t
taacagacgaggtcaacgatccctcccttaccatcaaatcaattnnntcannnatagtnntgaacctacgagtacaccgactacggcggactaatnttcaactcctacatacttcccccattattcctaagaaccaggcgacctncgactccttgacgttgacaatcgagtagttctcccgcttgaagcccccannnnnataataattacatcanaagacgtntancactcatgagctgtccccncattaggcttaaaaacanatgcaattcccggacggtctaaaccaaaccanactna

SEQ ID NO: 649748 - DNA, 156 bp, Homo sapiens
  misc_feature (20)..(20): n is a, c, g, or t
  misc_feature (133)..(133): n is a, c, g, or t
  misc_feature (141)..(141): n is a, c, g, or t
  misc_feature (151)..(151): n is a, c, g, or t
ggtcctcggtgttcatggtnacacatggtatgtgttcctcgctcagctggggcaaagtcgtggatctctttcccggatgacccagctccaggctctccacccggaccccgggttccaaggtccctggaggttncttcatgnaaggttctgncttgt

SEQ ID NO: 649749 - DNA, 106 bp, Homo sapiens
gctcgactcttaggatcccctgatcttccgtgccccgactcttagcgacagcaggctgcctgctgtcgttacgtacgaaaccccgacccaggggcacggaagatca

SEQ ID NO: 649750 - DNA, 529 bp, Homo sapiens
gtcatggtggtgttgagagatggtcagaggggagaagtaggggaggaggccagggagttgctgggtggggatctttagtacatgtcgaagacagtcaacaggatttcctgacagactggatatggggtgtgagagaaggcaggggtcaaggttgagtttgattgttactgaaattattaagtaattttaaaaaacactactgcctttcccaatcctaccaagtatgggatgctagattaaagaaatctcttcaggctcattgcagtgctcatgcctgtagtcccagctgtttggtaagcagaggtgcgagtatcttttaagggcaggtgttcgagaccagcctggacaacacagcaagatctgctctttacaaaaatatttttcaaaattaaataaatgtagctaggcatggtgatgtgtacttgtagtttcagctactcaggaggctgaagtgggcagatctcttgaggtcaggagtttgaggccagcttgggcaacatagcaagacccctcactctacaaaaaaaaa

SEQ ID NO: 649751 - DNA, 332 bp, Homo sapiens
catgttgaatggaataactgcatatcaccatgagtttgttttgcttttcaaacagacttgtatgtgtcatttgagtggtttccagattggagcgaggttattctgatctaaatgaacagcatttttttccttagcctctgtttgccactctgggggtgtctcctattgtcaaagccattagaaatgcataaaacctagagacatggtttcccccccaaaaaaaatgactttaaactagataatttactactgacctttcacagagaaaaaatatttcccttgaaaaaaactgggcttgtcattttttcccttgtagctttaagcaaagacat

SEQ ID NO: 649752 - DNA, 1710 bp, Homo sapiens
gctccctattcggattactgaatgctacgccctcatcggaacgccgtcctcacacaccaatggaacgagtctcgcgactatgactgcagaatcgctctggactcatcgtccgttgagaagttcctgacgtgcaatccatcctaacaatagactcatctagtgactcagtgtccatcagacgaatgcaacggtacatccaccgaggacgcccatcagcacgctcttctccattcacagaatcgcacctcaacaatcgacagtcgaaagtacggttcaacagtccactggcatggaaggcaatccgcttccacgtgtcaacgggcccatgtggcggacgcatccaaataataccattcactccatggcttcattgcctaccacgatcgagggacgaggctcttaatgaatttacggacgtcagttgtcgtgcatagcatgcacgagaaaaccctggaaagacccactcagaggccattgtagtcaccgtcgcttggaccttgcggaatataagataaggcgaagacagtgccatgtcaggtagacaggctaagtggtaccattaccccgaaaggtgagggagacgccatagagttactaactaattgtactttggacggggacgaggccccaaccaaggtaacaattataaccaacagaaacgtaataaaccgtgaatgccccggtcgcgaatcgcacgagtcaagcaagttaaaggggggaaacaatgatggcccttgtagtgtgcaacattcgtacaacttcaataggaagggtaacgcgccataacacttcgatggtcacacgtaagcaatggtctcgccaaactcggcgtactagacatcaggaaatgggccggtgtataaacaccttggtaccaactttgtggcacttcagttagacaccccttgggcgaataaacatctcagtctatggcccccattaagcgcaagagcacgtttgcctaattccttcctcgtaattcttcatttgcgcacagtagaaaaaccccgaggggaatttcaaaaaaagcgacacagaccgccccctataaggggaaaaataactaatggcatacctggaagtttcgcgggagtaaaagaggattcaacctcgttagtccaagttcgcttattatctttaaggaggtaacctccaaggaaggatcggatactgtccgtgcttggatagcatcatcgaaccgtaccagagtccgttcatacacctcataatggttgaactaggatgaaaacccgaccgtgaatatacctttgaggcatagaacacatcccccgttaagggcgaagcccccaagtgaagtgacatattagtaaatcgcgataagggtgcaaaggcccgcgtgttaaacagacaacttcgcctttccccccacaagcatttccaaaggggccgccgccaattttcgaatacatttatctccataatcatacaaggcggtatattaccgtaggataccattccccgtagtaggccctgaggccgcctttcaaaggagaagatatcatggagaagggggcagtaccagttgataggcgcccggaaatttaacaataatcacgaagtccgttcgatgtccgtaagagggagaatgaacattagccacagtagcgtcacaaataattaatcacagatagcagcagaggaagggacgatacaagatatatttccgtcgccacatataaaggccgacag

SEQ ID NO: 649753 - DNA, 542 bp, Homo sapiens
gcgttcgacggcgcgcacgggctcggcggctggcagtggctgttcctgctcgaagcgctgccgtcggtgctgcttggcttcgcggtgctgcgctggctgcccaacagcatcgaatccgcgcaatggctgaacgccgacgagaaacgcacgctgcgcgcgaacctcgacgccgatccgtccggcaacaagagccacgcgctcggcaaggcattctccgatccgaaggtgtgggcgctcggcctgatcgacctgtgcgtgctgctcggcctgtacgcggtgagtttctggctgccgacgatcctgcgcgacaccggcgtgaaggacgcgtatcacatcggctggctgatggtgatcccgaatgccgccgccgtgctcgcgacgctgtactgcggcgccagctccgatcgcgcacgcgaacggcgctggcatatcgtcgtcccgttcatggtgtcggccgtcgcacaggcggtcgcggcttcgtcgtcgcacggcacgctaaggacgattctgctgttctcgctgatcaacgcaggcgcggccgc

SEQ ID NO: 649754 - DNA, 419 bp, Homo sapiens
ccagaacggacgctgttagggttggttttactaatcaaagtctccatcaagagcgcatctgtgctttaccacttggggaagtcacacttgaatcagtggttgtgggttaagtaaaaactccaagtggtggccaggcgtggtagctcatgtctgtaatcccagcactttgggaggccaatgtgggaggatcgcttgagcctaggagtttgagaccagcctaggcaacatggcgaagccgctactctacaaaaaaaaatatgaaaatcagctgggcacggtggcatgtgcctgtagtcctagctactcaggaggctgaggtgggaggatcacttgagcccaggagacggaggttgtggtgagctgagatcatgccactgcactccagcctgtgcaacagaacgagactctgtctaaaatta

SEQ ID NO: 649755 - DNA, 246 bp, Homo sapiens
  misc_feature (77)..(77): n is a, c, g, or t
cagcatcgacaccatgttcgctgaactggggaaagtttggccgaaatttgacggtttcgtacactctattggttttncacctggcgatcagctggatggtgactatgttaacgccgttacccgtgaaggcttcaaaattgcccacgacatcagctcctacagcttcgttgcaatggcaaaagcttgccgctccatgctgaatccgggttctgccctgctgaccctttcctaccttggcgctgagcg

SEQ ID NO: 649756 - DNA, 428 bp, Homo sapiens
gttggtacttgtcacagatgcacctgggtaggaagcgtaggcagtgttggggtcctggagtggggtcaactgtaattctaggatgaagtcgtccacgccagccttgtagcgctggtaggccaggaaggccagcacaccccaggagaagatggaaaagaagctgaaggtgatggctgccctcacagagtcggcccccaccagcacgtccttcgggttggtgactgcccactggtggtttaggaagcagaaaccaacaaaccacaggaaggtccagagagctgagaagagcaggtcaccaatgaccaggtacttgcggtcagtggcgttgctgatctggggggaaatacgcgtcgaccaccaagaagaaggcctgaggcctggaaggccagcaccccgatggcactgccatcccagagtgtctggacttg

SEQ ID NO: 649757 - DNA, 227 bp, Homo sapiens
atgaggttgatctagaggatcccattaggcgcgttctgcgtgcactcccagccactcgggaggctgaggcaggagaatcgcctgaacccaggaggcggaggttgtggtgagccgggatcacaccattgcactccagcctgggcaacaagagcaaaactcttgtctcaaaaaaaaaatgtggattctgtggtcctgaccaggtctctggacgcagaacgcgcctaatt

SEQ ID NO: 649758 - DNA, 124 bp, Homo sapiens
tacacagtctcagtgatgatcaaactgacctgcaatgtgacttaaactgactgcctcagaacttaagtaagagagcaaaatccagttaaagctcatgatgtctaaaattcaataggatattact

SEQ ID NO: 649759 - DNA, 869 bp, Homo sapiens
tgggtaaattttggtacaattttaaatagcttaaatggtttttacggccaaataaaaacttgctttaacaatggggggggttgggggtcacaacattcgactcaactctcaggtgctcgggcctccttgtgcgtggggcttgtacactttgaacaatgtggaatgtggaactcctccatggagttgacgggttcccatgtggaacgccacgcacttactccttgtggggacccccactgtgcaccatttaacgagatgttagagaagagtgtcgcccattttttcaccaccccgagagagatagagccgaccccgagagagttctcgagtgtgccccgtggcttttcgagggccgagagagacacccagagtttgtggggggagagtctcgaggatacagcgtgaaaagagcgcgtgtctctttgacccgcgagttgtgtgagagtggcccagggtgtgggggtctcctcgagagcccctgtggggcacccccgtgtgtggtaatctcccccagagtctattatagagagggggcctatttatctattgagagaggggctctagagtggtgagagcatcgtgagggggttttggggcgaatagtgagggatattagtgcccgcgcgggtgtgacaacagaggtgtcccgagctctatataatatcccgccgtaggtcgctgtggataagaaacccctcctcccccccaaagactcttgtgtactatattcggccgacgttgctcccacgaccagcagcggttttgaccgaggggggggacgaatattggtcccccccctatagatgcgccgggggtctggggtgaacgttttcccccccgagtgcgccaaattccctctttgtggtggg

SEQ ID NO: 649760 - DNA, 141 bp, Homo sapiens
tcgtggatccacgctgttgctgcgtgcatgcctttcgcatggtacttgagcatctcaggactctcaatgacggctgtggagagctgggcctcggtcatgatggctgggctcttgccataggtggactggtgaatgcgtccg

SEQ ID NO: 649761 - DNA, 201 bp, Homo sapiens
  misc_feature (52)..(52): n is a, c, g, or t
  misc_feature (107)..(107): n is a, c, g, or t
gttagagactttgggtgaccaggtgcgttacaatgagcagtaatatttttanagaactcttcttttctaagaggtagatctcaacaatgggcttaaatattcagtanaccagccaccgtgaacagccaatgtgccttcttatagtgttctactcattggtcttgttctgcccagtgataacaatgggataacgcctgctac

SEQ ID NO: 649762 - DNA, 133 bp, Homo sapiens
  misc_feature (14)..(14): n is a, c, g, or t
  misc_feature (71)..(71): n is a, c, g, or t
agggggggtagggnctagctggagtggtaaaaggctcagaaaaatctgcgaagaaaaaaattctgaggtantaaataggattatccgtatcgaaggcctggacaggtggtgtgtggtggccttggtatgtgcc

SEQ ID NO: 649763 - DNA, 811 bp, Homo sapiens
ggagtgcccaacatggcggcggccgtaaggtgcatgggtagagccttgatacatcaatcaagaggctatagccatttccaaggatggatttattcagacatcacgtttgttctgtgtcctagtaaacatccagagatgcccaagagacagttttgctgctgacttacaaatgtctgctgaagaaaaacgataaaaagagtgctaaaagaaaagaacagcgcagatgagaaaaaaagatgaaactaggaagaagataataagcatatgccactatatggaaaggtcgaatcctgaaggatgatgtctattctaaaagcgcttatagcccgatgacaggatatatgatggtcggaggaaaagctggttcacttacttaagaaatttcgaaattcttgacgtttacatagtccaaaagctaagagatgttatatccattgatttcgacatctggtgatagtgtgctactggtggaaaagaagaaatatacgtggagcctattgtaccagatgttgcttagtgttgccatagcccatgttgctatccgaaatcaagtaaatgtcggctgtatttacagagaatgcatcagaggtcaaaatagtcggaagaaaatggagctgtattggcagagaggcactagtgctgatacagaagatgagggatgatgaacattgtcggcagactttcacgtatgctgtgtccagaaataatgcctgaacgtaatcgattaagggatgaaactgagtaatcaaagtatccgaaagctgtctcgaagattccatggggcgtgaacatccccaaaatggttgaatta

SEQ ID NO: 649764 - DNA, 268 bp, Homo sapiens
tgctgtgcgtgacatcgcgccccagaagtgatctcaccttccttcgagtgggtccaagaaaaatgaaatgatggttgcaccagataacagactatctcctgattgtgattcacgactccaaccgcataagccactctcttggctccctgtgtcattccttaatttactgccccccaagaatgttaatgtcaatcatgtgggtggactagcacatggcagtcgcttggaatccactcacaccaatccagtgaccgtgtatggtcgggct

SEQ ID NO: 649765 - DNA, 605 bp, Homo sapiens
gagagtaagtgccgcctctgtggtgctctgtgtttcaccttaaaagctctgccaagcagaggctcccgtgcagcgaagagacgctgctcagcaagcaccatcaaatttgccatgctggctggtggaagagtttgtggtagcagaagcagtgctctccatgctctaatttcccgggcctaaaactacccctcgactgtggtcacacaggatatgtcgcgcaaaatcacctgcagctcatctaacgagaaactgagttcaaaagctgccgctcagcctttgcatggaacaaccgcttatcctcggaagttcagaagcgggctgtcgatgtgtgtggccctgatcttcgctcgtcttgtcatcatacgtcagcgacaatcggacagaaaggctctggaaaaggtccggaagcaaatcagagtccatcatagctacattccacaccttgtatcctgggtcttagcagaccctatctcacacacgtgaaagtgacaactggactgatttcgccctcttggctcttcgcagccctcgtggtcggaagtcaccctatttacacccatcttcattctttcagatcattaatcgagcagaaataacaacgacta

SEQ ID NO: 649766 - DNA, 725 bp, Homo sapiens
  misc_feature (725)..(725): n is a, c, g, or t
taacccctccttattttatgcgctcaaaaaccaatttaaacccccccccccttgtaaagggggggcgggaaaaaacaaaaaacgcaaaacccgctgggaaaccaccatttcctgcccccggccatttatgcgccctgatggggatttgggtgtttcacatctggtcccggtggctggggtcgagatgtggaaggttgagacgcctccggggggggccttgtgcctttggagccccttgggagatctgtcaagaggggatgtggacagaaggcacatctgtgccggctctggctctcggggagacatggggctggttcccaaaaatttcctgagggcgaagcgggcgggcgtgtggggcgacaggaggtcctccctccaggtttgccagcgagaggggtcgctacagggaggtcgccaataggaggaaggtggtgcgtccctctgggctgggcccttagagtcgttggctcctgagcaggggagattggtgggcgtcaccgtgtgttgcttgtaccacgagcgggtgtccccactaccgcggcttggggagcaaggggtggcgccggccttccgcgaactatctttgatggatcccttctcccctctccctccgggagactttttggcctcgccccttaaagaacccttgtcttagtcttccacgggtggggcccagactctcctgggtggacctttttggggggcaggtcggttttaacgctctn

SEQ ID NO: 649767 - DNA, 469 bp, Homo sapiens
tgacgctgtgggtgtcatatgtaggtgagggtacagtagaaggaggcgatgtccagagctgggtgagcacctgggtagcaagcccagccaggactggctggtggaagggttcaccgtggaggcattggggaagtccaggccctcaggaatgctttccaacagcactgattcgcaagggtcatagcagggggctgggcgctggttgggacgggaagagatgcaagtcgacgtatacccatagaaacagatgagtcatcagggctccgatagcccacaaccgacagaatgaggaacagcaggacccagcgggcttacttttccgcagccttcaacgcctcaatctcatacatgggcagctcattggcgggctcctctgcaggcaccttcagctcctggtagattatcaaaagcctcttcctttcctcctctctttcctgtccatgtccctgctggtgctgaatgcaggtgg

SEQ ID NO: 649768 - DNA, 678 bp, Homo sapiens
  misc_feature (201)..(201): n is a, c, g, or t
  misc_feature (269)..(269): n is a, c, g, or t
  misc_feature (278)..(278): n is a, c, g, or t
  misc_feature (282)..(282): n is a, c, g, or t
  misc_feature (284)..(286): n is a, c, g, or t
  misc_feature (291)..(292): n is a, c, g, or t
  misc_feature (306)..(306): n is a, c, g, or t
  misc_feature (310)..(311): n is a, c, g, or t
  misc_feature (413)..(413): n is a, c, g, or t
  misc_feature (416)..(416): n is a, c, g, or t
  misc_feature (426)..(426): n is a, c, g, or t
  misc_feature (467)..(467): n is a, c, g, or t
agcagactctccccggaataaaaaagagaaatcttcataatgaattataaactaatgattaatgtccccaaagaaatctgctttctactatatctttcagcattagagatttttctgttcttgaaaatacagtctgtgctcttgattttgctatgtacggtttcatgcatttttttaaagggcattgaggggaggattatngctatgaatgaaaaaaatattttagcttagactaagctacctgccttcaaaatagtttagggacaccncatatttanttgntnnnatttnngaacattttctaangatnnggagagaaaatatttacaaaaattccacatatcagtgatacaatttcttgctgtcaccaattttttataatagcagagtggcctgttctaagaaggcatatnttnaagtatcttncagggtaacatggaaatactataaagttggatgtcaaattnaatatgttttcagtgttctctaattttttggaatttttgtagactttacacctggaaaaaaacatttgtaaaatcaccggaacaattgtgtgctttattttataggtagtggttattagtattacatccccattttaaaaacaaaaacataataatggttacaacacgtggagttttactaacatacatattaaatcaaagtatattctta

SEQ ID NO: 649769 - DNA, 443 bp, Homo sapiens
ttgtgaaatgtctattcaagttagtttgcccattttctattgtggtgttctgtcttttgaacaaggaggttcttaattttaatatagcccaatttatcattgttccctttatgcttagttcttttatgtcctgtttaagaatttttgcagccaccatgcccagcccaccttttactttcttaatggtgtctttttcttattgattttaggaattccttacatatcctggatatgaatcccactatgtggcttacctttttccttctttctttttgaaacagagtctccttctgtcacccaggctggaatgcagtggcgctatctcagctcactacaacctctgcctcccaggttcaagcaattctcatacttcagctactcgggaggctgagatcacgccactgcactccagcctggtgacacagcaagactccatctaaaaa

SEQ ID NO: 649770 - DNA, 735 bp, Homo sapiens
  misc_feature (708)..(708): n is a, c, g, or t
  misc_feature (726)..(726): n is a, c, g, or t
  misc_feature (735)..(735): n is a, c, g, or t
aaacatcgcaccccgcagggcttctcttggtgccctagttgggttcatttttgtttgtgactatgaatgggaagaagtcacaccctgtaaccactccaactccctaaggagtcacctcttctttaaggaatagctttcccttgtatctaaaaaacttggaactgacatgaatgaacgttggccactcttacccctccaggggtcacaatctataacgcctaggacccaagaatatcagaaataagtaagcaataaaactaattctggcaggaatcagggtggcaataggactagcagcaccctggggtggctttgcctaccatgagttaacgctaaagaacttggctcaaatcctagaatccttagccaccaacggagatcaggcattaaagagaattcaagagttccccagactctggaaaatgtagttgttgataacagactagcattggattatttactagctgaacaaggtggggtcttgtgcagttattaataaaacctgctgcacatatattaactctggacaggttgaggttaacattcaaaagatctatgagcaagctacctagttacatagatataaccagggcactgcccccaactatatctggtcaaccatcaaaagtgccttcccaagtcccaactgtttttcaacctcttcctaaggacctttgacaactggtcttgtttacaaaatgtttgggnccctttgcttcctttaanccccttaan

SEQ ID NO: 649771 - DNA, 189 bp, Homo sapiens
tgtgtaccatctatgtcctctcccctcccgttttgttacaatatcaggatagcactcccagtgccactttggtctcagtgtaagatccctattaactatctgaaagtgacaatagaagcaagaactctggtctcaaatatatagtaatttcctttctttagtcttcagtgactattgtttgaaaacaag

SEQ ID NO: 649772 - DNA, 535 bp, Homo sapiens
attccgatccccctcccggcgccgctccagcctagggtttcctcccgccgcccgtcgccccacccgccgccatggcccgccgcagcggaggaggaaggtcttcccgccctgctccacgtgctgctccagtgagaaacccaccagcgccagcccgtccagctcctccacctgctaccacccagagcagcggtggtggtatcatgagcgggattgggtccaccattgctcagggcatggctttcggtactggaagtgccatggcgcacagggctgttgatgctgtgatgggtccccgtaccattcagcatgagactgttgtcggtgaggctgctgcatctatgactccaatggacaatgctgctgatgacaagtgtggcaacccttccaaggccttccaagattgcatcaaccactacggaagcgatatcagcaagtgccagttctaccttgacatgctgaacgagtgccgccgtggaggagcaactctttaagctactatctttgcttgacttggggcttaattgggcagaacctg

SEQ ID NO: 649773 - DNA, 180 bp, Homo sapiens
aatattgctagccgtaataaatcaatgtggctgggtgtggtggctcacacctgtaatcccagcactttcggaggccaaggtgggcggatcacgagatccggagatcgtgaccatcctggctaacacggtaaaaccccgtctatactaaaaataaaataaaaatgcaaaaaacttagctgg

SEQ ID NO: 649774 - DNA, 719 bp, Homo sapiens
  misc_feature (655)..(655): n is a, c, g, or t
cagtctgctcccatcagcatgcccccgatatgagacatggcgccaaaggagattatttcagagatttaagatttaatgactgccccactggattttggacctgtgcagggcctatagcccctttgttttggccaatttctctcatttggaatgggagcatttacccaatgcctgtatccccattgtatctaggaaggaactaacttgtttttgattttacaggcttataggcagaagggacttgccttttctcaaatgagactttggattatggactttgagttaatgctgaaatcatttaaaattttgggggactgttgcgtaggcatgattggttgggaaatgtaaaaagacaagagatttggatgggctggggcagaatgatagggtttggctctgtgtccccacccaaaccttatctcgaattgtaattcttatgtgttgagggagggaactataatctccacatgttgagagagggaggtgattggatcatgggggcagtttcccccatgctgttctcatgatagtgagtgagttctcatgagatctgatggttttaaagatgttttgaagttcctccttttctttctcttgctgcactgtgaagaaggtgcttgtttcccctttgccttatgccatcattgtaagtttntgaggcctccctagctatgtggaactgtagtcaattaaacctatttcctttataaatgaaaaaa

SEQ ID NO: 649775 - DNA, 185 bp, Homo sapiens
ccctacttagaagagacgagatgtacaagagaagagacgagatgcacatgccatgtacagcatgaggggctgctgaagcccctcaccctgagtatgggagccatcttccacagatccaccatccccatcgtgggcattgttgctggcctggctgtcctagcagttgtggtcatcggatgctgtgt

SEQ ID NO: 649776 - DNA, 1696 bp, Homo sapiens
ggagaactagtcgcgagttttttttttggttttttgggagattaggggtggtttaatttaaaggggcgtggagtctatggtaatcacaggagggccagtatggtcccaggaacaaagggggagaggtgttaattttctgggtcttcttcctcctgggataaaggtctggatgagatctccctcctttctgggctcgggagggcgcttcttacaggggcgctgggcggtggcttctctggggtcctataagactctggggggctctcagctcgtggtgtgcaggccagggaggctttctgggcggggctctggtgtctggcgcttacagtctgggtgtggatgtggtgtctcccatgagagagaatcccggctgggtgttgtggagaacacaactatatcaccctcttaacactctatcacaggtgtgaccaggggtgtggtgggatcaccctctgtgtgtggcgagaaccgagatctctatctctataagagatatacaccgagtgtatatacatatatctagagaaagacaagcggcgcgagaggcgcgaccaaacatatccctctcacatatatctcttatctctcaactatctccctatgtgtgggaacatctttatctctctggagaggaataattcgccgcgcggggactatgagtgggcgtagtggagaaaccctctataccgcgagggttataaacatcttatatgtcgcgcccattggtggtgctgctccttggagcgcctcatattacacggggcggggtggtgcggcccaaacagtggtgttgggtgattatacaacaccggggggcagtattaacgcaagaagcggcgctccgtggggagcactattggggtgaccgccgaggtgcccacacaagggaggcttatttgaggggaggtaggcattgaggaatacccacaggagcgcgcccaattctcattttgtgtgcggatttgaggagcggtctcttcccccgggggaggacatccaccttgcagtactagaaggacacggaggagagactgtatagcggcggccctattgcgggggcggcgagaaatatacaccaataagggggggtccctcaacaattaggggaggggggctcccttaaaacaccccagagaaaccccttatgcctgttgctatgggggccccaacaaacggcggcgggaagggggacaccaccttcaacaaaggggggcgagagagagccccactattatcatagagaaagcagccccatgggaaagagcaaattaaccatacaatgtgggaacttaggggaggccccagcgcgcaaggagtcatacaccccaaacgccgcaagtattttccactagttggtgcgaacacccccaagtgggggcgacatcggggggacccatgagaaaatagacccactgttgggcggacgggcctatttgggaaacaaccacgggtgggaccccccctttgatgaagaaaacggcttgcggatgccatgggagagaggagccctcaaacagggggaagaacaccctataaaaaagccggagagatacccagggcgaaaagatccactcactaatcgcgacaagggaggaccgagacaaatagggggggccccgggatactcaagagtagtcccacacaatctcgtggcgggacaacacgaacaatcaaacacaacagggcggggtgcgaa

SEQ ID NO: 649777 - DNA, 825 bp, Homo sapiens
  misc_feature (519)..(519): n is a, c, g, or t
tggagtcagggtctgtgtcctgcgctcaggctggagggcagtggtgtggggatcacggctcactgcagcctcgatttcctgcaccaccacgcctggctgtttttttttttcccggaaaaaacgggggtctacaccggtgtggcccaggccgggtctagaaccttccggggctcaagcgaccccctcccgccctcggcctctccgcaaatgctgagattacacgcgtgagcccccgacccggcctccttttccaccgtttctgtgtctacagccgcccctcctgggctccgattgtttgggcagatgtcgccaattacggtgtcaaacggcgaaggggcactgagcgttttttctttctcccgtccttgtgggggcagcagctcggtcccggctagcggggttgagcccgtctctcagacgaggaaccgggggcccgagagggtgacccggtcccagaggcagggcaaggggaaaccgggattggggcccgaccggacccagccttgccttcccccctgnaggagatcgtcaatttaaatggcccgaaagcgggtgggcccgcacaatgccgttgttccgccaaggcgaaaccccaatttcggtcacgggccatgttgaccaacgctaaatttcggggtctcccaccgcgggggagaaaacatcatcccggaagggcgcactgcgggaagaaaaatgtttccatccacagcgggcgggcacgggggctacaaaggggagcagagaatataacccgccaagggccacaccggaaaaattagcggcacccgggcgcccagaaaagtggggggacactgcaacataaag

SEQ ID NO: 649778 - DNA, 645 bp, Homo sapiens
atggtacccgatggtgggagagaaggcgctaatgagaagtaggacagtaagatatctaccaggaccctagcagaccaccctccactgccagccagggtcatcttgctagagcctctgaggtcgcaccaaagcaaacagagcgggtgcgacatgtacagtggtgcgcagaggcaggacccaattggagtgcagaacactacctaatatagctgcaacaacatcaaaggcaaactgatgcaaagcaagcttggtgctcacattgttattctcttatttagaatgtcccttggtaataaacccctttccagcaggcccttctcagaagctgactgctggttcattggtgttattctgtgatgccttggccacacttttgttagtgtatttaagaatttgtagggtcttcatcacatgtcctgtttagtcagcctatgaggggtactgaatttgtggttactatgcccatcaggtcttctgggcaccctggtcaagggctgtttgattgatgctttccactactcgcagcaaaggttttgggtaaagggaagtgaaaggattccagtagtctgtcatggaggtgggatgtaggctgagggagaaggatcactacaagcacagcaggaagtcactggtgtgaagaaccct

SEQ ID NO: 649779 - DNA, 141 bp, Homo sapiens
tactccgacgcgatgacgcctccgaccggccgcgatccgctgacgatcgactaggtcgcgatccgcggcggcgacgtatacgtgaacccgcgcaccgaggtgcgcctcccggtgtacggcgcgctcgagacggcgctcttc

SEQ ID NO: 649780 - DNA, 437 bp, Homo sapiens
cacgaggcgcacggctccaacgacgcccagaatacgatgggcatcatcgcgctgacgctggtggccgcgcaggccgacggcacgctggacaacctgccgtcgtggctggcgttcctgcatccctcgccgaatgcgctcgccaacaacgacatcgacgcctggatcaaggtcacctgcgcgatcgtgatggccgccggcaccgcggcgggcggctggcggatcatcaagacgctcggccacaagctggtgaagctgcatccgatccacggcttcgccgccgaaaccagcgccgcctcggtgatcctggaggcgtcgtcgctgggcatcccggtgtcaaccacgcacactatctcgtcggcgatcatgggcgtgagcaccgccatgcgcttcaacgcgattcgctggacggtggtggaacggatgatctgggcgtggat

SEQ ID NO: 649781 - DNA, 749 bp, Homo sapiens
  misc_feature (52)..(52): n is a, c, g, or t
  misc_feature (64)..(64): n is a, c, g, or t
  misc_feature (77)..(77): n is a, c, g, or t
  misc_feature (116)..(116): n is a, c, g, or t
  misc_feature (134)..(134): n is a, c, g, or t
  misc_feature (230)..(230): n is a, c, g, or t
  misc_feature (233)..(233): n is a, c, g, or t
  misc_feature (242)..(242): n is a, c, g, or t
  misc_feature (255)..(255): n is a, c, g, or t
  misc_feature (258)..(259): n is a, c, g, or t
  misc_feature (264)..(264): n is a, c, g, or t
  misc_feature (266)..(266): n is a, c, g, or t
  misc_feature (280)..(280): n is a, c, g, or t
  misc_feature (288)..(288): n is a, c, g, or t
  misc_feature (296)..(296): n is a, c, g, or t
  misc_feature (303)..(303): n is a, c, g, or t
  misc_feature (311)..(311): n is a, c, g, or t
  misc_feature (325)..(325): n is a, c, g, or t
  misc_feature (339)..(339): n is a, c, g, or t
  misc_feature (374)..(376): n is a, c, g, or t
  misc_feature (393)..(393): n is a, c, g, or t
  misc_feature (398)..(398): n is a, c, g, or t
  misc_feature (402)..(402): n is a, c, g, or t
  misc_feature (412)..(412): n is a, c, g, or t
  misc_feature (422)..(422): n is a, c, g, or t
  misc_feature (459)..(459): n is a, c, g, or t
  misc_feature (477)..(477): n is a, c, g, or t
  misc_feature (554)..(554): n is a, c, g, or t
  misc_feature (578)..(578): n is a, c, g, or t
  misc_feature (586)..(586): n is a, c, g, or t
  misc_feature (599)..(599): n is a, c, g, or t
  misc_feature (605)..(605): n is a, c, g, or t
  misc_feature (620)..(620): n is a, c, g, or t
  misc_feature (624)..(624): n is a, c, g, or t
  misc_feature (638)..(638): n is a, c, g, or t
  misc_feature (662)..(662): n is a, c, g, or t
  misc_feature (665)..(665): n is a, c, g, or t
  misc_feature (679)..(679): n is a, c, g, or t
  misc_feature (682)..(683): n is a, c, g, or t
  misc_feature (727)..(727): n is a, c, g, or t
gataatcgcttttgttgttgttgttatagaacaatgaaaattcctgttaggnacccaagttgcngtttatatttgcntgttctcttaaatagtatgggaaggggtgggggggggcngttgggggggcccatcgngggcctttggggtttttcttcttggttccgtcctctcccccaccgatttttcagggtgtggtttcctagtctccgggggtgtccggtttagttgcnggntatgggggntggccgtagtgcntcnngggcncngttcgggtgtcccncggggccntttcgggncggggcncccttgtncgggtcgggggggncgcatcggtgcccntccccttccgggcgcggggcgggcggtcggcgggnnnggccggcgggggccccnccccnttgncggtggcccncggggggtcntccgcctgcccggggggttcgccgttgctgcggtccnccatgtcctggtggcggngatttctgtattcatcaaatgttagttttaattgaggaaagctccttaaacacaggttctcagtgaatttgtcttcntccgtgccccatctgttctcaccngctttatngagaatctgggcntcttgnttggccagatgctcntccnctttcagactttcntctcttctgccctctgcccaagtncanagagctttccgggngtnnccagatgtttcggcactaatgtcttctccaagactcttcctgcntactgcataataggcctgggcg

SEQ ID NO: 649782 - DNA, 205 bp, Homo sapiens
attcggctctgtaccccagcatgatgatcgacagaatgtagtggcatggtgcggcactgcgatcagaagcccgcgtggcgtacgtgccagttcatcgaatgcgctgtagtccgttcggtcggcgcgactgagcagggacaggaactcggtccggttcccacgccgcagaacgttggcaacgaacagcttctgcaggtaccagtag

SEQ ID NO: 649783 - DNA, 792 bp, Homo sapiens
taattaaaagaatttttttggagacggagtctcgctcggtcgcccaggcaggatggcaggggcataactggggctcacggtagcctcaacctccggggctctagagttcctcccgcctcagcctcatgagtggctgggaccgcaggcgcatgctaccatgccgggcaaactttttggatttttatagagacaggagggtctccctgtgttgcccaggctggtctgtaatgcctaggctcaagggatcctcggcctgggcttcttaaccggctggggattacaagcatgagacaccattccgggcctaaaagcctatttttaaagaaactacaatctcccagggggactggtttcccggcctctttggtgcagtcccagggaactggcctacagcaagaggcctaagatggaatcttttgggggaaaagtcattctaggatgaaaatcctatgttaaggccgggcgcaggggctcacgccgtgtaatcccagtacttggggaagccgaggcaggtgggatcacctgaggtgaggagttggagaccagcctgggccaactatggtgaaaccccgtctttactaaagctacaaaaattagctgggcgtggtgccaggcgcttgtggtcccggctactcaggaggctgaggcgggagaatgtgcttgagcctgggaggtggaggttgcagtgagccaagatcgctccatgggcactccagctgggtgacagtgaaacccatgtcaaaataaacgattaccagttgtcggcatccaagagaaacaaacccacggggg

SEQ ID NO: 649784 - DNA, 96 bp, Homo sapiens
tggaaaaactttccatccggggcggggatccctctaaagtcgcccggcgggcttgcaggttgggcctggcccgccgtttaccacggtcgggctggg

SEQ ID NO: 649785 - DNA, 430 bp, Homo sapiens
  misc_feature (408)..(408): n is a, c, g, or t
ccccacccccaagacttattttccggtttttgacctgagccccggttttgcccaggttaagggccccggcaaaaaggtggccgacgcgtttcacaacgccgtgggggaagtggaagacatgcccaacgcgttgtccgccttgagcgacctgcaggggcccaagttttggggggacccggtcaattttaagttcttaagcccttgcctgttggtgaccctggccgcccccctccccgccgggtttacccctggggggcacgcctccctggacaagtttttgggttttgtgggccccgggttgccctccaaaaaccgttaagttggagcctggggggccatgttttttgccccttgggcctccccccagcccctcctccccttcctgcccccggacccccgtggtttttnaataaagtttgaggggggggca

SEQ ID NO: 649786 - DNA, 543 bp, Homo sapiens
gcgtgaatctgggaggcagagcttgcagtgagccaagatctgtgccactgcactccagcctgggctgacagagcgagactctgtctcaaaaaaaaaaaaaaaaaaattacaaaattttggccatggcgctgttgttctcaggccttataattcccagcacttttggaaggccgatggatgggcggatcacaaggcgtcaagagatcgagacctatcattagaccaacattgggtgaacccccattcttcttactaaaaattacggaaacaatttagccaggcgttggttggcaccttgttcctgttaatcccagctagctcgggcacggcttgaagccatggacaaaattcgcttgtaacacgcctttataggcggaaaggctttgcacggtgagccatgaagaattttggtgccaaagagtgaaacgattcacagccccttggccacacaaggagtttgaaacacttccatgtcgtcagaaaaaaaaacaagtatataacgccgcggatattgttgtgccccaattgatcagggcaaatccc

SEQ ID NO: 649787 - DNA, 213 bp, Homo sapiens
catcacccacctttcagcgactcataatctgggttagggatagtgtataaaacagacatttcttaatcatttgacgtgcacgtataatcatggttagtctctggtaccaatatcttttacatgtatggcttctgcaatggttaatcccgtttgtcaacttgacggcatcatgaggtgctcagatacatggttaagcattatttctgggcgtgt

SEQ ID NO: 649788 - DNA, 384 bp, Homo sapiens
gagttattggtttgtatgttctcctccccagaagaagccactaaagccgttacagaaatggaacggtagaattgtgggcacacagccattgtatgtagctttagctcagcgcaatagaagagcgccaggctcacctcactaaccagtatatgcagagaatggcaagtgtacgagctgttcccaaccctgtaatcaacccctaccagccagcacctccttacaggttacttcatggcagctatcccacagactcagaagcgtgctgcgtactatcctcctagccaaattgctcaaactaaagaccaagtcctcgctggactgctcagggtgccagacctcatccattccaaaatatgcccggtgctatccggccggctgctccta

SEQ ID NO: 649789 - DNA, 951 bp, Homo sapiens
attgactaggatggatgggctagatcttctgtactacatggtggagctctcgccatctatatgatagcgctgggatcgtatcagagctacttgatcgccgtacgagaagttcgccatggaagggtccaatgtgtgactagctgtggtctgatccagagttgaccggggtggttggggtatatctcctccaagaggtgtgtacaactatgggcgagatatttctgagacgtttatatcatgccaatggactcatgtgggctgtctaaagttctcaccagactaatgatgggagggatataactggtgcggatgagcggagtgtagatagcgatatattcagtgctccaaacgattgtgatcgttgtggtaaccaagctggaatcatgtgaacttgacgatgctctataatacttctttcttgcaagatttgaaccggagctatactcgtatgaggtcgagccatcgaatgttagcgtcgtcggtgaccccagactacttcctgtaaattgagaattgttaaaacgtctgtacagaaatgtccatgagaccatatatcgacctagatggaatatgggaagagcaaatagttaactcgctgagtgtcggaagaataggttaacatttcaaaaatctgtgtaggcaccggtggaccaaaagatggtgccgtttcatacagagtactaaggcctctatgtcatctaaacgaggccgtgaacacttgtagaagattgaaccagttcaatggtggtgctgagagcgaccaattggtggtctcagaaacccaggttatcgtgggactaagcggctactttggtaagtacttttggcatggctccggagaaacttgcgggtatacgaatggtaactttagaccctcgtgaaataacaattaatttcccattgaggtatgggatattcccgcatgacgggattagggtgggagggacatac

SEQ ID NO: 649790 - DNA, 501 bp, Homo sapiens
  misc_feature (17)..(17): n is a, c, g, or t
  misc_feature (53)..(53): n is a, c, g, or t
  misc_feature (494)..(494): n is a, c, g, or t
gagggcaccccctcagnccatggactccctccctcttcctcctggaccattcnacctttccttggggcccagtccttaccatggcctaatggagtcctactttccccaataaatttacctccataagtccccattaaaccttccccaaacccttgttggatcctttgtcatttaataatccataaaaacaaaaatacagcccaaaaaagccggggtgcgatgccctcacaccctataatccctagcactttggaaggctgaggtgggcagatagcttgagctcagtagttcgagaccagcctgagcaacatggagaaacaccatctctaaaaactaaataatataataataaaataaattcaaaaattagccaggaatggtcatgcatgcctgtagttctagctacttggggaggctgaggcaggagggttgcttaaacctgggaggtcgaggctgcagtgagcccagatcgcaccacttcacacaaagtgagnccctatt

SEQ ID NO: 649791 - DNA, 290 bp, Homo sapiens
ttgatcaaagaataaaagaaattcaccttcatcattttttgacttaagataaaccgaattgcttcattttgagcagctccgatgccattatttgtttgcatcgacatatatgtcactttatcatttcgcaaacaataattatttaattttgattgtatgtctatcgtactcgcattatcaactaaatatcagacgcatctccatcgataaattgtgaatatttttgaatagatcatcgagattcggattataagtcaccaccaccacattgactaatatcctggtgttaa

SEQ ID NO: 649792 - DNA, 1448 bp, Homo sapiens
  misc_feature (559)..(559): n is a, c, g, or t
  misc_feature (721)..(721): n is a, c, g, or t
tggaaaaggggtctccctgtgttgcccgtgggtgggttcggctcttcaaacctctctgtggcctcaagccatctcctctcccattcttcattccttctccacaatatagcgtgggatttacaagttatgtgggccactcagtgccgtgagttaaattccttaatataaagtgcttccgtgaatgtggatgtggacggaaagtatattagaatgtagaagtggcagaagtgtagaatgtgaacgggaatctcaacttctctttctcctccttatagtgtggcgtgtgttttgtgtgtgggccacaggcaggctgtgaccctctcgccgtgttcgaggaaaacccacccccttccttccgcgggacacacgagggggagacgcctacgagcccctgtgggtgtgtgctctctctctcttctcaggagggctctccctctcgagagggcacactcttaagtgtctgggggtgtgccgggagagaaaagagagagggttatgtgaaagtgtggccacagagtggctccataagctgtgttttctccctgtgacaccccagagntttttctctttgtgtgtaaccacagagggtggttaagactcttggcccgagagatctctccccctatattaggagagaaggtcggaaaaataaaaacgttgcgaggaataaaagcccaagtggtttaaacccgttgggttctaataatagataattgagagnacaagaagaagaagagaaaaaagaaagagaaagaagagacgacggcagcgtcgaccagcacgacaacaggggggaaactaacaaacaaaaacaattagggtaaccacacacacacgacaactcgctgggagaccaagagcagacaaaaaagagccgataataacaaacagaatgttcgagcccatacacagacaaagagcaacaagacaaatagagccagccgaacagcaaacaaaaaacacaagacagccagcagccaagcaagacaagataacaaaaagagcaccacacacaagacgagagcctactgaaagggcagaataaggcaggagagcagcgagggaagaagaaacgagaggcaggcggaacaggagaaaacagagaaggagcagagagggaaacacgaacggaacgggagcgaaaaacaaagaaacaagaaagaacgggagagagagaagaggagagcataaaagtaaaaaggagagggacagaaggacgaagaaagatcgcgcgacgagcaccaacgcagagaaggcacatatgacgaaagaaatcatccagtgagacaatggagccgccaggagaggagatagcaccagacgatagaggaacacgcgagaacacagcgaagagatgagtgaggcacaaaggttatgacagcaacaaaacaggcggagcagagcgaccccgagtcgagagacacagacaggacgcgaaacacatcaca

SEQ ID NO: 649793 - DNA, 108 bp, Homo sapiens
  misc_feature (41)..(41): n is a, c, g, or t
  misc_feature (50)..(50): n is a, c, g, or t
gagaagacgacagaagggcggcccgtggaccgcgaaagcgnaaccacggnaaggaaagaaacacgaaaaagagagaaagaatgaggaaagaaacgaaggaaagaaggg

SEQ ID NO: 649794 - DNA, 209 bp, Homo sapiens
cccatgcacagttcgagtcattagtgtgtatctttttttgtgggttaaggtggggggatacaagaggaggacgcaaaggaggcttggatgggaagaagggtggcaatgagatatagctgtagtccagggatagtcagggaagcagataatttagttaaagtgtctcagcctaataagggaactgtgcatgggggggtacggagctcgaa

SEQ ID NO: 649795 - DNA, 897 bp, Homo sapiens
cttaggtagcagaggtatcctgttggccagcgagcattcccgtctgtgaatactgcctcggacaggagcatagaacggcaactcctggaagccagcacctggagaagctgggattggactctggctggctctcattccctgatgtgtctaacattgtattcgatattgccctcgctctcagatgaccacctggccgcgtgtgatgccttgtgatgaagacccaacctttgtagacaacgctgacgagcctacgttgattagaatcatgtggctggggagacagtggttgagaccctccagcgtccagctttggttgttgaacataccatatgcctaggatcactgcgattatcacacatgtatttgcctatatcgctgtggctttgtttgactcttacttcgcaggtgctatccttaagatagcttataatatcatgtatgatttaaatgctattgtcatatttacctatcattaagggatggatctgactagtttattgcatcatagaactattgcataaccactgattataaatactgactgcgtcatgcaggcctcaatggagtagatatagcgaccgattacttttttgggagttaagcaatgagacaagtaactgatggcctcgtttgggtcagtcggggagctctagcggcgttacctctctgagagggggaattctggtactcactcaatgagtggatacgctagaaagtactgtgaggaagacgcatcaatggctaaaggcggaatagggcatcccctgatctgtgtcttcggctgaacacttgtgacatacgacatcgacggctagaccgtgaggggcccgtgtggctttttcatccgtccgtcccctgggagctttcaaaggctctcttttccagcttggcgaaacg

SEQ ID NO: 649796 - DNA, 818 bp, Homo sapiens
tacaggatccaatagttaatgtcatgccttcgtgttgtaagtagccagatccctctccagtgacattggaacatgctacttattctaacttgccgccctgtaacagctagcttattctatgaaatttcattgaaaaacactgacagggtgttaggaagtggtgtgagagaatgtaggctctccagtgccattgtgtcagcttatgtattctagatgtgttgcagagcagctatgttacgcagctgccttaaatcgtaactatgattctaaatgaaatcagaagctaagtaatacagattgtttgggtgcaaagacacaagtatttgggtgaatagctagttgagtcgtgtaatagataaattgctatacatggtcatacatgttactcaactgctgcagttgcttcagatcgattctacgaacctggatacactatcgaagaatctagatttagtgtcgtttctggggcgtgttgaagtagatttgaggcggtctgcaagccagggagcagtgggtttaccaagagtaagatataaattcttattctatagataagaaaaaaagacaatataaaaacacaaaaacaaaaaaaatccagcaggtaaacccccagtgttcatctagagattggccatttactgcccaaccgcaacaacttgaagaagataaattcccttcaacgtctaacatgtagacaggaattggggcgtggacacccatactaaattccaaacgtggcactaaccgtaacttcttagatgtagggccagtccaattgaggaatagttgcgaacggtgtccatcatagccgggggcta

SEQ ID NO: 649797 - DNA, 1303 bp, Homo sapiens
tggccattaatttggattaattggcattctgaagtaccccggggggagggcctgaaaacgacccgtcttatactcagcgagttcataaagcctttattcaccgtggagaattaaatatctcgtggggggaaaaaactcaagaagtgggattactcaatacgttattttcacaggaagaattgtgagtttgtgggcccgtgaacgagaaagaacaccagcgtgtcactacaccgtgaaaaagagcgctcagcggtgagagaaattacaagaagagagaaacacgagctataaaccaccaaaactccgtgggtgaagaagaagaacgctcgaattataaagaggccgcagccaactctcacacgtggaagcggtggacacacacacctctcctctctgtggggtgtacgccgaggagagcacagaagcgggtgagacgacaccaactggcgccagtggagagcctggtggggcccacagagaggcgcccacctctccccactgagggagaaccccacacagagacgagaggcccacagaggggagagcgccctgtgtgtgggagagcagacgctttgtgtgcgctctctgagcccgcggtatagtctccacataatttctctctatatctatattcgcccgcccccactatatagttatatatcgcgctgctgaggagaaaggggcactagaggagccctacaatgtcgagcgccatattcgcgcgcaataatctctcccccggagagggggcgtgagggcccgcgcaaaccacccaactctctcgggcaaaacgccccatatagaggggggctccagaaagggggggtccaaaacccccgaacagaagggtgtctccactactccaagcgaaagtggcccccgccccggggcattctcttcccgtgaaaggtgaaagtgcactcgggggtgggcacagagccccgccacaagaaatcccacaaggacaaagagagaccagggcccacaaaagcggggggcaaaacaaaaggggagcaactcccagggtggccccccccgttgaaaggggcccccacgggttggtcccaaagacagcgtgccccaagatggcgtgagcaagaccatccaccaagactcaaacctggcgagaataccccccaagtgtgtcgccccaattggggccagtgccacggcaacacaccggaacaccacaaagtggtacacccaccagaggaacacacggacttagaggggctccacacagggtggaccacggtgagggggggggccacacaatatgtcagcgacacacaaaccacagagg

SEQ ID NO: 649798 - DNA, 220 bp, Homo sapiens
  misc_feature (58)..(58): n is a, c, g, or t
actcgttatctagaggatcccattcctgggctctaatgatcctcctctcagcttacanagtgctgggattacatggcatgacgcaccatgcccagcatgtattttttttttttttggtgaaatgcagagttaattcttgttccccaggttgaagcgcagtggcgcgatctcggctaattgaaacctcaacctccaaggttaaagcaattcctccggggga

SEQ ID NO: 649799 - DNA, 924 bp, Homo sapiens
  misc_feature (511)..(511): n is a, c, g, or t
ggagatattgccccccaagtctcagatagtgatagaatctctacaccagaaggcgacagatcattcatggggatgtataagcgatgagcagtcctctccaacgactgagcgatcttcactttacgcagtactacagactgcctagtgactccagaatatgacaaacctgcagaatttggccaagctggcctgaagacccagcaccgatcagcgatgactgtactacgtccctgtcgtacagaccatcgcagggtcagctgtctgctcccaaactacgacattggaggggcaccaacctctggctccgctgccctagcagctgacgcgcagccagcagtgactccacggtggatctgccacgggacctcagccctcgacgagccagagcagagactgaccggagagtgttcgctgggggcacgggaaccagaagcggacgatgcacgagcgggccaccgccgcgatacttagagttccgtccatgcgtattcacatgatcgacatggcagantgggcacaacctggggggcagctccacttacacatgccatggatgaaagattctcacgtatgctgatacacccagtgaccctctgtctacgagtgttcccacaacgaccgcagggaaggccgcgtctcataccggcgactcaaggcttgccgaagaagagtcacacgttcccgtggcatgaggatgtgacctccgcgaaggtatccctgtcctactggaaaggggaccctttctctgcgctgggaagagccagaccgtcatgggacaggggccgttgacacccattggaagtccctttcccacaatccccttcgaacggtctcccaaagaggccgtagggatggcccggggactaaacgggcccttccgtggtttgacccttcgctgaagggtctcaatacaggtgaaaaccc

SEQ ID NO: 649800 - DNA, 226 bp, Homo sapiens
tgtgagtgatctagagatctggtgaggcagactggagtgggctgggaatgacctgggtgagaggctgtcttgggtataatgtcagtttgtttacatttctcacaccaacaagtctacatgctgaaaagagagagaggggtgtgtgtgactcgcatgtgttggcaggaccaagggagggaggtaggataaaagggggaggaaggagagagtagccagggaatggtgg

SEQ ID NO: 649801 - DNA, 262 bp, Homo sapiens
aaggctttccctgacccccccgtttttttccttttccgggaaagcctctgtcccccgacattttatgtcataaaatacccatttattaatttcccgctctcccccaggggcccccgagctttgtaagggcaaaactttgtttggttgtggggtatgcccccaaccccccgggcagggcctgcccagggggacatttttgttggataaaggattttttgttaaatgggtttggcccccccaaaaaaacaaagccccccgggta

SEQ ID NO: 649802 - DNA, 987 bp, Homo sapiens
gcacagacagattgaactatatggggtgtgcggcgagtgtgagagggaagcgccgcggctgtatttctagacctgcccttcgcctggttcgtggcgccttgtgaccccgggcccctgccagctgcaagtcggaaattgctgctgtgctcctgtgctacggcctgtggctggactggctgctgctgcccagctggctggcaagatgaagctctccctggtggccgcgatgctgctgctgctcagcgcggcgcgggccgaggaggcggacaatgacgtgaggacgtgggcacggtgcgtcggcatcgacctggggaccacctacctccatgcgtcggacagtgttcaagaacggaccgcgtgagagatcatcgccaacagatcagggcaaacagcatcacagccaggacctatgtcgaccttcactcctgaaggggcaacagtctgattggagatgccggcaagaaccagactcacactccaacacccgaagcaacacggtctttgcacgccaaggcggactcatcggacgaacgatggaattgacaccgtcatgtgcagcccggacactccaagttccttgccgggtcacggcaggttgaacacagacaaaatcacaaccataccattacaaggttcgaatatcggcacgcgacggagcaccacaaaggacaatctgcctcactgacagaacaattttcttgccactggttcctcacttacccatgacacagaaacgcgcttgcaggccttcatatctgcgcaaagacagggtaccccgatgcaccacacggcaaccctgcaaacccaagccacaaataccccaccgaactgccccaaacgacgcgagcgaaccaaaccaaccggccggacaacccactgcccggcacctacacacggtgacatgcggaccgccagcgcaacgccacaagcgacacgggacgacagagcgagacaggcccacgactaacgactcggcgcgcgcaacac

SEQ ID NO: 649803 - DNA, 204 bp, Homo sapiens
ttggcaggatagtgcaggtgcagccacaggtcacacgcagtctcagccaagcgtcagccagaggagcatctccagcgcaggtgtcagtacagccaccagagcagacctatgagcagcctcatacccagccgcaggtgtcgttgctggttccagagccatgaccgagttgtggttcatagtctgcggcgctggacgatgccacct

SEQ ID NO: 649804 - DNA, 191 bp, Homo sapiens
agcaacccctattcatactctccttccgactatctcctaaacatctataaatacttcgtcctactaaactcttacaatacctttttacagtcagcttccctagggtgagtatatcccaatttctagtgatgaatatttagctcaatacttttcaggattcacataagtatgtaatacatacctcacagcaa

SEQ ID NO: 649805 - DNA, 1571 bp, Homo sapiens
aggcggagcttgcagtgagccgagattgcgccactgcactccagcctgggcgacagagcaagactctgtcgcccaggctgaaggccaggacgagtggccgtgaacccgggaggcggaagctgtgcagtgagccgagattgcgccactgcaactccagcctggagcgacagaagcaagacatctgcactcagaaacaaacacagcaaaccaaacaaaaaacaccaaacagcactctgcaatggacacaaaaaacaaacacaacacaacatactacgcacaccgatacaacaaggaccatgctacaacagatcggaaacaacaatactaagcgccacaccgaaactcacccgacgagccatcacacgtacacacacacctactaataaaaacataatactcataaaactcaggacagagcagaacataacagaagccccaagacacgacaacaccaacagccagaacaagagagaacaacaaccacagagagagagacagagacaacaggagacacccaagcgaacaaaacactacaaaacgacagaccaccacagccgcaggcgacgacagccaggcggagccaccacacgacgatgcacacagagcgagcaacacacagcgcgcagaacacacagctaggaccatcccgaagccaagagactcagccagcacggtagcgagaacgtcagaacaacaaggtgacggcacggacaataaacacacaagaccaacctgcacaacaaagacagcaacacgcgtggacaggtagagacacaaagcagtagcagtcgaactcctcgccaacagcccacaaacaacaagacacatccgcaacaaccaacacgcgagcagagaacaaacaccaacgacgagcggcagacactacaacacaacccggcagcgcaacccccaccacagagcacagccaacaaccgacacaaccaagtacactagcgcccgcgacacaacggagcgtcacacacacacaccagcccagcaccgcccacaacccacgaacacaaaagaaccacgaccaaacccaacaccacagaacgcctacaactcaagcaacactaccaccgaacacgcggggcggcgacacacaccccagaccacaacccaccagcccacaccaccccaccgcagcccaccgaagcgcaccgccacgaccacgcccaccaccagccgcacaaccgaccccccacaaccaccagaaccccacacaacgcaccaagagggtgaccgacctcgacacgttcgagcgctgtccccacaaccgacaaacagccagcacactatctaaaccgacgccgagtacgcagcgcgagtgcatatcactcacgcgttacgtactgcgcaccgattagcacggcgcagcgacggtcagcactacgacagggagacgaagagaggagagcaagcagaacccgccggtgggataagagcagcagctcgcagctgctccgacgatggaagaacgcacacaagagcagctcacgcacagcgcccgctgcacgagacaacgtcggcgcaacggccaccctcgcgcgaccagccaacacgagagcccg

SEQ ID NO: 649806 - DNA, 354 bp, Homo sapiens
caattgcaagcgcgcttttaacttatgtatttattttgtagagatagggtctcgctctgtcacccagactggagtgcagtggtgtaatcacggctcactgcagcctcagcctcctgagctcaagcaatccttacacctcagcctccctactagctgggattacaggcatgccaccatgcccagctaatttcttttattttaagtttttgcagggacgtgttgaaagaaaaaccttagccaaattaagcttaacaaagtttagttaagcaaagaatgctttgcgaatcaggcagcctcccaagccagggtagctcagagagactccagtgcagccacgtagtggaagatttatag

SEQ ID NO: 649807 - DNA, 498 bp, Homo sapiens
cgaatcatgcttgggaggcagaggcaggaatcgcttgaacctgggaggcggaggttgcagtgagccaagattgcagcattgcactccagcctgggcaacaagagtaaaactctgtctcaaggttaaaaaaaaaaaaaaaaaaaaaaaaattctaattcccaagcttttttgggggaattgaccagggttttaataaatatcttctgaaatactagacagatttgggttgcagactatgaaatatttcccatgtctttatttcaacaactgcaattttaatggtcttttaaggattcccaattccatgtgttgtccctctcttcctgcctaaactgtgtctcatttccttataatgtgctctctgattactgagcattttcggggtatttccatatgcaaaaactatttacccatctaataattatttaggggttccagatacagacgtactataatagagtcctagatccttggaaccttttaaaatactttcaaaac

SEQ ID NO: 649808 - DNA, 523 bp, Homo sapiens
actagttctagatcggccagctgcctaattctgaatatctatatatatatatcttttcaccataaaaaaaaaaaaaaaaaaaaacaaaaaaaaaaaaaaaaaaaaaaaaaaaaggggggggcgcccaaaattccccccgggggggcccattccgccccccccttttttggaaaaggggggcccctagggggggtattttaataagagcaggccgagggggcgggctattacaaaaaagggttggggataggggaaaaaacgcggcgcaacgctgggggattatcttttggggaagaggaaccctacttcttgctggggggggggggaacacaataatgggggacaacaccaacccatcagagcgaaatttcaagagctctgatagggtgaaatatacaaactgctctaaggtggtatataaggtgtgtgaaacccaggcgtgcaatttcgtacgggttgagagaaagactttggcacagggatgatatgattaagaacattttttacaggggacatgcgagaa

SEQ ID NO: 649809 - DNA, 156 bp, Homo sapiens
catacgggcctgtcccgtataggtaccaaccgatgacgggcatcttcagctgcactagggccccaagcttcatctatctcctttagcgcaggtcatcaagtctttcttaggctatgagctgctgacaggcgcaacctggctctggactcaataatt

SEQ ID NO: 649810 - DNA, 1220 bp, Homo sapiens
acctgtgactagacaatacggtaatggcagcgcgggcgcacagtaggataaagtgaacatggtcatagactggtttccatagagagatcatggatcatgacatagctgctatggatatcatcagagaagtaaaaaacgcaccggcgaaaacccgaggcgttcgtgaacaaatcacagaatgaaaggttcatgagagatcatatacggagggaatccataaatacaagcgagggaggtcccaacagcagaagactcagcagaagtacaaaagtgaacagcaccccagaacccgggagaacgacgacagagacacgcaagccaaccagacgaaagcgagagggggaggaaacagggaacgagcacgggaggagcggcaaacgcgagaacagcgcgaaagggagacagcgagaagacaagaaaggagccgagaggagggcgaggcgcgggggggggagaggagaaggacgcagcgacagcgcagagggggaacgcaggacggagcgggcagaaggcagggcgggcgggggggagaggcgaggagagcggagggcgggaggaagggcggaggcgcgagggcaggagagaggagcggggccggagccgaggcgaggaggggacgccgcagcggcggcgacggggaagaacaaaaagagagaaagagcggacacgacagaaggaaggagaaaaaagaaagagaaagacgaagagaaggaaggagcaggacacagacagagcgcgaaagggagagagccagaggaaaaacgagatcgagaggcaagacggacaagaccggaggagggagacgacgcagcgagaagaaacgagccgacgagggagaggagacagcaaacacgagggcgagcggggacaggagatcgcagaaagaggcaaacggaagagagggcagaacagacagcaagcgaacgagcggagaagaggcaaaaggaggacaaagacagagaagcgcagcaggagcaacagcgggacaagagaagaagaagaggagaggaaagacagacaagggcagcagacgacgagcgcggagcggagggaagagacaagaaaagagagagcagaacgacgagcaaaacgagaaggagcgacaagagacaacgagcaagccgatgcagagaccgaagaccgagcgaacgagaggaagcgcaagacgagggccgaagacgagaggaagaacgaacgcagaaaacaagagcagcgagcaa

SEQ ID NO: 649811 - DNA, 294 bp, Homo sapiens
caggttgggagagccccaagattgagaacaataatgaacaattattgtatgaacaattgttagagacagctaatcacaaacaacctgcgggcacaatgacctcattccacacgtagcacccttcagacaggaccctataaaactttcctccagcccttgcctctttgcaggtagccccttctctgctgagctgcccactgcaacatattttcacaatttctctaataaatctgcccttctttacctacaactatcttggtaaatggctttaccacctgcaaaactgaccctagg

SEQ ID NO: 649812 - DNA, 104 bp, Homo sapiens
tgtcagactccttgccttctgtatgattgtgaggctccccagccatgtggcactgtatatacaattaaatctctttcttttgtaaaacacaacaaaacaaaacc

SEQ ID NO: 649813 - DNA, 116 bp, Homo sapiens
ggacagttaaaggtacgtgtcatccttatctcctgtagcttggtatgaagctgggacatggaaacttagtatttgccagcaatagattggttgggtgaatgtggcatcgataaaca

SEQ ID NO: 649814 - DNA, 1059 bp, Homo sapiens
gataatcgcttctagtgtccggcaccatattcacacctgatggcctcgagtataacgaattgctatcgtctatgactatgtcccatgtccggccgatcctatgtccgctcctacggtaggaattttagagccggcgcgtctctactgccgtagcgacgagagtgcttcatcagtgctctggtctactagcatatctagttagctctgcctatctcttgagacccgtgaaccgaggtccgagccgacagccgaggatgagcgcgtaccagctgtgggagtgtcccaccacgataacctcctcactgaccggatatgctcatctcattgaccctataaacggcgaggacactcattcgctagaccgccggtgcggttaggaatcaggaggtgacgcgagatgacgcgagtgacgtgaccatgagctcgagtcaggaagtgacacactgtcacgtggggccgaggtacgacggcttcaaagtgacggatggaagcctccacggtggtcgcaaagatccctttggacaaattttgcttgacaggagcagacgacggacgcgggagaggaatgtagtcgtacattctcgccaagggaccaacgatgtgcaacgaacctccagttttgactaccttgcctcttgcccaggctatcttgtagccttgtggcccaaagtgctcctaggccaattggaaacattcctcgaatgccgaccaacccccagtgttaggtgacaccaccactgaagaaatgttcgttccacaggcgtacctgacccggttcggcgcgggcatgtcctctcagcgaggaaggccccttacaaaattgttattaatcccttaccttgaaataggcgcatcctctagacacgcttgaccttaggaccacaagtccctcttacccatatggattatcccaaacaggcagaaggagtgccaccttcctaactggctaacgtgggaacaacagccaatcttaaatctcaaccatcacgaattctttccccgagttttacccttagagggctttgcaaaaatcacacgcattccccttataccacccct

SEQ ID NO: 649815 - DNA, 157 bp, Homo sapiens
  misc_feature (144)..(144): n is a, c, g, or t
gttatcgccaacactttttcacacacagactgggacagaatagggaaccagaaatagaccgcacacctacaatcatcatcttgacaaacctgacaaaaaaacaagcaatggggaatagattcccgtgtttaacaagtggtgttnggggataaactca

SEQ ID NO: 649816 - DNA, 800 bp, Homo sapiens
cggtgttgtgaacttcgttgcttgcttgccctgtgcgcgctgtgctgcggacatggcctcaaactgattatacccaacaagcaacccaaagctatggtggcctaccccacccagccctgggcagggctattcccagcagagcagtcatgccctactggacagcagatgttacatgtgtgttatatgccatgtccacggaacacttcagtgctatgtgccatgatgcagctattcttcttatgtgccagagccagaacatgctatgtgaactcagtcaaactcccacaggggatatgtgctcgactgtgctgagaatatgtgcatgtagccaatgaatgcctcccaaatcgtctatactggtgcatgccatgtcctcactacccttggactaattggcacagcaaagccatgcatcacacatgcatgcaacctctgggggaagttaccggtgtatgcatgtatctacatgatgcagcatgctactggagcaaggccaccatgatgttgggagatgcatacagcacatgcagcctaagctattggatgggacaggcagcacaatgctatggacacgacaagcgaaaagctatacatcccccctcaggtggctatgggacaagaatgaaacaagtacaaaatggagagatggtggtggaaggtggaggggtggaggtggaggtaactatggcaaagatcaatcctccatgagcagtgcgggaggatatggaatcatgacagagatgggaggggcgggtgggtaggcaggggccgtgatgctgggagggtgaaagagggagaga

SEQ ID NO: 649817 - DNA, 882 bp, Homo sapiens
gcaccaaatggcggatgacgccgtgtgcagcggtgggtggccctggtgggccctgtgtggccctgggattggggaacctgctggtgtgcttcctgctggatgtgtttctgtgcatgttgtgcgatcctgtgtggcctggtggtctgctggcctgtgtgactgtgtgtgcctgtgtgtgcctgatggcccgcgtgagcctctgcgggagtgcaatgtgccgatggcataacggcagtgtgattgccgctgtacaccgaaagtttggtgcctgcatatggatcaagtggacagtgaaagcaatcaatgttcccatgtgagtgaagaatctatcattctttactcgccttgcaccgatataacggacaatcgaggagaatcagttgacttatcgtatccttgcggagcgccctcgttcatcgagagggactgacgggcttatgttggacaagacatttattgcccaagatggcaagaaaggcaggcacccgcagattgacctccggggacagccaaaggacgcggcagagcccgaagagggtctccgacaatgggaccaatttaatgggataattggccttaaattacagagagaggcaaactttaaaccaaaagtggggtgcgccaaacggatacgaggggatacattggggaggttgggttccacagagtggaattgggcatttcgccagacacgcgggacaggggggtttgggtgagcccgaaccccttggacaccagatttaccccggaatggaggtggggccaccaaagttacacagtttccgctttgtgagcccgaaaaagggtcgttttccgttcccacaaggtttcccggcgttcaacacacgcggattggccttggccaccgaagcgaggcataac

SEQ ID NO: 649818 - DNA, 623 bp, Homo sapiens
gccccctgggttccctcagcccagccctgtccagcccggttcccgggaggatgaagttcgtgtacaaagaagagcatccggttcgagaagcgccgctctgaggggcgagaagatccgaaagaaatacccggaccgggggtgccggtgatagtagaaaaggctcccaaagctcggataggagacctggacaaaaagaaaatacctgggtgccttctgatctcacaagtttggtcagttctacttcttgaatccggaagcgaatttcatctccgagcttgaaggatgccattgttctacccttgtgtcaaccaattgtcattccaccacaaccagtgccacaaattgggttcagctgtaccaggaacaccatgaagaagactttctttctctacagttgcctacaggtgcacgacagggtgtctaccggtctggtgaaagcctgcgtgccccttgaagcttgggaggggggtctcatttctacaaagagagaggtgggccccccttttctttgacctccttcctcactttcaagctcaagacacaacttccctttattcagggaccggcacttcttaatgtctgtgggttatctactccagactctcttaggaggggtaaatggg

SEQ ID NO: 649819 - DNA, 757 bp, Homo sapiens
cgctgcgaccgagagggagcccgctgctgcctgtttgcactcggctgtatgctgttagggccccggccccagcgcgcaacagctcgggggacggggggcgggggcgacggaccgtggtggactgtcccgtgtgcaagcaaagtgcttctccaaagacatcgtggagaattatttcatgcgtgatagtggcagaaggtgacacgacgcccaggatgcgaaccaatgctgactactgtgaggataatgccccagcaccagctactgtgtggagtgctcggagacctctgtgtgagacctgtgtagaggcgcaccagcgggtgaagtacaccaaggaccatactgtgcgctctactgggccagcaagtctcgggatggtgaacgtactgtctattgaacgtacacaagcatgaaccccttgtgctgtttgtgagagctgtgatacatctcacctgcagagactgccagctcaatgcgccacaaggaccacacagtaacagttcttagaggatgccagtgaggaacccagcgcacagtcctggcactcacttggtgaagcgccttggggaccaacatctcaacattgagaagaagcacccaaaggaggttcgcagcctcaatccgcacggtgttgacgtaccgaacgcgtgtgcacagtggatgtcccagaatggccactacctgcagatacatgaacgggagctgcaataagcgggggccagctgttgcgtggtacacatgaatgcccaaaacagtgaat

SEQ ID NO: 649820 - DNA, 553 bp, Homo sapiens
attttttataagttctggatttttctgcaaaagttttattaatttcggtttctttcttggataaagagaaataaggtgtaataggcagctttatattcttccaaaaccacaaaagttcatgtttttgttgaaattttgtcccaatttagggcgtattacaataagcggaacggtgttctattttaatttgtcagggcttgattagcaagggcgcggcagttgctagttccagttgcaggctgagagcatgtctcgacaactccgaaaaagtggcagcgacatgttcacaggtgtgcggggatggacaggctacgtctcagccactcgcgcggggaggcggagcggtgtgggcagaagtaaatttctttataaattatccagtctgggcctggtgtgttggctcacatgtgtaattctagaactttgggaggtcaaggtgggaggagcgcctgggcccaggggttcaagacgagcctgggcaacatagtgagacctgtctctataaaatatttttaaaaattagctgggcgcggctgttacgcctgtaatccca

SEQ ID NO: 649821 - DNA, 615 bp, Homo sapiens
cgacccacgcgtccgtttaaaagatggcatttggaaaccctggaatattgtccaagtgaactaggtggccttagacatgcatctgccagcatgggggttcagaagcctataggtcacatgaaatttgataggaggtgttcgacagagtacaaagagtgccaaagacagaaaagcaaggtgcgtgtccatactagtcatccactgactgtatggcaaatattaccccagcctactgagattaatctggtgattgaatccgaaagatttgagaattgacactaagcgagccagtggagctggggggcagcatgtaaataccacggacggtgctgtccggatagttcatcttccaacaggtgtggtttctgaatgtcaatcaagagagatctcagctgatccaattaaatgagctggctagtgacaaaagttacgtgtcaaaagcatgtacagcatgcatctagaagagagaaatatacttagaagatcagaatgctagaaaaattggagattggcaagtaataggaagatcagcagaaaagtaagagacataatgtttgccacagaaagcgggtcacagatcacaggaataaatcaagacgcgggcatgatcttgaa

SEQ ID NO: 649822 - DNA, 322 bp, Homo sapiens
cagacgttgcttcgttgtggcttgtgaaatatgtccagtgtaatgacaagaggtacatttgaaatattcgcatataggaagcttatagagcaatcataatgttgtcaatggagcaaactcaagctctatttctaaatcacatgttcttgatgtcttcctgcatatcactgaccttggatgacatgggagtaggagagagacgggtttgcaagtggagactgcggtgatgatgaagatgagtagctaggaggctctggtgatggcatgatcaaagtgaagactcagctccgcttccttgcagaactggcctatgatctggatg

SEQ ID NO: 649823 - DNA, 685 bp, Homo sapiens
attttctggtttaacttcctcaagaggtccatcaacaaggcaaaattggacatctcccgtgctgttggtgtttgaaattatgtcttctttagctgaggacaaattcaacctgggggcatagagtgagctaaaacgtgccactggttagtaactttagcctccaaaaaatgtgaccctgtgtgcagagtctcttgtacacatcttttctcacttgtcatctgtggcttatatagggctgtcgtcaggatacatgttggcatttacaatcatgtcttcatcataaaccatgtgtgtttgaggtagaaggatcgccatatcattcgttgcccaacttgggtttattagataaaacaggatctattaattacacagatcataaggcattaacgaatcctgtcacagcttatgtggaaatatgctctatccagatgttggtgacctgatctagggcgtttgtaattgtgcaacccgtaccgcagatgctagtgtatgtgtaaatgtgggctccctgttaagtgcgtctcatggatccatgaccttaggaagtagcgcatgcaagtctgaagcgttaacatgcgtttctaaaattggctgatgtgaagattcaatcatgcctgccaaccttgagtgtctttgatcgtttccaatctcttcgcacttctttttatcattaaactttgcatac

SEQ ID NO: 649824 - DNA, 420 bp, Homo sapiens
gaagagggtagcctctattgaccttctgtatatatttagctcggattatttcaggggtgtgtatcgtcgagatgcacacaagagtgaggctgctcattggtttagagatttgagagacgaatagtccacagccttggcgttgattgccttagctcagtctgttcagcagtgcacattggacgatcatggaaagttagtgaatgaagtctctgaatctgcttaaacatgtgacggtgatgagtcagctgaaagttgagacgaatcactgcataccctttttggagacagattatgcacagtcgcatctcttcgagaaacctatggtgaaatggatgactgctgtgcagaatgtgaacctgagagtgaatgctttttgcgacacggagatgacccttgatctccctacgattgttgagcctg

SEQ ID NO: 649825 - DNA, 200 bp, Homo sapiens
agacctggcatccatatcccaggtcctcaggcatccccacacccagtcctcagctgcactcgtacatcaggtcctcacacagcccacagaagcatttccttcacaccataccatgacatcggtccttcgcacccccaaaaccaggtctcggctgtaacagtgaccaagcaggtggagccttccatcgccccacacggcag

SEQ ID NO: 649826 - DNA, 252 bp, Homo sapiens
catcccgcaattcacataagaggataaatatgaatgaacctccctttaaacgtcaatggacagaaagctcacgcctggggcataatttaaacgtcggacacctttcctaaatgggggagcatgggactccaaagggacaccatgaattattccagatgtatcccatcttacaaagttctcactctgtcaaagccattcggggtgtgccggaacatgatcgggcataaaccagtcctctcaggggaggaggtc

SEQ ID NO: 649827 - DNA, 475 bp, Homo sapiens
  misc_feature (141)..(141): n is a, c, g, or t
tcctttcccaccttttttggttcccagaccctgtgagcctatggagattttttccaaagggccttggtgtccccccacccttgcccagggcctttggacaggggatggccaggtggcccctccaaacccctggtttttttntggtggggcccttaaacccttttttacattaaccgtttgctttgtaagcccttttttttttttttgggggccggttttttttttccccttaaaaattgcctttcctgccaaaaggactccggtttttttaagtccctgcccagggcttttcagccccccataagtgatggttcccctgttccctttacttagcatttcccccccgagttttttttcccctggatgggggaaaacccaaccgtggttttcccctcacccccccctccccccccctttcccccttccccctgggaaatttcccccagttttttttaaacccccctttttttggcca

SEQ ID NO: 649828 - DNA, 389 bp, Homo sapiens
acccttcgatgaggtgtaatgccagtcgatgaggtgaacaatcaactgtgaaacagttcacggagatggtgactgagccacagtcaggagcggcgcaacagctgtgcatgcagtcgagagactcatgaaggaactgtaccagcgctgtgagcggatgcggcccacgctcttccgactggcgagtgacacagaggacaatgatgaggccttagcggagatcctgcaggccaatgacaacctcacccaggtgatcaacctgtataagcagctggtgcggggtgaggaggtcaacggtgatgccacagccggctccatccctggcctcagtgaccccacacccccttcaggcccaagcctggatggtaccggatggaacagcttccagtcgt

SEQ ID NO: 649829 - DNA, 217 bp, Homo sapiens
cacgaggggccacattcaggaggccatcgccgtgatcaacaacctccacccacagctcttggccacaaaccggtatctttacatccatttgcaacagcagaatttggtagacctgatgcgccagcgcaagacaaaggcggcgccggtatttgtacacactcaccaggtggcttaaggcgatgagagccgacacaggctcacacagatggagcgtacc

SEQ ID NO: 649830 - DNA, 1137 bp, Homo sapiens
tgggaaacagtcttaactcggtcccccaggctgaattgcaggggcccaacctcggttcactgcaacctcctgcctccggggttcaagcaattctctcctgtgcctcagccttccggaaaagctagagattacaggcgaccacaacgtgcctaatttttggtattttaagtataaaaacggggtttccaccatgtgttgggctcaggggtggctcctcaaacctctttgaccctcagggtgactccgctcccccttgggcctcccagagagtgtgcgtgggaagttaacagggcgtgtaagccagtgtggcgcccgcggtccccaagaggaacaatttcttgaagaacccccacacaactttcagaaaccacacatttctgttccagtgtttaaaacacatagaaatttaacaacccttctataaagagcctagaggcaccacagtgcattctcgtgttaacagtgtgccacagaacagtggttctccactgggtttcccaccgatttaggggcgggaattctccacgtgtttctacgaaatctacttttacacacacaaaacagggtgtgtgggccgcggaaagtttaaacaccccagggagtaccaccccccaaggatacagtctatatatcttgcgtagccctccacagaaaaacttgtgaccccccgagatattgttgcgccaacagagtggtagacacaaccgcttgcgcaccccagcgcccgctctacagggtgttgttccctcacaaaaccctctgtgggtgaccaacaactcacactgtgagcgtgaattagcgcacgccctcttaatgacaacgacacacggcagtcgagagaaccccaccctttctccaacgacggatgacgtgtataacaaaacgcggatattcccccacctctatgaggcgcaaacaacatgtagcacgcgcacttgtgcgtatcgccatatcgctactacacttgtcactatatacccccccaccgggggcctgttgcatacttgccaccacttcttcgcaaattacgcaccacgtattcccccgcaaaaaaacagtttctccttacaacggttattactcacaccaattcacacgccacatgtggtggcacaactgctgtcgccacaagaatcc

SEQ ID NO: 649831 - DNA, 141 bp, Homo sapiens
cttgctctcctggtttactccactacattgctcctgcggcagctttcctactccacccttttacctttcccagaatacagaacctcaggccaaagagagatgccatgccccattaatctgcctctactgtaccccaggtga

SEQ ID NO: 649832 - DNA, 278 bp, Homo sapiens
atctccgtcgtgcattcactgagtaacgtatttacaccttgcgcacatatgactcgggaggagctaatgatacctcctgatacaattgctcgaggaaacatatttaactgatggagtcttatacgtggttcctgaatgcacagttgattctaacctatacaagtgcatcacatatagcagagcttccttctagtcttcttctgataattccaaatataaactttacctgtcagagtacaaagtagaagctgtgcattttataagaataagccttttca

SEQ ID NO: 649833 - DNA, 1041 bp, Homo sapiens
gcaacactccgaggtcaggaacgctccgtctggaacggcgcaggtccagcagctggggttccccgtcagcccgtgagcggccatgttcaaccccagcgccccaccaccatatgaagaccgcaaccccctgtacccaggccctccgcgcccctgggggctatgggcagcatctgtcctgcccagcgagggtatccatgcctaccctggctacctgctaggcctggctacgtgtctatccctgctggtctacccaacagcacgcatgccccccaaccactattctgatgcccatgaactacggaccagagccatgtgtataatggaggaggagagagcggtgagttgaatatcttcagcaggcccatgaggcagagatcgcgaaatacacggacaactgatgcagacaacaaagaatcatatagtccagacaaaggggttttacatacacaaattacaatctcgccatgacgacggcttagcctccagtcaacatgcaaggacctacttcaaatagccctaaatctaccaccccaatatagataaggagcaaccacctagattaacagtcaagcacctacataccatgcacaacctcataataaaatacttgcctcatagacactaaacttacacaattgataccataacctagtccatgaactcacatcatcgaaacacatccacatcgataatcccctgaacattcacccaactcaccatcgcactctgctcccactaagtgcaagctccccaaacaacaaccacagacttttatcacaccaaattggacacacctaaaaccaattacactttactaatcaacctcccccatttcattacaaagtataaatgatcaccaaaatacgcgcaattactcaactgcaaacagtctcaaccaccatattagacacacaacactaacataaatacacaccactctacatactacataacttactccatacttccaatcacaatatgctaccaaacaacttatataacaacatcccaacaatatccaaatatgacccaactaacaca

SEQ ID NO: 649834 - DNA, 1681 bp, Homo sapiens
  misc_feature (237)..(237): n is a, c, g, or t
  misc_feature (266)..(266): n is a, c, g, or t
  misc_feature (334)..(334): n is a, c, g, or t
  misc_feature (410)..(410): n is a, c, g, or t
  misc_feature (441)..(441): n is a, c, g, or t
  misc_feature (451)..(451): n is a, c, g, or t
  misc_feature (481)..(481): n is a, c, g, or t
  misc_feature (507)..(507): n is a, c, g, or t
  misc_feature (514)..(514): n is a, c, g, or t
  misc_feature (899)..(899): n is a, c, g, or t
attatgacaaagataacgatggcaggcttgatccccaagagctgttaccttgggtagtacctaataatcagggcattgcacaagaggaggcgcttcatctaattgatgaaatggatttgaatggtgacaaaaagctctctgaagaagagattctggaaaacccggacttgtttctcaccagtgaagccacagattatggcagacagctccatgatgactatttctatcatgatgagntttaatctccgagcctgtctcagtagagnactggctccttttataatttgttaccagctttacttttgtgataaaatattgatgttgtattttacantcttaagtcttaaccacagtcagaattatcttaatgtagattataattttgggcttttaggaaaaaaaaacaaaantctgatatttatttcaaaacgtattgaagcnacaaaatatnaatattgtgccatatgacaacaaagtcttncctaaataccccatctgtttagtacngtattgnggaatatttgagttctatttccatacttgaaaacatggaggatttgagagatgcctgaacaatattatttaagtagtatgtgaccgagctataaatttttgtttttgttctaagtagatttaatttgggaactgacaggacaatgtttttaggtttagcattttgtttaaaaacctttaaagaaacctttagaaggacttagacctcacatattaatgttgagaagttctgcttaattttaaaatggtttctataaagggttttattgtatgaaatagaactttatatttttgcatatgtatagatagtaattatatttaatgtataactatagcattatggtgagtggaatttgacattgtccaaacctttttcatttttgagngattaaaaatgaaatgtcctttgtaaaaaaaaaaaaaaaaaaaaaaaaaaaaaaaaaaaaaaaaaaaaaaaaaaaaaaaaaaaaaaaaaaaaaaaaaaaaaaaaaaaaaaaaaaaaaaaaaaaaaaaaattaaaaacaaaaaaaaaaaaaaagaagaagaacaaacaaaacaaagaacaacaaagagagggggggacggcagttgatacgattagtcagggaagccaactaaacccgtccaacagtagttggtgagtagaaagagcgcaaaaagaagaaagaaaataaaagcagcgcaggcgcaataatcaaaacaaaacgagagaggaagaaacagagacgatcaatgatcaggaaagccaacacctaggagttgagagaagaaacacgcgaagagctacgctgagccaaagctaggcatcgtggaggagagatagcaacaaactgcaggaaggcgaagcagaaacagagaaagatagtaagacacgacacaaacagagcatgcgatgaataataaagagaaagaataagagacaggagcgaaggagaacaacaagagaaggtggaagagccgtggaaaacaaatgaaaaagagataaacacagcgggagagcactaaacaaaaacaggaaaaaacaagaggaaaacgaaacagaagacaggaaaataaagcaaagaaaaaaagaaaggaagagaagaaaacagtaagcaaaacaaagggagaacacaacaagagagcgaaggcactaacaaagcaacaagagaataagcaacaagaacag

SEQ ID NO: 649835 - DNA, 1372 bp, Homo sapiens
  misc_feature (11)..(11): n is a, c, g, or t
  misc_feature (15)..(15): n is a, c, g, or t
  misc_feature (17)..(17): n is a, c, g, or t
  misc_feature (20)..(20): n is a, c, g, or t
  misc_feature (33)..(33): n is a, c, g, or t
  misc_feature (51)..(52): n is a, c, g, or t
  misc_feature (60)..(60): n is a, c, g, or t
  misc_feature (62)..(62): n is a, c, g, or t
  misc_feature (66)..(66): n is a, c, g, or t
  misc_feature (72)..(74): n is a, c, g, or t
  misc_feature (81)..(81): n is a, c, g, or t
  misc_feature (83)..(83): n is a, c, g, or t
  misc_feature (86)..(86): n is a, c, g, or t
  misc_feature (99)..(99): n is a, c, g, or t
  misc_feature (107)..(107): n is a, c, g, or t
  misc_feature (111)..(111): n is a, c, g, or t
  misc_feature (117)..(117): n is a, c, g, or t
  misc_feature (123)..(123): n is a, c, g, or t
  misc_feature (125)..(125): n is a, c, g, or t
  misc_feature (132)..(132): n is a, c, g, or t
  misc_feature (142)..(142): n is a, c, g, or t
  misc_feature (172)..(172): n is a, c, g, or t
  misc_feature (198)..(198): n is a, c, g, or t
  misc_feature (205)..(205): n is a, c, g, or t
  misc_feature (590)..(590): n is a, c, g, or t
aaaacaccgangccncnccncacaggcccaagncccaaccacagccagaannaccccaangnagancagaannngggcccncnagnagggaaagggganaggcgganaagnaaggcnaaacgnanggaagcnacaaaatatnaatattgtgccatatgacaacaaagtcttncctaaataccccatctgtttagtacngtattgnggaatatttgagttctatttccatacttgaaaacatggaggatttgagagatgcctgaacaatattatttaagtagtatgtgaccgagctataaatttttgtttttgttctaagtagatttaatttgggaactgacaggacaatgtttttaggtttagcattttgtttaaaaacctttaaagaaacctttagaaggacttagacctcacatattaatgttgagaagttctgcttaattttaaaatggtttctataaagggttttattgtatgaaatagaactttatatttttgcatatgtatagatagtaattatatttaatgtataactatagcattatggtgagtggaatttgacattgtccaaacctttttcatttttgagngattaaaaatgaaatgtcctttgtaaaaaaaaaaaaaaaaaaaaaaaaaaaaaaaaaaaaaaaaaaaaaaaaaaaaaaaaaaaaaaaaaaaaaaaaaaaaaaaaaaaaaaaaaaaaaaaaaaaaaaaaattaaaaacaaaaaaaaaaaaaaagaagaagaacaaacaaaacaaagaacaacaaagagagggggggacggcagttgatacgattagtcagggaagccaactaaacccgtccaacagtagttggtgagtagaaagagcgcaaaaagaagaaagaaaataaaagcagcgcaggcgcaataatcaaaacaaaacgagagaggaagaaacagagacgatcaatgatcaggaaagccaacacctaggagttgagagaagaaacacgcgaagagctacgctgagccaaagctaggcatcgtggaggagagatagcaacaaactgcaggaaggcgaagcagaaacagagaaagatagtaagacacgacacaaacagagcatgcgatgaataataaagagaaagaataagagacaggagcgaaggagaacaacaagagaaggtggaagagccgtggaaaacaaatgaaaaagagataaacacagcgggagagcactaaacaaaaacaggaaaaaacaagaggaaaacgaaacagaagacaggaaaataaagcaaagaaaaaaagaaaggaagagaagaaaacagtaagcaaaacaaagggagaacacaacaagagagcgaaggcactaacaaagcaacaagagaataagcaacaagaacag

SEQ ID NO: 649836 - DNA, 294 bp, Homo sapiens
attcgcggccgcgtcgacttttttttgttgttttttggagacagggtcacactctgtcaccctagctggagtgcagtggtgcaatcttggctcactgcaacctccggctcccaggtccaagcgattccctgccttagcctccagagtagctgggactacaggcacaggccaccacacctggccaattatttgttgtatttttagtagagatggcgtttctccatgccggccaagctgggtcgacgcgggcgcgaatttagtagtggtagtcgaccccggaatttcggaccggga

SEQ ID NO: 649837 - DNA, 124 bp, Homo sapiens
ggtactctagagatccccaaactcttgactcgtgccgggtgttgttcagcccagagccagattgctgtgtccctgggtcctccacaggtgaccccggtggacacacgcgtaacccatacctggc

SEQ ID NO: 649838 - DNA, 333 bp, Homo sapiens
ctgcgatccagcctaggcaacagagttgagaccctatctcaaaacaaacaaaacagccaggcacggtggctcatgcctgtaatcccagcactttgggaggtcgaggtggggggatcacctgaggtccggagttcgagaccagactgaccaacatggagaaagcccatctctactaaaaatacaatattagggggcgtggtggtgcatgcctgtaatcccagctatttgggaggctgaggcaggagaatcgcttgaacctgggaggcggaggttgcagtgagccatgattgagccattgcactacagcctgggcaagagcaaaactccgtcttc

SEQ ID NO: 649839 - DNA, 140 bp, Homo sapiens
tcgatacgacttttttttttttctctttccttttttctttccttctttccttcttttttctttctttctttctttctttctttttctttcctttctttctttctttctttcctttctttcttcccttctgtcgtcttctc

SEQ ID NO: 649840 - DNA, 192 bp, Homo sapiens
ccagatttccgcaaagctgggcagttgttagacgacgaataaccaatttcagcttcgcctttgtctagatcatcttcagagtctgcttataccccaggactgtacttcccacttttcataacgagttaggagcctagtagttgatcgactccgagcaacttttctcgtcttctttgtcggccaccatcttac

SEQ ID NO: 649841 - DNA, 157 bp, Homo sapiens
gcaaggcagcaaacatgttttcaatcatgccattgtgtgctaccctcaagtgtgctgtgtttcatcatggcagtctcaacacacacacgcacaacgcaacaaacacaaatcacagcctccatccaaccatctccgggctatctcgtgcagcaccaac

SEQ ID NO: 649842 - DNA, 215 bp, Homo sapiens
gaaagatgctatgtgatgagtaagctgattttaccaggtgtatcgttatctcaaggtagagactgccctaaggtagatggtttcagcaggcctatagctttggtattgtttgacccttaagcttaagcatctcttaccatggaggacgaataaagctgtacattgttgcttgagagtctgtacattatagtccagatttgtattagcactgtcag

SEQ ID NO: 649843 - DNA, 174 bp, Homo sapiens
  misc_feature (48)..(48): n is a, c, g, or t
  misc_feature (122)..(122): n is a, c, g, or t
  misc_feature (161)..(161): n is a, c, g, or t
ccctcaaaaattaaaaatagaactaccatataatccagcaattccagnctttgggtatttatccagaagcattgaaatgagggtactttcaaagatatcttagcactccagtggttgttgcnccagtaggaataaccaagatatgaaaacaacgtaatgtnccattggtcagtt

SEQ ID NO: 649844 - DNA, 385 bp, Homo sapiens
  misc_feature (133)..(133): n is a, c, g, or t
gcaatacaagcttgccagtttttgccccaacagataatccaatgaaggctgtgaaccaaaattttggctaaagcagtctccatggcagtttgatttttaaaggccaaacctcccacgacttcaaagcagggtntcacatgttaaccaggccccctgcttagagctgcagcacaaaagcctggatacatgcaactctattccactttccaattcaacagtaaacttcagattccaaacaatgttggggccaaacagcattgcaactgcggagagaaaattctaaggagggctagacctcagaacctctgccaagagcatcctctttgggagtggctggggtccgcacacaagaaggcattcctcctgtggggttccactcttaggg

SEQ ID NO: 649845 - DNA, 83 bp, Homo sapiens
tcctgcctaaggtttatttggacaaatagcccaggaggaccccacccccatgcaaatgggaccccaggggcgggggggggggg

SEQ ID NO: 649846 - DNA, 1177 bp, Homo sapiens
ggtacagaaacattagactgttatgaagatcagacacaactgcactgagatcccagacgcgtatctaattctccaactaatagaggcaactgcaccatgtctgtggacactggcggcccatgagggacacccgtgacgagcagagtgcacgacgcaggtacccttggttacaacatgcgacgttccttcctatgcgctgggtagagctcatgctaccgtcgccgtggtccggcgcacatcgcgtgcgggctaccttcactggtgcccatgcgacgtcacgcggtcccgggctcgtatctagatatgtaccatggttcacccgtacccatggaattcctggcggtcgttgggacgaatgcgtggctccactgtataaagcttgcctcgaaggcttcctcgcccgtgtcgctgtgctttcaaccgccatgcgcattggggcactcccaggcgtgcatgtgtgctgtgctgcgtgtccgcatgtccgcagacacctgtcctcgcagtggggaccacatgaccatacatgaccagcgcctaacgtaatggaacgaaacattgaaccgatgaagcggacgcattggtagattgccaccccatgctcttccaagaattagtcgtagattccaccctcctcgtaaaggaggtggtaaccaccgcacatcatgaagacctggggaggcccttcacctgcgagagagcttgaggatcaccgttagagacacacacaatggtatgaacccaattcagacgtgtggatacaaggtactatgtagaagcatgtgatgctactacatttggtctcgctggttattgaaaactgatgcaaggcaactccgttgggagtacaagaatgtcacagaatggacggctccgactcgagaagaagtcacattggcaaacgctggagcgacatcccgtcatcctgtgcgtggagttgtgaccaagacagcgatctgggccctattcgcccttgtcagagcagcaagaggcggtcttcacatcttgccaggccacacaaactacggtttcttagtgcccttaggccccaggcgcttccacgatttccgcctggtactcggtccattaaaccggtccggtttttgccactggcaaaaacacgagtgacataaaaaaaaagccgtgcaatcaattcacaggagcaccaggcaaaaaacgc

SEQ ID NO: 649847 - DNA, 327 bp, Homo sapiens
ctagaggatccacatacattgtctgatgacaacaatgttagatctgtttttataggcccacaaggccctgaggctctgtgagtttttattttttatattttgaggggtaggtcagggtttgagtccatcacccaggctagagtgcagtggtgcgatcatggctcactgcagcctcaacttcctgagctccagtgatcctccctcctcagcctcctgagtagctgggaccacaggcatgcaccaccatgcctggctaatttttttttattgtattttttgtagaggtgggttttgatatgttgcccaggttggtctcaaactcctgag

SEQ ID NO: 649848 - DNA, 435 bp, Homo sapiens
  misc_feature (29)..(29): n is a, c, g, or t
  misc_feature (36)..(36): n is a, c, g, or t
  misc_feature (90)..(90): n is a, c, g, or t
  misc_feature (108)..(108): n is a, c, g, or t
  misc_feature (121)..(121): n is a, c, g, or t
  misc_feature (132)..(132): n is a, c, g, or t
  misc_feature (138)..(138): n is a, c, g, or t
  misc_feature (143)..(143): n is a, c, g, or t
  misc_feature (298)..(298): n is a, c, g, or t
  misc_feature (395)..(395): n is a, c, g, or t
tttttcaaccccaataattgagcccctanacctttncttgagagagccacaaaacttttaacccatagtctgtctgggagccccatgaancttgttttattcaaaccntgcaaaagaactnggaaaaatttngacatnaaaanctaggccaggctgggtccagtgctttatgcctacaatcctaccaatttgggaggctgaggcaggaggattacgtgaggccaggagtttgacagcagcctgggcaatatagtgaggccccatctctacaagaaatagaaacattagctggacatgnacggcatgtgcctgtagttgcagctgcctggagggataatgtgggaggattgtttgagcctgggaggttgaggctgcagtgagcaataattgtactnactgcactgcagcctgggtgacagacagagaccctgtctc

SEQ ID NO: 649849 - DNA, 733 bp, Homo sapiens
cggcggcttgatggcagcgcaccgagttcccgcgaggatcatgacctgacggtggccccggagccgcgctgcctctcgggtgtctgggtcggtggggagcccagtgctctgcaggccggcgttgcgtgccggaggtgctgcatgtctccctcgcggtgagaggaatggcggagtgagcggtgaacctgcggcggcgctcgcgcggctgcctgctggggcggaacgggcagcttccgtgtgcctgggccgccgcctcacgcagtggcggcgtgctcccatgcgcaggtcttcagtgtgcccagggttgtgcctgtgcgtgccgaccttgcgatgacacactccaagtttcgtgcggtcagggctgattgccgcgagtttgaccgcgggcgggggccttgtggcccttcttgcccctttagcgacggcaagcttccgcactgccaggggccggcaagagggcggctcatcgtcgggccagacgacggcctccaggtcacgaggttacggagggcgagcgccggagcggtcgtagcgctgcaggggaccgcggggacaaccttgaattggcccccgagcccccgggctccttcgggaccgcgactggcggacagggctgctattccacaacatcttacgcggaaccaggggacacgttgcgggactcactcaattgttcggcggccgttggaccgcgggcccggtcagagccaacaattcctgtacacaggttgag

SEQ ID NO: 649850 - DNA, 362 bp, Homo sapiens
agttatcagccttggctacggttgattctgacttctctctgatatgggcgtgtgagagactacttcctattaggagagtcaggccgtgtgggaataaaatagtctcattcccagagtcagaggagaagagccatgtaccttgaaccatcgtccttcctctcaaggctagccagagggtgggagccataaggaatgcgtggcagtatcagatgcgagtgatggtcactaggatcctgacccgctcccataagctcaggagtagcaagggtccctttctcttcttctcgccaggtccttccttaaggcctgtgttgttgcaccgtctgcttggttggctgaagcggtgacatgggctaccgaga

SEQ ID NO: 649851 - DNA, 962 bp, Homo sapiens
cggacgcgtgggatgtattatgtttattgattgtgtatgttgaaccagcgttgcatcccagggatgaagccaacttgatcatggtacataagcttttgatgtgctgctggattggttgccagtattttattaagaattttcgcattgatgttcatcagggatattggcctgaaattttctttttttgtgtgtctctgccaggtttggtatcaggatgatgctggcttcataaaatgagttagggaggattccctctttttctattgttggaatagtttcagaaggaatgttcccagctcctctttgtacctctggtagaattcggctgtgaatctctctggtcctggacttttatggttggtaggctattaattgctgcctcagtttcagaacttgttataggtctgttcagggatttgacctctttctggtttagtcttgggagggtgtatgtgtccagaaatttatccatttagaagagaaaatttttaatgttcctagcacaagaacaaagataaatgactgaggtgagagctatcctaaataccctggtttgatcattacaccttgcataattgtctcaaaatatgacatataccccataaatgcatataatttgttatatgtctattaacaaaattttaaaaataggactggatgtggctgatgaataaatgggcgatggtaatactatttctctacttcttatgttcacaaatattttactattcagttccaaaatggatataaaataaccaaaagattccaaaatactattttctggcttccaattaggcccttattggctggtaatgctcggaggtttgcggtttcccactcggggtgttgcacccgtgtaaggagatcttcaggcgctccacagcgggccattacagttcgggaacacaaatgactgtaaaaagaggggcgcatcgaaaatagattataacacgccacaaaca

SEQ ID NO: 649852 - DNA, 397 bp, Homo sapiens
tgatgcgcacacacctatctagtgaagtggtaaaggactgtggttctccgtaagattacaccagtcatgagcgagagctcatagacggagaagactccgggaaggcttgtacgcccaacagcccattgaccaccttctcatgtctggtcacagagaactgattagtcctcagtacctctccgaccaccttcatgtacacagtggacaccaccttcacaaagtactgaaacatcatgaaggcttgcggcgcagagacatcgcgtgtggtccaggaggttcacaaatgcctggatagtcctccccaaatgacaggtgctggctgtcgtgggtcctgttgacgcttgtcaaggggttgaggccgcagggctgcaatgggcccatctcccatctgtgcttt

SEQ ID NO: 649853 - DNA, 330 bp, Homo sapiens
gccaattttaggaagcctttcatgactctaccaagtagactgagtcactgttattcagtgcgtccgcagacctatgctcacactccatttatagacagtaattaccgactgctgtgaattgcttggctatattattagcagtggctttagatccctgacacaagctacatgtctgtcaccaaaagttggcaactaagatgaatcacagaaaactaagacgtgataggaatgggtgcagtcagtggcgacttgaggaatagggaacaagactggcagcctataaaggaacactgcaagtgtctgaaaaagtctcaagtccagactcacttt

SEQ ID NO: 649854 - DNA, 196 bp, Homo sapiens
gcaatatggcaagaccccatctctaccaaaaatttaaaaaaatttagccgggggtggcggcatgttcttgtagttctggctactcacgaggctaaagtgggaggatcatttgggcccgggagttggaggctgcagtgagctacgatcgcaccactgcactccagcctggacaacatggcaaggcctcatctcttaa

SEQ ID NO: 649855 - DNA, 338 bp, Homo sapiens
tccatacacgtatattctactgcaggcgccattgatgcttacggcggcccggtgcatccggagcgcgtcttcgtcattcatgacgactcgcgggcgtggattcgagcctagagcgtgcgcgaggcctagtaccctgaccacctcgcgcgacatcctcgaagcgatggcgcgcggcgaaggcccgtccaatgccgtggtcatcgttgtttgctgcggttggggcgcagggcagctgggaaagcgagctgtccggagaaacagctggttgaccgtgcgggccgatgccgaactggtgttccagctgccgcttgagcaggcgctggcagggtgccgcctcg

SEQ ID NO: 649856 - DNA, 1013 bp, Homo sapiens
ggcggagcgcgcggtgcatggaatgggctatgtgaattgaaaaaaggtatccgttatgaaacttccagaaaaacgagctacatttttcagcagccgcagcacggtccttggccacacaaggatgagaaaaatatccaaccacgggagcctgcgggtggcgaaggtggcataccccctggggctgtgtgtgggcgtgtccatctatgttcgcctacatcaagtggcaccgggccaccgacaccaggccttcttcagacatcaccagggcagacccgggggcccggatggggttcagcaggcccacagcccctgggggacagcatagcagacgggcacgaggtcttctacgggatcatgtcgacagcaggaagcactggcacccgagtacaacgtctaccagtatcacccggccccccagagaaactcccacgtgaacccacgaaagccttcacaaggcactgaacgccaggtcttttctgccctcatgctgctgatgttgaacagagagcgctcagggaatcccgggaacctactgggatgttgctacaacagggacatcccgtacgaccttctgggaaggccgccacctctggtcctcagaggccacagatggtgcacgcctgttactggaggacaccaggcccagacgtatgcggaacgtgaagcacaggcatctaaagcttcgcactaaccctgaggggatggctgcgttaccacccacgagcgggaaccgacgaagggcgttcgcgtgaccaccacgatgccgcaaggcagctgacataccacagacgggagacgtggccagctgacctggcggacgatcacacacgtcctcctccgccgacgcacccagcgagatccacccgagacacggggcgcggcacaacgcacacaagatgctaaaacacagacggaaatgacagaaccgcgagcgagcccaccggcacactgcccggtcccacgaccgcccagtacggcgacgcgcactcaagcccagcagacacacaacgcga

SEQ ID NO: 649857 - DNA, 834 bp, Homo sapiens
cccagctgcaaaggtccttactcggcgcacccggaagagttcacgaaacatctggaggcacacggagttgaacccctcaaccaaggaggctagcttcaccaccaagaggcgaagggtcgggaacttgggggggtctggagtggttcggggggatgacaactccggtcgtggaggaaacttcattggtctggtggctttggtggcaccctggtggtggtgagaaatggtgcatggggatgctataatggatttggtaatgatggaagccattttggaggtggtggaagcacaaagattttggggatacaacacatcagtcttcacaaatttggacgccctgaagggaggaaaatttggaggcagaagctctggcccctatggcggtggaggcccatactttgccaaaccacgagaacccaggtggctatggcggttccaagcagcagccagtagctatggccagtggccagaagattttaaataggggaaccaagcttagcaggagaggagagcccagagaagtgacagggaagctaccaggttacacaccagatttgtgaactcaaacccagccaacagtggtggcagggcctagctgctcaaccaaagaagacatgttttagaccaaaaacatcaaagtgtatgggcaaaaaactcgaggaccgtatttgtgactaattgtattaacaggttattttaatttctgtttctgtggaaagtgtaaagcattcccaccaagggttttaatgtagatttttttttttgcaccccatgctgttgattgctgaatgtaaccgtctgatcgtgacgctgaataaatgtccttttttttta

SEQ ID NO: 649858 - DNA, 1024 bp, Homo sapiens
gctcttattaggcctgctgccacttccacgtaggactgtagactgtgcttcctcctggcccactggttgtagaggcctcccacaagctattgtggaacctatgtatgacgaaggaacaacagtgatctaaagctctttagcaaaccaagcagccagcgcactagctgcaggacacaagaacttttcaccaagaacaacagtcagaggtgattccatcagatccactacttactagtctgcattaccacggtccttaggaccagaactatgcgagtgctgaaacaatgacttctcttcaacaggtggctggagctgggtttgccatcactgccccaaggctcgggtctggggacatcgtctttcaacgtgaccaacctaatataccagtatacgaactcctcgagtactcctaatgcggatgggacagcgtaggatacgatacacctctaggccttcaagcccagtgcacaagggctctctaagttgaaacggacaacagtggacccccgtgactcccttatagagtaagacgagtggcccataagggccaaaagtcactggaaccccctcgtttggccattccttgggacaggcttaaagccatccatggcgtttccaggataattggcaacattgggctataaacccgttccggtatcgccccatgggtttcccaccaactgggctttagacaacattttaatatcccgcgtggatcaatccctgtggaagacacgccatttcccatttacaccatcacacatttcggccaacaaccgacatttggggaacagtacacccatataaattcgttcccaaggggactacgttgtgggctctcccaattaacggctaaggcattgtctcccaaaaactctatttacagggtcaaccacaacctctgggcgcaaatcccccttctcaaatatgtcacaataatatatccgtgttgtttccaacattgtctacaggcaaggacacttgcatacactctggtgtcctcagcacacagcacaagcctggg

SEQ ID NO: 649859 - DNA, 558 bp, Homo sapiens
  misc_feature (209)..(209): n is a, c, g, or t
  misc_feature (242)..(242): n is a, c, g, or t
tcgtctagcaggatccttgaaattgtgtggtgttatgttactgcgtaccattcaaacttctagactaaaggtcatcctccaaagggaccaagaggtaatgagctaggaacactatgataagcattggtatatccatggctcatgaggaatcgtggcatccttgaggatggtgttgtgccagcgttgaaggtttatgacgtttcctttgnagattgcttaggaaacattcttgtacaaggcanaatcctctcgtaaaaccttctcgaaggagattgtgtggtgtgtatgggtacattttcttacagttgtattaatttagaaaaatgtgtaatgacctattgataaaggttgtaggatattattgtgtatcctagagtaggtaatcttttaccctatagggagagagtgaagtttgttacttctctctcctttatacaacatagtggtccccactttattccccccacatgggcttgtgacctacttaagtacaagtgatagatagtgtgacctctctcacatttttgtaattgtgcattacaccacactaagggatcc

SEQ ID NO: 649860 - DNA, 338 bp, Homo sapiens
  misc_feature (209)..(209): n is a, c, g, or t
  misc_feature (242)..(242): n is a, c, g, or t
tcgtctagcaggatccttgaaattgtgtggtgttatgttactgcgtaccattcaaacttctagactaaaggtcatcctccaaagggaccaagaggtaatgagctaggaacactatgataagcattggtatatccatggctcatgaggaatcgtggcatccttgaggatggtgttgtgccagcgttgaaggtttatgacgtttcctttgnagattgcttaggaaacattcttgtacaaggcanaatcctctcgtaaaaccttctcgaaggagatggagttgtcgactagcttgaacagtagaatataaggggacatgagaatcataacaccacacaatt

SEQ ID NO: 649861 - DNA, 276 bp, Homo sapiens
gccaaagttgctgctctaccaaattctcagcagctcccttttacctattctgtgtggcaacgtctcgctgctgagtgcttttttctagcacttttatcaggggacctgctgtccttgggttgctggagcatggagaaatgccagtagttaatatcacttctcattctgcatctccatcctctcactcaccaaagccccaaactgcagccaacatagtcgatgattgaatgggggtagataggaatgcccagctcccttacctccaggcaaaaaaaa

SEQ ID NO: 649862 - DNA, 336 bp, Homo sapiens
aagtcctggatgctgtggaactttgttgaaagatggctaatagccttggcttcatggacttgggctctctgccgaatttctcttttacctttaatagagacttttcatctgaatggaggcattatcttacttttgttaatattcatatcaatagcaggtattttgtataaattccaggatgtattgctttattttccagaactagccatccctcttcaacgtcatttattgtttcccattggcccacctaggcatttcacacattggaaaaccatttttacaatcaagatacgcataagtattggtaattaccgaccttgaaatcctttatttttt

SEQ ID NO: 649863 - DNA, 141 bp, Homo sapiens
ttaatatagattagatcccatttgtcaattaagacttttgttttgttgcttttggtgtaatagtacataaagtctttgcccatagcctataatcctaaaattatattagcctaggttttcttctggtagtttttataggtt

SEQ ID NO: 649864 - DNA, 314 bp, Homo sapiens
ccggttcctttttttcccaggggggccaaggaattaattttggtttccccccaattaaaattcccccctttcccatcaggtcattgaaaggccctttaacgaaagaaatggtccctgaatgggaatttttttaaaaacccctgagattaaaaaaagcctttttggataacttataggaaaccctagacccccccagtaaagtggggatttttttttttttcccttttttttttggccaaaagttaaattaccagttttagttatgagtttggttccagtgttttttttttggggggtgttttaacttttgtcca

SEQ ID NO: 649865 - DNA, 566 bp, Homo sapiens
tgtatggtgaacatctagccacgtaaaaggcgttggatctttgtactgatactacagttcgtcttctggctaattcagagaaatgtcttttaatcatattcgtttacttatcccagatccttggaactcatgaaaaataacttgccagattttgcatcagccctcagtaagtcatgaaccatagagaaggtcatggggccatttatccttcgtgaccactggtctacttctgaagttctggcttcctaactctctaaggagtgagtcgtgtataaccagcttttaagttaatagtgcgtcatactgagtttgagcttctcttctgacttgatttttaactttcatgaaatgggaaataatgtttttccattctgctgttcatttagaagtgggactttgaggtgttagtaatgtcattgtcactgttctgaaagattgacagttgggaagacaagatatctcatgtctagtagtatgcatattagttttgtcccaccatgcctatctttgaatggctaacatttaaaagacatctgttctagttgcaccactactctagcttctct

SEQ ID NO: 649866 - DNA, 227 bp, Homo sapiens
accatattctattctgagagagtacatgcaatacgaggagccccagacatacagctgggcatgggtataaggcaggacatagtacctgcttagtcatagacaatattacatgtcctcatgtagctccccttaactgaaccccccttaacaggcgggattctgcctccagaataaacctaaggcagctctgaccaatgaatgagcccctctaggcaatgaacatcctc

SEQ ID NO: 649867 - DNA, 1010 bp, Homo sapiens
  misc_feature (165)..(165): n is a, c, g, or t
cagcacgcactctagcaaagtgtgcctgccccgaggccaagccctcagttacctcgtcctactccccagatcttgaacgatcacaactagtaatctacatcaatccgatgtaaatgagtcatcggagtgatctgcacgtcattagcggccagttagtcgatagcnctggcgtttgaggacattgttgtgagaaggcagacaggtgtgcgctgcatgactcaggtgagcaacagaaatcacgtctagggcgagacacacgttgaactgtgaagtgacccagcccggtccgagttgaaaccagccactggaagtccgtatagaaccacagtggaccaccggcggcactggtcacagggtacaccgaacacaagccctggggacacaccggagatatgacgccggcagtgtgatgtagactttttctcaagcgacactaggatacaaccgagtagtgtgaaagcccattggtgatgctccgaatgtgtgtcacacaaagacaggggaggctccgtggggcgatgaatcaattctcacgtttgacaagtatgaggtcggagatacccattccagacggcgagttgtagggccataacaattatacccgatattcaagatcactgggacaatcctatgtacttgctatcgctcagacagagagcataacgggtgagtgtgtagtcctgatcaccaggatttcgaacattgttctcgactctatcctagatggacatagtgggcagacatacatctgccccagaggaagaaacaacaagagatgccctagcaacccagcaaggccattccatgcagttcggtaagcagttggacatagggggcctagacagactctagaaagacgcagctctggcaagagtaaggacatacttagtggtagttggaccttatgcggtaccacccttttccaattaaactcaagaggatacgacccgaatgcaatacagttcttcgactcctccaacatatgtgggagaccacagacgtgctgcatg

SEQ ID NO: 649868 - DNA, 803 bp, Homo sapiens
  misc_feature (6)..(6): n is a, c, g, or t
  misc_feature (70)..(70): n is a, c, g, or t
  misc_feature (75)..(75): n is a, c, g, or t
  misc_feature (129)..(129): n is a, c, g, or t
  misc_feature (143)..(143): n is a, c, g, or t
  misc_feature (185)..(185): n is a, c, g, or t
  misc_feature (195)..(195): n is a, c, g, or t
  misc_feature (202)..(202): n is a, c, g, or t
  misc_feature (219)..(219): n is a, c, g, or t
  misc_feature (223)..(223): n is a, c, g, or t
  misc_feature (227)..(227): n is a, c, g, or t
  misc_feature (258)..(258): n is a, c, g, or t
  misc_feature (271)..(271): n is a, c, g, or t
  misc_feature (276)..(276): n is a, c, g, or t
  misc_feature (286)..(287): n is a, c, g, or t
  misc_feature (320)..(320): n is a, c, g, or t
  misc_feature (330)..(330): n is a, c, g, or t
  misc_feature (341)..(341): n is a, c, g, or t
  misc_feature (344)..(345): n is a, c, g, or t
  misc_feature (349)..(349): n is a, c, g, or t
  misc_feature (374)..(375): n is a, c, g, or t
  misc_feature (377)..(377): n is a, c, g, or t
  misc_feature (382)..(383): n is a, c, g, or t
  misc_feature (387)..(387): n is a, c, g, or t
  misc_feature (389)..(391): n is a, c, g, or t
  misc_feature (393)..(393): n is a, c, g, or t
  misc_feature (417)..(417): n is a, c, g, or t
  misc_feature (420)..(421): n is a, c, g, or t
  misc_feature (445)..(445): n is a, c, g, or t
  misc_feature (460)..(460): n is a, c, g, or t
  misc_feature (462)..(462): n is a, c, g, or t
  misc_feature (464)..(464): n is a, c, g, or t
  misc_feature (473)..(473): n is a, c, g, or t
gggacngcttcagggcttctccgcgactggaccgggcgccgctcgaaagcacgccctccattcgcactgnttgtngggctcatcatgaagcgcttgggctccgtgcagcggaaaatgccgtgtgtgttngtgacggaggtganagaggagccttcctccaaaagggagcatcagtttaaagtttnggcaactganactgtanagtcacaaggcattagntgcngatntatacagtgcaattccaacagaaaaagtggntggaacatgtgtnatgtnctacctatanngatcagccataccttgggctcgactagatgaanagccaacaanacaagctgaanaanngatntaaaaattttctacattcaaaagannanccaanngaantnnntnggaacgttgaggaggacttcaacncannctccggagtgctggataccagcanaggagacagaacaantnantgggaaccnagtgcctgatgaaaatggacacgttcctggtggggtaccagtagagaacatcaacaaagggtattgcctggcatccgtctgctagttcacttatgaatctgaaaattgcccgtggtacgaaaacaatcatccctgatgattctggaacttttggaaattagtgcagtgcactgtcagatctcttagaacaaaccgtggtactcataggaacacatatcatgcaaccagtagggttagggagcacgagcgtcattcatctcttttacccctgggcattcaagtaaaaatctcctcttgagcccaggtctccggccggttgacatgcccacg

SEQ ID NO: 649869 - DNA, 272 bp, Homo sapiens
cgctgtcggccagctaccagagcaaccaggtggagctggacaactacgtcaagaccatcaaggaagcggtcggcatcgccaacgtcaagagcgacaagatcgaccagatcctgcgcgacgcggtctccggtcgttacggtgacagccgtcagaacctggacggttcggcaccggtgaagaacggccagggcggctcgttcatctcggccatcgtcgaagcctaccccgacatcaagggtcagctcaacgtctatgaccacatcatcgccaag

SEQ ID NO: 649870 - DNA, 155 bp, Homo sapiens
cagcagcgcgagcagtcacaattccatcaagcaggtcaagcatgccctggccaaagcatgtgttgttcatgcatgtccacatttcagcacagcagctcttgcatcactcatgtggcaacaccacacaggtggcttcacaggcgcagcatcaccca

SEQ ID NO: 649871 - DNA, 838 bp, Homo sapiens
  misc_feature (6)..(6): n is a, c, g, or t
  misc_feature (70)..(70): n is a, c, g, or t
  misc_feature (75)..(75): n is a, c, g, or t
  misc_feature (129)..(129): n is a, c, g, or t
  misc_feature (143)..(143): n is a, c, g, or t
  misc_feature (220)..(220): n is a, c, g, or t
  misc_feature (230)..(230): n is a, c, g, or t
  misc_feature (237)..(237): n is a, c, g, or t
  misc_feature (254)..(254): n is a, c, g, or t
  misc_feature (258)..(258): n is a, c, g, or t
  misc_feature (262)..(262): n is a, c, g, or t
  misc_feature (293)..(293): n is a, c, g, or t
  misc_feature (306)..(306): n is a, c, g, or t
  misc_feature (311)..(311): n is a, c, g, or t
  misc_feature (321)..(322): n is a, c, g, or t
  misc_feature (355)..(355): n is a, c, g, or t
  misc_feature (365)..(365): n is a, c, g, or t
  misc_feature (376)..(376): n is a, c, g, or t
  misc_feature (379)..(380): n is a, c, g, or t
  misc_feature (384)..(384): n is a, c, g, or t
  misc_feature (409)..(410): n is a, c, g, or t
  misc_feature (412)..(412): n is a, c, g, or t
  misc_feature (417)..(418): n is a, c, g, or t
  misc_feature (422)..(422): n is a, c, g, or t
  misc_feature (424)..(426): n is a, c, g, or t
  misc_feature (428)..(428): n is a, c, g, or t
  misc_feature (452)..(452): n is a, c, g, or t
  misc_feature (455)..(456): n is a, c, g, or t
  misc_feature (480)..(480): n is a, c, g, or t
  misc_feature (495)..(495): n is a, c, g, or t
  misc_feature (497)..(497): n is a, c, g, or t
  misc_feature (499)..(499): n is a, c, g, or t
  misc_feature (508)..(508): n is a, c, g, or t
gggacngcttcagggcttctccgcgactggaccgggcgccgctcgaaagcacgccctccattcgcactgnttgtngggctcatcatgaagcgcttgggctccgtgcagcggaaaatgccgtgtgtgttngtgacggaggtganagaggagccttcctccaaaagggagcatcaggtcagcacctattggggaaaccccctaatcagccatttaaagtttnggcaactganactgtanagtcacaaggcattagntgcngatntatacagtgcaattccaacagaaaaagtggntggaacatgtgtnatgtnctacctatanngatcagccataccttgggctcgactagatgaanagccaacaanacaagctgaanaanngatntaaaaattttctacattcaaaagannanccaanngaantnnntnggaacgttgaggaggacttcaacncannctccggagtgctggataccagcanaggagacagaacaantnantgggaaccnagtgcctgatgaaaatggacacgttcctggtggggtaccagtagagaacatcaacaaagggtattgcctggcatccgtctgctagttcacttatgaatctgaaaattgcccgtggtacgaaaacaatcatccctgatgattctggaacttttggaaattagtgcagtgcactgtcagatctcttagaacaaaccgtggtactcataggaacacatatcatgcaaccagtagggttagggagcacgagcgtcattcatctcttttacccctgggcattcaagtaaaaatctcctcttgagcccaggtctccggccggttgacatgcccacg

SEQ ID NO: 649872 - DNA, 275 bp, Homo sapiens
cccattgcttgtgatagctgaaagccaagcaccaagcaaggactctatctgtagtaatttaatgacactcaaataaaattggttttcgaatgtccccaaaaaattagttttagagttaaaataataaagttgcattttagcttttctctccttctttgcttaaggagctcaccaattcctaaagtttgaaatgtgccaaagtagtacctcttctctcatcaatacctgaagtccttagctctggttcaatgactacttttagtatgtctgtatga

SEQ ID NO: 649873 - DNA, 268 bp, Homo sapiens
caatgaaactccaagatagttctctccaccagcacggggctacaaagacaggccagggggtcgcacactgtgggtactttccgtgagaactcataaaggtcgttgggacttcctgactctgatgaagtgggaaaagtactgcatgatttccaacgacaggctcttctcctccagagacaactgcccctcataggctgggtagacgggaagccccacggcaaactgaacatccgccagcacctccaggctgccatggacgtcgtttcca

SEQ ID NO: 649874 - DNA, 100 bp, Homo sapiens
ggatttgctggtgcagtacaactaggcttaatagggaagaaaagacagaaaaagagaaggagcaaagaaggaaagcagggagagaaggaaaaaggaaaaa

SEQ ID NO: 649875 - DNA, 241 bp, Homo sapiens
catgtgctgtaaggtcgagcgaattttgatttatatataattattttggaaacagtgtcccgcactggtcccccaggcgggagtgcaagggtagcaatttcggctcactggcaattgccacctcctgtgtccagttgattctcgagaactcagcctcccaaatagctgggaccacaaactgtgcaccagtggctaagtttttcttatctatggttttatacaaaattcaaaaaaaacaggg

SEQ ID NO: 649876 - DNA, 188 bp, Homo sapiens
gatcagcgctgtaccgggtttatcgatgccactgggctctgggctaggacacgagtgagaccctatctcagaaaaagtaagattataagaacagacatacaaagatacggagactcactatactgtatatgattggatatcattagcacatcaagagtactctacgctctggaattgctatctagaag

SEQ ID NO: 649877 - DNA, 221 bp, Homo sapiens
  misc_feature (202)..(202): n is a, c, g, or t
gcctagcctcctagacacttttcagttgattccagtctgggatgcccgcctgagggatctaagcctcccattgtctcggctcctggctcagctagaaccatctttcccattgtccctgtggtgctagggtttcagtggttattaacgtctgtgttgtatcatcttgcctgaatttcagctctctgtaaccagttccccaaanaaatcccccctttacctac

SEQ ID NO: 649878 - DNA, 311 bp, Homo sapiens
  misc_feature (96)..(96): n is a, c, g, or t
  misc_feature (105)..(105): n is a, c, g, or t
  misc_feature (123)..(123): n is a, c, g, or t
gggctatgcaagggggtgatcttttagactcatcatggaagattggagtagctaggatacacctgtgggcttggggaattgggggcaaggaatgtnttgtcagtnctcaggttcatgtaaatnttgtatcggcagggatgggccttggttccctagagacaaggaaagcatttgggggtgaaggcaggaaggctagaagagagtggatggaagattctatggggtaagagtgaattgaggaaaaccccatgaaattttgggaaaaggaacactatttctgatttggttgtctaaagcagagggacctttat

SEQ ID NO: 649879 - DNA, 101 bp, Homo sapiens
gccagcaccaaccagacatctatgtacctctgtgccagcagtaacccggacagggaggaaggacgagcagtacttcgggccgggcaccaggctcacggtca

SEQ ID NO: 649880 - DNA, 180 bp, Homo sapiens
ttttttaaaaacagggggggcccctaaagggggggggttcccggaggggttttttttttaatttacccttttttttttaaaaaggggtttttttgttttttttaaaccccctttgggttttttccccttgaccctttttttttactgggttctttaaaatttttttttttggggggccca

SEQ ID NO: 649881 - DNA, 129 bp, Homo sapiens
agagacttcgccgagagtcgtcggggtttcctgcttcaacagtgcttggacgagaacccggtcgctcgttccccatcccggctcggccgcccatagccagccctccgtcacctcttcaccgcacactcg

SEQ ID NO: 649882 - DNA, 335 bp, Homo sapiens
  misc_feature (44)..(44): n is a, c, g, or t
  misc_feature (102)..(102): n is a, c, g, or t
  misc_feature (106)..(106): n is a, c, g, or t
  misc_feature (109)..(109): n is a, c, g, or t
  misc_feature (111)..(111): n is a, c, g, or t
  misc_feature (182)..(182): n is a, c, g, or t
  misc_feature (323)..(323): n is a, c, g, or t
  misc_feature (328)..(328): n is a, c, g, or t
gcaggggcagagcggtctcaccccccgcctctccccggcccccnccgcccatatggcgaggagggagccccctcccaacccgggctcgagcggcggcgcctnaggnagngngtcatcatggaactaattcgctgaccgacccagcggccgagcgtgcgtcccgctcgagcgccagaccagcnccgcgcccccgatccgcttccctttctccctcctcagttggccgagtcgtccgcgcgcaccgctccgcgccctatgagaatgaggtggtaacgggcccccggatgaccccgcgtcaccactgtgaggcctacagctctgcnggggngggagga

SEQ ID NO: 649883 - DNA, 150 bp, Homo sapiens
cgttaaggaaaccagaatttgacaaactccaacaatacaaaggggcatgttgctaatgagcgcaagaagagctgaccatattagatttgatgcttgggggatcatagagaatttatgtctgcttttctaaatctgaattataatagctta

SEQ ID NO: 649884 - DNA, 117 bp, Homo sapiens
ggtttgggcccccccctttattccctgccccgggtaaattagccccggggggccccccccccccaggggttttggtttttccccttttttttaaagggggggggtttttttccccca

SEQ ID NO: 649885 - DNA, 105 bp, Homo sapiens
cagcgtcagggtcaataatcattcaggtgttttgaaaatccaggaaaaatattcaggatggggccggggctgccgaaatgtgttcccaggctgtggagtccccag

SEQ ID NO: 649886 - DNA, 187 bp, Homo sapiens
acccgcggcgtgttcatgcagaagatgtgctgtttgggctgcatctggaaagaggattattgggttgcaggatgggcactgaaggggggggtcactcccctcccacacacacacacacacacagacacacccctgccccccgtcaatgtgcacacacacacacacacagacataccctctgccaacg

SEQ ID NO: 649887 - DNA, 379 bp, Homo sapiens
aagtctttttcacattattataattggggtgttcactagagtagcccttttcatttccttcaagaactttgccagccgggtgcggtgactcacgcctgtaatcccagcactttgggaggctgaggtgggcagatcacttaaggtcaggagttcgagaccagcctggccaacctgatgaaaccccctttctactaaagatacaaaaattagcctggtgtggtggcaggcacccgtaatcccagttacttgggaggttgaggcacaagaataacctgaacccaggaggtggaggttgcagtgagccgagatcacgccactgcgcttcagcctgggcagagcgagagtctgaaaaaaaaaatatattccaacattaccatgt

SEQ ID NO: 649888 - DNA, 190 bp, Homo sapiens
gccgggaaactgctttacactataggcattgttacactgtggatgctgtaattagggtcctgctagtttttccacagcaagcgtgtgcttctatcagcactaatatttctgggatctacatagtactgtttaaattatggtacatgtcatttaatacatctcacttcagtctgtctatcaatattgttct

SEQ ID NO: 649889 - DNA, 101 bp, Homo sapiens
aggatctgaagtcaccgcgtactcatgctcaccagcggcgctcgcgtgcgaacgccagttttggccgttttttgcggtgcagaagggtaaaaacagcagtt

SEQ ID NO: 649890 - DNA, 405 bp, Homo sapiens
  misc_feature (166)..(166): n is a, c, g, or t
  misc_feature (171)..(171): n is a, c, g, or t
  misc_feature (175)..(175): n is a, c, g, or t
  misc_feature (182)..(182): n is a, c, g, or t
  misc_feature (190)..(190): n is a, c, g, or t
  misc_feature (193)..(193): n is a, c, g, or t
  misc_feature (196)..(196): n is a, c, g, or t
  misc_feature (201)..(203): n is a, c, g, or t
  misc_feature (208)..(208): n is a, c, g, or t
  misc_feature (213)..(213): n is a, c, g, or t
  misc_feature (215)..(215): n is a, c, g, or t
  misc_feature (217)..(219): n is a, c, g, or t
  misc_feature (225)..(225): n is a, c, g, or t
  misc_feature (227)..(227): n is a, c, g, or t
  misc_feature (242)..(242): n is a, c, g, or t
  misc_feature (252)..(252): n is a, c, g, or t
  misc_feature (290)..(290): n is a, c, g, or t
atagtgcggctgcagcttgattacaggactgatctaccatcaccacgccagggatcgcaggagtgccagcgtgtaagcctccccatacgggatgtggtacttgggggcctcatcactcacgtccgtctcgatgcgagacgggaatgtccagaaggcgatcggctcntcatnggtnatgtganatgccttncanccngtgtnnngtctnggganancnnntctgcngncaggatgtgtccatngaccacgttnccacaaaggtgaagtccaccaagttcttcccatttccnatcacgaacttcatcttgccgttcctggctgcctcgatgaggatgggtaccaactgcgggtcccttggggcgaaaatgccatgagggcggatggctgtggttcggacattcttct

SEQ ID NO: 649891 - DNA, 186 bp, Homo sapiens
ctccttcacagtcgggaaagtaatatgagtaggactgtgtatgctactagattatctgctcgttgttctataccacttcacagctctggtttcatctggattatgggctttagagaatgttaccccacctggtcataatttatacctcattttgattcatgactctgggttatcattccagagtta

SEQ ID NO: 649892 - DNA, 167 bp, Homo sapiens
gcgccgctccttgatcatcaagggcctgccgacccaactgaccgaccagctcaagcgccgtaactgatgctgggcggggtgctcaagaaagtcctgctggtgttgctggtggtgggtgcgatccagaactggggcaaggtggagcggctgttcaagccgtcccaggt

SEQ ID NO: 649893 - DNA, 470 bp, Homo sapiens
taagtgcatctgccactgtaaatcatagtcatgactaggacaatatgttgagcccgcctagtgaatgatctaaccaggagggtcttgggaacctccaacaatttcaaaccatgtcttcctccctaatactttcttatttttgtcctcacttaaagccaccttatatctgctctccaaattttatttccacttcgtttttatcttcctttttctttcttctctccatagaaaacaggacctgttagctgtacacttccctgaaactagatccatttacatattcaatctttcactgaactatgaaaactcattgatttattcaataagcatgtaacaggcatttgttacattccaggctctggaaaacaagctcagtaagagagtcttattcagtcacttaaaccttacattcaaacgaggaaaacaaattagtaagaaagcaattattttgttgtggctatatactgcat

SEQ ID NO: 649894 - DNA, 225 bp, Homo sapiens
caaagggctggaggttacagggcatgagccacggcacccgggcagtcctctattttctggcccccatttccagacccctccagtcttggttcccagaacaccttcagaaggcatgagtaaaagggaggtgataatttccaactcacaggatgggggggggaagaaagggagaccatctataaaagtcttccaggtagagagccgggcaagggtaccggagctcga

SEQ ID NO: 649895 - DNA, 116 bp, Homo sapiens
aaggtagacgctctgcctatactcacatgtataaggcttttctgaagtgtgaactctcatccagttcgattcccacattcactgcacatgtaagatctttccctaatgaggtctcc

SEQ ID NO: 649896 - DNA, 427 bp, Homo sapiens
  misc_feature (22)..(22): n is a, c, g, or t
  misc_feature (77)..(77): n is a, c, g, or t
  misc_feature (160)..(160): n is a, c, g, or t
  misc_feature (272)..(272): n is a, c, g, or t
  misc_feature (274)..(274): n is a, c, g, or t
  misc_feature (277)..(277): n is a, c, g, or t
  misc_feature (285)..(285): n is a, c, g, or t
  misc_feature (291)..(291): n is a, c, g, or t
  misc_feature (298)..(298): n is a, c, g, or t
  misc_feature (303)..(303): n is a, c, g, or t
cactctatactgtaaagtacgnaaacagcccttgacggtgaaaaacagcagcggcctgcagcagctggccttaccanactgtgaaatccgtcgctatcggggagttcttgaatctgcagacccgtctggaggagaaaccagatctacggaaagttcatcnaaaaatgtgaagggtcctaaaaagctctttccagatcttccatttggaaacatggacagtgacagagtagaagcccgtaagagcctcctagaatcattcctaattggggggngngcnattccagngatcgntaacagnggttnggtgcaggagttccttgctctgaacacagatgctcgtattgcctttgtcaagaaaccatttatggtctctagaatagacaaggtgttaccgatttggaaactagaaatcacctttttacttaaa

SEQ ID NO: 649897 - DNA, 213 bp, Homo sapiens
cgctcacacgggagggacacggggacggtggagtggcgcagagcggatggctgagaccgttagcgggaagcagggtgagcaccatgcgcgggacgctcaggccgggtcgggcgttcagtcatctccaccacacaggtacagcagcgctttctggtagtcgcccttagcgtctcgcgggatataataggacagggactggccgaagctggagca

SEQ ID NO: 649898 - DNA, 87 bp, Homo sapiens
gatttttaaagacaaatatctaaatagaaaaatggccaaaacaggagttcaagaccagcctgaacaacgcagcgagaccccatctct

SEQ ID NO: 649899 - DNA, 1536 bp, Homo sapiens
tggtgtgtgtgtaggggctgtcttggctgtgtcgtggtttgggtgtgctgtgtgtgtggttgcgctgtgcggcggctcggtaggcgagtgtgtgtgtgcgtgctggtgatggcgtctgtctggcttgtgggttggggcgtgctgttgctggcttggccgcgcttgctgtgttgtgtgttcgaggtcggtgctcttgctggtctatgtgtgttggccgttgtgggtgcgggtgcgccggtggtgctgcggtgtggctctgggcctcggacttgtcgctgtgtgccgtatgcctggtgttcgtccctgtctgttagtttgtgacttgggatgtcgccgatccacgatggtgttagtggtgatgcggtgtctcggagtgttgggttgcttgctggtgtgcatgcttgctgtgggggggagcgtcagtttggcttgtgttggatggtgtgggaggagagggcggttggctctgctcctggtagatttgtttgctcgactgccgtcgtagtcacccggggtgggctccggggggattggcggggatgggtttggggtgctcctgcaggggggctgtgggggcgcgtcattgtgggctggtcccgttggattggggaacgagggtagtctcctgtgtgtgtacgtcctgtgctcagtggtgagtcgtgtccgagatgccgtccagcggctcccttgtgcgcttgacccgtgtggtcttcgtgtcaggagggtggttgctggtgctttgtcggggtcgttctcggcgctgggtggtgtgaagggtcgcgtttggccaagggggggggttcctcgtgtttgttcggttccccagtgtggttgtgtgcccccaattggatggggggcgtttccttctctgagtgttttgacgctgctaggtcaggggggccaaagttgtgtctgcggaaattgcttagccttgaatgtggccagcgagccgtgccgagggggctccaagtcccaggtggccaacacaatgctcgtgttgcacaaggaggcctgtgggggagacgttgctgtagggggtgctgtgctaggcaagtccagtgaggtcctgggccctccttgggagtcttgggggccctcgggcccagtgcctggacctgtgtgctgttgtgttcccgcacgtcgcccactgggtgtccgcttgttgtattcgtggttaaaagtttatgctggacttgcacgccctgggggtttcacggcttcggtgccatcaggcccactccgttcagccttgtggcccacctctgtgggcaccaatgggggctccaccaccatgcacccaatctgccccgcagggttggtggcgagtatccacaggcgctctcatgtgggaccatgggcacccctgaccgggcacttttcagcgcccgttttgaggaccagacaatcacacacacgagtgtaggcgtacatcccaccacaccccagctggtcatcgcattggatttcacatacaagcccaccgtgggtcatggaccacctttattttataccaaaatttcaaacaagtttttacca

SEQ ID NO: 649900 - DNA, 758 bp, Homo sapiens
catggtggctcacgcctgccacccatgaccgggtaatttgtatttagtagagacgggttcactgtgtagccaggatggtctcgatctcctgacctcatgatccgcccgctcggcctcccaaagtgctgggattacaggcgtgagccaccatgcccgcgcttaataactttttaaaggatgtcaagttaatggaatgtatctgctcctacattcttccacccggggttttgttacaaattagtcccagatctagtgtgtacattctttctcaattacctttttgtggctattgggaaactttctttaacaaagaggtttttcctcaccctttggttgtgcccaagaaggggcaggaaggaaaaaccaaaagatttgggttccaattggcaaaggtggtttttcccctttaggaggggggggaaaccccccttaaagggaaaaaacacgccaaagaggggcgaaaacgggcatcgcttttttgttgggggcaacagtgcgcgggccgccaaaaagggggggggggcgacacccaaacagaagacagacggggggagtcttaaacagacattttttttttgttatcaccacagacaaagaagatgcgacgacgaagaaagagtaacgaaggagagttggtgtgtggtggggggagcgagagaagaatttagtttatagtcgacgagaggagaggtggggtgggagatgattgagtgattgatttgtgattagtggagagtagttagtgatgaggagaggga

SEQ ID NO: 649901 - DNA, 445 bp, Homo sapiens
cccccgggattttggtagtgatgacattcatctatagcaacatacatacaatgtacagatgtataggatgtggacataagagtttctgtgacgaaatatgcttcagatgagaataccaagaacataatagagttcatgcagaggcctaaggataatcaagtagtcactaagtttatcttaagatctacacttataggatgctgttattgctagcacaattaagcaggcggagtctttcatttgctcaaacactggaatctttggttgctaccatatcagctggcttgcagacgagaagcctaccattttaagaatgttgtaagtgaacaacttgcaaaccccagggatggaaaaaccctaagaatgcacaattgtgagcatttaacaaccatcacaactgtggctgaagactgttcatgccgttcttctgaaatgagatctcaaa

SEQ ID NO: 649902 - DNA, 1337 bp, Homo sapiens
ctgtttgtcttctttctctcgtcgtgcttcttgttcttttgtttttctgttcctgtttgtgatcggttcgttagttgcgtgttgtctgtttccctcgtggtttatcattttgtcgcttctgctgctctgtcgtctcgttcttctttggttgctttgcttcgatctgtctctgttcgccttgtgggcctctctctcttttcgcggttgctgtcggttccttgtggcgttcttgtgttgttcagtactgcttgttttgtggttctttgtgcttctgtgtgcgttgtcctcgttgtgtcgcttctttcctgctcttgtttggtgctgttccttgttcggtattcgttcccttttggtttttagtgtcctgtgttttcctgactgtttgtctggctggggtcctgtttcagctctttgtgtgccgggtgcctgttttgggctctccccggtgtcattctcccctggtgccggttcatgttgtttttgttttgttgggttcctgttttgtgtgcgtttgctgtgtctttggccccgttgtctggttcctgtagtctggtgttgtgtctttttctaggccgttggtcgtcctcgtgcgtgcttgccaggtcgcttgctgctgtgatcccttgggtgttttttgtttcagtgatctcccttccgtgaaaggattggacttttaatctttctggtatgctagtgtatctatgggccttctgctcccgttgcgtgaattgatctccatgggaaatcccatgtatggtccctgtgcgtgtgcatagtggcttcgtgcagtgtttcatcgtcatggagggcctgtaggggtactagcgagtgattgtccctctccacctgcctggccgagtccttccttgtttcagtcttcctctgtgcgacctcttccagggatgcagtgggagtctcaggattctctgcccctgtcatctcggcgtagtcagaatgtgtatgggtgcctttccctcggatcccatggccccatggcagagcttttgcacctgcaggatcccctttgagggcctttcaaggcgtctctccatgtgagtccccctctgcctggcccccctatgccccagctccctcttggtgtcctgtgccaagtccgccccatgggcctggggctgttgggatgccatagggccccctggtatctcagttccctcacgattcccgatcatcgggcacacctgccccctggttatttgtaaatatttctatttggatcccaattctcctctggaattgtgctggcacctctggctgccgcagctcatgtgatacgtgtggtggagtgggatgaggccgatggctaaccgaggggtggg

SEQ ID NO: 649903 - DNA, 125 bp, Homo sapiens
gcggccgcctactactactactactgctcgaattcaagcttctaacgatgtacggggacatgcaaggtctacaaactcctcggacttttggccaggggaccaagctggagatcaaacgaactgtg

SEQ ID NO: 649904 - DNA, 780 bp, Homo sapiens
tgggactctaatcaacttccctttggtgggggactttggggattcacagaaatcggagttgggaggccctttaaaaaaaaactccggatttttgacggagtaaattgggcgtgtgcccaaacagattttggttatattgggcgcccctgtgtaagaaggtaactccctgtgggggttccccttcttataaataattgggcgtataattggaccaattggcttaaggggcaaacggtgattttattatacaaggactcgcctagaaaatatatatgcattctttggatttcaaagaacgcaaaaaggtgtctctctaaattaactccctttaaaccaacaagattaaaactaaggtgggggcacataattaacatttaatttgcggcacgaaatggggtgggtaaataaggccgtaagacgcaagttattagcaaatatgggagagggccccggtgtttcaaggtgaggaccaaagggcgggccccagggttataattaaccggttttctccgggacccctttatttaattttcttctacccaaagttttcttcccactggtggtgtttccctttttgcgcacaaattgtgggtagcttttaaaaaagatttttcgtggacccccaggtaggttcaatattcgttgggaggaccattctcttgagagaatttctccaattttcaaaaattaacaaaaaattttacattctatgttgggtactaaaggtcacagggtttggagaggctaacctattcatgtattaaatatagtttccccaag

SEQ ID NO: 649905 - DNA, 812 bp, Homo sapiens
ccctttttttttgtttgttttaaaaggtagttaaataaactccagaaaataatagcagatgcatggaaatatttgacataatctcgattttcaaatctctcattcaaataaaggggataaaaataaaattgcggcctttacggcagcagaacctcttgccggaaagggatgggtaaaataagatacttcacgggagaggaactaatttaggttaagaggtatgcatattcagctaagaaaatacaaccctttttcagctatatagagtagggaatataaaaggatatttctacatttttggaccggtattcaaagttctaaattcaacttggactgtgaagagagaaggtgatttgggtacccatacagagtagatcatcacaattacaagggaaagataattaacgtttaatatgcggtaaattggctttggaaagttggggtcagaaaggctgtgataataattcgggcccaaacaggtatgcttataccgtgacacaaatttcactaaaacctaacactttgggctgggagttctggggattccgacttcctgagtcccttccatttccaaagcaggttccatggagagcaggcaaggttgggggaccaggtgtatgatcaagactaattcagatgccaaagtttccaagctcacaggggaaagaaggtgaaacacagaccggctgctgccacgtggcccccagagacttgaaaagggaacaaatcagaaaccggtcaactggtgacctaagaaaatttgcaaaacccaagcattactatgcagtgactcaaactcttagatcaaatca

SEQ ID NO: 649906 - DNA, 768 bp, Homo sapiens
ggggccagtcgcgctgctgtcctgctgggcctcacctggtgctttcggcctcctcttacatcaacaaggagtcggtggtcatggcctatctcttcaccaccttcaagcgccttccagggggtcttcatcttgcgtctttgcactgctgccttacagaagaaggtgcacaaggagtacagctaagtgcctgcgtcacgtcctactgctgcagtccgcatcccctcgaccgcgggggcacttcacggatccgctcaatgactcctcagcccatgcgaagtcaacacccgctactacactaggggacccagagccgaattcggcaggatgtggaatgaccactgtgaggaatacagacggatgctcgcgtcgcttcatgggcgggtgacgatcaagcagagaggccccgagcctgagacgcgaagggtacccagtggggggaaccaacgccgtgcgtgaaccaagccccgattgctggcaagcgccccgtggggggcacctagttcccctagcaaaacaccccgtgcattcggccgagttcaagtgagggcttccaactcctcgtcacctcgggccgcccctaggttctttccaaaacgtcacccccaaggggaaggcctaaccccggggaaaagccacagagacaagtccccctttggggaaggcccgagtgcaaggccttgtagcgccatttgggaacgaactcgcttggtcgcccttggaaacggggcaaacctttcaacataaagcaggttagctcctttgcgaaag

SEQ ID NO: 649907 - DNA, 105 bp, Homo sapiens
atcaacacacccaaaaagatgacagactacgccaagaagcaagggaggatccaggagcccaaacaactactacagaatagctagcgctgagtaaccagagctccg

SEQ ID NO: 649908 - DNA, 351 bp, Homo sapiens
agcatgagagctggacagatggagcagactcacaaattgcccagcgacacaggaaatgaggctgcacagcgtgctcaaaactaaagaaacccatatcagaacaaggaatgttcacccatcagatcaatgaggattaaatgacttatacctaataaaacgatcaaaatgtgaaagaaccagaaattgtagatggcagtgaaaactggccctgtcccttggggtgggcaattgagcaccattattacttaactacatctgcgctttgatctagcaatttcatttctaggcgtttttcctttaaatatattgacagacagttgggcgcggtggctcacgcttataatcccagca

SEQ ID NO: 649909 - DNA, 150 bp, Homo sapiens
tctcttgcaatttcaaccaagtccataacggtgataataccatcatcaaccgtcatagaatcaacgatttgtatacgcccctatttgatgggcaaaataagtaattcccacgcgtccagagccttatcgcaaagcggtacaccatatgcg

SEQ ID NO: 649910 - DNA, 836 bp, Homo sapiens
  misc_feature (27)..(27): n is a, c, g, or t
  misc_feature (83)..(83): n is a, c, g, or t
  misc_feature (89)..(89): n is a, c, g, or t
  misc_feature (91)..(91): n is a, c, g, or t
  misc_feature (103)..(103): n is a, c, g, or t
  misc_feature (120)..(120): n is a, c, g, or t
  misc_feature (151)..(151): n is a, c, g, or t
  misc_feature (189)..(189): n is a, c, g, or t
  misc_feature (248)..(248): n is a, c, g, or t
  misc_feature (269)..(269): n is a, c, g, or t
  misc_feature (323)..(323): n is a, c, g, or t
  misc_feature (336)..(336): n is a, c, g, or t
  misc_feature (363)..(363): n is a, c, g, or t
  misc_feature (388)..(389): n is a, c, g, or t
  misc_feature (393)..(393): n is a, c, g, or t
  misc_feature (403)..(403): n is a, c, g, or t
  misc_feature (423)..(423): n is a, c, g, or t
  misc_feature (427)..(427): n is a, c, g, or t
  misc_feature (432)..(432): n is a, c, g, or t
  misc_feature (445)..(445): n is a, c, g, or t
  misc_feature (466)..(466): n is a, c, g, or t
  misc_feature (478)..(478): n is a, c, g, or t
  misc_feature (485)..(485): n is a, c, g, or t
  misc_feature (492)..(492): n is a, c, g, or t
  misc_feature (513)..(513): n is a, c, g, or t
  misc_feature (518)..(518): n is a, c, g, or t
  misc_feature (549)..(550): n is a, c, g, or t
  misc_feature (552)..(553): n is a, c, g, or t
  misc_feature (733)..(733): n is a, c, g, or t
  misc_feature (739)..(739): n is a, c, g, or t
  misc_feature (745)..(745): n is a, c, g, or t
  misc_feature (749)..(749): n is a, c, g, or t
  misc_feature (768)..(768): n is a, c, g, or t
  misc_feature (773)..(773): n is a, c, g, or t
  misc_feature (826)..(826): n is a, c, g, or t
aatttgttattgtggcttatttctccnagacaaaccttctgtgagtttaacatgcggtattacattaggtactacggtcaggntaaaanancacctgattttnttagagatgtgtttganatatttttaggtgacataaagaaggcctganatttgcttccaggcaatccaggggcaagacaaagaggnaacaggggtcccgctgctgagacaggcgggggcatcagatctgcttgaacacatccgtngcgaaggggtagtcacacacngctcggccctacgcttccagctcaagactctgtccagggtcccgttctctcccnggggggctttggnagggtttggggggcaaaccattagggnatggggcagctgagcagtggggggnncgcngggggggggncggcccgggggggggggggnggcncgggnggggggggggggnctccccgggcgggggcgcggngcggggcgaggncgtggcngccgccntccttccgggcccgggcggcnccggnggcggtcgccggccgtgcgggcggccgcgcnncnncgggcgccaggacgacagcacagcccctttcctgggcaagcctgacatccttctgaagctgcaaaaatgggatattgaagaacttatgaaggtactttaggccgaagctgttcttcatggaagactcagcatagcggaagtaggaggaactggaggtctgtccaggttgtcgatgaagtnacgcangtcgtncggnagatgactcggtgctcgcncatgncccggtagttacccagcacgcacactggcacgtggggtgggcacttttggaanctcccggaga

SEQ ID NO: 649911 - DNA, 147 bp, Homo sapiens
tagtacacgctcatatggccacacttgcaacggacgtacgtcagtcactcatcaggatatagtcagcgatgaaattaaactgcacttattcttccatagcatcggaaaaagtcagtatgctcttggtgtaatcataaacaatctccg

SEQ ID NO: 649912 - DNA, 405 bp, Homo sapiens
caaactcgcgtgggagccacattactcactgaaaccattccttctgaaacatctaacacactccagaacactctccttatacccctacccaataacttcaatactgcttactcccaaattcagacattattctcaatgacttcaacaaagatgctcaataacttatctacatcctgaccttcaaaaactcctaagaccttcatctgcacttcagctagccacaaagaaactcaacagagccatcaactgaaaagtgctaggccgagtgtggtggtgcacgcctataatcgcaacactttaagaggccaaagcaggtggatcacttgaggtcaggagttcgacaccagccctggccaacatggtgaacacctgtctcctttataaatacagaatcttagccgtaca

SEQ ID NO: 649913 - DNA, 237 bp, Homo sapiens
aggcgagtcgcagtcacacttggaagccctcatgagtgcaggtcccgtcacttgtcgagagggcctcgactggtgatgaaatttaccgcacagccatctggagatgagcctgatattcagccaccatgtcttcaaattcatcaggattgaagtaggtgaagccccacttctttgagatgtggatcttctggcggccagcaaacttgaaattggcccttgtcagttcctaaatcacat

SEQ ID NO: 649914 - DNA, 129 bp, Homo sapiens
aaaggcatttgcacagacatgggaggacctctgcttaacgggtaatgtcagctctactgcagggcacggctgtttggtgagtggattgaaactgtctctgtatggccagacaaaacgtagacaaggtag

SEQ ID NO: 649915 - DNA, 122 bp, Homo sapiens
tgagacgcagtgtgtggtgtggtactcactgatgtccagcgtataatgactctgtctacttttccctactactactgccttactgtcttaagaaaaatctgacttacgattttggattcttt

SEQ ID NO: 649916 - DNA, 499 bp, Homo sapiens
  misc_feature (418)..(418): n is a, c, g, or t
  misc_feature (443)..(443): n is a, c, g, or t
  misc_feature (457)..(457): n is a, c, g, or t
  misc_feature (490)..(490): n is a, c, g, or t
aagtgttggggattacaggcgtgcgcttgttgcccagcctgaccaacatggcggaaccccgtctctactggaaatacaaaaattagccgggcgtggtggtgtgtgactgtaatcccagcctcccaggtagctgtgactacgagcacccaccaccacgcccagctaatgtttttgtattttttgtagaaacaaagtctccttgttttccaggctggtcttgaactcctggggctcgagcagtctgcccatatcgaccttctaaagtgctggggagttacaggcatgagccacttgcacacggcctatagtacacattttttaaagtaggatttctggaattttacggaaatattttacttaaatttcttcctggcaaaagggttattacatttgttatccataggtttagggagtaccnggggtttcacccataacctttgatnaactttggaggtantcatccaaactctggtaaatctggtccattctnggtgggggt

SEQ ID NO: 649917 - DNA, 418 bp, Homo sapiens
gtctacttgtccatgcgctacgcatgactcctgctcacgcatgccgcgacactgctgggcacggacctgtcgatcgacactagactgctagtgtcctaagatatgaagtcctggagcacatgtcctgtcacagatggagaaagccatctctgagactggcgttaccactgtctacctgttcacttcagagatgtacacctacggagctgagacagacagggatggagctgactgcactgacgggccgactgatgagctatttggccccactggcgagcttgctggattgagtgtggctgtcacatgtccaagctcacttatggagggatcgaccagctggttagccggaccgacctgctgctgccagatactaagcacgctcagctgtcagagaccatgcgacgtggagaggatgccc

SEQ ID NO: 649918 - DNA, 125 bp, Homo sapiens
tactcaaggaaggactggccaagggagagggtgccttccgggcagtgctgtgctgtatgcagctgcaagggaagctccagctggtgtcctccatccttgccaagtcactgtcaggagagtctctg

SEQ ID NO: 649919 - DNA, 164 bp, Homo sapiens
ctgagaagaaaatccatggttcagaaaggacgcaccatggtaaagaatatcatgcggacaaagtttgggtgcttattaggaagcagtttagtgctctggctaaatgaggatataagcagaaaagacttttggtttcaactccttagggttacagggctccctgg

SEQ ID NO: 649920 - DNA, 120 bp, Homo sapiens
tagggcaggtcagaaagaggaagcaagaaagaagaatccgaggagtctagatagataactagggcaaggtctaatagactaaacctctataataacagtacgataaaaagctagaactat

SEQ ID NO: 649921 - DNA, 152 bp, Homo sapiens
gatacagaaacaagaagaatttaagcacatagcagtatttccctgcaagataaaaatcctccctcagtacattttttattctcgagatccgatagtgatgggaagtgtcaagcaaaatttgttgacatcggatgtaggtatacccatacaca

SEQ ID NO: 649922 - DNA, 977 bp, Homo sapiens
caggactacctagggctgcagagaggatctacctcgacgtgtgggcttcgtctctgattgagagctgaacactcactgggacgcgctgcctagtgggaaaacagactgttcactctgggtctcctctgagcctgttactgtcgctcagtaaaggtcttcttgctgcttactcgccctccatttgtctggcttacctcattcatcctggacacaggacagagaacttgggacttgccggtatggtggagctaacacatagtctgtaacactaagtcaggattgatagacatgccccttgctcgccacattggtggatgacaagagggagggaagaaaggagagaagatctgtgagccttcggcaaacccagagttaggagatcggagagccaagactgtgagatccttatctggggctctgtggttcctggcgtctccaagcttctgggcacctcggtttccccggtgccagtcgtggtaagctgcttgtgcgagagtcttgctttagtcagccaggctggagtacagggtgtgatcacagcttactgaaacgtcgtgcgtctcaggttcaagcgattatttctgcctcagcctctggtgtagctggaagttacagggtgagcagtcactgatgctcatggatgagaagactgggacatccatcagataagaaaggctgcccaaagtgtacagtaataagtcgacagggtcggacaagaacccaatcactcaggcttccggaagagtgagtgatagacgaaatagagaatgctagtctggatgagaaaaaacacgacattgtccgggcacggggtcaaggcggtatccacggactagcaggcaaggggcggacatggggccggagagggaacacgggtaggggggaacccgttgggaaatcaaaatagccgagggggggggctgagaccccactggagtgggaaaggacacgggggggcgcagagaacagcctggcac

SEQ ID NO: 649923 - DNA, 631 bp, Homo sapiens
agcggtgtgttttcaaaaaagatctgtaatgaattttatgtgtggcatatacttatttcttgagagaagattttaacttattgtttttattttatggttacatatgatgataacctgctattattaaacttttctaaaaagtgaaaaaaaaaaaaaaagatttaaactcggtccctactctgtattcgggatccatctgagatgcatgctaagctatgtgtatgttttaatttggcactgctcttcctggcaatttgtttaatggttattgcagaatattaggtacatgtctcctctgtttaagtaatattgccctttataaaaaagtatgattaagcaaactattttataaagtgccctgtttaaagcatttgcactgtattttggccactttatttccattttctactttaaatttgtccctcacttcctcttctactttgtttgcaccacgtagcaaatggggcttgttgtgtctgtagtcagccacttatgccccattgtgaggaaaacctaagggaatttaactaaacactgtgcttcatatttgtaccctgtgttgtcctacagctgaggaattcctccctgtagtcatatattatgtacctaatattttagaatctacctatga

SEQ ID NO: 649924 - DNA, 983 bp, Homo sapiens
cgggtctgacgctgaactcaggatgtcgtgaaacttatccgttaaaaagtccactacgggaaaggcaaaggatctatcatcacctatggtcgtcatcgccacgcgtagatacggcggcacgtacagcatgactggccgtctgatctatctatgctgcggcctcgacggctgactcatcgaaaacttcgagaaagagatggctgctgcaacatgggcctggggctccattcaaagctattgcctcatgtgaggctctatgtgccttactgtgccaagcattgagacttgctgaactgcctggtaatccacccatttgtataatcatccgccttgatgcgtaacttagagaaacctatgtcatgattcataatgatgaactacttcatagggtagctcccaagtgtatacaagtcccattattagtccaaaatgaccatagaattccacccgaggcacattgcgtctcgagcttagattatggttgcctgtccgttgacatcgtggcatagcttaggctgtgtgtgatgaatattaggaacgcgctcgggctatcatctccatgcattatgggccacgcatgcagagaagcatgtcaccttcttagcgcctttccattagtgggtgtcgcataatgaagggcaattagtcgtgaggtaaagctacaatcgtgctcttcaagaagaagaccagccccttaaaagatcagcatccgatggagttattgacgtgcataaactagtcaagcgcgacagtacgacgccatcctgttaacatgaccgggcacaattgcgtgcattaccaaaaaccccggactaggaaggcatgtcaatcgggtgggccagtctattcggcgatgagaatatgtgtcgaacggaacattgacctagtgcgtccattgatgattaacctgtgctctatggaacctacggggcataggaaacgtcaccccggagagggttggcaaaaagcctgttgtcaacggg

SEQ ID NO: 649925 - DNA, 148 bp, Homo sapiens
actgtcatgacgggaatcccgcatgctggtggcaatggtgctaggttgggcttcattcagcttgaagacactctgttgtgctggctggcaggccctgtggttgctggctgagggttctgctgtcctgtgccaccccattaaagtgcag

SEQ ID NO: 649926 - DNA, 1060 bp, Homo sapiens
agcggagttagtcgcgggggccggcatccgcttgttcgtagaagcaacgactttggcagggatgacgtccccagggtcggcatcagcgtgggactgggtaacagagtgaagggaaagcagaaggagagccttgagaaagacctgctctctccgtccgcatccataagttgactgagtccaagtgagagccaacagaggtcactagtgcatcaagctggagtcggggatgcgggtttccaccatgtcggcattctttcgtcagagcggggaagtatgagtggggcggaatatgggagaatagggagggactcgcgctcgagcgcatcgtggcttggggacgacgggtccgttaattccggcacctgttcacatctgactggtatctggattcatacggttgaccccagatacaatcgaaatcgcagggcggctagggcagggtgggaatcgacgacgaggatactactatttcccacgctagtgctagcgagaatacgcgagtacttgacggtccactacttcacggcgttgtaccgaagaagactaggacgatcccggcgtagtaccagaggagactggcagtccgagtgtgcgaggtggtctacaatggaatccgtgggcaagccaggatggtcaagcacatcctggccacaggcgagggaccctcagccttcaatacgccatcgtgtgtgagttggaacccatctttcatgggaatcccagtcgggtaccctagcaataaggcgaggggcttgtcaggaacgactagaacggccagggtcggcagccgtggacgtcccctctccaaggtaactggcttgttgccacagaagggggtgctcaaggacccttacgacgggtgggccagggcctaataagcgtacctccttggagcaacattggtgctgtctcaagaaggaattggacgcgcgtaatcaatctttacactgaagtcctgggaatttgggggataatccaccttaccaccctaacaagttcccaaaaaggggacccagtatggccacagaagggccagaaggcttatgccaagcaaaaaatg

SEQ ID NO: 649927 - DNA, 390 bp, Homo sapiens
ctagaggatcccttgctatcatctggcacctgctgggggaagcagggggaaatgcctcaagtatttctattggttaaaacctcggtgtgagaacactgcttttggccactcaatggaagacagttcatcaaacaccagtgagtgggacttctggagcaaagataaaagaattcatggctgcactgcaccgattctgaaaaggaggaacaaacgcccctgtttggaacatgaatcttggccctatcccattgtgagatggtgccagctgtgccatgacatgattttgtttgggtgtgacatcttgtggtgcccatggtgatcacatattgtgcaactcatacacatctatgcttggctgagtgtgaacttggatgtgccatgcacacaatg

SEQ ID NO: 649928 - DNA, 123 bp, Homo sapiens
  misc_feature (2)..(2): n is a, c, g, or t
antgagggcagtgcaggttggtggtgcggtagctgtctagggagagcagatggccaatggtgtgcctggttggtcagtgaacatgaacacatcctgctgcctggatgttggcacagaagtgcc

SEQ ID NO: 649929 - DNA, 806 bp, Homo sapiens
gtcggcgataagggcccggcgttctggacctcgtgtcgcgatctgccatgtctccagtggaggaagatgaaagggctccggaagcgccgaggctgcggtctcccaggcccgtgttcagcgactcgtgaggacggcgagtttgagatccaggcggaagatgacgctcgggccctggaagctgggacctggaatgacccactgggctaccgttcacccactcatcggaatgctactctcggatgtggacgcctggacacccgggagtattggtgcgtgcccagaacgaaggaagaagaagaagtcttggaggcttccagtcctattgggccgtgagtctatcccggttgttcaaatggcatcatgaacgaagcgggtacagagtttgccaatactcccaatcgcagagtgatagacgcattcccgagtgattcttatggaattggcaagggaacgtaggtggccattggccgcaggatcggggcatagtgtcgagggacagcactgcgttaccttccatcccaattgtatcgagctggctctaagaccccatcagttgcccatgaccggggtcgccgtgcgccttcattccttcttcgcccgaccgcggagagcgtgggccgctcaagacccgtgaaagttcactacagcgacgctacggtcgatgttcaccttggccttcaaaggacttgcccgtgatccttgggttggagacagggattggatgaccaagttttgcacgcccttgtaccgaacattcccgacagttaatttattgcccatggccagggacggattggtgcaatgtg

SEQ ID NO: 649930 - DNA, 237 bp, Homo sapiens
tttcgcctttctactagattctgagtgttttatcatgaacgggtgctggatttttatactttgttggcttatttacattgacacgttttttctatggtcaagtaacatttggtaatatttgggttgattttaaaaatattaagccaccactccattggtgacaaactatggctgggttatggtatgtaatcagttttacatgtggctggatttagtgtgccaccatttctttttttt

SEQ ID NO: 649931 - DNA, 704 bp, Homo sapiens
gtctttcaacttccttccttagtatctcttcattcctgtagtagttattatgtctataccacttggttcttatcacatattattttttataatgtaatgtaggcatgccagaaagttccatattttctaaaaaagaaaatttaattattttgcctcactctctatttctgtttctgaagacatagtcaatgaatatatctgtctcatgaccccagctagattgtaagaccctcaagtgcatagaccataccttaagatgttgtgggttttttgttttttttgtttgtttgttttgcacaagcatagattgagctgttgtccataataaatcaataggtttgggattgcctttaagaacaaagatgactcatgagtgcagactggctagattatcaatggctagagcatagatgaagaaatggacttcatctctcgggaagtcaaggcattttccatatccgatggcattaaattatcatgtctcatccttttgccaatccttgtccttgtttaaagggcagaaagtgtgatggactcatgcaaattcatcccttcagtcctggggggaggaattcatggcttcctggatgtggcttgattattttgtgcacaaggaggcttttcctaagatgataaaggcatttttaccaaaagaagatagcagctgtgtaaagttcatgctatagcattttagtgaatcaatg

SEQ ID NO: 649932 - DNA, 346 bp, Homo sapiens
  misc_feature (66)..(66): n is a, c, g, or t
cccaaacggaaggccattttccctgctcttcctcagttgtccggggcgggggtggggggttctccnaggaatggaaaaaccaggccctttagaggatcccaaaaagggaaaagaaccaggggcccttttcttttttaatcagcccaccttttgactccccgcccgccccaatccattatttttttttgccttccgggtcccatccttaaagctcgagtcgttccttcccctcctggattccgggtaggaaaggcagccccgcaggaggcgggtgcccgtttgtcccaggcctgggcgtggtggaggaaggggtgctggaacaataaacggccctatccaaatgtca

SEQ ID NO: 649933 - DNA, 589 bp, Homo sapiens
taaaacgggcttttacagataccacccctttgcaggaccacacagcgcttccagcaatttacaggtgttctccctgtgagtgctcaggccatcacaccccgtcattatgggaggttgtaggagagaaggagttatgacagatgaccctcctcgtgagtcaatactaagatgactctcgggtacccgcccctcacttatcagccacgagaacaatagtgtgcacaacacaacgcgtggttccacactctcggcaaagcttctctcgcacacaacaagtgctctaatggagattatattgtggacgcggtccaacacacctccttaaattatgtgtgttgagacacgcaccctcgtgcccctttttcgtgttccgttgtcagctgaacaccagggtgctgtaggtgctggttcagctgccgcacacagtcgttgaactctttgtcccgcgcaaacactctggaagagtttgaacaagttcaatcagtatagaaacgtgtgttcattctcccccaccctaaaattgtcagagtagttaattcctcccaacaaggaagataagcaagggcgcacccccacgacaaacaaaaca

SEQ ID NO: 649934 - DNA, 160 bp, Homo sapiens
catcggatgatctctttcctaagcagcaagccggcagttatcattaactccccgcaactgagaagcatagcaagttagcatgtgggaaaacagaccccggtactgtcttcgtgatgaataaaaacatttcaactccctacagttgtgccatgcatttaag

SEQ ID NO: 649935 - DNA, 197 bp, Homo sapiens
aggctcggtccggtatagcggtctccctctgtctccagactagttttttttccttaatatctatccctaacaaatgattgctcttatctgttgctatttttcgctccactagcatgttggctccatgagaacagaggtttctgtctgctgtgttcactgctgtatctccagtatctattccatgagaccgctctacc

SEQ ID NO: 649936 - DNA, 213 bp, Homo sapiens
gccccaaattttttggggcccccccccttaaattggggggggggcccttttttttcccccgggcctttttttggccaaaaaatttaaaccccgggggggatttttcccccccccgggggggccccttggggggggggggcccttttcccccctccccaagggggttttttttttcttttttttttttttaaaaaagttgggccccccccccca

SEQ ID NO: 649937 - DNA, 347 bp, Homo sapiens
catgagaacagagctcgcaggtgacttcttgatgtgtctgtaaatatctggctggctcaggaataagcacttatatgtggaaaatgtattatctacagtcgggagtaaatgttcatagaaacgctcacccagtacgatgctttgtcgacgagctggatttaacgtttcacatctcggctccccagctggctagctgtgtgacgtactctgataggacatacgatttacgctttacagcacgctaccccgatggacaaacaccataccaaaggggtttactttattctcacataatgacgacattcttaagcacgggaccagtaattatagtaactgtaagcagcata

SEQ ID NO: 649938 - DNA, 441 bp, Homo sapiens
tgacctatgcgactgaatgagatgaagaaacagattattagcatgcaatggctctatacagagcataccagaaatacctgatgacctgaagcaactttctaaacctgtgtgcgaaatctctcagaacactgttctcccgatggcagctgcccagaggtgctttcattgatcaaagccaatctttgaacatccacattgctgcagcctaactatggcaaactccactagtatgcacttctacggctggaagcagggtttgcaagcactgggatgtattatttcaggacgagaccagcagctaatccactccagttcactctaaataaggggaagctaaacgataacgacaaggtctcacaagcggaagaagagaaggagaggaacacagcagccatggtgtgctctttggagaatagagatgaatgtctgatgtgtggatcc

SEQ ID NO: 649939 - DNA, 510 bp, Homo sapiens
  misc_feature (25)..(25): n is a, c, g, or t
  misc_feature (200)..(200): n is a, c, g, or t
gattgagaccatccctgctaaacangggaaaccccgtctctacttaaaatacaaaaaattacccaggcatggtggcacgcgcctgcagtccccagctacttggcaggctgaggcaggagaatcgcttgaaccccgagaggcagaggtcgcaagtaagtggagattgctcccactgcactcccagccctgggtgacaggtncgaactacgtctcaaaaaaacaaacaaaggctgggcgaggtggctcacacctgtaatcccagcactttggggggccaaggcaggtggatcacctgaggtcaggagctcaagaccagcctgaccaacatggagaaaccccatctctactaaaaatacaaaattagtcaggtgtggtggcacatgcctgtaatcccagctacttgggaggctgaggcaggagaatcccttgaacctaggaggcagatgttgcggtgaaccaagatcacatcattgcactccagcctgggcaacagagcgagactccatctca

SEQ ID NO: 649940 - DNA, 361 bp, Homo sapiens
  misc_feature (40)..(40): n is a, c, g, or t
  misc_feature (259)..(259): n is a, c, g, or t
tctgtcacaacaactcaactcagctttgtagtgtgaagcnaccataggcaatatgtaaatgaaagtgctgtggccaagagtggtggctcatgtctataatcccagtactttgggagccaaggcagaaggatcacttgaggccaggagttaaagaccagcacgggaaacatagcaagaccttgtctctacaaaaaatgaaaaacttagccgggcgtggtggtatgcacgcccagctagttctttttcttcaaaaagacgntgaagcaggaggatcattttaacccaggagtttggggctgcagtgagctgttgactgtgccactgtgttctagcctggacaatagagtgagaccctgtccta

SEQ ID NO: 649941 - DNA, 301 bp, Homo sapiens
gaaaagcaaggttgtatgacgtgaaagaatatttcgatatgcatgtgtgaggcaaatacatgggtgcgacagatgagaacatttaagtacttggggagcctaggagagtatgcttggtgactaggagaaacaaactggttcagtttccagtttcagaatacaatgaaagattgctctagaatacaaagaacagtcgaatggtaatggtacagggaaacgaaacactctcatgaccaagatttctaaccaaacgcgccagagacgaccccagatagagagaagacattctatgcgttgtcgc

SEQ ID NO: 649942 - DNA, 696 bp, Homo sapiens
  misc_feature (237)..(237): n is a, c, g, or t
cccccccgttgttaatttggggaatttgcccaccccaaccgggcgttcaccattgcaagccagtttgctgagctgaagggaaagatttgatcgccgttctggtaaaaagcgtggaagatggccctaaattcttgaagatctggtgatgctgcccattgttgataatggttcctggccaagcccacatgtgtgttgagagcttctccagactatcccacctttgggtcgcctttgctngttcgtgtatatgaggaccagaccagattgcggtgtggtgtctatccaaagaccagtgagaccaagaaagagctgtctggagactggcaaggtccacccagatctgccccagaaaagactccaggaagagcataaatggaatattagtccctagtacctgccaccccccacacttcttaaatcacgtggtggagagaagcggttctcagaaactgtttgtttcacaatgtggccactttaagtttagtagtataaagactggttaatgataacacatgcactcgtaaaacctcctcacgaaggaaaggagaatgttttgtggagccacctttggttttcttttttgcgtgtggcaggttttaagattattagtttttaaaatcagtactttttaatggaaaccacttgacccaaaatttgtcacagaattttgagacccctttaaaaagtttaatgaga

SEQ ID NO: 649943 - DNA, 115 bp, Homo sapiens
cagaaatatgcctgcacacatcatggtgaagtgcaggctatttctgcagtttaatataatcaaactttgtaccaaccatcgctccatggtgctgacatcctaccatggtgctgat

SEQ ID NO: 649944 - DNA, 483 bp, Homo sapiens
  misc_feature (30)..(31): n is a, c, g, or t
  misc_feature (36)..(36): n is a, c, g, or t
  misc_feature (117)..(117): n is a, c, g, or t
  misc_feature (306)..(306): n is a, c, g, or t
  misc_feature (312)..(312): n is a, c, g, or t
  misc_feature (321)..(321): n is a, c, g, or t
  misc_feature (391)..(391): n is a, c, g, or t
cgtaccgctttcgttactgtcattgccgcnnctctntcgactgtttggcggcatgttgaatgggcatagaatcaattttcggtcctcagccgggtcgaccagtccttacggtgcggnaccctgtcggctcagcgctgcaagcacgccagaatttttggaactcgtttcgtggcatcttttgaggggatttttcgtgaacaagtccgagttgatcgagcacatcgcccagcaagctgatatttccaaggccgcagccggtcgcgccttgggaagctgtcattgggtggtgtgcgtaccacactgaanaagggncggcaccgntgtcgctcgttgggtttggcacctttgctgtcagcacccgtgttgcacgcacagggcgcaacccccgtancggcgacgccatcaagatcaagaaagccaaggtgcccaaattccgtcccgggcaaggcactgaaagaccgcgggcattaacagtaacgaaag

SEQ ID NO: 649945 - DNA, 404 bp, Homo sapiens
atgtgatctcgttactctaggcatctgattatcgtgcagtccagggatcatggctggctggtcagaggctgacatactgcttcttatattataagacaataaaacacaatagtgttgaagtgttggggcagcgaaaatttctgggggtggtatggagagataatgggcgatgtatctcagggctgcttcaagcgggattaggggcggcgtgggagcctagagtgggagagattaagctgaagggaggtcttgtggtaaggggtgatatcatggggatgttagaagaaacctttgtcgtatagaatgattggtgatggcctggatacggttttggatgatttgagacgctaaacggaagatacaaggtccgaataaaaggaggagacaactgggtattagatgtc

SEQ ID NO: 649946 - DNA, 427 bp, Homo sapiens
ccgctatttgggacggcggaacagacaggatactatttccatgtggctagagaacgtggacaccactatgaaggtgcacatcaagataccgagatgacctcgtcctcagtgtgagccctgcggtgccccttaccaccccctcctgcctgccccggacacaagggtctgcattgcgtccatttcaagaggtggccccagtgacgcgagcagcccaggctcctgctgtacttgggcaagatgagactgttcccccaaatagcatcctttttccttccaacttggctgaaaaccacctggagacgcagttcacgtccaggctcttcccctgtggaatcttggggcagtcaagtacgaggcctcattttctcaacctgcaaaacgggttacagcattcctttatgatagctcacgccgtcccaaagcacag

SEQ ID NO: 649947 - DNA, 212 bp, Homo sapiens
ggatgcttagaacggagctggaactaccccaagtgcttacagaaccggactacgtggctcagaagctgcttttgaagagacaccagagcatggacaattccaaggcagtcctggtggtagctatgggactgctcagcccccacctcactatgggcccacacagccagcttatagtcctagtcagcagctcagagctccttcggcattccctg

SEQ ID NO: 649948 - DNA, 194 bp, Homo sapiens
atccccgttcatcgaaacctggtctcgaactcctgacctcaggtgatcctacccgccttggcttcccaaagtgctgggattacaggtgtgagccaccgctcctggcccagagtgacactattctgatggcatgcttgtgataaacttcagtacaaaacatatcttagggaaaaagaggctttgatgagggtttc

SEQ ID NO: 649949 - DNA, 159 bp, Homo sapiens
tttgaaattcttttcattttttttttaaaaacggctttattgagatataattcccatgccccccaattcccctatccagtatacaattcagtagggtttactatattcagagttgggcaactatcatttttttccccccctctaccccctttagagcca

SEQ ID NO: 649950 - DNA, 983 bp, Homo sapiens
  misc_feature (702)..(702): n is a, c, g, or t
  misc_feature (715)..(715): n is a, c, g, or t
  misc_feature (768)..(768): n is a, c, g, or t
  misc_feature (779)..(779): n is a, c, g, or t
  misc_feature (837)..(837): n is a, c, g, or t
  misc_feature (839)..(839): n is a, c, g, or t
  misc_feature (841)..(841): n is a, c, g, or t
  misc_feature (845)..(845): n is a, c, g, or t
  misc_feature (857)..(857): n is a, c, g, or t
cctcattcttggagaacaacacagaacctagtcaatcagaatggccgcaaccaccatgtcactctcttccccagccttcgccggcaaggcagtgaagaacttgccatcgtcatctctttttggggaggctcgcgttaccatgcgcaagacggcagcaaaggccaagcaggttgcctcccgcagcccgtggtacggctctgaccgcgtgctctacctcggcccgctttctggtgagcccccgagctacctgaccggtgaattccccggcgactatgggtgggacaccgctgggctgtcggctgaccccgagaccttcgccaagaaccgcgagctggaggtgatccactgccgttgggccatgcttggcgcgctcggttgcgtcttccccgagctgctcgcccgcaacggtgtgaagttcggcgaggctgtttggttcaaggctggatcccagatcttcagcgagggcggcctcgactacctcggcaatccaagccttgtgcacgcgcaaagtatccttgccatctgggcttgtcaggtcgtgctcatgggcgccgtcgagggctaccgcattgccggtgggccgctcggtgagatcgtcgacccgctctacccgggtggcagtttcgacccgctcggccttgctgacgaccctgaggcgtttgccgagctcaggttaaggagatcaagaacggtcgctcgccntgttctccatgtncggtttcttcgtgcaagccatcgtcccggcaagggtccactcgagaaccttgntgaccacttgncgaccccgtcaacaacaacgcatgggcattcgcaccaactttgttcccggcaagtaangngngtcncgagcttgcggngaatatgccgtgtccgtgtgagtgtactaccagatgttattaccaggatcgatggtgaataaaatgcgagaatcgtccacaaacacacacacacaaaccgacacaaaaaaaggccacaaaaaaccg

SEQ ID NO: 649951 - DNA, 334 bp, Homo sapiens
  misc_feature (275)..(275): n is a, c, g, or t
  misc_feature (279)..(279): n is a, c, g, or t
tcatggcctagtggaggagacagattaaaacttaattagaaaaactggctgggtacagtggctcatgcttgtaatcccagcactttgggaggctgaggcgggtggatcacctgaggtcaggagttcaagaccagcctggccaaaatggtaaaacctgtctctactaaaaatacaaaaatgagctgggcgtggtggtgcatgcctgtaatcccagctatcaggtggctgaggcaggaagaatcaactctgtcaattgggagggttggagggtttgncaangccgcgcactgcactccagcctgggtgacagagtgcagtggcacggtctcggctc

SEQ ID NO: 649952 - DNA, 153 bp, Homo sapiens
gtgcggcgtgtatgataaactggccaagaccaggatcaggcattcagcaggagctggacgacctgattgattgatttggacaaccagcaggcaactcgtgtccaacctggaaaagaagcagagaaaatttgatcagttgttagcgcgtgctgt

SEQ ID NO: 649953 - DNA, 689 bp, Homo sapiens
ctccccagacaggttgtgccagcacttctaccaatcggaccgcttagcctcctgaaagcgtgtgctcaataaggagctctcattgtagttgagcctaagatagctatctgacctaagtgtagtgtactcacctcatggtgccacaggcatctatttcccaggtacttggcacctggagccagtgtctatcagcatctccgaaagtatgcccggcgtccagtctaaacgtgccatgcagatccatggaaagcttctgtggagacgcatgcaaacggagcttcaccccgtgaatcataccattaagatcccactctaagctggtgcatgagtatgtttcgccaaagtagcaccattagcatcagcccggtagagtcaggaaccatctctaacgggcccttcattcctccacatgctacaatcgctgttatgggcctacggtgctatgtagcatgggtcctttgtgtgacagcaagacggagcaatccatagaagtcctcttcctgattcactggactccattaatgtgcatgccgatcagctgttgccgtcaagatccagatgaacttccgtgtcgtgcgtgagcactggatcattcctgatattgcagcacttttggcgtgttcctctggatctccgcattatgtcccttgtataaaccagtatagaccacttggcaagacaccatctgt

SEQ ID NO: 649954 - DNA, 267 bp, Homo sapiens
ctggacggcttagcactccttgacactggatattccacatttagcatctctcatctcgcatatggcaaaggaactcttcgagcacttagccacagtagccataaggatcacctgcagaatagactctctcaaagcagataccagagagcaggtttagcaccatggtccccagcagtgtgacacacatagctgctcgatgagatcatggcagcatgccatatgtagacagtagcacgtccaacatctctgactatgtagtgcccaatc

SEQ ID NO: 649955 - DNA, 217 bp, Homo sapiens
agatggacgtagctagaactgactctccaggcatccattcttgcttcccccttccacccagtaccacgaatttgcaagcctgggatgcgttcacattgccctcaccctcaattccagtatggtcttatattatttttgaacatagatctgtattcatcttgtcgccatcaataattgattctttcaatgaatcggtcacatcatgcgggggatccat

SEQ ID NO: 649956 - DNA, 1098 bp, Homo sapiens
gtaacgcggggccgccacgtgacagcttaatggcggcggtcgtctgaggcgggcgtggctggtatatatgctgtggctgtgcatgtgatggcaagtcagctgaaaccttcccggtcgcctgctccctgtccctgtatctggcgtgcttccccaaggcggcaggactcggcgcgccatggacagtgcctggctggtcggtcggctgtgctgggcggggctttgccgactgtgccgtgctggtgtgggcctctgaaccccctggtgtgcctgggttgtgtgctggtcactgtgatgggccttctctgcggtgggccatgtcgtgtgtgggtcgcccaacccggccgagcttcccctgggtcatgctcccaagctgttggtcagaaccccttgggcacaaggttctccccacctagtgcaattccagccagtgggtttcgcacagttggctagatttaagaccgaggggctttaattaggcctttgtcttaacaagagattgtccctagggttccaggaattgtatcccgggttctcccagcgtggaacccattcgaggaaacacacgtggttgggtcccaaggcagggactttaccgcaaaggctttttcccaaggcggaacgcgccccgttgcatttcgtaccctgggggcttcattaaacgggcgaattggggacaccattaaacgcgccttggggccatcccaccgaacttggggaacaggacagggcgttcccgaagcgattttttttccccctagaggacgaaacgtccgaggtctgtaaaatagcccaagttctggtttcgaagaacggcagttggtccatgggttaactgtaatccttggctccccactttatacatttgagggggagcggacaacggtggacctgtattgcgacatcacccccttggaactagctttgcagacctaggcagccatttatcaacagcgactttggtaaccccgttaccagcaaatacatatttggattccgtaaagaaaatcgggcgaaacccccacgtgcaaaattttactatactatacccgctgtggaccatgtgctattcccgcgcccatttgtggcgaacagtgtggc

SEQ ID NO: 649957 - DNA, 164 bp, Homo sapiens
aagggtccatttccccccccctcaggtttgaaccgcggttgccccccctcctttccaggttttcagccccacgtccctccctgaacaatcccttttcttgaaattccgccgtcaagaaatttgccgcggaagtaaatggataaatgttttcttttccaatcgga

SEQ ID NO: 649958 - DNA, 173 bp, Homo sapiens
tttctgataaacccatttcacactcagtatggacacttccctggtttggaagtttattctctaatattcacattccaggtacgtcctccctgtggatttctgcccgcatctacgtcttggttgaccccttcatttaggagcgatgttgaaatacgttcttttgatcctcctga

SEQ ID NO: 649959 - DNA, 467 bp, Homo sapiens
  misc_feature (290)..(290): n is a, c, g, or t
gaaccggccggagccgggcgccctacagctgagaaggggacccaaggggtcggccgcggccaaggcccctaggaccgcgcccagctcacgctgcgacgcgcttagacattctgcgtcaggtccgggctcctggacttgctttccgagccctgagggggagaaaaggtaccaattttaaatccaaatatatctatggtacaggaagactggcagagagtctggaagttgggttctggtctggtgtgccactgactactggaccttgggatcttggctggaagactttcccngtgcttatgttacaagcaaattgacccacaggcctggaagagtgattgttggttgcgcaaggtggtcttaccagctcactcccctggacccaccggggacctgagcataactgggtggacttgggctctcatgggacaccgggttgaaatacgactgctgacctgggatgtgaagga

SEQ ID NO: 649960 - DNA, 1069 bp, Homo sapiens
ttgaaacagccaactcatgactaaggcaaagtcttctttctccttacagctgagcttctctggatgatgttgactacgcctgcgaactggcgggacagtggtcgacgtataggcgttgtccgaaaggcaacacggcaacaaagtccagctggcagcaacaaagctgacacaataacacactcagctgaactggcattactgatggaacgctgatcccatccatttacgtctgcgcacaagctacacttcagcccccctgaggcagtgttgactccaacacacgactgcagctaccacagggaactgacttgagacttgctggagcgacgggccgactactgcacaacggctgcaggctctactcccactcttggccactcgctgtgggatggccaacacaagcggcgcacttgcctgccagcaacagggcgacgagcgctcaaagcttccaaattggtgctgctcctgcggcccaataaatgcacaaactactggccttacgaaccattcgacacccctggcgcagggcgcacaagcggcaatggtcgtgaccacgactcagtcttgagcttcatttacacttatgaccgctcggaccactacgcacacgaacgcctccttacacccaactgctggaaagacaccgctccgagcgaatggccacttggagccctacccgcgcagcgacgaatgaacggtgagaacttccttcagccggaattccttcaaatcccgccgccacctgcgcacacttgccaaccgccctggcacctggtcaggaccaacctccgctaaaaggccccccaaggcccgatagcacagctccctcgaaccctggatccagctgagccaaatcccctgtaacaaactatccactcagcaaacgacagccggacgccccctcgccctaatggatccacgcgcacgcccaggcggcccgcgcaacccaacgaggcatgggacccacaacaacacccgccaccgagcccacgccataccccttccaaacccaccaccaaacccatgacacgtgcgggcacacgacaaggtggcgaaccacaactacgcg

SEQ ID NO: 649961 - DNA, 202 bp, Homo sapiens
cattaggcaataacgcgcgaatcatgactgcggcgttcgtggtggtggtgatcggcggcctcggcagtttctggggcgtggtactggcagccttgctggtcggcgtggtgcgcggcattaccgtgcagttctatgcgccggcaggtgaagcatcaatgtatctgctgatgttgctggtattgatcttccgtccgcgcgttat

SEQ ID NO: 649962 - DNA, 926 bp, Homo sapiens
atgtggtatgaagatgaaaaacattccctgaattcttcgtcgagcctccaacccacagatacctcgatttcccagcaacagcatatcattgcattgccatgccgcattgcacacccaaaaacaaaaggggccatatgcatattattcctgcaatgcaacaagcagcacaaaccatagtgttcacatagctgacacacctcacacgccccctctccattcaacatctcactgcatagtcaagcacagattcattctttacaccacagccaactgggcacagtgcacaagctcattccgcggcagcaccccaacaattccaaggggctttcaacaattggcacacccgcattgcctgaccccaacccagcccgcacttcaattccattaaccgcctacggttaagggccggggcatatatattagcacaagcaggcttggtgcaccaaccacaatggcacaacacaagtaatgggggcatccagccagcacaggcaccgcctctactaagcgctcaagacacgtggaccccccgctggatcaactaccccaggcccattggcccattctgcaaggcggttggactggtaggaacacacacccttaggcaacaagtaagatttccagcaacacaatggtttcacatacatggaacctcgaaaggaccctcccacttgcgaagtatcccaccaacactgcggtaacatcacaatcacaaccacacccattcggccttacggccccttcccaccactcacacagcacatcactacaaccacttacgacttgccccgccaacttaagacaacgaacatttggaaccacattattggcctcacacttcccacgcaagacaatttacaacggtcatcaggaccccccgcacataacttacagggacttgctggcaatactacaattacgcgcaa

SEQ ID NO: 649963 - DNA, 445 bp, Homo sapiens
  misc_feature (194)..(194): n is a, c, g, or t
  misc_feature (209)..(209): n is a, c, g, or t
  misc_feature (214)..(214): n is a, c, g, or t
  misc_feature (322)..(322): n is a, c, g, or t
acacagtcctctgacagctggtaaatcctcggtcccagtaagccctgcccaagaagccacaacccagccccagcacaggctcctcagatttatctggagcaaggatttagggacactgttctgggggtgaggcttctagggctgagcttctctgagagtatctcaggggctcctcaagccaagccctactcagntctccagggtctttntcagngtcaaatttatgaagagggcatgaggtgcttgtctgagactgatctcctcctgctgagtccccccatcagactgtccttcctctgcagcgagtgtctgcagggtctgnatgcgggaaaggaattctgatctgttgaaatttgtctcctctgtgtgtcctgcactaaatgcccaaaccccagcatgggacttaatgcagagagagacacaggcagagtccaacctgagcata

SEQ ID NO: 649964 - DNA, 284 bp, Homo sapiens
  misc_feature (148)..(148): n is a, c, g, or t
  misc_feature (156)..(156): n is a, c, g, or t
  misc_feature (222)..(222): n is a, c, g, or t
cctctcgcctgagcttacgaagtgctgggataacggacgtgagccactatgcctggccacaattttaaattgaacttattttagcagcatcaatttcttgatatatgttaaacaacagcaaatgatcatatatattctgtgtgctcancttttctngcttttcaaagaagatttctggacagatcatttcatttgcttctgtagcagttactcgtactttantgatttggggttgcaagatcagtacttatgagacctgcttcttctcatgcactttgtcaacc

SEQ ID NO: 649965 - DNA, 114 bp, Homo sapiens
  misc_feature (81)..(81): n is a, c, g, or t
atcaacatcgagtcgtaaaccctatgttgatatggactctagaataggatgcgctgttatccctagggtaacttgtcccgnggtcaagttattggatcattgagtatagtagtt

SEQ ID NO: 649966 - DNA, 143 bp, Homo sapiens
cccatggggggagtgacacaaaaatagggactgtgttaaggataaaaatcccctggtttcctttgttttttgggctcttgtgatcttgattgacacaagtggccccgttccgcaaaagtaaattaccttgttgagagaaatta

SEQ ID NO: 649967 - DNA, 528 bp, Homo sapiens
ctcattagaataagaggaagaggatgatgccaattcagaatctgagggaagcagttagctgaggaggaagatgactgctgcagagtcagtgaaaacaacaaacacaaaaaagaatgggagcatcaaacatttctcgcgggggtcgctggcctctggtaaagacgctccatggccctgctgattgggccctcgaggctgctggatgtgctcgtgggactgtgggccagacagcagattctgaggtggacaccacgggatgctcgaaagagcgggcgtgggcctgtctcggagatataaaaaagccccgtggccgtggagagatacagtctgttgatggaacatataccacctagcgtgggtcattcaagggatcggctagcggggtgttgcctaggatgggagttgtcacaagcagggaattctgaagtgtgcagaccaagctcccagtggcagtcgcggcgcagacccacgtccgtggggtagaactgcatcatccaagagactggagaggacctcaagcaagatgac

SEQ ID NO: 649968 - DNA, 732 bp, Homo sapiens
cttaattttgcacagggagcaggagcagcaaaaaatctctggtgctccagagcactcgtcctctcttggaggggttattaggtgggagaaatgtgatactttgtttgtgtgtgtgtgtgtgtgtgtgtgtgtgtgtgtgtgtgtgtgtgtataacatctgtgaaccaggctaattagcgtcgtgcgtaccagagcgccatatcgtggtgtggcagagtctcacccccttcctaagagcagggtagaaaagatgttgtgtattcttttctaccacaagacgcagattccgctgtcccttcagctctcaggagccctaggagagtcataagctggggcatcccgctgggcccagaggactcgccggtggtgggcacagctctaatgtgtgctcaggctgtcttgggtgcactggacttggaagcaactacctagagaagtcaggggagagaaagtagtagatctagaaggccgcgatgtgggtagtgtgtgccccagcatatcacccaggccaagcagagccaaacctaggagagggcaagggagtagactctctgccccaggcacgcgtgaatacatatatataccacaaatcactcagaacttcagggcaaagagtgttgtctcactatggtgatctcataagatacacatcagtgtggtgtgtaagcatcacagacaatggaacccctgtggaggaagtctggcagaacataaagagggccaaaaggcccc

SEQ ID NO: 649969 - DNA, 1074 bp, Homo sapiens
  misc_feature (68)..(69): n is a, c, g, or t
  misc_feature (478)..(481): n is a, c, g, or t
  misc_feature (483)..(483): n is a, c, g, or t
  misc_feature (485)..(486): n is a, c, g, or t
  misc_feature (490)..(491): n is a, c, g, or t
  misc_feature (497)..(497): n is a, c, g, or t
  misc_feature (507)..(507): n is a, c, g, or t
  misc_feature (541)..(541): n is a, c, g, or t
  misc_feature (547)..(548): n is a, c, g, or t
  misc_feature (551)..(551): n is a, c, g, or t
  misc_feature (556)..(556): n is a, c, g, or t
  misc_feature (574)..(574): n is a, c, g, or t
  misc_feature (580)..(580): n is a, c, g, or t
  misc_feature (587)..(587): n is a, c, g, or t
  misc_feature (589)..(589): n is a, c, g, or t
  misc_feature (596)..(596): n is a, c, g, or t
  misc_feature (599)..(599): n is a, c, g, or t
  misc_feature (607)..(607): n is a, c, g, or t
  misc_feature (625)..(625): n is a, c, g, or t
  misc_feature (632)..(632): n is a, c, g, or t
  misc_feature (656)..(656): n is a, c, g, or t
  misc_feature (671)..(671): n is a, c, g, or t
  misc_feature (681)..(681): n is a, c, g, or t
  misc_feature (689)..(689): n is a, c, g, or t
  misc_feature (695)..(695): n is a, c, g, or t
  misc_feature (701)..(701): n is a, c, g, or t
  misc_feature (714)..(714): n is a, c, g, or t
  misc_feature (718)..(719): n is a, c, g, or t
  misc_feature (721)..(722): n is a, c, g, or t
  misc_feature (727)..(727): n is a, c, g, or t
  misc_feature (806)..(807): n is a, c, g, or t
  misc_feature (820)..(820): n is a, c, g, or t
  misc_feature (1041)..(1041): n is a, c, g, or t
agcggaggcgcgcgggggcggggcgagtgcggcgcggggtataagtagagggtgcaggaggcggagcnnccttctccccggcggttagtgctgagagtgcggagtgtgtgctccgggctcggaacacacatttattattaaaaaatccaaaaaaaatctaaaaaaaatcttttaaaaaaccccaaaaaaatttacaaaaaatccgcgtctcccccgccggagacttttattttttttcttcctcttttataaaataacccggtgaagcagccgagaccgacccgcccgcccggtggccccgcagcagctccaagaaggaaccaagagaccgaggccttcccgctgcccggacccgacaccgccaccctcgctccccgccggcagccggcagccagcggcagtggatcgaccccgttctgcggccgttgagtagttttcaattccggttgatttttgtccctctgcgcttgctagccgnnnncntnncccnngctaangcccccagcnccggcactcgctctcctcctctcacggaaaggtngcggcnngtngcccngcgggcagccgtgccganatgaancccagtncncccaacnacnccatggcntcgctctacgtggggganctccacnccgacgtgaccaaagcgatgctcnacgagaagttcagcncggccgggcncatcctcnccatcngggtcnacaaggacataancacnngnngctcnttgggctacgcgtatgtgaacttccagcagccggcggacgcggagtgcctttgggacaccatgaattttgatgttatanngggcaagccagtncgcatcatgtggtctcagcgtgatccatcacttcgcaaaagtggagtaggcaacatattcattaaaaatctggacaaatccattgataataaagcactgtatgatacattttctgcttttggtaacatcctttcatgtaaggtggtttgtgatgaaaatggttccaagggctatggatttgtacactttgagacgcaggaagcagctgaaaatctattganaaatgaatggaatgctcctaaatgatcgcaaag

SEQ ID NO: 649970 - DNA, 690 bp, Homo sapiens
  misc_feature (68)..(69): n is a, c, g, or t
agcggaggcgcgcgggggcggggcgagtgcggcgcggggtataagtagagggtgcaggaggcggagcnnccttctccccggcggttagtgctgagagtgcggagtgtgtgctccgggctcggaacacacatttattattaaaaaatccaaaaaaaatctaaaaaaaatcttttaaaaaaccccaaaaaaatttacaaaaaatccgcgtctcccccgccggagacttttattttttttcttcctcttttataaaataacccggtgaagcagccgagaccgacccgcccgcccggtggccccgcagcagctccaagaaggaaccaagagaccgaggccttcccgctgcccggacccgacaccgccaccctcgctccccgccggcagccggcagccagcggcagtggatcgaccccgttctgcggccgttgagtagttttcaattccggttgatttttgtccctctgcgctttgcgtccacaggtgcacgtactcagctctagcgttgtcaaggcttcctggggtgtaccggagcaggctcctaatgccgggcaacagtggacccggcttgaccttgcagatcaaagcagacagaggagctggagcgctccaatgatttcagcctgacggctcttcaaaacatcccattctgcttaccacgcatggattctgaacattggaatctctaacccg

SEQ ID NO: 649971 - DNA, 177 bp, Homo sapiens
cacccctctgtcattcggcctgcttttttttacatgacaaaaactaacccccctctcaatcatataccaaatattcccctcactaaacagaagccttctcctcactctttcaatcttatccatcataacaggcaggtgaggggggcgtaaaccaaacccaccttccccaaatttttt

SEQ ID NO: 649972 - DNA, 2375 bp, Homo sapiens
  misc_feature (202)..(202): n is a, c, g, or t
cgaagaactgtgcaataaagaagaagccaggaggtctttgaaaatgacccggaaacggattattttgatccaaaatacttagttgtcttcgctcttttcaaactgggttattcactgctgcacgtcagtcaactaatgcttatcctgacctaagaagctgtgtcaatgccattccagaccagtgtagtcctctgccatgcantgaagatggatatatgagctgcaaagatggaaaagcttcttttacttgcacttgtaaaccaggttggcaaggagaaaagtgtgaatttgacataaatgaatgcaaagatccctcaaatataaatggaggttgcagtcaaatttgtgataatacacctggaagttaccactgttcctgtaaaaatggttttgttatgctttcaaataagaaagattgtaaagatgtggatgaatgctctttgaagccaagcatttgtggcacagctgtgtgcaagaacatcccaggagattttgaatgtgaatgccccgaaggctacagatataatctcaaatcaaagtcttgtgaagatatagatgaatgctctgagaacatgtgtgctcagctttgtgtcaattaccctggaggttacacttgctattgtgatgggaagaaaggattcaaacttgcccaagatcagaagagttgtgaggttgtttcagtgtgccttcccttgaaccttgacacaaagtatgaattactttacttggcggagcagtttgcaggggttgttttatatttaaaatttcgtttgccagaaatcagcagattttcagcagaatttgatttccggacatatgattcagaaggcgtgatactgtacgcagaatctatcgatcactcagcgtggctcctgattgcacttcgtggtggaaagattgaagttcagcttaagaatgaacatacatccaaaatcacaactggaggtgatgttattaataatggtctatggaatatggtgtctgtggaagaattagaacatagtattagcattaaaatagctaaagaagctgtgatggatataaataaacctggacccctttttaagccggaaaatggattgctggaaaccaaagtatactttgcaggattccctcggaaagtggaaagtgaactcattaaaccgattaaccctcgtctagatggatgtatacgaagctggaatttgatgaagcaaggagcttctggaataaaggaaattattcaagaaaaacaaaataagcattgcctggttactgtggagaagggctcctactatcctggttctggaattgctcaatttcacatagattataataatgtatccagtgctgagggttggcatgtaaatgtgaccttgaatattcgtccatccacgggcactggtgttatgcttgccttggtttctggtaacaacacagtgccctttgctgtgtccttggtggactccacctctgaaaaatcacaggatattctgttatctgttgaaaatactgtaatatatcggatacaggccctaagtctatgttccgatcaacaatctcatctggaatttagagtcaacagaaacaatctggagttgtcgacaccacttaaaatagaaaccatctcccatgaagaccttcaaagacaacttgccgtcttggacaaagcaatgaaagcaaaagtggccacatacctgggtggccttccagatgttccattcagtgccacaccagtgaatgccttttataatggctgcatggaagtgaatattaatggtgtacagttggatctggatgaagccatttctaaacataatgatattagagctcactcatgtccatcagtttggaaaaagacaaagaattcttaaggcatcttttctctgcttataataccttttccttgtgtgggtcacacaaggtctacattacaaaagacagaattcagggatggaaaggagaatgaacaaatgtgggagttcatagttttccttgaatccaacttttaattaccagagtaagttgccaaaatgtgattgttgaagtacaaaaggaactatgaaaaccagaacaaattttaacaaaaggacaaccacagagggatatagtgaatatcgtatcattgtaatcaaagaagtaaggaggtaagattgccacgtgcctgctggtactgtgatgcatttcaagtggcagttttatcacgtttgaatctaccattcatagccagatgtgtatcagatgtttcactgacagtttttaacaataaattcttttcactgtattttatatcacttataataaatcggtgtataattttaaaatgcatgtgaatatctttattatatcaactgtttgaataaaacaaaattacataatagacatttaactcttca

SEQ ID NO: 649973 - DNA, 1020 bp, Homo sapiens
  misc_feature (68)..(69): n is a, c, g, or t
  misc_feature (424)..(427): n is a, c, g, or t
  misc_feature (429)..(429): n is a, c, g, or t
  misc_feature (431)..(432): n is a, c, g, or t
  misc_feature (436)..(437): n is a, c, g, or t
  misc_feature (443)..(443): n is a, c, g, or t
  misc_feature (453)..(453): n is a, c, g, or t
  misc_feature (487)..(487): n is a, c, g, or t
  misc_feature (493)..(494): n is a, c, g, or t
  misc_feature (497)..(497): n is a, c, g, or t
  misc_feature (502)..(502): n is a, c, g, or t
  misc_feature (520)..(520): n is a, c, g, or t
  misc_feature (526)..(526): n is a, c, g, or t
  misc_feature (533)..(533): n is a, c, g, or t
  misc_feature (535)..(535): n is a, c, g, or t
  misc_feature (542)..(542): n is a, c, g, or t
  misc_feature (545)..(545): n is a, c, g, or t
  misc_feature (553)..(553): n is a, c, g, or t
  misc_feature (571)..(571): n is a, c, g, or t
  misc_feature (578)..(578): n is a, c, g, or t
  misc_feature (602)..(602): n is a, c, g, or t
  misc_feature (617)..(617): n is a, c, g, or t
  misc_feature (627)..(627): n is a, c, g, or t
  misc_feature (635)..(635): n is a, c, g, or t
  misc_feature (641)..(641): n is a, c, g, or t
  misc_feature (647)..(647): n is a, c, g, or t
  misc_feature (660)..(660): n is a, c, g, or t
  misc_feature (664)..(665): n is a, c, g, or t
  misc_feature (667)..(668): n is a, c, g, or t
  misc_feature (673)..(673): n is a, c, g, or t
  misc_feature (752)..(753): n is a, c, g, or t
  misc_feature (766)..(766): n is a, c, g, or t
  misc_feature (987)..(987): n is a, c, g, or t
agcggaggcgcgcgggggcggggcgagtgcggcgcggggtataagtagagggtgcaggaggcggagcnnccttctccccggcggttagtgctgagagtgcggagtgtgtgctccgggctcggaacacacatttattattaaaaaatccaaaaaaaatctaaaaaaaatcttttaaaaaaccccaaaaaaatttacaaaaaatccgcgtctcccccgccggagacttttattttttttcttcctcttttatcagctccaagaaggaaccaagagaccgaggccttcccgctgcccggacccgacaccgccaccctcgctccccgccggcagccggcagccagcggcagtggatcgaccccgttctgcggccgttgagtagttttcaattccggttgatttttgtccctctgcgcttgctagccgnnnncntnncccnngctaangcccccagcnccggcactcgctctcctcctctcacggaaaggtngcggcnngtngcccngcgggcagccgtgccganatgaancccagtncncccaacnacnccatggcntcgctctacgtggggganctccacnccgacgtgaccaaagcgatgctcnacgagaagttcagcncggccgggcncatcctcnccatcngggtcnacaaggacataancacnngnngctcnttgggctacgcgtatgtgaacttccagcagccggcggacgcggagtgcctttgggacaccatgaattttgatgttatanngggcaagccagtncgcatcatgtggtctcagcgtgatccatcacttcgcaaaagtggagtaggcaacatattcattaaaaatctggacaaatccattgataataaagcactgtatgatacattttctgcttttggtaacatcctttcatgtaaggtggtttgtgatgaaaatggttccaagggctatggatttgtacactttgagacgcaggaagcagctgaaaatctattganaaatgaatggaatgctcctaaatgatcgcaaag

SEQ ID NO: 649974 - DNA, 242 bp, Homo sapiens
gcttggattcaaatctctcaggggcctgggctgcaggatttgaccctaatcagaagcatccggcgctggaagtacggcaaggttctcctggttccgggtgaaggaagaatgacccaatttacgccatgaaagtggtgaagacagagctggtgcatgatgacgaggatattgactgggtacagacagagaagcacgtgttcgagcaggcatccagcaaccccttcctggtcggattacactcc

SEQ ID NO: 649975 - DNA, 2013 bp, Homo sapiens
  misc_feature (202)..(202): n is a, c, g, or t
  misc_feature (1936)..(1936): n is a, c, g, or t
  misc_feature (1971)..(1971): n is a, c, g, or t
  misc_feature (1996)..(1996): n is a, c, g, or t
cgaagaactgtgcaataaagaagaagccaggaggtctttgaaaatgacccggaaacggattattttgatccaaaatacttagttgtcttcgctcttttcaaactgggttattcactgctgcacgtcagtcaactaatgcttatcctgacctaagaagctgtgtcaatgccattccagaccagtgtagtcctctgccatgcantgaagatggatatatgagctgcaaagatggaaaagcttcttttacttgcacttgtaaaccaggttggcaaggagaaaagtgtgaatttgacataaatgaatgcaaagatccctcaaatataaatggaggttgcagtcaaatttgtgataatacacctggaagttaccactgttcctgtaaaaatggttttgttatgctttcaaataagaaagattgtaaagatgtggatgaatgctctttgaagccaagcatttgtggcacagctgtgtgcaagaacatcccaggagattttgaatgtgaatgccccgaaggctacagatataatctcaaatcaaagtcttgtgaagatatagatgaatgctctgagaacatgtgtgctcagctttgtgtcaattaccctggaggttacacttgctattgtgatgggaagaaaggattcaaacttgcccaagatcagaagagttgtgaggttgtttcagtgtgccttcccttgaaccttgacacaaagtatgaattactttacttggcggagcagtttgcaggggttgttttatatttaaaatttcgtttgccagaaatcagcagattttcagcagaatttgatttccggacatatgattcagaaggcgtgatactgtacgcagaatctatcgatcactcagcgtggctcctgattgcacttcgtggtggaaagattgaagttcagcttaagaatgaacatacatccaaaatcacaactggaggtgatgttattaataatggtctatggaatatggtgtctgtggaagaattagaacatagtattagcattaaaatagctaaagaagctgtgatggatataaataaacctggacccctttttaagccggaaaatggattgctggaaaccaaagtatactttgcaggattccctcggaaagtggaaagtgaactcattaaaccgattaaccctcgtctagatggatgtatacgaagctggaatttgatgaagcaaggagcttctggaataaaggaaattattcaagaaaaacaaaataagcattgcctggttactgtggagaagggctcctactatcctggttctggaattgctcaatttcacatagattataataatgtatccagtgctgagggttggcatgtaaatgtgaccttgaatattcgtccatccacgggcactggtgttatgcttgccttggtttctggtaacaacacagtgccctttgctgtgtccttggtggactccacctctgaaaaatcacaggatattctgttatctgttgaaaatactgtaatatatcggatacaggccctaagtctatgttccgatcaacaatctcatctggaatttagagtcaacagaaacaatctggagttgtcgacaccacttaaaatagaaaccatctcccatgaagaccttcaaagacaacttgccgtcttggacaaagcaatgaaagcaaaagtggccacatacctgggtggccttccagatgttccattcagtgccacaccagtgaatgccttttataatggctgcatggaagtgaatattaatggtgtacagttggatctggatgaagccatttctaaacataatgatattagagctcactcatgtccatcagtttggaaaaagacaaagaattcttaaggcatctttttccttccagatgttccattcagtgccacaccagtgaatgccttttataatggctgcatggaagtgaatattantggtgtacagttggatctggatgaagccatttctnaacataatgatattagagctcactnatgtccatcagtttggg

SEQ ID NO: 649976 - DNA, 231 bp, Homo sapiens
tgcgatattcgaagtttgacatatttaaatttacataaactataatatttttatttctatttgtatatgtataaaatgtgatcaataccttgtcgttacttgcagtcagctagggagaaagtgtaaattgtcttgactttagactcacgagatttatgacggtggacatgacattgataccgaatatacacgtgccttttgttttagggactcttcggtaagctgaaaaaa

SEQ ID NO: 649977 - DNA, 2983 bp, Homo sapiens
  misc_feature (202)..(202): n is a, c, g, or t
cgaagaactgtgcaataaagaagaagccaggaggtctttgaaaatgacccggaaacggattattttgatccaaaatacttagttgtcttcgctcttttcaaactgggttattcactgctgcacgtcagtcaactaatgcttatcctgacctaagaagctgtgtcaatgccattccagaccagtgtagtcctctgccatgcantgaagatggatatatgagctgcaaagatggaaaagcttcttttacttgcacttgtaaaccaggttggcaaggagaaaagtgtgaatttgacataaatgaatgcaaagatccctcaaatataaatggaggttgcagtcaaatttgtgataatacacctggaagttaccactgttcctgtaaaaatggttttgttatgctttcaaataagaaagattgtaaagatgtggatgaatgctctttgaagccaagcatttgtggcacagctgtgtgcaagaacatcccaggagattttgaatgtgaatgccccgaaggctacagatataatctcaaatcaaagtcttgtgaagatatagatgaatgctctgagaacatgtgtgctcagctttgtgtcaattaccctggaggttacacttgctattgtgatgggaagaaaggattcaaacttgcccaagatcagaagagttgtgaggttgtttcagtgtgccttcccttgaaccttgacacaaagtatgaattactttacttggcggagcagtttgcaggggttgttttatatttaaaatttcgtttgccagaaatcagcagattttcagcagaatttgatttccggacatatgattcagaaggcgtgatactgtacgcagaatctatcgatcactcagcgtggctcctgattgcacttcgtggtggaaagattgaagttcagcttaagaatgaacatacatccaaaatcacaactggaggtgatgttattaataatggtctatggaatatggtgtctgtggaagaattagaacatagtattagcattaaaatagctaaagaagctgtgatggatataaataaacctggacccctttttaagccggaaaatggattgctggaaaccaaagtatactttgcaggattccctcggaaagtggaaagtgaactcattaaaccgattaaccctcgtctagatggatgtatacgaagctggaatttgatgaagcaaggagcttctggaataaaggaaattattcaagaaaaacaaaataagcattgcctggttactgtggagaagggctcctactatcctggttctggaattgctcaatttcacatagattataataatgtatccagtgctgagggttggcatgtaaatgtgaccttgaatattcgtccatccacgggcactggtgttatgcttgccttggtttctggtaacaacacagtgccctttgctgtgtccttggtggactccacctctgaaaaatcacaggatattctgttatctgttgaaaatactgtaatatatcggatacaggccctaagtctatgttccgatcaacaatctcatctggaatttagagtcaacagaaacaatctggagttgtcgacaccacttaaaatagaaaccatctcccatgaagaccttcaaagacaacttgccgtcttggacaaagcaatgaaagcaaaagtggccacatacctgggtggccttccagatgttccattcagtgccacaccagtgaatgccttttataatggctgcatggaagtgaatattaatggtgtacagttggatctggatgaagccatttctaaacataatgatattagagctcactcatgtccatcagtttggaaaaagacaaagaattcttaaggcatcttttctctgcttataataccttttccttgtgtgtaattatacttatgtttcaataacagctgaagggttttatttacaatgtgcagtctttgattattttgtggtcctttcctgggatttttaaaaggtcctttgtcaaggaaaaaaattctgttgtgatataaatcacagtaaagaaattcttacttctcttgctatctaagaatagtgaaaaataacaattttaaatttgaatttttttcctacaaatgacagtttcaatttttgtttgtaaaactaaattttaattttatcatcatgaactagtgtctaaatacctatgtttttttcagaaagcaaggaagtaaactcaaacaaaagtgcgtgtaattaaatactattaatcataggcagatactattttgtttatgtttttgtttttttcctgatgaaggcagaagagatggtggtctattaaatatgaattgaatggagggtcctaatgccttatttcaaaacaattcctcagggggaccagctttggcttcatctttctcttgtgtggcttcacatttaaaccagtatctttattgaattagaaaacaagtgggacatattttcctgagagcagcacaggaatcttcttcttggcagctgcagtctgtcaggatgagatatcagattaggttggataggtggggaaatctgaagtgggtacattttttaaattttgctgtgtgggtcacacaaggtctacattacaaaagacagaattcagggatggaaaggagaatgaacaaatgtgggagttcatagttttccttgaatccaacttttaattaccagagtaagttgccaaaatgtgattgttgaagtacaaaaggaactatgaaaaccagaacaaattttaacaaaaggacaaccacagagggatatagtgaatatcgtatcattgtaatcaaagaagtaaggaggtaagattgccacgtgcctgctggtactgtgatgcatttcaagtggcagttttatcacgtttgaatctaccattcatagccagatgtgtatcagatgtttcactgacagtttttaacaataaattcttttcactgtattttatatcacttataataaatcggtgtataatt

SEQ ID NO: 649978 - DNA, 211 bp, Homo sapiens
tctatcttattcctagctgcgcgtatcaggcggcatcgcggccttgtcttgagcatctaatttgactaagtaaagcttcgggtcccgatggaattcagctaagagcatcgaggtggcgtcgagaggcaaggggcggggacgggcggtggctcgcctcgcggaggaccgcccacccggtcccaagatccaatgtacgagcttttaactgcag

SEQ ID NO: 649979 - DNA, 3061 bp, Homo sapiens
  misc_feature (202)..(202): n is a, c, g, or t
cgaagaactgtgcaataaagaagaagccaggaggtctttgaaaatgacccggaaacggattattttgatccaaaatacttagttgtcttcgctcttttcaaactgggttattcactgctgcacgtcagtcaactaatgcttatcctgacctaagaagctgtgtcaatgccattccagaccagtgtagtcctctgccatgcantgaagatggatatatgagctgcaaagatggaaaagcttcttttacttgcacttgtaaaccaggttggcaaggagaaaagtgtgaatttgacataaatgaatgcaaagatccctcaaatataaatggaggttgcagtcaaatttgtgataatacacctggaagttaccactgttcctgtaaaaatggttttgttatgctttcaaataagaaagattgtaaagatgtggatgaatgctctttgaagccaagcatttgtggcacagctgtgtgcaagaacatcccaggagattttgaatgtgaatgccccgaaggctacagatataatctcaaatcaaagtcttgtgaagatatagatgaatgctctgagaacatgtgtgctcagctttgtgtcaattaccctggaggttacacttgctattgtgatgggaagaaaggattcaaacttgcccaagatcagaagagttgtgaggttgtttcagtgtgccttcccttgaaccttgacacaaagtatgaattactttacttggcggagcagtttgcaggggttgttttatatttaaaatttcgtttgccagaaatcagcagattttcagcagaatttgatttccggacatatgattcagaaggcgtgatactgtacgcagaatctatcgatcactcagcgtggctcctgattgcacttcgtggtggaaagattgaagttcagcttaagaatgaacatacatccaaaatcacaactggaggtgatgttattaataatggtctatggaatatggtgtctgtggaagaattagaacatagtattagcattaaaatagctaaagaagctgtgatggatataaataaacctggacccctttttaagccggaaaatggattgctggaaaccaaagtatactttgcaggattccctcggaaagtggaaagtgaactcattaaaccgattaaccctcgtctagatggatgtatacgaagctggaatttgatgaagcaaggagcttctggaataaaggaaattattcaagaaaaacaaaataagcattgcctggttactgtggagaagggctcctactatcctggttctggaattgctcaatttcacatagattataataatgtatccagtgctgagggttggcatgtaaatgtgaccttgaatattcgtccatccacgggcactggtgttatgcttgccttggtttctggtaacaacacagtgccctttgctgtgtccttggtggactccacctctgaaaaatcacaggatattctgttatctgttgaaaatactgtaatatatcggatacaggccctaagtctatgttccgatcaacaatctcatctggaatttagagtcaacagaaacaatctggagttgtcgacaccacttaaaatagaaaccatctcccatgaagaccttcaaagacaacttgccgtcttggacaaagcaatgaaagcaaaagtggccacatacctgggtggccttccagatgttccattcagtgccacaccagtgaatgccttttataatggctgcatggaagtgaatattaatggtgtacagttggatctggatgaagccatttctaaacataatgatattagagctcactcatgtccatcagtttggaaaaagacaaagaattcttaaggcatcttttctctgcttataataccttttccttgtgtgtaattatacttatgtttcaataacagctgaagggttttatttacaatgtgcagtctttgattattttgtggtcctttcctgggatttttaaaaggtcctttgtcaaggaaaaaaattctgttgtgatataaatcacagtaaagaaattcttacttctcttgctatctaagaatagtgaaaaataacaattttaaatttgaatttttttcctacaaatgacagtttcaatttttgtttgtaaaactaaattttaattttatcatcatgaactagtgtctaaatacctatgtttttttcagaaagcaaggaagtaaactcaaacaaaagtgcgtgtaattaaatactattaatcataggcagatactattttgtttatgtttttgtttttttcctgatgaaggcagaagagatggtggtctattaaatatgaattgaatggagggtcctaatgccttatttcaaaacaattcctcagggggaccagctttggcttcatctttctcttgtgtggcttcacatttaaaccagtatctttattgaattagaaaacaagtgggacatattttcctgagagcagcacaggaatcttcttcttggcagctgcagtctgtcaggatgagatatcagattaggttggataggtggggaaatctgaagtgggtacattttttaaattttgctgtgtgggtcacacaaggtctacattacaaaagacagaattcagggatggaaaggagaatgaacaaatgtgggagttcatagttttccttgaatccaacttttaattaccagagtaagttgccaaaatgtgattgttgaagtacaaaaggaactatgaaaaccagaacaaattttaacaaaaggacaaccacagagggatatagtgaatatcgtatcattgtaatcaaagaagtaaggaggtaagattgccacgtgcctgctggtactgtgatgcatttcaagtggcagttttatcacgtttgaatctaccattcatagccagatgtgtatcagatgtttcactgacagtttttaacaataaattcttttcactgtattttatatcacttataataaatcggtgtataattttaaaatgcatgtgaatatctttattatatcaactgtttgaataaaacaaaattacataatagacatttaactcttca

SEQ ID NO: 649980 - DNA, 3122 bp, Homo sapiens
  misc_feature (202)..(202): n is a, c, g, or t
cgaagaactgtgcaataaagaagaagccaggaggtctttgaaaatgacccggaaacggattattttgatccaaaatacttagttgtcttcgctcttttcaaactgggttattcactgctgcacgtcagtcaactaatgcttatcctgacctaagaagctgtgtcaatgccattccagaccagtgtagtcctctgccatgcantgaagatggatatatgagctgcaaagatggaaaagcttcttttacttgcacttgtaaaccaggttggcaaggagaaaagtgtgaatttgacataaatgaatgcaaagatccctcaaatataaatggaggttgcagtcaaatttgtgataatacacctggaagttaccactgttcctgtaaaaatggttttgttatgctttcaaataagaaagattgtaaagatgtggatgaatgctctttgaagccaagcatttgtggcacagctgtgtgcaagaacatcccaggagattttgaatgtgaatgccccgaaggctacagatataatctcaaatcaaagtcttgtgaagatatagatgaatgctctgagaacatgtgtgctcagctttgtgtcaattaccctggaggttacacttgctattgtgatgggaagaaaggattcaaacttgcccaagatcagaagagttgtgaggttgtttcagtgtgccttcccttgaaccttgacacaaagtatgaattactttacttggcggagcagtttgcaggggttgttttatatttaaaatttcgtttgccagaaatcagcagattttcagcagaatttgatttccggacatatgattcagaaggcgtgatactgtacgcagaatctatcgatcactcagcgtggctcctgattgcacttcgtggtggaaagattgaagttcagcttaagaatgaacatacatccaaaatcacaactggaggtgatgttattaataatggtctatggaatatggtgtctgtggaagaattagaacatagtattagcattaaaatagctaaagaagctgtgatggatataaataaacctggacccctttttaagccggaaaatggattgctggaaaccaaagtatactttgcaggattccctcggaaagtggaaagtgaactcattaaaccgattaaccctcgtctagatggatgtatacgaagctggaatttgatgaagcaaggagcttctggaataaaggaaattattcaagaaaaacaaaataagcattgcctggttactgtggagaagggctcctactatcctggttctggaattgctcaatttcacatagattataataatgtatccagtgctgagggttggcatgtaaatgtgaccttgaatattcgtccatccacgggcactggtgttatgcttgccttggtttctggtaacaacacagtgccctttgctgtgtccttggtggactccacctctgaaaaatcacaggatattctgttatctgttgaaaatactgtaatatatcggatacaggccctaagtctatgttccgatcaacaatctcatctggaatttagagtcaacagaaacaatctggagttgtcgacaccacttaaaatagaaaccatctcccatgaagaccttcaaagacaacttgccgtcttggacaaagcaatgaaagcaaaagtggccacatacctgggtggccttccagatgttccattcagtgccacaccagtgaatgccttttataatggctgcatggaagtgaatattaatggtgtacagttggatctggatgaagccatttctaaacataatgatattagagctcactcatgtccatcagtttggaaaaagacaaagaattcttaaggcatcttttctctgcttataataccttttccttgtgtgtaattatacttatgtttcaataacagctgaagggttttatttacaatgtgcagtctttgattattttgtggtcctttcctgggatttttaaaaggtcctttgtcaaggaaaaaaattctgttgtgatataaatcacagtaaagaaattcttacttctcttgctatctaagaatagtgaaaaataacaattttaaatttgaatttttttcctacaaatgacagtttcaatttttgtttgtaaaactaaattttaattttatcatcatgaactagtgtctaaatacctatgtttttttcagaaagcaaggaagtaaactcaaacaaaagtgcgtgtaattaaatactattaatcataggcagatactattttgtttatgtttttgtttttttcctgatgaaggcagaagagatggtggtctattaaatatgaattgaatggagggtcctaatgccttatttcaaaacaattcctcagggggaccagctttggcttcatctttctcttgtgtggcttcacatttaaaccagtatctttattgaattagaaaacaagtgggacatattttcctgagagcagcacaggaatcttcttcttggcagctgcagtctgtcaggatgagatatcagattaggttggataggtggggaaatctgaagtgggtacattttttaaattttgctgtgtgggtcacacaaggtctacattacaaaagacagaattcagggatggaaaggagaatgaacaaatgtgggagttcatagttttccttgaatccaacttttaattaccagagtaagttgccaaaatgtgattgttgaagtacaaaaggaactatgaaaaccagaacaaattttaacaaaaggacaaccacagagggatatagtgaatatcgtatcattgtaatcaaagaagtaaggaggtaagattgccacgtgcctgctggtactgtgatgcatttcaagtggcagttttatcacgtttgaatctaccattcatagccagatgtgtatcagatgtttcactgacagtttttaacacgtttgaatctaccattcatagccagatgtgtatcagatgtttcactgacagtttttaacaataaattcttttcactgtattttatatcacttataataaatcggtgtataattttaaaatgcatgtgaatatctttattatatcaactgtttgaataaaacaaaattacataatagacatttaactcttca

SEQ ID NO: 649981 - DNA, 2536 bp, Homo sapiens
  misc_feature (202)..(202): n is a, c, g, or t
cgaagaactgtgcaataaagaagaagccaggaggtctttgaaaatgacccggaaacggattattttgatccaaaatacttagttgtcttcgctcttttcaaactgggttattcactgctgcacgtcagtcaactaatgcttatcctgacctaagaagctgtgtcaatgccattccagaccagtgtagtcctctgccatgcantgaagatggatatatgagctgcaaagatggaaaagcttcttttacttgcacttgtaaaccaggttggcaaggagaaaagtgtgaatttgacataaatgaatgcaaagatccctcaaatataaatggaggttgcagtcaaatttgtgataatacacctggaagttaccactgttcctgtaaaaatggttttgttatgctttcaaataagaaagattgtaaagatgtggatgaatgctctttgaagccaagcatttgtggcacagctgtgtgcaagaacatcccaggagattttgaatgtgaatgccccgaaggctacagatataatctcaaatcaaagtcttgtgaagatatagatgaatgctctgagaacatgtgtgctcagctttgtgtcaattaccctggaggttacacttgctattgtgatgggaagaaaggattcaaacttgcccaagatcagaagagttgtgaggttgtttcagtgtgccttcccttgaaccttgacacaaagtatgaattactttacttggcggagcagtttgcaggggttgttttatatttaaaatttcgtttgccagaaatcagcagattttcagcagaatttgatttccggacatatgattcagaaggcgtgatactgtacgcagaatctatcgatcactcagcgtggctcctgattgcacttcgtggtggaaagattgaagttcagcttaagaatgaacatacatccaaaatcacaactggaggtgatgttattaataatggtctatggaatatggtgtctgtggaagaattagaacatagtattagcattaaaatagctaaagaagctgtgatggatataaataaacctggacccctttttaagccggaaaatggattgctggaaaccaaagtatactttgcaggattccctcggaaagtggaaagtgaactcattaaaccgattaaccctcgtctagatggatgtatacgaagctggaatttgatgaagcaaggagcttctggaataaaggaaattattcaagaaaaacaaaataagcattgcctggttactgtggagaagggctcctactatcctggttctggaattgctcaatttcacatagattataataatgtatccagtgctgagggttggcatgtaaatgtgaccttgaatattcgtccatccacgggcactggtgttatgcttgccttggtttctggtaacaacacagtgccctttgctgtgtccttggtggactccacctctgaaaaatcacaggatattctgttatctgttgaaaatactgtaatatatcggatacaggccctaagtctatgttccgatcaacaatctcatctggaatttagagtcaacagaaacaatctggagttgtcgacaccacttaaaatagaaaccatctcccatgaagaccttcaaagacaacttgccgtcttggacaaagcaatgaaagcaaaagtggccacatacctgggtggccttccagatgttccattcagtgccacaccagtgaatgccttttataatggctgcatggaagtgaatattaatggtgtacagttggatctggatgaagccatttctaaacataatgatattagagctcactcatgtccatcagtttggaaaaagacaaagaattcttaaggcatcttttctctgcttataataccttttccttgtgtgtaattatacttatgtttcaataacagctgaagggttttatttacaatgtgcagtctttgattattttgtggtcctttcctgggatttttaaaaggtcctttgtcaaggaaaaaaattctgttgtgatataaatcacagtaaagaaattcttacttctcttgctatctaagaatagtgaaaaataacaattttaaatttgaatttttttcctacaaatgacagtttcaatttttgtttgtaaaactaaattttaattttatcatcatgaactagtgtctaaatacctatgtttttttcagaaagcaaggaagtaaactcaaacaaaagtgcgtgtaattaaatactattaatcataggcagatactattttgtttatgtttttgtttttttcctgatgaaggcagaagagatggtggtctattaaatatgaattgaatggagggtcctaatgccttatttcaaaacaattcctcagggggaccagctttggcttcatctttctcttgtgtggcttcacatttaaaccagtatctttattgaattagaaaacaagtgggacatattttcctgagagcagcacaagaaatttttttttgcaattccatctggcaggatgaaattctcttttgttggataggtgggtt

SEQ ID NO: 649982 - DNA, 2440 bp, Homo sapiens
  misc_feature (202)..(202): n is a, c, g, or t
  misc_feature (2383)..(2384): n is a, c, g, or t
  misc_feature (2387)..(2387): n is a, c, g, or t
  misc_feature (2390)..(2390): n is a, c, g, or t
  misc_feature (2395)..(2397): n is a, c, g, or t
  misc_feature (2401)..(2401): n is a, c, g, or t
  misc_feature (2403)..(2405): n is a, c, g, or t
cgaagaactgtgcaataaagaagaagccaggaggtctttgaaaatgacccggaaacggattattttgatccaaaatacttagttgtcttcgctcttttcaaactgggttattcactgctgcacgtcagtcaactaatgcttatcctgacctaagaagctgtgtcaatgccattccagaccagtgtagtcctctgccatgcantgaagatggatatatgagctgcaaagatggaaaagcttcttttacttgcacttgtaaaccaggttggcaaggagaaaagtgtgaatttgacataaatgaatgcaaagatccctcaaatataaatggaggttgcagtcaaatttgtgataatacacctggaagttaccactgttcctgtaaaaatggttttgttatgctttcaaataagaaagattgtaaagatgtggatgaatgctctttgaagccaagcatttgtggcacagctgtgtgcaagaacatcccaggagattttgaatgtgaatgccccgaaggctacagatataatctcaaatcaaagtcttgtgaagatatagatgaatgctctgagaacatgtgtgctcagctttgtgtcaattaccctggaggttacacttgctattgtgatgggaagaaaggattcaaacttgcccaagatcagaagagttgtgaggttgtttcagtgtgccttcccttgaaccttgacacaaagtatgaattactttacttggcggagcagtttgcaggggttgttttatatttaaaatttcgtttgccagaaatcagcagattttcagcagaatttgatttccggacatatgattcagaaggcgtgatactgtacgcagaatctatcgatcactcagcgtggctcctgattgcacttcgtggtggaaagattgaagttcagcttaagaatgaacatacatccaaaatcacaactggaggtgatgttattaataatggtctatggaatatggtgtctgtggaagaattagaacatagtattagcattaaaatagctaaagaagctgtgatggatataaataaacctggacccctttttaagccggaaaatggattgctggaaaccaaagtatactttgcaggattccctcggaaagtggaaagtgaactcattaaaccgattaaccctcgtctagatggatgtatacgaagctggaatttgatgaagcaaggagcttctggaataaaggaaattattcaagaaaaacaaaataagcattgcctggttactgtggagaagggctcctactatcctggttctggaattgctcaatttcacatagattataataatgtatccagtgctgagggttggcatgtaaatgtgaccttgaatattcgtccatccacgggcactggtgttatgcttgccttggtttctggtaacaacacagtgccctttgctgtgtccttggtggactccacctctgaaaaatcacaggatattctgttatctgttgaaaatactgtaatatatcggatacaggccctaagtctatgttccgatcaacaatctcatctggaatttagagtcaacagaaacaatctggagttgtcgacaccacttaaaatagaaaccatctcccatgaagaccttcaaagacaacttgccgtcttggacaaagcaatgaaagcaaaagtggccacatacctgggtggccttccagatgttccattcagtgccacaccagtgaatgccttttataatggctgcatggaagtgaatattaatggtgtacagttggatctggatgaagccatttctaaacataatgatattagagctcactcatgtccatcagtttggaaaaagacaaagaattcttaaggcatcttttctctgcttataataccttttccttgtgtgtaattatacttatgtttcaataacagctgaagggttttatttacaatgtgcagtctttgattattttgtggtcctttcctgggatttttaaaaggtcctttgtcaaggaaaaaaattctgttgtgatataaatcacagtaaagaaattcttacttctcttgctatctaagaatagtgaaaaataacaattttaaatttgaatttttttcctacaaatgacagtttcaatttttgtttgtaaaactaaattttaattttatcatcatgaactagtgtctaaatacctatgtttttttcagaaagcaaggaagtaaactcaaacaaaagtgcgtgtaattaaatactattaatcataggcagatactattttgtttatgtttttgtttttttcctgatgaaggcagaaggcttcctgcttctgccatccacagtttcagttttggagtgtggtctacacactcatttaacttcattgcttcctgcttctgccnnaanacnctgcnnnctgntnnngccggccctctgtcactgatgctgatacggcctgg

SEQ ID NO: 649983 - DNA, 590 bp, Homo sapiens
gcgaattcactagtgattgtgagctgagatcgcacccggtccaagcactggctttgagataagcaatattaaaaacattttcagcttcatcagatgctgactaactgacctccaaccactgttccaccagccataactacagctttgattggacaagtgactgatttcagtaactttttcctgacaaggtgactacccatcatggactggttctggctggcttacagagctcctgcacttgcatgtctttgtgtcctgaaaagaccttttgccatatagggcctaattataatacatttaaatgttaagtctccaccccaaagtgaccatgggttgtatgttgcatgcatgtttgttcaatatgcatgtgtcagaaccactttcatgaatattcatagctcctcatgtaacctgttgaatgtgtatgtttagtcaatccattgagcatgaagctcctaccctaaaccctccttctttgaagtgcctgtctctggtcttggctggagacatgcttcccagcaggtctcactccctttcttgggctggagtgcagtggtgggatctcaggtcacaatcgaattccccggggc

SEQ ID NO: 649984 - DNA, 379 bp, Homo sapiens
aacctacatgtaactggagcagaggaaaggacagagaaggtcccaaatcaaagtgccctgattgtcccttctgtcccttgaaaattcagctatgggccctggcacagtggttcacgcctgtaatctcagcactctggggggctgagttgggtggaccacttgaactcaggagttcaagatcagcctgggcaacatggcaaaactttttctctacaaaaaaaatacaaaaattggctggacacggtggctcacacctgtaatcccagctactcgagaggctgaggcaggagaattgcttgaacccgggaggcagaggtgagccgagatcgcgttattgcattccagcctgggcaacaagagggaaattccgtctcaaaaa

SEQ ID NO: 649985 - DNA, 546 bp, Homo sapiens
aattatccggcctatccaatattcggcctatccactggaatcttcttcttggcagctgcagtctgtcaggatgagatatcagattaggttggataggtggggaaatctgaagtgggtacattttttaaattttgctgtgtgggtcacacaaggtctacattacaaaagacagaattcagggatggaaaggagaatgaacaaatgtgggagttcatagttttccttgaatccaacttttaattaccagagtaagttgccaaaatgtgattgttgaagtacaaaaggaactatgaaaaccagaacaaattttaacaaaaggacaaccacagagggatatagtgaatatcgtatcattgtaatcaaagaagtaaggaggtaagattgccacgtgcctgctggtactgtgatgcatttcaagtggcagttttatcacgtttgaatctaccattcatagccagatgtgtatcagatgtttcactgacagtttttaacaataaattcttttcactgtattttatatcacttataataaatcggtgtataatt

SEQ ID NO: 649986 - DNA, 330 bp, Homo sapiens
tgggattacaaggtgcgggctattgtgtctggctttttttcttttttagagacagagtctcactgtgttgcccaggtcgctgctgaggtcttgtgctaaagtgatcgtctccgggactcccaggtgctgaggtcggaggcgtgagtcactgtgtccagcctcaggtgttctttctgctgttagcttgagcgcagttactcatgtgcagaagcttcactcagaatgaaaaagtttggatagagtagcattagtcattatgcatgtgtttatctggcatgccataaaatgttattctcttaatgaaatgtggcaccttttctgtttctggtt

SEQ ID NO: 649987 - DNA, 530 bp, Homo sapiens
  misc_feature (16)..(16): n is a, c, g, or t
ggcgatggtggcggcntgcgtggacccagcaggcgcttccggccgcggacacgggctctgacacgcgggacaaggggcgcggcgagtgcagcgggagggcagcagactttgatctcttggtgatccggtgggggatccggtggcctagcttgtgccaaggaagctgctcagctgggaaagaaggtggctgtggctgactatgtggaaccttctccccgaggcaccaagtggggccttggtggcacctgtgtcaacgtgggttgcatacccaagaagctgatgcatcaggctgcactgctggggggcatgatcagagatgctcaccactatggctgggaggtgcccagcctgtccaacacaactggtgagagagaagcccttgccctctgcaggtccccattgaaaggagaggtttgctctctgccactcatctgtaaccgtgagcttttccacccggcctcctctttgatcccagaataatgactctgagacttcttatgtatgaataaatgcctgggccaaaaacctta

SEQ ID NO: 649988 - DNA, 626 bp, Homo sapiens
  misc_feature (491)..(491): n is a, c, g, or t
  misc_feature (516)..(516): n is a, c, g, or t
  misc_feature (531)..(531): n is a, c, g, or t
cacgtccgcacccctgtgtagcccagttggccgcttctcttccagcacgttgttcgttggtcccccgcgggttgttcccccctggggggccctgaggagacccccttctcccgtgtcccttcttggcgccccatatgttccccacagtgtgtaaaagggcaccagcccccagtgccacatggggggtagagagggcagagggacatgaagggcgcccctggttgcgcccttctctgccgaagagagcactgcgcgccgtatgcgcctggcggccacatcttgccggagagctgtgcgggctggctccttcttggagcccctggcgttcttccccaccctggttaacgccccggttagcacaccccacacctgattgttgggttcctcgcccaggcgttgtagaggacaatgtatcttgagatatttttctctccctttgtggttttcattttgtgtggttttattttgtggtgtttcttgttcttcccttnttggggggtattccagagtgggctngggccccgtgggcgnagaccaccagctcaccttctgttggccatcctttttgaatacccggagaccccacggctttagacccctgagcggctaaatgaaataaaatggga

SEQ ID NO: 649989 - DNA, 1531 bp, Homo sapiens
tgctctctactcgtgccctcccctcgcttcgttggtaggctgtcttgttgataccatgtgggactgatcagcctacttgttgggtgataccctgctgtgtgctcgtctactacacaacaagactcgttgttgctgtttcacccaccacgcggtggtgggtttctcccccgcccgccacatggtgtggtatgcgcacaagccaccacactgttgcgtgtcggcgatcacacgcgggaagtggttactgccccccgccacctacattttgggggagggcccctgctcttcgtagatgctcgccccgccccggaggagttgttttctcgttcggaccagctgttccagatgtcccttttgtcctggtggccaaagaggtcgtgttttataccccgggtgggggaccccaactcccctcgcccaaaggttttgcctctgtgtgcttcacactttggtgttctctctgaaggggcccccccgtctttccacctgccccccctggaggggaaaaggggatcaccccgaccctccacgaccacgcttgttccggaggagaaatcttttccccctcgggaaggaccccgaccattgggggcctgctgtagaaagggagtgtgtgcccccccccgggcccacttttcacgtttcagcctcttgtacacccgcccctttttgtgcacccgggagcactcctcgcgcgcggtgaggacccccgtggtgtgcaccctcacaccacacttccaccacgcgtgtccacgccccacgcccccaccactgtgtgagagacacacggggaacacacacgcgagcacacggcgcgtgttagtagtgtgtcccccgcgcttcgcgacacaccccctccacagagagtgggtgagagattagagagttgtgggagcaccccgcccatcttgaagtttcttccgcgagcacacatccacggccacaggcgcacacactttgagaggccgctctggggggctgtccacgcccactgtgagcccccacgcgagactccacgccacttgagtggggaccacactggggattgggggggggacacacccacacaccctcttccgccgccacagttctgtctcactaaggccttcttcccacgagaagagagagtctcggcccacagagacctctggcgtggtcaccgccccttggtggtggccaccgggaagaaggccccccggcccacagagatggcccccgggccggcccacaggtccatctactcctgtgagaaggagcgcacagggagagcctccccgagagggaacacccgagccctccagttgccggggtggaaaggctcttttcgcccttgtcccacccagggctccaacccaagccctcgccagtgtgtcccccgctccggggaagggccccggcccgacaccggcgccagggagaacccagtcctgtcggctgggcccttggacggctgtccagttttgcaccatgatgttcctattgtgaactctccgagacccttaaaaagaagtttactgcccaagtgaataat

SEQ ID NO: 649990 - DNA, 763 bp, Homo sapiens
ggacagagtgctatggatcttaatgacagcaataatgtgattcgtgcagtagtgctgaaacaggagaatacaatgatacagaactaaccaaactaatggtgcagaacgtatgacaggttactcatgcactgatgtagtgagatgatgccaggagagatcattaaagaaaatttgagtacagaatactaataatcaattatgtatgcagtctcatgctctcgacataatggcgggcagaagacatctattttagaattctcttgtatctattacccttgtcgagttgaggcaaattgactactgcaatatgaactatgaccactgtgagagagtatagaaaagtacactctagacatctcagacgttccttgggtatatttgaactctgaaaacgacgttattcgcacggacatgttctaggcaactggtctctgggagacacctcagactggacagaggcagctgcatggccgtgccttgtgcaggcctggtccagaagaccagagccgtccagacgggagggccttggttggttaacagggtgggacagttctcaatcgaattctgcatcgtgattataaattcttcttttaaacaattcaggaggaaatgcataacaaaagagaaagacacatttaacaaatagttttggattaattaaaaccggtggaaattgactgcatgtttcccaaaacaaattgagaacatgtaatatgggataaaagaaatgctgagagtaaagtaatatgacgtgtggatgagg

SEQ ID NO: 649991 - DNA, 246 bp, Homo sapiens
  misc_feature (21)..(21): n is a, c, g, or t
  misc_feature (23)..(23): n is a, c, g, or t
  misc_feature (69)..(69): n is a, c, g, or t
  misc_feature (104)..(104): n is a, c, g, or t
  misc_feature (165)..(165): n is a, c, g, or t
ctcgtgcaatttcggcagagngngttacacgcaccaagacagaccatatccaggggtgtctaatttttnggcttccctgggccacgttggaagaagaataatgntcctggaccacacacaaaatacactaacactaatgatagcttgtgaggtaaaaaaaaaaantcacaagaaaatctcataatgttttaagaaagtttatgaatctgtattaggccgcattcaaagccatcctgggctgcatgt

SEQ ID NO: 649992 - DNA, 662 bp, Homo sapiens
gcaccccccatttggccccgagagacgagaaaattcttggagaccggtcctcctgtggagtaacaggagttcagcgaggtcctaactaggcaggaggaactgggcaaacgagaggaggaacaataatatgtactaatagtcaataatagagcagagggggaggaggaaccgcaacaagagatgtcgtgggaacccccggcatctggggctggccgggcttccaaagcgcagcctgtcacgcagggttccggtccaccacaggcgggaacctggctgttaaggggggccccaagaggtgccacccacgaggcgcagagtctccacacagcaggcaatcggcaccccacaaccggccttttagagtcaggtccaccatgggggacggcccagcgtgggtgggggtccagagggtcccgaatgggggccgtgccctttgccccagaccgtgcactcttcaacccaggcacagtccggctctggggacacaggggcctccccggccaacagccccaggggcctctgagggtttgaggtccccaaccctgttgccaagaggaccttgtccccagcgtccctcctcccaggctggtttgagtgtgcgtgcgtttgtccgagcttttatttcatcattgccaataattaattaaggaaggccagtttta

SEQ ID NO: 649993 - DNA, 500 bp, Homo sapiens
tgtccccatagttggaaggcagtgtggcaaagggaatatagatctctgtgcgtatcatttcttacctctgcatataaaactacagttgtctctaaaggtttaatttagaaagtatttaacgaaaaagaaccccaggatctaacacgatcagagtcagataatcacaattgctaattaaaaagcacttatgtatttggtgattttctgaaattctggctcagtttcgttatgatatggagccatgtgggtccatgatgagtgagtccctgctgcattggtatatgattgacttttaccctcatgtgcttctaatttgggatgttcttcactgtgtgccctttgagtgtctcttgcctctggtttcttgtttgactaaaaaaccagttctttaagatgacagttccaatggtctttgctggagttcggataatctttcatgatttactactttattcacgtgtgttttcacctctgggccatggtttctagagcactacact

SEQ ID NO: 649994 - DNA, 262 bp, Homo sapiens
  misc_feature (1)..(1): n is a, c, g, or t
nctttggtccgagagaaattagttgtcagctcagcaaagatacaacctggtataagaacttcagcgagcttgggagactgacagatcagatgccactagaaaaggggtgccaccctgtaaataggtttgatttctgtcaaagtgttctctgagcctcactgggatagaagccttcctactgtgaggtcatactatttcaatttttggaaacctatgcagtctctgaccttggtgaagatttctaatttctctcggaccaatg

SEQ ID NO: 649995 - DNA, 1303 bp, Homo sapiens
tcttgcaggaagcacaaaccacaggacggcttctcccgggcgggcaaagaccacacaacggccgacaacaacgaggggggctgtcttttctttcctattgaagaggggggggccccacagacgtcggtgggtgaagcccttttttggagagggggtaataaaacctccccgccacgagaaattaaaagaggttgtgttttagtgtgttgcgctgcctcgttgtgggcaaaaaagagaatatcaagaggagggaatgtttgaaaaagtgcatccgcagaccttagaccgtgttgtgagagagaaatgatatatggttcacaaaataaaggggtttaaagcctaaaaaggaatgattttgtggcttcttataggccgcttctaaaaagtgttctgtttaaaacaccgggtagaaaaatttttttaaaaatagagggctcttataaaggagatttctcctaaaaaggagagaggagacagtatattttggagtaaagagagcttcttatagagagagagtgtaatgccactcgagagggagaagggagacacagaggagtataaaaagaggttttttctttatagaaacacactctgagccggcgagaggtgctagagagagtgtagaagcttttctctctcaatcgggagagtgataaaagagaagatgggtatatgtgtatagaaagagagagaaattttgtgagagagagagaaagggagacttatacacagagaggcctccccgagaatgtataatacaccacacatatagagaaggcggcacaaataggctttgtatagagattataaaaatagagaagggtggagacttataaccccaggctctataaagtgttatagtttataaaagtttgtaaggtggagattataaaataaattttgagaagggcgaattctctcttataaaaagagagagattataaacccgagaagggtgagattataagagagcccctgagaaatccactgaacgccacgggagagaaattggcgctcacatttataaagcgctatgttataacgccacatttatctataaacgccacgagccgcagaaaagtggagaaagaattaaattgggaggtggtaaggagtgaaacacaatttggaagaaagaatatagaaagtttgaaagtggagaaaactggagaagaacacagaaagtatcgggagaaggcgaaagaaaaagaaatatagaagaaaaatataggggaattagaagataaaaacataacttttagaagaaaaaagataaatttaaaccctgaaaagtaggaagcca

SEQ ID NO: 649996 - DNA, 409 bp, Homo sapiens
tgccacatctctcgattgatacaggattggctgtgcttctatatgcttccaaccagtaagtggtctccaagggtgatgtgtgagtatgacctagtcttctttgttacgacatcctatggctgatttgtgaccatgctagaggctgcactgtatgaagacctcgactaccattcacaaggtgcagttgagagacttttggacagtacacagtgtcaacaaatgtcacaggctccgaccaagtataaccacgtccttggaaaatccttccattatagcggatttcaaaacatcctaacttgctgtaaaattccagaattctttgatcatctggtctcacttcaccgaaagctccccgggagccaattagccttcagtgaagacaggaggcgagccatcatgcttttgggca

SEQ ID NO: 649997 - DNA, 386 bp, Homo sapiens
  misc_feature (35)..(35): n is a, c, g, or t
  misc_feature (65)..(65): n is a, c, g, or t
  misc_feature (68)..(68): n is a, c, g, or t
  misc_feature (70)..(70): n is a, c, g, or t
  misc_feature (100)..(100): n is a, c, g, or t
  misc_feature (114)..(114): n is a, c, g, or t
  misc_feature (120)..(120): n is a, c, g, or t
  misc_feature (143)..(143): n is a, c, g, or t
  misc_feature (160)..(160): n is a, c, g, or t
  misc_feature (183)..(183): n is a, c, g, or t
  misc_feature (195)..(195): n is a, c, g, or t
  misc_feature (201)..(201): n is a, c, g, or t
  misc_feature (204)..(207): n is a, c, g, or t
  misc_feature (212)..(212): n is a, c, g, or t
  misc_feature (215)..(216): n is a, c, g, or t
  misc_feature (221)..(221): n is a, c, g, or t
  misc_feature (223)..(223): n is a, c, g, or t
  misc_feature (226)..(226): n is a, c, g, or t
  misc_feature (241)..(241): n is a, c, g, or t
  misc_feature (245)..(246): n is a, c, g, or t
  misc_feature (251)..(252): n is a, c, g, or t
  misc_feature (255)..(255): n is a, c, g, or t
  misc_feature (259)..(259): n is a, c, g, or t
  misc_feature (264)..(264): n is a, c, g, or t
  misc_feature (275)..(278): n is a, c, g, or t
  misc_feature (289)..(290): n is a, c, g, or t
  misc_feature (294)..(294): n is a, c, g, or t
  misc_feature (335)..(335): n is a, c, g, or t
  misc_feature (340)..(340): n is a, c, g, or t
  misc_feature (342)..(342): n is a, c, g, or t
  misc_feature (345)..(345): n is a, c, g, or t
  misc_feature (354)..(354): n is a, c, g, or t
  misc_feature (360)..(360): n is a, c, g, or t
  misc_feature (366)..(366): n is a, c, g, or t
  misc_feature (378)..(378): n is a, c, g, or t
ttttttttgaatttggatattttggttaggttgtnccaactttcactttttttaccattccatgnttntntttgggtaatcccttttaatggtgaacttnaggtcacaacagtnactatnagttcaactactccaaggtttcngaagacaatggcttctncacccaagcaggttgtatatganttccaaattggncctggnttnnnnctggnggnnttttngnttngcgctgttggggggntttnnggggnnggntttngggtngggtggttttnnnnagcacattggnngggngggatttgttctgcgtcacgatcagactgttacattttgcnatcancngcntggggtgcnaaaaanaaaatntgcgttggggcnctttgttg

SEQ ID NO: 649998 - DNA, 592 bp, Homo sapiens
  misc_feature (109)..(109): n is a, c, g, or t
acacaaaggcagcggcgaagtaaagccttggatgacttctacaaaatgttacagcacgagcccgaccgagcgttctatggactcaagcaggtggagaggccaacgaagnccttggccatagacactttgctcatcagtgatgagctcttccggcatcaggatgtggccacccggagccggtatgtcaggctggtggacagtgtgaaggagaatgcgggcaccgtaaggatattctctagtctccatgtgtcgggggaacagctgggccagctgacgggagtagccgccattctccgcttcccagtgccagaactttctgaccaagaggatgattcaagttctgaagaggattaagactggcagttaatagtttcgtccctggttttctcagcatccttgcaggtgccagagcagcacttgttgatcctgctggggtttcttgtgtgttgggttcacattaagtgttttatgatttgggcggcaggacatgtattcaaattaaataaatcacgacgatgtccaagcttatgttttctagttcgagttactgttttttaaatacctggaaacagcaacttgtgtagttaagaga

SEQ ID NO: 649999 - DNA, 179 bp, Homo sapiens
taggctgtggacgacggtggatgatgcataaactgaaagaggtccagagccgctctagatgtcatagttttcgacctgcaggatcgtggtgagccagccgacttcattagagaagcccatggacagcatctgggagagggtctgaatcagccaccactgagcctctggcggaagatgtg

SEQ ID NO: 650000 - DNA, 523 bp, Homo sapiens
gaagactatgaatcttttgatagcatttccttggggttttgggagagaaatttacatcttgcagatatctgatgaaactctcatgtgaccaaaaagactgcaaataagagtttgataaacagaaaacagcatgacatatagtttctgggtaactctttgaacttcttaggtacagcatatactgtccttcacatcacctgcgtgctatttgtgagatatctgagcttattcgaacacgccacagcggaatcatgtggaacgtgagctagctgggtgacgggcatgcaagctatgttagccactctgtcctcagtttccctagataatacaatgaagctggagtagtcagcgggtagtggtcctcacgatcttttacatcttatagtatggaatgcggacacggatttgctagactttcatttttctgtgtaagtacattaggaatcaataactactgcctactattaccatctttcatgaaataaaatattttctagcctgaaataactggcgacgacatacc

SEQ ID NO: 650001 - DNA, 161 bp, Homo sapiens
  misc_feature (1)..(1): n is a, c, g, or t
  misc_feature (97)..(97): n is a, c, g, or t
nattcggcacaggctaacaataaaatataatgcccatataaggaaaaactataaagttatttatttatttatttatttatttatttatttatttatntgagatggagtttcgcactgtcacccaggctagagtgcagttgcgtgatctcggctcactggcc

SEQ ID NO: 650002 - DNA, 434 bp, Homo sapiens
  misc_feature (28)..(28): n is a, c, g, or t
  misc_feature (34)..(34): n is a, c, g, or t
  misc_feature (121)..(121): n is a, c, g, or t
  misc_feature (178)..(178): n is a, c, g, or t
  misc_feature (199)..(199): n is a, c, g, or t
  misc_feature (249)..(249): n is a, c, g, or t
tttcacactgcagctgaagttcattacntgaagnacgcctcatcatttcattccttggctccaaaccttctgctgcctctaagataaaagctcaacttcttaacagtgtacagtgtgcacnttccaacctttttatctgttctctccaccttcagtttagcgtcatccaaaaacacanccttgcaaagctttgtactcngcaccccagatgatctccaggcagctcagatctctttcctgcttttgccntgcactgttcccgggacttcctctttaatgtagcactcagctccccagccattctgtccatccttcagagcaaccattttaatgaattggtttttgaatcccaaaaaggttctgccatgaagtggccagtcatcacggtagatggcgtatgttttggctgatttttaaataaaatgaaacccata

SEQ ID NO: 650003 - DNA, 526 bp, Homo sapiens
cgggatagtctagagatcccgtgtcatcccccttcgtcaggaggcagaggtttagtgagccaagattgtgccactgcactccagtctgggtgacagagcgagacctggtcttaacaaaaaagaagacatgtggctggccgcagtggctcacgcctgtaaccccaacattgtggggggacgaggctggtggatcccttcaggtcaggagttcgagaccagcctggctaatgtggcaaaaccctgtctctactaaaaaaaaaaaattacaaaaattagctgggtctgggggtgcgtgcctaataatcccagctacttgggaggctgaggcatgagaatcacttgaacccaggaggttgaggctgcagtgagtcaagactgcactccagccggggtgacagggcaaaactgtctcaaaaaaaaagaagacttgtgggcaagaagtgtggggggggtgatttccctaattacccaaacctagaattgcctcagtgcccatcattagcaggctggataaggacgtagtggt

SEQ ID NO: 650004 - DNA, 185 bp, Homo sapiens
atgtcatgagaactgtgcctatcgctcgaccgtgagtgaccaacagaggagggaaggcaagctcaggtggccgctccctcagggcatccaggagtctctgcacactctccccctggaggatccagagagaagttgtcaagcatggaaccctgaagattctacagcaggatatccagtggaatttc

SEQ ID NO: 650005 - DNA, 623 bp, Homo sapiens
  misc_feature (29)..(29): n is a, c, g, or t
gctagcgaatatgtatagccggcccgggntgtatttcgtcacggggctcgtcatgtactggtgacacagggccctggcccgttcaacttcccagcgaaagcctcggcctaatgcagaatgtctacagatacttgtggaatgcagagaaaggtgcaacattccttagtgatgctgagatcatccagttagtcaactgctaagcatatcccagcctacaagttggaaacgtctgatggacaactcagtgagcgtggtgtatcgtattcgccgacagttactttccaagaagcttacagaaccttcttctctccaggtacctagccttacagggattataattacgtccttgcgtgcatgtgcgcagcttgttgtgcagcaatgttattggatactatgcccatccctgttggagtggcaggacccctttgcttgagatgcacaaaatgcaatttcaggttgccaactggcaagcaacagtaaggtttgtcttgttggccagcaccaatagtaggctgcagcagcaatagcgtcttgtgctggaggtagccagtcagtccgcagtccttgccagactgggactgactcgtggacccagttgtgcgtcttccacgtgcttgtgactc

SEQ ID NO: 650006 - DNA, 261 bp, Homo sapiens
cacggagttcctgtacaacctgtactcatcagagggaagggcgtcttcgacctgcaggaccaatgtcctgggccacctgcagcagggtggcgctacgaacccctttgaacggaactatgggaccagctgtggtgaaggccagctgtggttgtcggaaaacctggcggaggtaccggaaggcggtggttgccaagccccaaaccggcggaatcgctgaaaaaggggggctaccggttgcacaaaacgttttacctgcggatg

SEQ ID NO: 650007 - DNA, 1588 bp, Homo sapiens
  misc_feature (1311)..(1311): n is a, c, g, or t
gcccaagattcctacatctggacgcatgacggccgcgtgtgccagcaggaggtcccgcgggagtccgcttgcctgggcctctggagactcgtgggaagctccgcggatcggcttcctgcggaggcgttgcaggcccgctgcgcatcctggggtgcccgttggatctggttgccagtaggaaccgggcgcctggggggcctcagggccggcgggacccctcgctggacgtggccaaaggggacaccgcatggggaatagatgcgtaggctagcgcaatggtctccccgatgctagcaccaacaagctttcgagggacaccgccctatgcgttgcgaccgtgaacccactcgcacaagagattgctagacgttcctcgcgtcgaggaagcggacgcaattctgagtccttcccggtgtccatgcaccacctcgcccctccaatgtgacctttgggacaattcaagcacgaagttcccttgtcgcactgttgtccattttacccccttgcgagcgcgacgccctcctccttcccaagaaggggccctcgtaccgcgagttctttaggcagacggagtttcacctcgcccaccacgagtggcccctgtgaaagaagcaagaaacaccccccgtgggcgccgttggggcgcacagagcgacaccccccagggtggttatcctgaggggccccctatataggcctttcggagcttaatattcgctggaggacaaacgtaaaacaccatccgagggtcgccaatcgcgtttcgcggcggcctacattagcgccgccctggatatttaggtgcttttgcgcggtcccccctagcggcggcaccgtggtttgtggggctccctccggggcccctgaaattcactcgcctaggcgttgggggcccccacatttctgaacttacgccatggttgcccccaacaccggtctgtgccattcttgcggacttccggaaatcctcccccccgggctcgccttcgggccaagttgcgggcgaccgttaaaccctgcggcggaagcggcggaggaggcccattttggggcactcgccgggggggggttaccaccggtttccccccacacgaaacaccacttctgtgtggggtgaccaccgccggttttgtgcccttaccaccgtgggggttaacgcaccccgggtgcgcgccccgcgccggttaattgcgccaagtcggcctctttcgaatttcgttttgggtgccctttctggagggctgtgatgggcctggccaacccctctcctttatggttaaccttctccggttgggtgccacaccccgtccntagggcggccgaaggcccttggcgcatctcgggtgggtggaccttccccggctttttaaattcccccagagcggcgaattcgccaattcgtgtttggggcgccacctttctcccccggccaagaagacgggtcccgattaggcatctattggcgagacttccggacatattttgttggtcccctatggcggcgtttgaggataccaccgcagggtgggcacaaccgtatagtgactactattttggggccggcgccttcccccaccaggtttcccgc

SEQ ID NO: 650008 - DNA, 171 bp, Homo sapiens
ttcgtctttataaaagacaaaaaacaataaacgtagctgggcatggtggtgtgtgcctgtagtcccagctagtctggaggttgaggtgagatgatcgcctgggcctgggaggtcgaggctgcagggagatgtgatggcaccactgcactccattctgggtgaccctgtctc

SEQ ID NO: 650009 - DNA, 468 bp, Homo sapiens
  misc_feature (3)..(3): n is a, c, g, or t
  misc_feature (85)..(85): n is a, c, g, or t
  misc_feature (100)..(100): n is a, c, g, or t
  misc_feature (117)..(117): n is a, c, g, or t
  misc_feature (123)..(123): n is a, c, g, or t
tgnggggccccatgtcttattcaccaacacttccattactctggagtccagaggcgagatgattttctctcagttctaggacttnccagaggtacatagngaaaattcatctgaaancaaaangaaccaaaataaataaaataaaaacacataaaacaaaatggataaaaatgacatgtttattattatgataggtgattttgacatatttcttctacttattgaagatcaagtagcagaaaagtggagactacaaattacttcagagctgggcatggtaatgctcaggctcaaaaaccaacaagtaacaaaactcttaaaaactaaaaaccatttatttgatgtaatatacatgcatgagttgagtgttctacttaatgttagaaaaacaaatccaaagaaaatagaattagtaaagctgtaagagtcaaattaatgaactaggaatgattgcataggagagaatta

SEQ ID NO: 650010 - DNA, 493 bp, Homo sapiens
  misc_feature (20)..(20): n is a, c, g, or t
  misc_feature (40)..(40): n is a, c, g, or t
  misc_feature (43)..(43): n is a, c, g, or t
  misc_feature (49)..(49): n is a, c, g, or t
  misc_feature (51)..(51): n is a, c, g, or t
  misc_feature (55)..(55): n is a, c, g, or t
  misc_feature (62)..(62): n is a, c, g, or t
  misc_feature (67)..(67): n is a, c, g, or t
  misc_feature (76)..(76): n is a, c, g, or t
  misc_feature (102)..(102): n is a, c, g, or t
  misc_feature (112)..(112): n is a, c, g, or t
  misc_feature (122)..(122): n is a, c, g, or t
  misc_feature (133)..(133): n is a, c, g, or t
  misc_feature (135)..(135): n is a, c, g, or t
  misc_feature (146)..(146): n is a, c, g, or t
  misc_feature (196)..(196): n is a, c, g, or t
  misc_feature (198)..(198): n is a, c, g, or t
  misc_feature (239)..(239): n is a, c, g, or t
  misc_feature (248)..(248): n is a, c, g, or t
  misc_feature (262)..(262): n is a, c, g, or t
  misc_feature (274)..(274): n is a, c, g, or t
  misc_feature (276)..(276): n is a, c, g, or t
  misc_feature (285)..(285): n is a, c, g, or t
  misc_feature (290)..(290): n is a, c, g, or t
  misc_feature (293)..(293): n is a, c, g, or t
  misc_feature (297)..(297): n is a, c, g, or t
  misc_feature (333)..(333): n is a, c, g, or t
  misc_feature (365)..(365): n is a, c, g, or t
  misc_feature (393)..(393): n is a, c, g, or t
  misc_feature (444)..(444): n is a, c, g, or t
tggaagcaggtttatttatnaaaaacttgcaattgaatanaanaaacananatanatatgtnttatntatttctanaaatgcacataacatatatttgcctnttgtttaatnttttttccanaaatttattananaagggcatggngggatacctacttattcttcattatgagaacaattaaaggcatttattananaggaaattaacagatcatctgcttctataactttattagcnacattaaanaggcagtgagcaanaatttaaaaacncnccattatanaaaanaanaaanaacaaagtaaaagttaatgttataaaaataaactgntagttagggaaatctaaatgggcatgatcccnttttagaagaccaaatgattaatagggntgtcatgttataatagacaattgtctaattatttctgtgtttttatttagngggtagcagaagttgttcagaagagcagaaatatgtagaaaacatctct

SEQ ID NO: 650011 - DNA, 341 bp, Homo sapiens
gccgagatcatgccacgggactccagcctggcaacagaggtggctccgtctcagaacaaaaaaaaaaaaaaaaaaaaaaaaaaaaatcatattagtttatctcattataaccaatctcatcagaaaagtcttaagtattgagaagttgtcaggctgaaaggcaggtaaaagttttctaaacattctaagtttcacttgaaagcttgaattttatcattggcaacaatgcttttcttgaaatgacgggctcacttattatagttattactattattattattattttgagaatcgcttgaacccaggaggcagaggttgcggtgagccgagatcatgccacg

SEQ ID NO: 650012 - DNA, 362 bp, Homo sapiens
ccaagaattcggaacgaggccgaactttgcgagtctttgtttgggaggctggggcctgacttcgccggggaccgggccgcgggctcggccgtgcgctccggtgcagcggccgaggagccccggcgcccgccaccccgggacacgccctcgcagtcgagcccggaccccgacccggaccccagcgccgccgggcgagggcgggagggggagcgcttaccagatcgtcccgagcgcgccgcggtccaggcgggcacagcgcagggtcaagttcacgtccggcccgcgggctgcccgaggtccccgggcgcggctggggcagcgggaggcgcgggaggccgaggtccgggtggccgccgcggccg

SEQ ID NO: 650013 - DNA, 147 bp, Homo sapiens
attgccttcccgtacttctgtcttccagtttaccacttcaaacttctatcttctccaaattgtatcatccgtaccactcccatattaatctttccattttcgtcatgcgtttatgtaaatgcgattaactacggctttaatatgacg

SEQ ID NO: 650014 - DNA, 494 bp, Homo sapiens
aaccaggtgttcctgttggcaaacgggtgggtttggctttttgcaaagcatcaccccgtcttcccggatcattctgtataagggggtcctgggaggggcagcctacgtgaaccccttccccaacatcgccctggagaccagtgatgagcaccgggagtttccaatgggggccccctgcattttttacccactggggatttccccgtcgggggtccggggtttggctttgcaagaattcctttgcaggctctccttattatgggggtccccaggaagcaggtcacattcccctgtggggaaagggaaaggttaaacccccagggcccccccaaaaaccccccattaattggggtcccccccttcccggcaggtttgggagtagggaaggggttaaaccctgtttcccctgcaggggggcccccccttgtttcccccttggggggtttttttccgggctcaagccttttgaaaaaaagccggttttttccctggga

SEQ ID NO: 650015 - DNA, 184 bp, Homo sapiens
gtggtctatatatctcttcctcacactgttagttactgtgctccccgttagcatgagggctgcgtcccagggctttctcatcttggtcttcctgcacctagcatcaccttggagacctgagctctttgggacagggtgctcatcaatcaaaactggcaacctccagatgaacgctctgggcttc

SEQ ID NO: 650016 - DNA, 349 bp, Homo sapiens
  misc_feature (186)..(186): n is a, c, g, or t
  misc_feature (290)..(290): n is a, c, g, or t
ggccgatgggaaaaaaaaccctattactgcgccacgggttaattgtccaagaccgccacgacgggtaataacgtgcgtaaacgctcaatttttctgggctggcagaagcgtaacaggtcatttaaaggatgcgttccacgcactgttcgtggaactcgttgtgatgacggaatgagaccaggtaangcagcagtttttctctgtcaatttggcgtccacgatactgaatttggagcgaaccccaatctggttgatgggtgatcaggcagtttgatttcagcaggtggctnacaagcgtctcttccactactttttcaccacaggtggcattctccagatagtcagtagt

SEQ ID NO: 650017 - DNA, 170 bp, Homo sapiens
  misc_feature (95)..(95): n is a, c, g, or t
tgcttgtgctataacgtgtaagcgctgtacggtccgaattttgggatcggctgctgcttttctcagcgccgaagccgcgccatgctcgtcctcangaagcgccctgacgtcgggcgctggccctcacgggacgctgggcgcccctcagatgttgcttcatctgtgttttg

SEQ ID NO: 650018 - DNA, 156 bp, Homo sapiens
tcagctttttattggtatggtattggttcgcaaaattaaaaacaattacacatttccaggagaattgacttgcttctgtggacacgtcatcatatttctcatttacttttttacacacttccctgagtcgctgctattgaaacttctaaaactagg

SEQ ID NO: 650019 - DNA, 251 bp, Homo sapiens
gatttgatggatcaaactctatgagatattccagagaactaaacacacagtattcaggttgtgtatgctttctgacacaatgccaactgatgtgttggacgtgacctaaatattcatgagagatccaattcgaattctggtgaaaaaggaagaattgtcccttgaagtaatcaaacagttttatattaatgttgagagagaggaatggaagttggatacactttgtgacttgtacgatacactgaccatta

SEQ ID NO: 650020 - DNA, 396 bp, Homo sapiens
gttgttgtgtcaatgctctgcagtcccacaaggaacgcatagagcacattgagtgtagacatgcaaggccaggcgctacctgattgtatagggaaaggtcatgtggctgtagggaacagcttaccagtcaatgcccaaccttgcaggcctaccttctacagatagtcatctctggcctgccatgttcactgttttctgcacagtcagccaccaaccttatgatgactgactatgcagaaaagaataagccgcatcatcagctgcatgccacaaaactctattcttttaaaggcaggtggttcagtgaatattgtggcaccgaggcatctgagaggcaggtgtgctccggatatgaccattcatttctctggcgcattaattctccctttgttgcta

SEQ ID NO: 650021 - DNA, 678 bp, Homo sapiens
gctgttatcacctctagacggatcccccactaaggatcaactgaagagaaacttacaagtgtcatgaatgtggcaaggttttaactcgaaaatcaaaccttgaacgtcatcatagacttcatactggaaagaaatcttagaagtgtaaatttgcaaggtttttaggcaacagtcaaaccttgcatgtcatcatagactttatactggagagcaacaccttacaaatgtgaagacatgtgcacaaaagttttcaatttcaaatcactccttgaactacatcaggcagcagtcatactgggagagaaaccatacaaatgtaaggtttgtgcacaaggattaggggtgtgcatcacacttggcccaacatactggactccacactggcaaaggcattgtacaagtgtaaatgagtgtggcagcagccttgggtggtcagtcaacaattactcaccatcaagccatccgtggtataaaggaaattgcataatgtatgattgtcacaaagtctacagtaatattacagccattgcaaaacatgggagaatccataatgaaggaggtctaacaagtgtcatgtggcaagtcatacagacatcatacataccttgcagttcattggcgatcttatacaggagagacatcttacaaatgtgatgattgtggcaaggtcttcagtca

SEQ ID NO: 650022 - DNA, 117 bp, Homo sapiens
cgaaataaaatggcatgccttcccccgctgaaataatcagatgagaaatgcatggcgaaataaaataaaactgtggccgactatttaatgaagatgaagggaagcgttatttattgg

SEQ ID NO: 650023 - DNA, 290 bp, Homo sapiens
atctataaagcgatatacagatgaaaatttgagactatttgaacttataaatcatattgatgaaaagatttaagcgcaaactttagggtaaaaattgccaccccccccgtctccaggtgaaccaagggtttgggcctgggaccatttccagcttgaccacagttggtcaccatagggtattcaattaaactctgtgtgcctccacatccacctctgtatatcgggtccagtcccggcccctcccaacctcacaggcatgttgtaagaattaataaggtaacgtgtaaaaa

SEQ ID NO: 650024 - DNA, 277 bp, Homo sapiens
ggacgaagcaccagaaggaagcataagcatccagaaatgattagaaattaaaagttacaagaggccagtgagaacagagcactagtgaattttccaaattttaaatgggatggtgtaccgacaaaaataatggacaaagttagaaaactggctctgatttcctcttaaccacttgaagcactgagatttgatgtttagaccgtaactactttgagttactgctattaattagtaaagtatgagatttccaggtacatgttaggcattagatgagatt

SEQ ID NO: 650025 - DNA, 1106 bp, Homo sapiens
gcttgagagacagaggcaccccggacagagcacgtgaagccactgcaataaatagactcagacatgactgacaaagccccagagccacatgatggaggaggagtgacgaatgagtgagctggacacccaaagctccaacttaactaacgccatccaccacagcaaggtccctgcaacagacgcagcctgctacgggacaatggaccacaacgcattgcatgccgcagcctctcactctcccggtaccgtcgcacactaccggcgtggccttggcgcagtactgggctcctgctgcgctgcacaggagctcctgcctgcgccgccccaagtgctcgggtcggtcgaccccccggggtcttcagcccgctaggctttcgtggtagacggacgctgtctccccggcgtgtgaccctaggacttccaccacaactgcgctagctccttctccctctcgggcgcgacgtccttgcggatgacgcgccccttcgcgccacgccgcggaccagcctcgatgttgcttgccttcctgcgcggtgcaaagggctttcccttggcgcctcattcacgcgcgccttccgccgccccttcctcccaacctcttccaccagcatcgctgcaccatccctggcggcccctcactccgggtcgctccccgcggccctctcgccacgtgttcaccggctctccccatgacccgactccaccccccttaaccccggggcacccttgggggggggttggcacctcggctggggcacttgccttgctggcgcaactgcaacttttcagttggggttctcggcgcccgtcgcctttagctgtggacttccttcggtgcccccttcgcatgcggctgctcacctggcggcttccgccgcccctgctccccccccgcggtctgcaacggggcgcgcggcctcccgtccaccgcggccccccttgcctcgcgcctgcctgcacgccgcctcacggttacccccacggcacgctccaacatgctagcccgtttgctccccatccccggcaccccaatcggaccagtgcgtccacacgaaatccgacgcccttcacgcgttcgatgggcgtgctttgcacacaccctctgg

SEQ ID NO: 650026 - DNA, 226 bp, Homo sapiens
ggcgtgatagaggatccccggtaagacgcggtctgtacctggccgtcgtgagcgctacctttgtgtcccagcatttagggggagaggcggctcttaaccaagaggtgagcgtggaggtggttagtggtgaaattcctaacagggcaggtttaggcatctaaaaagccaacttctccgggccacgcaaagtgggaagatggagttcagcttgtattcggttagcagg

SEQ ID NO: 650027 - DNA, 334 bp, Homo sapiens
  misc_feature (8)..(8): n is a, c, g, or t
  misc_feature (51)..(51): n is a, c, g, or t
  misc_feature (226)..(226): n is a, c, g, or t
  misc_feature (228)..(228): n is a, c, g, or t
  misc_feature (251)..(251): n is a, c, g, or t
  misc_feature (253)..(253): n is a, c, g, or t
  misc_feature (256)..(256): n is a, c, g, or t
  misc_feature (281)..(281): n is a, c, g, or t
acagaagnatcgctatcaccgcccaaggtcagaacaggaccagcacccacnagcggaaggaaattcgcccaggcctgctgagggacaggctcaggggtcctcccaggcaatggaacttgctggttactgcgctcctgggagctaggggcgcctgggtttcccaggtgtgaaggggcagtgccccttggcagggaccggcctctctctgcagcgccacggggttctngnccccccgcggcgggagtaggggntncantccgccgccgcaggggctacaatantccgcgccgtcggggttgcactgcccagaagaacactttcggaacgggggcgt

SEQ ID NO: 650028 - DNA, 186 bp, Homo sapiens
  misc_feature (106)..(106): n is a, c, g, or t
  misc_feature (108)..(109): n is a, c, g, or t
  misc_feature (114)..(114): n is a, c, g, or t
atcgcttctcggccttttggctaagatcaagtgtagtatctgttcatcagtttaatatctgatacgtcctctatccgaggacaatatattaaatggatttttggancnnggagntggaataggagcttgctccgtccactccacgcatcgacctggtattgcagtacctccaggaacggtgcacca

SEQ ID NO: 650029 - DNA, 350 bp, Homo sapiens
cgaagatggatgttaaaatcagttgcccaggataaaatgcaggcaggatctcagctcactgagaaactcgtgcttcccattttcaagtgattctccgtgcctcagcctcccaagtagatgggattacaggtgcgagccaccacgcctggataattttggtattttaagtagagatggggttcaccatgttggccaagatggtcgcaatctcctgacctcatgatccacccgcctcggcctcccaaagtgctgggattccaggcgtaagccattgcacctggccaccaatttcttaaaataggacaatgatgaagttggctgctttgattgactcttctgttcacaaaact

SEQ ID NO: 650030 - DNA, 98 bp, Homo sapiens
  misc_feature (45)..(45): n is a, c, g, or t
ttcaagcttctaacgatgtacggggacatgggaatttggcctttnttgattaaattccgtgctccccctgcaaataaagcctttttacacatctctca

SEQ ID NO: 650031 - DNA, 1616 bp, Homo sapiens
  misc_feature (325)..(325): n is a, c, g, or t
tggaaacggagtggtcccctctgtcccccaggtgggagtgcaggggggcgctcatccggggctcacgggcaactctccgcggctctccccgagtttcagcgcctatttctccgcgggctcttaagtctctcccccagacaggcggggaatctaacgagggcgcccgccacgcggcgcccgcggttaaatattttttgggtgatattttaagataaaaaagcgggtgttcacactcgcggggtctctccgaatctctctctcgtagagactctctctgtgagtatccgcgcgccgcgcgctctcgacgagcgctctccccaaccanatgagaaatatctctcgtgaaacccctagtcgtgtgtgtgaaagtagtgcggagcgcggacacacacagagacgccacatatatatctctctctatctactttctcacaaagacgacaatagagtggggagaacacatatatactcgcgcggtgaatatctctttattctctctcagcagactagagtgtgacacacaatactcacctctgtgagagaaaagagagagatatagtcgcgccaccacctgtggggggagtggggcgctcctccggaaaatatgtggggcgcctcctctcttccccgcgtgggggcgcgtgtgggaggcaggtctctcttatataatgaggtcacagaggtgtgtgagccaaacagatatgaagaatataaaaaatctcccagaggtctctcccccaatataaaagcgtgtctccacagagcgcgttatatcaacgggaggaagggggaggaacatatctctcgcgcgcgcctatataatataaaaactttgtggggctccagaaccgcgggtgggctctccctcaaaaacgcgcgtgtgtctctcgcgtgagatctacagacagtgtgtatacctacacatggtgacaccacatggggggtgggccccaaaaacactttctcatatataaggcaaaattcttacacaatctttagagcggccctgtaggagagcacccctggtgggggggccccctgtgtggagaatctcttcgcgccctgttgtggcgtctcctcacacaaatagttgtgcccaattggtggaaggacaacacattccaatattataaccccccctgggggtgaaaaggcataccatttatgaaagcggccttcgttgtgaacacccccaaaaaacactaataattatcgacgacacaaacttcccctctcccccccctcgttgtttgatgataaaaaaacactccctctacaaaataaaaaaacacgttggggagcggcgacagagagggaggaccagatggaggaggcggagcacacacaaaggggggatccctaccaaacccaacggggctggggtgagatggtgttctccccccccgggggagaaacccacaaggtcttttcaaacaatttccaaaaaaaacaaaaaacaataagagaaacaacacacactaacaacactacaacacgcacctactacaatcaaaacacatacacgacacacaaaaaccagcaaacaacacacagtacgacaccacaactattcgagcacgagaaaaacaacaatcaaacaacgagacaactaagat

SEQ ID NO: 650032 - DNA, 148 bp, Homo sapiens
  misc_feature (11)..(12): n is a, c, g, or t
  misc_feature (112)..(113): n is a, c, g, or t
gtgaagcaaanntgcgacagacagctcccagaggcgaggggtgcgtgtgcgtccgcttctcacctcaggtctccttcggccccgctgccctccctcgcggcatgggtgacanntgggtcggtccgtcgcgggctgcctggggtgcgag

SEQ ID NO: 650033 - DNA, 111 bp, Homo sapiens
tcctcgggaggaccttctcatttcccctgagtgagaaggagcctccggagggctttgagcagggtagggttctgatctgttggatattaaataaagatccccccaggaaca

SEQ ID NO: 650034 - DNA, 751 bp, Homo sapiens
tatgtgttgccgtccaggtaaaggcttcctaaaaacgtgtgaaaacgtaggcttggattaaggcgacagcgattcctaggatagccagtaaaattaaaattgtgaagataataagtgtaaagggaaggtataatggttcgatattggctagggtggccgctcccaattaggtcgcactgagtagtgtgcgcctagcagtacatgttacgcggttagagcgtacggccagggctatgggttcagaatagagtagcgctagatggttccgataatacctagtatggggataaggggtgtaggatgtcgcccttgttggctacaaaaggtgcgcgctagggcattttaaactcttagagcgaaacgcctataactccactgcccccgcctcataaggggatgcgccagtggctaggtattatagatagcttgggctggtccggcggtaccatgacgtgacggccagagagcccggagaaagcgtatcagtcgtgtggcgcattcaacacatggattacagcgagtccccaagcatcatcaacgaagactcccagcgtccccgcccccttaaagggagagaagaaactaaacgcggaaacacctcagaggcacggaacggctcacccgtgcgaaataacagcccattggatcaggggggggcagcaacaaaccccccgatgcgtggaccgcagacaatttcggggagagagggggacccccaaaaacaggcgggaacacaaacaaaccaccagcc

SEQ ID NO: 650035 - DNA, 542 bp, Homo sapiens
ctttttctttttttctcaaaaaataaaattatttgggtgggggggactaaaaccctaaaaaaatttttctaaaacataaaaaaatcccccctttttaaaaaaaaagcccaggatttgttttttccggggttttttttttaaaaagggttttccccaatgggagggggaaaaaattggggtttgttaggattttttttcaagagccaatccgttggccaaatttaaataaaggagaaaactttttttttcttggatccggaaatttgaattgtgtaagatggcaatttttcccaaagcattttacagattcgggggcctttttgccaaagggccaacaagtttttttggaaaaagggaaagccacccctcaaattctttttgaatttgggggggggttttgaggggcccaaacaattttgaaaaaagaaaaaaggggggagggctggcttgggcctctaaaatttaaaaccctttttacaaaaagcccagggagccacgcccgggggggggaatgaccatccttatatgcaaacactggcacg

SEQ ID NO: 650036 - DNA, 899 bp, Homo sapiens
  misc_feature (405)..(405): n is a, c, g, or t
aagagtgtctccgctgcgcgtgtactggtggggatagaacaaagatttgttacgctagtatcatagggtggtagtgctaatcgaatcccttctttccactcgcgatcgcttcattcccttgtcactcgagatagtgcgttgatcttcacttatgagagtcatctatgtagtcgtagtgaatattagtgtcacattcagagtcccgccagatttttatacgacctgagtgttccaagtagtcttcgctgtgctaacgctgggtaaccttactcgcatgaaggggtgaagtcactggatgtctcaagagttgaccgcgtcgcaaatagcaagtagccaaagccgttgccaaatgccacccataaatcaattgggcccgtttatttatgacgactttatttattctanatatgactttctagtagtattgtatatatattgggtcgtctgcttcgccttgtatggttctcttccttgtttttgtaatagttgaaaacgatgatataattattataagtagactataagtatatttagtaagtatatattattagcttaaaagtgtatttagtgtaggggcatttttaagagtaaacaatctgagtgtatacagaacaggaacaacaaggaaactaaaaaagggacatgtggatgcgggatctgtgccgcacgaggagtgtgtctcaggaagccattgttttgaggtgtcgtcgaccctgaagcacaggcataccttagaccttctgcaaccatgacgtctactcgcagataggacaaccgggggacctcacaataggagtctagtatcactctacaccctatataaacaactcacgtggggcctgcagaagctttgtgaaacacaggctcactattgaattgctggggactcttaaggggat

SEQ ID NO: 650037 - DNA, 182 bp, Homo sapiens
  misc_feature (1)..(1): n is a, c, g, or t
  misc_feature (115)..(115): n is a, c, g, or t
  misc_feature (129)..(129): n is a, c, g, or t
naagaagtatgagtcacatgtggtacccgaggagttattcgtaggcttttcagaacttctgtagtgtgtggatgtaggctgtttcttgatgattaggtttcaatttgtctacgantaactcctccgggnatccgtgcacgttaacgattactaggactatgcagaaaccaggccgacgaaaa

SEQ ID NO: 650038 - DNA, 394 bp, Homo sapiens
  misc_feature (30)..(30): n is a, c, g, or t
  misc_feature (37)..(37): n is a, c, g, or t
  misc_feature (91)..(91): n is a, c, g, or t
aagccacatgaaataatccctgttagcttncctgggngaaccttacaacaagagcaaaaccccttatgcaatgaaagaaaaacaaaagcantgtcagaagacagcagaacaggccgggcgcgggtggtcacgcctgtaatcccagcactttgggaggctgagccaggtggatcagctgaggtcaggagttcgagaccagcctggccaacacggtgaaatccccatctctattaaaaatacaaaaattagccatccatggcagtgtgcgcctataatcccagctactcgggaggctgaggcaggagaatcacttgaacccgggaggtggaggttgtagtgagcccagatcacgccactgcactccagcctgggtgacagagcgagactccatctc

SEQ ID NO: 650039 - DNA, 1035 bp, Homo sapiens
  misc_feature (1)..(1): n is a, c, g, or t
  misc_feature (313)..(313): n is a, c, g, or t
  misc_feature (625)..(625): n is a, c, g, or t
  misc_feature (690)..(690): n is a, c, g, or t
nggccaaatgtcacccccctggagagtggacacggaacaggtcaattcccctccccagaaaggacgcgggggacacaaaacacttgccgggaagagccgcccggtttgttctccgccccccccgttttgtctcgcggcgtacaaacatttgcccagagcgggcacgcaagacgctctctcttctcagtgtagttagaccggccgcaccacacacaatctgtggtggagacacacccctcttgtgtaggggagcgcagataccccctaactcctcacagcgtagcgccagagcgccccacatacccctttggcnagacacaaagagggggttacatagtggggggcgcacacacccccgagagacaaaggatggagcacacgtggcgccccaacccaaaagagccactgggggcccccccttgggggggcgctgtctcgtccctggggcgcaatagacacatactttctctccaccagagaaatttctttgggcggtttttataacacccacacagtgttctccatctcggagaaagcccctctcctccagagtagagtttacatcttgctgtccatgtgagagacacagaattcttgtggcgtcttccaaagacaccagaggaantagaggtgtggcacccagggagaacacccacccacagaatgtctccgacccacctctgggggtcnttgtggagatgtggacacgttcaaatttggtctcagcgccacccagacgtgtctccggcgcaccctaccagaagaaaaaggtttctcacagagtttggccaatttaatctcctttgtatagatgggattgtgcctgcctggttagcccttagatttctcagaggcgtttacaacagacttctgccgttaatatctctcattgggatttagggatgcacccaacaccacgggtggttattctcccccccccaaatttgggtttttggatttcaagtagaacaaaaaaaaatggggaataataggggaaattatttatagcgatggaaaaaaacccgggggggggga

SEQ ID NO: 650040 - DNA, 254 bp, Homo sapiens
tacccccaattttccaatcccccgttggagaatggccgttaaccttagccggggctttatttttcttcccaaaccgccgaagggcctccttaaagctttttttttggggaaaaagctgttctcccttaaacgaagaagaaagggccgaagaaaagtgggcccccttagaaaccgagaaaaccgaaataaccccccgggactgctttttcttttcccgctgggggctgctaataaaaggggttttttttgctgga

SEQ ID NO: 650041 - DNA, 206 bp, Homo sapiens
cagtgagaatcaatagtgaccaaaagtatcagacttctccaacttgaggagagatacggctctgggaaatcatggacatgtctttcgaccttgtacgaaacagaaacctacgaaacgtctgggcagggacagttcttcacggcatcttcagcaacagagacagcgaatatccggcaggagattagcctcatgaactgcctccacca

SEQ ID NO: 650042 - DNA, 799 bp, Homo sapiens
cgatgtaatttttttccaagaaagcacaccccctggctttttcactcaaggtgcacttttggcacacactcaaatgtttggagaacgttatattaaaaccgctctcgcaccaacatatattgtatcgcaaactccctcacatagcagatggcagcgaaaaaataattcccccccacctccacgtgtgtttttatattccacacatcagttacatatacattacccgcgtgttattctttctcgcagagtaccaagtttctatcaatgtctgttttaccctcgctttctttaccaaaccaccccctttgttcgttcatcattcctttgaatttatgtcccactcctcccacgcatgttcatccacgtatttcattgtcaacacatataccacactctgtaggaagtgacgacttatgtttatattaatacgcacacacctcacacacactctcttattgtccccatctgtatacaaattcattgatgtcatatgtcacactatatactctcagtgacaagaagacttctccacacatatatgagacgcacacaatcaccacccccgcacacacatttatttagggaaactcaccacacactatttggagagaccacctctccaggtggccagcggtacatacatcggcgctcaaacgcctcgtaatccccagcaccctcgaggcggagacacacagagccacaacatgccatgtttggaaggagcacatgaagcatagcagcccccaccgaggcaaccaccatgaggggagccccctctcctgtcccacagaaaacagag

SEQ ID NO: 650043 - DNA, 901 bp, Homo sapiens
tcctattccgagctagcagagagtgtgaatatacgcatctgagtgctgtgcgtcgtgtacaggtgacgcggttaccctgggtgcccatacaggcgatttggaacacgattgtggacagtaagtactatgtgctaaatccggttgtccttagcgggactaatagctaatgggggtcataacacacgggtgaggcttgctcaagagagtgtgggcgcacaaacaaataggttggttgttgttaacgcagagtatcgcttgcgctaccttgtgagtgtacattgtgacacctgttctttgatgtggtgtcgcggcaacacacgagttgtagaacctgtcacaacacgggttagcttgccgcctctcggtgacacatcgatggttctccggccccacagatgttgacagatgattttgtcataatttgggagggacagcatactgagtctctgctggctaaatcaacgtcgtcgtgtaaagcaggtgtagatgaatctgcccccttcccgtcagagtgtggcgccccgccgccgctctgggtgtacatacttcttggatataggtggtctggtgtccgcagcgaggtgtgggcaatacctgctgtgtgctccgccctgttgtgggtgtctcttcgtgcgcaccggaatgtgcagggcgcacctgttgttagtcgaccagagtgagagtggacgcccccttttttcaatagatattataatgataggtcaagtctaaaagaagagaaacggggtataaagaataaaaaccaacacaacatccgagggaacactacttaatgtcaagagcagcaccgatatcagaagcattgttgttcgccccaaaaaggaaatggatttaaacccccccgggggaattgtggtccccgtaacagaaggaacaaaac

SEQ ID NO: 650044 - DNA, 280 bp, Homo sapiens
gtccaactcatccaggagtgcatcatcggaacaagtttgcctgtatgggtggaatatctggcagcgatggaaggttttctggatgggtaactgaggggattagctctatcgctgtaacagcatgggctggctgggacctcggctttgcatttgccactagttgctgtagcacgggctcgctcgggttgacttgctggtgcttgtgtaccggactacatacgcggaacagggctccacgcactgcccatgggatattgagctgcttgctctcttggcaggc

SEQ ID NO: 650045 - DNA, 201 bp, Homo sapiens
  misc_feature (197)..(197): n is a, c, g, or t
ctctagaggatcctgttgcgggcccggtgggatccttaaaactactgagggctgggcacggtggctcacacctgtaagctcagcgcttggggaggcggagcggggcggatcacacctgaggccaggagttcgagaccagcctggccaacattggggaaacccctatctctactaaagaatacaaaatattagccggngcgt

SEQ ID NO: 650046 - DNA, 454 bp, Homo sapiens
  misc_feature (400)..(400): n is a, c, g, or t
  misc_feature (418)..(418): n is a, c, g, or t
  misc_feature (444)..(444): n is a, c, g, or t
  misc_feature (450)..(450): n is a, c, g, or t
attttataggctagaatacaatctctaaaaggccctttctgattatcttaacccaattcattgcaaatattcaccattaagataagagtcactctgtagaacctgtcaattttctcagtcttaaggctttgagaacactttaatttttctataaatccgagttgaatgtactgccgggaaggaaaagctggagccccagggcctatggttcactccaccatcattaatgtttacatccacctttcagatctcatttttgatgaagaggaaggagcggtttccacaaggggcacctccgttcagagcattgaactggtcctcccaccccatgcaaaccatcacggaaatacatttggtggccagattatggcgtggatggagacagtggctactatttctngcaaggttcttggttttnaccttcggcctaatgattttgggganccagtnaggg

SEQ ID NO: 650047 - DNA, 155 bp, Homo sapiens
agtatgatcttctacagcatcttgccagagactacacaggaacggaacatatacagagcactataaacatgtctttggacagtaaaacagtcatttatactatctacactcttgattattccaatcatatcttcctcaaggccatgtaacttatg

SEQ ID NO: 650048 - DNA, 713 bp, Homo sapiens
cgcggagcagtccatgtcccggccgggaccgggacggcgtccgatgtgccaatggctagctctaggtgtcctctgctccccgcggttgccgttgcctccccggagcttctctcgcatggctggcgacagtactgctacttctcgccgactgggtgtctgctccggcaccgcgactgcccccggcatattctccctggctggttgcccacctgcgtctgccactgtctccgtggtctgggctggtgggcctgagccgctgggccgtgtctctggctggtgggcctgcggggtccatcagggcaacggttggctccaatgagcgaaaacgcaggtgcccagggctggctggactgctttgaagaccattatgctgcgagcactgtggcttgtgccctgccgggacttgccttgtttccgatgagctgatctcatggggagcccccgggtccgcggatatgcatcaggctacttgcacgtgagggaagtcacccgtaccagtcttcgttgatcagttatagccgcggtactgcccgcgagcaactcctgtggcacaaacgtcgggagcctcgtgggtgccgcggcgggtcgagggcggttctggaaaccctgtgcgtcgcgcttcgtaggctgcctgggcgtcggagacgcgccgcctctcagctgtgcctggtcctggtggtcctctccgtctcttgggcgagatggccattcca

SEQ ID NO: 650049 - DNA, 215 bp, Homo sapiens
aatgtgatagtcatacgttttagttctcgaaatgaatctccacagtgtataccatagtggctgtactagtttacattcccaccagaagtatagaactgttccctgttcaccacattcacacaaacatctattttttttttaatggtcattcttgcaggagtaaggtggtatcacattgtggttttgatttgcatttccctgaagattgttggtgg

SEQ ID NO: 650050 - DNA, 413 bp, Homo sapiens
ttagaggatcctgtgtcatccccttcgtgaaggggtctgatggagatatgtcctcggcggtgtcgtacgacctgagagcgaacctgagctgagtgggagatggctgtcaaggggagagctcaagaatgcggctggcgtagttccgacgcatctttgaactgtgcagttactctctgccttttacctgtattacacggaagtgctcttgttgcaggcttgtgttgctaattgcaagagaccggtcgggtttgctgtgttgtgacccgatcgagaagagtcaggaggcgtacctgctggctgttcgagcactacgtcaaccaccggaaacacaacattccggacttctggcccaagctgctgattaaggagagagaagtgcagagttcgaattctgtacggaaggggcgatgaca

SEQ ID NO: 650051 - DNA, 208 bp, Homo sapiens
agggtttctttggccggcttggctgggttggctggctggcttgcttgcttggctggcttgcctggctggatggctccctgacttggctggcttcgctgcctgactggctcggctggctgtctggctggctggctggctagctggctgggttgatggcttgactggctggcttgctggcttggctggctcgctgcctagaaactcttgt

SEQ ID NO: 650052 - DNA, 859 bp, Homo sapiens
  misc_feature (590)..(591): n is a, c, g, or t
  misc_feature (646)..(647): n is a, c, g, or t
accacagatcttggccagagctgggatgctggtatcagaattgccagagtggaatgttaatgttgatgccactttcaactgaagatcgagtgttgatggaccagtctgtgcctggaggcacaggtaagtatcatgtgcttacaatttgtgaaggagacccactagtacatagatgtgtaccattattcccagtcaatcgaatgagttaggaactccgtggagctctgcacatacctgtttagggctactgactgtgattccacgtcgagagaagggagtggacattagggcattgcccgtagtgacatgtcatcagtggtggtcgtttagctctggtgggtgcctgtatagacgaagtctgatacgcgtgtactactcacttcgtaccgcgagcatactcatcgtggcaatggcaacctttcgtatgcatgaattcgtcacgggatcagtccatactactcgtcacagacgttgagcacggctagaaaatagagaggtgtatgccccacccccaagtgtggaatgttgggcgacggactggcggcatgacgttgctgtatgagtcacgtatccagacctagttcctctgnnatgacatgaatgctcaagaataaacgtgtatgtacgccgtatacagtgagtgctnntcacacgatagacgaaggcatcacgcctatgtctgtgctacaggacaaataactcatctcggattaagcaacactctcccagtgcttttacagttcgtgctgttggaagaaaggctgtggttgacttgatcagtcctaggagggatcgtcagcgtgcccaaatttgttgttttttcgcatggctaggaagtatccatgataacacattcctg

SEQ ID NO: 650053 - DNA, 212 bp, Homo sapiens
actcgagcggaacagcggagtaaaatttcctaagatcctggaggattacctacccccgtcctctatcgagaccccagtcgtgatgtgacaggaagagccaccatgcaagatggacacgagccacaagctgcactgtgaacctaggcactccgcgccgatgccaacggcctgtgggtctctaaagggaccccccccccatcggactagccaaa

SEQ ID NO: 650054 - DNA, 350 bp, Homo sapiens
tcccagttcgacggagactctcaaggacatcgcttgaacccaagaggtggggatgcagtgagccaagattgtgccactgcactccagcttgggtgacaagagtgagactccgtctcaaaaaaaaaaaaaaaaaaaaaaaaaaaaaaaatgattacttcagccttgaacaagggttctcaaaattaggggcataaaccaaattgattgtttatatacgggtctcacaaaataaaaaaagggaccaaaaattggaccggggcagggcgggggatagggggggtaccattaaacgcttcccacgaactcaagcgctccttcttacgggcttgggtccaggtaaaaccccctat

SEQ ID NO: 650055 - DNA, 875 bp, Homo sapiens
  misc_feature (12)..(12): n is a, c, g, or t
  misc_feature (78)..(78): n is a, c, g, or t
  misc_feature (97)..(97): n is a, c, g, or t
  misc_feature (122)..(123): n is a, c, g, or t
  misc_feature (126)..(126): n is a, c, g, or t
  misc_feature (219)..(219): n is a, c, g, or t
  misc_feature (310)..(310): n is a, c, g, or t
  misc_feature (325)..(325): n is a, c, g, or t
  misc_feature (468)..(468): n is a, c, g, or t
  misc_feature (478)..(478): n is a, c, g, or t
  misc_feature (589)..(589): n is a, c, g, or t
  misc_feature (595)..(595): n is a, c, g, or t
  misc_feature (601)..(601): n is a, c, g, or t
  misc_feature (607)..(607): n is a, c, g, or t
  misc_feature (617)..(617): n is a, c, g, or t
  misc_feature (619)..(619): n is a, c, g, or t
  misc_feature (623)..(623): n is a, c, g, or t
  misc_feature (627)..(627): n is a, c, g, or t
  misc_feature (630)..(630): n is a, c, g, or t
  misc_feature (634)..(634): n is a, c, g, or t
  misc_feature (658)..(659): n is a, c, g, or t
  misc_feature (681)..(681): n is a, c, g, or t
  misc_feature (741)..(742): n is a, c, g, or t
  misc_feature (754)..(754): n is a, c, g, or t
tgccggcgtgcncccccgcgcctgcctggttgtgtcctcttttccctcctccgtttttcctgttccctgctgcttttngctccgctgtcggcctccncctgtccctgcgtttttttcttccnnccnttgcccttgtcctggcctttccctcctccgccctccttccggcttccctgttggtttctcgttttctcctttctttcctttcctccctctgtnccctgccgcggttccttcccttttcctggggtgggctccgtgccctgcgccttgttctcggccccgtgcgtgtgcctggggctctgttctnctccctttgcccttngcgtttgtcgcgcgtccccccgctgtgtccgtttgccccctttgtgctcgtgttccctcccttttcgctttcgcggtttcctcttcccgtggtcgccgggcttcgtccccttggttggctttccccgcttttctttccctgcnccccgctgcntctgtccccctgcgcaccgcttgcttcccctctccgcgcgtgggcggcctttgcgccttggcgtgcggcgctgctttggtgccttttttgttttttggctcggtgttttgnctgccngtcttntttggntagacttttntngttngacngtngctnacacttgggttttataggcacaanncacaagtcttatactagctgtnctttattttttgagttcttattaatgaggaacatccacttttgcattgacagtgatttcnngattgctttttntgcctttaaaggattcttgactagtcgtgcacatcagaactgccaggtccccagtggttctgaagcagtaagctttgggtgggctctggcatcagcactttcactaagcttcacagataat

SEQ ID NO: 650056 - DNA, 139 bp, Homo sapiens
tattcttcgaatgatgatgcgccaggattcaagaatacaccaacgaatgctcctgctactttagagtatacagcttcttataatgctaatcagaaatatgatgataaaaataaatggaatctcggaaccaaagttgtag

SEQ ID NO: 650057 - DNA, 380 bp, Homo sapiens
  misc_feature (44)..(44): n is a, c, g, or t
  misc_feature (46)..(46): n is a, c, g, or t
  misc_feature (54)..(54): n is a, c, g, or t
  misc_feature (56)..(56): n is a, c, g, or t
  misc_feature (58)..(58): n is a, c, g, or t
  misc_feature (171)..(171): n is a, c, g, or t
  misc_feature (221)..(221): n is a, c, g, or t
  misc_feature (380)..(380): n is a, c, g, or t
agatggccgcgctcctggccgcctagagccggagcgcccagcgnantgcggagnancnagtggtcggggcgctgtgcgcatgctggttccgcctggggggcccgcgcatcatcccgttggcccgactgtggtacagacctccatgagccggtcccaggtagccctgctggncatgagtctgctgctcatgctcctactgtatgtggggctgccaggccccntgagcagacttcctgcctctggggagaccccaatgtcacagtcctggctggtctcacccctggcaactcgcccatcttttaccgccaagtgctcccactcaaccaggcacacagggtggaggtggtgctgcttcatggaaagggctttaactctcacan

SEQ ID NO: 650058 - DNA, 1553 bp, Homo sapiens
  misc_feature (747)..(747): n is a, c, g, or t
tggagcacagggtacttaattggatggtacttgacaatgttgcgtgttccctagtgccccttccccttcttcagggggctctacatgtggcactgtgtgtgaggaggggagatctcaggtggtggtgggggactgagtgttgtggcagggactccccagcaggtgagggtctctctcttcctctgggtgctctgtgctggggcgctgggtgggtccagggggtctaacctcctttgagagggccattggtgtcgccatgtgaggtgtccacacacccttgtatgcgttgtacgccaaattctcggtgtgtcaataccaggagaacactgtgagcgtctttggaccacaagtgggggctctgtgagagtgtgcgcaattgccgcccagtgctctccaaggtgcgctccaacgtgtgttgtgagagtgagactgtgggtgtgtgtacgcgctgtgtgagagaagtgtccagagatgaggaaagaccacactcttagtgtgtgctctcccgaggttcttgtacaactcgccgagttgaatagttgtacctcctcttgttgacataggtgtggacgtccctctcccgcgagaccgccctcgtggagtttataaccacccaccacctcctctctcttgtagagcatttgatccctcaatcaccatactatattgggaggcacgaagagatataatacctcgtaaagaacaagcgtgcacgacagtgtggctccctagtcgttgctcctcccnccacacactttgtagaactccaccatgttttttgcagacacttgtgtgtggtgagaaacaccacgtggtgatcaagtgggcccatattagccgcacatgatacgaacggcttatccccccggtggtaccacaaaggcctccatcgggggagagttaagaaccttttttggcccccaaactgagagccctcttatgcgcggcaacagggctgacgccaaatgattacaagagacgcggcacattggttgagaatatcggaacttggttcactattatggagaggaacaaacatgcccccccctctcgtgttgtggcgcacaatacaacagggccaacacaaaaggttatattccgcagcagagagaacgggggtgaggcccaaattccccaacaacaaagagtccttactctataggaggaagctatgggagccaatgagacgataaatgtgcctgccttattatgcgaccccttcggtcggtgtgatcaaccaatgggacagtagtcacgtgattcacacagacagaatacccccaaaagaacatgtgtgcaacaatggtgcggctaatcaccaccctcttggggtcaccccacgcgagtgggatgattgtctcaacaacaagcccacgatcatcgagtgatgatcgtcgatccaaagatagaacgaatcaatagtggacggctaaattcgaaacatccatgctgaagagacgcaatcgagatggccaacaaccacctctctcctcaccaatgagttttaccacaacacaccacgcacgatgagatgctcacacacatgtagtcgc

SEQ ID NO: 650059 - DNA, 456 bp, Homo sapiens
  misc_feature (190)..(190): n is a, c, g, or t
  misc_feature (220)..(220): n is a, c, g, or t
gtttggcccacctgaaaggttgagtggcgaaaaattgggtcccccctttcccccttgcgttcaacaaccaagttcaccctgaaatgctggctgtactcaacccttttcaaattttttgtagatgtagcttaaggacgtgagttatttttccgcagactgtccaagagccaggtttctaaacttggacctnaggtagaaagcttcccatcgggggccctanctcaaccccaccaggccctctgttgggcctgcacacaactctgtggctagaacactccgaggcccttcggtacccatcagagtgggccccttgccaggtggcttttcagttacagagtccagtgggccattttgtagaaccattcagccccctccgggaggtggggtagggtgggaaagaggaacaggtctgggggtttgtggaacccagtccccttcagaatctgtaaaacctaa

SEQ ID NO: 650060 - DNA, 337 bp, Homo sapiens
gagtttgcattagataaaagtatcatgtccatgattaatttctgtatcgatagtcgtactgtgcttatgagaagagaatgttcggccagacatggtgacccacgcctggactcccagcactttgggaggctgcggcaggtggatcacctgaggtcaggagttcaaagaccagccagcccaccatggtgaaaccccatctctactaaaggatacaaaaatgagccaggcatggtggtccatgcctgtaatcccagctactccggcggctgaggcaggagaatcatttgaacccaggaggcagaggttgcagtgagccaacattgccccgggccgaatt

SEQ ID NO: 650061 - DNA, 221 bp, Homo sapiens
aactactgtatttccatgtcagctggggctctcagccgcccaaggcgaggacagcagaggtcagctgcagaggaaggctggcaccagccaccaatcccaaccccacctccaggctaatgcatgcccctggcacgggctcagtcccagcaccaccctgcaggctccagcaaggagcgtggtgtcccctgtcactccttacagctcatacttaggcctctagc

SEQ ID NO: 650062 - DNA, 1085 bp, Homo sapiens
  misc_feature (745)..(745): n is a, c, g, or t
tgacaacagggtctcgctccatcaccccaggctggagtgcaggggtgcagatctcagctcgcgtgcaggcattgaccttcccgggcccaagttgactcctccgtgccgtggacctcccaaaagtgtgttgggatttacagggcattgagccactgtgcattccagcttgtggttcataatttttccatacccaggggtggttttaaaccttagtttctctccagcttaagttaaaagtggtgcccaaagtggaaacacgatcttaaactctctcgtgcagcccatttctttcacgtggtgctctttgtggtgttgtgaccaaaaccttctataaatctttcacagtgtgtctttgtggtgttgtgaccaacacctataaccctttcacagtggtcttttgtgtggtgtgacaacaaccttctataaccctttcacagtgcgtccttggggtggtgtaacacaaacctctcttcccagtggggtgtgggtgcattctgtgacccctatattcgcccacaacaatgtgtccttataagagaaaggctctcaactctttccttttgaacctgtgttctgtgcccaattcccccttctcccaaaacaacataaagtggggagagggcactcgtggacattattcgcatccaaaaggatgtgtgaggggctctccccccctactcccccaaggtgttccttcacagagtgatttcccacatagtgggctctaagacagaatacagaattncttaggcttgaacgaaaggggcacaaagagaagctacacttccgtggacacacccgtgttaaaaacgccaaacagggcctgggtggcgatttaggaacagggggggacaaacgccgcggactagaataaaggggccagaagtagagtaaacgcccccacaaggggaggcgcccccgagaaagcccacatagttccccctaatggattaaggggcaccccgctgggcgaagcacagagggcacacagcggggtgtacacacgtgactacaacaaccccagaatagctcaaaacaccggcacgacacatacagcgacatacaacccgggagaagacaacaca

SEQ ID NO: 650063 - DNA, 805 bp, Homo sapiens
  misc_feature (193)..(194): n is a, c, g, or t
  misc_feature (202)..(202): n is a, c, g, or t
  misc_feature (289)..(289): n is a, c, g, or t
  misc_feature (291)..(292): n is a, c, g, or t
  misc_feature (296)..(296): n is a, c, g, or t
  misc_feature (318)..(318): n is a, c, g, or t
  misc_feature (357)..(357): n is a, c, g, or t
  misc_feature (387)..(387): n is a, c, g, or t
aatcttgtggcggccctcacgatggtccttccacaggacctttacctcgcccgcttggggtcgtcttcggttttccgggagccttgcaaggtcctggctcgctttgacgtctgccctctgggaggcacaaacctttcctaggaacgaggaacctgtccttgacgattgccggctgtgcccctcagtccctccnngacctttntcgttgggacatggtctgttgctggaagacaatcatagccccgggggccgacccggactccactcctgatacccgagctcctgtcancnntcgngagctcttgtgaaataaaagcngggttggcctcagccttgggtctgtctcatgctctcccngttcctctccccgccaccccagggcctccnagccacctctggaaatacttggctctgcccccatgggcaccgggaggggcgcccacgtggagctgtggaattgggccccgtggcagagcccccatcccttgggggcttgtggggatgcgcccaagcccccgagggagaggcctggggacaccaacaaatctaagccctccctagctgcttggtaactgtgtcatgaagctgccggacagacacacgtggcatctccctgggcaaggagagcaggcctgcagcaatgggtcctgttcccgtgtgccgctgggtggcaatggctgcacctggcactagggctgctctgtggatgtgggtgacaacggcaaggaggggatgctggccttcctgcacatagacctgccgttagtaaatcataagccccaattaaccggttgtttgaatatta

SEQ ID NO: 650064 - DNA, 237 bp, Homo sapiens
tggacagaggagccgagatcagtctctctgcgcctcccatgcttccccccttgaatggagctgcgtacaggagctgcctacagtgccccgggcatggcaggtttagtgttgcctgacttcagatatggcctatagtgggggctgaatgtatgggcctcgtggcttgcccaccaaatggatgaatccaacagctacgcatctgctgagctcatgggccagacccacgatcagtccttg

SEQ ID NO: 650065 - DNA, 135 bp, Homo sapiens
tgcctggcacggacgcagctccctgctcgtccggggtgtgatcccaccggaggtaggcaatgtggctgtgagtgtgggtgagtgactggagagacggtgggccaccagcattctcccatcacacgtgttaggaca

SEQ ID NO: 650066 - DNA, 854 bp, Homo sapiens
gcacagacccgtgcccgtcgtccgtgagcctcccgagagccgtcccttcgtccggccctggagcattgctgtatgtcgccggtgtcgcagtgctgaggattggcgccgcgggtgtacgcggctctctgcgcaggcctgagtgggcccagagaacgcgaggaactccgtagactcgtcgacacgtctcgtactcctgtcccaatatcagggcttgtgtgaggtgactcgcgagtctgctggagtgactcgcgcggacaggacacgtgctcatggaacgccatgtgagacgccatccacactgtcagacgtcatgatccgactatccagccgaaatcgtccatcgtgagcgaggatcctgacacatcagtattgcgcggacatggacggcacagcggagaagccacagtgccctgcagaacgaaggcttgacacaggtccacaagaatagatttgccccgcggtccacggagcttttttcaagagttcccgagagaccagtcagcgaagcattccttgacagatgacatcgaatatatgcctcgtactccagttttcagcagtcttcaacacaacgtaaaggcgagggacaggcagagtctatccccaaagtcccatatggatatatgggggacagcagttgatagaaagcctatccggcgtagttaggttcgttatgcggcgggaacatggcacaccagttcgacctggagaagtgcaacactcagccgacatatcacaataccatgggagcaggcagttttcagtgagtagccagcagatagcattggcggaaccattatgcacagttagcaacgcagaggggggatcacaacagagcctacaaataccaccaa

SEQ ID NO: 650067 - DNA, 1228 bp, Homo sapiens
ctccctcaagtttcacttctgtgaagttggaacgctgacgtttgttcctgaaagtatctgaagagagagtatgcataattgagctctgtatcccacgtgtttgtactgtatttatcaagaattcatcagtacagaatcgatcgacttgagtatggtcgcgacatgtcccacaggagctatgagccaaaaaacagtttcaagaggacatgtgatcgtagatggcgtccagtaccgtaccccagcgcgtgaatgaacgagtcttagacatgaatgatcgtcaaaccgtatcgcgtatgtaagcaaattgacatcaatgcgtgcactcgcctgcaatgctgctttgattgaagaaggaactccatcgatagaatagcgcagagtcgtgtggttgtacagtcgtaggcgagattggtggaaattcgttgctacataatagtaagtattgctagtttagcgagtttatgaatatcttctcagagtgaagatggtatcgtagcagggacttcagaagcacctatttccacgttggccttacctattcctcatgcgtcatatgtttctggacgagcttcattagggagggacttggagtagtaagtgtaacggagcgtacgaagacattctgagtggaactagaatacagagtttggtacccaacagacatcccaacattacgcaggaacaggcgtcacaagatgctgactcaaataaaagcttctgtggatggctcgttttatgcacaaggaaaaagaaacagtgataggcaaaaattgtgggacttcagggaaaacagaagttctggacaaatactaaaataggtactgggttgttggaactattgacaccattccgaatattattcggaggatgacaaaaagtcagggaaaggacttaaaaaagcttagtcgacaaatggggccacacatagaccctcagggtgaactcgggaaacgcgggacgacagggggcacgacagagggaaacgcgcacaggcaatgcacacaaccagtggggcagaacgcgggggccacatcacgcgaacacgggaccgcttcaaaggcacgaataacagggggcgccacatatgggaggcgaacaactgtaagccccgcgtgagaacaatgatataaccatgcaacgggtccagcataaaaaacacgcagcacgacacaggggcgggcgacaagaaggggacaacaggagatgttagacccacccaaagaggtaa

SEQ ID NO: 650068 - DNA, 565 bp, Homo sapiens
tgtcgatctagaggtccccctcggtctaccttgttctgataacatcttatcaggagacagggttggagagtagaaaacgggtcggactgaaatttactaggcaggaatttcctcgtcctaataggccggggagcactatgggagaccggggcttatttcgtcccttatctgcgactgtataagacagacattcccagagtggccatttcagagacctccccctaggaaagcattctctttctcagggctgttccttgctgagaaaaagaattcatcaatatttctcctattggctttggtaagaagagaaatatggctctgttccgcccggctctcaggcagtcagacctgatggtcagctcccttgtgtcctgaacattactgttatccggttctttttttcaaggtgcccagatttcatattgtttaaacacacatgctttacaaacaattggtgcagttaacgcaatcatcacagggtgctgaggcgacatacattctcagcttactaagatgacaggattaagagattaaagtaaagacaaggtagagccgaggggtaccg

SEQ ID NO: 650069 - DNA, 128 bp, Homo sapiens
ttgaggatccccttatgtctgacccaccggcacttcaggagcttgataactagagaggcattgcaacgcacgagtggggaaactgattgcccaggcatgagggctgcttgccaaggtcagaacataag

SEQ ID NO: 650070 - DNA, 634 bp, Homo sapiens
ggtctggtctcttgctgtcaacagtgttgggacggaacagatccggtggactctcttaccagctctcacgagccgccctcgcgatttcgcatcatccgtcttgcaatgcatccggagaccatcttctcgtgccatctcctgctttctgggacctggccagcagcgatgtgttgtggttgagctccctgtcttgcccaatcaaaccatggagcgtcccagaattcgtgcagaattattgcaccgaacgttgagaggcagaccgatcaaacaggcctggtcaaattatgtagcctgcgaggtcgccatccatacagcctatcgcgtcgtctcatggagcttctagttatcagatccggcgactgatgtgagctcgtcggaaggcgtgagcctacgttctctccgcgagatggacgaggagaagcgctgatgggctacgagcgtcctccgtgatagatgcaaagaccagtcgtgtgacggccgtcgctctcttccaggacatcaagaagccagcggaatgatgagtggggtaaaacccagaggccatgaaagctgccatggccgtggagaaaaagctgaaccaggcctgatggatcttcatgccctgggttcttgccgaagggaaccccatatctgt

SEQ ID NO: 650071 - DNA, 1087 bp, Homo sapiens
  misc_feature (457)..(457): n is a, c, g, or t
tacgtcgtactgcagtgctattccgtcgacagtacctgttggttctctggaggcgaatgtgcggcttcatctcttgctacccctgtacatcgaaaaagcaggtgtcaaatgtctattacttgcgcaaccgccattcgaagacatcgatatgcctagtggactcaagacgtagaatcagtggatcgaaagacgtagttcagatgactcagttgagttggaaacgctggaatgggtgtattgcatagttgatcggggcatggatcgcgtattgcgacggtatgcgacctcctaaattagttccgtagcaaggttctctggatgtcttggctaggaaatgcaagggatcgagtcgaagtaatccaaatccattgagttggcatccccgtcgtgaggacgcggaatagaccttattagagtccaaacaaagcagtcgttgcctgtcacaattggtatgtantcactacttggggtctccataaagtctggttgattggggaagagacttgcatacgcaagcatacgtgagcgacaacgacatactatgacatggaaaaaggaaaaaatttgttgaaattgcacgagggtacgtattaacatgggacattcggaagaccatcgatggaccacgagtggactcggcgtaggagaaggtaggtggcataggaatggggacccgtatggtaaatgaagggacatgatggtaatgaagggcgaagaaagaaagaattgtaggtaaatggcacaaaaattggtaaggttagtaccccatagaatctgagaatctatcccacacattgtaatgcctgcggtctacctgcctgggacagtctccaaattgtgaatacctatgtcttcattgcaagtccccatgttatgtaaagtaagatactagtaaagtacactcgtaggcttgctaccaaacatttggccttggaattgcttgggtatgggtttccccttgccaaaaagttgcgaaaacccaaaaaaggattgtacttggggcaacagtgggagttaccttactggatttagcctaaggttggccccaaaacaaataaggtagattaaggccatgaaaattttgtcc

SEQ ID NO: 650072 - DNA, 141 bp, Homo sapiens
ctcttcttctgttgagcatttttggcaagcaagcgtgtgcttgtcatcattccctgttatccatctctgaaatggtgacagccagaatccggctagaacattagtcgagctgcttcgctgctccgaatattggatactaag

SEQ ID NO: 650073 - DNA, 263 bp, Homo sapiens
  misc_feature (38)..(38): n is a, c, g, or t
  misc_feature (46)..(46): n is a, c, g, or t
  misc_feature (147)..(147): n is a, c, g, or t
cacaccccagcaccagcagcaactcttcctcaagcagnaacagcancagcaacagccaccgccagcacagcagcagccggcaggacgttttaccagcagcagcaggcccagtccttatccaagtattcccgtcactatagcccagangacgagccaagtccagaagcccagcccattgctgcctacaaaattgtttcacaaaccaacaagcagtcgatagctgggtctgtttctatcacatcccttttcctccagggactacg

SEQ ID NO: 650074 - DNA, 205 bp, Homo sapiens
agtgactgtccccagtgcttcataatccgcatgcatggatgtgtgctggtcccggtggaccctgggatttttgtttgccccttggagcaggtgtggagtgtcactgtctgtcatcatagaggggtagtcagaaacgggcgggtccgccagccaggtgctgttgtgcttaatttgacaataaagttgttctccccccgtaaagaga

SEQ ID NO: 650075 - DNA, 363 bp, Homo sapiens
cgtctacgctgaactatgtgtgtgtgtgtgtgtgtgtgtttgagatggagtctcgctctgtcgcccaagctggagtgcagtggtgcaatcttggttcactgcaacctccgcctcctgggctcaagcaattctcctgcctcagcctcctgagcagctgggattataggtgagcgccaccacgcccagctaatttttatattttcagcagagatggggtttcaccatgttggccaggctggtttcgaactcctgacctcgtaatccgccctgcctcggcctcccaaagtgccggatttacagacgtgaaccaccgtgcaccacccagttgctttacttatctgtgtcacatagttcagcgtctga

SEQ ID NO: 650076 - DNA, 294 bp, Homo sapiens
cgacagagctaagtcttattgagactaatctatatattgacatacttctatttaagaactaccagactacaaccaacaaatgtctacactatgcagcaaatgagagaaatcatgatctacggatactcatcccactgacatgagcacatcatgtacaaatgcattgtaaacttacaaaataagttacacaatttctgcaagcctctcactatacaaactcaaaatccttctttattttagtacacagtggatctggtctctgatcacccagcactggtagttacatgtgacaca

SEQ ID NO: 650077 - DNA, 397 bp, Homo sapiens
aatagacgaaatcatttgccacaacacagatgaactggaggctattaagtgaagcaactcagaaacagaaagtcaaatattgcattatattagtctgttctcatactgttaataaagacatacctgagactgggtcatttataaaggaagcgggcttatttgactcacagtttagcatggctgaggggaccttaagaaacctgcaattatggcagaaggggaagcaaacacgtccttcttcacatggcagcagcaaggagaagtgctgagcaaagcgggagaagccttttataagaccattagatctcgtgagaactcactcactatcacagaacagcatgggggtaatcgcccccacgattcaataacctcccacaacatggcttcatagtgaagt

SEQ ID NO: 650078 - DNA, 142 bp, Homo sapiens
actcactcttgtcagcagttgtatatctgggcagggtggcggagagaaggctcaataatgccacctcgaggcgcaacaccaggtgcagggtggagtctttctggatgttgtcgtctgagagagtgcggccatcctccagctg

SEQ ID NO: 650079 - DNA, 584 bp, Homo sapiens
cggtgacataagtgcgtatggacttctcacctaatgaccgaatgatccggaggtaatccgagtcgttgtgaacaacttcgatgatggagtcctggggtcatgtagctggactctatcaatcaggtagttcgcaggcgagctcggagatcgaccttatgccccgaggctgaagaatggatccccttccttaacaccttatacaaacaatttaaattccaaatggattacaaggacttaccatgttaggacctaaaaccataaaaaaactagaagaaaaactagggcaataccattcaggacataggcatgggcaaggacttcattgtctaaaaacacaaaaagcaaatggcaacaaaagctaaaattgaacaagtgggatctaattaaaataaagagcttctgcagcagcaaaagaaaccaccatcagagaacagggcaacctacagaatgggagaaaattttgggcaacctactcatctgacaaaagggttaactattgcagaatctacaatgaatcacaacaaattataagaacacgaaaaaaaaacacacccatccacaaaagtggcgtgcacggcatatga

SEQ ID NO: 650080 - DNA, 572 bp, Homo sapiens
cactatttgtgcaagtcagtgtttttgacaattcagtgtcgcaataaaaagtggactgcacactaagggaccatcccccagcctgtaagctgtctgtattaatggggcccgttgtatctcggaattttgaggttggaacaatgggagccctgttgagcgtttcctaaagtgacttagccgcctgcgttgtttgaccagggaagcaacaggaaatggcagctagaggccctccctgtgcgtgacctcttgtcacactcagaggggaggtaactgttcagctggttatctactcttcaggtgtttggacgaaacacacaaataatgttatgaggaaaaagcaaatattctctccgtgagatattgtacagtgtctgctgtagtgctcagaataatgcaagagtgtagtcccatatagcggtgtagtatatagcattatttatttgaggtctcatagcacattgttaatattcattctcaatgtgacttcgtcacatattcgtttttcctttcgcacttatgatacaagattaaagagcattttgtaaatgcttaaaaaacacaaacaaaaagaa

SEQ ID NO: 650081 - DNA, 416 bp, Homo sapiens
ctacagttttactgtaagataagagtgtgtgtgtgtgtgtgtgtctgtgtgtgtgtgtgtgtgtgtgtgtgtgtgtatatatctatattataaaagacttctctccatgtggcggtatccactctcagttccaggcgttaaatacagacgtattttcaaaaatatatatttatttctacaagcatctgcgatgcgtgtccattatcccactctgggtgtttgtttcgtgaatgatatctattatgccatcgtgtagagtcttcctgaataattgcatcctcccgctgtgagcgaggtaccacaggagaatttgtgagcagaaaaatctgtgtgcttctttaagataacttcaagagtcgcagagccacacagtgtgtagacatatttcttctgcgctcagggaattggggctataa

SEQ ID NO: 650082 - DNA, 288 bp, Homo sapiens
taatttgatttcccttttaagggggggtttgggcagctggggtccccgattttggctgtcctatgtccaggaaaaagcccctttgttgggggtgcccttcctgtttatacacccccccagcccagcaaaagcctttcttgaaccaaacaaacctgttggttgggagactgcccaaacatgatttatgaggggttcccgcctgctgtcccccccctgatcccccagctaacgagggggcccccagcatttcctgatttcctttggggtaataaaagctttttgggctta

SEQ ID NO: 650083 - DNA, 470 bp, Homo sapiens
ctgctcccttcttggaaagatgcaaagtgctttagtaggctcctgggtaagagtgcactttatgttaatcctgcccctggccctctggttgtacctgaaatctgactgagtcatgccggtgaagtgaaaaggttttcatttggcatccaacctggaataggaccctgagccgcccacttcctctccaccatcttgaggtcacccctggaggctgcctagtcttcctaacactttgcccccttccatgcatcatggtctcctgaaagccagtggaaactcctagtcctctagccaccccatttattcctagttaattgtttgagcctcccaagcttttggagtttggctgctctctagtctgggaacattttgagggcaaagattgtgtttttgtccatctgtatttcccatgctcagccccatgcctggaagacaataaaggtctgataaatactgttgagctaaaaaaa

SEQ ID NO: 650084 - DNA, 813 bp, Homo sapiens
atgccaggctggtacggtccgagtttttagatcgccagcgcatgtgttggactggtgctgtgcggactagtgcacagagctgcgggagcaggcacatgggagtgtggagcctggtggctgggacgtgcgggatccggtggtgagccggagtccctgcctgagtgggggctggaggtggatgtgtggcccggctgatgccgcgatgaagcctgagcggcgagtgaccaggcggctgctggctgtgcctggcccctgggaggagtgcttccaggcggcctgtgcagctggcgctgcgggcaggacagatcatcagaaaagcccttactgaggaaaaactgtgtctcaacaaaaacatcagctgcagatcttgtgacagcaaacagatcaccttgtggaagatttaagttattttctgaggttgcgagagacggttccttcacacaggtctcctttttctctagtacacatgtgaacccggcacaggagactgggatagagaacctctcgggcaaggccacatagtcattgcagcaggaacagatgtttgcttagcgccttgcccaagggcctcagcccttagttgaaccttggggacagtccaggagtgtcgcaaaggcactgccctgaatggcttaggatctaggtctgacttggatccttgagaagtgcctttgtgaaggttgtaaacagcgggcaagctccacatgggacccatgcctgcagcaagggttcattgcgagagggaggacggcggattcatggggccaaagtgtgtgctcaccccagaggcccgagcgtggatcatcgaacccc

SEQ ID NO: 650085 - DNA, 902 bp, Homo sapiens
ttggcaaaccattttcccttggtgaaagtaatattagagcctcgttggatgtatcttctcctggtccattcatgcttgagcggacctttttgaaccgggaagaccggttcgcctgttttggggcctcctatccgcgtagggaaactaacggggcgcttttgctccttgggtaccaatcccccttgcacttgcatagcgaccctggcgagccgctccagcgcaaaaacgctctcggaggctatggctgggacagggtaactatgctggccagaggcctgcgaatggtgactggtggtcggcgtgcgaatcgtctctacgccaagacacgccatggcaggaaatccttgacgacgagaacgcattgaaagctagatggcgcgaagcttggagctgggacaagactgctcggaggcactaggcaccagtcctagcgggctagcccgtcaggggaccgaggagacagggccccgagaaggagcatcgcacaggaagacacctaggctcgagcacgcaggacaacgtgtgcagcatcggtgtccggcgtgtcgaggccaccagtcaatcatacgtgtgacaagaacgttcgtgcagcgccacgctgctaggacctgccgtggacccagggctgagcagtgctataggcaccagtgacatggtgagcacaggcatagggccagcagtcatcgtccaggctacgacgtgtcaagtcggcttatgctacaacggagcgcatggagcgcgcggtctgcagagaggagccagaaggccaccccgcaagtgcctgtcctgcgggggcccccggcatcctgcacacagggtcgcagtcaccgcacagtgaagcctgagcctgtgacaggaacggaagggtgtaggggtcagacagggactggtgcaaatggtac

SEQ ID NO: 650086 - DNA, 219 bp, Homo sapiens
gatccccttacacggctacgccactgcactctgtcctaaacatatcttttattaattagttttcactttatttattttaatcttcttagttagtatattcttgaaaatcgttgacaatagaattgtttatgttctctactattgtcgatagactcaaagttttcagatgacaatcttgtccttgttggcatctcagtttagtccctcaatatgctagaa

SEQ ID NO: 650087 - DNA, 849 bp, Homo sapiens
tgggcacgtattctctttccccaggatgtaccttgcctgagatataaggattcagcggacatttctcccatttgcttactgaaagaagtagaaatatggctgctgttccgcctggctcaccggaggtcagagtttacggttatctctctctgtttcctaaacattgctgggtatcctgttctgtttcaaggtgcccagatttcatattgtctacgacacacatgctgtacaattcgtgcagttaacgcaattatcacagggtcctgaggcgacgtacatcctcctcggtttacgtagatgactaggattaagagattaaagtaaagacaggccataggaaatcacaagggtattgactggggaagtgataagtgtccatgaaatcttcacaatttatgtgttagagattgcagtaaagacaggcataagaaattataaaagtattaatttggggaactaataaatgtccatgaaatcttcaacaatccacgttcttctgtcatggcttcagccggtccctccgtttggggtcactgacattcccgcgaacacgaagaattatactggtattggaatctagtgtccgcacgcaaatcgtcaatggtcaggttgtaatcatgcaatgattggaggaaggggcctggtgggaggtgactggatcatggaggtagggtttctgatgaatgtgtagcaccacctctcttgccgtgagttatgagatgtggtcattttagaaagtgtgtagcacctccccgtttgccgtctagctgcgtgctcccaccatgtgagatacttgctccccgcttcacattctgcgagtgattgtaagcttcctgaggcctcccatat

SEQ ID NO: 650088 - DNA, 374 bp, Homo sapiens
cccaggagttcaaggtcagtctgggcaacatggtaagatgttgctgagagattttgtcaccaccaggcctgccctacaagagctcctgaaggaagcactacacatggaaaggaacaaccagtaccagccactgcaaaaacatgccaaaatgtaaagaccatcgatgctaagaagaaactgcatcaactaacgagcaaaataaccagctaacatcacaatgacaggatcaacttcacgcataacaatattaaccttaaatgtaaatgagctaaatgctccaattaaaagacacagactgccaaattggataaagagtcaagacccatcagtgtgctatattcagcagacccatctcacgtgcagagacacacata

SEQ ID NO: 650089 - DNA, 426 bp, Homo sapiens
catcgagctcggcccgccgtgtcaatatactctctgtacggacttgagtgttcgcacgtaaggccgctgtgtttattataccaattgctcctagaaggatcctacattagaactctgtacctagcagacaatgcagacttgaatttggacgatgatattctctatcaagtgaggcatctagcatatattacttcaataatagtttcaaaactgtttcaactccctattactagtaaatacttataaggtctttataagtacaaatacttataaggtctttgtaagtacaaatacttataaggtctttgtaagtataaatacttataaggtctttgtaagtataaatacttataagatctttgtaagtacaaatacttataaggtaacttacaatgttattaggtaaccttaactgaatacttactc

SEQ ID NO: 650090 - DNA, 152 bp, Homo sapiens
cctgcctgaaacgctaaagctgccttgtgaacaaactgggaaactagtttagaaaagtgatacggaattgtgaaaaaaagctcagacttgatgctctgtaaccacatgagtgtcttcttttttatttagtaatacgctgctggaaatgcgga

SEQ ID NO: 650091 - DNA, 810 bp, Homo sapiens
attatcttgaaaacaatcttccagtagttctgacgatacttggagcctggtccacgtgcatcccaccttgggaagcctctccaaagagctttcggagctgacactgacagcttcagtttcccccagcacccaggagagccttgctgtgtctgtctgcccggcaagagtccattctcactgctgggacactcatgaaaatctccacgtcctccctcttcccagcctgggtggagctccagggctggggaacgtccgcaagtcaatgctcagagatgcccggagctgcctcttagactcgtctggcccatctacctgctgacagagcatgacaaagatgacgctcaaaagtaatgccattacttctttttttttttttttttttttttgagatggagtcttactctgtcacccaggctggagtgcagtggcgtgatcttggctcactgcaacctccaccttcccgggttcaagcaattctcctgcctcagcctcctgagcagctgggactacaggcgcctggcatcatgcctggctaatttttggatttttagaagagacgggtgtttaacaatattggccaggctgggctaaaactccaaccttgcgattcgccccccttggcctcccaaaggctgggattccaggcggtgacccctggccccggccgaatggcttttttttaaatgggtcaaaagaaccccaaaaatttttttctaccttggaaaaattttttaaaccgaaatttccctgtggaaaaaaaaggtggttggacacaaaaaaaaaattcgggtggcggcctttccttatagg

SEQ ID NO: 650092 - DNA, 1366 bp, Homo sapiens
  misc_feature (237)..(237): n is a, c, g, or t
  misc_feature (671)..(671): n is a, c, g, or t
  misc_feature (687)..(687): n is a, c, g, or t
  misc_feature (1304)..(1304): n is a, c, g, or t
aattcagtgaagctcatctaggcgaaaataaggcttgtggttaccaggcaaagacgagaatagacctatcgtaagacttgtaatttattgtaaagcactagatgaatctggccataactcgttagtgtacctcaacatgtagtcacacagcatgccggtgttcatagactttcaggtgttagggcgctacagcagtcagtgtatgactaggaatcctcaatctcttcacgtaggacnagcctcctggtgtctgaacggaccaatcacgacccgagtgtcgcggaaggcagcaaaggctagctctatgtaattatcccaatgtattgaactcgcgacaagtacccacgttggacaagtcgcgcacgggggtatatggataagggtgcaggctcggcttgatttgggatgagtataggccatgtttggctcatggtacacctaattatccttaacgagaggtgacgccaggttatcgtatatctataatcctgcgtgaatattgtgctgtccatactgttcagggaatgtgtctcgcggcactccgtacggaggacacaagtcacactcacaattgggactgtgcttagtgcgccgagcttatggacactccatacagagtctagtctggggtggatgtgtactcttataactgtcgatttacataatcagtnatcgccattcgacggncattctcaggccatggcagagattgtcacaaaagcaacatctgttgacagtttacaacgttggcccaaagaaggtccaggcgatattatcctttgagtatcgtttaccctatttcaagactattcattcaccttcctcgcctagaattatctggagaacagtgtatcggttggtatggcaagtcttagacttgttcacgtccgtaaacatcggtatagagaacaggccggttatcccacacacacgataaagacatcggaatacatacacattctttcgcaaagcacttaagttcgcagacaaccagaacgtgtggagggagaggcgcccgcgagtaaacactccacgaatttgcggggccgggaaccaagggtagaacgtccagtaatattcgcccatatttacggatgaggatcaggtcggtatcctaaccatcaccgtagagacaggccttgttggacacaaccccctgtggcgggtatccgggaacaatatcttcttggcgtttgaagcacatacaccctcgtatttggccaaagactattcgctcctattagcgcaacaatgggcgcggaaccatagttacagccatgctcctaacagaaatgagcacgttntcaacagtatgtaagggcagccaatatataggagaatgtcaacttatgggccatcatctttg

SEQ ID NO: 650093 - DNA, 328 bp, Homo sapiens
cctggtgtaatctagaggatccctagcgacgtttgcaatgacaacaacgaccttcgactcttcctgccacttctttgccacaaagtccacctggagggcaccaagaagggccacaagctccagctggactacatcgggccttgcacatccatccccccttgcttggactctgagctgaccgaataccccctgcgcatgcggaacctggctctaagaacgtcctggtcacccgtgtaatgagagggatgaggacaacaaaccttctgactgagaagcaaaaagctgcggggtgaagaagactccatgagaattgagaaggcggcctgga

SEQ ID NO: 650094 - DNA, 987 bp, Homo sapiens
tgcaagaggagacctcacattcaggagtggcctatgaagtaatccatgctgtaacatctggccattacacgagtcccagcatggtcggattgttttggtatttaaggaattagattctgccccaaaagctcttgtcaacatagcctcgttgcacccatcactttgaaacgtccatgtcgatggtgttgaataaccatagactgtcgttgatcatacctggacatcctagttgatatctgtgaactggtataacatgcgtacggacttaaaaagaaaaaccgcgtgtactgtgattccatatgtcaacccgagaaaggtctgcaaggaattcggaggcgaacgaactacgccgtcctctggcacacaagggccggactactcagcagcacggccgtcggactacgccctccggcggggcattcttctcaaagacggaaagccaatttccgcgtgtgagatatctcacacatccaacgtggctgtttaaacacattttctcctgcacactacagcggctcctacatgcctttgggccacacgcgcattagtatgctgtcacccaatatacccctcggggccccactctcttcgcctaattctctagcacgtcattgcggcgcgcctctccatcccgaaactgtcgcccggtcttcgcaggtcccgcagcctccggcgagtatcacctcctcttccccgaccttggcctctccctctcaaccacctggtgtgcctgcgacggcgtcccctctgctcgcccgctaagtgggcaaacctcgatgttcgcgccagcccttctccaccgtgcgcgcgcgccgcttacccgcccggcatccgggcgcttcgggatcgctcgtaacactctcctcaccacagcccccatcacggctttctccaagggccagccgcctgacccttcttttcgtcagtttccacgcccactttgcgtcggccccagcgcactccgcgcgacatttaccgtgttgtatc

SEQ ID NO: 650095 - DNA, 148 bp, Homo sapiens
taagttcccagccgctacagcgcggtgatgacccagcggcgaacgcgtgatctgcgtgtccaacagcgtgcgcgagtacgtgcagcggcactatccgagcgtgccggaacagacgctgcaggtcattcccacgtggcgtcgatgtcgg

SEQ ID NO: 650096 - DNA, 299 bp, Homo sapiens
acgtgcattgtgtactcagcggaaaggcagctcctgggctcggaagacccagactccagaaatggagctgctattgtagggtccaaacaggatgacactggtgaaggcattcttcctcagcttgtccagtcgctggcaccttcccgtgatgagattgcagctcatgaaggtctgagtgagttcttcagggaaagcgatactctgagtaccacagggaccagccgtccttatcaaagtgctcccagaaatactggaagtgccacagagagtgtgtgctcataggcgtacatgcgctagaa

SEQ ID NO: 650097 - DNA, 345 bp, Homo sapiens
tacttcctttcttcctagcttcctacaccaaatcgcactgtctcctaggactcttttcctatcttcaccacgaactgctgctagctcgcttgctccctcagtcctagctttatcatatatagagtacctgtaatcctgtctgctgttgtcttcctatatacactgaatccacttctgtgtagcacctgggtcagctgtcaattaatgctagtcctcaggaattaaaaaataatcttaactcaaagtccaatgcaaaaaggattaagtccggtaattactcttgatcttgaattacttccgttacgaaagtccttcacatttttcaaactaagctactatatttaa

SEQ ID NO: 650098 - DNA, 205 bp, Homo sapiens
attcaatttgcggagccatctgcatgttcatgttggtgaaatgccttttcatattatttgcccagttttaactctggggtgttcatctatattgatttgctaaagctctttgtctattatagtgtaaccaatctttggtccttcatttgaattattttttttcaatttttcatctattcttttacttctacagaaacttttgccc

SEQ ID NO: 650099 - DNA, 399 bp, Homo sapiens
attcatatgtgtcaactggacgtaccttacaactcaggtgattttagcttataggagagggggtgatctaaaacactctattacgccggcatctatagactcgggttactcgtgtgaccgcggtggctggcacgaaattgaccaaccctggggttagtatagcttagttaaactttcgtatattgctcaaggttaatccactgctgtttcccgatgtgggtgtggctcaggctcaagcgtaacgcagctgcattgctgcgtgcttgatgcttgtcccattttgcatcgtggtgcatttcagagggtgaactcactggcaacggggatgcttgcatgtgtaatcttcactaagcagctaatcagaaaggctaggaccaaacctatacaaatgactacaaa

SEQ ID NO: 650100 - DNA, 129 bp, Homo sapiens
ttagtaactgtgtgggataaagaattccctcctgtaatggggggcttccctcagtcagcccagactgggggtcgtcaacagacctgcgtgactgctgtgctcgccacaggcctgcttcactcacagcca

SEQ ID NO: 650101 - DNA, 248 bp, Homo sapiens
ccagattgtatgtgtcagtggagtgagtggtattacaggggcgaaccaatatgatcagacgggaagtttgactggtcgtttcgaactgggcggtcacccttcttaagaactggtggtccccggtccgggaggcaccatattgatggcgaacttagtggggacacccgatcgggatagcggactacaggccagaactcctgggctcaagggaatcttccatcttagtcttccgagtcgtgggcccgaaa

SEQ ID NO: 650102 - DNA, 104 bp, Homo sapiens
cgtaacgcagcgccccagtggtggtggtggtggtaacatcatgtagagggagtatcgggctgttacggcggcgctgttacggacgtgtaggagggctcgttacg

SEQ ID NO: 650103 - DNA, 277 bp, Homo sapiens
tgatgttatcccaacacattgatatctagcctgaaaactaagtaatgatgcttattaatataacaaaacaatcattggtcatcggctagatggaaccttatggatatgagaaaatcatggaaaatctgagagctaggggccctggaaggacccagtgctgtgaacaacatggagcttaatgaggtcatgggtcctaacaaaaagaggaaagctctggaagtgctggttttaataaccctagagccttgttcctttctgggaattcttcgtgtccccc

SEQ ID NO: 650104 - DNA, 336 bp, Homo sapiens
gctgcaatcatctcctggatctgggtgccagctgcatgcgaagcgagctttggtctcctccatggctggactccatgtgatgctctcatgctgagcttggtgactgcagctcattctccagtgttctgcatggtgcgccagagctccgagatctctgctcttgctgctctgcccctgctcgctgtgggagcgccacctcgctggccagctcctctgtcttggagacgaaccattcctcggcatcctatgcggttcttctctgcaaatcttctcatacttggtcacgcatctcgtacagaatgcggatcagttccacgccaggtgcacgcaccacaa

SEQ ID NO: 650105 - DNA, 162 bp, Homo sapiens
  misc_feature (28)..(28): n is a, c, g, or t
  misc_feature (81)..(81): n is a, c, g, or t
  misc_feature (117)..(117): n is a, c, g, or t
  misc_feature (126)..(126): n is a, c, g, or t
atggagctgctgacgctgacgtttggcngcgacggagctctgacgcgcatgatgacgcatcttcaccaaggccgccctgangacgtttgcggggcatactgctgtgctgccctaagnctaccaggncgctgtcgggcactacgggtggttgacacccaccca

SEQ ID NO: 650106 - DNA, 605 bp, Homo sapiens
  misc_feature (29)..(29): n is a, c, g, or t
tttactaattgttatgagttagtgcaacntggttatattctgcacagatcttacgaacttatcatgtcattgtcacaggtactattttgcattccatattcggatgtgacaatcgtgtgaataggatcatggccaggatctattccatcttaggcatctcgagcatacccactagtgaagtaggcatatgttaggcgggtacttgccagcttttgcctcccaccttgttcatggcatagtctgcagtactggttctcgcattccagtcttgcagttctggtcttgatgcataccggatggcattttgtgtgtttttctaatggatcttatattttaagagccttaattctgttgtgccagtaccttttcatatgtaccaatcgttctttatgttgaataaagtttttctttataagcacgcagccaaccagtctcttctgatgctcagtccatgggtgtccagacccatggtgttcacatattctgagaattgcgggttagctttctggggttttataaagtatagcccgctctgtttagctaccttattgacaatgtcttgacaatctttcccagtgatatcatgcatctccagactagttctc

SEQ ID NO: 650107 - DNA, 672 bp, Homo sapiens
agctctaagcaggatccgtccggcacgcgcgcccgtcagttaaactgagcatggtcatagattgttgcatagaagatcaagtgcctaattattgctggcctactctccgcttctgaaagcccgggagataaatcatactgagtgatgaactaagctccgtgttatgtgcatgtgacgagatactcggtgtagtgggactctcatcatctcaagcgatgtccaagcgagctctgatcgtccacgttgattgccccttgaacgtgtaggcagagcagctcagagcacggcttgaaagcggatggtaggaattcccttggcaagaggttcctccagaagaactcaatgattaacatgaatgtcacgtagcaaaagtctcgagtctgatggtatctggggtgaacatgacgttgattacctttcgttggtgaggaagaatgtaactttgaatccagatcccaatgagattaagcagctatggttatgtgtcaaaggaagaactacaaacgaacttctgaaaaaagcagtcagtggtgaaattaacgataacgccatggtttacaacttattgcagcgacttttctctttaaatggtgcgataacttaaatcatttgacactcagtttgttgaccatgacaacactatccgaatgtgaatatgtaggtacaatgatc

SEQ ID NO: 650108 - DNA, 597 bp, Homo sapiens
ctgagcacggagaggctgacggacaggatctatgggcagatactaagagcgaacttcacataggaagggatctgcgaacacgttgccaggggctcgagaaggtcactgagtgagttattgggagtcttaatagaataacactagatattaggtccattcattaattagttccagtttctccttgaaatgagtaaaaactagaaggcttctctccacagtgtagtgccccttcactcatttttttttgaggagaagggggtctctgttaacatctagcctaaagtatagaactgcctggggggcaggggttaggaatctcttcactaccctgattcttgattcctggatctaccctgtctgtcccttttctttgaccagatctttctcttccctgaacgttttcttctttccctggacaggcagcctcctttgtgtgtattcagaggcagtgatgacttgctgtccaggcagctccctcctgcacacagaatgctcagggtcactgacccactgcttctcttttgaaagtagagctagctgccactttcacgtggcctaggtagtgtctccactacaccctgtgctccctgccacatg

SEQ ID NO: 650109 - DNA, 291 bp, Homo sapiens
gacatacgtctatgctggtccatcacatgacgagagatgcccatgccgtcaccatgttgattcggggggtaataaacccacgcgaggatacagaccaaggtttttggcccccaaatttactgggaaaaaggatgcctgaacacgccaagtcgggtgcgaattattgcagttgctgctgctcaccgccccttatcagtttttcttctcttctttgacattctaagaacttatagataacttaaaacttttgtgaggcagattaatgtgggccataaaacctttaaatgttta

SEQ ID NO: 650110 - DNA, 372 bp, Homo sapiens
  misc_feature (70)..(70): n is a, c, g, or t
  misc_feature (72)..(72): n is a, c, g, or t
atttctaatttttaagaattggggaagggggtagacccctaattcataacccctctaatttttggtaatntnaataagggggccccatgggggagccctttggtataaaatagccaaatagaaaaggggcccattggtttcccttttaatatgcttaaaataagcgggggggtctatttcaggtttttggccaaaaaccattggggatagggatggggagggtaaaccagtaaagggggttttttggacccctgtttgggccggtttccccggggccttttatcccaagggggggggaccccgcggggatacgaggctccaagagaaaatgggggtataaaaaaggggtcagaattaaccttttttttcata

SEQ ID NO: 650111 - DNA, 277 bp, Homo sapiens
  misc_feature (157)..(157): n is a, c, g, or t
  misc_feature (159)..(159): n is a, c, g, or t
  misc_feature (161)..(161): n is a, c, g, or t
  misc_feature (241)..(241): n is a, c, g, or t
  misc_feature (270)..(270): n is a, c, g, or t
ggcacgagctggcagtccttgggtctgagggggttatctaccgccgcttgcattgcatctgtcgcgcgcttattgagcggaacagtccgatagctattatttttggtgtctggaaggtgcgcgactcgttttttgagatcaacttgggagagcgttngntngcaatctcagatgagcgcatcgtcgtttccacggcgattcgtgtcatccatgcgagcatagggttgctatgtgcattaanccgcccccaggaggcgttgctcctccgtnccctacg

SEQ ID NO: 650112 - DNA, 234 bp, Homo sapiens
gtgttacacattcatgctgttgcaggcgtgcaggtcggtggtgttgcacattcatgctgttgcaggcatgcaggtcggtggtgttacattcacgctgttgcaggagtacaggtcagtggtgttacacacattcatgctgttgtgcagctatcacttacatctccagaggtgccttgtggtaagaagtgggctagggcatttttaatcttagagcgaaaacctataatcactgcg

SEQ ID NO: 650113 - DNA, 1096 bp, Homo sapiens
gggaagtcgctgagtgggtggtgaagctggttggtgaaatgtgtctgtgtttatcttcgcgccccttgcgttcttgcctgcgtgcttgcctgtggcagtgtaaatgctgcgattgcgatgatgctctggcaaccctgccgactcatgcctgtgaacctggctccctgtgccccagtggtgcgtggttgtccttggttgctccgaactccttcctgcatgggctccttgtggaccctgctggtatcctgggatgtccgcttgctccagggtcccttttccttgcatgttgatgtgctgcctgtcctggccatcctctagtgtcccctgcaggaacccccagtcattggggcaaataccatgcatgtgaagcgcagcctgctgctgggacgctggcactgtgtgtgccataatgactgccccaggatggtgacatgctctggggtgtgcaccaaatggactggggacatgggcccaatgactccttgatggtgacatgccccgaagaacgcctgacctcttccactcctgaggaaatcaatggcaccatgagaaggacggaattcctggttctggcatgcatgatctaggaaggtcgaatgatcaaatgctcccgcccagtgctcggccaacggagatggtatcgatgtgacggggggccggacaaggacacgtttacttatctgggtccttcaagcaactggagtaaacttccccatcaccagaagccacaataacttttgtagccatcctggatctgccggcacaggacgagcatcaggaccagtccttctgtggagttggtcagtggacgcagcgaacccttccgagcccaaagtaaaccagcaagcttggacaagtaaccagcatcactcacgtgcagaaacactgctttcgacggtattcgagtgctaattgacgggatcaccaaattggccagaagatgttagacttgccacgtctcccccagtgccttcctaatggggcccaatgttgagcaccaagaatggatgggcacccatatatcccaggattcccgagtacagagaacagccggcgaccttagcacacatgcgcgagcagcaagttgtgcacgcag

SEQ ID NO: 650114 - DNA, 369 bp, Homo sapiens
  misc_feature (369)..(369): n is a, c, g, or t
gagagagagagagagagagagagcgcgagagagagagagagagagagagagagagtgacagagtactagagcctccaggttcagggctgtcttcagctatggtcccttcacggtcttcctttctgcgtgactgcatgtgcccttgtcttctgcttgctttctccgtgtccagccatgaggtactgctctgccatactctgataatcgggtgctccattacttattgcagatgctctgtttcgtccttatgtgtgctcgatgcattccgatcactagaccttgttgaatccccctgtctactgccattattgggcttgagtctttgactgtgtatcgtattggtggctcccgtcttcctgggcccgggtn

SEQ ID NO: 650115 - DNA, 112 bp, Homo sapiens
agctgttaaggacggggattataaacgtgaaactcttgtcgatggtgatatcgttgtaatgataggtggtagaactggtcgcgatggtattcaaggtgcgagtggttcaagt

SEQ ID NO: 650116 - DNA, 166 bp, Homo sapiens
gcacgagatatgagcctataattttctcaataaaaatttgtatttgaggctgggtgcagtggctcatgcctataatcccagcacttcaggaggctgagacgggaagatcgcttgagcctgggagttcaagaccagcctgggcaacatagcgagaccccatctttcc

SEQ ID NO: 650117 - DNA, 148 bp, Homo sapiens
aatcatcctccaacctgtgactgaagcaggaactcaactggatgtctctcacccactattcacatcttcaatgactaacaggccattaactgcacaactacagtgtcaaacatttattttactagtctcctgtagtgtaaccattaac

SEQ ID NO: 650118 - DNA, 81 bp, Homo sapiens
actctcaatggcttcaggtgtgtgtactggggcagcaccgccttgagtctggcaggaggtgattaaacagctcagcttctc

SEQ ID NO: 650119 - DNA, 350 bp, Homo sapiens
tgagcctctcaggtagatcattactgaggttagaacagcagctgagcctgcaaaagtcagtgatctagtggctgagctggcactagctggacctgtggaacgctggaactgcatggcttctctgccgcaacttctccaaatttccacacatggcgcaggtgccccccatagggtgcttgtgggagctcctggctcctatgcttcctactggataggggggcttcagtggcaaccatttgggccaacatgcaccctcatgctggaccagggttggccgcaccagccccgggtttgactgggggcactgggggtgcgaacgttggcttgatgacctgctttggtgcccgcca

SEQ ID NO: 650120 - DNA, 164 bp, Homo sapiens
  misc_feature (115)..(115): n is a, c, g, or t
gtgggggggagatgacgggcagtaatgcagaggaggacgcgccaaacttaggggcgagttgtccagctctggccgcaaggtttgcatccgactggattctttccttcccccaggncatgatggtggcccacggcaataagtgtggggtacctgagctcgaaatt

SEQ ID NO: 650121 - DNA, 1021 bp, Homo sapiens
gcttcaaatggcggatgactccggtgcagcgtgggggcccgggggcccctggtggccctggcatggggaaccggggtgtcttccgcggaggtttcggtcgtgtcgtccgggtgcgcggtcgcggtcgtggacggtggtcgtggcctgggtctgtagctcgcggtggccccgtcgtggaatcatggagctggcatggccgtacactgatagctggtgctgatttgggatcacgaggacaattgaatgactcagggtcccgtggagggaagagtcctaatctctatctcctctggtgtcctatatagggaaatcccagtctccttgctttccgtggcctggaggagtccctttctcaagtgcaatgagggtgtctggagagaagtgagtgtgcagtgcggtaatgcgatccggttgcggtcatgtcgccacagagttgttcaagggcttgtggttgctttcgggggagctacagtggccacgttggtcttgggtgcttggttcccgcttgctgcctgggtaggcgtggacgtcggccattgcgttggtgccactctagtcctggtctagagctctcgcattcgtcgccctccgattgcgcagatggctttcctgggggaacaagttgcggtagagcccctgagtgtccgcttggccatgtgacaagtgccgttgtcgggtctgtgctggtgcgcctcgtccctgcacaccaggggcacctggatcgttgccggctgcctgtggtctaggaaagctgttgcatgagggctggtatcgatgtctggtacatcttacgtcgggtggttgggtgctccctgggtgagttcgcgataggcccttttgttgccgttttcttacaccgacatggtactgagctccggcctgtggagggtctgtgtgcccgtcttcctttaggaggtcttggcacctgttagccccaccgggtcgggggggggggcccacggggtccgccggtttccggccacgtcttcggggccccccttgggggccccctttttcgggg

SEQ ID NO: 650122 - DNA, 111 bp, Homo sapiens
ggtgaatgtcgggcgagacgcgtatgatgcgcgctgagggcgcaatgcatcaggccataaatcggagatacgtagcggtaacgtaacaacggactcagaatatagtagatg

SEQ ID NO: 650123 - DNA, 1002 bp, Homo sapiens
aaggagaaagagaaggagccagaggaaacttgacaaactggagaactctgcagcacccaagaagaagggatttgaatgaggagcacaatggacagtgatgatgacagcagtgatgacgagcaggaagaagaagtccagaagcgccccaagctgtccaagaagatagttgcgcgcgagatgaaccgcttcactgtgggtgaactcaagcagctgggtggctcggaccgatgtcgtggaagatgcacgatgtgacagcgcaggaccctaagctcttggttcacctcaaggccacatcggaactctgtgcctgtgccacgtccatctggatgtatgaagcgcaaatacctgcagggcatacggggcattgagaagcccccgcttcgagactgccagacattcatcaagaggcacaggcaattcaggagatgcgagaggccctgtcacggagaaggaagaacagaagaccatgaaggtcaagaatgcgagagaaagttcggcctaagatgggcaacgattgagatcgactaccataaactgaatgatgccttcttcaaagtggcagaccaaggcaaagctgacatccatggggacctgtactatgaggggaaggcgttcgagacacgactggaggagaagaagccaggagatctggctgatgagctaaggattacctatggggaatgccagaagaacgatatggcctccatgtgtgctcccacaagggtgcatggccatgtcaagaaatgtgacaaccccatggattcgcactttaaatccctgggtgaaatctcctacctgaaacggcgtcctgggggtcccacgcgtggggctgagggagaccccggggcataacaggggacaccccaatggagccgctgtaaacaccagttagaaataagagaccagggtgccacaaaattgagacccggtggacgcgagacacttacaaagctgcaggagacaacaagccgaggacagcaaaccgcagggaagacgggctac

SEQ ID NO: 650124 - DNA, 106 bp, Homo sapiens
gctggtgtctcagcacaccacacggtccctcacaggtctccacgggggcgcagggagcaggatttactcctcctgttatgtagtagtggcggcagcgggtaccgag

SEQ ID NO: 650125 - DNA, 273 bp, Homo sapiens
cctttttggggggaaggggctcccctcctggatcaccattttccagattaacgggccccgggggggggcccttggggaataccttttctttcccaaaaccctgggggcccccctgaaaattttgggaaaaaagggggcccggtttattttcccaggaaggggcccttaaaaaaaaggggcctgtccctggggccccttttcaaactcctaaaactggtttttatgtccccggttttttggggaaatcccccaaaaaagggccctaatttttca

SEQ ID NO: 650126 - DNA, 1100 bp, Homo sapiens
ggagttaaatggggtccatggccacgtgcgttgtagttgccccgctaaggcgcactgacaacgtgtgcccctaaggctatgtttgtatatgtgtcctcagaatctacacagaaacgagatgaaagattcggagagattgacccacatgctaatctgaagagagtgcggataccacaatcgtaggcgcaagatccgagagtattgagccctagatattattactacggcacaaagacgcaatgcgcacattggagacatctggactagtatacagctaattgctgattcatacagacgtattcaccgcgtggactcattgcaatgcttgcaccatgaaacgcataggatctgagacgcaatagaggataggatagcgagcttatgtagttagccaacttggttggaacgttagtataaacatagccactatatccactaggcgagccaggagttgaaacgaacaggtgcatgctgacgaggacatgcttgttcattgcaccagttagcactagtgcgctcgacacgggtcaagagcaactccctgaaattcgggactctgaaatgggaggatgcaaggaactcgggcgattactgggtttccagaaccttgtgcttccccttcgactttatacgggaaatcgccttaatggtgaagttgtttaagccaagaatcagagaaacctccatggcggagttcgactgccttagagatcgttatgcaccgattctcaaggacgttatgagtcattaacacttaacgttcgaaaataatctatgagttacgttacgttagattaacttacttcctttcacttttgtaaccagcaccatagttggaaaaaccaatacatgtacagcaacgcataaggggaaactatcagaacaaacatctcagagaaaatacgacaataaactgcgagaaatagatacaccagtgttatatagacgacgagacagaggatgaacacgaacggtcgtgaaaatccgaggaacagtccgccctacaggacgcagtactccacgtaaacgctattcgaatctcataggacacccaggtagatgaacagatttaacagagcacaagagagtatctacgaact

SEQ ID NO: 650127 - DNA, 474 bp, Homo sapiens
cggaagttgcagtgagccaagactgcaccactgcatgctagcctgggcaagagagcaagactctgcctcaaaaaaaaaaaaaaaaaaagaaaaaaatctaagctgttggaacattaaattattttgagctttaaagaaatgtgtttatgagacttgagtcatgtgacaggcagctgtaacctaggaaactgtaaacattttttctctgattatagattagcctccttccttatctacataattttgtaaaatgttgtaaatgactaaagggtacttccctttagtcccacttcactgctgatcttcattgcagattaacttccttcctacctctctcacacaaagccttcatgactgttacattatatactcttttaaattagaaaataaatgaaaccaagccacaaggaaaagaaaacaaattaactaattgaattgttttaattcataaaccagctttgtataagaaataaa

SEQ ID NO: 650128 - DNA, 385 bp, Homo sapiens
  misc_feature (28)..(28): n is a, c, g, or t
  misc_feature (75)..(75): n is a, c, g, or t
  misc_feature (94)..(94): n is a, c, g, or t
  misc_feature (167)..(167): n is a, c, g, or t
  misc_feature (187)..(187): n is a, c, g, or t
  misc_feature (246)..(246): n is a, c, g, or t
  misc_feature (284)..(284): n is a, c, g, or t
  misc_feature (333)..(333): n is a, c, g, or t
tggatggacccagcagagggcactcctnacccacggggaaaatcgtgcgcccggcctcgtcccaccgcccagaanacgccgctacacaatggantctcgctctgtcgacccaggctggagtgcaatggtgcgatctcggctcactgcaatctccgcctccgggtganaggtgaagccagctggactnccctgggtcgagtggggacttggagaacttttctgtctagctaaagatttgtaaatgcnccaatcagtgctgtgtctagctaaagtttgtaaacgtnccaatcagcactctgtaaaaatgggccaatcagcactctgtaaaatggnccaatcagcactctgtaaaatggaccagtcagcaggatgtgggcggggtcaa

SEQ ID NO: 650129 - DNA, 268 bp, Homo sapiens
tctctccacacggataacacgtatttttatgagacatctctcctttaattatttttatattttaaaaattgttataaatatataggtataatgacagcggggagatacataggcataggtacagctaatgataaagacaaggagatataaagatatagataaagactatagacagatattaatatagggatatagatatttagagatagaagtaaaaacagaaaaaaaaaagatatttaaagtaaaactatgaaccagtgtgagagag

SEQ ID NO: 650130 - DNA, 367 bp, Homo sapiens
  misc_feature (237)..(237): n is a, c, g, or t
  misc_feature (279)..(279): n is a, c, g, or t
atgagatggaatctagctctttcgcccaggatggagtgcagtggcgcgatctctgatcactgcaacctccgcctcccgggttcaagtgactctccagcctcagcttccagagtagctgaaactacaggtgagtgccaccacgcccggctaattttgtttgtatttttttagtagagacagggtttcacagtgttagccaggatggtctcgacctcctgacctcgtgatccgcccgtntcggcctcccaaagtgatgggattagaggcgtgaccacccgngcacggcggaaaacgagattttttagatcaactttacattgccaatgcccattggtattccttcacaacaaattcacaagagtgtcag

SEQ ID NO: 650131 - DNA, 150 bp, Homo sapiens
gcccagcgagccagaagtggtggctggtcccgcgcgaaaattcttagctgtacaactctagggaatgaaacaatagttcaagaggaggcctgttaaactttttttacaaatacaattgggttattcaccatgggggttaggcaaagctta

SEQ ID NO: 650132 - DNA, 364 bp, Homo sapiens
caggactcccccactgctttcagagcccccagatcacaggaaatcaagtgatgatctttgaaactttctgaaactgagctccccaagtctacaggggatctaaccatgcctggccttccccaccaacacagagcacatctccccaaggctcccaacccacgtgggccacaaatcagggtctgctattacccaactcagcaggtgttgcagcctgagagatgaagcctcaccaaccccaccatgttaaaagctcatggttcttggtttatcacccgtcccctgggccctgactgtacactgatcattcactcatctgggaaccactggccacattctcccacattatctgtctctctatacctta

SEQ ID NO: 650133 - DNA, 152 bp, Homo sapiens
atgtcatgatgcctaactcatacactctttgcctcaaatataattactaaaaacaaatatagtataaacattaaacaaatgaacaataatcatcaatagacgggttactttcaaggaagagttgttttgtgacaaattctactcttgatcta

SEQ ID NO: 650134 - DNA, 1039 bp, Homo sapiens
tgtgcaccccatcccctcccccccgctgccccgattcctggccccagctctgggggtggatgtgcctgggctgccctgggccagagtcctgtgcctggatgctgtgatgctgctgccctgtgccccagatggagcatgcatctgtgcacagtgcattgactcatcgaatcagcgaacggatgtgaagtgcatctgagtgagacacctgcgtgcatgtgtgtagccaaactgtgttgaaccatgagatgtcagagcatgacattccacacgaagactgccctccagcaagagcacacagagatgtgaacaatacactaaccaaactaacagactaactataacagtgactagttagatactaagaccctaggggcatatggattaagtgtgaggatgttgacacacaatagacacttaggacatacaaacaaagaaaggggggagacgcaacaacccttaagagccgtattatggtaagcgagacgcgcagcatcaggaagagctatcgtcgacatagacaccatacggtacccccacgttaaaaacgggaagcagcacaccaacagagagaatcgacaacgtgaaagcagcatataggacctatccccccttaagcaaagataggagcccaaaaacgtgggcaagcctccagcggtgggaaacccgtaccaatcggaagcaacaacaggaaagctatcattcgacatagacttcaggcgtgcatacaccgcgataaaccatggcacacaccccgttggggccgacccgggaaagtacaagcgcgccttaggaggatttatggccctaacacagagagaagcataagccacgttaatagacccgaacagggaaccaccgaaaggaactgcgagaaagacagccgaagaagactgctctcgggtgcacggacgtagagaacgaacatagaccacactaacgacaccaacgattaaggataaaggggacaaggagaaattcaatggggaacataagaggcggcgaggataagcgaaggtacacgacagcagacaccgcacgc

SEQ ID NO: 650135 - DNA, 421 bp, Homo sapiens
  misc_feature (12)..(12): n is a, c, g, or t
  misc_feature (151)..(151): n is a, c, g, or t
ggagcaggcccngagggccggacccgcggccgcaagaggaacaggcccccccccccccgagggagggagcacagacggagcggcgggaggagcagccgggggctgcaggggctggagcagcaccaggcttggactccactttttttaacgnggagaaggactcggagctcttccacagcagtgtggaggccattgtgaatgccatctcacacgctcgtgcccagaggtacgtgaacacactcctgaaactcatcccgctggtgctgggtctgccggaacaactgcggcaggcagtgcagaatggggacatggagacctcccatggcatctgtcgcatcgctgtggccctgggcgagaaccactcccgggccttgctggaccaagcgcagcactggcagagctccctggcactcgtaaacat

SEQ ID NO: 650136 - DNA, 204 bp, Homo sapiens
agaaggtggagctgcaggagctgaatgaccatcgcactcatcgcagtgcgttctggcagcagatagatctctgcgagctcgagagctcaaggccaaggagtcgcgctggggcctctacgaggaggagatgcgggactgcgcgacaggtggcacagctaacacgacaaagccgcacacgcgcgcgagcgcgacaaccacgcgcgc

SEQ ID NO: 650137 - DNA, 327 bp, Homo sapiens
  misc_feature (99)..(99): n is a, c, g, or t
gtcactctaaggatcctgtctgtgctggtcacagcttcgacaggtactgtcttctgctaggcagaggacacctggtgacatctcaagggtgacgcattntcttatcatcgatcttctgcacccatactttccgccgaaatcttttggagtagtcttgatgcggactcgtgcttggccagctttctcttgtaatcaaaccccacagcagcggagtctgcctctccgactgaaccaccgaatttgccttccaaaacagttctttatatctttttggggatttcatgcagctgcaattttctcctggtgatcccagacaagaaccacacg

SEQ ID NO: 650138 - DNA, 288 bp, Homo sapiens
  misc_feature (1)..(1): n is a, c, g, or t
  misc_feature (33)..(33): n is a, c, g, or t
  misc_feature (42)..(42): n is a, c, g, or t
  misc_feature (47)..(47): n is a, c, g, or t
  misc_feature (59)..(59): n is a, c, g, or t
  misc_feature (61)..(61): n is a, c, g, or t
  misc_feature (90)..(90): n is a, c, g, or t
  misc_feature (96)..(96): n is a, c, g, or t
  misc_feature (106)..(106): n is a, c, g, or t
  misc_feature (125)..(126): n is a, c, g, or t
  misc_feature (132)..(132): n is a, c, g, or t
  misc_feature (154)..(154): n is a, c, g, or t
  misc_feature (180)..(180): n is a, c, g, or t
  misc_feature (215)..(215): n is a, c, g, or t
  misc_feature (219)..(219): n is a, c, g, or t
  misc_feature (247)..(247): n is a, c, g, or t
  misc_feature (253)..(253): n is a, c, g, or t
  misc_feature (256)..(256): n is a, c, g, or t
  misc_feature (266)..(266): n is a, c, g, or t
  misc_feature (281)..(281): n is a, c, g, or t
ntttatcaaaagtttattaaatagaatacaatngcaaaattnaaggnttttaacaattnantggtaaagttcaagtggaagaaagcaaanctcagnggagtaaganaagaaaagaacaatatttnncctatnccatttaattcccacaaatttncaaagtgagcattgttattctcagtntccagatgaatgcactgaaataattgggatatttntccntccaaatttcatgttgaaatttggaggnggggtntgngtgggaggtntttggttactcagcnaaagaat

SEQ ID NO: 650139 - DNA, 306 bp, Homo sapiens
ttgattgagtggcatgtgatgtgagattactgaatctgtgggagctcggtacagccggggggggtcctcagactctcatgtgcagctctgtattcaccttcaaaaactatccatgagctggtgtccgcaggtccaggcaggagtctggagtgggtctcaacaataaagttgcagtgaccctgatggacctattatagagcgtctgtgaggggccgcttcaacatctcaagagacaattccatggacaccctatattttaaagatagacagtctgacaaggtgacgacgttcggcctttattttttg

SEQ ID NO: 650140 - DNA, 188 bp, Homo sapiens
agaggttgcagtaagtctggatgccacatcaaactgttttgtgggtactcctaaacttcgtggaggagccctctttcataaatctgagacagccttggtctgagggggcaaagcagagattcacgtgctgcccaggcatagcacatagcaggtggacatccctggacactttcctgcaaagcacgcaa

SEQ ID NO: 650141 - DNA, 168 bp, Homo sapiens
  misc_feature (88)..(88): n is a, c, g, or t
ttccccccccccccggggggtgtggtataatttttttttattatttgtgtgggggggggggggggggggggttttggggggggggggncctttcccccccccccccccccccggggccccccccccgggggggtttttttttaaaaagggttttaggggtttttttta

SEQ ID NO: 650142 - DNA, 668 bp, Homo sapiens
tgagccccccccccccccccccgcataaaatggggctccgtcccgtcgtttaggtcgcctcttaatctccggttctcagtaacttccttcattccggttctttaaagcgtcgggaccataggcgcgagttactatatttagttctacccacagctctccaataataacttcacgaagcgggcaccactaccgccaattttacccctagaggaggaaagtaagtctagagaagccatacaacccgtttatgcgatacggctaggaagcggcgcgattaggacgcgaattgtggtaagtcgttcctagctcgcgtccgcgcctatttcgttacgtcgttcctaaaatagagcaaagatagagaccctcagtaatagtgttcgaatgttactttgttcgttttcggacctctagcgtcgtgggtgaacttacttttctccgtccaagatcgagtgaggtccgtaagcattggaggtgaacgaaccgggtttgttcgttctattccttcttttagcggacgaagaggagccatccgcgctcgctaacagtcttctatcgggtagtagacttaaggggttttaggcggcgggttttctaggtcgggcgggtctcgcgtctggggggctaattattggggcaatcggtccttcgcaggaggtgctccggtcggt

SEQ ID NO: 650143 - DNA, 277 bp, Homo sapiens
gtgactctagagatccccctgaaatgtctgttttgactggggctcatagacgatgtgtgcagacttgcataatggtggcttagtgtgtatcagtgaacactacagcacaggtgttctgaccatgctcaggcttgcgacaagtgagcaactctagtggcttgcaaacagagaagtttactttgtgcccagtcatggggtcaccgttgggtgagtgcaccagaatagcagtgcagcatgttggtatcattggccgttcgatcctcatttcctccctaaa

SEQ ID NO: 650144 - DNA, 3672 bp, Homo sapiens
ggcgccggcacacctattggcccccgcggcgtcccgtcgccgcgtcgcgttgctggcccgtcggagcgacgccgctcgggtcagtcggcggccggactgggaagatggacgcagctactctgacctacgacactctccggtttgctgagtttgaagattttcctgagacctcagagcccgtttggatactgggtagaaaatacagcattttcacagaaaaggacgagatcttgtctgatgtggcatctagactttggtttacatacaggaaaaactttccagccattggggggacaggccccacctcggacacaggctggggctgcatgctgcggtgtggacagatgatctttgcccaagccctggtgtgccggcacctaggccgagattggaggtggacacaaaggaagaggcagccagacagctacttcagcgtcctcaacgcattcatcgacaggaaggacagttactactccattcaccagatagcgcaaatgggagttggcgaaggcaagtccataggccagtggtacgggcccaacactgtcgcccaggtcctgaagaagcttgctgtcttcgatacgtggagctccttggcggtccacattgcaatggacaacactgttgtgatggaggaaatcagaaggttgtgcaggaccagcgttccctgtgcaggcgccactgcgtttcctgcagattccgaccggcactgcaacggattccctgccggagctgaggtcaccaacaggccgtcgccatggagacccctggtacttctcattcccctgcgcctggggctcacggacatcaacgaggcctacgtggagacgctgaagcactgcttcatgatgccccagtccctgggcgtcatcggagggaagcccaacagcgcccactacttcatcggctacgttggtgaggagctcatctacctggacccccacaccacgcagccagccgtggagcccactgatggctgcttcatcccggacgagagcttccactgccagcacccgccgtgccgcatgagcatcgcggagcttgacccgtccatcgctgtggggtttttctgtaagactgaagatgacttcaatgattggtgccagcaagtcaaaaagctgtctctgcttggaggtgccctgcccatgtttgagctggtggagcagcagccttcacatctggcctgccccgacgtcctgaacctgtccctaggtgagagctgccaagtccaggtggggtccctcggaggtacgatctgtgcccttgcttccccagtcctggcccccttggttttgaccattaaggtgtgtgtgagcctgagccgtgagcacttggcagtggttcgcctgtgagaccaggtatggagtggagcgtcccctcctccaagcttgcgcccagcagcccaggacccacctcgtcttccccaccagcgctgcctgccggggcgctgtggagctgggcgtgctaccatggagtcctcaggggtctggagcagacagaacatgcaggctctgtggtgacgcagtcctgggtgggggactggttcacttgggcaccactggccatgggtggcgtagacccctcggaccatggccagcgtgccgcaggagccggcctgggctcgtgcagtgaagtgagtggccgtgagcgcgtcctcctcatctctgtctccctgtggaaaactctacaaacaaggcaatggcaatggaaccactcctgatgaccacgagggtcagacgcgggacagaggcccctcaggcctgagattgtgccggccgccccctgccctcctcaccctgccctgctcctcttctctgctccctccccccatattcgcaggtctgcacaacccccggacctgttcacacccgcatggggacagctgtctgtgggctgcagagcaggcactgctcagtctgccccacgccaagggcccttgactcacacccaggtggcccacccaagatgcctgatgcgctatgtcctgttccttctagattcttctgatgtagagcgactggaaagattcttcgactcagaagatgaagactttgaaatcctgtccctttgaaaatcctggggtcgggggtggcacctgtgagagcctggggctcctggtgccgctgcgtttcatccatcccgcccgctcgcctgccgagggctgcgccccgtgctgcctccccccagagggccacccgctgtgctcgtggactgaggctgcgctgcccgggaggccttactgcttggtgtcagactgcccagctcagagtgcccgtcagggcctgtgcatccgcacgcggagccgtctgttaggagcttccagagcgttctctcgacactgccagccccgtgttagcacctgggcctcagtcccacttgctcccaggcgccggttctgtggttggtttggaattaaagtcctgtttgaagttgtcagacacagacatgaatttctggggcgctccctgagtcagagtctcagaagacctgtgcaggctggcgtgagaggagcggcagccacactgcggccccacgcccaaggactgggctgctctcgaggggggcgcgcccaccgctgtgtcctctctgcccagcctggcttaccaagggctacctcagtgggagatgaggttggaggaacgaaggcgaggttcctccttgctttggggagaaaagtattcaggaagtgggtgtgtgggaaacctgaagatggcgtgcacaggacacagcgtggtcggcctgggcagaagggcggctggctgtcctggagctgctgctggagcctgccctcagagtgtccctttccagtgctgtggcattctgtggcagcttccccaggtgtggtgacgggggggggcggggcctccacctgtgacagtcaggcttgagggtggacggcgtgcctctcccaggagccttccccatgtccttgccttgctgagaattgccctcccatgccgctgaggtgttaggtggtttagggccaaaaggggaaaaccacttgagtcttgtggtgtgtggtgggcagacaccacagggtggcatcacctggtggcatttccagaacctcagccccgattccagcacccaccaccgcctgaccctgtgtaacctgctgtcccgggtcccagagtgcactctgccccgctgctctgctgcctgtcctgggaaagtatctttgccccactaggaaatgtaaacaggagggcttggggagcgtgggcacttttctcatgagcagctactgcggcgttggcaggactcgctgctgctgctgctgcttgtgtaggtcggggagccggagatccccgaggacgcgcgccggacagtcggcactgaccggcccacctggtagcagaggacacccccagccccccaagcattgaagacatagtgtatttcctcgtatcctttctcccttgggtgtagttggggtggggaagcagggaaggctggtgcgatctccattccttgggctccacgtccgagttcatggtgcgccgctgtgctgggagctgcagtggtaatgtgtgggacaccttgaccaaaggggagctttgtctcgtgtgttttgaaaaaggcttaatgaagagaatgttgttcattcttagtagtatagtttgcaattcttaatggcaaataataagtttcagtagaaaacaaaaaaaaaaa

SEQ ID NO: 650145 - DNA, 5457 bp, Homo sapiens
  misc_feature (3309)..(3309): n is a, c, g, or t
  misc_feature (3341)..(3341): n is a, c, g, or t
  misc_feature (3464)..(3464): n is a, c, g, or t
  misc_feature (3476)..(3476): n is a, c, g, or t
  misc_feature (3488)..(3488): n is a, c, g, or t
ggcgccggcacacctattggcccccgcggcgtcccgtcgccgcgtcgcgttgctggcccgtcggagcgacgccgctcgggtcagtcggcggccggactgggaagatggacgcagctactctgacctacgacactctccggtttgctgagtttgaagattttcctgagacctcagagcccgtttggatactgggtagaaaatacagcattttcacagaaaaggacgagatcttgtctgatgtggcatctagactttggtttacatacaggaaaaactttccagccattggggggacaggccccacctcggacacaggctggggctgcatgctgcggtgtggacagatgatctttgcccaagccctggtgtgccggcacctaggccgagattggaggtggacacaaaggaagaggcagccagacagctacttcagcgtcctcaacgcattcatcgacaggaaggacagttactactccattcaccagatagcgcaaatgggagttggcgaaggcaagtccataggccagtggtacgggcccaacactgtcgcccaggtcctgaagaagcttgctgtcttcgatacgtggagctccttggcggtccacattgcaatggacaacactgttgtgatggaggaaatcagaaggttgtgcaggaccagcgttccctgtgcaggcgccactgcgtttcctgcagattccgaccggcactgcaacggattccctgccggagctgaggtcaccaacaggccgtcgccatggagacccctggtacttctcattcccctgcgcctggggctcacggacatcaacgaggcctacgtggagacgctgaagcactgcttcatgatgccccagtccctgggcgtcatcggagggaagcccaacagcgcccactacttcatcggctacgttggtgaggagctcatctacctggacccccacaccacgcagccagccgtggagcccactgatggctgcttcatcccggacgagagcttccactgccagcacccgccgtgccgcatgagcatcgcggagcttgacccgtccatcgctgtggtacgtggcggccacctgagcacacaggcatttggtgctgaatgctgtttgggaatgacgaggaaaactttcggatttttgcgtttttttttcagcatgttgggataagtactgtgttcacgtggttgggaatctgaagggtataagagccggaactgtgtccttgcaccctcacgtccctcccccaggcaccacctcctgtgcagccttcatggccttcgagtggcccagagagcgtgtgtctggatgtgagcgtgtgtgggcgcgtgctgagtgtgcatggatgagtgtgagccatggtgagtgtgtccccctcacacctacatttaaacacacgggcggcccctccacccacccctgcaccaccttcgtcacacccacatttaaacacgggcggcccctccacccacccactcctgcaccaccttttgttttccggaggctctgacttgacctctctgggggatttcctaagaaggagcttccctgtttttccattttgattacctagttgtgatttttggtgtgtgatttatgcagacctgcctgccctcaaatatatttgatggggaaagaggccaaaaaacccccctagaaatcatgaatgacggtgacatgctcagggaagcagttaaccgaatcgggggctctgttgtggatgctccgccccatttaggaggaagaaggcagatctgggcctgaaatgggacggtctctgagctgtggcgcagccccagagtgcacaccacgctccatgcacctcctgggcagggtggcagtagtggggaacatgggctggagctctgtggctcacactttttgtttgtttgtttgtttttgagacggagtctcactctgtcgcccaggctggagtgcagtggcgcgatctcggctcactgcaagctccgcctcccaggttcacgccattctcctgcctcagcctctggattagctgggactacaggcacccgccaccacgcctggctaattttctgtatttttaatagagacgggttttcactgtgttagccaggatggtcttgatctcctgacctcatgatccacccacctcggcctcccaaagtgctgggattacaggcgtgagccactgcgcgcagcctggcgcacacttcttaccagaacctagtcacgaattcctcgtcgaactagaattaggtatgtttgttactgtaaacgcagcttggtggcttacagtgattggcactctaacagtcaggtcaggctagagagccagccaccgcagacagaggagtggacgcgtgaacgttgagttgagaccaaaggggccacctggtgggataactgtcctcacccgtgaggaggaggaatgtcccctgtccccgggggagagtgctcctacaccagcgccgaggcggcagaatggtgtcttcaggggaagagagtgcccagtttgagcttctccccccatttcgtttctttttgtgttaacatctgcgcatctggcagcgttgagaattcctagtgactgtcattacaggcggcagctttaaggatgtgattgccggtgacccttggccggtcccctgtctcctggctcctcagcaggaggctccctgtgtcacggtgtccttgggcagttctcggtggcctttgccgccaagcttccagggagctgctgggcgaaggctgagacccagcggccctgcctcacagtcacagagagaagagctccccacttggccctaactcataacctgccccaatcccggaacactcggtgaggtttgagagatgcacaccacgtaacatctcgtgggcgaatcaaggcacagcaacgcagtggagcctgaggggagccgggcactggtgcaggggaccatgcacagggcaccctcggagctccgttcctggccacaggagccaaggcaggctggaatgtccagcacctgcatgctgggggcctctgctgcgccactggcagtgggaatggaagcccccacctcttagccgactgcagatgggggtgtcgtgttctgctcatcgtcatttcgttttagtggggtttttctgtaagactgaagatgacttcaatgattggtgccagcaagtcaaaaaggtttgtagccgccccacacccacagccgagctgagccacccagggagacaggcagtggggcgtgcaggggtcgaaggcctgcgtccaggtctcaggcagcctcactgggccgtggggagctttgtcccgcctggcacagctatgtagctnagcagggtggggcgtcctggattgcccatctngcaacacagttaacaaccctggggacggatgttgcgtgttgactttagaatgggatttccagtgtcctcatccgtctcctgttgagatgggggtggtgatggggtgctgagctacgccggccnagtgcgtgtggnccacccccctcngccgtggtggtcagactgtgctgtgtgttgatcaccacactgggttctcgtgtagcctttagtgtggagctgcctctgttttctcatcagtgagatgggatgacaggtttgtccgctggctgtggccggctggcccctttctcttggccgcagcaagcactggggtgaggctgcacctaacggccatgtctcactaacagctgtctctgcttggaggtgccctgcccatgtttgagctggtggagcagcagccttcacatctggcctgccccgacgtcctgaacctgtccctagattcttctgatgtagagcgactggaaagattcttcgactcagaagatgaagactttgaaatcctgtccctttgaaaatcctggggtcgggggtggcacctgtgagagcctggggctcctggtgccgctgcgtttcatccatcccgcccgctcgcctgccgagggctgcgccccgtgctgcctccccccagagggccacccgctgtgctcgtggactgaggctgcgctgcccgggaggccttactgcttggtgtcagactgcccagctcagagtgcccgtcagggcctgtgcatccgcacgcggagccgtctgttaggagcttccagagcgttctctcgacactgccagccccgtgttagcacctgggcctcagtcccacttgctcccaggcgccggttctgtggttggtttggaattaaagtcctgtttgaagttgtcagacacagacatgaatttctggggcgctccctgagtcagagtctcagaagacctgtgcaggctggcgtgagaggagcggcagccacactgcggccccacgcccaaggactgggctgctctcgaggggggcgcgcccaccgctgtgtcctctctgcccagcctggcttaccaagggctacctcagtgggagatgaggttggaggaacgaaggcgaggttcctccttgctttggggagaaaagtattcaggaagtgggtgtgtgggaaacctgaagatggcgtgcacaggacacagcgtggtcggcctgggcagaagggcggctggctgtcctggagctgctgctggagcctgccctcagagtgtccctttccagtgctgtggcattctgtggcagcttccccaggtgtggtgacgggggggggcggggcctccacctgtgacagtcaggcttgagggtggacggcgtgcctctcccaggagccttccccatgtccttgccttgctgagaattgccctcccatgccgctgaggtgttaggtggtttagggccaaaaggggaaaaccacttgagtcttgtggtgtgtggtgggcagacaccacagggtggcatcacctggtggcatttccagaacctcagccccgattccagcacccaccaccgcctgaccctgtgtaacctgctgtcccgggtcccagagtgcactctgccccgctgctctgctgcctgtcctgggaaagtatctttgccccactaggaaatgtaaacaggagggcttggggagcgtgggcacttttctcatgagcagctactgcggcgttggcaggactcgctgctgctgctgctgcttgtgtaggtcggggagccggagatccccgaggacgcgcgccggacagtcggcactgaccggcccacctggtagcagaggacacccccagccccccaagcattgaagacatagtgtatttcctcgtatcctttctcccttgggtgtagttggggtggggaagcagggaaggctggtgcgatctccattccttgggctccacgtccgagttcatggtgcgccgctgtgctgggagctgcagtggtaatgtgtgggacaccttgaccaaaggggagctttgtctcgtgtgttttgaaaaaggcttaatgaagagaatgttgttcattcttagtagtatagtttgcaattcttaatggcaaataataagtttcagtagaaaacaaaaaaaaaaa

SEQ ID NO: 650146 - DNA, 258 bp, Homo sapiens
ggacggcacagttgaccagatattttgtattttgagtaaagatggggtttggcatgtgggccaggcaggtcttgagctcctggcctcaagtgatctgccctcctcggctcccaaagtgctgggattacagacgtgagccgccatgcccagacacctatgtatgtcttgatgcttagtcacaatgttctgattagttgaggcggtctttttctttcaggaaaggtatgtttaacattccacactgaagatgtaattgtc

SEQ ID NO: 650147 - DNA, 2438 bp, Homo sapiens
ggcgccggcacacctattggcccccgcggcgtcccgtcgccgcgtcgcgttgctggcccgtcggagcgacgccgctcgggtcagtcggcggccggactgggaagatggacgcagctactctgacctacgacactctccggtttgctgagtttgaagattttcctgagacctcagagcccgtttggatactgggtagaaaatacagcattttcacagaaaaggacgagatcttgtctgatgtggcatctagactttggtttacatacaggaaaaactttccagccattggggggacaggccccacctcggacacaggctggggctgcatgctgcggtgtggacagatgatctttgcccaagccctggtgtgccggcacctaggccgagattggaggtggacacaaaggaagaggcagccagacagctacttcagcgtcctcaacgcattcatcgacaggaaggacagttactactccattcaccagatagcgcaaatgggagttggcgaaggcaagtccataggccagtggtacgggcccaacactgtcgcccaggtcctgaagaagcttgctgtcttcgatacgtggagctccttggcggtccacattgcaatggacaacactgttgtgatggaggaaatcagaaggttgtgcaggaccagcgttccctgtgcaggcgccactgcgtttcctgcagattccgaccggcactgcaacggattccctgccggagctgaggtcaccaacaggccgtcgccatggagacccctggtacttctcattcccctgcgcctggggctcacggacatcaacgaggcctacgtggagacgctgaagcactgcttcatgatgccccagtccctgggcgtcatcggagggaagcccaacagcgcccactacttcatcggctacgttggtgaggagctcatctacctggacccccacaccacgcagccagccgtggagcccactgatggctgcttcatcccggacgagagcttccactgccagcacccgccgtgccgcatgagcatcgcggagcttgacccgtccatcgctgtggggtttttctgtaagactgaagatgacttcaatgattggtgccagcaagtcaaaaagctgtctctgcttggaggtgccctgcccatgtttgagctggtggagcagcagccttcacatctggcctgccccgacgtcctgaacctgtccctaggtgagagctgccaagtccaggtggggtccctcggaggtacgatctgtgcccttgcttccccagtcctggcccccttggttttgaccattaaggtgtgtgtgagcctgagccgtgagcacttggcagtggttcgcctgtgagaccaggtatggagtggagcgtcccctcctccaagcttgcgcccagcagcccaggacccacctcgtcttccccaccagcgctgcctgccggggcgctgtggagctgggcgtgctaccatggagtcctcaggggtctggagcagacagaacatgcaggctctgtggtgacgcagtcctgggtgggggactggttcacttgggcaccactggccatgggtggcgtagacccctcggaccatggccagcgtgccgcaggagccggcctgggctcgtgcagtgaagtgagtggccgtgagcgcgtcctcctcatctctgtctccctgtggaaaactctacaaacaaggcaatggcaatggaaccactcctgatgaccacgagggtcagacgcgggacagaggcccctcaggcctgagattgtgccggccgccccctgccctcctcaccctgccctgctcctcttctctgctccctccccccatattcgcaggtctgcacaacccccggacctgttcacacccgcatggggacagctgtctgtgggctgcagagcaggcactgctcagtctgccccacgccaagggcccttgactcacacccaggtggcccacccaagatgcctgatgcgctatgtcctgttccttctagattcttctgatgtagagcgactggaaagattcttcgactcagaagatgaagactttgaaatcctgtccctttgaaaatcctggggtcgggggtggcacctgtgagagcctggggctcctggtgccgctgcgtttcatccatcccgcccgctcgcctgccgagggctgcgccccgtgctgcctccccccagagggccacccgctgtgctcgtggactgaggctgcgctgcccgggaggccttactgcttggtgtcagactgcccagctcagagtgcccgtcagggcctgtgcatccgcacgcggagccgtctgttaggagcttccagagcgttctctcgacactgccagccccgtgttagcacctgggcctcagtcccacttgctcccaggcgccggttctgtggttggtttggaattaaagtcctgtttgaagttgtcaga

SEQ ID NO: 650148 - DNA, 101 bp, Homo sapiens
cttccagcactgggacgaactcaaggcattcttcggcagaggtggtcagggatggtgtaccccttggttgctagcccttggcctcccacagtgtcctggct

SEQ ID NO: 650149 - DNA, 960 bp, Homo sapiens
gcgcccgccctttgtgtttgtgcccccttttgggattctcgtgctgccgtttgggacacctccccgggcgctttctgcttagtaacacccaattgggcttccttggcgtgtttttctagagctttccttcctgggtggctgctccgccctctatcctgttcaccggcggcggcccccccccagtgtgggtgaccccccgcggcgcccgtgcctgccctggttatgcttgtgccagaacatgcccgttggctggggcgtccaccaaggtgctgcgcagcgtggtccctctcttctcactcgagggacagaatccgtccgccggttcgctttgctggccaagcgggccaatatgttggtgtctctctctggccgggagatttcgcgtcccccttcttgattcttcgggatgtaaaaacccgacgcgctggaaaccaattcttgtgaaccacccacgcacaggcggtggacccccccgatgtgtctatcccaccggaggcgtttcatcactcgaggtattagcattactcgtgtcctgtctagaaacgaacagagactctttggttccgcggtgcctgccgtgagtccacacctccgctggtttcttcccgccccctctctgggaggagacagacatggcaggatccgtatcacagaggggcacgcgaggcagctacggaccacgctcccgcgcccaccacaagggtgggaaaacccctccctccccgctcggggaagccgcctcatctacttcgcggcaggtagctgcgagggcctgcacgactagattgccgccagcgaagtcacgaccatgtctcaggagggcggcagaatacacaggaggagcatcaccatgttgaacccgcgagacaacgaagagggtccccacagaggcgagagaggcgccacacccgtgcacaccccccccgcgggggaccaacagggtccctctccaacaaaaca

SEQ ID NO: 650150 - DNA, 1688 bp, Homo sapiens
ggcgccggcacacctattggcccccgcggcgtcccgtcgccgcgtcgcgttgctggcccgtcggagcgacgccgctcgggtcagtcggcggccggactgggaagatggacgcagctactctgacctacgacactctccggtttgctgagtttgaagattttcctgagacctcagagcccgtttggatactgggtagaaaatacagcattttcacagaaaaggacgagatcttgtctgatgtggcatctagactttggtttacatacaggaaaaactttccagccattggggggacaggccccacctcggacacaggctggggctgcatgctgcggtgtggacagatgatctttgcccaagccctggtgtgccggcacctaggccgagattggaggtggacacaaaggaagaggcagccagacagctacttcagcgtcctcaacgcattcatcgacaggaaggacagttactactccattcaccagatagcgcaaatgggagttggcgaaggcaagtccataggccagtggtacgggcccaacactgtcgcccaggtcctgaagaagcttgctgtcttcgatacgtggagctccttggcggtccacattgcaatggacaacactgttgtgatggaggaaatcagaaggttgtgcaggaccagcgttccctgtgcaggcgccactgcgtttcctgcagattccgaccggcactgcaacggattccctgccggagctgaggtcaccaacaggccgtcgccatggagacccctggtacttctcattcccctgcgcctggggctcacggacatcaacgaggcctacgtggagacgctgaagcactgcttcatgatgccccagtccctgggcgtcatcggagggaagcccaacagcgcccactacttcatcggctacgttggtgaggagctcatctacctggacccccacaccacgcagccagccgtggagcccactgatggctgcttcatcccggacgagagcttccactgccagcacccgccgtgccgcatgagcatcgcggagcttgacccgtccatcgctgtggggtttttctgtaagactgaagatgacttcaatgattggtgccagcaagtcaaaaagctgtctctgcttggaggtgccctgcccatgtttgagctggtggagcagcagccttcacatctggcctgccccgacgtcctgaacctgtccctaggtgagagctgccaagtccaggtggggtccctcggaattcttctgatgtagagcgactggaaagattcttcgactcagaagatgaagactttgaaatcctgtccctttgaaaatcctggggtcgggggtggcacctgtgagagcctggggctcctggtgccgctgcgtttcatccatcccgcccgctcgcctgccgagggctgcgccccgtgctgcctccccccagagggccacccgctgtgctcgtggactgaggctgcgctgcccgggaggccttactgcttggtgtcagactgcccagctcagagtgcccgtcagggcctgtgcatccgcacgcggagccgtctgttaggagcttccagagcgttctctcgacactgccagccccgtgttagcacctgggcctcagtcccacttgctcccaggcgccggttctgtggttggtttggaattaaagtcctgtttgaagttgtcaga

SEQ ID NO: 650151 - DNA, 2230 bp, Homo sapiens
ggcgccggcacacctattggcccccgcggcgtcccgtcgccgcgtcgcgttgctggcccgtcggagcgacgccgctcgggtcagtcggcggccggactgggaagatggacgcagctactctgacctacgacactctccggtttgctgagtttgaagattttcctgagacctcagagcccgtttggatactgggtagaaaatacagcattttcacagaaaaggacgagatcttgtctgatgtggcatctagactttggtttacatacaggaaaaactttccagccattggggggacaggccccacctcggacacaggctggggctgcatgctgcggtgtggacagatgatctttgcccaagccctggtgtgccggcacctaggccgagattggaggtggacacaaaggaagaggcagccagacagctacttcagcgtcctcaacgcattcatcgacaggaaggacagttactactccattcaccagatagcgcaaatgggagttggcgaaggcaagtccataggccagtggtacgggcccaacactgtcgcccaggtcctgaagaagcttgctgtcttcgatacgtggagctccttggcggtccacattgcaatggacaacactgttgtgatggaggaaatcagaaggttgtgcaggaccagcgttccctgtgcaggcgccactgcgtttcctgcagattccgaccggcactgcaacggattccctgccggagctgaggtcaccaacaggccgtcgccatggagacccctggtacttctcattcccctgcgcctggggctcacggacatcaacgaggcctacgtggagacgctgaagcactgcttcatgatgccccagtccctgggcgtcatcggagggaagcccaacagcgcccactacttcatcggctacgttggtgaggagctcatctacctggacccccacaccacgcagccagccgtggagcccactgatggctgcttcatcccggacgagagcttccactgccagcacccgccgtgccgcatgagcatcgcggagcttgacccgtccatcgctgtggggtttttctgtaagactgaagatgacttcaatgattggtgccagcaagtcaaaaagctgtctctgcttggaggtgccctgcccatgtttgagctggtggagcagcagccttcacatctggcctgccccgacgtcctgaacctgtccctagattcttctgatgtagagcgactggaaagattcttcgactcagaagatgaagactttgaaatcctgtccctttgaaaatcctggggtcgggggtggcacctgtgagagcctggggctcctggtgccgctgcgtttcatccatcccgcccgctcgcctgccgagggctgcgccccgtgctgcctccccccagagggccacccgctgtgctcgtggactgaggctgcgctgcccgggaggccttactgcttggtgtcagactgcccagctcagagtgcccgtcagggcctgtgcatccgcacgcggagccgtctgttaggagcttccagagcgttctctcgacactgccagccccgtgttagcacctgggcctcagtcccacttgctcccaggcgccggttctgtggttggtttggaattaaagtcctgtttgaagttgtcagaaaaaaaaaaaaaaaaaaaaaaaaaaaaaaaaaaaaaaaaaaaaaaaaaaaaaaaaaaaaaaaaaaaaaaaaaaaaaaaaaaaaaaacgaaaacaataataacaaacaaatcatcacatcataccaatataaagggggggcggcgtctccttactttatctgtcctccgcctcggctgctcaccctctcgactcctcctcccgacccattttgttcatgtacccaggcgtcgtcctcttcttattgcgtcggtcatatatatctattcctaacttccccatcccggtcgcgtggccttcactaatcctatcactcgcactcacctagcatatatgaaactagtactatcatctctctattctctccttacttgtctccttcctctcattatactttccacaaaaaacctatccttatctctctgtttgattgttgcttccagatctttaccttaatttaacatactcataatctcaacaccactacagtttattctcattcacctccccccctctcaagctacactacctatatatactccctcaccatctcaacccacaacactaacaatcacaacc

SEQ ID NO: 650152 - DNA, 134 bp, Homo sapiens
ctcttagaggttcccccctcatcgagtcttcacgtgctatcatttcctttgatcttggttcctattcgtgtaccgagaaacttgtgcgaattattgttcaggtttagctgttagattttcccgagtccgggctt

SEQ ID NO: 650153 - DNA, 1673 bp, Homo sapiens
ggcgccggcacacctattggcccccgcggcgtcccgtcgccgcgtcgcgttgctggcccgtcggagcgacgccgctcgggtcagtcggcggccggactgggaagatggacgcagctactctgacctacgacactctccggtttgctgagtttgaagattttcctgagacctcagagcccgtttggatactgggtagaaaatacagcattttcacagaaaaggacgagatcttgtctgatgtggcatctagactttggtttacatacaggaaaaactttccagccattggggggacaggccccacctcggacacaggctggggctgcatgctgcggtgtggacagatgatctttgcccaagccctggtgtgccggcacctaggccgagattggaggtggacacaaaggaagaggcagccagacagctacttcagcgtcctcaacgcattcatcgacaggaaggacagttactactccattcaccagatagcgcaaatgggagttggcgaaggcaagtccataggccagtggtacgggcccaacactgtcgcccaggtcctgaagaagcttgctgtcttcgatacgtggagctccttggcggtccacattgcaatggacaacactgttgtgatggaggaaatcagaaggttgtgcaggaccagcgttccctgtgcaggcgccactgcgtttcctgcagattccgaccggcactgcaacggattccctgccggagctgaggtcaccaacaggccgtcgccatggagacccctggtacttctcattcccctgcgcctggggctcacggacatcaacgaggcctacgtggagacgctgaagcactgcttcatgatgccccagtccctgggcgtcatcggagggaagcccaacagcgcccactacttcatcggctacgttggtgaggagctcatctacctggacccccacaccacgcagccagccgtggagcccactgatggctgcttcatcccggacgagagcttccactgccagcacccgccgtgccgcatgagcatcgcggagcttgacccgtccatcgctgtggggtttttctgtaagactgaagatgacttcaatgattggtgccagcaagtcaaaaagctgtctctgcttggaggtgccctgcccatgtttgagctggtggagcagcagccttcacatctggcctgccccgacgtcctgaacctgtccctaggtgagagctgccaagtccagattcttctgatgtagagcgactggaaagattcttcgactcagaagatgaagactttgaaatcctgtccctttgaaaatcctggggtcgggggtggcacctgtgagagcctggggctcctggtgccgctgcgtttcatccatcccgcccgctcgcctgccgagggctgcgccccgtgctgcctccccccagagggccacccgctgtgctcgtggactgaggctgcgctgcccgggaggccttactgcttggtgtcagactgcccagctcagagtgcccgtcagggcctgtgcatccgcacgcggagccgtctgttaggagcttccagagcgttctctcgacactgccagccccgtgttagcacctgggcctcagtcccacttgctcccaggcgccggttctgtggttggtttggaattaaagtcctgtttgaagttgtcaga

SEQ ID NO: 650154 - DNA, 2950 bp, Homo sapiens
ggcgccggcacacctattggcccccgcggcgtcccgtcgccgcgtcgcgttgctggcccgtcggagcgacgccgctcgggtcagtcggcggccggactgggaagatggacgcagctactctgacctacgacactctccggtttgctgagtttgaagattttcctgagacctcagagcccgtttggatactgggtagaaaatacagcattttcacagaaaaggacgagatcttgtctgatgtggcatctagactttggtttacatacaggaaaaactttccagccattggaggttgtcgggacatttcactctccagtaaatgtggcccttggcgttactgagtcctaagaggggggacaggccccacctcggacacaggctggggctgcatgctgcggtgtggacagatgatctttgcccaagccctggtgtgccggcacctaggccgagattggaggtggacacaaaggaagaggcagccagacagctacttcagcgtcctcaacgcattcatcgacaggaaggacagttactactccattcaccagatagcgcaaatgggagttggcgaaggcaagtccataggccagtggtacgggcccaacactgtcgcccaggtcctgaagaagcttgctgtcttcgatacgtggagctccttggcggtccacattgcaatggacaacactgttgtgatggaggaaatcagaaggttgtgcaggaccagcgttccctgtgcaggcgccactgcgtttcctgcagattccgaccggcactgcaacggattccctgccggagctgaggtcaccaacaggccgtcgccatggagacccctggtacttctcattcccctgcgcctggggctcacggacatcaacgaggcctacgtggagacgctgaagcactgcttcatgatgccccagtccctgggcgtcatcggagggaagcccaacagcgcccactacttcatcggctacgttggtgaggagctcatctacctggacccccacaccacgcagccagccgtggagcccactgatggctgcttcatcccggacgagagcttccactgccagcacccgccgtgccgcatgagcatcgcggagcttgacccgtccatcgctgtggggtttttctgtaagactgaagatgacttcaatgattggtgccagcaagtcaaaaagctgtctctgcttggaggtgccctgcccatgtttgagctggtggagcagcagccttcacatctggcctgccccgacgtcctgaacctgtccctagattcttctgatgtagagcgactggaaagattcttcgactcagaagatgaagactttgaaatcctgtccctttgaaaatcctggggtcgggggtggcacctgtgagagcctggggctcctggtgccgctgcgtttcatccatcccgcccgctcgcctgccgagggctgcgccccgtgctgcctccccccagagggccacccgctgtgctcgtggactgaggctgcgctgcccgggaggccttactgcttggtgtcagactgcccagctcagagtgcccgtcagggcctgtgcatccgcacgcggagccgtctgttaggagcttccagagcgttctctcgacactgccagccccgtgttagcacctgggcctcagtcccacttgctcccaggcgccggttctgtggttggtttggaattaaagtcctgtttgaagttgtcagacacagacatgaatttctggggcgctccctgagtcagagtctcagaagacctgtgcaggctggcgtgagaggagcggcagccacactgcggccccacgcccaaggactgggctgctctcgaggggggcgcgcccaccgctgtgtcctctctgcccagcctggcttaccaagggctacctcagtgggagatgaggttggaggaacgaaggcgaggttcctccttgctttggggagaaaagtattcaggaagtgggtgtgtgggaaacctgaagatggcgtgcacaggacacagcgtggtcggcctgggcagaagggcggctggctgtcctggagctgctgctggagcctgccctcagagtgtccctttccagtgctgtggcattctgtggcagcttccccaggtgtggtgacgggggggggcggggcctccacctgtgacagtcaggcttgagggtggacggcgtgcctctcccaggagccttccccatgtccttgccttgctgagaattgccctcccatgccgctgaggtgttaggtggtttagggccaaaaggggaaaaccacttgagtcttgtggtgtgtggtgggcagacaccacagggtggcatcacctggtggcatttccagaacctcagccccgattccagcacccaccaccgcctgaccctgtgtaacctgctgtcccgggtcccagagtgcactctgccccgctgctctgctgcctgtcctgggaaagtatctttgccccactaggaaatgtaaacaggagggcttggggagcgtgggcacttttctcatgagcagctactgcggcgttggcaggactcgctgctgctgctgctgcttgtgtaggtcggggagccggagatccccgaggacgcgcgccggacagtcggcactgaccggcccacctggtagcagaggacacccccagccccccaagcattgaagacatagtgtatttcctcgtatcctttctcccttgggtgtagttggggtggggaagcagggaaggctggtgcgatctccattccttgggctccacgtccgagttcatggtgcgccgctgtgctgggagctgcagtggtaatgtgtgggacaccttgaccaaaggggagctttgtctcgtgtgttttgaaaaaggcttaatgaagagaatgttgttcattcttagtagtatagtttgcaattcttaatggcaaataataagtttcagtagaaaacaaaaaaaaaaa

SEQ ID NO: 650155 - DNA, 924 bp, Homo sapiens
  misc_feature (59)..(59): n is a, c, g, or t
  misc_feature (123)..(123): n is a, c, g, or t
  misc_feature (308)..(308): n is a, c, g, or t
  misc_feature (342)..(343): n is a, c, g, or t
  misc_feature (407)..(407): n is a, c, g, or t
  misc_feature (632)..(632): n is a, c, g, or t
  misc_feature (639)..(640): n is a, c, g, or t
  misc_feature (843)..(843): n is a, c, g, or t
  misc_feature (848)..(848): n is a, c, g, or t
  misc_feature (851)..(851): n is a, c, g, or t
  misc_feature (891)..(891): n is a, c, g, or t
tggctggcgtcctggtgcctgttccgcgtctgtgcgaccgtccgtcccgagcgcgcagncgcggcaggccaggtcagagcagcccaccatgggatggggagggggtggaggctgcaccccgcngcccacccatccaccagcagccgccggagcgccgcgtggtcaccgttgtctttctcgggcctcctgctggacctcctggccttcacgctgctgctgcccctgctgcccgggctgttggagagccacggccgtgcccacgaccccctctatggctcctggcagggcggggtggactggtttgccancgccatcgggatgccagtggagaagaggtacaannagtgtcctgttcggaggtctcattggctcggcattctctgtcctgcagtttctgtgtgcgccantcactggggccacctctgactgcttggggaggcgcccggtgatgctgctgtgcctgatgggtgtggccacctcatatgcagtctgggccacctctcggagctttgcggccttcctggcctccaggctgattgggggcatcagcaaagggaacgtcagacctctccaaggccatcgttgctgacctgggctcgcctctggcccgcagtcaaggcatggcggtcatnggggtgnncttctcactgggcttcaccctgggccctatgctcggagcctccctgcccctggaaatggcaccctggtttgccctgctcttcgcagcctccgacctgctgttcatcttctgcttcctgccagagacgctgcccctggagaaacgggcgccctctatcgccctggggttccgtgatgcggctgatctgctcagccccctggaanaaaanagnttctcggctgtcgctcgtggccccgcccccccctctggcnccccgctccccccctgcgccgcctggggctcct

SEQ ID NO: 650156 - DNA, 109 bp, Homo sapiens
ggtatgataggatgagcgcagcccggccatcgtacgaacgttcggctgggtggctgaactcgtgatcttgagcctgagatgtattgccgatggcaaccaacaggggtgt

SEQ ID NO: 650157 - DNA, 112 bp, Homo sapiens
agtagcaagtgaccagaatctgccatgtttaaaacgtttaactttcctattaaaagctgccgaaaaggttaacaataacaactttcaaggttctagatcgcgagcggccgct

SEQ ID NO: 650158 - DNA, 3039 bp, Homo sapiens
ggcgccggcacacctattggcccccgcggcgtcccgtcgccgcgtcgcgttgctggcccgtcggagcgacgccgctcgggtcagtcggcggccggactgggaagatggacgcagctactctgacctacgacactctccggtttgctgagtttgaagattttcctgagacctcagagcccgtttggatactgggtagaaaatacagcattttcacaggtatcggccatgctggagcccaccctggtctgaccgcttggcctgcagaagcattttgtgatcactgttctctgctaactctgccataacttgtgacttgcaaacttaaggcgttgtgtgtgtgtgttttttttcttttaaacaacctctagaaaaggacgagatcttgtctgatgtggcatctagactttggtttacatacaggaaaaactttccagccattggggggacaggccccacctcggacacaggctggggctgcatgctgcggtgtggacagatgatctttgcccaagccctggtgtgccggcacctaggccgagattggaggtggacacaaaggaagaggcagccagacagctacttcagcgtcctcaacgcattcatcgacaggaaggacagttactactccattcaccagatagcgcaaatgggagttggcgaaggcaagtccataggccagtggtacgggcccaacactgtcgcccaggtcctgaagaagcttgctgtcttcgatacgtggagctccttggcggtccacattgcaatggacaacactgttgtgatggaggaaatcagaaggttgtgcaggaccagcgttccctgtgcaggcgccactgcgtttcctgcagattccgaccggcactgcaacggattccctgccggagctgaggtcaccaacaggccgtcgccatggagacccctggtacttctcattcccctgcgcctggggctcacggacatcaacgaggcctacgtggagacgctgaagcactgcttcatgatgccccagtccctgggcgtcatcggagggaagcccaacagcgcccactacttcatcggctacgttggtgaggagctcatctacctggacccccacaccacgcagccagccgtggagcccactgatggctgcttcatcccggacgagagcttccactgccagcacccgccgtgccgcatgagcatcgcggagcttgacccgtccatcgctgtggggtttttctgtaagactgaagatgacttcaatgattggtgccagcaagtcaaaaagctgtctctgcttggaggtgccctgcccatgtttgagctggtggagcagcagccttcacatctggcctgccccgacgtcctgaacctgtccctagattcttctgatgtagagcgactggaaagattcttcgactcagaagatgaagactttgaaatcctgtccctttgaaaatcctggggtcgggggtggcacctgtgagagcctggggctcctggtgccgctgcgtttcatccatcccgcccgctcgcctgccgagggctgcgccccgtgctgcctccccccagagggccacccgctgtgctcgtggactgaggctgcgctgcccgggaggccttactgcttggtgtcagactgcccagctcagagtgcccgtcagggcctgtgcatccgcacgcggagccgtctgttaggagcttccagagcgttctctcgacactgccagccccgtgttagcacctgggcctcagtcccacttgctcccaggcgccggttctgtggttggtttggaattaaagtcctgtttgaagttgtcagacacagacatgaatttctggggcgctccctgagtcagagtctcagaagacctgtgcaggctggcgtgagaggagcggcagccacactgcggccccacgcccaaggactgggctgctctcgaggggggcgcgcccaccgctgtgtcctctctgcccagcctggcttaccaagggctacctcagtgggagatgaggttggaggaacgaaggcgaggttcctccttgctttggggagaaaagtattcaggaagtgggtgtgtgggaaacctgaagatggcgtgcacaggacacagcgtggtcggcctgggcagaagggcggctggctgtcctggagctgctgctggagcctgccctcagagtgtccctttccagtgctgtggcattctgtggcagcttccccaggtgtggtgacgggggggggcggggcctccacctgtgacagtcaggcttgagggtggacggcgtgcctctcccaggagccttccccatgtccttgccttgctgagaattgccctcccatgccgctgaggtgttaggtggtttagggccaaaaggggaaaaccacttgagtcttgtggtgtgtggtgggcagacaccacagggtggcatcacctggtggcatttccagaacctcagccccgattccagcacccaccaccgcctgaccctgtgtaacctgctgtcccgggtcccagagtgcactctgccccgctgctctgctgcctgtcctgggaaagtatctttgccccactaggaaatgtaaacaggagggcttggggagcgtgggcacttttctcatgagcagctactgcggcgttggcaggactcgctgctgctgctgctgcttgtgtaggtcggggagccggagatccccgaggacgcgcgccggacagtcggcactgaccggcccacctggtagcagaggacacccccagccccccaagcattgaagacatagtgtatttcctcgtatcctttctcccttgggtgtagttggggtggggaagcagggaaggctggtgcgatctccattccttgggctccacgtccgagttcatggtgcgccgctgtgctgggagctgcagtggtaatgtgtgggacaccttgaccaaaggggagctttgtctcgtgtgttttgaaaaaggcttaatgaagagaatgttgttcattcttagtagtatagtttgcaattcttaatggcaaataataagtttcagtagaaaacaaaaaaaaaaa

SEQ ID NO: 650159 - DNA, 354 bp, Homo sapiens
tccaaagcgaatacccaatatgtgtaaaataatgttctgaacaaatgttgacatgcttatttattgtaacaagatggtgtacttcattgttccccgttggatttccgaagcaaagcaatgggaccctacgcttcagagtcttattggggtggggcagtgtccattgaggtgtcctgttcgggaatgacaagtccctggcagattatgaggcaggcatcctttggagttcttctctcaggtatattttaactaaaagctatcatttaagttgaagaaatcaagtcttgtgaattgatacgattgtacttctagagtctttgatgataagttgtctttgggtactacgctttggca

SEQ ID NO: 650160 - DNA, 2814 bp, Homo sapiens
ggcgccggcacacctattggcccccgcggcgtcccgtcgccgcgtcgcgttgctggcccgtcggagcgacgccgctcgggtcagtcggcggccggactgggaagatggacgcagctactctgacctacgacactctccggtttgctgagtttgaagattttcctgagacctcagagcccgtttggatactgggtagaaaatacagcattttcacggggggacaggccccacctcggacacaggctggggctgcatgctgcggtgtggacagatgatctttgcccaagccctggtgtgccggcacctaggccgagattggaggtggacacaaaggaagaggcagccagacagctacttcagcgtcctcaacgcattcatcgacaggaaggacagttactactccattcaccagatagcgcaaatgggagttggcgaaggcaagtccataggccagtggtacgggcccaacactgtcgcccaggtcctgaagaagcttgctgtcttcgatacgtggagctccttggcggtccacattgcaatggacaacactgttgtgatggaggaaatcagaaggttgtgcaggaccagcgttccctgtgcaggcgccactgcgtttcctgcagattccgaccggcactgcaacggattccctgccggagctgaggtcaccaacaggccgtcgccatggagacccctggtacttctcattcccctgcgcctggggctcacggacatcaacgaggcctacgtggagacgctgaagcactgcttcatgatgccccagtccctgggcgtcatcggagggaagcccaacagcgcccactacttcatcggctacgttggtgaggagctcatctacctggacccccacaccacgcagccagccgtggagcccactgatggctgcttcatcccggacgagagcttccactgccagcacccgccgtgccgcatgagcatcgcggagcttgacccgtccatcgctgtggggtttttctgtaagactgaagatgacttcaatgattggtgccagcaagtcaaaaagctgtctctgcttggaggtgccctgcccatgtttgagctggtggagcagcagccttcacatctggcctgccccgacgtcctgaacctgtccctagattcttctgatgtagagcgactggaaagattcttcgactcagaagatgaagactttgaaatcctgtccctttgaaaatcctggggtcgggggtggcacctgtgagagcctggggctcctggtgccgctgcgtttcatccatcccgcccgctcgcctgccgagggctgcgccccgtgctgcctccccccagagggccacccgctgtgctcgtggactgaggctgcgctgcccgggaggccttactgcttggtgtcagactgcccagctcagagtgcccgtcagggcctgtgcatccgcacgcggagccgtctgttaggagcttccagagcgttctctcgacactgccagccccgtgttagcacctgggcctcagtcccacttgctcccaggcgccggttctgtggttggtttggaattaaagtcctgtttgaagttgtcagacacagacatgaatttctggggcgctccctgagtcagagtctcagaagacctgtgcaggctggcgtgagaggagcggcagccacactgcggccccacgcccaaggactgggctgctctcgaggggggcgcgcccaccgctgtgtcctctctgcccagcctggcttaccaagggctacctcagtgggagatgaggttggaggaacgaaggcgaggttcctccttgctttggggagaaaagtattcaggaagtgggtgtgtgggaaacctgaagatggcgtgcacaggacacagcgtggtcggcctgggcagaagggcggctggctgtcctggagctgctgctggagcctgccctcagagtgtccctttccagtgctgtggcattctgtggcagcttccccaggtgtggtgacgggggggggcggggcctccacctgtgacagtcaggcttgagggtggacggcgtgcctctcccaggagccttccccatgtccttgccttgctgagaattgccctcccatgccgctgaggtgttaggtggtttagggccaaaaggggaaaaccacttgagtcttgtggtgtgtggtgggcagacaccacagggtggcatcacctggtggcatttccagaacctcagccccgattccagcacccaccaccgcctgaccctgtgtaacctgctgtcccgggtcccagagtgcactctgccccgctgctctgctgcctgtcctgggaaagtatctttgccccactaggaaatgtaaacaggagggcttggggagcgtgggcacttttctcatgagcagctactgcggcgttggcaggactcgctgctgctgctgctgcttgtgtaggtcggggagccggagatccccgaggacgcgcgccggacagtcggcactgaccggcccacctggtagcagaggacacccccagccccccaagcattgaagacatagtgtatttcctcgtatcctttctcccttgggtgtagttggggtggggaagcagggaaggctggtgcgatctccattccttgggctccacgtccgagttcatggtgcgccgctgtgctgggagctgcagtggtaatgtgtgggacaccttgaccaaaggggagctttgtctcgtgtgttttgaaaaaggcttaatgaagagaatgttgttcattcttagtagtatagtttgcaattcttaatggcaaataataagtttcagtagaaaacaaaaaaaaaaa

SEQ ID NO: 650161 - DNA, 532 bp, Homo sapiens
tcggtctgactagtctccttcagtgaaggtggatatcactgaaggagataggaaacctagaatactacttgtttacgttgccatgtatcccatctaggtgcagtagagaggaggaagactagccccttcagaataatgatagtggcatctgtttgagcccagagtcctatctggggtctcctcaggcacagtccctctagcaggggctctccaaataggagcctcccatctcgaggtgttctctgtgggtctgcccgtcccaaaccttacgatcctcctggagagaagatggtagcagcaaaagtaaagggtgagaaactggataagaagctgaaaaaaatggagcaaaacaagacagcagccactaggtaccgccagaagaagagggcggagcaggaggctcttactggtgagtgcaaagagctggaaaagaagaacgaggctctaaaagagagggcggattccctggccaaggagatccagtacctgaaagatttgatagaagaggtccgcaagacaaggtagagccgag

SEQ ID NO: 650162 - DNA, 3041 bp, Homo sapiens
ggcgccggcacacctattggcccccgcggcgtcccgtcgccgcgtcgcgttgctggcccgtcggagcgacgccgctcgggtcagtcggcggccggactgggaagatggacgcagctactctgacctacgacactctccggtttgctgagtttgaagattttcctgagacctcagagcccgtttggatactgggtagaaaatacagcattttcacagaaaaggacgagatcttgtctgatgtggcatctagactttggtttacatacaggaaaaactttccagccattgccattcatcattgttgtataccctggagctggaaggagatggggactggttctcagccttgcctctcaccggcggagaactgaggccggaggaggttgtcgggacatttcactctccagtaaatgtggcccttggcgttactgagtcctaagaggggggacaggccccacctcggacacaggctggggctgcatgctgcggtgtggacagatgatctttgcccaagccctggtgtgccggcacctaggccgagattggaggtggacacaaaggaagaggcagccagacagctacttcagcgtcctcaacgcattcatcgacaggaaggacagttactactccattcaccagatagcgcaaatgggagttggcgaaggcaagtccataggccagtggtacgggcccaacactgtcgcccaggtcctgaagaagcttgctgtcttcgatacgtggagctccttggcggtccacattgcaatggacaacactgttgtgatggaggaaatcagaaggttgtgcaggaccagcgttccctgtgcaggcgccactgcgtttcctgcagattccgaccggcactgcaacggattccctgccggagctgaggtcaccaacaggccgtcgccatggagacccctggtacttctcattcccctgcgcctggggctcacggacatcaacgaggcctacgtggagacgctgaagcactgcttcatgatgccccagtccctgggcgtcatcggagggaagcccaacagcgcccactacttcatcggctacgttggtgaggagctcatctacctggacccccacaccacgcagccagccgtggagcccactgatggctgcttcatcccggacgagagcttccactgccagcacccgccgtgccgcatgagcatcgcggagcttgacccgtccatcgctgtggggtttttctgtaagactgaagatgacttcaatgattggtgccagcaagtcaaaaagctgtctctgcttggaggtgccctgcccatgtttgagctggtggagcagcagccttcacatctggcctgccccgacgtcctgaacctgtccctagattcttctgatgtagagcgactggaaagattcttcgactcagaagatgaagactttgaaatcctgtccctttgaaaatcctggggtcgggggtggcacctgtgagagcctggggctcctggtgccgctgcgtttcatccatcccgcccgctcgcctgccgagggctgcgccccgtgctgcctccccccagagggccacccgctgtgctcgtggactgaggctgcgctgcccgggaggccttactgcttggtgtcagactgcccagctcagagtgcccgtcagggcctgtgcatccgcacgcggagccgtctgttaggagcttccagagcgttctctcgacactgccagccccgtgttagcacctgggcctcagtcccacttgctcccaggcgccggttctgtggttggtttggaattaaagtcctgtttgaagttgtcagacacagacatgaatttctggggcgctccctgagtcagagtctcagaagacctgtgcaggctggcgtgagaggagcggcagccacactgcggccccacgcccaaggactgggctgctctcgaggggggcgcgcccaccgctgtgtcctctctgcccagcctggcttaccaagggctacctcagtgggagatgaggttggaggaacgaaggcgaggttcctccttgctttggggagaaaagtattcaggaagtgggtgtgtgggaaacctgaagatggcgtgcacaggacacagcgtggtcggcctgggcagaagggcggctggctgtcctggagctgctgctggagcctgccctcagagtgtccctttccagtgctgtggcattctgtggcagcttccccaggtgtggtgacgggggggggcggggcctccacctgtgacagtcaggcttgagggtggacggcgtgcctctcccaggagccttccccatgtccttgccttgctgagaattgccctcccatgccgctgaggtgttaggtggtttagggccaaaaggggaaaaccacttgagtcttgtggtgtgtggtgggcagacaccacagggtggcatcacctggtggcatttccagaacctcagccccgattccagcacccaccaccgcctgaccctgtgtaacctgctgtcccgggtcccagagtgcactctgccccgctgctctgctgcctgtcctgggaaagtatctttgccccactaggaaatgtaaacaggagggcttggggagcgtgggcacttttctcatgagcagctactgcggcgttggcaggactcgctgctgctgctgctgcttgtgtaggtcggggagccggagatccccgaggacgcgcgccggacagtcggcactgaccggcccacctggtagcagaggacacccccagccccccaagcattgaagacatagtgtatttcctcgtatcctttctcccttgggtgtagttggggtggggaagcagggaaggctggtgcgatctccattccttgggctccacgtccgagttcatggtgcgccgctgtgctgggagctgcagtggtaatgtgtgggacaccttgaccaaaggggagctttgtctcgtgtgttttgaaaaaggcttaatgaagagaatgttgttcattcttagtagtatagtttgcaattcttaatggcaaataataagtttcagtagaaaacaaaaaaaaaaa

SEQ ID NO: 650163 - DNA, 5585 bp, Homo sapiens
gcctttgctaaattgctgaataagaagatggttgagtcacctccttcgcttaaacttgtcctcattggaggttgtcgtaacaaagatgatgaacttagggtaaaccaactgagaaggctgtctgaggatttaggagttcaagaatatgtggaatttaaaataaacattccatttgatgaattaaagaattatttgtctgaagcaacaattggtctgcataccatgtggaacgagcattttgggattggagttgtggagtgtatggcagctggcacaattatccttgcacacaattcggggggcccaaagcttgacattgtggttcctcacgaaggagatataactggctttctggctgagagtgaagaagactatgctgaaactatcgctcacattctttccatgtctgcagaaaagagactccaaatcagaaaaagtgctcgtgcatctgtaagcagattctctgatcaggaatttgaagtgacattcctatcatctgtggaaaagttatttaagtaatgccatatctgtaaaattaaagatattttatataaactggttaaacaccttcatatgtaaatatttttctaaattcaatctcatttgtcaaatcattttactttagaaaacagacaaaatttccttttagaataaaaggaagtgttgaaaagaaaatggatgactagccttcggcttccattcttggtatacatgagagaggctggctgctgagatgaatgtgaaccaggttgcagagaatctggctttgagccaccaggaagaactagtggatttgccaaaaaactaccccttgagtgaaaatgaagatgagggggacagtgatggagagagaaagcatcaaaagcttctggaagcaatcatttcccttgatggaaagaataggcggaaattggctgagaggtctgaggctagtctgaaagtgtcagagttcagtgtcagttctgaaggatcaggagaaaagctgggccttgcagatctgcttgagcccgttaaaacttcatcttctttggccactgtaaaaaagcaactgaatagagtcaaatcaaagaaggtggtggagttacctcttaacaaagaaaaaattgaacagatccacagagaagtagcattcagtaaaacctcacaggtcctctccaaatgggaccctatcatcctgaagaaccagcaggcagagcagctggtttttcccctggggaaggagcagccagccattgctcccattgaacatgcgctcagtggctggaaggcaagaactcccctggagcaggaaatttttaacctcctccataagaacaagcagccagtgacagatcctttactgactcccatggaaaaggcctctctccaagccatgagcctggaagaggcaaagatgcaccgagcagagcttcagagggctcgggctctgcagtcctactatgaggccaaggctcgaaaagagaagaaaatcaaaagtaaaaagtatcacaaagtcgtgaagaaaggaaaggccaagaaagccttaaaagagtttgagcagctacagaaggttaatccaactgtggcactggaagaaatggaaaaaattgaaaatgccagaatgatggaaagaatgagccttaagcaccaaaacagtgggaaatgggccaagtcaaaggcaattatggccaaatatgacctggaggctcgccaagctatgcaggaacagttggccaagaacaaagaactgacacagaaactccaggtagcctctgagagtgaggaagaggagggaggcacagaagtggaagaactccttgtccctcatgtagcgaatgaagtgcagatgaatgtggacggaccgaatccctggatgttcaggagctgcaccagtgacaccaaagaggctgcaacacaggaggaccctgagcaagtgccagagcttgcagctcatgaggtttctgcaagtgaggcagaagaaagaccagtggcagaggaagaaattttgttgagagaatttgaggaaaggcaatcccttagaaaaagatctgagctcaaccaggatgctgagccagcaagcagtcaagaaacaaaagattctagcagccaggaggtgctgtccgaattgagggcactatctcagaaattgaaggaaaaacatcagtccaggaagcaaaaagcaagttcagaggggactgttccccaggtccagagagaggaacctgccccagaagaagcggaacccctattgctacagaggtcagagagagtacaaactctggaagagctagaagagctgggaaaagaagattgttttcaaaataaggagcttcccagacctgtgttagaaggacagcagtcagagaggaccccaaataatcggcctgatgcccctaaggagaagaaagagaaggagcaactgatcaacctacagaacttcctgaccacacagtctccttccgtgaggtctttggcagttcccacaataatagaggagctggaagatgaagaggagagagaccaaaggcagatgataaaggaagcttttgctggggatgatgtcatcagagatttcttgaaagagaagagggaagctgtggaggcgagtaagccaaaggacgtggacctgacactacctggctggggcgagtggggtggtgtgggcctaaagcccagtgccaagaaaagacgccagtttctcattaaagcccctgagggtcctccaagaaaagataagaatttgccaaatgtgattatcagtgagaagcgcaacatccacgcagcagctcatcaggtacaagtgcttccatatccatttacccaccatcggcaatttgaaaggaccatccagacccctataggatccacatggaacacccagagggctttccaaaagctgactactcccaaggtcgtcaccaagccaggccatatcattaagcccataaaagcagaggatgtgggctaccagtcttcctcaaggtcagacctgcctgtcatacagaggaatccaaaacgaatcaccacacgtcacaataaagaagaaaaactgtaggttgtgtagctggagaagtgacagtcaggggccctgattccacttcctttggtccagttttactctgctacagggtggattccaaaactggctcagcacattgcatgtagttgagccacattttttaaaaaaagaaaatggatgaccattaattgactagcattttagaattgatcagacattagaacacagaaaaattctagtacatttaaattctaaacaatacagtggatgacccttttgaatatacctaatgatttccttaaaaaagaaattttaaacagacttgtttaatcgtgttctcaaagcatacagtcaagaggtgggactgactgatgctttataggtgtgtgtagggtggtagaggccaaggtgctgccagcaatcctttccatactaggtactggtgaaaattgtttttgtttatgctgtcagcacatttgtgtgggtctctcattgtcccttaacagtgccgcatctcagcctggaagtcagctttaagtcattcaagagaacctcaggctgtttttctgacagtgatgatatgatatacagatacatccacagggtatctattaccagcataatgcattgtaagatggcaaggtggcattttgaaagagcgctgggcaagcagttagcacatctgggcctaccttcagcttcttcatttacaaacttctgaccttttgacactaaagctgctcctttatctttctgagtctcagattcttcatctgtaatctggagttgttaattccagtccttactaccttttagagttggaatgagatggaaagtagatgaaactactttgaaaattacgacagttaagggctgggtgcggtgtctcacacctgtaatcccagcactttgggaggccgagatgggtggatcatgaggtcagcagttgagaccagccaaagtgctgggtgcggtgtctcacacctgtaatcccagcactttgggaggccgagatgggtggatcatgaggtcagcagttgagaccagcctgaacaacatggtgaaaccctgtctgtactaaaaatacaaaaaaattagctgggcctggtggcaggcacctgtaatcccagctacttgggagactgaggcaggagaattgcttgaaactggaaggcagaggttgcagtgagccaagattgtgccactgcactctagcctgggcaataagcaaaactccatctcaaaaaagaaaaaaaggaaaaagaaaattatgagagttacttaaaggtaacatcacatactaaatgtcttctataatcctatatttattaatgcattacaactctgtagattgttagttactaggccagtagctaggaattggtataaatttaatgcaccttctatcctgaataactagcatggaaaagtgaatatatgtgtgagcagatatggctataaagacctatagcttttgcactttatgcatatataatcaatcctttctagttcagtgaattgaccccatccacaggctgattcatctttgtgttaaggggcaaatgaaacggtatattatttctttgcagtctcctctcagtcattcatcaatgtggccagcttatctactcccaattatgttgttgatacatctccaagccatctgtcatcagatcaaaaagcagcaaacagagggtcagtcacaggatgttctgacacaccattgtaactttttgttagagatgatcccatttagaaaaagactggtagaaattggagtgaaaggaaccctacagattagcccagttctctcttattttcagctttacagacaagaacaatttaaatctaaagaatttagtagattccttcagtgtcacaaagctgtttcatgaaagaatcaagattataacctggatattctgactcctggcccagtgctttttcttactttgtagctacactttgaagtaagattcaaactgttatccactcaattgccttattcctgaggatgtagtcaaggaagaaaaagttttctggaattccgtaaattatattttaagcttatttcttcaaaattattttcatatatcacagatatatcattggaagatataatttgcatatatgttcattatcagtgttcctaatttggtattacatgtattctatttttttctgaatgatagcatgaaaagtgtcaaagtggtttgtccgctagcgtctgtctgcagaactttcaggatgactattaattcctctcagatgtcatttttgagtggtccaagcctgctgttttgaacccacagcagtggagatttgtattcttatttacagttgtgtactataaagtgtgtgttacataggttttgtgtaataattatttgtaaatattatttagatttgtatttagacatgatttatatctaatatagatacaaagtctgtgtctaaatattatttaaagaagtgatttttcattctcttggattctttccagtgtggtgccttttatatgcctcacatagtctccttgttctcctactaatattcccaagctccatatgccaattaaagaagaaac

SEQ ID NO: 650164 - DNA, 146 bp, Homo sapiens
ttctcggtccacacgccacggagaaggagtcacacacgccgggtgtgaaggagctcccagccccttgggggtgtcagttttgtttggggaaggactcctgttggggtactgcggtgtctttggcatcccttctccggtggcgtggt

SEQ ID NO: 650165 - DNA, 3243 bp, Homo sapiens
gcctttgctaaattgctgaataagaagatggttgagtcacctccttcgcttaaacttgtcctcattggaggttgtcgtaacaaagatgatgaacttagggtaaaccaactgagaaggctgtctgaggatttaggagttcaagaatatgtggaatttaaaataaacattccatttgatgaattaaagaattatttgtctgaagcaacaattggtctgcataccatgtggaacgagcattttgggattggagttgtggagtgtatggcagctggcacaattatccttgcacacaattcggggggcccaaagcttgacattgtggttcctcacgaaggagatataactggctttctggctgagagtgaagaagactatgctgaaactatcgctcacattctttccatgtctgcagaaaagagactccaaatcagaaaaagtgctcgtgcatctgtaagcagattctctgatcaggaatttgaagtgacattcctatcatctgtggaaaagttatttaagtaatgccatatctgtaaaattaaagatattttatataaactggttaaacaccttcatatgtaaatatttttctaaattcaatctcatttgtcaaatcattttactttagaaaacagacaaaatttccttttagaataaaaggaagtgttgaaaagaaaatggatgactagccttcggcttccattcttggtatacatgagagaggctggctgctgagatgaatgtgaaccaggttgcagagaatctggctttgagccaccaggaagaactagtggatttgccaaaaaactaccccttgagtgaaaatgaagatgagggggacagtgatggagagagaaagcatcaaaagcttctggaagcaatcatttcccttgatggaaagaataggcggaaattggctgagaggtctgaggctagtctgaaagtgtcagagttcagtgtcagttctgaaggatcaggagaaaagctgggccttgcagatctgcttgagcccgttaaaacttcatcttctttggccactgtaaaaaagcaactgaatagagtcaaatcaaagaaggtggtggagttacctcttaacaaagaaaaaattgaacagatccacagagaagtagcattcagtaaaacctcacaggtcctctccaaatgggaccctatcatcctgaagaaccagcaggcagagcagctggtttttcccctggggaaggagcagccagccattgctcccattgaacatgcgctcagtggctggaaggcaagaactcccctggagcaggaaatttttaacctcctccataagaacaagcagccagtgacagatcctttactgactcccatggaaaaggcctctctccaagccatgagcctggaagaggcaaagatgcaccgagcagagcttcagagggctcgggctctgcagtcctactatgaggccaaggctcgaaaagagaagaaaatcaaaagtaaaaagtatcacaaagtcgtgaagaaaggaaaggccaagaaagccttaaaagagtttgagcagctacagaaggttaatccaactgtggcactggaagaaatggaaaaaattgaaaatgccagaatgatggaaagaatgagccttaagcaccaaaacagtgggaaatgggccaagtcaaaggcaattatggccaaatatgacctggaggctcgccaagctatgcaggaacagttggccaagaacaaagaactgacacagaaactccaggtagcctctgagagtgaggaagaggagggaggcacagaagtggaagaactccttgtccctcatgtagcgaatgaagtgcagatgaatgtggacggaccgaatccctggatgttcaggagctgcaccagtgacaccaaagaggctgcaacacaggaggaccctgagcaagtgccagagcttgcagctcatgaggtttctgcaagtgaggcagaagaaagaccagtggcagaggaagaaattttgttgagagaatttgaggaaaggcaatcccttagaaaaagatctgagctcaaccaggatgctgagccagcaagcagtcaagaaacaaaagattctagcagccaggaggtgctgtccgaattgagggcactatctcagaaattgaaggaaaaacatcagtccaggaagcaaaaagcaagttcagaggggactgttccccaggtccagagagaggaacctgccccagaagaagcggaacccctattgctacagaggtcagagagagtacaaactctggaagagctagaagagctgggaaaagaagattgttttcaaaataaggagcttcccagacctgtgttagaaggacagcagtcagagaggaccccaaataatcggcctgatgcccctaaggagaagaaagagaaggagcaactgatcaacctacagaacttcctgaccacacagtctccttccgtgaggtctttggcagttcccacaataatagaggagctggaagatgaagaggagagagaccaaaggcagatgataaaggaagcttttgctggggatgatgtcatcagagatttcttgaaagagaagagggaagctgtggaggcgagtaagccaaaggacgtggacctgacactacctggctggggcgagtggggtggtgtgggcctaaagcccagtgccaagaaaagacgccagtttctcattaaagcccctgagggtcctccaagaaaagataagaatttgccaaatgtgattatcagtgagaagcgcaacatccacgcagcagctcatcaggtacaagtgcttccatatccatttacccaccatcggcaatttgaaaggaccatccagacccctataggatccacatggaacacccagagggctttccaaaagctgactactcccaaggtcgtcaccaagccaggccatatcattaagcccataaaagcagaggatgtgggctaccagtcttcctcaaggtcagacctgcctgtcatacagaggaatccaaaacgaatcaccacacgtcacacaaaaacacgctgaaagaatatgctctgatagatgtgaggttgcgtggagagaagtgacacgccagagacgccctagagcttccactctcccttgtgagtcccagatttttatcttatgactacagcgggtggtattcacaaatacttggcctcagatacattagcagtgtagttcaacgccaccatctttaacaatataaagggacatttatttatatctcaaaaaac

SEQ ID NO: 650166 - DNA, 432 bp, Homo sapiens
gccgggctactctagaggaccccgaacatgtcgaggctatcatgtatgttggtactttcacttgttgattcgagtacatttctatcatctccgcgtttgggctattatgaagacactatcatgagcatccatacgttgcaggccaggtctcactagacacaggcctccgtaacaactgtttcagtaccgactgagtggttcaattaaatattaagaggaaaaaaaaaaaaggatcccatgtgcccttttacaagggtggacatgtcacacaagccctccaagagtattgcctagatttctccctgggcctaaaaggctgacgggactcacgggaagtttttcttaccaggcgccattgagatgatgtaaataagtcctaccttgggtggactaaaggacatatctccccaggggcccctacaaaccagttct

SEQ ID NO: 650167 - DNA, 787 bp, Homo sapiens
gcacgagctcgtgccgtgggattacaggggtgagcccactcgcccagcccagcagtggcttctgtgtgggaagaaggtcagggctgaaggaccctgggaggatgccccacccaacatgtcctctctcatcgtggggtaattgcccatgtttgcccagccattctcacctatcagggcttccaaaagaatggccaaagtaagttctaacaactttgcttctttgccaaggcaagcaccaatgctacttttctgccctctctggatgcccgtgacttcggtcccacaggaagccaagctcctgaggcagctgaaattcagtcaggggactggggtctgtgtactgatctacaccccacttcatacctacttcttcaaactgtccccaacactgggaacacctgtccttgaatatcctcagcaatttaaggggaaaaaaaggctgaagcagaaagactttttccttccaaaattgtgcctgcttgcttgggggcctaggcatgcagacttgaaaataaatcaagcttgggtggggcatggtggctcccgcctgtgatcccagcactttggaaggccgaggcaggacagacagggtgaggaggatcacaaggtcaggagatcgagaccatcctggctagcacggtgggaccctgtctctactaaaaatacaaaaacaaaattagccagggtggtggcgggtgcctgtagtcccagctactctggaggctgaggcaggagaatggcatgaaacgaggaggcaaagctagcagtgagcggagatcgcaccggt

SEQ ID NO: 650168 - DNA, 525 bp, Homo sapiens
  misc_feature (23)..(23): n is a, c, g, or t
  misc_feature (34)..(34): n is a, c, g, or t
tgcggtggacatgcggtctgcantactctgaatnattgtcaacgtgatgttgcatattctcctcaaacttgtaggcaagatagttcatcaccaggaggaagtattgatgatgggttttggattttaggaaaaagtacacccttgtttgtgaaatgacatgctgttcctcagaaaaatggcctttaatcagttgctacatttttctacctttcctcattttaactgccatcattggtcttaaatggaacaaaatgaagggattttgacactgagcaaaaagtgtaagtggaagaagacagcagtagtagcagcaacagtaacagcagtagtgacagcaaccagtcatagagtaactacatgataacatcaaaagccataagatagagaaaggatattaccaagaaacttaccattaactggcttgattcaacaatgaaaacaaaaatcgccttttttctcctttcattatggcttaaagctttcaattgcacaaacaaaataaattatatgacaggaagtaaaaaa

SEQ ID NO: 650169 - DNA, 96 bp, Homo sapiens
ggctaagatcatgcgccacagctccaaggggagccaccagcctccatggtcacctcagcaggcgctcgcccaccgcggagtccggccgcggtccgc

SEQ ID NO: 650170 - DNA, 583 bp, Homo sapiens
  misc_feature (23)..(23): n is a, c, g, or t
  misc_feature (34)..(34): n is a, c, g, or t
tgcggtggacatgcggtctgcantactctgaatnattgtcaacgtgatgttgcatattctcctcaaacttgtaggcaagatagttcatcaccaggaggaagtattgatgatgggttttggattttaggaaaaagtacacccttgtttgtgaaatgacatgctgttcctcagaaaaatggcctttaatcagttgctacatttttctacctttcctcattttaactgccatcattggtcttaaatggaacaaaatgaagggattttgacactgagcaaaaagtgtaagtggaagaagacagcagtagtagcagcaacagtaacagcagtagtgacagcaaccagtcatagaggaagtcagggaccctgaatggagggactggctggagccatggcagaggaacataaatgtaactacatgataacatcaaaagccataagatagagaaaggatattaccaagaaacttaccattaactggcttgattcaacaatgaaaacaaaaatcgccttttttctcctttcattatggcttaaagctttcaattgcacaaacaaaataaattatatgacaggaagtaaaaaa

SEQ ID NO: 650171 - DNA, 1433 bp, Homo sapiens
  misc_feature (89)..(89): n is a, c, g, or t
  misc_feature (512)..(512): n is a, c, g, or t
  misc_feature (1024)..(1024): n is a, c, g, or t
  misc_feature (1109)..(1109): n is a, c, g, or t
  misc_feature (1153)..(1153): n is a, c, g, or t
  misc_feature (1165)..(1165): n is a, c, g, or t
  misc_feature (1196)..(1196): n is a, c, g, or t
  misc_feature (1203)..(1203): n is a, c, g, or t
  misc_feature (1214)..(1214): n is a, c, g, or t
  misc_feature (1224)..(1224): n is a, c, g, or t
  misc_feature (1241)..(1241): n is a, c, g, or t
  misc_feature (1249)..(1249): n is a, c, g, or t
  misc_feature (1253)..(1253): n is a, c, g, or t
  misc_feature (1340)..(1340): n is a, c, g, or t
  misc_feature (1382)..(1382): n is a, c, g, or t
  misc_feature (1426)..(1426): n is a, c, g, or t
cctcagaacctcatgggtagcagcgtaggagggtgagcgttaatccatgatgttcaagttgttttgccacaaccatgtttctccgtggncccgcggtcaaaacctcccaaattgctgtactcagccacccgcagggcggtctctttttctccaggttcacggggaacgtctcacccccatcaaaattcctggggtaacctgccgggggggaccctaaaactgttacagtttcacccccaagaggcaacctggtccgctgttgggtgaaggttacaagcaggaagggcggagaccaggggagtaagcaccttattccaccaaatgatggaagaaactgacttccaaatattatgggcttcatttttcggcacagtccgtggacattcccagcccctgttccctcccctcatcatgttggagtgtcccagttaaaagtgcactttctttcccactctagtgtgcgctacacaagggcagaatatcgcacgtccaattttttactatttcctgangtgcctggcacgtcatggacttatgattaaataatgtaattgaacaaaagaaggaatgaatgagttatcatagtatttagctttcttagtcagagattaggtttacttccctctgcttcctgagatttatctttcacttaattctttcatcggttaataacaaattgattatacttcctttcctctcaggactggctcagaataggacactctacacagagatctttctttctttcttttttttttttttaaggaaaagcatgcaggatcttattaatttaaaataatttctgctaacaattgtagggtataagaaagagtataacaagattggtaataacattacaaaatatataataaataaacaatgcctccttctaaggtctctgttttgttaataataatggtccttataggagagcaactgatttcttctgaaatgaaaagtggaagctctactaatttttggatttctgtcattccccccatcttttttttttcctgtgaagagnttactaaatgtctacagcattctgactcaacacttatatcacactttttcctctaatgggcagtgtgcttgtctgaggatgccanagcagaatggcagccatgcagtacgactccagccaaatgagccnaactggactttnttgtcaagacagtgtaagcctttaccatcgnatcttcntcctccccatntctgagcatncacaatgtcagacatanccggagantgtnaaacaccaatcaggcaggtctactataaggaacctgaatatggagagtcagtagtaaggaacagatacaagtacgtagtaagttccngaggaggatatcgacagcctacagtccaacatccttcgtatngccaagcaagacctacatatccttcagttcccggtctgctggcngtgtttc

SEQ ID NO: 650172 - DNA, 156 bp, Homo sapiens
gatccgacagcggcagttcacatgatcttcgaaatatgttgtccgtcattagcagcggtctctcttatctgactttactaatttcagatagagtcgcgctgagtcagccatggagagcaggttgttacagactctgacgccgtccaagcacagggt

SEQ ID NO: 650173 - DNA, 289 bp, Homo sapiens
  misc_feature (237)..(237): n is a, c, g, or t
ttgctgcggtcgatctagaggatcgcactttacgcaggcgtttcaccgaggaaaggatcgtatcgtatgtccgctatccagaacctccactctttcgaaccctttggtgatgcaagtaagggtgatgaactggtttctggtgggactgagggattatattcctattagaattcaacagagaaacgggaggaagaaccttaataacggtccaggggatcggtggatgattacgataanaaagaaactaggtggaggggtttaaggaaaaagtttgggctggcaatggtac

SEQ ID NO: 650174 - DNA, 546 bp, Homo sapiens
tctcccattttctctttcctcctccccaacccacccctttctctaaatgcctgtgctttccagttcttcttctacccctatggcatgagacctggaaatcatgatgagtttctccttgtttgtaaactgcctctgcaccggctgaggttgctcggccgtgggtggctcctggctggcaccctccggcgagctctgctccgcacccagaacgggggcggccacagcagagtctcgcgtttgaccagctactgcgtccaagaccgactcggtggaggtgccggcctcccgcaggggtgtgtagcccttattgctgctggatgggtcatccgactgggagctcccggagtcccgcctggtggggggcgagccctccagccgcaggggtggcgagggggaggcggccttggccagagggctggagtccgggtccgcactccccggggagggcgggggctcgggggacggcggcgcccggtagtccgggagcccgctggtgctgcggcgccgcaaggccgcgtacctgccggtcctgggcaggcggccgca

SEQ ID NO: 650175 - DNA, 510 bp, Homo sapiens
  misc_feature (24)..(24): n is a, c, g, or t
  misc_feature (32)..(32): n is a, c, g, or t
  misc_feature (37)..(37): n is a, c, g, or t
gggtgtgggtggtggggcctgaangacaaggnccagntgggcgggctgaaaggctccaagataaaggttccttcgttctctgagacactgtcagctttgaatgtggtacaggtggctggtggatctaaaagtttgtttgcagtgactgtggaagggaaggtgtatgcctgtggagacagccatcgaatggccggctggggctgggcatttccagcgggacagtgcccatcccacggcagatcacagctctcagcagctacgtggtcaagaaggtggctgttcactcaggtggccggcacgcgacggctttaactgtcgatggaaaagtgttttcgtggggcgaaggtgacgatggaaaacttggacacttcagcagaatgaactgtgacaaaccaaggctgatcgaggccctgaaaaccaagcgtatccgggatatcgcctgtgggagctcgcacagcgcagccctcacatccagcggagaactgtacacctggggcctcggcgagtacg

SEQ ID NO: 650176 - DNA, 335 bp, Homo sapiens
tactagaaagtcttacaccataagaggagatgtactccatacatacaacatttattgaccgatgtagtatatgtaaaacctgaatcaaggattgggggccgagcacagtgactcacacctgtaattccagtactttgggaggcaaagccaggcagatcacctgaggtcagcagttcaagaccaccctggccaacatggtgaaaccctatctctactaaaaatacaaaaataagccgggcatagtggtgggcacctgtattcccagctacttgggaggctgaggcaggagaatttcttgaacccaggaagggaaggttgcagtgagctgagaccac

SEQ ID NO: 650177 - DNA, 787 bp, Homo sapiens
gtgtgtagagtttttcgcgtatcagaaagactcctgtccttatgatcgtggtgagcaggatggttaagagtcttttccattctgatttgacttgtgtgcattttgcgcgagagaatctagtatagattctatcactggcgctttgtcttcagcttcttcatcacaaaaatcatcatcatcatcatggtcatcatcatcttcttcatcatcatcgtcatcatcttcaatcagcagcgagttctacttttgttctgtggaactttgcatacacctacagggacagaccgctctccagataaacttaagagtttcacatcctcctcctcttcatcatcagactgtgcatcctcctccacagctaataagtgctgtccaaaaatatgcagtggccgtgatccacacttcaactataagaccactggtggtgttatttcagagcccacaagggaatctgttgtctgtacacacattttcagagttgccagtgttactttaattgcaccgccttcgtaattcattgcctctgcttcaactatgtgcaactcatcctgtgcacgagcccataagctgaccgttcttagagatatctggtgctcattttcatcattatccaccttagagtgataatctttgtcggcctttagttcacagcagaaaagatagttctggggccacagggggctcatgtccatgtccatagaatcttccatcgggtggcggcacgcacttaggtagcagagaaggcggacgcagataaaagaacgctgctccagagaacagccgagca

SEQ ID NO: 650178 - DNA, 707 bp, Homo sapiens
cttctgcacgctagccacacgcgaggtcttcctggaggccatgaacgtggggcccccggagcaggccgtgcagatgctaggcgaggccctccccttcatccagcgtgtctacaacgtctcccagaatgctctacgcctgagcactccctgtctggactctgcccctagagtgctgtggaatgccatggtggcctgcaccgtgctttcctgcttgcatgatctgtggctgcgtgtggccagggccgtgagtcccgtggcatgagccttctggggcgctgcggggaactggagatcctctgtcgcccctgtgagctgagctggtctaggaaccacagactgtgacagagaaagtgtggcgaccagcccagaagaggcccaccctctcggtccggaacaagacgcctcagccagtggtctccccctcggcctattacacgcgtgcggcagccagggcctcgccagtgtgctggtgcagagcagagcaggcaggggttgggtgccgggcccgcagagcccgaagggtcgcaccccctagccctgtggggtgcatctgcggacccatggttgaagttcccagtgtcccgggttgtggaggctcgatcctttcttcctttctggccagcgatttgtcctcatctaaggccgtcctggacccgtttctgccaggtggcggcttgagcccggggacagtgcctcaaggctggtga

SEQ ID NO: 650179 - DNA, 665 bp, Homo sapiens
aagcagtttataactttttggcctcttatcacacgccctgtttcctttttttccctagagatgcttctattagtcttcaacagtatatgattatgataggcaatgcatgtgtaaagttaatatatcagaagacttttccccgagatcgtgtatgtatactctgtaggtcttttgatataactctgtatttgcaaccttggcttcactttttgcacaattattgaatttttcttccgccgagctttagagaaaaggatggcacgccgacagtaataagaaatgggtgattatcaaatacttttcctaaagctatagaaaaaatgcacatttcttttgtttatatattacaaatgctttaatcattatttactttcttcttgacagaatcgatcaggatcttcagctctaatatactatcaggaatgtcctccttaccttgatcggccccatctagcacaggagtaacgggattaattggtgtttgacatatttcttgatttcccagaatcctttcagaaacgttattcaaatatacagatgtactcttctggttttcgattaattgttgggactgtatatcggtagtgttattcccgctaaaacttgcagctggtatgttgttactatggcttggtgtgctaacgggtaatacggtatgtaaacta

SEQ ID NO: 650180 - DNA, 366 bp, Homo sapiens
atatagtatcccacctgtcgaacttctccaattcgcccttcaaatgtccctgaagccccactcagattctcactcacattgttaatttttgtcaccagagaaagaatagatccctgttcaccagaattggaaccgaggtcttgattcctcttcagcaagccctcattaaagaaagtttcaccaggtcctgccttgacccgggaaaagcccttttcacacaaatagaagtcaaatggaatatgtggcacaaggccttgaaccctctttgtgggctctcctctggaccagacgcgcacaccgcgaacgcggcctctgtcacccctcatggcgccttaacacgcgcactatggagaacctctcgtgccg

SEQ ID NO: 650181 - DNA, 235 bp, Homo sapiens
ttcgtactattcgatataactttttcaaaaggaaagagcgcttagggtgactaatacactgttatacagctatactgtacctaaatgaagaagaagaagaggaagattttgaaaaagaagccgaagcagcagcagcagcagcagcggcagaagaagaagaagaagaagaggaaagaggaagaaattttaccaaaaatttgaaatattttaaaatattttccctcctttgttttgt

SEQ ID NO: 650182 - DNA, 142 bp, Homo sapiens
  misc_feature (138)..(138): n is a, c, g, or t
aagatgacgagtgactggaaatggcgtataaacagagcgagcggttcacatatcagagatgtatgctggactggggccgagggcgctctcgcggcatgacagtagctacgaggcaagatacatcgcctgacgagactngctg

SEQ ID NO: 650183 - DNA, 297 bp, Homo sapiens
  misc_feature (7)..(7): n is a, c, g, or t
  misc_feature (78)..(78): n is a, c, g, or t
  misc_feature (230)..(230): n is a, c, g, or t
  misc_feature (240)..(240): n is a, c, g, or t
  misc_feature (275)..(275): n is a, c, g, or t
  misc_feature (294)..(294): n is a, c, g, or t
ggaaagnaggctccccaggccttactcagggcctcagggtccatgggttgggcagccagtctgggcccttctcagggntcctcatctccatcctcatcctctttccttcacagcatttactttggagcttcttttgtgacacaccattgtcaagtcatgatgaatcggccaacagccagcccttgccaagctgactgtcacagtcttaagattgggaaacttgtggtacnagattagacnttgaagagagcttagcagtgattgaggtggtgacntaaatatacagttactttnata

SEQ ID NO: 650184 - DNA, 434 bp, Homo sapiens
accaagtgcttcccgcaggacgggcgcatgcgtacaagcctctgtgcgactctgcgacttcatcgtcatactgatggttgttcacttgaggatttccaatcatgatcagccatagaacccgttactcgctggcccagtttctatcgatacaggaggcctccgcttccatcgcactcttcagcaaatacggtgtcgagcatttgtccctgtatccgtcccagttgctgacgggcatcatgaacatcgtgcgtgaccaagacgaccgaaccttgctgctggtgctccaggaaattgttgcaacgcccggcaatctccgtgccaaatccacgcaatgccgtgatcaggtcgtcttcaacaggtgccgcgtcagcgatggaagggtccgcctgcagcaacttcttgtcctgcgcgagatagccgtcgatcagcaggca

SEQ ID NO: 650185 - DNA, 1464 bp, Homo sapiens
gcgagcggacgcggcagcgcctctgtctcgcttttcttatttttcccccctttcccctttcttttattattagtttcctttatcctttttcatcccactataccaacgcaattgaaacaaatatccacacatcgagaagagacaggcaaataacaaagggagcacgcggacacgaagcacacggaatatgaacgcagcacagacagtaagctaacagaacagcaagcaagagcgcagaagagcagcgaagaagacataaataagcaagaacaacagcgagcagcaagacaagagacgaggaacgcgtcctaaacagagagcgagaaacctaggcgagagcagagacgacgcgacgaagaagagaacacgacacaaaacgcgcgcgcagcacacaacagagagctagcgacaaacaacagtcgagcagcacgaacacaccacgaggagacaactgctacagcaacagggccaagactgagcacgccaggccagaccgcggacgaacggcagcagaggacagcagcagagcagccacagacgcgacgagagcgctagccgaacgcaggacagctcgccaaagaacaagagccggcaacacacgaccaaaccagatagagagcgcaacacaccgaacaccagaagcacagcagaacgaccgcgaacaagaacacggagaagacacgacagaacaaacagaaagagaagcgaggagagcgccggaggccacgaacgacagaacgacgagagccgaggaccgaccgaaacagcacgacggatgctggaagcgaaggagcaacagaacggccaacagcgaagagaggcgggccacgacaagaagacgcaacgcgaaaaagtaggatacacagagaccgaccgaaggaagaatcgagagcaacagcaaagacgagagggaggagacgccggacaagaaacgcagcagaagaagagaccaggggaagaacgaaccgcgaacaacgcagacgaacacgaacgaagacaacaaaacggaagaacagaagccgacagcaccgagcaccgagaacaggaagcgaggaagaaggacgaacgacagaacaggaagcaacagacacgagggcacagcggacccacaggggagacgaagaaacggaacggaaacgcgaagacgatgcggaccaacgagaccgcacgaaggacagccagccgaacgtccacacggagagagagggagagagaaagcacgaaaacagaaaggggagagagtggacaggagagcaacgaacggaggaggagcgaggagagaggcgcgtagagagggggaggcgagaaacaaagagagccgaagagcgggaggggggcgccgcgaagaagcagagcgtacacgaagggcgagcgagggagagcagtgcagaacaggcgagcagccagacgaaagggacacacgcgcacaaccgagagcaagaccggggagcaggcaagagaaca

SEQ ID NO: 650186 - DNA, 249 bp, Homo sapiens
ggaagaagggtgttcaaaactgtttgttcaattggcccttttagtttaggaggaaaaggctggttaatgaaaacaatggcttggtaacccttcgaaggaaaggggaatgttttgggggcccctttggttttttttttggggggggggggttttaagtttttagtttttaaaaacgggattttttaatgggaacaacttggcccaaaatttgttccagaattttggggcccctttaaaaagtttaatgga

SEQ ID NO: 650187 - DNA, 187 bp, Homo sapiens
gaggcaggaggaggtggacgctgactgctaccatcacagatggcaaggttgggcagagaccaaggaagctgcaggcttgggtacggtggtgagggaagcctggtggtgccaggcccaaccgttggcatttacctaccttggcaccagccgtgcctcctctgtcacgttttcgcggtaccgacgctcg

SEQ ID NO: 650188 - DNA, 131 bp, Homo sapiens
gagaagagaagaagggggaggggatgaatggtgttggttccctgctgttgggcaggctctgagatctcagcagaagaaatgaaagctggaaatagggagggaggaatgttcaagcatcggtgaactccatg

SEQ ID NO: 650189 - DNA, 168 bp, Homo sapiens
  misc_feature (30)..(30): n is a, c, g, or t
  misc_feature (73)..(73): n is a, c, g, or t
  misc_feature (120)..(120): n is a, c, g, or t
  misc_feature (154)..(154): n is a, c, g, or t
tggcagccgtgaagctggagtccgagaatnatgagtacgagcgggcccggaggctgctggccaaggcgcgganagtgcccccaccgcccgggtgttcatgaagtctgtgaagctggagtnggtgcaagacaacatcagggcagcccaagatctntgcgaggaggccct

SEQ ID NO: 650190 - DNA, 192 bp, Homo sapiens
tgcgtgtcatccttgagtcgtatacattctctatcatgtgtgcacgggattccagacctgtccacttcttcaaggggtgaggtcctgttaccataaccatcatctctattttattagcatgtttgtcctgtctctggttgtctagtaggacaaaacaacatcatcagtatgtaaagaagacttttccctggg

SEQ ID NO: 650191 - DNA, 391 bp, Homo sapiens
  misc_feature (3)..(3): n is a, c, g, or t
  misc_feature (25)..(26): n is a, c, g, or t
  misc_feature (82)..(82): n is a, c, g, or t
agncgacgcggtcaaaattaaaaanntgtattgagggatactataaagagaacacagaatgggagaaaaatatttgcaaatnatgtatctggataagggattaatggccacaatatatgaagaactcctaaaactcagcaacaaactgattcaaaaatggggaaaggactttaatagacttttctccaaagaggcacaaatgaccaacagacacataaaaagatgctcaacatcacaattactagggaaatgcaaatcaaaaccatagtgagatactacttcacagttactaggatggctgttatttaaaagacaaaaacaaaagcagaaaataacgtgttagctagcaagtggagaaattaaaacctttgaaccggcggtcgcggcgtgc

SEQ ID NO: 650192 - DNA, 611 bp, Homo sapiens
  misc_feature (26)..(26): n is a, c, g, or t
  misc_feature (29)..(29): n is a, c, g, or t
  misc_feature (31)..(31): n is a, c, g, or t
  misc_feature (40)..(40): n is a, c, g, or t
  misc_feature (44)..(44): n is a, c, g, or t
  misc_feature (46)..(46): n is a, c, g, or t
  misc_feature (52)..(52): n is a, c, g, or t
  misc_feature (56)..(56): n is a, c, g, or t
  misc_feature (58)..(59): n is a, c, g, or t
  misc_feature (64)..(64): n is a, c, g, or t
  misc_feature (66)..(67): n is a, c, g, or t
  misc_feature (83)..(83): n is a, c, g, or t
  misc_feature (87)..(90): n is a, c, g, or t
  misc_feature (93)..(93): n is a, c, g, or t
  misc_feature (95)..(95): n is a, c, g, or t
  misc_feature (97)..(98): n is a, c, g, or t
  misc_feature (106)..(106): n is a, c, g, or t
  misc_feature (108)..(108): n is a, c, g, or t
  misc_feature (115)..(115): n is a, c, g, or t
  misc_feature (121)..(121): n is a, c, g, or t
  misc_feature (133)..(133): n is a, c, g, or t
  misc_feature (137)..(137): n is a, c, g, or t
  misc_feature (139)..(139): n is a, c, g, or t
  misc_feature (144)..(144): n is a, c, g, or t
  misc_feature (153)..(153): n is a, c, g, or t
  misc_feature (159)..(159): n is a, c, g, or t
  misc_feature (162)..(162): n is a, c, g, or t
  misc_feature (182)..(182): n is a, c, g, or t
  misc_feature (184)..(185): n is a, c, g, or t
  misc_feature (188)..(188): n is a, c, g, or t
  misc_feature (226)..(226): n is a, c, g, or t
  misc_feature (229)..(229): n is a, c, g, or t
  misc_feature (243)..(249): n is a, c, g, or t
  misc_feature (266)..(266): n is a, c, g, or t
  misc_feature (322)..(322): n is a, c, g, or t
  misc_feature (327)..(327): n is a, c, g, or t
  misc_feature (332)..(337): n is a, c, g, or t
aaacagcccgtattggaattttattnaananaaaaaaganaatntntgtcantgcncnnaactntnntaattgatggcacttncagnnnnggngntnnaaagactntntaaacanaatgtncacaagaaactnagtnancactntaaaccctntgattnggngccctccatatggcaagacncnnctnaaatttagacaataaactctctggaaaatttagcttanganaaagaatgatatgnnnnnnngtagataactcaaaaanaacaatttccttcaatatgggattttactattctaaaacaacagtccagtcttcanataanatggnnnnnnttgagaggagaaattcagagaatgaaattttcaatcatatcaccactgtagcatgacgttatttttttcataattttcatgagcagtgggattggagatgtcggaaaacggtgggaaaggaacatactgcatgatttgtggatagtaccaaacagcataggggtaggcagcaagttggttgagctgctggaaagggtgtagcggtggaggattaagagagtcgtcgcagctagcccccccccccaccctaaatattgttgttgaatgttaatat

SEQ ID NO: 650193 - DNA, 501 bp, Homo sapiens
tcattcactcagttcacacaaaaggtgttgggcaatttctacaattttgcttcatcatttgctgtttttcaggcccaggtggccccaagcccatttgaaattttcattccggcaaatgtggttttgaaatggtttgaaaactttcaaaggcggcttgcacagaacccttttttttggaaaacctaatttggataaaataatttttaatgggttttgaaatttgtcatgttttgaaggtaactggctccatttaaaagtttggggtcaaaggatcccgaaacctaagtttaaaaactgctttgggactgaagcttaattaaaaattttttttaaaaatttaaaaccttggaaaatgaaaattttttcctcattaaagacttttttccccttaagcttaaaattcccttcaaaggcaagacattttgttttggctttgattcattttttttacttaaaaataaaaccttttccaaaccgttgtgttcccagttaaaaaaaaaa

SEQ ID NO: 650194 - DNA, 664 bp, Homo sapiens
cgaagaaatatgcagactgtgcatcgttattgaagggggggctaatttcgcccaatcttttttgcaaagcatctaaattttcactactaatgtaatgtgatgctaatccgagcatataagcgtctgctccggtaactatttctcctgtgagacatagatacagagccatctgtgagtttgagttagctactgtcacaattctagggagagcaaaagttgagcctacatctggaaaaaatccaatgtccatctcaggcatggcccatttggtgttttcagtggcaattctaaagggcgtatgaatagacaagccaaccccgcctcccatggtgataccgtccatgaaagtaacaattggtttcaagtaagttgctatttgaaaattcaaagaatattcagcagtaaaaaattcgatagatttgttaaactcttgcttgatattgtgtgttgccacagtagccacgtcaccaccagcacagaacgaacgtggtccattggacgactttaaaataattaagtttgtagtgccactcttggcatactcattcaaggtcttgaacatggattctgacatttcggtattcaaggcattgagcttgttgggcctatttaaagtaataactctagcggtatcctgagctgtaaatagcacaggaggggtgct

SEQ ID NO: 650195 - DNA, 171 bp, Homo sapiens
tactcgatatggagggtaggtcgtgtcaagatagcagcagcaggtagtcagggctcaagacaccaccccctccagcttcttggggcccaggagcctctccactgctacagtggggtgggggtacctagcacaagcaaggtaggtaggaggttaataggtactatgtaaccc

SEQ ID NO: 650196 - DNA, 1444 bp, Homo sapiens
  misc_feature (1367)..(1367): n is a, c, g, or t
  misc_feature (1370)..(1370): n is a, c, g, or t
  misc_feature (1374)..(1374): n is a, c, g, or t
ggcgccggcacacctattggcccccgcggcgtcccgtcgccgcgtcgcgttgctggcccgtcggagcgacgccgctcgggtcagtcggcggccggactgggaagatggacgcagctactctgacctacgacactctccggtttgctgagtttgaagattttcctgagacctcagagcccgtttggatactgggtagaaaatacagcattttcacagaaaaggacgagatcttgtctgatgtggcatctagactttggtttacatacaggaaaaactttccagccattggggggacaggccccacctcggacacaggctggggctgcatgctgcggtgtggacagatgatctttgcccaagccctggtgtgccggcacctaggccgagattggaggtggacacaaaggaagaggcagccagacagctacttcagcgtcctcaacgcattcatcgacaggaaggacagttactactccattcaccagatagcgcaaatgggagttggcgaaggcaagtccataggccagtggtacgggcccaacactgtcgcccaggtcctgaagaagcttgctgtcttcgatacgtggagctccttggcggtccacattgcaatggacaacactgttgtgatggaggaaatcagaaggttgtgcaggaccagcgttccctgtgcaggcgccactgcgtttcctgcagattccgaccggcactgcaacggattccctgccggagctgaggtcaccaacaggccgtcgccatggagacccctggtacttctcattcccctgcgcctggggctcacggacatcaacgaggcctacgtggagacgctgaagcactgcttcatgatgccccagtccctgggcgtcatcggagggaagcccaacagcgcccactacttcatcggctacgttggtgaggagctcatctacctggacccccacaccacgcagccagccgtggagcccactgatggctgcttcatcccggacgagagcttccactgccagcacccgccgtgccgcatgagcatcgcggagcttgacccgtccatcgctgtggggtttttctgtaagactgaagatgacttcaatgattggtgccagcaagtcaaaaagctgtctctgcttggaggtgccctgcccatgtttgagctggtggagcagcagccttcacatctggcctgccccgacgtcctgaacctgtccctagattcttctgatgtagagcgactggaaagattcttcgactcagaagatgaagactttgaaatcctgtccctttgttgaaaatcctggggtcgggggtggcactgtgagacctgggctctggtgcgtgcgttcatcatccggcgttcgctgcgaggnggnccgngcgtcccccaggagccggtgccgtggagggggggccgggggagtggtgtgaatcaccaagggaggggtcc

SEQ ID NO: 650197 - DNA, 149 bp, Homo sapiens
aaaactaactcaccgtttacctgcctacatttcctgtacatcgcatggattacaatttcgaaaatacacctaaatactggtgtgctaatgatccagcaatgacacattatttcaccggactctcaaccttatttccagaaggtgaatct

SEQ ID NO: 650198 - DNA, 120 bp, Homo sapiens
gccttactaattttgttttcttttttatagagacagggcctcactacgttgcccagtcagatcttgaacctcctgggcttaagtcatcctcctgtcttgggcctccaaaagtcctgggat

SEQ ID NO: 650199 - DNA, 2787 bp, Homo sapiens
ggcgccggcacacctattggcccccgcggcgtcccgtcgccgcgtcgcgttgctggcccgtcggagcgacgccgctcgggtcagtcggcggccggactgggaagatggacgcagctactctgacctacgacactctccggtttgctgagtttgaagattttcctgagacctcagagcccgtttggatactgggtagaaaatacagcattttcacagaaaaggacgagatcttgtctgatgtggcatctagactttggtttacatacaggaaaaactttccagccattattggaggtggacacaaaggaagaggcagccagacagctacttcagcgtcctcaacgcattcatcgacaggaaggacagttactactccattcaccagatagcgcaaatgggagttggcgaaggcaagtccataggccagtggtacgggcccaacactgtcgcccaggtcctgaagaagcttgctgtcttcgatacgtggagctccttggcggtccacattgcaatggacaacactgttgtgatggaggaaatcagaaggttgtgcaggaccagcgttccctgtgcaggcgccactgcgtttcctgcagattccgaccggcactgcaacggattccctgccggagctgaggtcaccaacaggccgtcgccatggagacccctggtacttctcattcccctgcgcctggggctcacggacatcaacgaggcctacgtggagacgctgaagcactgcttcatgatgccccagtccctgggcgtcatcggagggaagcccaacagcgcccactacttcatcggctacgttggtgaggagctcatctacctggacccccacaccacgcagccagccgtggagcccactgatggctgcttcatcccggacgagagcttccactgccagcacccgccgtgccgcatgagcatcgcggagcttgacccgtccatcgctgtggggtttttctgtaagactgaagatgacttcaatgattggtgccagcaagtcaaaaagctgtctctgcttggaggtgccctgcccatgtttgagctggtggagcagcagccttcacatctggcctgccccgacgtcctgaacctgtccctagattcttctgatgtagagcgactggaaagattcttcgactcagaagatgaagactttgaaatcctgtccctttgaaaatcctggggtcgggggtggcacctgtgagagcctggggctcctggtgccgctgcgtttcatccatcccgcccgctcgcctgccgagggctgcgccccgtgctgcctccccccagagggccacccgctgtgctcgtggactgaggctgcgctgcccgggaggccttactgcttggtgtcagactgcccagctcagagtgcccgtcagggcctgtgcatccgcacgcggagccgtctgttaggagcttccagagcgttctctcgacactgccagccccgtgttagcacctgggcctcagtcccacttgctcccaggcgccggttctgtggttggtttggaattaaagtcctgtttgaagttgtcagacacagacatgaatttctggggcgctccctgagtcagagtctcagaagacctgtgcaggctggcgtgagaggagcggcagccacactgcggccccacgcccaaggactgggctgctctcgaggggggcgcgcccaccgctgtgtcctctctgcccagcctggcttaccaagggctacctcagtgggagatgaggttggaggaacgaaggcgaggttcctccttgctttggggagaaaagtattcaggaagtgggtgtgtgggaaacctgaagatggcgtgcacaggacacagcgtggtcggcctgggcagaagggcggctggctgtcctggagctgctgctggagcctgccctcagagtgtccctttccagtgctgtggcattctgtggcagcttccccaggtgtggtgacgggggggggcggggcctccacctgtgacagtcaggcttgagggtggacggcgtgcctctcccaggagccttccccatgtccttgccttgctgagaattgccctcccatgccgctgaggtgttaggtggtttagggccaaaaggggaaaaccacttgagtcttgtggtgtgtggtgggcagacaccacagggtggcatcacctggtggcatttccagaacctcagccccgattccagcacccaccaccgcctgaccctgtgtaacctgctgtcccgggtcccagagtgcactctgccccgctgctctgctgcctgtcctgggaaagtatctttgccccactaggaaatgtaaacaggagggcttggggagcgtgggcacttttctcatgagcagctactgcggcgttggcaggactcgctgctgctgctgctgcttgtgtaggtcggggagccggagatccccgaggacgcgcgccggacagtcggcactgaccggcccacctggtagcagaggacacccccagccccccaagcattgaagacatagtgtatttcctcgtatcctttctcccttgggtgtagttggggtggggaagcagggaaggctggtgcgatctccattccttgggctccacgtccgagttcatggtgcgccgctgtgctgggagctgcagtggtaatgtgtgggacaccttgaccaaaggggagctttgtctcgtgtgttttgaaaaaggcttaatgaagagaatgttgttcattcttagtagtatagtttgcaattcttaatggcaaataataagtttcagtagaaaacaaaaaaaaaaa

SEQ ID NO: 650200 - DNA, 1371 bp, Homo sapiens
  misc_feature (1294)..(1294): n is a, c, g, or t
  misc_feature (1297)..(1297): n is a, c, g, or t
  misc_feature (1301)..(1301): n is a, c, g, or t
ggcgccggcacacctattggcccccgcggcgtcccgtcgccgcgtcgcgttgctggcccgtcggagcgacgccgctcgggtcagtcggcggccggactgggaagatggacgcagctactctgacctacgacactctccggtttgctgagtttgaagattttcctgagacctcagagcccgtttggatactgggtagaaaatacagcattttcacagaaaaggacgagatcttgtctgatgtggcatctagactttggtttacatacaggaaaaactttccagccattggggggacaggccccacctcggacacaggctggggctgcatgctgcggtgtggacagatgatctttgcccaagccctggtgtgccggcacctaggccgagattggaggtggacacaaaggaagaggcagccagacagctacttcagcgtcctcaacgcattcatcgacaggaaggacagttactactccattcaccagatagcgcaaatgggagttggcgaaggcaagtccataggccagtggtacgggcccaacactgtcgcccaggtcctgaagaagcttgctgtcttcgatacgtggagctccttggcggtccacattgcaatggacaacactgttgtgatggaggaaatcagaaggttgtgcaggaccagcgttccctgtgcaggcgccactgcgtttcctgcagattccgaccggcactgcaacggattccctgccggagctgaggtcaccaacaggccgtcgccatggagacccctggtacttctcattcccctgcgcctggggctcacggacatcaacgaggcctacgtggagacgctgaagcactgcttcatgatgccccagtccctgggcgtcatcggagggaagcccaacagcgcccactacttcatcggctacgttggtgaggagctcatctacctggacccccacaccacgcagccagccgtggagcccactgatggctgcttcatcccggacgagagcttccactgccagcacccgccgtgccgcatgagcatcgcggagcttgacccgtccatcgctgtggggtttttctgtaagactgaagatgacttcaatgattggtgccagcaagtcaaaaagctgtctctgcttggaggtgccctgcccatgtttgagctggtggagcagcagccttcacatctggcctgccccgacgtcctgaacctgtccctagttgaaaatcctggggtcgggggtggcactgtgagacctgggctctggtgcgtgcgttcatcatccggcgttcgctgcgaggnggnccgngcgtcccccaggagccggtgccgtggagggggggccgggggagtggtgtgaatcaccaagggaggggtcc

SEQ ID NO: 650201 - DNA, 155 bp, Homo sapiens
ggtccttatcaagtgtcatatgcaagtggtgctccttaatcttaacatgctgtcgtcatcttcaagttgcaattgtgttggtatagtgaatcgcaatgggtcgactactgacatggcctttgcttaccatgatatcggggtatatgttagctggt

SEQ ID NO: 650202 - DNA, 2433 bp, Homo sapiens
  misc_feature (12)..(12): n is a, c, g, or t
  misc_feature (18)..(18): n is a, c, g, or t
  misc_feature (21)..(23): n is a, c, g, or t
  misc_feature (25)..(28): n is a, c, g, or t
  misc_feature (31)..(32): n is a, c, g, or t
  misc_feature (35)..(35): n is a, c, g, or t
tggctaggtacnaggctngtnnnannnnggnnggncgcaaatgggagttggcgaaggcaagtccataggccagtggtacgggcccaacactgtcgcccaggtcctgaagaagcttgctgtcttcgatacgtggagctccttggcggtccacattgcaatggacaacactgttgtgatggaggaaatcagaaggttgtgcaggaccagcgttccctgtgcaggcgccactgcgtttcctgcagattccgaccggcactgcaacggattccctgccggagctgaggtcaccaacaggccgtcgccatggagacccctggtacttctcattcccctgcgcctggggctcacggacatcaacgaggcctacgtggagacgctgaagcactgcttcatgatgccccagtccctgggcgtcatcggagggaagcccaacagcgcccactacttcatcggctacgttggtgaggagctcatctacctggacccccacaccacgcagccagccgtggagcccactgatggctgcttcatcccggacgagagcttccactgccagcacccgccgtgccgcatgagcatcgcggagcttgacccgtccatcgctgtggggtttttctgtaagactgaagatgacttcaatgattggtgccagcaagtcaaaaagctgtctctgcttggaggtgccctgcccatgtttgagctggtggagcagcagccttcacatctggcctgccccgacgtcctgaacctgtccctagattcttctgatgtagagcgactggaaagattcttcgactcagaagatgaagactttgaaatcctgtccctttgaaaatcctggggtcgggggtggcacctgtgagagcctggggctcctggtgccgctgcgtttcatccatcccgcccgctcgcctgccgagggctgcgccccgtgctgcctccccccagagggccacccgctgtgctcgtggactgaggctgcgctgcccgggaggccttactgcttggtgtcagactgcccagctcagagtgcccgtcagggcctgtgcatccgcacgcggagccgtctgttaggagcttccagagcgttctctcgacactgccagccccgtgttagcacctgggcctcagtcccacttgctcccaggcgccggttctgtggttggtttggaattaaagtcctgtttgaagttgtcagacacagacatgaatttctggggcgctccctgagtcagagtctcagaagacctgtgcaggctggcgtgagaggagcggcagccacactgcggccccacgcccaaggactgggctgctctcgaggggggcgcgcccaccgctgtgtcctctctgcccagcctggcttaccaagggctacctcagtgggagatgaggttggaggaacgaaggcgaggttcctccttgctttggggagaaaagtattcaggaagtgggtgtgtgggaaacctgaagatggcgtgcacaggacacagcgtggtcggcctgggcagaagggcggctggctgtcctggagctgctgctggagcctgccctcagagtgtccctttccagtgctgtggcattctgtggcagcttccccaggtgtggtgacgggggggggcggggcctccacctgtgacagtcaggcttgagggtggacggcgtgcctctcccaggagccttccccatgtccttgccttgctgagaattgccctcccatgccgctgaggtgttaggtggtttagggccaaaaggggaaaaccacttgagtcttgtggtgtgtggtgggcagacaccacagggtggcatcacctggtggcatttccagaacctcagccccgattccagcacccaccaccgcctgaccctgtgtaacctgctgtcccgggtcccagagtgcactctgccccgctgctctgctgcctgtcctgggaaagtatctttgccccactaggaaatgtaaacaggagggcttggggagcgtgggcacttttctcatgagcagctactgcggcgttggcaggactcgctgctgctgctgctgcttgtgtaggtcggggagccggagatccccgaggacgcgcgccggacagtcggcactgaccggcccacctggtagcagaggacacccccagccccccaagcattgaagacatagtgtatttcctcgtatcctttctcccttgggtgtagttggggtggggaagcagggaaggctggtgcgatctccattccttgggctccacgtccgagttcatggtgcgccgctgtgctgggagctgcagtggtaatgtgtgggacaccttgaccaaaggggagctttgtctcgtgtgttttgaaaaaggcttaatgaagagaatgttgttcattcttagtagtatagtttgcaattcttaatggcaaataataagtttcagtagaaaacaaaaaaaaaaa

SEQ ID NO: 650203 - DNA, 1296 bp, Homo sapiens
ggcgccggcacacctattggcccccgcggcgtcccgtcgccgcgtcgcgttgctggcccgtcggagcgacgccgctcgggtcagtcggcggccggactgggaagatggacgcagctactctgacctacgacactctccggtttgctgagtttgaagattttcctgagacctcagagcccgtttggatactgggtagaaaatacagcattttcacagaaaaggacgagatcttgtctgatgtggcatctagactttggtttacatacaggaaaaactttccagccattggggggacaggccccacctcggacacaggctggggctgcatgctgcggtgtggacagatgatctttgcccaagccctggtgtgccggcacctaggccgagattggaggtggacacaaaggaagaggcagccagacagctacttcagcgtcctcaacgcattcatcgacaggaaggacagttactactccattcaccagatagcgcaaatgggagttggcgaaggcaagtccataggccagtggtacgggcccaacactgtcgcccaggtcctgaagaagcttgctgtcttcgatacgtggagctccttggcggtccacattgcaatggacaacactgttgtgatggaggaaatcagaaggttgtgcaggaccagcgttccctgtgcaggcgccactgcgtttcctgcagattccgaccggcactgcaacggattccctgccggagctgaggtcaccaacaggccgtcgccatggagacccctggtacttctcattcccctgcgcctggggctcacggacatcaacgaggcctacgtggagacgctgaagcactgcttcatgatgccccagtccctgggcgtcatcggagggaagcccaacagcgcccactacttcatcggctacgttggtgaggagctcatctacctggacccccacaccacgcagccagccgtggagcccactgatggctgcttcatcccggacgagagcttccactgccagcacccgccgtgccgcatgagcatcgcggagcttgacccgtccatcgctgtggggaagcagggaaggctggtgcgatctccattccttgggctccacgtccgagttcatggtgcgccgctgtgctgggagctgcagtggtaatgtgtgggacaccttgaccaaaggggagctttgtctcgtgtgttttgaaaaaggcttaatgaagagaatgttgttcattcttagtagtatagtttgcaattcttaatggcaaataataagtttcagtagaaaacaaaaaaaaaaa

SEQ ID NO: 650204 - DNA, 359 bp, Homo sapiens
tctgacacatagaatggggtctcctcctccgtgggggtcgaagaaggtggtgttgaggttgcggtctgttagtagtatagtgatgccagcagctagtgactgtgagatgatagtgagaaagtaggactagctgtgatttaggacggattcagacgaaagaggggcgttatggtatttgggtttatgtgcaggggggttttatatttgataatttgtttgtgactgaaatttgatgtggccctaaagatatgaggagacaccttgctaggttgtaaaggagacagatgtgttagtgtctactggagtgctccagggcttgggagtagtttccctagctaaggggagtggtagacttgttc

SEQ ID NO: 650205 - DNA, 2672 bp, Homo sapiens
  misc_feature (12)..(12): n is a, c, g, or t
  misc_feature (18)..(18): n is a, c, g, or t
  misc_feature (21)..(23): n is a, c, g, or t
  misc_feature (25)..(28): n is a, c, g, or t
  misc_feature (31)..(32): n is a, c, g, or t
  misc_feature (35)..(35): n is a, c, g, or t
tggctaggtacnaggctngtnnnannnnggnnggntgggaagatggacgcagctactctgacctacgacactctccggtttgctgagtttgaagattttcctgagacctcagagcccgtttggatactgggtagaaaatacagcattttcacagaaaaggacgagatcttgtctgatgtggcatctagactttggtttacatacaggaaaaactttccagccattggggggacaggccccacctcggacacaggctggggctgcatgctgcggtgtggacagatgatctttgcccaagccctggtgtgccggcacctaggccgagattggaggtggacacaaaggaagaggcagccagacagctacttcagcgtcctcaacgcattcatcgacaggaaggacagttactactccattcaccagataggaaggttgtgcaggaccagcgttccctgtgcaggcgccactgcgtttcctgcagattccgaccggcactgcaacggattccctgccggagctgaggtcaccaacaggccgtcgccatggagacccctggtacttctcattcccctgcgcctggggctcacggacatcaacgaggcctacgtggagacgctgaagcactgcttcatgatgccccagtccctgggcgtcatcggagggaagcccaacagcgcccactacttcatcggctacgttggtgaggagctcatctacctggacccccacaccacgcagccagccgtggagcccactgatggctgcttcatcccggacgagagcttccactgccagcacccgccgtgccgcatgagcatcgcggagcttgacccgtccatcgctgtggggtttttctgtaagactgaagatgacttcaatgattggtgccagcaagtcaaaaagctgtctctgcttggaggtgccctgcccatgtttgagctggtggagcagcagccttcacatctggcctgccccgacgtcctgaacctgtccctagattcttctgatgtagagcgactggaaagattcttcgactcagaagatgaagactttgaaatcctgtccctttgaaaatcctggggtcgggggtggcacctgtgagagcctggggctcctggtgccgctgcgtttcatccatcccgcccgctcgcctgccgagggctgcgccccgtgctgcctccccccagagggccacccgctgtgctcgtggactgaggctgcgctgcccgggaggccttactgcttggtgtcagactgcccagctcagagtgcccgtcagggcctgtgcatccgcacgcggagccgtctgttaggagcttccagagcgttctctcgacactgccagccccgtgttagcacctgggcctcagtcccacttgctcccaggcgccggttctgtggttggtttggaattaaagtcctgtttgaagttgtcagacacagacatgaatttctggggcgctccctgagtcagagtctcagaagacctgtgcaggctggcgtgagaggagcggcagccacactgcggccccacgcccaaggactgggctgctctcgaggggggcgcgcccaccgctgtgtcctctctgcccagcctggcttaccaagggctacctcagtgggagatgaggttggaggaacgaaggcgaggttcctccttgctttggggagaaaagtattcaggaagtgggtgtgtgggaaacctgaagatggcgtgcacaggacacagcgtggtcggcctgggcagaagggcggctggctgtcctggagctgctgctggagcctgccctcagagtgtccctttccagtgctgtggcattctgtggcagcttccccaggtgtggtgacgggggggggcggggcctccacctgtgacagtcaggcttgagggtggacggcgtgcctctcccaggagccttccccatgtccttgccttgctgagaattgccctcccatgccgctgaggtgttaggtggtttagggccaaaaggggaaaaccacttgagtcttgtggtgtgtggtgggcagacaccacagggtggcatcacctggtggcatttccagaacctcagccccgattccagcacccaccaccgcctgaccctgtgtaacctgctgtcccgggtcccagagtgcactctgccccgctgctctgctgcctgtcctgggaaagtatctttgccccactaggaaatgtaaacaggagggcttggggagcgtgggcacttttctcatgagcagctactgcggcgttggcaggactcgctgctgctgctgctgcttgtgtaggtcggggagccggagatccccgaggacgcgcgccggacagtcggcactgaccggcccacctggtagcagaggacacccccagccccccaagcattgaagacatagtgtatttcctcgtatcctttctcccttgggtgtagttggggtggggaagcagggaaggctggtgcgatctccattccttgggctccacgtccgagttcatggtgcgccgctgtgctgggagctgcagtggtaatgtgtgggacaccttgaccaaaggggagctttgtctcgtgtgttttgaaaaaggcttaatgaagagaatgttgttcattcttagtagtatagtttgcaattcttaatggcaaataataagtttcagtagaaaacaaaaaaaaaaa

SEQ ID NO: 650206 - DNA, 619 bp, Homo sapiens
  misc_feature (345)..(345): n is a, c, g, or t
  misc_feature (508)..(508): n is a, c, g, or t
  misc_feature (593)..(593): n is a, c, g, or t
  misc_feature (609)..(609): n is a, c, g, or t
tttgagacagagtttcactctgattgtccaggctggagtgtaatgatgtgctctcggcccaccacaaccttcgcctcccaggttcaagcgattctcctgcctcagcctcccaagtagccgggatcacaggcacccgccaccacgcccagctaattttgtatttttagtagagacagggtttctccacgctggtcaggctggtctccaactcccgacctcaggtgatctgcctgccttggcctcccaaagtgctgggattacaggcataagccactgtgcccagcctgaagtattttaaaaaatatttttaaaatactgttcttttttttctcctcttaaaaaaanaaagaaaataatgggagtattttcctccctaatatggacacatttaatattttatttatttttaggtttataataattcagggaaaaaatctttatcttttttttttttttaagaggtctcactcttgatctcactcttgttgcccggttggagtgcaaggcncaatcatagttcaccatagcctcaaactcctgagctcaagtgatcctccttccttgggcctcccaaagcatggggattacgggtntgagccactgcacccngccttttcca

SEQ ID NO: 650207 - DNA, 2386 bp, Homo sapiens
agcggcttctgccctgtcaggtcaaagcactcagcagggccacctcccgcacccctgctcacatctcctgccaggccccctcactcccggcctccccaaagcccacctctgacatgaagcttccctgagctgagcctgcagattgggtttcttgtgcctgtgggatgtcctgtggtctttcctggacagtaagctctttggtaccatgtcccctcctgtcccctcttgtgtcacccagttgggcctcagcaggcccttgggccccctatggcagtgggtggggggaccgtctgctcccacctgggacctgtgctcagtcccccgcccctccacagcactgcttcatgatgccccagtccctgggcgtcatcggagggaagcccaacagcgcccactacttcatcggctacgttggtgaggagctcatctacctggacccccacaccacgcagccagccgtggagcccactgatggctgcttcatcccggacgagagcttccactgccagcacccgccgtgccgcatgagcatcgcggagcttgacccgtccatcgctgtggggtttttctgtaagactgaagatgacttcaatgattggtgccagcaagtcaaaaagctgtctctgcttggaggtgccctgcccatgtttgagctggtggagcagcagccttcacatctggcctgccccgacgtcctgaacctgtccctagattcttctgatgtagagcgactggaaagattcttcgactcagaagatgaagactttgaaatcctgtccctttgaaaatcctggggtcgggggtggcacctgtgagagcctggggctcctggtgccgctgcgtttcatccatcccgcccgctcgcctgccgagggctgcgccccgtgctgcctccccccagagggccacccgctgtgctcgtggactgaggctgcgctgcccgggaggccttactgcttggtgtcagactgcccagctcagagtgcccgtcagggcctgtgcatccgcacgcggagccgtctgttaggagcttccagagcgttctctcgacactgccagccccgtgttagcacctgggcctcagtcccacttgctcccaggcgccggttctgtggttggtttggaattaaagtcctgtttgaagttgtcagacacagacatgaatttctggggcgctccctgagtcagagtctcagaagacctgtgcaggctggcgtgagaggagcggcagccacactgcggccccacgcccaaggactgggctgctctcgaggggggcgcgcccaccgctgtgtcctctctgcccagcctggcttaccaagggctacctcagtgggagatgaggttggaggaacgaaggcgaggttcctccttgctttggggagaaaagtattcaggaagtgggtgtgtgggaaacctgaagatggcgtgcacaggacacagcgtggtcggcctgggcagaagggcggctggctgtcctggagctgctgctggagcctgccctcagagtgtccctttccagtgctgtggcattctgtggcagcttccccaggtgtggtgacgggggggggcggggcctccacctgtgacagtcaggcttgagggtggacggcgtgcctctcccaggagccttccccatgtccttgccttgctgagaattgccctcccatgccgctgaggtgttaggtggtttagggccaaaaggggaaaaccacttgagtcttgtggtgtgtggtgggcagacaccacagggtggcatcacctggtggcatttccagaacctcagccccgattccagcacccaccaccgcctgaccctgtgtaacctgctgtcccgggtcccagagtgcactctgccccgctgctctgctgcctgtcctgggaaagtatctttgccccactaggaaatgtaaacaggagggcttggggagcgtgggcacttttctcatgagcagctactgcggcgttggcaggactcgctgctgctgctgctgcttgtgtaggtcggggagccggagatccccgaggacgcgcgccggacagtcggcactgaccggcccacctggtagcagaggacacccccagccccccaagcattgaagacatagtgtatttcctcgtatcctttctcccttgggtgtagttggggtggggaagcagggaaggctggtgcgatctccattccttgggctccacgtccgagttcatggtgcgccgctgtgctgggagctgcagtggtaatgtgtgggacaccttgaccaaaggggagctttgtctcgtgtgttttgaaaaaggcttaatgaagagaatgttgttcattcttagtagtatagtttgcaattcttaatggcaaataataagtttcagtagaaaacaaaaaaaaaaa

SEQ ID NO: 650208 - DNA, 127 bp, Homo sapiens
gaatccggggatgggattggacctacagatataggtggaggaaacctcaagagacagggaggaatggctgagaggatggaggctttcctcgaatgctcctgaggcaacagaggccttaggcgttcag

SEQ ID NO: 650209 - DNA, 556 bp, Homo sapiens
gagcgagctgagtggttgtgtggtcgacgtctcggaacacccggtagcgcttgccagccatgggctgaccaaactgcactgcaagcagccagcattgccgggggattccaaagcacagcctttcttcccaacctatttttgcacaaaaagcatgggtgcatggcacactcatacacaaacaaaggcacattcgcgcgccaactcgtcaccatgccagcatcctatcttgcggcgccaagcacaatccccaaccagcaacagccagcagttcaccaggccaccatcgcgatctcacattgcgacagtcaagcattgggcttgccaatggggcttaacatgggggcaaccaaacattgtggggccaacctttttcccccgcattgggcaatattttcttcctttggcaaccaacaaatggccattggcggacccacaaggcaacccaccacaattggcgacacaaggcaaccaacccgaggaaaccaagggttggccacaagcccaagcacacacattttccagccaggcaaaagccgcatttcccggactgcgctgg

SEQ ID NO: 650210 - DNA, 138 bp, Homo sapiens
aacatgaaccgtcagtacctgaagcctgatgccgtcctgcacctggcatctatggggccaaagctgtgctctctctaccaccatgtgcactctacgtctgaactcccagagttactctgagcaccagcccagttcctg

SEQ ID NO: 650211 - DNA, 1950 bp, Homo sapiens
gaagtccggggatgggatccatttctcccaaatttagcctgttggtggagcaacacctgttttctcatcagtgagatgggatgacaggtttgtccgctggctgtggccggctggcccctttctcttggccgcagcaagcactggggtgaggctgcacctaacggccatgtctcactaacagctgtctctgcttggaggtgccctgcccatgtttgagctggtggagcagcagccttcacatctggcctgccccgacgtcctgaacctgtccctagattcttctgatgtagagcgactggaaagattcttcgactcagaagatgaagactttgaaatcctgtccctttgaaaatcctggggtcgggggtggcacctgtgagagcctggggctcctggtgccgctgcgtttcatccatcccgcccgctcgcctgccgagggctgcgccccgtgctgcctccccccagagggccacccgctgtgctcgtggactgaggctgcgctgcccgggaggccttactgcttggtgtcagactgcccagctcagagtgcccgtcagggcctgtgcatccgcacgcggagccgtctgttaggagcttccagagcgttctctcgacactgccagccccgtgttagcacctgggcctcagtcccacttgctcccaggcgccggttctgtggttggtttggaattaaagtcctgtttgaagttgtcagacacagacatgaatttctggggcgctccctgagtcagagtctcagaagacctgtgcaggctggcgtgagaggagcggcagccacactgcggccccacgcccaaggactgggctgctctcgaggggggcgcgcccaccgctgtgtcctctctgcccagcctggcttaccaagggctacctcagtgggagatgaggttggaggaacgaaggcgaggttcctccttgctttggggagaaaagtattcaggaagtgggtgtgtgggaaacctgaagatggcgtgcacaggacacagcgtggtcggcctgggcagaagggcggctggctgtcctggagctgctgctggagcctgccctcagagtgtccctttccagtgctgtggcattctgtggcagcttccccaggtgtggtgacgggggggggcggggcctccacctgtgacagtcaggcttgagggtggacggcgtgcctctcccaggagccttccccatgtccttgccttgctgagaattgccctcccatgccgctgaggtgttaggtggtttagggccaaaaggggaaaaccacttgagtcttgtggtgtgtggtgggcagacaccacagggtggcatcacctggtggcatttccagaacctcagccccgattccagcacccaccaccgcctgaccctgtgtaacctgctgtcccgggtcccagagtgcactctgccccgctgctctgctgcctgtcctgggaaagtatctttgccccactaggaaatgtaaacaggagggcttggggagcgtgggcacttttctcatgagcagctactgcggcgttggcaggactcgctgctgctgctgctgcttgtgtaggtcggggagccggagatccccgaggacgcgcgccggacagtcggcactgaccggcccacctggtagcagaggacacccccagccccccaagcattgaagacatagtgtatttcctcgtatcctttctcccttgggtgtagttggggtggggaagcagggaaggctggtgcgatctccattccttgggctccacgtccgagttcatggtgcgccgctgtgctgggagctgcagtggtaatgtgtgggacaccttgaccaaaggggagctttgtctcgtgtgttttgaaaaaggcttaatgaagagaatgttgttcattcttagtagtatagtttgcaattcttaatggcaaataataagtttcagtagaaaacaaaaaaaaaaa

SEQ ID NO: 650212 - DNA, 1298 bp, Homo sapiens
  misc_feature (1298)..(1298): n is a, c, g, or t
ggaccaagagcaataaggagatcatgtcagtcacatcatgaaaagatcttggggaacgtaatgatgcgaatagccctcagggcaagaggacggaggataaaaagtcagtctttctcaccacagcccaatcttcgtgcccgtcgcaaagctactgcgctgcgcgcgtagatgcatctgctgaagatggtaccgggcaggtgccgctgccccagtcctgggtggccaattacccaaggcaggatgagggggaaggtccaaagccgcgtctgtaaagctcgtatgcccatggaactaagtgcccagcggatcactgctgggactgcgggtgatggtgtctgaccagttgggtgagattggaattggtgacttactttggtcgccacgggaaagccgccatgcgtttctgtccctggaagatctctggataatcctttagcattaaacaggactttacaagcaactctgtgtagagaggatgtgggaagaggcagggtcgtgagagcgtagagctgactatatagatgaatagtcccatgctctgcgtggtccaagataaaacggcgattccttaatagcaagcttgagaggtgtatcgtaggtccgatgtgaagacggaaggcctgtgtatcaagaaaggcttggggctgagacggttacggacaccagactgttgactacctgtattgggacctagcgagccttatatgcgtctccgctggcttcgaatcgacctctgggctcatagtctggagcaacaatacggggctgcatggtggtttgagtatggggcaaagcaaatgatctggtgcgattcggaaggtcgtgataaccgccctccgagtcaggaacctttgagaggcactcttgcagaagctccaagagggcaaaccatcgggcaagtccacacattcttacaggacacatggattaccttgacctgaagtgggggcacattaacaaggagccgaaagatgtaaggtccccccagagggttagaagaccaaagactattaagaaacgtacagtgtaggacgtcaacgcaagagaaacccaatgtccagcccacaggtgtccattacagagcagagttatggacagaggcgaaataataagccacacaaaagacacaagcgaagagcaggaagaaatacaattttcacttaagaacacacagagaggagaacgacaaaggcgcggacgcagacaagaccactaagagagcgaaaaacaggcgagaaagaatagtatagtgcctacgctataggaagacgtacgaatgaatacaagcagaacagagn

SEQ ID NO: 650213 - DNA, 3171 bp, Homo sapiens
agcggcttctgccctgtcaggtcaaagcactcagcagggccacctcccgcacccctgctcacatctcctgccaggccccctcactcccggcctccccaaagcccacctctgacatgaagcttccctgagctgagcctgcagattgggtttcttgtgcctgtgggatgtcctgtggtctttcctggacagtaagctctttggtaccatgtcccctcctgtcccctcttgtgtcacccagttgggcctcagcaggcccttgggccccctatggcagtgggtggggggaccgtctgctcccacctgggacctgtgctcagtcccccgcccctccacagcactgcttcatgatgccccagtccctgggcgtcatcggagggaagcccaacagcgcccactacttcatcggctacgttggtgaggagctcatctacctggacccccacaccacgcagccagccgtggagcccactgatggctgcttcatcccggacgagagcttccactgccagcacccgccgtgccgcatgagcatcgcggagcttgacccgtccatcgctgtggggtttttctgtaagactgaagatgacttcaatgattggtgccagcaagtcaaaaagctgtctctgcttggaggtgccctgcccatgtttgagctggtggagcagcagccttcacatctggcctgccccgacgtcctgaacctgtccctaggtgagagctgccaagtccaggtggggtccctcggaggtacgatctgtgcccttgcttccccagtcctggcccccttggttttgaccattaaggtgtgtgtgagcctgagccgtgagcacttggcagtggttcgcctgtgagaccaggtatggagtggagcgtcccctcctccaagcttgcgcccagcagcccaggacccacctcgtcttccccaccagcgctgcctgccggggcgctgtggagctgggcgtgctaccatggagtcctcaggggtctggagcagacagaacatgcaggctctgtggtgacgcagtcctgggtgggggactggttcacttgggcaccactggccatgggtggcgtagacccctcggaccatggccagcgtgccgcaggagccggcctgggctcgtgcagtgaagtgagtggccgtgagcgcgtcctcctcatctctgtctccctgtggaaaactctacaaacaaggcaatggcaatggaaccactcctgatgaccacgagggtcagacgcgggacagaggcccctcaggcctgagattgtgccggccgccccctgccctcctcaccctgccctgctcctcttctctgctccctccccccatattcgcaggtctgcacaacccccggacctgttcacacccgcatggggacagctgtctgtgggctgcagagcaggcactgctcagtctgccccacgccaagggcccttgactcacacccaggtggcccacccaagatgcctgatgcgctatgtcctgttccttctagattcttctgatgtagagcgactggaaagattcttcgactcagaagatgaagactttgaaatcctgtccctttgaaaatcctggggtcgggggtggcacctgtgagagcctggggctcctggtgccgctgcgtttcatccatcccgcccgctcgcctgccgagggctgcgccccgtgctgcctccccccagagggccacccgctgtgctcgtggactgaggctgcgctgcccgggaggccttactgcttggtgtcagactgcccagctcagagtgcccgtcagggcctgtgcatccgcacgcggagccgtctgttaggagcttccagagcgttctctcgacactgccagccccgtgttagcacctgggcctcagtcccacttgctcccaggcgccggttctgtggttggtttggaattaaagtcctgtttgaagttgtcagacacagacatgaatttctggggcgctccctgagtcagagtctcagaagacctgtgcaggctggcgtgagaggagcggcagccacactgcggccccacgcccaaggactgggctgctctcgaggggggcgcgcccaccgctgtgtcctctctgcccagcctggcttaccaagggctacctcagtgggagatgaggttggaggaacgaaggcgaggttcctccttgctttggggagaaaagtattcaggaagtgggtgtgtgggaaacctgaagatggcgtgcacaggacacagcgtggtcggcctgggcagaagggcggctggctgtcctggagctgctgctggagcctgccctcagagtgtccctttccagtgctgtggcattctgtggcagcttccccaggtgtggtgacgggggggggcggggcctccacctgtgacagtcaggcttgagggtggacggcgtgcctctcccaggagccttccccatgtccttgccttgctgagaattgccctcccatgccgctgaggtgttaggtggtttagggccaaaaggggaaaaccacttgagtcttgtggtgtgtggtgggcagacaccacagggtggcatcacctggtggcatttccagaacctcagccccgattccagcacccaccaccgcctgaccctgtgtaacctgctgtcccgggtcccagagtgcactctgccccgctgctctgctgcctgtcctgggaaagtatctttgccccactaggaaatgtaaacaggagggcttggggagcgtgggcacttttctcatgagcagctactgcggcgttggcaggactcgctgctgctgctgctgcttgtgtaggtcggggagccggagatccccgaggacgcgcgccggacagtcggcactgaccggcccacctggtagcagaggacacccccagccccccaagcattgaagacatagtgtatttcctcgtatcctttctcccttgggtgtagttggggtggggaagcagggaaggctggtgcgatctccattccttgggctccacgtccgagttcatggtgcgccgctgtgctgggagctgcagtggtaatgtgtgggacaccttgaccaaaggggagctttgtctcgtgtgttttgaaaaaggcttaatgaagagaatgttgttcattcttagtagtatagtttgcaattcttaatggcaaataataagtttcagtagaaaacaaaaaaaaaaa

SEQ ID NO: 650214 - DNA, 273 bp, Homo sapiens
ccaaaacagagatatagatcaatggaacagaacagagccctcagaaacaacgccgcatatccacaactacgtgatctctgacacacctgagagaaacaggcattggggaaggattccctatttaataaatggtgttgggaaaactggctagccatatgtagaagctgaaactggatccttcctacaccttatacaaaattattcagatggataaagacttaacgtagactaaaccataaaacctagagaaactaggcatacattcagacatgg

SEQ ID NO: 650215 - DNA, 314 bp, Homo sapiens
  misc_feature (105)..(105): n is a, c, g, or t
atatatcacatgtgcattacaatttatttcataattacactatgtgcatttgctaattcctccacttaagttatcttacattccaatacattgagagagcaagantttcccttgtggaagctagagtaaattgcaagtttggaattgcaagtttggaatttctgggttaattagatactagtagtgaaaaggagacacaaggcttatcaatgcgctataggaacttcttactttaaaccaatccaatatacagacctttgaaagtaaaagatcaactgcacagatattttttaactaaaaggaatgtgtccagt

SEQ ID NO: 650216 - DNA, 793 bp, Homo sapiens
  misc_feature (225)..(225): n is a, c, g, or t
gacagagtccttgctagggggttcggggagcgcttggaccccggttctgggacgcgtcaggagaagggagcactggtttgtttcatcaggccaaagatgcctttctttgggaatacgtcagtccgaagaagacgacctcctcggaagtcggcatctctctccaacctgcattctttgatcgatcaacccgggagggtggagctggggtggaatacggatccccgnatatgaacctggcagggaaaagcctgaaagtttgaaaaatggccaggtggatagcagagacaggggttcagtgggcggtgtggacctggagggaggtgcagcgccttcgcggggcggaaccagcagttgtggtcgggaggaagaacgaatctctgtgcggttgaaaaggtggacatctaattagaacatggtgtcagagtcccattgttgaatcgcaattaatgggggacaaggaattggttgggaaatgaggatcagccgggacgacgaacaattgaaggacgccgcagaggacatttatggggggcacgaaggaatgggtggcgaagatggcctaacggtcggccagaggacatacacgggactaccaggccccggaagcagcgggcacctccagaaatatgggaggaccccacaagtgcatgggccaccccttgtggttggccaactccacagggtgcccgtggcacggcgagaaaacccatagattccacactggcggattcgtacactcacaagcggctccaagatgcatgccgtggggcgcccgcctgtgaacacaaccggg

SEQ ID NO: 650217 - DNA, 1760 bp, Homo sapiens
ggctcatggtgatcctcatcactgcactctcccgactaccgcggtaccacaggctcgtgccatgatgtcctgaacctgtccctagattcttctgatgtagagcgactggaaagattcttcgactcagaagatgaagactttgaaatcctgtccctttgaaaatcctggggtcgggggtggcacctgtgagagcctggggctcctggtgccgctgcgtttcatccatcccgcccgctcgcctgccgagggctgcgccccgtgctgcctccccccagagggccacccgctgtgctcgtggactgaggctgcgctgcccgggaggccttactgcttggtgtcagactgcccagctcagagtgcccgtcagggcctgtgcatccgcacgcggagccgtctgttaggagcttccagagcgttctctcgacactgccagccccgtgttagcacctgggcctcagtcccacttgctcccaggcgccggttctgtggttggtttggaattaaagtcctgtttgaagttgtcagacacagacatgaatttctggggcgctccctgagtcagagtctcagaagacctgtgcaggctggcgtgagaggagcggcagccacactgcggccccacgcccaaggactgggctgctctcgaggggggcgcgcccaccgctgtgtcctctctgcccagcctggcttaccaagggctacctcagtgggagatgaggttggaggaacgaaggcgaggttcctccttgctttggggagaaaagtattcaggaagtgggtgtgtgggaaacctgaagatggcgtgcacaggacacagcgtggtcggcctgggcagaagggcggctggctgtcctggagctgctgctggagcctgccctcagagtgtccctttccagtgctgtggcattctgtggcagcttccccaggtgtggtgacgggggggggcggggcctccacctgtgacagtcaggcttgagggtggacggcgtgcctctcccaggagccttccccatgtccttgccttgctgagaattgccctcccatgccgctgaggtgttaggtggtttagggccaaaaggggaaaaccacttgagtcttgtggtgtgtggtgggcagacaccacagggtggcatcacctggtggcatttccagaacctcagccccgattccagcacccaccaccgcctgaccctgtgtaacctgctgtcccgggtcccagagtgcactctgccccgctgctctgctgcctgtcctgggaaagtatctttgccccactaggaaatgtaaacaggagggcttggggagcgtgggcacttttctcatgagcagctactgcggcgttggcaggactcgctgctgctgctgctgcttgtgtaggtcggggagccggagatccccgaggacgcgcgccggacagtcggcactgaccggcccacctggtagcagaggacacccccagccccccaagcattgaagacatagtgtatttcctcgtatcctttctcccttgggtgtagttggggtggggaagcagggaaggctggtgcgatctccattccttgggctccacgtccgagttcatggtgcgccgctgtgctgggagctgcagtggtaatgtgtgggacaccttgaccaaaggggagctttgtctcgtgtgttttgaaaaaggcttaatgaagagaatgttgttcattcttagtagtatagtttgcaattcttaatggcaaataataagtttcagtagaaaacaaaaaaaaaaa

SEQ ID NO: 650218 - DNA, 561 bp, Homo sapiens
ttaccttttaaacaacagaaatcattcttcacagttctcgaggcgggaagtcagaagcaagacatcagcagatggggggtcgggggagggcccaacggccagcttctaggtcctcacaggagggaggggaccaggaatctctagggggtctcttctaagcacattattccattcacaaggagtccaccctcatgacctaatcccctcccaggggctctaccttctaatacagtgaaaccagggagggggattggagcatatgacttgggcagagcagggaacacaaaagtatccagcccatagcactagggtgcgggggtggtggccctccaagccttccaaggcctccgtccagaactaggtttgccagggtgatgcaggatccggtggcgtggtaatgtcaccaacagtgcagacccgggtagagaaccagggaatagcagggctcatcccaggcctggcattctacctccctaggaccaaaatggccagtagagccccaatcggtatagcagagaatcgccttagatggggaacccttatctaactccagctccaaaa

SEQ ID NO: 650219 - DNA, 237 bp, Homo sapiens
cttccgcggaggctgtatcgccacgaccttgacgcttcttcccttagctacgacggagggggtctccatccctcgcccagctctcgttggtgggcacggtgggtggcttttttcgggtcactggcgcacctctctcattccagcccactgctcgggttcaatcccggctccaggctccccggcaggcggccgggccattcccaatcgtcccacacacctccaggcatagttgcgggg

SEQ ID NO: 650220 - DNA, 164 bp, Homo sapiens
cctacgccggttctcgttggagacctgcctaatcatatgatattggtgaagtatctcctggagcccacttgaatatgatcggtggagccaagtggaacagtggaattcgacgcattgtgtgtgcacatttgccttggtttagctggcaaaacctgctttcatgg

SEQ ID NO: 650221 - DNA, 172 bp, Homo sapiens
tcttaccgaacgaggcagtggtgggcacgacggcttgcgggctggctcacacagaagcacatcgaccgcttggtgggtaaagccacccatgtcagtgtgtctgttgtcatggtggaggtggacggcacctgctactagagccgggccgtctgtccctagcaatgcctcgtgg

SEQ ID NO: 650222 - DNA, 998 bp, Homo sapiens
cgggggggcttgtgtgttcgttggcttgtttgccagtgaacggtagatgtgggtggggagaagacacaaggcagtttgttctggtctagatgagatgggaacccaggaattgtgaggttacgcaggaatatctttagggtgagtgaggttttccttgagttgggcaccctgttgtgagagtttcaggaatctttggccagcaggagaataggtggtatgtggagcagactagtcggcagaatggaaggaggtggaaaaaaaccgacaccgggctgacttccacctcccagtggtgagcagtggggagcccgaagacccagtttccttctacattaacggttgagtttagcccattatcggctctccctatttatcttagtggaaggggagtggggtccaagtgacagctggcatgggagaagccatagtttctcaccagtcagctagagatgtagccatctgggggatctgttgtggcttacagcaaattctctatgtataacaccggagtgaataacttcaggggaagggtggggagtcagccaagtgcctcagtgtgccctgttgaaacttagagtttatccgacgcaatcgtatggatatggtgtccctaggagagactgtgcatatttccgtactggactctgtcgaaaccatccatgatacgacgaaggatgctctattgcattgagctactgagcaggaggctgcaggcaagcttaagaaccgtacccgagtctcattctacgagtacctctattaccataccggtacagccacattataccttgcccgtcgacaggggcggaaggcgggccgacatttgagaacctgccgcacaatgacactaaaactaaccacaatctcacctggccacaacaaaaactgtgcacacacttctgagtcaagtacacgtatacacccacaacagcatacaaacctgcatcgactcccagctggataccagattaaggcgatcaacgtacatgcacttatcc

SEQ ID NO: 650223 - DNA, 107 bp, Homo sapiens
agatgctcagagggagtcaaaaagctagtcagtggcagactgaagacgtgaccaaactctggagtctcccttgagtacccttcctaggaggccggggtgctctaggg

SEQ ID NO: 650224 - DNA, 411 bp, Homo sapiens
gtaacttccaagactgacagctttttatgtatcagggtttgataaacccagtccttaactgaaggtaaaccaaagcatcacgttgacattagaccaaatacttttgattcccaacaactggtttgttctttttccccttttgggctttcccaaagtgagaatttttaaaaagacttcttgcttctctccccacccatccttctttttttggccttttacaggtgaatgttgagcccccaatcaacaggggttttattttttcctctactcaaagttaaaactgcccaaagttacgggctttttactttgctagaacaacaaactattttatgtttacaaactggtttccaatgttatttatgggcaaattgtcaaaatgtaaattaaaaataaatgttcatgctttcccca

SEQ ID NO: 650225 - DNA, 431 bp, Homo sapiens
gcgattgccagaccatgcgtggtgaagtgaacagcaccctggggacagcggcatacatggcacctgaagtcatcactcgtgccaaaggagagggccatgggcgtgcggccgacgtatggtgactcggcgtgtgcatgcacacgccgagtgaccatactgcacacgccgaggatccacaccctcagatcactatgcagatcgggggcaacaacttcgtccattctgacttgcaacaacttcgtccattacgatctgcaacaacttcgtccatcctgacctacttcaagaagtgtgtggttactcggcgtgtgcagcaacaacttcgtccatcatgatctgtcaccgcggtggtatggtctggagactcggcgtgtgcagcaacaacttcgtccctccgacctgcctgaatgtttggtcattcggcgtgtgca

SEQ ID NO: 650226 - DNA, 1263 bp, Homo sapiens
  misc_feature (345)..(345): n is a, c, g, or t
gacgccatttaagccccgcctttgcccatggacctcttcgcgcgtatagcatgatctcgttggtatccctattcctatgccctcgtttcctggcccacttgggtaggaacgcgtaaggtggacaaccttggttacaattgtttgtttgctaacgctcttgtggtgcttatctaccccagctcacctattgctatttcaacacgtggtgtatgtcgtcaatcatctgtcgttataatctgtttttgggggttcccatggggactggcggccaaaatgcaacccgcaaaactatgttatgtgttccccgagtctgttatcctgacgcctaatggttgtaatccaaantgtacatcctgctatggtcggttctgtgttgttttcatggtaatgctttctagagggctcttgaagcctactagagtggaatcgccaacggtaactaccctagccgttacctgcccttttcggtcgtgagcactggcttgtggtagccctttgttgctcaacggacccaaaactcgtccgcgtcgtgttcgaaaaaggtgcttcatgtgtgggtataatgccaaacttggtgcttccgctggagggtgccaaccgcttggagatatgaaagctgtctccaacccgcttgctctcatgaacatccttgggcccctttgggggcgctttcgacctagaaagtctacacggcatagaaatcagaggcttacttcacgtgcttggcgtaatttgtgctctcgatcggaatctgcgctgagaccgctgccctggcccccgccatgccacgcgcctgtgccgatattccaccgtgccagcctccaccgtgccgcccgtgccacagaggggagacggtgagcgcccccgtcaccttcgcactccgccaccttgggggctcgggggggacagtctggaaaggagggaccaccgccaccccagcagctgaaggaggggattctggaacatgaagggcgacttcgggattcatgagtacggcacgggcgtcagcatgcactcacgtgggacgctgggcgtacccgaggacgggatatccaggaattgaggggcacgacaggatttctgagcaccaggggcagaggaggccagagcaacctcagggaggagatgatgacctggcgtcccagtccatacaaagggcatgggcccgactccgagggggcagagagaggagaccgtcccaacccccggcagtccaacctgccccgtcgacttgccatcatgcctcggtataaatcagttaat

SEQ ID NO: 650227 - DNA, 204 bp, Homo sapiens
gagagcagaagcaatatttattgtgaagactgaaagaacaaagctttcacagcacataaaggaaactaagcaggttgtcgctgcaggctggtggggagcctggcggtgccaatttttatccccttttttggacccgtccacttcctgctgactggccctttttacattaccattgattgtgccattctactgaacgctcattag

SEQ ID NO: 650228 - DNA, 140 bp, Homo sapiens
gctgctctggcctccggcgggtgtccagaagccccatcgggggcggcctgggacaggggctctccgcgagtattcgcctgctcccagacagtccaccgacgctgctgatcagaaacgctgcctatacacgcgtcgtggtg

SEQ ID NO: 650229 - DNA, 256 bp, Homo sapiens
ctccaggttgataccaatgctagagtacgatcatgtggattgagacatatttgcactcactatatctaatacccataactgtgatttgctaccccactatggttaaccctaaacctcatcagttaatgctacaggtgtgctcgtgcgcacagtacgctccagagctaagaactactcacatcgaccagtcgatgtgttcatattcctctataggagcgtgttctgtaatcgataaaccccgatcaacctcagcacg

SEQ ID NO: 650230 - DNA, 514 bp, Homo sapiens
agccccggggtccaaccaagcttccttggacaatggccaaaagttgcccccgagcagggcccccctctgcagtgactcaatgatagggggctccatcaggaagtgttatcccgcctacagagctggccacgcccccccgctctttctatagactcccagtgtgtgggagaaaagaacccggtgttcttcccacactcttgttagtgttacaattggcgcccttggaggattcattcattatccaagaagctggtgtaacagacaggtccacacggttctcgtctctaaccgctctcccaatagacaaatgagccaaactatttttttgtagcacacccctctggttgtttttctttttgccgacggggcccgctctcttttgtatcgatgattgttgttaagaaccccacttttgtatacggcgaaccacccgtggccccaccaagtcttccgccacgacatttcgggagaccccccttccaaaaagactaagaacggatcaatagacgaaaaa

SEQ ID NO: 650231 - DNA, 454 bp, Homo sapiens
ccggaccccggaacagtaatggagcagcgtgcggaagcacgggtgggaaggtgggatccaggaagagggcgctggggacaaggagagggccctgctgaacgcttcctgacatggcggagtggcccattcattattcatccaatggtcacagagcaagactcacctcccacacctcccaggggcaactctgccgctgcatcaggcagcgcacacagcagcccggccgtcccccgttcaggtggcacacagcagcccagccatccccaccacagggacctaaggcccaggcactttgtggagcgcccagcctacaagacttcagcgcagacagatcagggccccaccaatgcagtgacagggcagggaagccctccaaagccaggcctggggacaagacactgctctgggcctggcccaggcacagagcactcagtacctaaaacttcgttttctg

SEQ ID NO: 650232 - DNA, 226 bp, Homo sapiens
cgttgattcattggtagattgatttaattcttttgcttgaaatttgggaacttatttgaatagaataggattgggcagggattttttagatacaagtggacccacactagaaagaaatattgtttattgcctaagaagctaaggtacgggctgctcaattgaaactccttgacaggaatatactgttatctgtgcgcaaggaaaaaagaatgtatgtatttggtgc

SEQ ID NO: 650233 - DNA, 1033 bp, Homo sapiens
gcacagcatcgattgctggaggtcaggcactgtacgaggatattgccaaccgcatccgggctgaggctgatagccatgtaccatatcaggtatgatggagcctgcagatcctggctgtgatgcacgggccatgacctgcggacgcacaaaggacttgaggatctctgagatgaacccggaatacatcaagcctggacgtccaggcgtgatcatggagggcctgcaaaagtgcctaacaggggttttgccctgtgagggcggactatagcgagaatgatagatcagccgttgagaagtagcgtgggcacatttgaagtgtatggctaagcgcctgggttgtgcgagcatgtaggccgtgctgtaaggtggcgccaagacgggcactatgggggcggcagacgtgctgttgaagtccccaacgcagctgatgtacttgctcagatgcttggacccttggaacctgtcgtatgaatcgcctagcgcttacagggaaaggctgaccgctaaagtgtcagcaggcgtggtcctggctggaagtcttgtgggatgccgaaaccatggaaatacttcagtacttgagagaaacctacctaacagtgcctattgcgaggtggttcctgcttacttcgagtccctaattgtggggtgccctccactaaggctccggttccgtctacgataacaaggcttggggactcctcgcttcgggtgtccttgaggaactgaggtggtccgacgtgtcctttcaaggcgccacagactcatccaggggccgaggttgtgtaaggagggaatcgcaggacccgcttaattgggaaagctggcgctatgagtccctctgaccgtgcggcccagttgtaccagcttggggggaaaccctccattgctatcccttctttgtaatgtgcccaaactaggcgaggaaagaccgtattgtgggggatgcccttcgcacggtgagacgccccaggggggtatccatactacaggcacgggggatataccccgacccctttcgtgtcctctcaaaaat

SEQ ID NO: 650234 - DNA, 114 bp, Homo sapiens
tatgtcagtacagtgtaaacatctgacgcaggcttatgcggaggagaatgtaaacatgtaacttatactaacattagtacctgccgggtgacacgtctgggtaccgcagctcga

SEQ ID NO: 650235 - DNA, 514 bp, Homo sapiens
cactcgattctcctgactcagcctcctgagcagctgggattataggcatgcgccacacacacggctaatttgtatttttagtagagatggggtttctccatgttggtcaggctggtctcgaactcccgacctcatgtgatccgcccgcctcggcctcccaaagtgccgggattacaggtgtgagccaccgcatccagcctttttttcttttattacaacagtccttatgctgaattcagttatcttgaaatggtgaacaaccacagctgtggacctcaaactatgtacaaactgagcaatttttcttgtaatgttctaacttttctctgcctcttaggggaacttccagcaacactagtggcactagtgggtcccatagtattactcaaggtttactgtattgcactaaacacaatgaaaactatacaagaaccatgagagatcaatttttactgtgatacacaattagctggagagataaacactcacatggtgatgactagcgtcacacaac

SEQ ID NO: 650236 - DNA, 178 bp, Homo sapiens
taggcagggtcttgatctatcaccgaggctgaagtgcagtgcaatggtgcaatcatggcttgctgcagccttgaactgggctcaagcaatcctcttgcctcagtctccaaagtagatggatagctgggactacaggtgtgtgccatcacacttggctaatttttcacttttgtcgacg

SEQ ID NO: 650237 - DNA, 299 bp, Homo sapiens
ctcaaaaaaaaaaaaaaaaccgaaccaaaccaaaaacccccttaacagctttcctaaggaaagctaatgctgggggggcttccatgcagccatttttaattcatggacctccctactctgcccttgttctggaaaagttaacgtgctgggcaggggggacccagacatgggataaccaggttttagccttgttagaaaagggacccaaaataagggaattagaaattgaaaaagggaatggggggagggataacccttgttatttgttgtgccccctgcagaaagggaggaattgaaat

SEQ ID NO: 650238 - DNA, 149 bp, Homo sapiens
tctgcatcttggcaaccaacttcctccctggcctctcgtttccatccccacttttccaggtgtcctcccatcaccatctcatcaaccagtgcatctcccgggcaacactccaagcaagcacacaaccatcacccatcattcatttcaac

SEQ ID NO: 650239 - DNA, 125 bp, Homo sapiens
cacggtgcagggcctggtcatatcacagatgctgcgcaagcgcgtggagacctcgcgactggctcagcactactggagccccggcactgtgcgggccgtcaatgaacgcgagtggtggcaggata

SEQ ID NO: 650240 - DNA, 368 bp, Homo sapiens
tgtaggaattctgcacgaggccgcgtgtatgggactgttgcatacgcgtgtgtgtagactgtggccgctttgtgttctttggcttaataccgggagtgaggggggccgcggcggcgcgacacaccggcttcggaaccactgtgcgacagggcttgacatgagccggaaaaaaagtctggatttctataaggcttgagaagctctgcattgactggggggggtgggattatcatataagccggtgtgttttattccaccacggaagagattaaccactcttaccatggctgtggtggtatataaaccatatgccttcttatgattaatgcgggatcgaatggacgtgccaggtgagaggtacgtgggtg

SEQ ID NO: 650241 - DNA, 171 bp, Homo sapiens
gagaggcgctcacctcttatgacgtccggctagccatgtgattacttcactccataactgctcctcatactaggcctactaaccaagacgactaaccatataccaatgtatggcgcgatgtaacgacgatgaaagctacataccatgtggccatcggggacgggtggtgga

SEQ ID NO: 650242 - DNA, 176 bp, Homo sapiens
tgaatttgacaaagaaccccttccctttccttgccatgtccccctccaaaggaagtcccccctcagcaaggtggtttggcatttggggccaactccattacagctatgagctccctgctgtcagtgacgtttggtgttttttgtactgtgtttcaataaaaactccttcaaggtta

SEQ ID NO: 650243 - DNA, 281 bp, Homo sapiens
tggcgcaaaaaagtaaagaaaaaattatctgagtcatgaacctaactcagttttacataaaacaagggtttttttttgtacttttaatatctactgaattttccagaaggaaagacagttctttttttttttttaaatttggtccagcacttggccaacaggtgtggacaattccagaaagtcatggtatgggcagcagggccaggttcagatggagcccgtgccacccggcctgttccctcggcggggggctttctggcatggagggcattcgtccacct

SEQ ID NO: 650244 - DNA, 248 bp, Homo sapiens
ttaatcgaaaccacgtcggagccggcgttcggcccgctcatggccagggcgccgacatgctcgccgctgatcaattgaggtagatagttgagtttctgcgcgtgattgccgttgcggttgatctggttcacacacaggttggagtgggcgccgtaggacagcgcaaccgacgcggaaccgcggctgatctcttccatggccaccacgtgggccaggtagcccaggcccgcgccgccgtatcttccggc

SEQ ID NO: 650245 - DNA, 888 bp, Homo sapiens
  misc_feature (12)..(12): n is a, c, g, or t
  misc_feature (18)..(18): n is a, c, g, or t
  misc_feature (21)..(23): n is a, c, g, or t
  misc_feature (25)..(28): n is a, c, g, or t
  misc_feature (31)..(32): n is a, c, g, or t
  misc_feature (35)..(35): n is a, c, g, or t
  misc_feature (728)..(728): n is a, c, g, or t
  misc_feature (798)..(798): n is a, c, g, or t
  misc_feature (801)..(801): n is a, c, g, or t
tggctaggtacnaggctngtnnnannnnggnnggntgggaagatggacgcagctactctgacctacgacactctccggtttgctgagtttgaagattttcctgagacctcagagcccgtttggatactgggtagaaaatacagcattttcacagaaaaggacgagatcttgtctgatgtggcatctagactttggtttacatacaggaaaaactttccagccattggggggacaggccccacctcggacacaggctggggctgcatgctgcggtgtggacagatgatctttgcccaagccctggtgtgccggcacctaggccgagattggaggtggacacaaaggaagaggcagccagacagctacttcagcgtcctcaacgcattcatcgacaggaaggacagttactactccattcaccagataggaaggttgtgcaggaccagcgttccctgtgcaggcgccactgcgtttcctgcagattccgaccggcactgcaacggattccctgccggagctgaggtcaccaacaggccgtcgccatggagacccctggtacttctcattcccctgcgcctggggctcacggacatcaacgaggcctacgtggagacgctgaagcactgcttcatgatgccccagtccctgggcgtcatcggagggaagcccaacagcgcccactacttcatcggctacgttggtgaggagctcatctaactggaccccanacacgcagcaggcgtggagccatgatgggctgtcatccggacgaagttcatgcagcaccgcggcgatgantcnggaatgacgcatcgtggtggtttctgaatgagactatgtgggccagtaagtgtttgggtctccttgctggtaactcattggcgagta

SEQ ID NO: 650246 - DNA, 398 bp, Homo sapiens
tccagagtatcccccggcattaccctcactaaagggacgaggcttaaagtaggacaaccatggagcctacctgtggcaggagagacaacaaagcgctataatcctaaggtcatgagaagtgtcagcctcacctgaattttgattaagtaaatagaggggctaccgggagctcggaattccgtcaatccataggttcattagctagtattcctgaagtgaaaacgaacggcaagcgataacaatttctgggtgtaaactacatccagaggaaaagataaggaaaaaaactatacataatgagataaataccataaataaaaggaaagagggagggggaaagagggtaccgagaatcaaattaataaatacatggataataaacaaataaaatgaaatgt

SEQ ID NO: 650247 - DNA, 1630 bp, Homo sapiens
ggaagatggacgcaggtgttattgaatgtgatgcaggatttttctcagccactctggcagccagagacctccggctggcgaggcccctgcccaggccttgcttgggtccaggctcgccgcaggagataccccatctacttggtccaccggtgtggcacctggtttgcactatggcacggataccatgggaagatggacgcagctactctgacctacgacactctccggtttgctgagtttgaagattttcctgagacctcagagcccgtttggatactgggtagaaaatacagcattttcacagaaaaggacgagatcttgtctgatgtggcatctagactttggtttacatacaggaaaaactttccagccattggggggacaggccccacctcggacacaggctggggctgcatgctgcggtgtggacagatgatctttgcccaagccctggtgtgccggcacctaggccgagattggaggtggacacaaaggaagaggcagccagacagctacttcagcgtcctcaacgcattcatcgacaggaaggacagttactactccattcaccagatagcgcaaatgggagttggcgaaggcaagtccataggccagtggtacgggcccaacactgtcgcccaggtcctgaagaagcttgctgtcttcgatacgtggagctccttggcggtccacattgcaatggacaacactgttgtgatggaggaaatcagtaagtggctcagagtttccatggacaagaaagttgaaatcacgggcaacatacacacttcctcgcctgagtcccacgggagcctcggcgagtgtgtcagtcgccccatgccgtgcaggtgctcgtggggcctgtgcgccaagccagatgcacggtggcctcgctctcctatcccggcggtcataccaagagaggagagcccaggctgtctggaggccgcgacttggtatctcacgtcgtgtttgtgtcttggttacaaatcgtttatgaaggccctgctgtgcttaggcgccctcgtgtgggaattctggtgaagttatttgcgtgccttgatgtgcgacagagagatgtagcaaccatctctagctgcaccatctcgagcaaaggcacgtcgtgaaggcagagctcttttcagctttctggaagaaaggtctgctgcaaccctgaaggaacctgggcgtggcaatatttacatctaggaggaaaactgtggctcagttttaacaaatgggctcattgagtgagttccaaattcatgtttcaccttccatgatgtagccaagctgagaactcttaaaaatgcctcaccggctttttcactcagggccacctttttcccaaggaacttctcaaaactccctcaattccaattttattgaagttctacatgtaggctatttgcttgaatccaattttccataagaaagagctcatttaggccgggcgcggtggtcatgcctgtaatcccaggacttgggaggccgaggtgggtggatcaatgaggtccggcgttcacgaccaggcctgggccaacatggtgaaaacccggtctctactaaaaatacagaacttgctgggctgggggcccgcgctattgtccagctaatcggagggtgcgca

SEQ ID NO: 650248 - DNA, 423 bp, Homo sapiens
cctcagatataacaatcactttgtcaaataaaaggatctcaaatgctaacacaggtttgccagagaattggagacacaaacttttttgtcttttacagctggtcccttcccttttctactatgaaatacttctaaactttatctccactacaaagtgcaggaacttactggtacttggctgaatcaaagggaagaaatcgatcttcagaggtcatgtggcccaaccactggccttcaggctaaactgtcttaatcatctgagagaaatgattatctctccactttcaaagacttctagggatgaaacctgaataacctgtcacagtaataccctcgaacaggtctgccagaaagttcttgctttgtgtttaaccttaatctctcatgagacactcagaatcctttttctcttattttattctc

SEQ ID NO: 650249 - DNA, 255 bp, Homo sapiens
cctcctgggtgcaaatgattctcctgtctctgcctcccgagtagctgggaatacaggcgcgtgccaccatgcctggctaattatttgtatttttagtagagatgaggtttcatcgtgttagccaggatgatctcagtcccctgacctcgtgatccaccgtctcggcctcccaaagtgctgggattacaggcgtgagccaccgcgcccagcctaactatgaggtgatttaaggaaagtaatgggaagggtcgacgc

SEQ ID NO: 650250 - DNA, 665 bp, Homo sapiens
  misc_feature (12)..(12): n is a, c, g, or t
  misc_feature (18)..(18): n is a, c, g, or t
  misc_feature (21)..(23): n is a, c, g, or t
  misc_feature (25)..(28): n is a, c, g, or t
  misc_feature (31)..(32): n is a, c, g, or t
  misc_feature (35)..(35): n is a, c, g, or t
  misc_feature (610)..(610): n is a, c, g, or t
  misc_feature (612)..(617): n is a, c, g, or t
  misc_feature (621)..(621): n is a, c, g, or t
  misc_feature (625)..(625): n is a, c, g, or t
tggctaggtacnaggctngtnnnannnnggnnggntgggaagatggacgcagctactctgacctacgacactctccggtttgctgagtttgaagattttcctgagacctcagagcccgtttggatactgggtagaaaatacagcattttcacagaaaaggacgagatcttgtctgatgtggcatctagactttggtttacatacaggaaaaactttccagccattggggggacaggccccacctcggacacaggctggggctgcatgctgcggtgtggacagatgatctttgcccaagccctggtgtgccggcacctaggccgagattggaggtggacacaaaggaagaggcagccagacagctacttcagcgtcctcaacgcattcatcgacaggaaggacagttactactccattcaccagataggtgggaggctgcagaatgtgccaggccccacccgggctgtctggagagggtggagtggtcggtttcccctcagagcttttctggtgtcgtgggatgtggagcaggaggctgtaaacctgtaaacactgacctctgaccatctgtgcgctgctgtcacatcacccccgtgtcatcccacatcancnnnnnncacnaggnccaaccctgggccttgcccttcctgctgtccatgcggctt

SEQ ID NO: 650251 - DNA, 136 bp, Homo sapiens
ataaaattcggtaaggagaaatcaggttttaaaatcaataagagcaagataggcttagatagacacagagagctcataagaaggattatatcaaaactgtcccagaagaaacagactaaaatgaattttctcatat

SEQ ID NO: 650252 - DNA, 645 bp, Homo sapiens
ttttaaaaaaggcaaaaaatttgcccagtttaaaaagttttcttgggaccttttttatataaaaaattttgggcttttaaaaaaaaaggcctttgttttttggggggaaaaaattggcgtttttcgtaaaagccccccaggggtttaaggggggggtttaaaactttttttataaaaaaagtcgattttttccgcccccaaaacgggtacccctttataggccttattttaaaaaaaaaaagttttgccttttgtttgttttccctggggtaaataaaaacttcccctccggtcccaagaggataatagtaaacgtttatttcaaaaaaacaaatcccccggtttttttttttttttttactaaattttctttattgaaataggtaacggccgttccttgataccagataggcttcaagtaatcaggaaaaaaaaatcttgtcaaaatgttacccacttgaaatggacagtgcatagagaccccttttaacctttaagtattgtcataaaagaaatatgttaatcaagcaacagccagatctaaaaagttccaagtgtggatttcccattagttcttataaattaaaaaaatccccaatataatcatttgttcactatcttctttcaataagcacatggacaggg

SEQ ID NO: 650253 - DNA, 255 bp, Homo sapiens
aggtttaaaaaaaagggaatgttttttgcggagggtttcctttgtccttggggggctcgagggggacagtagggaacccctgttttcaaggcccagcccaatttttttgggtgggttgggggtttgtttcatccccagctgggggggccttttggtttggaaagttgggttgtttcataaaacccccaggtgggacatttttttgggaattatgaattgcccttgttttacattaaaagagaatgtttttgttca

SEQ ID NO: 650254 - DNA, 141 bp, Homo sapiens
aggatccttagtatatcagattacagaacagcgctctcttgagggatatgaagcaccgccaggtctattgagttataagctgtggctcgtagtgtactaggcgagcagtttagttgatttaactagtagaggtaaagaggc

SEQ ID NO: 650255 - DNA, 932 bp, Homo sapiens
gatttgaagctgcaagaggaagaaggccctctcagctttttggaagaagtcaaagtaagcagagagatggacagggaaacacttatagatgtggccagaacatctcttcgtactaaagttcatgctgaacttgcagagtgtcttaacagaggctgtagctggacctccattgttggccattgaaaaagcaagatgaacctattgatctcttcatgatctgagatcagtggcagatgacaagcagtacacagtctgagacactgtatacaagcttaagtcagcagggcttgttgttggcaccacggatcacggtctatcctgtgatatggaagcacaaagggtggaagggatgcatactatccttcgacttgtaacgtgctcattaggagctatgagaaaacagaaggtgagattctggctgtgtactctgacatagaggtgccagtaagcagggagagaaaacaacttcggtgaaagagctagcacaacgcaagacattcgcatctggcacagcatcacgggttctgaaacacagcatcaactagcaactcgcagacaaacggagaaagtcgtggtagtgcggaatctcccagcatacaccagcgcatagcgtgggtgtcatttaaagtccacagagacgggtgaacattggtacccgcacgtatgtgtaccctttgagtagtggctgctctctccagaaaagcagacgcgcgatgacgttgtggcctccattggcgcggccccggaaggctttaacaaagcggaagagacattcacttggcgaacgaacggcgtagaaccttcatttgcttgtagatcggttcgggggataagccgcttggaaatattcccatcttaggacgaaacccataacgttcccttgaccgtgccttggggacacattgcagcggactatgctaatatgtgacctc

SEQ ID NO: 650256 - DNA, 200 bp, Homo sapiens
ccaactccagagtccttaatactatggctaagcataataaatcactggggaatcttcttctgaacaaagaatgtttttgtaaagcccaaattagtaagttccaatttttttttttcagcgcctcctactataccaggctgatgatatgggctggctaactgtgtgggcccagacagtcatttgcctatattcctagctgg

SEQ ID NO: 650257 - DNA, 1140 bp, Homo sapiens
cgtcagtgtctctcgtgctgtgttgctgttggtctcgctgttgtgggtgtggcgcccggtgcgcgtgtgggtgctaacgtttgtggcctcgttgtgttgaggttgcgtgtggcttgttcgagagacgtggttgtctgtttgtgttgctccgtgtttgtggatgggcgcccggtgcagtgtcgcctgtcgcacaggttctgcttggggtgagccgcgcgctggctcgggtcttgccgtgtgtgcgtgcgatggcctccggggatgtgtttgtagccccccggctttttccggtttgcccgtgtgcctgttatggggttcctggggtacgttggggtttgggcgtcgcagtcgcttcggatgctggagtgagggtgtgagtgtttcgcgggtccccctggtgctccgaccagtaatgagctatttctggcttccaagtgggtaatctgtcccccggcctgaatgtgtgggatgttaaggtaaaattgggggaaggaccatgcagccggagatgccgaagatgggcctcccggactcctggttaattcctggaggacacccctgctaagatttcacgattttagctgggaaacccccatgagcccttgggtcactttgctcacatgttctgaggataacactcactgcagatattggccaatggctggaaatatttgcccatgatgaagagtcccgatgtcccgacatccgaatctggagggacccaggattctttaaccccaagtaccgcagaaatgttttctgttgaatgtaatgctaccatgaatgccttgaatttactccagcgcccaaaaggccttgtatagtatggaaaatgtaagtggggtggcttatggcttcttttatcctctgattcttagcacctttcacaagtgagctgtttgccgtaactgtatcatattgtagctattagggaagagaagaatggttgcttatagaaagaacactcaccccttgattttaaatacccagtagccacgggtattgcccttgattcacactgttttaagtcctcacttttctccaactaagtgcttgctgttccccaatatggccagaataacttttaccctttttccttcccacccttcttgattggctttgccagaaataaagttttta

SEQ ID NO: 650258 - DNA, 618 bp, Homo sapiens
  misc_feature (435)..(435): n is a, c, g, or t
  misc_feature (497)..(497): n is a, c, g, or t
  misc_feature (530)..(530): n is a, c, g, or t
  misc_feature (548)..(548): n is a, c, g, or t
  misc_feature (551)..(552): n is a, c, g, or t
ggtgttattagtgaaaaataactgtgtactcgttgttctcactgacatagcactccaagtagttgttgcgtgatgtgataggaagtggatattgggcaactatgagatagattgatgagaagtgcaaccatgatctctacgacgcgtgatcgccttccttcgatcaatatcaatcttacgtttctttcattacagcaatggcgtactgtaatgcgtggtaagtccgtgcgtatatttgtggcaccgatgactatatagtgctcgctaatattgaaacaatccaagagtatatggtcatgttcaccaacgagagtagcacaaatcttgacttctagtgctcactacttctgctattcacacttgggtgccccatttctcattcagtggatggggcgagtcatcctcaagagacaaagggtaaatacaccctgaaancgttctaattaggtacaccctcgagtaacaataatcaccatatgtctataccttgaccaaancggacagagggacagagatagggtctcgacacngtatctgtgttgccatgnctnnattctcccattctagccctaagtcgaagacatagacatcagagcaaagtggggtacaagctaagtg

SEQ ID NO: 650259 - DNA, 113 bp, Homo sapiens
  misc_feature (100)..(100): n is a, c, g, or t
tctgacacatcgcctcttcgagaacaccacaggtgtggcaaaggaattcacccctacaggccagagcacaattttaaccaccatatcattctgcctctgngtaggtcagtcaa

SEQ ID NO: 650260 - DNA, 410 bp, Homo sapiens
aatgagatactggtatgctacaaaaaaaacatccacgagagcagtataaggtcggagtgggtgcaagccaggtaagacaacgtacacaccgagtgcctccatcacgcaggccagaggaagacaacgccacaccagcgtgcctcctacacgcacaccagtgccatcctcgcgggtttcacggatgtcgctagaggcccgcggtggatgtctccagtacggctctagtgccctgtaggccctgcccacatggggcacactggagtcaaacatcatcccagcgctcgtcactcgcaaacatcaccaggagcctgcctgagggacagtggacgcgccccggacatcctgaactctggtcagggcaaagagggctggacccagggcagaggagcccggtctcgacttcatcccag

SEQ ID NO: 650261 - DNA, 301 bp, Homo sapiens
tatagctgttctagaggatataggaggtcgctttgtcggtacaaaagcttttaagcttaatataataccatctatttctgcttttatagcctgtgctatctaagtatttacctcaaaaaaatctttgcccagaacactgtcctgaagcatttccacaatgtttttgcctagtagtttcacagtttcaggtcttacatttaagtatttaatccacaaaataagaaagagatttgcaaggatacttcagtccaggcatagtggctcacacctataggcctggcactttgggagaccaaggcag

SEQ ID NO: 650262 - DNA, 181 bp, Homo sapiens
  misc_feature (96)..(98): n is a, c, g, or t
acctggagacaaaggtgcaaaaaggatctattggtggaatggtctttcaggaacaacctggagagaaaggtgtgcctggcatccctggcccacaannncaccttgcttaccttgagacaaaggtgcaaaaagagagaaagggcaggcaggccacctggcataggcatcccaaggggtcgcc

SEQ ID NO: 650263 - DNA, 297 bp, Homo sapiens
ggccactttgtcaagctcatttcttggtttgacaacgaatttggctacagcaacagggtggtgggcctcttggcccacttggcctccaaggggtagggcccttgggcccccagcccccgcaggggcccagggggggggggggggccctccctgttggggggtccttgccacactcagtccccccccacattggatttcccctcctcacagtttccatgtgggccccttgaggggggggggggccttgggggccgccccttgtcatgttccctcaataaagtaccctgtgctcaccca

SEQ ID NO: 650264 - DNA, 1260 bp, Homo sapiens
ataggaaatcaaatccagtcaaagagataacttcttaaaagggaaattaggaatggggctagagaaggtgatcttgcaatgatcctctatactgaatataatagcaatttgctaggggctctcaatagattcactagcaatgccatagtacttatcatacagaagttatttcatcgacttaaagtacgtgtagtaggctgttgactccttagatgtcatttagatacgtgcattgcagccttcagtcaatgtaaagatacgagtcctgttaaagctaactcactgaaggaagatacttatactgtaacatcttagccataaatgtaggatgtaacgtctacaaggagcgcaatgagacttaagtactaacaaagtaatttattctaggtgtcaaaagagaggggggtctcatgtgaggcgcgtacacaagtgattacagtatgttatgacacttttggggctttacttcctctaaatatgtaacagaatttcccctactttcaatccctataagtagccaattaatagccatcttttgcaaattccaccgactctaaatgtcacacaccatcaatttttaaaggtccataaaacgcaactcggaattcttcgagagaacggctttagggaacatctcagaaggtgcacaaacaaatgttcagccaagagggaacccatctttttaataactacaccgtaggggcccacacggactaagttttgttccgaagttttggtgccttttggtatttcggacactcttgaaattgggtttccgcggataaaaccgtatacttcaccaagcaagaaagttccctcacattaaagaaggcataggagaccgggggaagttcacacccattttcttgttgaagcggcggacatcccgaagtagtacatggacatctcataattgaaaactctcccttctccataagcggaagggaaaaacacaatcgtgttgcgttcaaaaattctccccaccgcaaaaaaggcaattttataaaccgataggatggatctaattttgaccagaaaaagcgagcctaattgtaacctgaggtcgagcttcgtttgtaaagagttgctaacccgagcttgttgtcccccctaagggtgccgaagggttacaaccctgtatgctcagacatcctaacaggctgagataatgggctatggaacaacgacatcgcacaagggaaccgaaggaccttttggcagcctgttagggaataacgattctggagagcacatacttca

SEQ ID NO: 650265 - DNA, 1222 bp, Homo sapiens
ggacgcgctgggtcgacccacgacgtccggctaagtgcccacgaagtctaagcagatgtactgggtgttcaagcgtaacgaggatgcctgccgctatggcagtgccaatcggagggtgctaggccttccttggcctcaggccgttcgttcgttcggtggtgcgacaagcgtattgacaccaccaagatcgagcaacggccacgtgacctgggaagtaccgtggatcatagggtgacctgtctcgttctcaaagaatgctcctaggacacttcctggtaggttgagtcgggttgtctgcttgccgtcagcacaacacgagtggagcagtacacccaaggacccggaaggcagcgtgctggctgaggggccggagctctagtgcagggcagccgatcacctgtcagctgtgctttataccatacttcgtccatggggtgtgctaggcgctactcctggctctagcagcgactagaaggctggacgtggacgagttcatccagaattacgttgagcccactccggaacccaatagtgcctacgcctcctacccagggtgcatctgtggacaagtaacaagcagccacccttggaccagaacgcggagacgagcgagggcatacagccagtccccttgtggactgagcgggagaacagcggggaagggggacagacgcagggccgcccactgtctggcctgggacgatgcccatgaggcatccgggaactgcccagcacatctctatgcacctgttccagcctgcgcagatgaccacacaagctgaaggagcctcagaagcaaggcgaggggcctgcagaagcaagacccacagtggcctgagcccacgaagcgcgatcaggcacgactgggatacaccctcacggggacactacaggaaaacgagtgtctaaacgaggagtgtaccacggacgtcacgaggagccaaccacgacggaggggagaaaaaagcgcaaggtgtcacgagagcgaggacaaacgaggaccgagaaatccccgagcacaggacaccacgcgacgacccaacaaagcaggcgttcgagaaaaacagcggcggcgaacaaacgcgagaagagacagagcaacaagcgaacaccgagacgcaacagacacagagacgacccacgagctgagcgacacagcgggaggcacgtactcaacgaggaagagaacacaggcgaaaagacgagaaacaagcgcagaaga

SEQ ID NO: 650266 - DNA, 108 bp, Homo sapiens
  misc_feature (37)..(37): n is a, c, g, or t
aaaaatattatgtactatatttttagtctcaaacacnctatatattatatatatttaatttttttatatatataaatataaatgttttaaaaagtaagaaaaaaaaaa

SEQ ID NO: 650267 - DNA, 580 bp, Homo sapiens
  misc_feature (144)..(144): n is a, c, g, or t
  misc_feature (203)..(203): n is a, c, g, or t
  misc_feature (212)..(212): n is a, c, g, or t
  misc_feature (278)..(278): n is a, c, g, or t
  misc_feature (356)..(356): n is a, c, g, or t
  misc_feature (374)..(374): n is a, c, g, or t
  misc_feature (460)..(460): n is a, c, g, or t
gtatcatgggctacataagcatggagcgtgagcgcgccctgttgaaggtccagcaaccggggacctctctgctgcgattcactgagagctcccgggaaggggccatcacattcacatgggtggagcggtcccagaacggaggcnaacctgacttccatgcggttgaaccctacacgaagaaagaactttctgctgttactttncctgacatnattcgcaattacaaagtcatggctgctgagaatattcctgagaatcccctgaagtatctgtatccnaatattgacaaagaccatgcctttggaaagtattactccaggccaaaggaagcaccagagccaatggaacttgatggncctggaactggatatatnaagcatgagttgatttccgtgtctgaagtgtaagtgaactcagaagcagtgacatgcagcacacacctcacagccaacaaaaattnaagtattggcccccgcccaagatgcatgtattttacttttccattgtaattgctatcgccatcacagctgaacttgttgagatcccagtgttactgcctatcagcattttactactttaa

SEQ ID NO: 650268 - DNA, 578 bp, Homo sapiens
  misc_feature (15)..(15): n is a, c, g, or t
  misc_feature (51)..(51): n is a, c, g, or t
tgggtgactctacangatctttcttacgcccaaactctctggcacagaggnatgaaatgggcattcctctgctgtcccatgaactggcaaaggccgtaacccagatgtgccccagccgtacaccgggggtcgatggactcccagtggagttaataaaaaattgggtgaataattggactggacttcttttgcgtgttgcgtgaataccgatgagctgccgtcggtcggctctgactctcctgcctaaaaaaggggacttgtgtgaacttaagaactggaggcctgtggcattgctctgtgcggactacaagatatttgccaaaggcctctctaacagactgaagtcccatctggactctacagtacacggggaccaaacatattgtgtaccgggacgctcaatcaaggacaacttgttcttaatcaggtacatgttggactgttcgagaggttcaaatgtgaactttggactggtctctttagaccaagagaaggcttttgatagagtggaccatgagtatctgtttaatgtgatgtctgttcttgagtttggggcgttaagagggtacccggctcga

SEQ ID NO: 650269 - DNA, 264 bp, Homo sapiens
accaaattttttttttttaattttgagccaggtcccgctttgtttccccggcttgtttttaactcctgggctccagtggtccccccgcttccgcttccccaagtgctggcctttccggggttagcccccccccccgggcttttttttttttttttttcccccattgttttaagccgttagggggaaggggggttttttttttttttttttttggttttttttcctttgaacctcccggggccttattaagtaggtttgccgtta

SEQ ID NO: 650270 - DNA, 288 bp, Homo sapiens
gcacttttgatgtgaaaccctgattaagtgtgatgtgggtagatgtcttcaggatgctatgctgcgttcagaaacagtggtcttgccagcattatccaagcccaggagaagtattctcacctcctggtctggtgcacttttcaacttgcgcaacattgagagcaagcccatcctcccgccgagtccctcctcctcctcctcctcctgctgcctcccccgttaccaggggcaactgctgcggtgccacccccgacgttcctcgcacgcacagctgaggagctgagcagc

SEQ ID NO: 650271 - DNA, 2564 bp, Homo sapiens
  misc_feature (41)..(44): n is a, c, g, or t
  misc_feature (47)..(47): n is a, c, g, or t
  misc_feature (49)..(50): n is a, c, g, or t
acacacacccatccgcacctaatccaactagctgtagccgnnnnatngnnggtggtctattaacttgttcaaaaaagtatcaggagttgtcaaggcagagaagagagtgtttgcaaaagggggaaagtagtttgctgcctctttaagactaggactgagagaaagaagaggagagagaaagaaagggagagaagtttgagccccaggcttaagcctttccaaaaaataataataacaatcatcggcggcggcaggatcggccagaggaggagggaagcgctttttttgatcctgattccagtttgcctctctctttttttcccccaaattattcttcgcctgattttcctcgcggagccctgcgctcccgacacccccgcccgcctcccctcctcctctccccccgcccgcgggccccccaaagtcccggccgggccgagggtcggcggccgccggcgggccgggcccgcgcacagcgcccgcatgtacaacatgatggagacggagctgaagccgccgggcccgcagcaaacttcggggggcggcggcggcaactccaccgcggcggcggccggcggcaaccagaaaaacagcccggaccgcgtcaagcggcccatgaatgccttcatggtgtggtcccgcgggcagcggcgcaagatggcccaggagaaccccaagatgcacaactcggagatcagcaagcgcctgggcgccgagtggaaacttttgtcggagacggagaagcggccgttcatcgacgaggctaagcggctgcgagcgctgcacatgaaggagcacccggattataaataccggccccggcggaaaaccaagacgctcatgaagaaggataagtacacgctgcccggcgggctgctggcccccggcggcaatagcatggcgagcggggtcggggtgggcgccggcctgggcgcgggcgtgaaccagcgcatggacagttacgcgcacatgaacggctggagcaacggcagctacagcatgatgcaggaccagctgggctacccgcagcacccgggcctcaatgcgcacggcgcagcgcagatgcagcccatgcaccgctacgacgtgagcgccctgcagtacaactccatgaccagctcgcagacctacatgaacggctcgcccacctacagcatgtcctactcgcagcagggcacccctggcatggctcttggctccatgggttcggtggtcaagtccgaggccagctccagcccccctgtggttacctcttcctcccactccagggcgccctgccaggccggggacctccgggacatgatcagcatgtatctccccggcgccgaggtgccggaacccgccgcccccagcagacttcacatgtcccagcactaccagagcggcccggtgcccggcacggccattaacggcacactgcccctctcacacatgtgagggccggacagcgaactggaggggggagaaattttcaaagaaaaacgagggaaatgggaggggtgcaaaagaggagagtaagaaacagcatggagaaaacccggtacgctcaaaaagaaaaaggaaaaaaaaaaatcccatcacccacagcaaatgacagctgcaaaagagaacaccaatcccatccacactcacgcaaaaaccgcgatgccgacaagaaaacttttatgagagagatcctggacttcttttggggggactatttttgtacagagaaaacctggggagggtggggagggcgggggaatggaccttgtatagatctggaggaaagaaagctacgaaaaactttttaaaagttctagtggtacggtaggagctttgcaggaagtttgcaaaagtctttaccaataatatttagagctagtctccaagcgacgaaaaaaatgttttaatatttgcaagcaacttttgtacagtatttatcgagataaacatggcaatcaaaatgtccattgtttataagctgagaatttgccaatatttttcaaggagaggcttcttgctgaattttgattctgcagctgaaatttaggacagttgcaaacgtgaaaagaagaaaattattcaaatttggacattttaattgtttaaaaattgtacaaaaggaaaaaattagaataagtactggcgaaccatctctgtggtcttgtttaaaaagggcaaaagttttagactgtactaaattttataacttactgttaaaagcaaaaatggccatgcaggttgacaccgttggtaatttataatagcttttgttcgatcccaactttccattttgttcagataaaaaaaaccatgaaattactgtgtttgaaatattttcttatggtttgtaatatttctgtaaatttattgtgatattttaaggttttcccccctttattttccgtagttgtattttaaaagattcggctctgtattatttgaatcagtctgccgagaatccatgtatatatttgaactaatatcatccttataacaggtacattttcaacttaagtttttactccattatgcacagtttgagataaataaatttttgaaatatggacactgaaaaaaaa

SEQ ID NO: 650272 - DNA, 159 bp, Homo sapiens
tgaagcctcagaattgtttttatcaggtgctataattctataattaattttacaattcatgtagcaaatggaaaatcattcagagaggccaatgtatataaataacagtttatactgaaactgccaatttactaaacagcactgcatggtgtttatatt

SEQ ID NO: 650273 - DNA, 1132 bp, Homo sapiens
gctctttccctatcggtgtgccactagaagatcctggtgtcgccatgggccgccgccccgcccgtatgttaccggtattgtaagaacaagccgtacccaaagtctcgcttctgccgagtgtgtccctgatgccaagattcgcattatttagacctgcaggcggaacaacggcaaaagtggatgagttaccgcttctgtggccacatggtgtacagatgacactatgagcagctgtcctctgaagccctggagcgctgcccgaatttgtgccaataagtacatggtacacacagtacgcgcgccacacgatggcttccatactccgcggctgcggctccacccctttccacgctcatccgcatcaccaacgatgtcgcacctgttgccttgctcgctgtcacagcgctccaacacagcgcactgccgacggtcgccctctgcccacacagcccccagggcccacctgcctgggcccgcggctccacactctggccccaccgtccatcactgtcctctcccgcacccatagccctgccgcacaaccacaggcaccgcactgcttgacattgacgcgcccacttgccgacacgggccccaacgcctcccaacgctcttccctggcaccccgccacgaacggaactcccactctctccgaccaccacagctgagcgcctctccacccaccgcctcccactgcctgcacctgcaactctgccacgacactgctcgctctgcacacaagtcgggctcattcccacgactaggctgtcgcggctccacgctacatcccccgttcctcgcgccctctcgcacccactttgcacagacctcgcacctctcctcaatgggcttccaacactgtgcctcgcctcccctgtccactacccccacccactcaacactcccacctcctgctcacccccccgccgtcctcacccaccacccacctcccgccccctccccctcacaccctacccccccccctcccccctccctctcacccaccctctccacccccccacctcccacccacacccctcctcccccacaccccgcccccctttacatcatcccccacccgcccccaccaccacacccacccacctaccacccccctcacacccacccacc

SEQ ID NO: 650274 - DNA, 1553 bp, Homo sapiens
ggcctagcagaaacgtgatccggcatcacgaaagtcccctggggagaagtgggagtggacaggggcgctgactaagtcagcgccctgcagtacaactccatgaccagctcgcagacctacatgaacggctcgcccacctacagcatgtcctactcgcagcagggcacccctggcatggctcttggctccatgggttcggtggtcaagtccgaggccagctccagcccccctgtggttacctcttcctcccactccagggcgccctgccaggccggggacctccgggacatgatcagcatgtatctccccggcgccgaggtgccggaacccgccgcccccagcagacttcacatgtcccagcactaccagagcggcccggtgcccggcacggccattaacggcacactgcccctctcacacatgtgagggccggacagcgaactggaggggggagaaattttcaaagaaaaacgagggaaatgggaggggtgcaaaagaggagagtaagaaacagcatggagaaaacccggtacgctcaaaaagaaaaaggaaaaaaaaaaatcccatcacccacagcaaatgacagctgcaaaagagaacaccaatcccatccacactcacgcaaaaaccgcgatgccgacaagaaaacttttatgagagagatcctggacttcttttggggggactatttttgtacagagaaaacctggggagggtggggagggcgggggaatggaccttgtatagatctggaggaaagaaagctacgaaaaactttttaaaagttctagtggtacggtaggagctttgcaggaagtttgcaaaagtctttaccaataatatttagagctagtctccaagcgacgaaaaaaatgttttaatatttgcaagcaacttttgtacagtatttatcgagataaacatggcaatcaaaatgtccattgtttataagctgagaatttgccaatatttttcaaggagaggcttcttgctgaattttgattctgcagctgaaatttaggacagttgcaaacgtgaaaagaagaaaattattcaaatttggacattttaattgtttaaaaattgtacaaaaggaaaaaattagaataagtactggcgaaccatctctgtggtcttgtttaaaaagggcaaaagttttagactgtactaaattttataacttactgttaaaagcaaaaatggccatgcaggttgacaccgttggtaatttataatagcttttgttcgatcccaactttccattttgttcagataaaaaaaaccatgaaattactgtgtttgaaatattttcttatggtttgtaatatttctgtaaatttattgtgatattttaaggttttcccccctttattttccgtagttgtattttaaaagattcggctctgtattatttgaatcagtctgccgagaatccatgtatatatttgaactaatatcatccttataacaggtacattttcaacttaagtttttactccattatgcacagtttgagataaataaatttttgaaatatggacactgaaaaaaaa

SEQ ID NO: 650275 - DNA, 286 bp, Homo sapiens
acttaggtccttctgcgtcgtcttatttggaggagggaggcagcgctcccatcctagggtcttttcagtcagttcatgcaacagcctctactttctcctagcgtactgttccactattccctgttgctgtatttctccaagcggaagattcccaggcagaccaccaccacctccgcaccttgttggggtaacctggtgactcattcattggtcccttctcattctggacccatgtggcggcactgatggcttgctatcatctacagatccctggcgtttttgaaaa

SEQ ID NO: 650276 - DNA, 969 bp, Homo sapiens
taaatttttaattttccgggggcacatagttaattggaaaattttttttttttggaaagggcgggggtctcatttggtcccccaaaacaaaagtggcacggggtctattcccgggccccttcttagcgcacttacaacactttaaactctccgtgggcctcttcaagcaatttctctcacgtgccttacagcctggggaagatagcagtgggaattaacaagtgtgcccgacaacacaccccgtggctcgagacaacatactttctcttactcagctcgtgatcagtgttcaacagtggtcatttatccctcatatacagaagagtttttttctccttctcttcgagagtggggtctaaagactcccaagtgtggcaccatatctacgtgagtacaccaggcttgggagatatagtgagagtgtctccaacagcgtataacaacagagggagtcgccccggagtctcatcaaatattcatcgtgccgcacgagacataattcgcgtgactccaagcctcataaaggcaagatttcttcatcaagtagtatattatacacgtcccaacgtgttgccccactagagagaatgccttgccctagtggggagccaatattacaacctagtggcccccgaggaaacccacacatcatatgtcacagagcacaccaacaggggaaatagagctgtgcgtgtgacgatcgtggagaaaaatcccacagagaaacacaattcgcgcgagaaattgtgtggcgaaacctgaccatggaggtgaatccaaggccccccggggttctcaaagaacatcatgtaataacacagacaatcttgaccgaaaacacccgtgcaggggggatagacaagccccgggaagatgaacaacaccgtggaccatgattgcggacatctaagagactccccacaggtgggttccccacaggagagaggcaccaggtcacaaaacgagtga

SEQ ID NO: 650277 - DNA, 1084 bp, Homo sapiens
  misc_feature (269)..(269): n is a, c, g, or t
tgttcccccgggttaaagggaaccttttaaaaaaaaaaataaccagttttaacaaaacccttttttttaaaaaattttaacaggaccagggagaataccgtcccattaatttggtacctataaccatttccacgcattcggcgctttgagaacaacgacgcgtgacactttacaaaatgaaggatgagactctctaccttcagagttctgcgggagactcacgtggggttcctcacaaaatgtgtacagtatccagcaatctcaaacangctggtagaaacaacaccttgtgcaagaggtggcgtgtggtctgttgtccccagcggctgtttggccagtaggtataaagccacacacgggggtgtagatattccccgcacaatgcggcatgagcacgatgcgtggagggttccttctacagaccgccaggtagaattttatttctccgcgacccacagaaaacgcgtatcgtatgcggataaccaaacaacacacttcccgggatattttatgcaagggataaatacaaagcatgcagtgcatgcgtgtgttgacaacaacgcatttaacaatgaagtgcagacatccgcgtagtggttgagaatgactttttttcatcacgcactttcgatttagggaagacctcgccacatataatgtaaaattcttttttgactcgcagagagagaacgacacagaaggcggcgggcattttacgcacacctctttgggtgcgggggcgacctggcgtcatatttaattattgtatcaacaccgaggtgtattatagtgtggcgccttacagagggggggctttttccacgcgtgcggaagaagattcaccaacagattactctaaaagtggtgcaccaccagacaatttatttttatattcggcagaacattcgtgggccacggggcgttcttcagtgcacactacttgtggggcaggcccatgatcgatccgagaagctcattgcgaggggggacacctctgcgttatctacgaagtgctgttggccaccacagagtgatgtctctgacttactgataaaaaaaacccccacagggggtataataaacc

SEQ ID NO: 650278 - DNA, 367 bp, Homo sapiens
gcatgctgtgactattgtgtcaaaaggagcaggataacatagcgtacaacactcttcagagcctgctgccatttcgcactttctgcctcgtatacagggagtatcatatattgctctgtagtgctatccaaatagccaaatagcatccctcatgtcgctccagctgaatcattcaattatagtactatcaactttaatatatctctgtatttacttcctggaacaatatgctgtaaattttcttgctgatgatatgtagtccgaatgtaatcctatcacagctaggcaagagcctcatttgctccacaacaaattcccactcgctcttccttctccattgacccgtagttaaccacctgtaactcct

SEQ ID NO: 650279 - DNA, 714 bp, Homo sapiens
  misc_feature (41)..(44): n is a, c, g, or t
  misc_feature (47)..(47): n is a, c, g, or t
  misc_feature (49)..(50): n is a, c, g, or t
acacacacccatccgcacctaatccaactagctgtagccgnnnnatngnnggtggtctattaacttgttcaaaaaagtatcaggagttgtcaaggcagagaagagagtgtttgcaaaagggggaaagtagtttgctgcctctttaagactaggactgagagaaagaagaggagagagaaagaaagggagagaagtttgagccccaggcttaagcctttccaaaaaataataataacaatcatcggcggcggcaggatcggccagaggaggagggaagcgctttttttgatcctgattccagtttgcctctctctttttttcccccaaattattcttcgcctgattttcctcgcggagccctgcgctcccgacacccccgcccgcctcccctcctcctctccccccgccccccccccccccccccccccccacccccccccacccccccccccccccccaccccaccccaccacccccccccccccctcacacccaacacaaccacgccacacgaccaaccacaccaccacacaccccccccccactccaccaccaacactcacccacaacacccacaccaccaaccatacacacaccaccacactcaccccaccctcccaccacacacaacacaccccaccctcacccccaccccccaccacacaccaccaacccctccacctcctcccacaccccccccccccataacccccc

SEQ ID NO: 650280 - DNA, 2524 bp, Homo sapiens
  misc_feature (41)..(44): n is a, c, g, or t
  misc_feature (47)..(47): n is a, c, g, or t
  misc_feature (49)..(50): n is a, c, g, or t
acacacacccatccgcacctaatccaactagctgtagccgnnnnatngnnggtggtctattaacttgttcaaaaaagtatcaggagttgtcaaggcagagaagagagtgtttgcaaaagggggaaagtagtttgctgcctctttaagactaggactgagagaaagaagaggagagagaaagaaagggagagaagtttgagccccaggcttaagcctttccaaaaaataataataacaatcatcggcggcggcaggatcggccagaggaggagggaagcgctttttttgatcctgattccagtttgcctctctctttttttcccccaaattattcttcgcctgattttcctcgcggagccctgcgctcccgacacccccgcccgcctcccctcctcctctccccccgcccgcgggccccccaaagtcccggccgggccgagggtcggcggccgccggcgggccgggcccgcgcacagcgcccgcatgtacaacatgatggagacggcggcggcaactccaccgcggcggcggccggcggcaaccagaaaaacagcccggaccgcgtcaagcggcccatgaatgccttcatggtgtggtcccgcgggcagcggcgcaagatggcccaggagaaccccaagatgcacaactcggagatcagcaagcgcctgggcgccgagtggaaacttttgtcggagacggagaagcggccgttcatcgacgaggctaagcggctgcgagcgctgcacatgaaggagcacccggattataaataccggccccggcggaaaaccaagacgctcatgaagaaggataagtacacgctgcccggcgggctgctggcccccggcggcaatagcatggcgagcggggtcggggtgggcgccggcctgggcgcgggcgtgaaccagcgcatggacagttacgcgcacatgaacggctggagcaacggcagctacagcatgatgcaggaccagctgggctacccgcagcacccgggcctcaatgcgcacggcgcagcgcagatgcagcccatgcaccgctacgacgtgagcgccctgcagtacaactccatgaccagctcgcagacctacatgaacggctcgcccacctacagcatgtcctactcgcagcagggcacccctggcatggctcttggctccatgggttcggtggtcaagtccgaggccagctccagcccccctgtggttacctcttcctcccactccagggcgccctgccaggccggggacctccgggacatgatcagcatgtatctccccggcgccgaggtgccggaacccgccgcccccagcagacttcacatgtcccagcactaccagagcggcccggtgcccggcacggccattaacggcacactgcccctctcacacatgtgagggccggacagcgaactggaggggggagaaattttcaaagaaaaacgagggaaatgggaggggtgcaaaagaggagagtaagaaacagcatggagaaaacccggtacgctcaaaaagaaaaaggaaaaaaaaaaatcccatcacccacagcaaatgacagctgcaaaagagaacaccaatcccatccacactcacgcaaaaaccgcgatgccgacaagaaaacttttatgagagagatcctggacttcttttggggggactatttttgtacagagaaaacctggggagggtggggagggcgggggaatggaccttgtatagatctggaggaaagaaagctacgaaaaactttttaaaagttctagtggtacggtaggagctttgcaggaagtttgcaaaagtctttaccaataatatttagagctagtctccaagcgacgaaaaaaatgttttaatatttgcaagcaacttttgtacagtatttatcgagataaacatggcaatcaaaatgtccattgtttataagctgagaatttgccaatatttttcaaggagaggcttcttgctgaattttgattctgcagctgaaatttaggacagttgcaaacgtgaaaagaagaaaattattcaaatttggacattttaattgtttaaaaattgtacaaaaggaaaaaattagaataagtactggcgaaccatctctgtggtcttgtttaaaaagggcaaaagttttagactgtactaaattttataacttactgttaaaagcaaaaatggccatgcaggttgacaccgttggtaatttataatagcttttgttcgatcccaactttccattttgttcagataaaaaaaaccatgaaattactgtgtttgaaatattttcttatggtttgtaatatttctgtaaatttattgtgatattttaaggttttcccccctttattttccgtagttgtattttaaaagattcggctctgtattatttgaatcagtctgccgagaatccatgtatatatttgaactaatatcatccttataacaggtacattttcaacttaagtttttactccattatgcacagtttgagataaataaatttttgaaatatggacactgaaaaaaaa

SEQ ID NO: 650281 - DNA, 258 bp, Homo sapiens
gcaccgcctgcaagcacgcgaaaaccgcacagaaggtagatcggatggtgcatcgatgggcaaggtgggtggccatcgtgacgtagctaggtgcgcttacgcatcgaagacagtgaggctgacccatgcctcgcggctttaggcctaaggagagccccccgtagtggacacagatgcccactggaagatctcctcgtcacctagcccaagcacttgcacagatggaccctagcctcacccctcaacccccgcactggc

SEQ ID NO: 650282 - DNA, 1296 bp, Homo sapiens
ccccgtggagctctcagcccaagggaagcagatgatcgagacgtactttgacttaccggttgtatcgccatgtggaagagccgccagcatctcgaagctgctggactttgacgacgtcctgtgaggggcagaggcctccgacccagtcacgcatcaggccgagtccctctgacaccgggaacctgtgagtgctgtggaccgtctcgatgtctccccggtgactgtgtgtgctccggtctcgtcctggagccacttcagtggcacctcagcacgttgctcaggttccccctgtgggttccggtcctcgctgcagcccgtgtgccgctagaggcttgcagtccctgggggccgggaggaatcccgccctgtggcccgtggatgctcaggggccaggcagtgtcctgccatgcctcgcctggaggctcagctgtgggcagtccctccatggggttcatgggaaattaagtgcactttctatacccccgtaagcaaattcaacaggggtaatgcacgcattcattgttcagactgagtttaagccacgtattgctgcttagtttagcaggtgttaagggcgaccccgggcgcaagtcagacccaggatagatccggcattgtgttccggggaacccttacgtggttcaatcccgctcacactgacgattcgaatttaacaagtcccccaagggattggccccggggttgccgtagggcgccacggcgttgacacggtggttgacccaaggcatggagtcttctggtctgacacatgggcctggagttcgtctgcggatctgtcttgacacatggggccgagatctactaaacaggacatagcagcttagagtttaccaccttcacccttctttggcagatccctcgcgaattacccttggcttaagatgtttagaaccccatcaagcaccggaagcccggaaccccgggctacggcggggcagcgtctcggtgcgccaaccgcagggccacgcccaccaagcgcgagcaacgcgcgtcccaccacactgaatcaaacaagaggcagccgccggtatgtgagacccgagtccacaacgaggcgacctaaaagcaccaccgaccgcaatctcacacgacggaaccagacctagcactctaccgtaacaaccacaccacgagtagaagccacccccaacacaaacacccacggcccaagacggagaccaagacaccgctgccgacgctggtaaagcagcgggacaagatcacgaaagtagaaatggatcgaccagcacgacgaccgacccaaggacacaccgc

SEQ ID NO: 650283 - DNA, 168 bp, Homo sapiens
gtcgacaatttggccatcaggtttaaagcgtgcactagaggtcaggtgcagtggctcatgcgtgtaatcccaacactatcggaggctgaggcaggtggatcacttgaggccaggagttccattccttgcctcctgtaatccagctacttgggaggctgagtgtcgacg

SEQ ID NO: 650284 - DNA, 477 bp, Homo sapiens
  misc_feature (24)..(24): n is a, c, g, or t
  misc_feature (464)..(464): n is a, c, g, or t
tccttctcaggccatatttagttngctttaacatactgttagtaggaatataaattagtatggccactatggaaaacaatatggaggctcctcaaaaaaatgaagagaaaagaaatcactatgtggaagagatgtctgtggaagagatatcccttgtttattgcagcattattcacagtagccaagatatggaatcaacattaagtgtccatcagcagatgaatggataaagaaagtgcagtacttatacacagtgaaatatcattcaggcataaaaagtgatgaaattctgtcatttgcagtagcagcatggatggaactagaagacatgttaagtgaaacaagccagacaccaaaagacaaatatcacatattctcacttatgtagaaactaaaaaagttgatctcatcaaagtagagagtagaatggcagttccagaggctgggaatggacagggcaaganggaatgaagagag

SEQ ID NO: 650285 - DNA, 139 bp, Homo sapiens
cgtcgtttacatgcctgtggtaccagctacattggggggctgagtgggaggatggctatgggtctgggaggtcgaggttgcggtgagccgtgatcacaccactgtactccagcccgggtgacagagtgagaccgtgtcc

SEQ ID NO: 650286 - DNA, 880 bp, Homo sapiens
  misc_feature (588)..(588): n is a, c, g, or t
  misc_feature (600)..(600): n is a, c, g, or t
  misc_feature (611)..(611): n is a, c, g, or t
  misc_feature (684)..(684): n is a, c, g, or t
  misc_feature (827)..(827): n is a, c, g, or t
  misc_feature (829)..(829): n is a, c, g, or t
  misc_feature (839)..(839): n is a, c, g, or t
  misc_feature (841)..(841): n is a, c, g, or t
  misc_feature (855)..(856): n is a, c, g, or t
  misc_feature (858)..(858): n is a, c, g, or t
gagggctggtttgggcatggtgctgggctgcctgtctttgatttcacttatttgtttttttcttaaaacaggtactgaggataaaacaatataaaataatatgagagggtctttctcttccttcattcccccctttggagactctcactttttatagcgggagttctcactcttattttggttacttatgtcttttagtgcaacagatggatagtgatttatatagtacacttgtgctgaagcacttggtgaactaaggtagcgatgaagctttttatcatttgaagaagtacaggtaggaaacaaaggagcgcaaccccatgaggttgataatactatgaccaccaatgccatttcattggtgaggaagttgaagcaaataaagtccaagtaacttgtccaaccccacatcattatgtagtggtttctcagagacttgaatgaagggcatctggatccagagtgccagctcttaaccaccatgttatgctgagtcttctatttgagcaatggaataaactgttctctgcaatgactacactcacatttgttggagctatgtgtgttcattgactggagccaactgtngtgaaatgggtngaattcttganttgattcttggcttgaagtctgcatagccaaagcaagactaagcaaaaagaacaaatctggaggtatcacatnacccaattcaaactactacaaggctgtagctactgaaacaggatggcaaaggcataaaaacagacatgtggacaatggaacagaatccagattcagaataagcaatacttatggcatgatcttgacaagcaacaaacctaagngngaaagacccntntcacagggtgtggnnancacagtccctgagtacagactg

SEQ ID NO: 650287 - DNA, 598 bp, Homo sapiens
  misc_feature (199)..(199): n is a, c, g, or t
tgtgctctgctctatagtactctcttgtacacatgtatggtcgatatcgatcataaaaatgtacttagctctcgatacattgactctgtggaggcactcgatcaaataactctgtttttgtcggttctaaatgatcattctctacagatgctcccttgtctgaatggtcacattagtgaactgtggactctgttgctcngtgggatctatctctaaagtctttagggagaatcctagtataaatttatggaaatgtttttgggggtgaatctctagtaataaatttgagtgttgtgtgacttggtcttcctttgttgtcttggctgtctcaatcttctggcctctatagttttctcctgctctgcctcccaaagtgcctggattttagggttgatccactgtgcttgtgcttagaggtaataaattttaatattctattcagattaagaaaatatagcatattagtatttgtatctttagtaaagttactgccagtttgatttttttttttgcaatttacttagctgaatcatgtaattcacagtaaatatgtttctgtgttttaccattttttattattcctgttttgaaaaaaaaa

SEQ ID NO: 650288 - DNA, 527 bp, Homo sapiens
caactacagcagctattccaagaacagagcctctgtgagcatgtacaccaatggtggctgccttagcagggcatcatgatggcatacttggagcttggggccttctgaatctccaaggaccaggacacttccttccaagaggcagcagcaagcttggtccactgtatactcctccaaatgcatctttgtcaataactgtcaggtatttattcttgtttaggtaaacagcatccagctttgtcccattgaaagcatatccttggactgaagtaaagccattgttgtacagcttcagtgtcaaggtttcattgcatagtccctgaaaagcattcacagggattgacgtcatgtaagggttgtctgtaatttcaagtataaagaatatatcggtggaacaaaactttggtcaggtcagggaacattttaagtccagtgttgaaaatgcccaggaactttaggagggggagctctttgagggcatcagggtctatgtacgttaagttcctggtataccgaagataccgagc

SEQ ID NO: 650289 - DNA, 742 bp, Homo sapiens
  misc_feature (450)..(450): n is a, c, g, or t
  misc_feature (462)..(462): n is a, c, g, or t
  misc_feature (473)..(473): n is a, c, g, or t
  misc_feature (546)..(546): n is a, c, g, or t
  misc_feature (689)..(689): n is a, c, g, or t
  misc_feature (691)..(691): n is a, c, g, or t
  misc_feature (701)..(701): n is a, c, g, or t
  misc_feature (703)..(703): n is a, c, g, or t
  misc_feature (717)..(718): n is a, c, g, or t
  misc_feature (720)..(720): n is a, c, g, or t
gagggctggtttgggcatggtgctgggctgcctgtctttgatttcacttatttgtttttttcttaaaacaggatagtgatttatatagtacacttgtgctgaagcacttggtgaactaaggtagcgatgaagctttttatcatttgaagaagtacaggtaggaaacaaaggagcgcaaccccatgaggttgataatactatgaccaccaatgccatttcattggtgaggaagttgaagcaaataaagtccaagtaacttgtccaaccccacatcattatgtagtggtttctcagagacttgaatgaagggcatctggatccagagtgccagctcttaaccaccatgttatgctgagtcttctatttgagcaatggaataaactgttctctgcaatgactacactcacatttgttggagctatgtgtgttcattgactggagccaactgtngtgaaatgggtngaattcttganttgattcttggcttgaagtctgcatagccaaagcaagactaagcaaaaagaacaaatctggaggtatcacatnacccaattcaaactactacaaggctgtagctactgaaacaggatggcaaaggcataaaaacagacatgtggacaatggaacagaatccagattcagaataagcaatacttatggcatgatcttgacaagcaacaaacctaagngngaaagacccntntcacagggtgtggnnancacagtccctgagtacagactg

SEQ ID NO: 650290 - DNA, 1572 bp, Homo sapiens
ggtgtcgctcagagtcccgcgttcccgggaactagtaagggagcctggggaaggcggggcgcggcccgggcggccggggcggggccggcgggagggcggagggccgggcggacctgtccctgccggtcccggtggaccccgcctgccccggtggcaccggccatgaagctgaagctgaagaacgtgtttcttgcctacttcctggtgtcgatcgccggcctcctctacgctctggtgcagctcggccagccttgcgactgcctccctccgcttcgagctgcagctgagcagcttcggcagaaggacctgaggatatcccagttgcaagctgatctccgtcgcccaccccctgtcccagcccagccccctgaacctgaggccctgcctactatctatgtcattacccccacctacgccaggctggtacaaaaggcagagctggttcggctgtcccagaccctgagcttggtgccccgtctacactggctgctagtggaggacgctgagagccctaccccgctggtctcggggctgttggccgcctctggtctcctctttacacacctggctgtccttacccccaaggctcaacggcttagggaaggtgagccaggctgggtccggccccgaggagtggaacagcgcaataaggccctcgactggctccgaggaaaagggggtgctgttgggggggagaaggatccaccgccaccagggacccaaggagtcgtgtattttgctgacgatgacaacacctacagccgggagctctttaaggagatgcgttggactcgcggtgtctcagtgtggcctgtggggctggtgggtggcctgcgatttgaaggtcctcaggtacaggatggccgcgttgtgggtttccacacagcatgggaacccaacaggccctttcccttggacatggcgggatttgcggttgccctgcccttgctattggctaagcccaatgcccagtttgatgctactgcaccccggggccacctggaaagtagtctcctgagccaccttgtagatcccaaggacctggagccacgggctgccaattgtactcaggtactggtatggcacacccggacagagaaacctaagatgaagcaggaggagcagctacaacggcagggccagggctcagacccagccattgaggtgtgatggcaacctcaccctgacttctaccttattttaggcacataccttgtgggactgggctccaggccagcccaggatgtggtttttttttttaaagacctgacccctgagaaccagaggcagcccctccaaccacagggtgtgtcccagttgcttccctcccttcccccagcctgccatgtggcactgcccacatgttggggacaagcagcttctctagtgagccagatcagccccatctggggcggagcaggacagatggactcagaaaggagggtagctgtgggaaaagggtaacttattggggacaagcatgcagtggggggctagaggagctgggctggaccctccccacctgagcatgcgatccccttcctacctctagaataaagaatctcaacccgg

SEQ ID NO: 650291 - DNA, 311 bp, Homo sapiens
acaaaaaaaattaggtagctggagctgggcatggtggtgagtacctgtagttccagctactcaggaggctgaggtaggaagatcttttgaacgccaggaatatgagaccagcctgggcaatatagcaagaatctctctaaaacaaaacaaaacaaaaagtattaagaagtagtcttggggctgggtgcggcggttcacacctgtaatcccagcactatgggaggccaaggtgggtggatcacttgaggtcaggagtttgagagcagcctgaccaacgtgctgaaaccccgcctctattaaaaatatacagt

SEQ ID NO: 650292 - DNA, 183 bp, Homo sapiens
gttgagacaccacaaggtaagagcgtctcgatgaccacatacgaatacgtgccaggcccacgagcaagtgtaccgtttacttgaacgtgaatgccgatggcatcatctacgggagccgtttcgaaaccggcgatcgcgactcttgcgacatgatgaaggcgcgtatgccgttcttctaagctg

SEQ ID NO: 650293 - DNA, 237 bp, Homo sapiens
cgccaccgcggccatcgccgtggccagcttccagccagggcacagcgccgggtcgggcgcggccacggtgacctcgaacgcggactgctcgcgcccctgcgggcaatagaacagcgagctgccgttgaagaagccgcggcgcgtgtcgagccaggccttgcgcaccgaattgtcgtaggcgtggacctcgtattccagcgtcagcgcgccaccgccggcgacgcggaagctgcgctt

SEQ ID NO: 650294 - DNA, 354 bp, Homo sapiens
  misc_feature (30)..(30): n is a, c, g, or t
  misc_feature (35)..(35): n is a, c, g, or t
  misc_feature (115)..(115): n is a, c, g, or t
  misc_feature (123)..(123): n is a, c, g, or t
  misc_feature (146)..(146): n is a, c, g, or t
  misc_feature (353)..(353): n is a, c, g, or t
cggaggcgccgataagcggatccagtgccnaaggnccggagggatatgaggagatgaggagtctgaggacctgcaccactgctgctggaggtgggagtgatagagggcacctgcntgccgganttggacgtatgttcccctcagcnggggaccccaactgctgctgagtgaagaggaaactgagagttgattgtgccaggcgccagtcttgttatgactgtgtatttttgttgatctataccctgtttccgaattctgccgtgtgtatccccaacccttgacccaatgacaccaaacacagtgtttttgggctcggtattatatatttttttctcattaaaggtttaaaccana

SEQ ID NO: 650295 - DNA, 452 bp, Homo sapiens
  misc_feature (431)..(431): n is a, c, g, or t
aaataatcaaaacccaacataagtgtaagattgcctttaaaaatatgcatcaaatcgtgtctcattacttttctctgagggttgtagtaaacagtaggagttaataaagaagctcattttggtttacacgttagaaagaagagaagcctgacagtggagatatgttaactattgtataatgcggcctggtatacatgacactcttctgaattgactgtatttcagtgagctgcccacaaatcaagtttagagccctcatccatttatgtctcagaccgttattcttagctattcaatggtgagcacgactgaaatctgcctgataggacccgtattgccacagcactaatacaacatatatcgtactgagagcttgttttatcattaccatgatgaaggtacatgaacatcagaatttaaaatcataaatntaatcctttcacctttaccat

SEQ ID NO: 650296 - DNA, 473 bp, Homo sapiens
gttctggtcgtgtcacagactatacattctgtgccgcgtatctattgtacctgagcatggcactatgtttactctttcgctatgtacggtagatccgcctactgcgactaaagagattcagtaccttaacgctaaaggtgctttgacttataccgatattgctggggaccctgttttgtatggcaacttgccgccgcgtgaaatttctatgaaggatgttttccgctctggtgatacggctaagaagtttgaggattgctgagggtcaaggtgggtatacgttatagcgccttcgaatgtatctcctgcttatcaccttcttgaaggcttccccttcattcaggaaccgccttctgggtgatattgcaagaacgcgtacttattcggcaccatgattattgaccagtgtttccacgtccgttcagatgttgccgtggaatagtccaggttaaatttaatgtgaccgcttatcg

SEQ ID NO: 650297 - DNA, 1780 bp, Homo sapiens
gtgccccaacatggagcggcctttaaagggactttcacttttgtataaccacttcatctctgtgagcccattttcccagttctggggaaaactctcccgcgccacaagatctatacaacaagaaaatatgagggctctcacttctcctatacccttattaaagaaacacaaactcctgtggttttccccgagggcttataaagccagtggtgcacccaaacactttagccttacatctcgagagagagcagagaccaaagacacaagtatagacagaacacacacatttgtggggtggctttgtgttgcacactttctgcgtattctcaacacccaatataatccgtgaaatgggctttataactcgagccaagaaaactccaattttatgtgtgcactttataaagagtctagcgatgtgtgacacctattgtgtgtgcacacaccgagggacaccctgtgcagagcccatgtgtgcgtctcccctttcaaattctcctctcgctgtgggtcgccagagttaaagacttcaaaatatcaccttgaggggtgtttaaaatatctccagcgcgagaagagagagacgagttttctctctcttgtgtagatctctctctctacaatatgagtgcgcgtgacgaggcttctcaaacctttctctataatctccacgcgagaaagactatagcgctttctttatcacgcacaatatcgcgcaaagaaagagacatttcaagaggccaaaataatagcagcattgtgcttcactaaataaacgctttctccaggggaaattctccataaacaaataatctctatctaatctccactcatcttttcgaacatcttattaagagaagcgccataacccccttattacatcgacggttatttaattatttatttagtattattgatgctaggaggagaacagacagaggcgaggcagcgctcacacacacataatagtgtgtgcgttgcgccccaaataaaagcagggcgcgaaaactattgacgcaacggaggggcgactcgttgtaacaccacaagagaagcgaggccgacaacaccaccacaacctggggacaaaaaataaaatcaacaaccgagcgtggtatggagacaaacacccacccaaataagtcataacaccaagaaggacgagtgaagtatgggccccgccaccacctcagtcaagagagattcactcacaaacaacaagcggggaggaggggaccccacacacaaaacgcacagcgacactaaacgaaaggacgagagcagaccggctatcaactgttcgtctacacaagaacataaggagggggctacctggtgccatgcatgtagtcaccccccaccgggctggagtggatgcactatcacgcggggtggtgggccacacaaccgaccgaggagcacaaataggcgtccctacgaacacccccccacacagaggacacaaagacggataactccccccacggagcacaccacgcggcgcgcaaagatactctctgtcagacaaacagagccagcagcacccccccgtggttgaccccaaggcgggaaacaaccacaacagatcgacccgcgcgagcaagtaaccttccaaccccgcaaacaagcaacaccatcacacgaacaacatcgacgcgcggcggggtgggccacacaagaacaacacacccaagggacaccgggggctaacatacaacaagacgacaccctcatcagatcaccacccacaaaaagactggtcgctcgacaaccaactatg

SEQ ID NO: 650298 - DNA, 642 bp, Homo sapiens
ggccgctttggtcacagtgaccgccaccgttgccgggggatgggtccctgagacttggcgaagtaggagccctgtgtgatcgtgcgtcagagtcggggctgagaccagccctggccagggcagttaccaggacggtctccggaggccgggattcgcggagggtccaccagcaggaagaaaccccaggaggaagaaacctcagacagatcgccggggaggcagcgcgggatcccagcctcaggcgtgcgcggacggtgtgcggagtctagctttgtaccaggctgcagtgcagtagtgccatctcagctcactgcaacctctgcctcccgggttcaagcgattgtcctgcctcagcctcccgagtagctgggattacagccacatgccacacacccagctaatgtcgtatttttagtagatacggggtttcatcatgttgcccaggatggtcttaatttcctgacctcgtgatccgcccatctcgcgctcccaaaatgctgggattacaggcatgagccaccagaaccggacatgcttgcttaaaagctaaatatttcaggcttgtgtgcattaggctctgttacaacctacttacttctgcttttgtaattctataggcaccattgataatacctaacaatg

SEQ ID NO: 650299 - DNA, 378 bp, Homo sapiens
  misc_feature (200)..(200): n is a, c, g, or t
  misc_feature (218)..(218): n is a, c, g, or t
  misc_feature (309)..(309): n is a, c, g, or t
  misc_feature (324)..(324): n is a, c, g, or t
  misc_feature (369)..(369): n is a, c, g, or t
  misc_feature (372)..(372): n is a, c, g, or t
  misc_feature (375)..(375): n is a, c, g, or t
aatggaatggatttcaaccccgaatggaatggaaaggagtggaatcaacccagagtggcatgtcacggaatggaatggcaaggaatggaatggaatggaatggaatggaatggaatggttcggaatagaagggactggaacgaaatgaaatggaatggaatggaatggaatggaatggaatggaatggaatggaatgganccgaatggaatagaatgnaatggaatggaatcaacccaagtgcaatggaatggaatcgaatggaatggaatggaatggaatggaatggaatggaatggaatggattcancccgaatggaatggncaggaatgaaatcaacccgagtggaatggcatggaatggaatccnaanggnatg

SEQ ID NO: 650300 - DNA, 260 bp, Homo sapiens
agcctggcccggctctagctaagttaatttgtgagctgggcacatggcgtgaccatctctacaaaagatacaaaagttaactggatgtggtggtgcatgcctgtggttcatagctactctggaggctgaggcgggaggatgacctgagtgcgggaggttggggttgcagtgagctgaagttgcgccactgcactccagcctgggtgacagagtgagaccttatcttaatctaaaaaataaaatttctgtgcccatttcaa

SEQ ID NO: 650301 - DNA, 320 bp, Homo sapiens
  misc_feature (7)..(7): n is a, c, g, or t
gctcggnacccatggcttcctggcaaagacggcgcagcttgtcgtcgtcatagccgaatccacggccgagtcaccaaaaacgaccccacctgatggccgaccgcatcaccgagttcatgtctgggcatccataccccgcacccgatcgacccaacgccactcaatccaggaacgcccaacgccaaatcctttttcagtgaccacaatccgcacgcttccagccttgatgaaagccgcgacgaccaccaccacaacgatgacagccacgatgcccccggtagccaggctcgtccatgctccaattgcgacgataagcgaga

SEQ ID NO: 650302 - DNA, 330 bp, Homo sapiens
ctgactacagcagaagctgccctggctgcagggactggaaatgctcgaagagcagcaactggacctccactccgctgtgttctttgcgaaacactaccgacgcctcccgtcccttgacagcctcgaagccagatggactgctactctccagtcaagctgtgaagctgctaccacccagacacccagacagacgtgcgcccagaggtcctggccaaatatggtggcctgcctaagatcggaacagtgctccttatgtaaactgagccctttgtttaaaaaacaattccaaatgtgaaactagaatgagagggaagagataacatggcatgc

SEQ ID NO: 650303 - DNA, 269 bp, Homo sapiens
aaaagggaaatattgaatggcggaccaatcatatcgtgaggaacgttgaaccctttatgtcctaaaatccttggaaccctgtggctaccaaaaatggtgaaccgaaaatgccgtccctattggggatgggagactgtaaattctctaccgcttgtaagagggttaaacagagccccaattatatggttataggcggtgcttgaattattttggtgagcttggttgctattaaactatggtgcgctcaggtcattgatactcctgcatgc

SEQ ID NO: 650304 - DNA, 433 bp, Homo sapiens
taagaggctaggggtatgagcacacgcagatcaaaaaaagaagatggactgcaggatgaggacgacagtgcaacgcaacagccccattacagcattagccccaactgagaaggaagaaggccttagcacccggctcttggctctggtgattttgttctttatcgttggtgtaattatcgggaagattgccttgtagaggtcgcaatgcacaggctggtaaattggattggtgaatccaccatatcatgggatttaaatttatcataaccatgtgtaaacacgaaattcatgtctgatgcacatctcacaggtcttgcctttaaattacccctccctgcacacacatacacagatacacacacacaaatataatgtaacgatcttttagaaagttaaaaatgtatagtaactgatcgagggggaacagaatgat

SEQ ID NO: 650305 - DNA, 443 bp, Homo sapiens
ccaggccatgtttggggctttgctctcctagcattcgtttgacgtgggtcggtaactctccggctgggttttgtttctgttcctccccgagaggccgtgtggccctcaggaaatgtgttgtgcacagttcttcctcggatacctccacgccctttggctttcaagtggagtgtttgtctggtacgcattttgtgcttttaaaaaaaccattgcaggtggcggtgtccgatatgttcctcgtcccagtttgaggtgttcattctggccctctatgtgcttaccaagtagataatgtaagagatgtgaccacatttggaaatgcttgccctccctctcttatccatcacttaggtggtcagttatgagttagagcacagggtgctgtatacgtcagtccggccttattcatgtgcaaaaaatgtgttgtgtactcttttggagtg

SEQ ID NO: 650306 - DNA, 160 bp, Homo sapiens
caagttcccctgttactggttacagagtaacaccactcccaaaaatggaccaggaccaacaaaacctaatactgcaggtccagatcaacagatttgactattgatggcttccagccacagtggagtatgtggttagtgtctatgctcaggatccaggcgg

SEQ ID NO: 650307 - DNA, 97 bp, Homo sapiens
  misc_feature (49)..(49): n is a, c, g, or t
cgattagaggatgacgtctcacccaccccagtaggccactgtcgacttntgtttccagaatatccagaaatccaaaggggctgttgctgaacagtct

SEQ ID NO: 650308 - DNA, 396 bp, Homo sapiens
ggctgttcttcctaggcaatcaggaatgtggttgaggccggcactggcgatgccagagagagagactaaaactcacctccagccataaaatggcaggcagcttcttaggagggcttctgagactcccagcccttggcagcagctgagccatgagcaacagcaatgcattccagatcagggaaccaaaatctgttaccaaaatgctaggggtttggtctaggttctgctgctcaccacccagaaagccaatcactgagacaatatcgccagggaaggaggctttaatcagatggtacagccaaggagagctagagatgaaatctcaaatccatctccttgaccgactaaaattgagtttatgtagtgaggaaggtggacctctcattgtctggatgc

SEQ ID NO: 650309 - DNA, 135 bp, Homo sapiens
gtatccagagaaggcgagtgaactaaagtacagcacatacgtgacagtggcggccaacacacctcgctaaatggcagtttcaactggccacattctcatcaggatagacttcttaatctggggtccaggcctgtt

SEQ ID NO: 650310 - DNA, 810 bp, Homo sapiens
ttgttccccctctgcggcgcaacactggtggtaccatgtgtcgagaacacactgtggtgtattttatcaacgagggcctctcttcctcgcgggtgattctctcgcgttggccgcccgtcgccttttattatgtctgccttgtgattcacaccccgcccgatgtccccccgccgggtggctgtgtggtagaatatgtggcccgccgccccccccttccttctcttcctcccgctgtgggggggtgaccctctcgctcggttgtgttgacccccccgctggttatttactcttcgtcttcttcgttgtgagacaacgaggtgtgtgctgcgactcgatttaatccgctcctctgtctcgcctgctgtttttattgtactagggactctctgcgtggtcgtgttcaccgccactgattttgttcctccctgggcggtgctcctcctgctcggtgtgtcaggaggagggacccccacgtcactttctcctcaggtccggggccatatggaatggtgttttttctcctcccccgcccaggaggaggagtggttagtggtgccgggcgccccttcttttgttgggcccccaccccgctttttttccccccccccgcgggggtggaccgcacaccccttcttttgtgtgggtggccgccgcacccccccccccctccctccgtctggcgaggggggggtgcccccccccccccgatttccttcgtcgtccccctcacacccccccccccccctccccgccgccccccccccccggccgccggccaaccaacgaaaggggggggggggggggaagaga

SEQ ID NO: 650311 - DNA, 1077 bp, Homo sapiens
  misc_feature (715)..(715): n is a, c, g, or t
  misc_feature (718)..(720): n is a, c, g, or t
  misc_feature (724)..(724): n is a, c, g, or t
  misc_feature (726)..(726): n is a, c, g, or t
  misc_feature (733)..(733): n is a, c, g, or t
  misc_feature (743)..(743): n is a, c, g, or t
  misc_feature (747)..(750): n is a, c, g, or t
  misc_feature (762)..(762): n is a, c, g, or t
  misc_feature (764)..(764): n is a, c, g, or t
  misc_feature (767)..(767): n is a, c, g, or t
  misc_feature (775)..(775): n is a, c, g, or t
  misc_feature (786)..(786): n is a, c, g, or t
gcccagacgcacaccgcgcatgctccgagcgcggcgcccccgacgcggcgctcggctcggctcgggcatttccgcctctttgttttaaactccggacgggctttttttctcctcctcttgggggggacccagagggagcggcgccccctcccccctccggcgcggaccccgcgtgcgccttgctcgcccgcagccccgagaccgcaggcgtcacaatgtagcagggaccccaggcgtcgtgctcagaaaatggaaaaagagccagggccggaaggagggtgcagaagcgagtccgcgtgcggagccaggaggcagcgtcgcgtgggagtgctggcctgaagcctccatgccccggcagagggacggacacgcggacgtctagcggagaagccaaagatgttgaccaggaagatcaagctgtgggacatcaacgcccacatcacctgccgcctgtgcagcgggtacctcatcgacgccaccacggtgaccgagtgtctgcacaccttctgcaggagctgcctggtgaagtacctggaggagaacaacacctgccccacctgcaggattgtgatccaccagagccaccccctgcagtacatcggtcatgacagaaccatgcaagatattgtttacaaattggtaccaggcctccaagaagcggaaatgagaaagcagagggagttctatcacaaattgggcatggaggtgccggganacnnnacgngngagaccngctcgcacancacnnnnagatcccatcgnanggngacaccangcgacgacagncaacacagaggcgcgagcgaacccgcagcagaacgacaccacgagagaacagacgggtgacaccggcatgcgccgcagccccgcacaggcggggcgaaccggagacgacacgcgggtaggaccagggaacgcgtagccgaacagcgacgcacaaaaaccacgcgcgacgggcgagcaacaccgcggaacggggacacaccagcggcatcgcgacaaagcgctgcaacccgtcaggcacggcagcgcactggcgaaggcggcaaacagtaacaacgacagcggcgaagcacg

SEQ ID NO: 650312 - DNA, 162 bp, Homo sapiens
taatgaaactcgacggacgcgtgactagagaaacgccggtacttatcctacgagaatacatactatggtcgtccacgaggactgttaatagaacagctgaatgttcaagctgatgctagtgcagaccttagacggaactgagacatatgattttgtaaactc

SEQ ID NO: 650313 - DNA, 1177 bp, Homo sapiens
  misc_feature (815)..(815): n is a, c, g, or t
  misc_feature (818)..(820): n is a, c, g, or t
  misc_feature (824)..(824): n is a, c, g, or t
  misc_feature (826)..(826): n is a, c, g, or t
  misc_feature (833)..(833): n is a, c, g, or t
  misc_feature (843)..(843): n is a, c, g, or t
  misc_feature (847)..(850): n is a, c, g, or t
  misc_feature (862)..(862): n is a, c, g, or t
  misc_feature (864)..(864): n is a, c, g, or t
  misc_feature (867)..(867): n is a, c, g, or t
  misc_feature (875)..(875): n is a, c, g, or t
  misc_feature (886)..(886): n is a, c, g, or t
gcccagacgcacaccgcgcatgctccgagcgcggcgcccccgacgcggcgctcggctcggctcgggcatttccgcctctttgttttaaactccggacgggctttttttctcctcctcttgggggggacccagagggagcggcgccccctcccccctccggcgcggaccccgcgtgcgccttgctcgcccgcagccccgagaccgcaggcgtcacaatgtagcagggaccccaggcgtcgtgctcagaaaatggaaaaagagccagggccggaaggagggtgcagaagcgagtccgcgtgcggagccaggaggcagcgtcgcgtgggagtgctggcctgaagcctccatgccccggcagagggacggacacgcggacgtctagcggaggctcccgtgtcctcagtatgcatcaggtctcccgaacctcacagccccgcagggaggaggagaaggggaggatttgactttggaagtctctgtgaccagaaagccaaagatgttgaccaggaagatcaagctgtgggacatcaacgcccacatcacctgccgcctgtgcagcgggtacctcatcgacgccaccacggtgaccgagtgtctgcacaccttctgcaggagctgcctggtgaagtacctggaggagaacaacacctgccccacctgcaggattgtgatccaccagagccaccccctgcagtacatcggtcatgacagaaccatgcaagatattgtttacaaattggtaccaggcctccaagaagcggaaatgagaaagcagagggagttctatcacaaattgggcatggaggtgccggganacnnnacgngngagaccngctcgcacancacnnnnagatcccatcgnanggngacaccangcgacgacagncaacacagaggcgcgagcgaacccgcagcagaacgacaccacgagagaacagacgggtgacaccggcatgcgccgcagccccgcacaggcggggcgaaccggagacgacacgcgggtaggaccagggaacgcgtagccgaacagcgacgcacaaaaaccacgcgcgacgggcgagcaacaccgcggaacggggacacaccagcggcatcgcgacaaagcgctgcaacccgtcaggcacggcagcgcactggcgaaggcggcaaacagtaacaacgacagcggcgaagcacg

SEQ ID NO: 650314 - DNA, 198 bp, Homo sapiens
tgaggctgaggcaggagaatgatcacttgaacccagtaggtggaggttgaagtgtgccgagatggctccactgcactccagcctgggcgacaaaaagcaaaactctttctcaaaaaccaaaacaaccaaccaaaaacccacccctgtactggcagagtgttggtaagagttagaaaagcattttgaaggtttccttgg

SEQ ID NO: 650315 - DNA, 358 bp, Homo sapiens
  misc_feature (32)..(32): n is a, c, g, or t
  misc_feature (62)..(62): n is a, c, g, or t
  misc_feature (66)..(66): n is a, c, g, or t
  misc_feature (130)..(130): n is a, c, g, or t
  misc_feature (139)..(139): n is a, c, g, or t
  misc_feature (198)..(198): n is a, c, g, or t
  misc_feature (273)..(273): n is a, c, g, or t
  misc_feature (310)..(310): n is a, c, g, or t
tgagagcgcagaggacgcagggccgctggagngcacggtaacgaagctagtgtgcggttggnaccnggctgagctttttccgggacccgtggtgctgaatggagaggacggagacgaagccgagccgcgntcctagcgngcgccgacgctcgagctgtagctgccaggcgaggatgtgtggagcgcaggcgaccgacntgtaaatgagaggtctcgggccccaggacccccggggcccgggattgagttatcgagggcagccgcgggggccanttccgaccgtgacaggccaaggcgacggcgccgcccncccgcccctttccgtgcagaagcaagcttcttccttttccgcgcccgg

SEQ ID NO: 650316 - DNA, 1197 bp, Homo sapiens
gcccagacgcacaccgcgcatgctccgagcgcggcgcccccgacgcggcgctcggctcggctcgggcatttccgcctctttgttttaaactccggacgggctttttttctcctcctcttgggggggacccagagggagcggcgccccctcccccctccggcgcggaccccgcgtgcgccttgctcgcccgcagccccgagaccgcaggcgtcacaatgtagcagggaccccaggcgtcgtgctcagaaaatggaaaaagagccagggccggaaggagggtgcagaagcgagtccgcgtgcggagccaggaggcagcgtcgcgtgggagtgctggcctgaagcctccatgccccggcagagggacggacacgcggacgtctagcggagaagccaaagatgttgaccaggaagatcaagctgtgggacatcaacgcccacatcacctgccgcctgtgcagcgggtacctcatcgacgccaccacggtgaccgagtgtctgcacacctgtacgtgccctgcccgcgccacccagggagggcgcgcccttcccagctctgtgctcttcagaaccttggcttttgtgttaccacacgcttttagctcaagcccgacaaaagcaggaaccaggaccaggggcagagacgatcttgaagataagtcagaaaagtcatttcacgctaaaggtcctgtgggtggtgtcagagcagatgaggcctcgcttaggagagcgaaacacaggagagaccccacattcctcccacggagcagcaaggccagtagccgctgtgacagtgctcactgctggcagtttccaaatctccagaggagttccttagatccttcaaaggggaaccttccagtgtgttcttcacacctgatgtgcgtcctcacacctgatgagtctgtgctttggtgttagaggactcacacctggggctggacctgagtgtttttctaagtgtggctaccgctgacgggcaggtgccatccatcaggctgaggctcggctcttatgctaacctgaggccccatggctggcggccctgctggtgtggacgaccgctgtgtgcgtctcttgatggctggggagcattttgtttaaacaggatctttaaaatgaagtgtacgcttataatacaagtgatgcttgtgtatttctcactttaggaaataaaatatttgccaatttgatagaaaa

SEQ ID NO: 650317 - DNA, 1203 bp, Homo sapiens
gcccagacgcacaccgcgcatgctccgagcgcggcgcccccgacgcggcgctcggctcggctcgggcatttccgcctctttgttttaaactccggacgggctttttttctcctcctcttgggggggacccagagggagcggcgccccctcccccctccggcgcggaccccgcgtgcgccttgctcgcccgcagccccgagaccgcaggcgtcacaatgtagcagggaccccaggcgtcgtgctcagaaaatggaaaaagagccagggccggaaggagggtgcagaagcgagtccgcgtgcggagccaggaggcagcgtcgcgtgggagtgctggcctgaagcctccatgccccggcagagggacggacacgcggacgtctagcggaggctcccgtgtcctcagtatgcatcaggtctcccgaacctcacagccccgcagggaggaggagaaggggaggatttgactttggaagtctctgtgaccagaaagccaaagatgttgaccaggaagatcaagctgtgggacatcaacgcccacatcacctgccgcctgtgcagcgggtacctcatcgacgccaccacggtgaccgagtgtctgcacacctctcaagcccgacaaaagcaggaaccaggaccaggggcagagacgatcttgaagataagtcagaaaagtcatttcacgctaaaggtcctgtgggtggtgtcagagcagatgaggcctcgcttaggagagcgaaacacaggagagaccccacattcctcccacggagcagcaaggccagtagccgctgtgacagtgctcactgctggcagtttccaaatctccagaggagttccttagatccttcaaaggggaaccttccagtgtgttcttcacacctgatgtgcgtcctcacacctgatgagtctgtgctttggtgttagaggactcacacctggggctggacctgagtgtttttctaagtgtggctaccgctgacgggcaggtgccatccatcaggctgaggctcggctcttatgctaacctgaggccccatggctggcggccctgctggtgtggacgaccgctgtgtgcgtctcttgatggctggggagcattttgtttaaacaggatctttaaaatgaagtgtacgcttataatacaagtgatgcttgtgtatttctcactttaggaaataaaatatttgccaatttgatagaaaa

SEQ ID NO: 650318 - DNA, 123 bp, Homo sapiens
gacttctcccaggcagcggtgaggtggtcatttgcatgggactcatggggcatggaactgccccagctgggcaagcagagcccatgtagttcagaggggatgggctgactttagaaaagagct

SEQ ID NO: 650319 - DNA, 734 bp, Homo sapiens
gcccagacgcacaccgcgcatgctccgagcgcggcgcccccgacgcggcgctcggctcggctcgggcatttccgcctctttgttttaaactccggacgggctttttttctcctcctcttgggggggacccagagggagcggcgccccctcccccctccggcgcggaccccgcgtgcgccttgctcgcccgcagccccgagaccgcaggcgtcacaatgtagcagggaccccaggcgtcgtgctcagaaaatggaaaaagagccagggccggaaggagggtgcagaagcgagtccgcgtgcggagccaggaggcagcgtcgcgtgggagtgctggcctgaagcctccatgccccggcagagggacggacacgcggacgtctagcggaggctcccgtgtcctcagtatgcatcaggtctcccgaacctcacagccccgcagggaggaggagaaggggaggatttgactttggaagtctctgtgaccagaaagccaaagatgttgaccaggaagatcaagctgtgggacatcaacgcccacatcacctgccgcctgtgcagcgggtacctcatcgacgccaccacggtgaccgagtgtctgcacacctctcaagcccgacaaaagcaggaaccaggaccaggggcagagacgatcttgaagtgtacgcttataatacaagtgatgcttgtgtatttctcactttaggaaataaaatatttgccaatttgatagaaaa

SEQ ID NO: 650320 - DNA, 273 bp, Homo sapiens
cggggttgacaccagctcggggttgtttgtttgtttttgagacaagatctcactgtgtcacccaggctggaatgcagtgccgcgatcatggctcactcgacctcctgtgctcaagcgatcctcccacctcagcctcccaagtagctgcaactacaggtgcatgccaccacacctggctcatccctgcattttgtttttgtagagacaaggtttcaccatgttgcaaactcctgaactcaagcaattcacccaccttgccctcccaaccccgag

SEQ ID NO: 650321 - DNA, 428 bp, Homo sapiens
tataggtgagttcccgcagtttcaacatagcatagcgacgctagatcatcaggtagacttgctaattcgttgatcaaactttgacgttctttatcaaacgttgcttgatcaaactgatcccccgtcaccaatggttcaaaaatcatatcccgtaaaaaagcaaaagcatccccaaggagatgttctgcatggtcaatataagtgggcgctggcaattgcaaatggtaacgcacatggtgtgtttggcaaaacgtaccacatctgtttggaactgcgcccatacaaatcaattgttttttgcgcaacggcttgctggtcgggatatttttgcgaactgacagcggtcaaataagacaacaatgccgtgccgaaatggtatgcgtcagtaacggggccgaaaatcgcccggaattggtagggtttaaatt

SEQ ID NO: 650322 - DNA, 147 bp, Homo sapiens
tcgcctttcgctctctccctcctgtccctgctgcttcttcgctggcgattgcaatctacagccagtcagcttgtcctccaccagattgtctcacctatctcacagccggccctgctttggttcgtgtactcttcgtgttcctcgcta

SEQ ID NO: 650323 - DNA, 623 bp, Homo sapiens
  misc_feature (394)..(394): n is a, c, g, or t
tttttttttttggtttttggtatttcgcatttgagatgctttttataataaagttatgccaaaaatacagcaacaaatacagaaaaagtattaacaaacggagaagccccagatacacgtacagtaacaatacaaaaatgtgactggtcaaacagctcaagttcacatttaacactttcaattatttttaattacactatttctgttcaaaagaatgttttccttacatacaaccatgatcagtctttagtctcaatcgtaccaaaataaagctatatataagcactctgactaggtaaagtgtgaagtaccccgtgaagtggtctggggcttgaaatgggacacatggtctcaaatggactttaagcatgccttggcttaagaaagaaaagtnatggtgatgggttaaaaaggtaatactttttgaaacaacagattgaatatggttactttcaggctttatttaagaacattgcaagagacaaacagtttttaaggaaggaacctttaattggggtttatgtaaaaacctgtggaaattgaccaaggcttatatttaaaaagggaaatttggttttgggaaaaagcgggtctttttttttttttgtgggggcccccccccc

SEQ ID NO: 650324 - DNA, 1405 bp, Homo sapiens
  misc_feature (599)..(599): n is a, c, g, or t
gatcccaggtttaactttactttggtcgtccagattccggattcactacgatcatgacgcagtctgcaccactgggcgtcgacagcttcgattcccacagagaggagtcgacccgtcagatagtaaccattgaaggtgctaaccggagggctgacaggtccgggttggcggccagccttcctagacactgtgaggcctcgccgcacacggattcagtgggccgccctggcgtcgttagtcatacccacaaattaccaagttccgggtagagtgtaaccattgctcgaattggcacactgggatgaactgtgagatgactctgcagcgattcatcatgatgcatataccgaggacactaatttcagtagacacgtagcagtgccacgcagcactttgaggcgtaggttagccatatgctgcaactcctgaactcgtgaagtctagactagtgagccttaactggggcgagacattgcacacagtgagtcccaaggtcccctcgggcacggctatcgtgtctacatatacttatcgtgacttctgcgcttgaagaacgggacttctctccacaaagttcaccgtggttgacgcccttccgnaggtgtgaccttggggactgaccctgcctggtatcacaacgactgttggcaagtacatgcgtacggcggcagccaagatgagaccgtactgcaggcacgagcgaaacacaatcgtggaagttcagcctgtccacacgagtccttacttcggtacaggtcataccgtggccgcgtcgccagatgggggcccgacctttggagtccactcttgtaaacagcatccacggcagcgaaattcccagggatacttacccagcccacggggagactggaacgcacccaaggaattctttgcactacttctcggcgcactcctttgaacgcacgacaaggccgctggccttgcattgccctattcgcctaactttgggccctggcaacctgccgtgttcagctccgctacggcgatcggttattcgccccttctagagccgttaccctcggttggcctcctcggtgcctatccccgcgtaccatcattcattccctcccgttcactcgccgggcataatttatttgaaccgcgaacacggtctcaggcgaacacacaaccttccaccccaatttcacagcggccgaacatgtcccccatagtggtcgcctgctgcgcgtagcgacagacacagtggaaacaacgcttaaccactaccttaacgacccgccccccccgcgtcagatatgccacggccatacgatgggaaccgtaactcagcgcggtcgccacccgaccctcgtctggacccagttcacgagaacactcacaacccaccgcctccttttcgtcgcgtcacgccatgccaacggcc

SEQ ID NO: 650325 - DNA, 150 bp, Homo sapiens
tgctggctccgtgcctggtgtcatggggtaaatgtcttccgggtaggaatctgactacagggggaggagcagaagaggggacacatggggggcttgctgggaaagcccctaatcttcagtcagactcttcttactgatctccaatcaccc

SEQ ID NO: 650326 - DNA, 557 bp, Homo sapiens
ggtatgaaaagcacttctgtcgggtgtcgtcgacatgatgagcaaatagagttgactcagattaaatcagagcactagtacagtgtgcactgtagagaagaaaggcactccattgtgtgtacgatggagaagagctgacttgaatcaagcaatggggaacaaaaagaacataaagtggtcagcctgagcgggcgagatggaatcacatggcttccaaagccggaaaggaggctctgaaagccacacactggtgatctccagtggtgatacccaataacaatcagcatgaatctctcagacacattgtgttgtgaggcctgtaggcggattcaaatacagaggttgatggccacagcagcttggtgaggtccagctcaatttcaaactggttggttcaccagcatgctaacaggcttaggacttgctgacatttgcctcagatactctctggaggctgcagtacgttgaagcctaaggctgctcttccaggcagctgttgtgagtgggatgtggttgggtgaacatctgtgtagacatgggtattgctaaaatcatgg

SEQ ID NO: 650327 - DNA, 427 bp, Homo sapiens
ggcgggagacgcttaatttcccaaggcttccagaaaagaatttggtgaaaaaaaggtgaggagcgagtcccggcaggcaattgggatgggcttcgggcggcggtgaagttcgggtgacccatttccccagcggtgtcgtctccaggaccacccgttggaaataccaggcgggcttcacgggtgcggctctgtcggccaatgcccggttggttctgcagggaccgggactgtcccagggcttgtgagcacgggagcgcttggttgcctgcaagggaagtgcattggcttaaaaccagaaagaccacggcctgggagccattcttcaggaagggattcccaagggttattatttttctattaattgcggttgcaacttcgtgtgcttttatttaattaggcgctgtaggtaaggggctgtaggtaaggg

SEQ ID NO: 650328 - DNA, 1507 bp, Homo sapiens
  misc_feature (417)..(417): n is a, c, g, or t
  misc_feature (471)..(471): n is a, c, g, or t
  misc_feature (834)..(834): n is a, c, g, or t
  misc_feature (1244)..(1244): n is a, c, g, or t
tggaaaaaaaacccgccagttatttttttcctcttggaaaaacaaaacaaccccaaaattgggattccgggaaataaaatacagtatgagaatagggagaaaacgggctggttggtctatgaggaactctcattttcaaatcaccatttttattatgggaaggtaacttaacgggggggggcaaacaagagggccatggctgggagtctctaactttgggagaaattgggaagatatcaaaattttggctattcaacaaacaaaacaagggggggaggaaccccttgtggtaaaacgctctaacaaacccttaattttataccttttatattttgcacccaatataacaagagattacgctagggtgtacagaaaacacccagatgagtggcgtctaaagaacccgggtgtcgccanaaccccaatagtgttagaaaagcgcttgggggtgcgccttttctttcataagantctccccataatccgcgtgtgtgcctctttataaagaaaaacccaacccaggtttcttctcataacagagaaaagtgattacactctcgcgagaaaattcaccccacaggggggttctctaattacaccccacaaattttacattccctctcccttttttacacaacaccgcacaaagagaaacatccagaaaagggggggccaatgagtaagtcttctatcgaggtcttctgcgggccccccctactcttgtgggcggacagaggcgagcgacgtggggggccccaaccagggggcgctgttggggcgaaaaagagaggtcctacaccgcttgcgtcgtgccctcatacaattctgtggaanaggagggcgacaaggcaaggtgttgggccgccaacaacccaaatgtctattgggatacatatgtcatctatcacgacgcggcccatactatcaacagaggcagcaaaagccaaaaacatatcacagatgtggcggcacacaggtactaatacaaaagggtgtatcaacaactagcggggttgtgaccacgacaacgcctttactactttcggaggagagaaatttaaaatcccacccccgttttttatagtggaactcacaaatactaagcagcgaaaacagtttaagacctccagagcagctgtcttgtgtatacaacaacagcagaaattaaggcggcgggctcaccgcacataattgtttgtcgcccccaagacgattgtggtgtctgctggacacaccttcttgtngtcctacacaaagaggagagttggtgcccccccctttgatgtgtcctaccccccaagaaggggtccccagtgatgatagacacagggggtcgtcgaagcagcccaaccgacaaacgctatatgagcccgattatataaccagacaacttgtgtgtgaagaacaaaaacagtgttcgctgtgaaacgaacaaacaggatggctgcacagcactatcgaggtctccagaacatatagactagtctgcgccgcgtgtataacaact

SEQ ID NO: 650329 - DNA, 884 bp, Homo sapiens
  misc_feature (254)..(254): n is a, c, g, or t
ggcagacactgaccttcagcgcctcggtccagcgccatggcgccctccaggaagttcttcgtgggggaaactgagatgaacgggcggaagcagagtctgggggagctcatcggcactctgaacgcggccaaggtgcggcgacaccgaggtgtttgtgctccccctatgcctatatcgatttcgccgggaagaagctagatcccaagatgtgctgtggttgcgcagaatgttacaaagtgactaatggggctttnactggggagatcagccctggcatgatcaaagactgcggacgccaacgtggttggtcctggggcactcagagagaagggcatgtctgggggagtcagatgagcgtgatgtgggcagaaaggtgcccagtgctctggaaggaggggactcggagtaatcgcctgatggggggagaagctagatgaagggaagtggcaatcactgagagggtgtgttcgagcagacaagggtcatcgagataaggtgaaggacttgtagcagtgtcgtctgcttatgagcgtgtgtgggccatgggatatgcaagactggaaacaccccaaaaggcccaggaagtaaacgagaagctcccgagaatggtgaagtcaaccggcctctgatgcggggggtcacagaggcaccgtatcattaatgagggctcgggatgggaaactgaaggaagtggcaaccagcggggggggaggctacctggggggggctccccaagccgaatggacatcatatggcaaaagggcccattcattcctacctttgcaggccggaaaagggcaaacagaaagcccgaagaggggaggccccggcacaaggctctgaattccgggggagcccccaatggacacagcgggggggcgagc

SEQ ID NO: 650330 - DNA, 962 bp, Homo sapiens
cccgccgccgccgccgacatcatgaggtgaaatcgtgtcacttgcaagccgggcagtgcgagaaccaaatcggcgccaagtttgggaggtgatcagcgatgagcacggcatcgatcccaggggcacctaccaggtgggacagacgatctgcagctggaactgctatcacctgtgtgctacaatgtatgggccaccggcgggtacagtacagtgccctcgcgtcgcgtgctcgttggatctagttggatgcccggccgtccatggacgtccgtgctgctcggtggcccttcgggcagatcttcctggccggacaacttcgttttcggtcagagtgggtggctgggaacaactgtgccagggtgcgctacacagaaggcgcaggagctggtgtgacttcgtgtgctaggcatgtttgtcgaagacaaggggagcgctgacgcaccgctcgttgactgcctgacaggcgtttccatggtgatcgccactccctggagttgatcgtggagctggagtcttgggattgggtaaccacgtcacatcatcgaagcaacgatccgggaaggaagtacccaaaacagggatcagtgaagcacgtttaagatgttgtattgccttatgacccaaaagatgtcattaaaacaattggtggagcccttactaagcccaccctactcagtccacctggctcgtaagaaacaccaggacgagagctactgcattgctagaccaaagcttctctagacattttgtcagaacctaaaagctgagcagcccacctatggtgacatgaacacctggggtctgctccatgaatgggtcaccacctgcctggcgttccaagccatcaaatgcggactggccactcgctgtaatgactgatacccggttagttaaagcacgttccatgacacggggctgtaccacaacggcaatactcgaattgtacaaacaggtgtgcacct

SEQ ID NO: 650331 - DNA, 526 bp, Homo sapiens
  misc_feature (49)..(49): n is a, c, g, or t
  misc_feature (84)..(84): n is a, c, g, or t
  misc_feature (92)..(99): n is a, c, g, or t
  misc_feature (104)..(104): n is a, c, g, or t
  misc_feature (108)..(108): n is a, c, g, or t
  misc_feature (156)..(156): n is a, c, g, or t
  misc_feature (175)..(175): n is a, c, g, or t
  misc_feature (177)..(177): n is a, c, g, or t
  misc_feature (189)..(189): n is a, c, g, or t
  misc_feature (219)..(219): n is a, c, g, or t
  misc_feature (224)..(225): n is a, c, g, or t
  misc_feature (255)..(255): n is a, c, g, or t
  misc_feature (268)..(268): n is a, c, g, or t
  misc_feature (278)..(278): n is a, c, g, or t
  misc_feature (294)..(294): n is a, c, g, or t
  misc_feature (303)..(303): n is a, c, g, or t
  misc_feature (305)..(305): n is a, c, g, or t
  misc_feature (316)..(316): n is a, c, g, or t
  misc_feature (319)..(319): n is a, c, g, or t
  misc_feature (337)..(339): n is a, c, g, or t
  misc_feature (354)..(354): n is a, c, g, or t
  misc_feature (356)..(356): n is a, c, g, or t
  misc_feature (362)..(362): n is a, c, g, or t
  misc_feature (368)..(368): n is a, c, g, or t
  misc_feature (370)..(370): n is a, c, g, or t
  misc_feature (379)..(379): n is a, c, g, or t
  misc_feature (389)..(389): n is a, c, g, or t
  misc_feature (396)..(396): n is a, c, g, or t
  misc_feature (398)..(398): n is a, c, g, or t
  misc_feature (403)..(403): n is a, c, g, or t
  misc_feature (405)..(405): n is a, c, g, or t
  misc_feature (417)..(417): n is a, c, g, or t
  misc_feature (419)..(419): n is a, c, g, or t
  misc_feature (453)..(453): n is a, c, g, or t
  misc_feature (509)..(509): n is a, c, g, or t
aaaaccttgagcacacagttatgaccaggacagactcatctctataggnaaatagctgctggcaaactggcattacctggtttnttgggatnnnnnnnnaagtntgtngcctctcggcctggttagcaagaagcattcagggtaggcctaggttantcgtgttatttcttccctntnctgagcagaganttccagaagcaccataaacggagccagatnaaagnnccccaacacctccccccgccaacctttganagaatataggggnatcttcagcntggacacgcatgcatntcccctctnanaccctcagcanttnttccattcccatcaagannnccctcacggtccctntnaaactntgtcantncccctaganacccctcctnttttttncnctctntnctgtgccctctntnttcagcccctgttggttctaggttgagatgcgtncccacctgattaggtccaaatctgggctcttcgttagcactggggcctggcctctnccccctccaggacaggg

SEQ ID NO: 650332 - DNA, 180 bp, Homo sapiens
gggcacagtgggggttggacccggccccccaatttttttgcctgttgcctgtgcccttaaagaacaaaattgatttttgcccctttccctgtgtgaggttggccccgctttttgccccaggcccctggtggggggtttccccccccccccctcgttttgaataaagcatttgggccccca

SEQ ID NO: 650333 - DNA, 980 bp, Homo sapiens
  misc_feature (179)..(179): n is a, c, g, or t
  misc_feature (213)..(213): n is a, c, g, or t
  misc_feature (258)..(258): n is a, c, g, or t
aggaggccagcagccacagacaaggccttgtccagaggaagccaggcatgtagcaccaccagcctggtgtgctgcattctcgcgccccaaggtggggagtagggttatttagccctaggagaggagagaaagttggttttagcttaagacaatcaggaccattcaaggattttgaccanatggggttcccagtaggagaatttggagccaccnagcggggacccttttgagacctcactgttggtgcctgtagctctngtgtcccagaggtgttgttttgagcattcttacacccccagcctcccatgggctcatccccgcagagccccctggtaggctccctggagtgcttgcccggggtgtggtctcttccagaagatgcagcctttgttctttcttccccgtcttcaatggccatatcctctcagacattctccctgcccctgttcaggctcagtatggtttggtggcccagaacttttgagtgcgcactttgttggctgatcacaggttttggtctggctgttgacttgattacactgggctgggggtgccgcctccttccagctgggcctgccctggaatctttgcctagtagagatgagtgggcctgatcctgtgggctgtagaagtggtacaggggccctggtgggactcggggtgcagtcaaaaatgctgtgctggggactgtgttcaggtgggagctctggtctcacccactgcctgtttctctctctccatctggggatgtttcctgagcagttcaagaggccgactcactcgccagtgtgcagctgggagccacgcgcccaacagcaccagcttcagccaagagaaccaaggcggcagctacagcagggggccagggtggcgccgctgaaccatggcctatctcctgtggcctctgcctctggtgggaaatagcgcatacaggatattctggagcggtggttaaagaagagagtcacgtcaccataaac

SEQ ID NO: 650334 - DNA, 947 bp, Homo sapiens
aaacactgtgatagttaattattataagtccacactactctcctacgacactttcgatataccgtgacatttcgatacacttttcatacacaacgtgtctacttctatacgtttgccacaaaagccttccatccgacacaattatctccttcttataagccttttaacccattgtagattcgccctaccacgccaggacattcgacacaattctaaggtctgcctaaaacctggtatatattttccccacgcccctggacaattccgaacttacgaggccaccccaaactcttaaacctccgcccttataaacgtaccataattcgtgggtaacccctcatgcccccacttttcagacatgttccccttttgtaagaagctggcccccccccttttttggtcaaaaacccccccgtgtgtccacgcctcttgtaacaacccgccgacacattgccccaataatgttctatttaacaggaacaccatcttcgaggaacaatattgtaatggatgtcttggaatctacgtaaaacacttcggggatttctttcacccccccttttacattgtctctcaaagaattctcattgcccattattagcggtaaaacaatttctcaatcagttcagtcttcctcttaagtcttaaccgtgcgcaacatcacccttctgaatggacaccgggtagttaaaacccctgcggcgaacccaccaactgttgctcaaaacgccgagattatgtaatcatgtcacttgtgtgcacactaacacgagccccctgtaccttttattgttcaccccccgcagcatgtaccccactctctgtagtgcaccacgaaacacaacaatcttgggtattattctgaccccttactcttaccccactgcaccctgttcaccggattttcgactattcttttcaaaaagccctaaaaccccaaaaagaca

SEQ ID NO: 650335 - DNA, 944 bp, Homo sapiens
  misc_feature (179)..(179): n is a, c, g, or t
  misc_feature (213)..(213): n is a, c, g, or t
  misc_feature (258)..(258): n is a, c, g, or t
  misc_feature (908)..(908): n is a, c, g, or t
  misc_feature (913)..(915): n is a, c, g, or t
  misc_feature (917)..(917): n is a, c, g, or t
aggaggccagcagccacagacaaggccttgtccagaggaagccaggcatgtagcaccaccagcctggtgtgctgcattctcgcgccccaaggtggggagtagggttatttagccctaggagaggagagaaagttggttttagcttaagacaatcaggaccattcaaggattttgaccanatggggttcccagtaggagaatttggagccaccnagcggggacccttttgagacctcactgttggtgcctgtagctctngtgtcccagaggtgttgttttgagcattcttacacccccagcctcccatgggctcatccccgcagagccccctggtaggctccctggagtgcttgcccggggtgtggtctcttccagaagatgcagcctttgttctttcttccccgtcttcaatggccatatcctctcagacattctccctgcccctgttcaggctcagtatggtttggtggcccagaacttttgagtgcgcactttgttggctgatcacaggttttggtctggctgttgacttgattacactgggctgggggtgccgcctccttccagctgggcctgccctggaatctttgcctagtagagatgagtgggcctgatcctgtgggctgtagaagtggtacaggggccctggtgggactcggggtgcagtcaaaaatgctgtgctggggactgtgttcaggtgggagctctggtctcacccactgcctgtttctctctctccatctggggatgtttcctgagcagttcaagaggccgactcactcgccagtgtgcagctgggagccacgcgcccaacagcaccagcttcagccaagagaaccaaggcggcagctacagcagggggccagggtggcgccgctaggaaggagaagaagggaaagcacaaaggncagcnnncnttctctacagacccatgcccgggtacc

SEQ ID NO: 650336 - DNA, 128 bp, Homo sapiens
  misc_feature (49)..(49): n is a, c, g, or t
tgatcagctcggtacctatagccgcatccaggatttttgtggaagaatnattatgatgagtttgaagaaaagagtgcttggctataaaacactggccctggtggtagaataccccatggtgtgcaggt

SEQ ID NO: 650337 - DNA, 816 bp, Homo sapiens
  misc_feature (49)..(49): n is a, c, g, or t
  misc_feature (94)..(94): n is a, c, g, or t
  misc_feature (112)..(112): n is a, c, g, or t
  misc_feature (156)..(157): n is a, c, g, or t
  misc_feature (162)..(163): n is a, c, g, or t
  misc_feature (172)..(172): n is a, c, g, or t
  misc_feature (176)..(176): n is a, c, g, or t
  misc_feature (198)..(198): n is a, c, g, or t
  misc_feature (200)..(201): n is a, c, g, or t
  misc_feature (203)..(203): n is a, c, g, or t
  misc_feature (205)..(207): n is a, c, g, or t
  misc_feature (236)..(236): n is a, c, g, or t
  misc_feature (242)..(242): n is a, c, g, or t
  misc_feature (250)..(250): n is a, c, g, or t
  misc_feature (282)..(282): n is a, c, g, or t
  misc_feature (288)..(288): n is a, c, g, or t
  misc_feature (300)..(301): n is a, c, g, or t
  misc_feature (309)..(309): n is a, c, g, or t
  misc_feature (324)..(324): n is a, c, g, or t
  misc_feature (350)..(350): n is a, c, g, or t
  misc_feature (358)..(358): n is a, c, g, or t
  misc_feature (372)..(373): n is a, c, g, or t
  misc_feature (375)..(375): n is a, c, g, or t
  misc_feature (390)..(390): n is a, c, g, or t
  misc_feature (405)..(405): n is a, c, g, or t
  misc_feature (436)..(436): n is a, c, g, or t
  misc_feature (477)..(477): n is a, c, g, or t
  misc_feature (489)..(489): n is a, c, g, or t
  misc_feature (507)..(507): n is a, c, g, or t
  misc_feature (536)..(536): n is a, c, g, or t
  misc_feature (649)..(649): n is a, c, g, or t
  misc_feature (733)..(733): n is a, c, g, or t
  misc_feature (808)..(808): n is a, c, g, or t
ctgtgtgaacatgaaggactgaaaagcgtgggaatccacactgattgtnatcctacagattgtcatgagctgcacgtgtgccaatcagaaaggnatgggagtctcagaagancagcgtggcttacagacccttggctttagtgaattcaggaaagnnggaannatagtctcncctngtagtaaaactcaagacaaaanannancnnnttggacagccttctacattgtccaatgcngggcanggggccgngggggggccttttgttcggggtggcgccattnctcggntggttgtgtttnnggcttttnccttcctgttgggtntgttgttggggctttgggtggggctngtgctgcnttggtgggggttgnngngctggctgggcgcantgtgttgctaaactntctacaaagtgtggcagcatcaacccggganatggcacatttgaaccaggatcgccctgacatgggcttgcntttttgtatgtnttttccccaccccctganctagctggtatcttgtggatgtttctgtnacagtggtaaaagtaaataaattgcatttaaggggtaagcaggtgtttaaaaacaaaacaaaacaaaacaaaatgaaagaatgtggtcgcagctaaggaggttttcacatgtngtttaactccagtaaagtctgatccagcatctgatgcatactaaggttttcttctttggcatgagcaactttctcttctaagtnatcaatgcttttctccaatttagttactgacctctccgcaaactcagcccgagtatcagcctccttcagcatgtnggaaaggg

SEQ ID NO: 650338 - DNA, 126 bp, Homo sapiens
agcgggtctgggtcaggacccacatagaggaggtagataacgcgacttaccaagattgctgtaatgttttggagctacaagacttggcgttatcctagtatttacagcttggcacttactccgagt

SEQ ID NO: 650339 - DNA, 220 bp, Homo sapiens
cttacgccctcatacatcaaacattcatctctcagaccaaatcatttcagttccagaaagaaggccatattcacaaactcattacaagcctgatcatcttaatatattgtacggaactgtcattgtagctgaaatggcattttttctctcccctgatgttcttgcaaatggattcgtttggaggtagaataagaagtttgggtgacggaatataaacaca

SEQ ID NO: 650340 - DNA, 279 bp, Homo sapiens
ttttttaaaaaaggtttttttttttgggccccccgccaatcatgggggggagcccatgggacaacgggggacctttggtagtttttcaaaatgccccccttttacccgggtccaaaagaaacccaatgggccgggggtggtttttgccccccggttttttctccccccaggggaaaaggtttggggaaacccgccttttctgtttttttaaaaatacagctttcccccggccagtttaccaaggaagcccgggcccaaaaaagggttttccccctttta

SEQ ID NO: 650341 - DNA, 492 bp, Homo sapiens
acattgttcccatcctcagagaagtttcagtttgtacaaaagaaatacacacaattgcctattatttatattttagcacaagggaaaataatctcatttttaaaaattcttgacacagggaaatagatggaaaataaattttgaaaacttatttttaaaccatgtaggagtacttaatttgcagtgatcaatgactcaaagctcagcatgtcttaaatattccatattgctaagcagctgataatacaaatccatccttcattccgctgcttttctcttgatgtatctagcataattggtgttttcctatgtgtgtatctgaattgcatatttcacagttactgtagaaacctattactccttggcatttagcatggatgataatgttgctccttcagtaattttagcctagaccaaacatttttgaaatggtgttgtacattagggccatcttgcttatagattaataaaatcactaacctttacactaaa

SEQ ID NO: 650342 - DNA, 254 bp, Homo sapiens
  misc_feature (77)..(77): n is a, c, g, or t
  misc_feature (166)..(166): n is a, c, g, or t
ctccgtcgggggtatgtttctgtttgttacgttcaggactgagacatcttgtgtaactgtacccctggggcgtctgnacccggggtgaggcctcctgcctgcctggtgccctgtcccagccccaggtcttgtgcagggcacctgcgtggctgacagccaggctgtntctccagccggggctgccagcgcatctagccagcccagccctgtgaaggaatggagctgacttgcgtgcaggggacctgatttatagg

SEQ ID NO: 650343 - DNA, 102 bp, Homo sapiens
acgtaccatggcttcgtactcacacaggttcaaggaggtgccatcatctagtgggtaagctagagctcacccagtgtactgctttgtaaatagtcaaagact

SEQ ID NO: 650344 - DNA, 229 bp, Homo sapiens
ggtttttaaagggggaaaaaaaaaaaaaaaaggaaccctttggctttcccggggccctttccagacattcccctcccagattttagggtttggattcccgggttggggttttcccatgtttatggtaaccgaactgggcccccccccttaagaagaaaggaattattattcctcttggtgggcccccccggcgccttttatttttctttttttggggggatttttttta

SEQ ID NO: 650345 - DNA, 413 bp, Homo sapiens
tcgtgccgaattcggcacgagcctggccggggaatttaaataaaataaaataaaataataaaagaagagaaggaaggagagaaagaaggaaggaaataggtttacatgtcttaagactggatatttcagtggtagaagaagagggccaatgatacggagggatgttaaccaattctctacacttaataaatttaaaattaatattctgacttttaaaggcaaccctttggtcctccaaaagattaaccataattcataatgctagatgagcatcttggagcaagtacttctctttcactctcataacattcaacatactccggcctggacaacattaaggtgaccctgtttcttattaaaagcaagagggtaggggaatttttttaattttatttatttatttatttatttat

SEQ ID NO: 650346 - DNA, 523 bp, Homo sapiens
gccggtaccgacggtgtctggctgactctagaatctacttctaccaaccggatagatgtgattttctgagatcctgagagtttcctctcctaacatctcaggcagaaaactccagcaggaagtagaatcctggtgtttaatgatttcttctctgtcttactcattctgacagtaaagcaggtggaaataaaaatatgcattattggctgagtcgagtggctcacacctgtaatcccagcactttgggaggccgaggtgggcagatcacttgaggtcaggagttcaagaccagcctggacaacatgatgaaatcccatctctatcaaaaaaaagaaaaaaaaaaaaaatttagctgggcttggtggctcaccattgtagtcctagctactcagtttgagccaaggaggcggaggtggcagtgagccaagatcatgccactgcactccagcacaggtgacagggtgagactctgtctcaaaaaacccaacaaaaaaaagaatttctaacagaacaccgtcgaggg

SEQ ID NO: 650347 - DNA, 113 bp, Homo sapiens
  misc_feature (42)..(42): n is a, c, g, or t
  misc_feature (73)..(73): n is a, c, g, or t
  misc_feature (87)..(87): n is a, c, g, or t
ttcgaccgatcggaagtgggggcgggacggcagcgagggtgngggctcagatcgccaggcagccgtgggtctncagggtccggtcgngacccttcccttcccgggcgggattt

SEQ ID NO: 650348 - DNA, 268 bp, Homo sapiens
ccacgccggggcccgcgaaggcggccactttcatgtggctgtcgtgtcggatcgctttaccggtttgcaaagattggcccgtcaccgcctcgtttatcattgcctgtccgacctgatgcagcgcggcatccacgcgctggccatcgaagcccgcgccccgggtgaaccctgagacaggtcgagcatgattgaaccgcgcgcccagcaaagggcgcgatttttttagcctgactcacaccaccccatgaagaagcttgcgctcgccgcc

SEQ ID NO: 650349 - DNA, 187 bp, Homo sapiens
  misc_feature (1)..(3): n is a, c, g, or t
nnntcagcgatgactatcgagcataagcctggaggcaaagatggagagatacgacgatagaactgatggatcgataatgggacgaggaggcaccccggacaatggcatcctgagcatccatcggatacccaaatcctgcttgcagccggaggttgaagcccggatagagcgagccccaggccttgca

SEQ ID NO: 650350 - DNA, 766 bp, Homo sapiens
  misc_feature (31)..(31): n is a, c, g, or t
  misc_feature (63)..(63): n is a, c, g, or t
  misc_feature (72)..(72): n is a, c, g, or t
  misc_feature (132)..(132): n is a, c, g, or t
  misc_feature (135)..(135): n is a, c, g, or t
  misc_feature (137)..(137): n is a, c, g, or t
  misc_feature (141)..(141): n is a, c, g, or t
  misc_feature (158)..(158): n is a, c, g, or t
  misc_feature (164)..(164): n is a, c, g, or t
  misc_feature (169)..(169): n is a, c, g, or t
  misc_feature (189)..(189): n is a, c, g, or t
  misc_feature (205)..(205): n is a, c, g, or t
  misc_feature (214)..(214): n is a, c, g, or t
  misc_feature (233)..(234): n is a, c, g, or t
  misc_feature (248)..(248): n is a, c, g, or t
  misc_feature (283)..(283): n is a, c, g, or t
  misc_feature (398)..(398): n is a, c, g, or t
  misc_feature (757)..(757): n is a, c, g, or t
ctttttgagttattctctcactcccccggcnctctctgccggtttttgtttagccaggctctngtctgggtntttcgtggtcactgcttttcgactgtttggcgcaattcctctttttctcacctcttgatncgnantttnctcggttctcatgtccnactgcnatatngtgcccggttcagtgtggcngtcttctggtttcaanatgtggttntacttgggctttgaaaaannctccttacctgctnaagatctaggggcaaaggtcaaagcgactgttganagtcattgcacacatcttgggcttcaaaacacacacgtgggaccgcggtgagtgctctcccttctgtgtctccagggtgctaagccactatctggggccctggggccccagggcngccctcaggcctccacaggccctgggtgcctccgcgcgtctgagaagagcccggactctacccaggcatccagagacttcctgagcctgacctggaggcattaaggagcctgccagtcactgggcgcttccctgtgaggtctcattcatgggatctgagcacacggaaaccaacgctcacccctcataacccagaggacaaggggagttgcagcgtgtcttgcctagttttagaatgtatttgatttcaaaatcttttgtggatcttctattaacagtaaatgaacgcggtattcctgctgtaggttactctataataaacgaaaggaactagaagggctgaggtggcctgagtgagtntgagtttca

SEQ ID NO: 650351 - DNA, 176 bp, Homo sapiens
cagatgggggtaacattagactagcgcccccaggatgtccagacatgaacatgcgtgcctgcagggaacggtatgggtatgcattctgatgttcgcagagctagctgtgggctttgctgaagctcggaagctcccctgatgacctgatctctgctattgaaacttctaaaactagg

SEQ ID NO: 650352 - DNA, 392 bp, Homo sapiens
ctcaagggatatttaaagggttcggtggccaagtttagagttcacttaagattctatctgggtcaaacagcgtcccacgtcgcgataggttcagcccctcttcatataattcttccaggtatttgttccacattggcctgcaaacgtacagctgttcctaggtagctcctggcctccgggtgtcaatgcttcggctatcctcctaagttagttaatcagatcctctactctatgtctacagaggttcctctcgcggtgtccaatgcttgcacaaacaccgatattcccctggaattatcccaatgcgcatgtcactctccctgtaactgatccgagatctggctagatagctcatataaccctgtgcaattgtactcctcagtatatttgcg

SEQ ID NO: 650353 - DNA, 144 bp, Homo sapiens
  misc_feature (60)..(60): n is a, c, g, or t
taccgtatctctaacattacgagtcacaactaaaaaaaaaaaccccataccacactgaantgtaaattttaattataaaacaagaatatgaacaaaacattttaaaataatctcaattattgggcaactcatcacatcatggca

SEQ ID NO: 650354 - DNA, 372 bp, Homo sapiens
  misc_feature (197)..(197): n is a, c, g, or t
ttacccttaccatttactcccaaaaagctttttatttttatttttttgaagggagtttttcgggggggactctggaacaagatttggctttcaaatcattgtggggccccccaccaaaaacccttttatttttgggggtcggggcctttttagtagggcaagggggggttaaaaccccaaaatctttcccccttccngggggggtttgcccccaggtttttaattccccccccttactttaacccctgacagggcggtccccagtcagggccgggcccggggtggggccctttggggagatgctgccccccccccaaaggggtgagccccgcttcccgggcccggttcccttggaaaaaaaagatttttcta

SEQ ID NO: 650355 - DNA, 175 bp, Homo sapiens
ctacgaggctcccccctgtcaggggtggctgttaattcttcagtccatggcattcgcagtgcccagtgatggccttactctgcactatagccatttgcccaacttaagtttagcacttacacgtttcagtaatagctgaacctgttcaacatgttaataaaggtttcgtggcatg

SEQ ID NO: 650356 - DNA, 588 bp, Homo sapiens
gctatgggtgcagaaatatggtttaagcacggtggctcatgatcatgttcccgaaagaactgccgttgccacatccaggacggatacaagctaagcactgaaaacccacaagatggagactcagtttagagtcatggtctatctagtgagcgccgcaagttcacctatgttccaactaccatacgggcgcgttggaacatggatgaggagcagatggcgttcttcgaatcatggtttgcccggacacttgtcgacggcactctgtggtttgaggcaacgcttaaaacgcctgttggcttcaaggattagatctgcaaaatcaaagggatgtatgacggaccagagcttgtccaggtgaaccgatacgagatgtcgggcacgtttcttctgcgcgataggcctttgatagagccaggatgggaaaactttcctgagctctggttcggcaagaacatcatcgacttagcaatcaacagggattggccagaagcatgagcccactcgacgtttgctatgcatcgccaggcagcgaagtgctcatcccggcatttgagctgtttagcgattcctggagaacgaccaccgagg

SEQ ID NO: 650357 - DNA, 518 bp, Homo sapiens
attctagagtatcccctcttggttctataccctgaaaactgcatcactttcatggtggagcattgttttgtttccatactgcatttcgtgcttggcgtagctgtgcgattttaccagtgtggtactgcttgtgcagggtctctttagtcagatcttccacgtccgagtcttccatccagttgacgctgtaccagtcccccaggtacgtggacctcttctcatcatagtaacaggcgtaggacgactctctggggttggcagcagtagttgcatagacattgatgttatccggcaggtggttcatcatggacccagactcacaggcttcaatgtagaacaccatctttcggtacattttgtgtttgtacatgtaatggatggtctcattcaggtcctttacatgaagatcttcattgggaaaaaccagtattccagtagatccatggtcagtgaagtaaatgaacacgtgatcctgggggccactcttcaggactatgccggatcctatgcccttcact

SEQ ID NO: 650358 - DNA, 573 bp, Homo sapiens
  misc_feature (525)..(525): n is a, c, g, or t
tccacaaatagcccttttaattggcccctatttgaagtctgaacttataaacaaatcctgggccggggggtctcatatccatcagctcgtccaatttatagccccccgtttgctcgtccccagggggttttcccagagaactacgtggcgcttcaccattagaagcgcctccattagacgcttctcccaattctcaaacttgggcgcttctctcagcatttttatactttctctaacagaaagactctcatgggaaagggataaactaagattgggaacgcccttttctctatgtgttctttttccccaagtgggtctggtctccgggatactccactattcttatgtgagaccccactctttctctgtatcacaagtgtctcattgtgtgggtctgtgacaccctctctctgcgggggtctccaaagtgatttctcacactctcatctcttctcttctccgagatatgtgtggggagcccccgtgtgtgtgggtgcttagagcgcaaataaaagagggggtccntctccggaatctcgagatgtgggtggcggtttttaaggtaaaaacccc

SEQ ID NO: 650359 - DNA, 942 bp, Homo sapiens
ttcctgcatctaaccggtccctcgccagcacccggggtgactgccctgtcccaccaggagagagggcgaagggatgagcctgggtttggactctaaaatctcagcattgccccatgtgtcctagacttcccaagggcaagagtgaagaccctgccattccacatcccctatcctctgaccaggtgcttgggtctctgaaagcaaacaggaaaactagagaccaaaaaggggacacaaggagaagggctgagccacaccttcttgctcttacccttggtgcctaaatgctgtgatgatgcacctgcagggtgtgtgctagcccttcctgtgccccgttccttgtgccagaggtcaaaggtgggggcaggctgggacctgcatttcatggggcaggaacagagggtgaaagggacagatagattgcaggtccagttctgcatctcttggctcgagggtggcagaagttcacgcctgtgcacgtcccgttataaagtccctcactaccaagggctgtacatgtggcttggggttctactgccgtccatctcaagccattgtgagcatgtgaaacctcctaaacgtatagaaggggctaggggatccctctttccctattgcttcactctttaatacccaagagaagttgggccaagaggggagatgtgtaggttaatcccgggctgtcagaaggaagctctgcatatttattagctttgttaaccgtgggaatgggccctttccaagggtctggtgggggccccggccgaaccccatttttccaaccattggtttggcaaaaaaccctggcgccgttagaggggggggagcccggtgaaacaccacaggaaatgatttagaagcgggcacaaaaacacaaaagaacacttctgtccctctctttttttttcctcattcttactatattccgcttccgggggggga

SEQ ID NO: 650360 - DNA, 1815 bp, Homo sapiens
agcgggatcgcttcgggtgctcgactcctgttgcgcatgctcagcgcgctgcccggctggggacccgcgcacctgcagcgcccgctgctcggccctgcatcctgcctgggcatcctgcgcccggccatgacggcgcactcattcgccctcccggtcatcatcttcaccacgttctggggcctcgtcggcatcgccgggccctggttcgtgccgaagggacccaaccgcggagtgatcatcaccatgctggtcgccaccgccgtctgctgttacctcttctggcatcatcgccactcctggtcgcagctgaagcccctgttcgtggccccagcttgtaagaatgagatcatcgtgtgtactgtgctgctatccgtgtgggagtgacctcgtcagtcaccctaatcgcagagtgtcccacgcgtcgtcgagaactgaacctgatgagacatccaacatgatcacacatgaacaaagacacactatcgatcacggaaccacatcacacacacaaaacacctcccccacacaactatgtctggtcaccagctccctcctgctggcacccagagacccggacccgcagggcctgcctggttcctggaagtcttcccagtcttcccagccagcccgggccctggggagccctgggcacagcagcggccgaggggatgtcctgctccaatacccgcactgctctggagtttgccctctttcccaaggagatgctgctggggagctggtatgggtggggtctttccctttacagacggggcagatgccaggactcagcccatcctgaggaggacacgtgtcctcatggagagggtgctccggcccaggcgggggagtcggtgcccagtcagcagctctgccaccatcctgctgggaactgggggggcctctattgggttataggcaaggccttttctctggcatggaattgttaattttctgacacgtctagatgtgaaatttctgaaaatgttgaagcagagaaacattcacacacaaaaagcaacatagtcatgtgggtccagatggcctcagtcctagatgttggcaccctttgctgtgtctcctcagagtatcctgttccgcctcctgccacctggacctccctcagtggatgtcttccctcccccgaccccagcctgtcagtccgagcacagtgcaggtttggctctgacttgggcctttggctgcagtgggggtggatttcagagcctctcatggcagcatctaagtgaccagagctgggatgagagaggggaaggggcaatgtgagtggcgctatgggacgggccagccctgctcctgagccagccccgccctctgccccctggccctgggctctgtgctagggatggtgaagaatgggggcgtgccagcctggcaggagtgggaagcaacacgcaggggtcccggacctctccagccttgccctcacgcttatccgagctcccagtgtggttagcacagagctcacccaccttgcctggctcccagctggggcctgtcctcactggtgctccaggggaagaaacgacagcctcacttctgtatggactgctgatgtggcctgccatcctgttcagcgggcattgtctttggagcagcaggagactaggatgcctctcactcacatgccagttcctggctggccagctgctcagggctcaggctggggcctcccattgacatcctccccctacactccctctctgagcctccgtcgcccctcctgttgggtaagggtgttgagtgtgacttgtgctgaaaacctggttcatatataataaataatggtgatgaaaa

SEQ ID NO: 650361 - DNA, 709 bp, Homo sapiens
gcggccgctccaacatcagaatgtgcccagtcagcagctctgccaccatcctgctgggaactggggagtgacccgccgcccccgacccaggtgcccagctctcggaatgactgtggctccactgtccctgacaaccccttcgtccggaccctcccccacacaactatgtctggtcaccagctccctcctgctggcacccagagacccggacccgcagggcctgcctggttcctggaagtcttcccagtcttcccagccagcccgggccctggggagccctgggcacagcagcggccgaggggatgtcctgctccaatacccgcactgctctggagtttgccctctttcccaaggagatgctgctggggagctggtatgggtggggtctttccctttacagacggggcctgtcctcactggtgctccaggggaagaaacgacagcctcacttctgtatggactgctgatgtggcctgccatcctgttcagcgggcattgtctttggagcagcaggagactaggatgcctctcactcacatgccagttcctggctggccagctgctcagggctcaggctggggcctcccattgacatcctccccctacactccctctctgagcctccgtcgcccctcctgttgggtaagggtgttgagtgtgacttgtgctgaaaacctggttcatatataataaataatggtgatgaaaa

SEQ ID NO: 650362 - DNA, 346 bp, Homo sapiens
tctggagaacagaatctggcggtggtcacccaagctagagtgcaggggcgccatctcggctcactcccgggttcaagcgattctccggcctcagctggggaaatagagatggcagtgagccaagatggtgccacggcactccagccggactaattttggtattttaagtaggcacagggttttcaccatgtgggccaggccggtcgtggaactccgtgacttcgagtgatccacgtgcctcggcctcccaaaatgcggggataaaagacgtgagccaccatgccgggccccacggttacttttattactacctagaactacactggttgaaatggtcgccaatccg

SEQ ID NO: 650363 - DNA, 1016 bp, Homo sapiens
cgtgcttgcgcgtgggactgggcgatgtgtccgttggcctttgttcgtgggtgatgcggggcgccgtaggtccttggttccaatagtgtatcgggtgaagcttttgcgtgtaacctatctctgtagtgtgtgatccgagggtgttttctgtccgggccctttcggggttccttgcccgcgctccagtggattgcgccgatacgcgagctgagctgtctgctgtttcaggttccaggagtgagtaaggcttgagtaggtcatactgggtaacagtcctagtgtcaaagtaggatgtgggccagcggctattactttggttttgctttgacgcgtaggactttccaatagggtgtatgaatattagactatctacagatgcgtagtgttgttcgctgctctgtggcatcgcataaggctgaacctgatgcatggtgtggaacctggataatggatttggcttataagtctagttacgtacctccgaacacagagtctagagtgggtagctaattattattgtgctggttaatagccctatgctggaaggcaaagtacgaagctgagactctaacttcaggactacatcatgctacccgctcaggccttgcctatgttccgtgagcccgcgcctaactggagtacaaggaatactagctggatgataggtacatgtactggtatcccctgatagtcgcataaacctgaacctcctgtagcaggcccaggtcgtggtggccgagattggaacccacgggggcactctctcttcctatattgtgatagaacattgcattatggatcaagactgatgacgagtaaatcctcagggaagccattagtgcgtgcatgcacatagcagacagaagacagcccatattgggtttctccagcatattccaagaactcagccctaaaaccatgtttgccacaagttgaatctgatagatgaggaagcagagaatgagccagaatggaaaaaaacgtaaaaatttgaagagaatctattcttgaagaga

SEQ ID NO: 650364 - DNA, 174 bp, Homo sapiens
caccgagggtccagatgttcaactgcgggcagataaaggtggagaagtttatttatgagaacacctgatgttttctctgacaggtccatggatcacttccagaagttctttcaacagtgggggggagctgagcacacatggtccgggatactcataacaggaagagcaacggga

SEQ ID NO: 650365 - DNA, 337 bp, Homo sapiens
tcagctcgtcagggatcgctatctgtggttcagttttttgggttcatatgattttagaatagattttcctaattctgtgaagaatatcattggtagtttgatagaaatagcattgaatctgtaaattgctttgggcagtacggccattttaacaacactgattcttcttatccatgatcatggaatgtttttctgtttgtatcatctcagatttatttcagcaatgttttgtaattctcactgtagagctctttcgcttccttggttagctgtattcctaggtattttattctttaggtggctactgtaaatgagattctgtgcagaggcattttga

SEQ ID NO: 650366 - DNA, 273 bp, Homo sapiens
cccgcgggagtaaaaaaaaaagggggtgggaggaaaatgacgagatataaatagagacaataggggataagtagaatggaaagatttttttaaaaagaaaggccttacatatttataactgaatccagacaaccaacgtgttcataacctctctctctctctctctctctctctctctctctctctctctctctctctctctctctctctctctctctctctctctctctctctctctctctctctctctctctctctctctctctctctctc

SEQ ID NO: 650367 - DNA, 439 bp, Homo sapiens
cccgttttggtaaacagccgagggacggggctggagaattgtaacctctctcaaatgcatagctagagctatggatgcaaagactgccaatccatgatatcaacattctagttttaaccatgttgaggctatttgttcacatttacattgtttacaaacggagtaaaacaagcttatattttgaattaagctcatgagccatttataagttccattcttcaagaatcaatgggccagttgctaagtccaaaaatggacgtagcaacggctgattgaccctttaaggttatgatttggtgaggggaagctgagtctagctctgtaccgagggaaacttcaccccagagtccagaagccaaccagcgtcatcggaactgttagaactcataggaactcttagaaccgtcgacgcggccgcgaatttagtagtagtaggcgg

SEQ ID NO: 650368 - DNA, 322 bp, Homo sapiens
  misc_feature (272)..(272): n is a, c, g, or t
agctgagcagcgagtagagtccgtcgagaggatggagctgtgcccggagaggctgacttgctgctcttccaggcctaattccaggccgactagaggacgacccgtgcctgcacaggccgccgggaggccggagctggccctggagaggccgacttcgggacgttttgggcctgcagaggccgccgggaggcccaagctgggcctagaggagcccaccgaccggaggccatttggggcctgcagatgccatcggagggcaggagctgagccgngagaggccaccgtgaggcctgagcctggcctggggagcttggctccagga

SEQ ID NO: 650369 - DNA, 283 bp, Homo sapiens
ctcaatggaatcctagaaaaagacaccacaaattaactagtaatccacagaaaagactcagcctgaagaggaactggagggatctgagccgcctcaaccaggtggcaaagagactgccccagcagcagaagaaaagaagaaagatgcaggtgtagagacagagatcgagtctatacaagggcatgccgaagctcaacctataagactagaggccacaggcaggcatcagtcaatcatggtaccacggacctctctacacgcagtacgggtgcagcggctgaaa

SEQ ID NO: 650370 - DNA, 220 bp, Homo sapiens
gcacaagctagatacactgtcagatcctctggcattctgaggaaattgaaaggtttcttgtcccttacagttctggggggcacaggacggaggaatttttggagagggtcttaaggtgcgcggggtattgtttaggaaaacacacttctcagatactctgagactctgtgtgttttgggtccacggacacatctgctgctctggtatcacatatatcccc

SEQ ID NO: 650371 - DNA, 225 bp, Homo sapiens
  misc_feature (35)..(35): n is a, c, g, or t
  misc_feature (59)..(59): n is a, c, g, or t
  misc_feature (61)..(61): n is a, c, g, or t
  misc_feature (104)..(104): n is a, c, g, or t
  misc_feature (145)..(145): n is a, c, g, or t
  misc_feature (150)..(150): n is a, c, g, or t
  misc_feature (181)..(181): n is a, c, g, or t
ttagagatcccgctattacctcccaggtttgctgngctcaggaactcactctgctgggngnctgggcctgtcacgatcccatatcaaggcaggtacctgacgcnagccccagcccccagcacgagtgagtccctgagcccagcanaccancagccagttcaacctccctacggagtaccangcatagtgccaccagctgtttcattagcacctggaaggccctca

SEQ ID NO: 650372 - DNA, 152 bp, Homo sapiens
cagatatagccaaggatgcatagtactctcatttcagcatttcctccaaagctgggcagttgttagcgagaatgaccaatttcgcttcgccttgtcgagatcatcttcagcagtgtgatgagaagaccctatactcagaggcaatccagctt

SEQ ID NO: 650373 - DNA, 447 bp, Homo sapiens
aagaagaccacggcctttccaaggcacattttacaacgctgctagtccctctaaaatcagtaggatctgaaaacagcttcaacacaagcatacacacacacaaacacttagacatagaggttccatatcgtaaccttgtgcttctctagtgagaatggtaagctcagggcatcatccacatgcaactcaacaaaatggtgtcatcaatttctgtcatgcaacaatcatccgaatccatggttgggcacagcagcagaaaggtgttctgaaatgcagcagccagatctatgatctgtcagtaaaaacaatcaacgtcagcacttccatgtgataataaatttgcaagtagaatttcgatacaggtcatgtatacaaggtccatattaaaaataatatccaaggaaagaatgaagagaaatttggttccagatcataattgaattccat

SEQ ID NO: 650374 - DNA, 100 bp, Homo sapiens
aaacaccgcaatctgtaggagcataacttgagccaggagtccaagatcagtctgggcacatatgcatgacacccatctctaagaaaaaaaaagaaaagag

SEQ ID NO: 650375 - DNA, 442 bp, Homo sapiens
  misc_feature (40)..(40): n is a, c, g, or t
  misc_feature (51)..(51): n is a, c, g, or t
  misc_feature (435)..(435): n is a, c, g, or t
ttccctcttgcttcaagacacttaccccttttccccaccntattgcctgcntacttgaatgaaacaatcgctgggaaagcattaagagaattaaggctgggcactgtggctcatgccctgtaatccccagcactttgtgaggctgaggcaggcagataacttgagccccaggagtttgagaccagcctgggcaacatggcaaaaccctgctctcccaaaaaaatacaaaaattagctgggcgtgctggtgtgcctgtattcccagctacttgggaggctgaggtgggaggattgcttcagctggggaggcggaggctgcagggagccaagactgagccattgccccagcctgggtgacagagcaagaccctgtctctaaaaatgaatgaaaggaaggaagaaagagagagaaagagagagaggaaagaaggatgnagtaaag

SEQ ID NO: 650376 - DNA, 262 bp, Homo sapiens
  misc_feature (103)..(103): n is a, c, g, or t
gaccctatcacttcagttctgggactgaaaatagttcatgctttctctgtctgtccacagcttacagtcacaacatgtgtgcatagcctcagtaggtcagatntgactggatattgtgagcatatattggaacaaattattttaaaaaggacacttctatatgaagaatatatagtaccttactaaagagtttttctacactttcctcataaatgacctatttagcactagtctaaacactgcagaaagacaaatcttagat

SEQ ID NO: 650377 - DNA, 788 bp, Homo sapiens
agcgggggaggcggctggcgcagacaaaggcacgggcggcgtggagtggcggcgcggactgaggtgggccgggtggaggcaggtggtggacgtcagtgctgtgtcgagctgagtgaagctgagttgaaaggtggcttgacgcggcctggctcgagtttggttcgacgttgtagcggggtggttggttggttgcgtatggaacgatattcgaggagccgagtggattgcgtggccgatggctggacgaggggtagtagggggggtacagttcggtgcctgtacatgggagtaggaggggatcctcgaacggtgtatcccccatggtgatgcgcgcctgggctcggggcgtggcgcgtggcgtgtggcgctcccaggtgtcgcgcctcatggctgtgttcgaggaagtcgtttaggacggagcttttgaggggacgtcgttctcagatgcggtgctaacgaaattgttcgtagaaatctccccagaattaccatctgattaacgcttttgcataacaaagcagttagaaaaaaacgtacataccaaagacagtctgcgcatcccggggtcggatatcacggggcctatgaatcgcgtttcgaaagcgcgttgcgcccacggggggacgcgacgcggtgttagcttaccccttttttggttcgcaacgtggttagaatgcgcggagccattgggcggatgacatcgagtgggtcaatcagctgggtcactcagtgttggtgcaccattggttttatccctgcggccactaactgcccaaacaaaacctaga

SEQ ID NO: 650378 - DNA, 123 bp, Homo sapiens
caggtcggtacctgtggtccttcccctactcatcgactaatttacactcacagagacctgaggctcataaacattctactactcagtctcactgcccaggacctcatgtggagcctcatgtgt

SEQ ID NO: 650379 - DNA, 212 bp, Homo sapiens
  misc_feature (73)..(75): n is a, c, g, or t
gagtcccgagcctgagccgcaatcgctgcggtactctgctccggattcgtgtgcacgggatgccgaagcttannncaggaggcttcgttttgccctggttgcaagcagcggctggggagcagcggtccctggggaatatgcggcgcgcgtggatcctcctcaccttgggcttggtggcctccgtgtcggcgggagtcgagagcagactgaca

SEQ ID NO: 650380 - DNA, 226 bp, Homo sapiens
tgaagcaattaaaacagcatggtactggcaaaaaaaaaaaatagatatattaaccaattgaacaaaatagagaccccagaaataaacccatgtatgtacagtcaattaatttttaacaaagatgccaagaatatgcaaagggaaaaagacagtctcttcaataaatggtcttgggaacactaaatatccacatgcaggagaataaaattggatcctcatctcacac

SEQ ID NO: 650381 - DNA, 328 bp, Homo sapiens
attctgaatcacattggacagccccatgcctgctacacacacacacacacacacagacgcacgcagaagcacatgcatatgcacacacgcacaaagcgtagtgaaggaaaagaaggcagtgattctgtcccctaaagaaaaccgtgatacttatgagaccacttccatctgacttccattccgggtgtcactaaatagctttgaggactggggcatggaatagaatgcagaggccttctttaaagtgcgctacattgactgtagcatacccctcatatagaagagaggtaagagggctttccagaatgaacatggaaatgttccaaag

SEQ ID NO: 650382 - DNA, 492 bp, Homo sapiens
caaaacatctaagagatattatcttttgtcctacaggccactttatgggagaatttagcttaagaaagagggtttctgtgtgaaagtgcctgaccaccactgcccagttcaggtgagggacctgagtccttttccttttttcagtctttcagtggccgtttcctagtagcttcttggtaattgagggaaactggccgggaccactctctactgttacctgaaggccaaggagtgaacctgggatagctcccctgcccagaaggcggaaggactcttttgtatctttttgagttatagtccctgatccctacctgtgatgcaattggcagcagaagctcgtccagggtgaactcacacacatttcaggcgacttaaaccctctttcttaagctaaattctcccataaagttggcctgtaaggacaaaagataatatctcttagatatgttgacctcccttctcctactgaatcgcttgcctgttcatggggac

SEQ ID NO: 650383 - DNA, 507 bp, Homo sapiens
  misc_feature (237)..(237): n is a, c, g, or t
  misc_feature (239)..(240): n is a, c, g, or t
  misc_feature (260)..(260): n is a, c, g, or t
  misc_feature (262)..(263): n is a, c, g, or t
  misc_feature (356)..(356): n is a, c, g, or t
  misc_feature (381)..(381): n is a, c, g, or t
  misc_feature (426)..(426): n is a, c, g, or t
  misc_feature (487)..(487): n is a, c, g, or t
  misc_feature (490)..(490): n is a, c, g, or t
cactaaagttccaaaagggctgcttctttcacctgctctgtctcagcacactaccgaaacacagaatataagcattacttgggctggtttttgtaatgctggacaagttttggcaacgttcccttcatttcaggggagaaatccaatattctcacttccaggcagacccctagtgatcctgatcagatgaacgaggacaagcccttcacagggcacattcaccatagctacgcaagnannggactccaggcgtgcccaananngggcagtggttgtgaataccaagatgacggaataacatgccaaacctacgatgaatgagagatatgtgaagggacctccccggatgtaaacanatctgcaaggccaactgcaaggaancaagctcggctgggataggcggggatgtcttattcccacacaggngcccacgttgaacaccccgcctgagcatagctgacggcgcctctcgacgagacgacaccanacncccgcaccacacgccac

SEQ ID NO: 650384 - DNA, 187 bp, Homo sapiens
  misc_feature (87)..(87): n is a, c, g, or t
tctgagatcccacgaagctctcatcatagagcactgctctggtccttagtgctctatgttttcataaaaaatcaaaacagtatattnactttttttggatagagttcatctgttccaggctgagtgcagtgcgtgtctcagctcatgcaacttcgcctcccagtccagctcagttctaggtaccgag

SEQ ID NO: 650385 - DNA, 130 bp, Homo sapiens
tgctgggattacagacgtgagccgttgcgcccggccagtaaaaggcaatattctatcacattatgctggtcacccaaagctagaaacatacatcaactatttctctagggataatctctgatcggccact

SEQ ID NO: 650386 - DNA, 696 bp, Homo sapiens
aatataaaagggagttggagacaaaaaaaaaaaaaaaaaaaaaaaaaaaaaaaagaaaaaaaaaaaaaacacaaaaaaaataaagacaccaaaaaaaaaataaaaccaacacataaaaagaaaaaaaaaataaacccggtcgttgtccgcccgggccctaaaacttttttttctgggggggggctagggccgcccccccaatttcgccgccggccccccttttcccctttggggggcccttttccttttgccggggggggtttttccccggggggccgggggaaaccccgggcggtccccatgttaaatggggtggcggaccgccctttttcggcgggtcggttttgtgcgctgtgttttttacccttttttttttgtgggaaaccccggtcttctttttggttcttctcccgcttttgttacaccacccgccctttcggggaattccctttgttattcaagtgtttccccctcttttggttccgtcttccccctttgaacccgcgcccctttttgaggggggggccccccccccttaggcgccaaatccctcttctgggcgggccccttttggggcccttccgctctgggggttggggggggggagggcctttggcttcctccggggccttcgtgggccccctttctggggcttggcgcccagcccctccccttccccaaggtggtttcacccta

SEQ ID NO: 650387 - DNA, 1010 bp, Homo sapiens
  misc_feature (497)..(497): n is a, c, g, or t
ccccagccgggctctgctggtagcgtaaagccatgatccgatctctctcccgggggagcaaaatggacgaaaggcgaccccccaggcagggagccgcctgggtgccttgggaatccggaggaatcccttctctttgccagtcttgaggagactagactgagagcctgaaggagtgagtcaggagatgggccgagcgctgccccccgggggtcctcgcgcgccgggcgcaacttaggagcgcagcgcagctaggctccattcccggccgccgacgctcagcccattacgcaaacactgggcgggtccaaggcgaaccaccggctcgtgtccgcacgcctggctgggaagcccatgagagggcgctgcgttgcaggagcgttccggcggcacctacagacggagggcttggaaaattacccatagctacttgtgcgccgttcggcctagaagcctctcgtctcaggcgcccaacgcctgggctttcctgccctttcganatgcatgcgctagtcttgtctcccccagtaacttttgagtgcggctggcgtgggcgcaggggcgcaagggggggcctgcatgcgccttgcgtcgccgccccctcccgcccgttcttcttgtgggcctcgccacggacggtttgcggatatggcaagggcacggcggtggattgggccccgcagaatttcgaacagcccgcgggtggcaaacatggcccgtgcaccgggtgtgccaaaaaagcgcccttcccaaggcggccaaatggggccctccacaaggcccaagcgaagccaacggattccagccgcgacccgcaggaaggaaatccatggcacgataaccacggcggcgagccaggccatgggggggtacgcgagcaaggccatacctgggtgcacaaacagccccgaaggaacacccgtgcgaccccctgaagaacaaccgcagagcccagatcgtcccgaacaagccctggcttggggaaccactactcgttgagaactccagccgga

SEQ ID NO: 650388 - DNA, 198 bp, Homo sapiens
gctcaagatctacagcagcacagcttccagagagcagacttgtgtgccccacctatccctctaacacattctccactgatgatgcactaacacttgcctcccactgcagcctgcggtctagccagcttccttagcaccaggcataggactagcctctcggtgggggctgctcgccaccaactcatgtgtgctcttgct

SEQ ID NO: 650389 - DNA, 369 bp, Homo sapiens
  misc_feature (92)..(92): n is a, c, g, or t
  misc_feature (322)..(322): n is a, c, g, or t
ttcaaaaattagctgtttttgaggaaagctcagtgaaactcaaaaagaacacaaaaggaattcagaatcctaccagataaacttaacaagancgggcacgattgctcacgccggtaatcccagcactttgggaggtgaggtgggcaaatcatgaggtcaggcgatcaagaccatcctggctaacatggtgaaaccccatctctaccaaaaatacaaaaaattagccgggcatggtggcacatgcctgtagtcccagctactcaggaggctgaggaaggagaatcacttgaacccaggaggtagaggttgcggtgagccgagntcatgccactgcactccagcctggacaacagagtgagactctgtctc

SEQ ID NO: 650390 - DNA, 234 bp, Homo sapiens
agtacccgatggtcgatcactgtctcagcctgatcaacagagcgagactccgtctcacaaaaaaaaagaaaaagaaaaacgttgtgaccacggtgtaactaccacaactaaaatactgattggtaatggccctatcatctataaggacttttagtactcctgccattttccatttaaaataccatttccatttggtggacaggtgaagaaaaaccagtacagtgatcgaccaag

SEQ ID NO: 650391 - DNA, 442 bp, Homo sapiens
  misc_feature (394)..(394): n is a, c, g, or t
cgcgtcgactctcttttggaagtggctgttttgtttaaagggcctgtggatttgtccagcgggcagtgggaagcatagctctaaagagtggcattgagcttaaggccagggatacagatttcacagtaacaagcagagaatagatggactgggagcagatgagaccacagtggaatggccactctctgggactggatgaggactgtactgagttgaagagtcccctcccttcaccgccccgggatttcatgtctacccagaacctaagattcttaccttatttgggattgtttggaggttctagcaggggagtgcagctacttgtatatccttgaccaaagactggtcctcctctatccagatggtcaccttcttcccccgagtgcgcagcttntggagggatgcacatggagcagtgaggtcgacgcggccgcgaatttag

SEQ ID NO: 650392 - DNA, 540 bp, Homo sapiens
  misc_feature (229)..(229): n is a, c, g, or t
  misc_feature (395)..(395): n is a, c, g, or t
  misc_feature (397)..(397): n is a, c, g, or t
  misc_feature (408)..(408): n is a, c, g, or t
  misc_feature (440)..(440): n is a, c, g, or t
  misc_feature (536)..(536): n is a, c, g, or t
gagctcggtacccattctacgctgcacctgtctgtgggtcatctattaaagtattttgaacccagtcaagatttacttcctcctggagattctgcttctgtgggtctggagtgaggctgtctggttttgcacctactggttaaatgacctcctccagttctcacagtctgtctcaggagtaggtggggttttgataatgttcatgtctgaagcatagagaactgtattncctggtagaaaggaaacaggaaagaagggctttaaagcctttgcaggaatgatgggctgggttatttttgtcaccaattcccaccccaccttcctcagtcaagggacaaagcactttttcgtgctttgtttttaccagcctcaggttagaggataagctagaatcntngtcacctattntcagtccaggcaggaggtgccagcagttcagnggttcctgtctcaaaattgggagggaaacgaggcacccaacttcagtcatccccctttccagtatggagtggaaaagtgcacgggacttgtggctnaaga

SEQ ID NO: 650393 - DNA, 980 bp, Homo sapiens
  misc_feature (26)..(26): n is a, c, g, or t
  misc_feature (67)..(67): n is a, c, g, or t
  misc_feature (104)..(104): n is a, c, g, or t
  misc_feature (130)..(130): n is a, c, g, or t
  misc_feature (151)..(151): n is a, c, g, or t
  misc_feature (163)..(163): n is a, c, g, or t
  misc_feature (175)..(175): n is a, c, g, or t
  misc_feature (899)..(899): n is a, c, g, or t
  misc_feature (918)..(918): n is a, c, g, or t
  misc_feature (939)..(939): n is a, c, g, or t
ggctgctatccccacccgggctccgngctgcccccgcaggcgctgttcatgggcgagggaacttgtnagaagcgccgggacgccgagtatggcgccagcccggngcaggtcgcagacaatggcgatgacnactcagaaggaggcctggtgnaaaaccacgtgnacagcaccatgnacatgttgggcgggggaggcagagctggccggaagcccctcaagtcgggtatgaaggagctggccgtgttccgggagaaggtcactgagcagcaccggcagatgggcaagggtggcaagcatcaccttggcctggaggagcccaagaagctgcgaccaccccctgccaggactccctgccaacaggaactggaccaggtcctggagcggatctccaccatgcgccttccggatgagcggggccctctggagcacctctactccctgcacatccccaactgtgacaagcatggcctgtacaacctcaaacagtgcaagatgtctctgaacgggcagcgtggggagtgctggtgtgtgaaccccaacaccgggaagctgatccagggagcccccaccatccggggggaccccgagtgtcatctcttctacaatgagcagcaggaggctcgcggggtgcacacccagcggatgcagtagaccgcagccagccggtgcctggcgcccctgccccccgcccctctccaaacaccggcagaaaacggagagtgcttgggtggtgggtgctggaggattttccagttctgacacacgtatttatatttggaaagagaccagcaccgagctcggcacctccccggcctctctcttcccagctgcagatgccacacctgctccttcttgctttccccgggggaggaagggggttgtggtcggggggctggggnacaggtttggggagggggnagagaaatttttatttttgancccctgttcccttttgcctaagattaaaggaaggaaaagta

SEQ ID NO: 650394 - DNA, 225 bp, Homo sapiens
  misc_feature (171)..(171): n is a, c, g, or t
ggggctgaggatcctagacagcggacccaattctaagtcgcacccacgagttcccagcagatctgggccctgacaacagaatcagcaccaagaggacttaagtctggaacctgctcaggcatcgatccggcaagtgtgtgcatcaaccttcgctagatccaaatgccaatnaaagaagagaaagccagggattaaacacgggggggggtccggctgtctagaggc

SEQ ID NO: 650395 - DNA, 145 bp, Homo sapiens
agacatgggaccattagcctcacatggatctaggactagcgaataggaaccaccacaaggaggaggtggtggtgcaacctcagtggctgtcaccatagctctccaccacagataccgctgctgatgccgaagctcgacctgagtt

SEQ ID NO: 650396 - DNA, 234 bp, Homo sapiens
gctgcgctatttgctggtgccagtggtgtcggcgtggcttatgtgcctgggtggaggaagcagctactcctatagcagtggtctatggcgttggatggtggcttcagtaccagcagtggcaggagccattgaggggtggcctcagctctattggaggcggcagtaccaccatcaagtacacaaccacctcctcctccagcaggaagagctataagcactaaagtgcgtctgcta

SEQ ID NO: 650397 - DNA, 987 bp, Homo sapiens
  misc_feature (383)..(383): n is a, c, g, or t
ggctgaaggctggtttgcgtcgacaggtggcggttaccctgagtctcttgtctggtgacgggcgtcgattatgcagtccgggctggtcactcagctgtagggttcagcgaccgcgggggggtggcgtggttccaaggccgctattatgggcgcgggagtccggagcgctcgcatttccggactggatgagccgtgagcgaagcggtgagtctgtcacggagggtgtgaggaggtagccggcattctcccctggcgccctctacgcttgaatgcagggctctcgggtgccccgggcgctccaagtgcgcgccgcacgccgcgtatggagacgccggtggtagtctctggccgtgctgcgtatgcggccagttgtgcgccattgntgtgtacgtattctttaacacccgttgcgttcagcggtgcgccacgcgtcagacgtgtggtatcagcgtccccttgggaagccagcgtgggtccccgttcagtataggtgagcggtaattatacaatgcattgagctgttagcagacgtttcgcgcagttgcttacaggacacgctttacttgatatcttagcgactgttaggctattgctggggtgctacggggaagccaaggcatcctacagggcccggcacaacacattggaaccccgagtgtaggcacgcgatgtcgatgtaccatttgggacgacactgagggggctggggggtcgacttccatgtggaagctattgtaagggcgcctgaaggggcctttctttcaaaaaaccgaattccaatttccttggacgttattcccagccgtcaatttgggcacttcacttggcccgagatttgaggtatcgtccgttacacatgcacaagcaaagcccctttgaacataccagaacaagaaaaaccaaaggcaaaactccccgaagttccccaggacccgactttctgggaaagggcaaaaacttgggaggggcagcccttgggtggccccc

SEQ ID NO: 650398 - DNA, 589 bp, Homo sapiens
tgaacgcacacctattaaatagggaatcctttccccattgcttgtttttctcaggtttgtcgaagatcagatagttgtagatatgcggcattatttctgagggctctgttctgttccattgatcaatatctctgttttggtaccagtaccatgctgttttggttactgtagccttgtagtatagtttgaagtcaggtagcgtgatgcctccagctttgttcttttggcttaggattgacttggcgacagtcattcatttgataaatgtttgttgcatgtgtattccttcagtaggcagtgaggataccataatgctgtgtattatgtactatggctttttttttttggagttatgaaatatccctgtgaggccttttacaactatttcttgatggtgattctgcatctcaattcgtaccttttcagactttggtttatctagcaaatatgggttctgatcagaaccagtccttattgaatgcttggtgccaggtactgtagtaagcgctttgcatggattcttttcatcccaactaacaaccttatgacgtaagtactcttattcttctcattttatggatgtagcagt

SEQ ID NO: 650399 - DNA, 273 bp, Homo sapiens
tccgttacacctaaggattcctacatgcagagcggaaaccaaaagcaagaagtaatagctgtcttacatcagataaaacagactttaaagaaacaacagtttaagaaagacaagagtcattatacaatgataaaaggatcaatttaacaagattagacaatcttaaacatatatgtacctaattctggagcatctagattcatagaacaattactactagacctaagaaaagacagagacagcaacacaataataatgggggacttcaacact

SEQ ID NO: 650400 - DNA, 387 bp, Homo sapiens
aacactacattgaggaaaaatctaggacattaactacttacaatgactgaagtggacagactaggaataggcaaggatgatggaagaaacactcagctatctactaggaagaaagcaaaggccaattcatctaaattaagatgtacaaagacaggagccatctttcacaccagatactggcacaccagtcgtacgaggtctgacatacagagaaggtctctacatcacaagaagaacatctaccagacacgaggctactctcaggattagatatcatggaagtgtagaggattacagattataacagatattgcgatatttgcacatacataataagatatcttgggaccgatgcggtggtttatgcctgtaatcccagcactttgg

SEQ ID NO: 650401 - DNA, 1429 bp, Homo sapiens
  misc_feature (439)..(439): n is a, c, g, or t
  misc_feature (799)..(799): n is a, c, g, or t
ggtttgtggtacatcaacgtgagccagtgtggctcgctggtgtaacatcgaggccacaggaatctgaatcggtactggttagagacggaaaccatacgccatagatgatgccattcaggtagctcaatagggccgctgtaattaccgtagttctcgagggtgggtccaccgcgcttggattcactttcatacttggcagttgattgtagacaatgggatattaggtcctgaccaaataggacctcgctcataggtctgtggttgaagtgcaacgcatgaggttcagaatcgatttctttagcatgtcctagtcagtctgtcacatggtacgtgacagacagagtcggatggcttaggcgaacgcgtgaggtgtctggtattccacgtagacttgatggacgtgtgaatagtggagacagcctcctgaggtacgcggtantgccgccgagcgcgtcaacgaaacttgataggaaagtagtgcacagaaatttggcatttggacgttgccacttggaacagctcgtaggggtaccagcaaatgtgggggacacaacttgtttagttccaaaggaccactccctttgccagcgtgggtgccttgcccaagaagcgaataacacattagtctacgaggattagctcgcgtagccaaagggcaattcggggcaacttaggacgaaagggagggggtactccagtccttgaggaaaaagaggtcaccagatggtatcaacccctcactttagggttccgacttaggggcgagagaagcggttggcgcgaaccagagcccctgcgntagagtgcccacacttcaatagcgatcacatttgggagtcgatgcaagacgaatcgagcttgtttcgcaccagtgagggaagctaagcttggcttgaacgaatttttcgagagaggctccattggccgatgggagcgggcgtatcgcaatgctattggtccattttagcttctcacacgcgctagggtttaggaggcggcgatagggggaacggggggtgacccgcctcaaagttgggtaaacagtctcacaggttgagcgaaaaggcctaactcagaatggagggacagtgcggtcggaatggcaaggaaggtagttgccacccaacaatccgcatgaaatcaccagggtccgtataagaaagtgtggagcgtgtaaaggggacaagacgggtatcattacatgaaatgccgcccagtggttatcggcaagttgtacgacggcacaatcgcgccctattggaggcgtgtgcaatcacaacaaacgcccagatgttagcgtctcacccagggacgaacagtttaaccgcgacattaatacgaggccatgagagagtgcgaaatagcggacaagcccactcgcttaggacgaatttccctgtgtgcgtccaacactgacacggtatcgtac

SEQ ID NO: 650402 - DNA, 240 bp, Homo sapiens
tatttcagtaaatcagaaaagttctatagagaaataaggagagtaagggccatagagtgcaagaaaaagggctacgtaagggtcttgttaggcactgaatgcaatttaatagggcatccaaatcataatgaatagtagataaacgggatattatacaacatgtaaaaataagcatatataattaatcaggagacgggatctacactggacactccaggtctaggagagcaagggcgcgat

SEQ ID NO: 650403 - DNA, 157 bp, Homo sapiens
ggtcgacggagtcagatggaggggaatgcagtggaatggaatgaaacggagtgggttggaatggagtccagtgaaatggaatggagtagaatggaatggaaaggaatggaacggaatgaaacggatggaacggagtggagtggtgtggaggtcgacg

SEQ ID NO: 650404 - DNA, 516 bp, Homo sapiens
tgccccactgtggagtgctgtttatttctattccgttgcattaccttcactttgccttgtgccatggtttgtatgcatgtcccctctcaccaactgaaatccacaagattcaattttcctggaggacatgttcattagagcatcccccatgggggcacgtacacagtagtcactggataagtatcactgtttaaaaacctgtaccaggtcgaagttcaccagggaggcttcaactttccatctttctcccttgagtatttaaactcagctaagttcctcaaatatttttgagcaagtctggagatgagtatcatgagatgggtttgggttgggatcaaggttgtctccatgtggaaattttggctaaacccttcttcctgctgtgaaatgcaagcttcctcatgagctgccaactcaggcaaacatctttgattgtggggaagtgggcatttgaggtttgtaataatttggatatggctggggggatgttagcctttgttgaaccaaccctttctt

SEQ ID NO: 650405 - DNA, 897 bp, Homo sapiens
  misc_feature (115)..(115): n is a, c, g, or t
agcggagtgagccgagatcgcgccactacactccagactgggcgacagagccagactccgtctcaaaaaaaaaaaaaaaaaaaaaaaaaagcacctttaggaattcattcgtgcnctcacacggaattatttctcagggccaagggcttggtgacgagcctttcattattattttaaaggagggacaaagagccccttcagacctcatgtggacgctgaacgggagtccacacagggcagactttgacctttgaccagaatagtctctcaagatgccaaactggggcggaggcgcaaatttgttggagccttgttgaaaagaccgttctaccagtgcaggaaaaaattccaggtgcaatgtggacatggattttcccacaagacgttgtttcccacgtgctattggccttgcaggaaggctcttgacagcacgacagtcgcggcctcatgagtcggaggatctactgcaaggtgttgctattgggcgcaaaattttggccccaaggggatcgggttattggacaaggcgctggcttgtctcagcacagacacgggcgagcattctcggcctgcagttcccaacagtccccaaagccggcacgctcagtatacccaccagacaaccctttccaaatttcactgcaacatttgggagagttccgaaaagtgccctcgattgtggcaagtcagtcctatgctgctgacacggtcactggcaagttggcaagcccttgggaacaagacctgttccgttgtgccatcttgtgggaagagtcggagtccacaaatgtctgtgacaaagatggggcacctttctggcaacggttgttatgccaacaatttgggccccacggatatgggtttgggagggccttacccacacagtgtaaacgacga

SEQ ID NO: 650406 - DNA, 312 bp, Homo sapiens
tgagtactctagagatccggctgactacggggaaggggcggtcaggttcgttctccaggaagcgtagtgtggactcatagccgtgcgctgcagttcgcggagctgctgctctccaggtcagcatggggtcacctccaccacgccatggctgatagccccgtagggcttcttcctgcgcaggagcaagatggagaggacgatgagggagcctccgccccggtccatgatcagcagacccgacacaggctcacggggaacacccctgtcccagctgatgccagctcatccctctgaatctccgatgagtgggaa

SEQ ID NO: 650407 - DNA, 376 bp, Homo sapiens
  misc_feature (373)..(373): n is a, c, g, or t
cggcacgaggaaagaataaaatgctgccaggcacagtggctcatccttaaatccccagctcacagctcaaggtctgggacacagttgatgcccaataaatgtttgctgcctacctacagctgcctgaggctgaacgttatgacccttccagaagcacagtgggtctctctcttgtccaggtgctggtgagaaagtcaagtacagtacctatcatggaaaaaccctatgtctgggggaatgggtgtgagaagggggtgggcttccccaggaggagaaaaggcagatgctccctactcccttgagcctatcgggagcttctaagaagttggttaacctcgaccaataaactaaatctattacaagagactcaaancca

SEQ ID NO: 650408 - DNA, 437 bp, Homo sapiens
  misc_feature (9)..(9): n is a, c, g, or t
  misc_feature (39)..(39): n is a, c, g, or t
  misc_feature (64)..(64): n is a, c, g, or t
  misc_feature (157)..(157): n is a, c, g, or t
  misc_feature (433)..(433): n is a, c, g, or t
atgaaaccnatagggtggttaaaagtaccttgctgggtnaacttgataattcctggagggtcangggaagcgctatgtgaatccccacttctgatatttgtaaagattctctcccagggcctgaaagcttaaggggttgagcaactcctcccttctnaggcccaagcccccaggcgcaaggccgcttgcatcagcagcgtgcgtgagcagatgcgccagcaagatagcaaaagcaggaagagagccagccggaagacaagtacctctgaagatggagaaagaggccatctgggtacaacgttgcagttacgtcagaccaggacacttcctgtttacaggagactataaaacctttgccccatcctcactttggggacgccgttttagcctcagcccgccagcacccaggctctcattaaaacagcatgtaccnccaa

SEQ ID NO: 650409 - DNA, 277 bp, Homo sapiens
gaggccgatcgtgtggatgcccattgtgacctgagataggcattctctagtggcatatcggcaatgcttctgctggtcatagtgcgaaagcgtgagtttgagatcggtgaactgcgtgccgcttaataggcttggcgtgtatcgtcgcttaatggacatattgtagcgattagtggtgctgttcaagtctgttatctggtactttcgcagtgttgtatacggcgttagttacatcgcctacataggtccatcggcagagcaccgcgttgcgtttgac

SEQ ID NO: 650410 - DNA, 796 bp, Homo sapiens
  misc_feature (238)..(238): n is a, c, g, or t
atcgtctctcagacaccaagctggagatccaggcttatctgggaaagtgaggccaccatggtctgctggagaagtctcttgtccggcatccttgctgcttgttcttgatactgcgtgggtgcgtgcggcatgggtccaggctcttctcgcttggaaactagagggaatcccggaggcaagaaaattcacaagcggcgagacaatatggactcagactagtgcccccccgagcagcagngtccaccttactgtaaatcaatatgatgatggcgcaggaatattgacgacagggggcggtgtcaccatcgcaggtgatacatcttatgtgcacggagtcccttatggttaggatgttcagaaatgtcttgttgccacggaaaaggtcagcctgcaagaacgggcagggtcaactgataactaatgagcagattccagcatgcgacatcacagagtgcgtctgacaaagggtccggtaccccaactgtgcataccggaccagccgaggagagaccgtcattgtggcctgtgaagggagcccagaattgttggcaagtacagtttggatggctgcttgtgggaggaatctatctaaggtcaaaaggagtgaggataaacctaactcccttaatgtatctcttcaaagttgcttttcgttgttccttcatgttgtgaaagaagtaatggaaggtagggtctatgacagaagaatgtacctttggtgaacaatctggtgatgggggtgagaggaatgaaggtggccgagaacctgaattgttaaaaaggtgaataaaagaag

SEQ ID NO: 650411 - DNA, 359 bp, Homo sapiens
taacctccttttccttttaaggtactgggcccatgtgttgcttgactactgggaatgacaagtcatactttatgaacagggattaagctatattaaatcacaggtaatagggtggaggggcagagtatgttacttcaaagtctgtgtaacttgaattaaaactctggatattttcagatgtagccagcaattgtcttctttcttaacatgctaacagtgcattaacttataggcctagaagccagaattcattgctttataactctttattagtcagcaaggtatactcccaacatatgtgcagtacatatcacttagttatttaaaattgagctgacgacacaacagaaagatcctgt

SEQ ID NO: 650412 - DNA, 212 bp, Homo sapiens
aggataccctacgtcgcatatttatagagtatactgtgatgttctgatagacgtatacttgtgtaatgatgaatcaaaataattagcatatcctatctcaaacacttgtcatttctttgtggtgagaacagtcaaaatcctctctaaagtatattttattttaattaattcattttttttttcagagggcgggatggatattcgacagtagt

SEQ ID NO: 650413 - DNA, 775 bp, Homo sapiens
catactgtttaaaaggcataactgaattatatgtgttattctttatatagacacgtattctataggttattctcacccgaagtattcacacaatctctttttaaaataactctcggaaatggcattttgcattgcacacagaggctaggatgagccatatatataagtgaaatgtcactatctctgcaaacaatataaaccgcgattatctgccatcattagtacctctcaacttacttttgtagaggactaacgaaacaatctgtaggattcggtttccatacagggaagttctccgtcctatgcaatgtttctcaattaattctgcttaattctgagccattaatcctgctacactttgtaatgatacagttaattcagactaatctttgggggcttatagggtagttaagttagaactcttcaagggagacatgtatcaacaactattagttgttgttactaaatttataaacatattgattagttacacttgtgtaacgaatataaggtttacgacgctatgagaatttggtgtctatcaccagttagctatttgctgtaatgtcaagaacaatcgttcaccagtatgcaagaatcgtaccttttcttgaatagaaagccaaatgtactttagacatgaatggcaactatataaagaatagacttcatcaatgttattcctacatgtcataagattctacttaaacttgtcttctttcaaatgtttgagaagatgctgacccactgaacagtctactgctgacataaatag

SEQ ID NO: 650414 - DNA, 1327 bp, Homo sapiens
gaccagtctgcgatgtacgctgaccattggccgagtatggagctcttcgaacgccttctctggtgcagtcggacaactcctacactgccatctctcagcatgcgtatcacatcagcttctccactaaatccctgactcaggaactactggtttgtgtgtgcatcgagagtaaggtgcccgagcctcctgtgcagtacgaaacggtctggccagaccaagtgcttagacatgccagtgtccctggatgtgagagtaccaatcgacaatccatccgcaggagggtggtacaatagcgaagctgggtaggactagtgtggagttgaccaggttgctccttccgtgcagacttcctgcgcagtggctatgtggactagtcctgttgcaggaacactgttggaaggaagccaggcggagaggtgtccgcatagttattcaattggagactttaacatcctaaacaagcgcaaagggagcatggttgcacgaaaatggcatcgcacctgggcacatgttgcgcgaacggtagggcatgggcaccgaatggtcaagcccgcaactcttcgcgaatttcagggagggcgacatagacgggatctgcatcgggaccgaaagggcttatccctgtccgtccaatgccagccttcacccaatcgcgagaagttgtcagtctgggcatgaaccatatcccctcatccgcgattacatgccccccggggcggcgacactgccattgattccacacttcacaagtgctggagaacctgtgcaaggtgcttccattgcagaggcttgcacgtaacacctttgcgtgaactttagagcaacgaaagtttaggcgacagcgctccaacgatgggggaacaaccccgcgttagccccttggttggagggccttcaaagaaccgttgaaggggagggcacgttgaatagcattggcgtgggttatctgcacctgctgtgagtcccctgagggtgctaaagagagtccatcccgcgatggagagagagaacttcgtattcgggccccagagggagttgaatccggttgattcccgcaccaaaaaggtgcatatacacaagagagcaggacctggggccccagacatttgcaggtgctgcaccacagggaaacgggacctttgggaggacacccgagccagtatgggctgtaggggaacatgtcattcgggtcttggggaggacccttgacttaacagtgtgaggagctagtgagcttccttcccttgtggcaaaccgttggctctggccgttcggacagatcagggctagggtcatgcacaacacgtttacatggacagaggttaac

SEQ ID NO: 650415 - DNA, 121 bp, Homo sapiens
gcgtgggtccttgcagagggcagggcggtggagagactggtgcgtgggggtcaatgcaccaggactgtggatgtgcgagtggggtgagcgaaggtgcatcgtgcaggagagtgactagagt

SEQ ID NO: 650416 - DNA, 236 bp, Homo sapiens
  misc_feature (6)..(6): n is a, c, g, or t
ttatgntgctacctccacaaacagctgggatgttaggcgtgagccaccgcgcctggcctagtgctcttattttgtcatgttggcttttgttttaatgttgagactttagtctggctttgtacagaggagtcgagttgtggcataaaccagtagacttcttatgttctcaggcataatggtgggtcattccaatgcttctagtaagtacttcgcaaaggagtattgtttgcgctatt

SEQ ID NO: 650417 - DNA, 103 bp, Homo sapiens
atgcctacttgtaatttgataaatccttatgtttgaagagaaacttccggtgtgagatatacaaatatattgaattgtgtcatagtaaacttctgatttgcca

SEQ ID NO: 650418 - DNA, 338 bp, Homo sapiens
  misc_feature (338)..(338): n is a, c, g, or t
cccaggacagtggagtcagcagtaagccctgggacaggtggcaagggtgggtcccttgactttgcacgctcctcaggaacccctttcccgggtgagccctctctgaagagactgtccttgggcctcctctggaagcagcaccccagaggacagggctcctcctgcttgccttaggcttcccttacttgaattgcgttggaccttggggattacttggtagatatattgctcttggctcgcctggtggtagttttccaccatgccagggtttgctccactggggcaaagtggcctcgtggatgaccctgagctttcatccacgtgccttttgattaccn

SEQ ID NO: 650419 - DNA, 492 bp, Homo sapiens
ccagtcgagcaacatggtggaccctctctctacaaaaaattagctagacatggtggcactcacctgtagtcccaggtactcgggaggctgcagtgagccatgattgtgtcattgtactccagcctggaagacagagtgagaccctgtctcaaaaaaaaaaaaaaaaaaggggtgggggggcgtatagaagggtgaatgatggagtcattggagtaggtattaaactcccctttaatgcttttctagcatattgggggtatcacatggttttagaaaggaagcattctgccttaactgtaggtacccagtgctagcaaggggtgtgctgaagtgggtggatgggactgtatcagaaccagggtactttcagctgcagacggaccatacccctgtccacctggggttgctggatagaggtaagagggcggagagctgttcacaggctacacagggtctgtctcaagccgggttacgtgggcattaacattgctc

SEQ ID NO: 650420 - DNA, 950 bp, Homo sapiens
atggcacatgcagcgcaagtaggtctagaagacgctatttcccctatcagtagaagaggcttatcaccctttgtcatgatcacgcccgtcatagtcattgaccttatgtgattcgctagtcctggtatgcccattgtatcctaacacgtcacaagcaagaactaaggtaagtacgtaacatcgtcagtacgctcagggagaataggaaaccggtctgaatctaatccctgcccgcacgaatcagtcctagttcctgcagtcgcgcctcaccatcacctagcgcgatcctttacattataccagatcgtagggtcaaggaatgtcccatcaccttaccagtcaaagtcaattggcacagcgcaatgtgtactgaatcactatcgggagatagcaccgagtctacggccgagtagtaactcttgcaacgtcactacgtacatatccacacattatatcctagaaaccaaggacgatctgtagacatccttgcacaggtggaacaaatacgaggtaggtagttgcccccgagttgtaaggccgcccaatgtcgtaataaataattagcatcaccaaggaacgtcttatgctacatcatgaagcatgtccccgcacaattcagtgcttaataaagctgatgcgattccgcggactgtcgtaaatacagaaacaaattttcgagcgataagacgaacggggggtaatacctacgggtgcaaatgctctgagatcgtgtggaagcaaagaccacgagttgctagtgccacaatcgggtcctaagaaataagatttcccccttaaaaagtcttcgtggacagttaggggccgggaattgtaacccctattcggcagcccacctcgtaacccgctctaagaatgcgcacagaaaatgaatagaaagcgcataaagaaagactcatccgggggaacggtggggacaggaacagggttta

SEQ ID NO: 650421 - DNA, 170 bp, Homo sapiens
gacttagaggatccccccttgcacggtgctgacagagtagagaggcggtctcaaaacacttaaaacatttggattacttagaaagaccactatggggcacgggtagataggatgtgctgtctggaaacaaggccagttaagtgtgtccaccttttgacggaccaatgcga

SEQ ID NO: 650422 - DNA, 247 bp, Homo sapiens
gagagtccacaaatgctatggggtgaatgtcccacccaatactcaatgttgaaagttaattgccatggtaatggcgtgaaaggttgagacccttaaaatggccatgaaggggctggtcgtggtggctcacacctgtaatctcagcactctgggaggccgaggcgggtggatcacctgaggtcacgagttcaataccagcctggccaacatggcaaaaccccggctctactaaaattacaaaaattag

SEQ ID NO: 650423 - DNA, 105 bp, Homo sapiens
agacgattgtggtaattggggaggagttgctgcgagtggtcattgctgggatagatccgtgtcattggttggggtgggtggagagcgggtcgccagactgagtgg

SEQ ID NO: 650424 - DNA, 418 bp, Homo sapiens
ctctgcctcctgggttcaagccgttctcctgcctcagcctcccaagtagctgggactacaggtgcacaccaccatgcccggctaatttttgtatttttaatataggcggtgtttcgccacattggtcaggctggtcttgaactcctgaccttgtgatacgcctgcctcagcctcccaaagtgctgagaatacaggtgtgagccatcacgcccggccgatgcaagcttttatatgttcttgagaaaattattacagggtgttttttctcatattctttaatatttttcagaacaaatgctcatttgctttttatttatttaaatttgagcaccatgcaatttttactaagctgaatagctaggctaactactatgatctttttaattaaagaaaagaaaaacagggtcacaggttatgc

SEQ ID NO: 650425 - DNA, 244 bp, Homo sapiens
tagcatgacccagtgtggcatacagcaaatggggtttaattgagaggaagaaaacctataaaggattaagggccaggcacggtggctctcgcctggaatcacaccactttgggaggccaaggtaggtgaatcatctgaggtcaagaattcgagaccagcctggacaacatggcgaaactgcatctctactataaatacaaaaaaattagccgggcattgcgaatcatgcccagctacttgaaag

SEQ ID NO: 650426 - DNA, 129 bp, Homo sapiens
  misc_feature (129)..(129): n is a, c, g, or t
tcttaccattgttctatatgtgccattttaggttatatgtgtattaaggataaggcttaaatctcaaagggatgtgttaaaaatagggagttgggaaatccggccctttgtgtgaagtgccctttgggn

SEQ ID NO: 650427 - DNA, 545 bp, Homo sapiens
  misc_feature (161)..(161): n is a, c, g, or t
  misc_feature (274)..(274): n is a, c, g, or t
  misc_feature (294)..(294): n is a, c, g, or t
  misc_feature (350)..(350): n is a, c, g, or t
  misc_feature (370)..(370): n is a, c, g, or t
  misc_feature (433)..(433): n is a, c, g, or t
  misc_feature (443)..(443): n is a, c, g, or t
  misc_feature (495)..(495): n is a, c, g, or t
aggtactttgtaacccccttcgaaattcttttatctttttatcctttttctgatttattgggctaagacttccatcactattctcaagtggtaaaagcatgcaccctgtcttctttccattttcacaggttaagttttcaatatatattatcatttagttnatggttgctaaaaaaattgttgcagcttttccttacaagaataaaggaaggtccactactttctcttcactaatttggaaattgtacagtttctattccttttttttcttttnttttttttttgagacggagntcgcttctgtcacccgggctggagtgcagtggtgtgatctcagcacactgccaagntccgcctcccgggttcacgncattctcctgtctcagcctcctgagtagctgggactacgggagcccgccaccgtgcccggctnaattttttcntatttttagtagagacggggtttcaccgtggtttgcaatctcctgatctcgngatctgcccgccctcggcctcccaaagtgttcgcagtcacaggcaagagc

SEQ ID NO: 650428 - DNA, 981 bp, Homo sapiens
cccaccgagggtttcccaatggaacagcttgtgcgtgtgccagggcccccgaagttttgctgggtggcagagtgtccgggggagagaggacccgatttcgttctcccttttgaccgagggcccctttgggcaaagggagccttttgacctatggtcccacgagacgtttgtgatgtcccacaccttcaggatgtgagacccacgaggggccaaggggttctatccccagaaatttctacttgggtctcttcatagcccttctccacactgtgaacgcccacctgtttggagattgtggacactttcttcgggccactgatttatcgcattggagggcccaaccgcaaggaggatttcttgggacagacagatgtttaagtgtaaaatattattttcacactggcgctttggatataaaagaataccagatgcttgccgcagaaagagggaagcaaattttgtcgaccatccccacccgcagaagtaggctgaggagagacaagattgttgcaaccccccctatcacttcgatccgcagagctgttaacaccgacagtgccaccgacagccataccccagctaggggaattcctggggggtttcctggtggtggggtgctctctcccctctgtgtgtgtgtgttctctcatgggcgcccccccattgtgagaaggtttgagtttagccgccccgccagtgtaggatgatagcgaaggtgttccccacacaccgtgtctagagacaccatcttgtcgaggacaccttaacttcgttgagcggaatttcttgtgcgccgacgttttttataaaatggttataggactgcttttctatgaaggtttctgggccttttccaaaactggaatatgggacaaaatcccacacgggaaggaaataaaccctctccccttttttccaccctgttttttaagtgggaaaatccatttttttaattaaaatattttaaattggcccccacta

SEQ ID NO: 650429 - DNA, 100 bp, Homo sapiens
gcgtacgcagagaggggccctcgtccctctatcacggctcactggcaaggcattaacgcggcgcccgcccagcctagacacggtcaattttgctaagcat

SEQ ID NO: 650430 - DNA, 85 bp, Homo sapiens
gatatcgtaccggttgacgtggctacagtgagcatgattgcgcctctgcgctccaacccaggtgacagagcaagactctatctac

SEQ ID NO: 650431 - DNA, 443 bp, Homo sapiens
  misc_feature (4)..(4): n is a, c, g, or t
acgnacacccgctcctacacgccacatcgatgaccttcagtcctttatgttcgtctaccagcatcggaatggcctcgtccggggctgttccatggcccagccggccgacgctcccgcggccccaggtgtacagctccccctcggcagtgatggccgcactgtaagtgctcccgcaagcgatgtgcaccacgtgcttcccggcctgctttccagagaaggcggagatcaccttaggctcctccaaaggcacagagtccccatggcccagccgtccgccgtccccacagccccaggagtacacctctccagtagcagccaaggctaggtagtgctgaccatcagaatgggcagcaatttttacaatgtttctggaggcaaggccttggaccagctgtggggccagcgtgtcactattataggcctgtgtggacacgcggccattg

SEQ ID NO: 650432 - DNA, 157 bp, Homo sapiens
  misc_feature (65)..(65): n is a, c, g, or t
  misc_feature (108)..(108): n is a, c, g, or t
  misc_feature (111)..(111): n is a, c, g, or t
atccgccaccatgcccagctaatttttgtatttttagtagagacggggttttcaccatattgggncaggctgggctcaactcctgacctcaggtgatctacccacctnagnatcccgtgctgggattacgggtgagccacttgtgcctggtcttttt

SEQ ID NO: 650433 - DNA, 318 bp, Homo sapiens
tttctttgagatggaatcttgctgtgatgcccaggctagagtgcaatggcatgagctcagctcactgaaacctctgctttgttcccccggttcaagagatttttctgcctcagcctctcaagtagctgggactacaggtatgcaccgccatgcccagttaatctttgtatttcgtgtgtgtgtgtgttttggaatcattgttttagaaaaacagattaaatattagattaaaaaataggttaaaacccccaaaacttaaatctaatcttagtgatgtttacatttatggccatctgcctcagtttcatgacgtcgacg

SEQ ID NO: 650434 - DNA, 132 bp, Homo sapiens
ccgcggctaattcatggacaggaactaccccagcgccggcttcgggcacccgctcggcgccggggctcggatggagttaccagaggtcagcgaaagctagcttggtttattgcagctcctggatcctcgcac

SEQ ID NO: 650435 - DNA, 247 bp, Homo sapiens
acacggattaacacttacactacctttatcctcctaacgtatttcgtaaccacactctcaacattacaataagttttagaacttggaggcacttaagaacataattacatttactaatatattagttatcaagttatgatatagtgtccacttacctatcctattatattatggataagagaacagtagtctacactaatagtatagacccagagacctggtactatagaaacacaaccaaggacct

SEQ ID NO: 650436 - DNA, 1651 bp, Homo sapiens
  misc_feature (510)..(510): n is a, c, g, or t
taacctttttatccacctttttttttccgctttaagtggggcccccaaaaaattaaaacacttataagccgaggagttttaaatagcaattttgtgtggtaagcaaagtttacttctccatctctctcttaagtctcaaatgtgtggtctcaaagcttctctctccagttattttcacaaaacatggatatatagaacaaaagtgcttaccacaaaaccgtgtgtgcctctctgtgaaagatatttttttctctctttatttctctctcaagagacaccacacgtggaacaaaaaacacctatttatctgtgcgtgtgtactctccaaaacacatctcacccacagagttcattatacacgagaatacacccttatctctccacttgtgtctctaacagcgtgtgtcgggtgtgcgagtctctatacacacagtgtgtgtgtgtgttctatacaaagagagttctacacacagagagtgagagcgtgcgcagtgttatctacacacaaanagagtggcgcgacacgggtgtgggaacacagtgtgtgcgcaacaccctttacatgtgtgtgcgcttctctgtggagatattctctagagacatctgtgtgtgtgtgtttattatactccaccacacgattatgttctctccacgagtgtatataaaaaacaccaccccgctgcgcgcgggtgtacactctcccactatatattatcaccccctctttatatattataagaggcgggcgtcatatataacccccgacgccacatatatacaccaatatagaagccgcgctatatatttccacccctgtgtgggtaggctctccactacttatatatctccaccggtgagcaggggggggtacacaggcgcttaaacccatgtggaagaatatacgagcgtggaaaacaggttccccctaagtgggggtttacaacatgttggaacctccccataaaagcacctcatctgacccccgggtctctttattacttcctcctaaacaaactctccggggggaacaacgaggcgagggacttcacccaccttaatagtaaccaccctcattcaccccttctatttaaaacctcccagacaaaacgtcggggcgcggtgggtttggtggaaaaaacacgcgttggcgtccctccaccaaaaatcaacaccttgctggtgtgcccatcaaccacctcattctcttttttctaacaacaaacagcacaacaaacacagaggaggggggggggggcggctcctctaatagaaatatatcacccccccaaggagggggggccacacaactttacatcgcctacaccccactttttctttttgtccgacacaaagggggccccccaaacaagaagggacgccgcatataataaaagcgacgacacgcgccggccgcgctgttaaaacaagcgcgtgggcggcgggagaaacaactagcctctcggagaccctcccatggcgagagcagacaccaaccaccactctgcggggggtgacgaacatgccgcggccaaccaccacaagataaaaaacacgccgcggcagtagaaacacaccagccgcacgtgtcgacagccctatctcgtgcgggagagttagttataacccacagacgatactaccagacaagcaa

SEQ ID NO: 650437 - DNA, 404 bp, Homo sapiens
tatgtatacacctgaagccccagtgggcgtgtgttccaggtgctcttttagtttgccgtctataggcagcttgtgctacacagctcaattagaccctctacttgtcgcaaggacagagggctattttgtatcccgggttcttgcactttggtgtaccggcagagtcggatcacacctgggcttggagaatgagtgtaaagttctattgagtggaagcagctctcagccaatgggggagccagaaaggagatggtcttcctctggagttgggctgcttggtggccccagctctcctccgactgccctggccaaactccaccttgtccagccagtcgatggcctgccagagtgctggcatctgttggtgtgttcttccactggcgtgttcccctcgagagggtacc

SEQ ID NO: 650438 - DNA, 314 bp, Homo sapiens
tttgattctaaaacatctcttataccataccttctgtataaagtcagaaagtcatcttcaggggccccaaatggaaatactaattattgggaattggttaaatacattaagtgcattaatacaataaaatacaataagccattatataagcactctcctccagggtcacttgtcacatgtcatgttgtaggttaatatctgatgatgtagtatatagtaaaaaaaaaaggttgattatacatgtaacttagtgtgtgacatgtagatacatttactggttagagtgggtagataaataaatatgaaaacatgaa

SEQ ID NO: 650439 - DNA, 211 bp, Homo sapiens
cgtgtgcagtgtgtagacgagagaaacgcagattcaactgaataaatgaagtgaggtcaaaacaagagaggcactcaaaaacaccaggaacctatcttctttttttttattataatggttctttttttcttttttttatttttttttttctttctcatggcaaccgggggacccctctaaagcccccctgaagtcttgcaagctttggaaa

SEQ ID NO: 650440 - DNA, 667 bp, Homo sapiens
  misc_feature (607)..(607): n is a, c, g, or t
  misc_feature (647)..(647): n is a, c, g, or t
  misc_feature (660)..(660): n is a, c, g, or t
gttttttgttttttgattttacatttagtctatcatctatttaagtttttgtttatggttttaggtatgaattgaggtttttgctgtatatgaatattaaattattcaagcatcgtttattgaagaacctgtcctttttccattgaattgcctttgcacttttgtcaaaaatcaatagaccatgaatgtatgagtctacttctgtgctctgcattctgctttattgatctattttctaaatttatgtcaataacacactgtgtgtagtatgccttaagatcacatagtgcaacctctccaactttgatctctctccttttctttttggctaatctaggtactttgaatttgtatatgaatattagaatcagattgtcaattcctattaaaaatcctgctagaattttgtttgatatagaattgaatctcagataaatctgagtaatactgataacatattagttttctaatacatgaaaaaggcctatcattccatttatttatgtcttgcttggttactttcagcaatgttttgatttttcaatgtatagttcttgcatatctattaacaaatgtacccttatgaacttcatatattgatgctatngtaaaggctatttttttaaactccttgttcattatcagtntagatttactttnggtattt

SEQ ID NO: 650441 - DNA, 93 bp, Homo sapiens
actgaagacagtgccacttactactgtgcctttaaagttttggcatataaagtcctacatttggggtggcggtggtgcattgataaactcact

SEQ ID NO: 650442 - DNA, 155 bp, Homo sapiens
  misc_feature (3)..(3): n is a, c, g, or t
  misc_feature (18)..(18): n is a, c, g, or t
  misc_feature (65)..(65): n is a, c, g, or t
  misc_feature (142)..(142): n is a, c, g, or t
ggntacttggcgcgatgnacctccggttctgtggtgatctggactgtcccgactgagccactggnagaaatcagcacgctggccaagatgtcctctgtgcaagttacgactgctctgcaccaggctactaaaggtgctgctnggacaggggattg

SEQ ID NO: 650443 - DNA, 421 bp, Homo sapiens
  misc_feature (2)..(2): n is a, c, g, or t
  misc_feature (257)..(257): n is a, c, g, or t
  misc_feature (271)..(271): n is a, c, g, or t
anttgcaccctttaaccaaaggagccatttcccgtttttgttaccaaaccgttccaaagaaagctcttttacatactgatggcctacattaatgaacatggtaaaataaaatttaaagagattaggtgtctggttaaattatctgtctcaatttgagttattaaatttcgaaaaggatgatatagacgttgagtggttcaacaaccaattagagaatatttctttggagggtgaaaggaaaagacagagggttggtnaaaaattactggtnaaacaacagaagaaattaattggaagtataaaaccatggttgatggagcaattacaggaaaaattatcgcctgatttaccagatgaagaaattccaactttagagttacctaaggacttagacatgaaagatcatttagaatttttaaaa

SEQ ID NO: 650444 - DNA, 189 bp, Homo sapiens
  misc_feature (135)..(135): n is a, c, g, or t
agcttagagcggaacgggttccacgtgcggtactcctgcttcacgccgccctcggtcaccgtgacgcgcctctcgccgtacacagactggcccggcaccatgttagcgtgaccagcgcgtcctccgccccgcgtnagatgaagaggccctcgtgccggtgcgctccaccgacaccaccatggccccttc

SEQ ID NO: 650445 - DNA, 169 bp, Homo sapiens
cctgaaatcaaggatagtagtgaacactatatacactgtttgttatgcatccttccatatctacgataaagtttaattcataaactaggcacaggaagagattaataacagctaataataaaatagaacagtcgtaacaatatactgtaataaaagtcatgtgaaagtg

SEQ ID NO: 650446 - DNA, 360 bp, Homo sapiens
  misc_feature (354)..(354): n is a, c, g, or t
acaggtccagcgacactccataaatgtgtagatacccatggccatcttagacaagccagctcccatagttctagcctttcagggccttgagcttggccaacaccccttccgctgtctgctcacccatcaactgctcacgcaccttgcccttgtcgtcgatgatgaaggtcaccggcaaggcctcactgcgcggaatctcgaagatcccgtccgggttctgggccagtaccgtgaacttgatccccagcttgtcgctggcggccttcagttcctcaccctgcacattgtcgaagttgacgccgaacaccccgacattctggcctttcaactgttctgccagggcattgagctcgntgattt

SEQ ID NO: 650447 - DNA, 315 bp, Homo sapiens
gcgaggggggagagcaggtgttcatcattcagtatgatgatcttcgaattcattcagagaggtattttccagtggtggggtgatggggataggcgtggtggaatcaacactgtcagattgctcatgtgcgatgtccgagacagctaatggtgcggatgcttgtatccttgtcagatgcacggagactatgatggtgcatttttctttaattacttcgaaaattttttaagtgttacgttcacatgcctttatttaaatcaggaaaatccttgtggcttctgtggcagtgtgtgagtttgagctcaagccatgcca

SEQ ID NO: 650448 - DNA, 121 bp, Homo sapiens
gggtgactaaccttagtctgtcgcctgtggcatccatgggcgtgatttctaacctaccatgtttacatggtcctgcagaccccgcgtaacaccatcacgctcctaccaagccatagaaata

SEQ ID NO: 650449 - DNA, 347 bp, Homo sapiens
gttccgcctgttacctttgccggtctcggacccgcatgccagtgctctggcgctgctcaggtgccgggctggtctggggcgggcatgcaccgcccgtctcagggcgccgcttcttggctctgctgctgttgctgctgtcgctgtcattggcagctctgaacagcccctgggcaggtgccctgtgggatacgatctcggaccccgcctcagcggactgaggggtgctgagcggtcattggtgctggtgggacgaagcttgacacgtggcacacggatttgtgcccctcggaaagagctcctgtaggagggtactgctctgaggacctcagttcctcatccttgggacg

SEQ ID NO: 650450 - DNA, 175 bp, Homo sapiens
caacaccaacttcatcggtggcgaaatcgaagccgatgacgttcagatcaagggcggccaactgaacctgtcgaaccttcacaccgacctgaccggcaacctgagcatcgcctccggagcagctctgcaggtccgcctgagcgacagcaccaacgtgaacactccggtggtcggc

SEQ ID NO: 650451 - DNA, 229 bp, Homo sapiens
cggtcattttctacatatctaagttgcacatggaacccagcaacaagaccttaataagaaagaaagaagagtaggaactcctcaaagtacaaaaaagaaaaaagaaagcagaagagccactgaaagcagaatacctgtttcaaagagtcagccggtaactcctgaaaaacatcgagctagaaaaagacaggcatggctttgggaagaagacaagaatttgagatctggc

SEQ ID NO: 650452 - DNA, 1052 bp, Homo sapiens
caacttgcgggaatttcgcaggttggtgtcactgtaggtgttgactggggatttctagttgtgggggggtttaacgcgcagagacttgtgggagtgccggatcatggtccgtccctccacccgtccacctccaggtctacgggaagctgatgacccttgggtaagagggactagtgtggtcctaggagaagaacaggggagacctgtggctagtttataaacataatcatcctctgtctatctaaggactgctttccggaccccctagcctcctcccgaaccccggctcagatcttaccagataggtttggagagataatctgtcttgctcactctcttgtctgatgggcaatacaatcgacactgcactctgcaatgcactgttggagagggggtgaactatgggcaaacaccatggggggaaacttgtccaatatccggaagtcgcctgaccggagcgcagcagctcactgtgtgtcaaggtctcctgggcagctgggatcaggcaccaggaatcgcgcgtctgacctaagccgccaaaggtaccgcatgaacagccatcccaggctaaagtgtagtcagtgtggcacgtggaaacacctagttaccaagaagacgcacagagatgtgaagcacatcgtcagtgagctaggggaaagtgtaagcagacaatgggtagggtgtccaggtgatgtgggcatacttgattcgcgttccctttgctggagggcttaccaaatcagtcaagcgaaccgcccctgcgaatacgtggagtactacatatacggaattactcaacatgggttcagcccaaactcggggtaaagcaaacagcgatggtagccaggatgcgacttggcgaggacttggtcacaacgcagttcggatttggcaatacctatgggataacaattattcgtccatacgtgataggtccatagagacatgtacattggttctgggaccctgggattgtagatggatacacccattccaggaactgtctgaaactcgtgtagagaaaaagggagaggacaccctcgataccccag

SEQ ID NO: 650453 - DNA, 103 bp, Homo sapiens
  misc_feature (59)..(59): n is a, c, g, or t
tctagccgaccggcgtgtcagtgtctgctgtctatgacaatgagacacccgagcgcagnctcacacaagctgtctgttctcagtgggcagagtgttcttacat

SEQ ID NO: 650454 - DNA, 235 bp, Homo sapiens
ggatccctcgttatcatcggcacccagctaccctctcttgatggagacttgagaggagcagatgtttagctcgaagggcccgcatgtttctctcccggggccacggagtcgacttgaccttcacgtgaacctcttctatgccaacaagtctctggcacctgcaccgttgactctgaacttacaataggaccacgatttgccacgggagacctaggatggcatctcgttacccagc

SEQ ID NO: 650455 - DNA, 537 bp, Homo sapiens
agctgactctagagtatcccccctgtcaaccttccagtacccgtacgctgtaccttcagatcgatgtcactttggacattgatgcccatggtactactcaatgtctctgctgctggaccagagtacgggaaatgagaacaagatcactattactaatgacaagggccgtatgagccaggaacacattgtgcgtatggtccaggaagctcgagaagtcacgaagctgaagattaaaagcagagggacaggctgtcgccaagaattcacttgagtcctagtgcctcgacatgaaagcaacagtctgtagagatgagaaacttcaaggcttgattaccgatgaggactaacagaagattctggacaagtgtattgaaattatcaactggcttgataagaatcacactgctgagaaggaagaatttgaccatcaacagaaagagctggagaaagtttgcaagcccatcatcaccaagctgcaccccgaggtgttcctcagattgaagtcacttttgacattgatgcccatggtacactcta

SEQ ID NO: 650456 - DNA, 326 bp, Homo sapiens
agagggcctatcccggatctgggtagctgggagcggtttatcacaccacgccagctaattttgtatttttagtagagatggggtaatccttgtcggtcaggttggtctagaactcccgacatcaggtgatccacccaccccggccttccaatgtgctgggattacaggcgtgagccaccgtgcacggcctagctgtaccattttacattcccatcagcagtgtataaaggttctaatttctccaaatccccatacatacacacatacatcttttttttttttggagacagtttttttttctgtcccccaggaaccgggaatggtac

SEQ ID NO: 650457 - DNA, 118 bp, Homo sapiens
tatttaatgtcaaaacaattaatgcttcattattcatagattctctgaggttccgtagaaccacaccaccttcgtgtatggcacgtttgtagctcgttatatcaagagagaggctgca

SEQ ID NO: 650458 - DNA, 448 bp, Homo sapiens
tgtatgttgtgtgttgtgtgtagtgtggattgtgatatttgtagtgtgtgtagtgtattgtgtggattgtgtggttagttactgcgacttgtgttgggactgctgataggaagctgtctacaggaaatgctaacattgggcaccctgactgcaagttcaaagacacagcagttatgccagatggtcagtttaaagatatcagcctgtctgactacacaggaaaatatgttgtgttcttcttttaccctcttgacttcacctttgtgtgccccacggagatcattgcttacagtgatagggcagaagcatttaagaaactcaactgccaagtgattggtgcttctgtggattctcacttctgtcatctagcatgggtcaatacacctaagaaacaaggaggactgggacccatgaacattcctttggtctcagacccgaagcgcaccat

SEQ ID NO: 650459 - DNA, 454 bp, Homo sapiens
tcctattgctcgctatggagtgccatggcctgctcttggctcgctctaacctctgcctcccagggactggcaatgcttctgcctcactctccacagcaactggaactacaggcctgtgccagcatgacccagtacttcttgcgtcaatgagtagagatgggttttcaccgtgtcgactaggctgggctcaatctcctagtagctcgtaggttcgaccgcctcgggctcccaaagtgctgggatatgcaggcttgggccaccgcacccggcctgaagtgtatatgtttgttcttgaaaagaccagtgtaagtagaagtgtattttgactatacaattagttgaaattggtgtataagttaaccagatagtactctgaatcacagagatggttgaatactgacacactgtacctgggataattcctactggcctcatgtggaagggtggtgcctat

SEQ ID NO: 650460 - DNA, 662 bp, Homo sapiens
gttaatcaggttgttttaacctgatatgtttcatggtctctgtacctcattcactttggcaataatttcagagatagcaggcattcccatgggtaaagagggaaaaggaggaaaggaaaaaagccagaaattttacacctgagcctaacttcttttctaatttatttgtttgcttaggtacttggtgagagacctctagttttgtaaatactggctgaacaaaatgaggataagaaagaattaaaaaactaaacctttatttttgaaaacactgctataacatctagcataacctagcatatagcctctgaagcaacagaaaaggaaatatgcttgatattttcaactagtatgcctggacattttaaagttgattgaaaaggcctggcatggcggcttatgcctgtaatcccagcactttgggaggccaaggcaggtggatcacctgaggtcaggagttcaagaccagcctgtccaacatgatgaaccttgtctctactaaaactacaaaaatcagccaggtgtggtggtaggagtctgtaatcccagctactccgtaggctgaggcaggagaatagcttgaacctgggaggcagaggttgcggtgagctgagatggcgccactgcactccagcctgggcgacagggtgagactctgtctc

SEQ ID NO: 650461 - DNA, 141 bp, Homo sapiens
cacgagggggctttttttctaaaaaattttaggcttttcccttttttaggtttttaaaaaggatttttacaccaaatggccccaaggggaatccccccgggtttaccccaggtgagagagagttttcgaacgcgcgtttac

SEQ ID NO: 650462 - DNA, 151 bp, Homo sapiens
aatgtccatcaatacagtccttacaaggttactcatgaaaaataagtggctgggcacagtggactccatgccttataatctcaacactttgggatgccgaggtttcgagaccagcctagagcaacactagtagagaccctgatctcttgca

SEQ ID NO: 650463 - DNA, 427 bp, Homo sapiens
gactctacacggataccctgctgcttctcctcctcgcggggcaggtaatgacgaaaaataacaatacaggactctttctgaggcccatgttaactccgaatgattccactttaaatctctttaatgagcatccattggagggcaatgtctaggtgccaccagccgcgcgtaattccagcctccaatagcgtatattatacgttgctgcattcttacaagctcgtactttgatcttgggagcgggcggtcggtccgccgcgaggcgagccaccgtccgctccccgcccccttgtccttctctggtgccccctcgatcctcttagctcagtgtccagcggggcccgaatcgtttaatttgtaacaattagagtgttccaagctcggcccgagcctgctggatcccgcttcttggaattatgcactatga

SEQ ID NO: 650464 - DNA, 675 bp, Homo sapiens
atgctttagaagcctacagcaacattctgagactgctccaacatgcttgaagatctaagcttttctcttttaaaactggcacatactcagagcagtcttcttagcctatggtcgtacgtgtcaagacatcacgttgtaaagagggatgatttccttcttttgatttgaaaatttgcacatgctcaatgcttacattgtgcggttcgacgtcactacagcttcttttttttttttttttttttccctatttgggccaaactctgggaaactcttaaaatctttgttgggggcccgccccaccagggaccaaaacaaagcttttgaaaaaccttttaccatgtgaaaaaacgcacgtgacatttttttttaatttaaaatatacgccggggactttaacctgtgggttagtgcccatgtgctcttcagaattggctcttacataggcgtgactatattgttattcaccctttcttctcagctgtgggatctccaatgtgggtggattttctttctaccaaaacatctcaaaatgtgccctctcaaggccaatctccttttggggctgatattgttttggcagccatactggtttcgtttaatatacgcaacaggattagtgtggcggggaacacaccggacgattcaggggggggagggctaattaaagaaaacctg

SEQ ID NO: 650465 - DNA, 198 bp, Homo sapiens
gtgacatccactgggggaaagaatatcagagtctccatgcacacagcacgagcaggtaaaaaaccaagaagtgctagactatatactacttcaaaatcgtattttcatttagaaataaacatgtgtaacagtactgtgtcacttttacacgacacccgtcatcacttttcaattgactactttgcagctaacatggcc

SEQ ID NO: 650466 - DNA, 318 bp, Homo sapiens
  misc_feature (28)..(28): n is a, c, g, or t
  misc_feature (78)..(78): n is a, c, g, or t
  misc_feature (81)..(81): n is a, c, g, or t
  misc_feature (86)..(86): n is a, c, g, or t
  misc_feature (90)..(90): n is a, c, g, or t
  misc_feature (93)..(94): n is a, c, g, or t
  misc_feature (110)..(110): n is a, c, g, or t
  misc_feature (113)..(113): n is a, c, g, or t
  misc_feature (116)..(116): n is a, c, g, or t
  misc_feature (118)..(118): n is a, c, g, or t
  misc_feature (121)..(121): n is a, c, g, or t
  misc_feature (147)..(147): n is a, c, g, or t
  misc_feature (154)..(154): n is a, c, g, or t
  misc_feature (177)..(177): n is a, c, g, or t
  misc_feature (193)..(194): n is a, c, g, or t
  misc_feature (312)..(312): n is a, c, g, or t
  misc_feature (318)..(318): n is a, c, g, or t
cccttgaaagaggaaggtggtcatggcnttgcgcaggtgtatggcgagctggcggatgtagaggaaggcgtgctggtnggncacanccgnctnnagggccagcagctccntcnagntncanctgcatgaatctgatgaatgggaggncaccagngcgagctgaacttgcagttcctnacattactgtgatgtnnacatttgcttgaggacgtgtggccaaggaaatgtgtcctctcttgttgccggcatgactctgcttgaggaccagtgaaagccagcaccctgcagagactccttccccatgtgctccantacgan

SEQ ID NO: 650467 - DNA, 131 bp, Homo sapiens
agtcattccacgaataaccatagaaatgaaagcagaggcagaaaagaaaaataaaaagaaaattaagaatgaaaatactgaagggaggcccctcaaggaagattggtcttggaactaggaagggccttaaa

SEQ ID NO: 650468 - DNA, 275 bp, Homo sapiens
  misc_feature (28)..(28): n is a, c, g, or t
  misc_feature (78)..(78): n is a, c, g, or t
  misc_feature (81)..(81): n is a, c, g, or t
  misc_feature (86)..(86): n is a, c, g, or t
  misc_feature (90)..(90): n is a, c, g, or t
  misc_feature (93)..(94): n is a, c, g, or t
  misc_feature (110)..(110): n is a, c, g, or t
  misc_feature (113)..(113): n is a, c, g, or t
  misc_feature (116)..(116): n is a, c, g, or t
  misc_feature (118)..(118): n is a, c, g, or t
  misc_feature (121)..(121): n is a, c, g, or t
  misc_feature (147)..(147): n is a, c, g, or t
  misc_feature (154)..(154): n is a, c, g, or t
  misc_feature (177)..(177): n is a, c, g, or t
cccttgaaagaggaaggtggtcatggcnttgcgcaggtgtatggcgagctggcggatgtagaggaaggcgtgctggtnggncacanccgnctnnagggccagcagctccntcnagntncanctgcatgaatctgatgaatgggaggncaccagngcgagctgaacttgcagttcctnacatagcgtattgacatctgcatcgacggtatcgtgtacatggagaacgtgtccttcatagaccggcaaattgatgagaccatggtagccagcacatg

SEQ ID NO: 650469 - DNA, 129 bp, Homo sapiens
  misc_feature (101)..(101): n is a, c, g, or t
taaaatgtggactcagcgaaagatccaagggccgacttctccccaacgtgcgtgcacgctgatgtgaggtctgggcatgggaaagttcctgggcgaagcgntgggacacagacctgagtctcaagtggc

SEQ ID NO: 650470 - DNA, 704 bp, Homo sapiens
ggagaaccatcccggtaacccgatcaccgctgtcaccatgaaccacattgtgcaaacccttctctcctgtcaacagcggcagcctcccaatacgagatgctcaaggaggagcaggaagtggctatgctgggggtgccccaaaaccctgtcccccgatgtccaccgtgatccacatccgcaggagacctccgtgcctgaccatgtggtctggcccctgttcaagcacctcttcatgaacacctgctgcctgggccttcatagcattcggtactccgtgaagtctagggacaggaagatggtctccgacgtgaccggggcccaggcctatgcctccaccgccaagtgcctgaacatctgggcccttgatttcgggcatcttccatgacccattctgctcatcatcatcccagtgtaggtccgtccagggcccaaagcgatagcatcaggaaggcatcactttggagggccaaggggacgcttcctggcccggtgcaccgtggtatccccaacggtacttcctagtctgtgccatttcccttcgcgcccattggccccccaatgagggccaaggagagcttctggccactttggaccctgggtaattccccaacgtttaactctccgaagcgccttttcccaagttgccctttcagcccccctggtgcctccaccaataggcaccgaagtccctgtgcaatccaacg

SEQ ID NO: 650471 - DNA, 401 bp, Homo sapiens
tccgtgtgtagcagcagagacacaagcatcatcaccagatcctgtcctcctccctctgccatactatcgctaaaatacccctcttcaaataaaacacacagcccaattgaaaaaacacccctcccccagagagaatagttactgtgacattagactggagagtcagccaggtgtgatctgccactaatgaccactacagcaaagagacagagagagagggggagaaagagagagaaaaaagaggcagagagagagagaggcagagagagagagagaggcagagacacagaaaggaggaaatatgaggagaagtgatatatggagctagagaaggaagaggtctgttgagatgtaaaagtaagcgtcgacgcggccgcgaatttagtagtagtaggggccgc

SEQ ID NO: 650472 - DNA, 570 bp, Homo sapiens
  misc_feature (560)..(560): n is a, c, g, or t
  misc_feature (563)..(563): n is a, c, g, or t
gaaaataggtaacaacataaagacaatatgcaaatatctttgagctgcattctttacttcctttttattcctagcaaatcagtaacaatgaatgccttatctcctctacatgcaatatggatatcttccaagagagtcttgttttacaaagacaatatttaatttttatatgctttccagatatcagcttcaaatataatataacttgagtagcattctaagccttttttttttttgagacagcctcgctctgttgcccaggctggagtgcagtggcacagtctcagctcactgcaacctccgcctccctggtttaagcaattctcctgcctcagcctccctagtagctgggattacaggcgtgagccaccacgcctggctaaattttgtatttttagtagagacagggtttcaccgtgttagccagggtgatctcgaactcctgacctcaagtaatcctcctgtctcagcctcccaaagtgctgggattacaggcatgacccaccacgcccggctgcattctaagctttttaaaagaaaatagatggcaaaaatagagnggnggatcaa

SEQ ID NO: 650473 - DNA, 268 bp, Homo sapiens
  misc_feature (88)..(88): n is a, c, g, or t
  misc_feature (116)..(116): n is a, c, g, or t
  misc_feature (181)..(181): n is a, c, g, or t
  misc_feature (213)..(213): n is a, c, g, or t
ccgggccgggattgaggccagtcttagatgtgcagtaccgtgactgacgtgctggtgccaacatcgtccaccgtgggtcgtacagtancccgtggccgggcagtgagggacaggancccttcctgcaagtggctcatgctgctcagtaatgagtcagccctgccacatgtgcatacttgtnagctatggagatgatgaggctccctcagcagngcgtacaatccagcgggtcaacactgagctcatgaaggctgccgttcgggggtct

SEQ ID NO: 650474 - DNA, 338 bp, Homo sapiens
ttttttttgagacggatcgtctctgtcgcccaggctggagtgcagtggccaagtctcggctcactgcaagccctgcctcctgggttcacgccattatcctgcctcagcctcccgagtagctgggactacaggcgcccgcagccacgcctggctaatttttaaaaaaattttttattttgaatagagacggggtttcacatgttagccaggatggtctccatctcctgacctcttgatcctcccacctcggcctcccaaagtgctgggattacaggcgtgcagccgcgcccggccagatactccatttcttaaatccttcaatggcttccagtgcactt

SEQ ID NO: 650475 - DNA, 505 bp, Homo sapiens
ggcgggcgcggtggctcacgcctgtaatcccagctctcagggaggctaagaggcgggaggatagcttgagcccaggagttcgagacctgcctgggcaatatagcgagaccccgttctccagaaaaggaaacaaaaaaaaccaaaggacaaaaaaaaaaaaaaaaaaaaaaaaaaaaaattgtgtggggggcgccccggcccccgaaaaaaaggtttcaagaacacattgcgggtggcggcggcgggcacccagagcagggtacgtggacactgggcccaaaagcgggtctacacagagagaaaccgggcacagaggaaccagggtgtggggctttcccacaaaatataaaaaaggcgcgcggggggaacaccggaggcggtctgaggacgcaaactaccaagaggggagatccggggagggacaacagggcgcgttcaaaccaacagggcgggtccaaggcggagggcggataattaaaaataagcccgcggccgggatagaatc

SEQ ID NO: 650476 - DNA, 912 bp, Homo sapiens
gattatattttcaattgactacctttcatacttgggatgccctcagaggaacataacagttctcgtgaccaaagcttttcgatacttctattaagaagaatccatcgtgcagggcgcgagtggacctcatgtctgtagtcccagtcacttggagatgctgagagcgggcggatcacgaggtcgggaggtggagactcatcactggccaacgacaggtgaaacccctatcatcatacataagaatcgtaaaaggtatagccagtggcgtggtgcgtgggtgccttgtagtccgcagcatattcaggcgcaggctcgatggcaggatgaatgggtattaacctggaatggcggagattgcagagagccgaggatcggcagccacttgccatctctcaagacactggggcgttgacaagagtcggatggacttccgtgcttccgttgactagtaatagatgctttaagagcttaagtcaaaacattctcgtaggtggatgccaaaatattttctgaatgcgccgaaacttggttctagacatgaccattgtcatttccagaaaaggctcgaatctctaaatagcgcaccgtttgagccgtccgataggagggccacgggcatgaggctcggcgcacgagtttgcacatttgtctcgctaagctctgagacgtctattcttagcatacccttctcgtgccgtgagcgggatgtcccttgagcacatgggggattcaaccctagcgggcaggagtggggattagcgaattgcacaaatcacactttcgggctggacaccgaatttgtcctgctttctgcacccctggtcgctcaaccgcggaaagggactcctcaccagagtttgctgggcacaatgggcggcactgaagaacactgcaacctgtcacgacaagatt

SEQ ID NO: 650477 - DNA, 897 bp, Homo sapiens
  misc_feature (44)..(44): n is a, c, g, or t
  misc_feature (79)..(79): n is a, c, g, or t
  misc_feature (87)..(87): n is a, c, g, or t
  misc_feature (123)..(123): n is a, c, g, or t
  misc_feature (160)..(160): n is a, c, g, or t
  misc_feature (167)..(169): n is a, c, g, or t
  misc_feature (184)..(184): n is a, c, g, or t
  misc_feature (210)..(210): n is a, c, g, or t
  misc_feature (218)..(218): n is a, c, g, or t
  misc_feature (228)..(228): n is a, c, g, or t
gtgtctgtacagcatggatgtggacagggaaaacagcaagtgcncgcggtgggacatgccacaggtcaggctgggtgtnaataaagngttcacactgcttccctgctttccccagtgactganggctctaggccacctcctcctcagcctcctcctcganctcgccnnncgtcgctcggctgtngcatcctggtactgctggtactcggncaccaggncattcatgtngctctcggcctcggtgaactccatctcgtccatgccctcgcccgtgtaccagtgcaggaaggccttgcgccggaacatggccgtgaactgctcggagatgcgcttgaacagctcctggatggccgtgctgttgccaatgaaggtggcggacatttttagcccccgaggtgggatgtcacagacagccgttttcacattgttggggatccactcaacaaaatagctgctgtttttgttttggacattaagcatttgctcatccacctccttcatggacatgcggcccctgaacacggcggcaaccgtcagtagcggccatggcgggggtcgcaggcagccatcatgttcttggcatcaaacatctgctgggtgagctcgggcacggtcagcgcccggtactgctggctgccccggctggtcagtggggcaaagcgggcatgaagaagtgcagccggggaaacgggaccatgttcacagccagcttccgcagtccagcattgagctggcctgggaagcgcaggcaggtggtgaccccactcatggtagcagacaccaggtggttcaggtcaccataggtgggcgtggtcagctttagggttctgaagcaaatgtcgtagagagcttcgttatcaatgcagtaggtctcgtctgtgttttctacgagctggt

SEQ ID NO: 650478 - DNA, 261 bp, Homo sapiens
gtcgatgcctcactttgagaggcactgatgggtcggttcacctgacggttggggagtacacgaccagcctggccaacatggcgaaaccccgtctctactaaaaatacaaaattagccaagcatggtggtacatgcctgtaatcccagctactcgggaggctgaggcaggagaattgcttgaacctgggaggcagaggttgcggtgagccgagatcgcgccattgcactccagcctgggcaacaagagcgaaactccatctc

SEQ ID NO: 650479 - DNA, 244 bp, Homo sapiens
gatgacaccaagacccccatttgaggacatctatcgtatactgatgatgctgagtcacaaatagaatttataaagattcttcgctataaaacttgtaagctaactgcaacggaaaaacaccttcttttgctgctgcacatatgactaccctccctcaggtgcacttggctagctccaagcacctggctttggactaggggacaacggaagagcccttttgccatcacaccacctgtacctctac

SEQ ID NO: 650480 - DNA, 327 bp, Homo sapiens
gggcaggcagcttgctagctgctaggtcgactagtaggacccccatctagcagccgtgccgaatacacgctgcgcttattctccgacttataactgggcggacgagtggaatccgacatgatttaattataacgaagtatcgtgaatgcccggtggcggttgttgactgcgatgtgatttcttgcccagcgctctgaatgtcaaagtgaagaaattcaatgaagcgcgggtaaacggcgggagtaactatgactctcttaaggtagccgaatgcctcgtcatctaattagtgacgcgcatgaatggatgaacgagattcccactgtc

SEQ ID NO: 650481 - DNA, 369 bp, Homo sapiens
gttttttcctatttttttatgggggaacttcccccccattttttttttggggtttttcctttttaaattttgaagggggcgggccttttccacccctttttttaaccccctgttttttaaattaacttttttttttttttttttggggaagaaaaattgatgttggcggaaattggggggctcttcccccccaggggggataaaattttttccaaccctcccccggggggggtccttcaagggggggagcccccacccgcctgccccggttttttgggtccgggggggtgggtccccaaacccccccaaaaggggggggggggggaatggacgttttttttttttttaaaaaggccttttcccttttta

SEQ ID NO: 650482 - DNA, 108 bp, Homo sapiens
  misc_feature (84)..(84): n is a, c, g, or t
ttatagacgcattgtctctagagtaggagcgacgtcggggtggtactagtagcatgcagagtctcgttcgttatcggaattaancagacaaataggtccgacaactaa

SEQ ID NO: 650483 - DNA, 161 bp, Homo sapiens
gagactcaaccccaaggccctgacgctggaccagtggctggaacagcacaaaggggacttcaacctgctgtgacctgcccgcctcgcggccccttgttgggattggggggggcagaggggcataggcaaaaacacccccataaagccattgttttcccaga

SEQ ID NO: 650484 - DNA, 188 bp, Homo sapiens
cctgggggggccccccccccgtatcaaggccgagctgacttcctcagccccagcctgttacgccctggccgtcagccccgacgccaaggtttgcttttcctttttggccaacggcttcaccccttcccctgctgcatgtgggggccgatgggcaggggcccccggtggaaataaaatgtttttttcca

SEQ ID NO: 650485 - DNA, 129 bp, Homo sapiens
gccccccccccccgggggtaaaaaaaccccaaaggggacccccccccccccccgttcccaaaccttgcccaaaggggtttttttttttaaaaaaaggggacgttgaccccggggggaggggcccgggga

SEQ ID NO: 650486 - DNA, 111 bp, Homo sapiens
tcaggccggaataaaggtttattgtgctggtgccttatatctcaccacctgtagagctgtgcagaggttgggggagccccacatggagggatgggggagaggacctcctgc

SEQ ID NO: 650487 - DNA, 851 bp, Homo sapiens
gagagagaactagtctcgagtacgatttttttttgagtaccaataagtctttattattcattggtattttcccaggaaaggagaagggaagggaaatgtcagcttgtgtaaaaaatgattagaaaatgggaaaggaagtacccagtacagaaaatcaaccatcaaataaaacaccccagtgatggggtcccaaagcccaaaggggctcatctcctgcagtccaggaatgagggcacaggatcatggaaaaaaacagacaggtacgggctttcctaccctcccgccccataaattcaagattttacacaaagtttgggtttctagcagtaaaacatggagtcacatcgttcgtctcctataaacaatcttgtgccccctttgacataaagtttctagcacctgcataaaagttcctgagtgactggatatacattcatattccctttctgtggctcctgaccccactttctacaatggaaggcccccaaatggcatctcttaactttaggattagaacattaaaaatttagtggaagggttttgtatcccatccaaaattaacagtcaggtgtgtactggggtcctgtgtcatggtctggttctgagcaacagagtcttgccttctgcaaacccagtgcttgtcaggtctacggtgtacccaattctcaggccaaaccggcaaccctactgcatatcgaggacaccatacgattcacacgtgcatcactcacaccggatatcacttctgattatacgccatgccatcacttccggtcacatcacatttcatatcataaagagatattgccagaaaatccaaaccaatggaatcttcacaagaaaccacttga

SEQ ID NO: 650488 - DNA, 339 bp, Homo sapiens
tggcatgatacggatttgttgcacaacagtggtatattcacactctctgtcgacatatttcatcaggttacgcagaaccgtgtgtaattaacagcttatgattagcttagtttatgggatttcccatttaatagttctggcttggaacacccttgtcgtcgaagacactgaaagcaaaacgttaggtaagggggactgctgtagacacaagatctttttctcacggttttactcgcgatgccagaaggaaataatatcgttgtgtatatgaagaaaagttttaataccattaggtggacaagtaaaatacacgatcgagtgaatcagaaattagcgttt

SEQ ID NO: 650489 - DNA, 102 bp, Homo sapiens
ctagtcaccctaaataattatgtaaatgcctttactttgaactagtacattgcaaccagatacatcacttttcagagttagagtaacataataccttggaaa

SEQ ID NO: 650490 - DNA, 215 bp, Homo sapiens
tctggatgcaagtgtcgcccaggctggagtgcagtggcatgatatcggctcactgcaacctccgcctcccgggttcaggcggttcccctgcttcagcctcccgagtagctgagaccgcgggcactcgccaccacacccggctaatttttgtatttttagtagagacggggtttcactatttttggcccagggtaccgcagctcgcacattcgtca

SEQ ID NO: 650491 - DNA, 397 bp, Homo sapiens
atcgcgtaggggagcatcagaatggcaggttgtggtttcggtctccacgcgtgattgggctattaaaaagcaccttcatagtaccagaccatgtggtgccttgtgagagtataggacgagtgctggctcagagatgctttgaggcgggaatcaactgcatggtctaccaactaacctcccgtgggaggcacgcctcagactcaatgaaacgactaccatgtgccatgacagacggtggtgtcggtttacgggaacctcagcagaatctatgaatgaatggaagcattatttgttctcgaacattttacttttcttctgtcagccactaccgccatcctcagagagcatctggtagaacagccagactggaagtttacagcaagtcctgttgccgtgt

SEQ ID NO: 650492 - DNA, 575 bp, Homo sapiens
cggccggtgagattggaagtaggcggcggcggcaggcggcagaggggagtccgaggttatagcgtactcaatagatacccgcggaaacgctacgggtctaagaacacggatacagggtagtactacctagggtactctacaaagacacaggtacctagtacccctagcaactagctagggcagataagcaagcgagtcgaccatacgtcccccatactggacgcgcccagggtctaggcacgcccaggtccggtcaactcctactcacccccacacatgagtcccgcaattcctagccgacagcacctcaggctgggccaactacagactccaagcgcgtcctctccagactatgctgttacggacttcacataagtactcgctctaccgccttcatcatccagcgaatacgcggactcatgattttctcctcactaccatcagctattccgtgagtatactttcgtattacttatctatggtaacgtgcacgtagagctcgaaaggaagaagtgtttcacctggttcgcacttgtccgaccagagcatgcagatagcactaaaaagtcgacacc

SEQ ID NO: 650493 - DNA, 180 bp, Homo sapiens
gcccattccgccagcttcgccactgtgtccgcatcgttcgacacatagacgaagacaaacttgtcaccccccagccgccctgcgaacgacgcgccggtggcgagcgtcttcagccgctgagccaggctgatcagcaaggcgtggccaccgccgcgaccgtgcagatcattgaccgcccgg

SEQ ID NO: 650494 - DNA, 469 bp, Homo sapiens
  misc_feature (347)..(347): n is a, c, g, or t
cttctatgcacactatatatcaaaaatgagctgcaatagcatcgatccgactaatggacgagaaacagtcgtgcatgtccagtgatcatcatcagtattctactacagagtttgaccatctgtcgccgaggaatggagctgactttgacatcataggcataaaggagctacttgagggtctggaccatagtgttcatttagaagagaatctgacagccagggcatattgcagtcgtcgctgctgtctttgttttacaaaccagagcacaagtcctctgacagcacattcctggtactcatgtctcatggcatcctggagggaatctgcggaactgtgcatgatgagnaaaaaacagatgtgctgctttatgacaccatcttccagatattcaacaaacgcaactgcctcagtctgaaggacaaacccaaggtcatcattgtccaggcctgttgaggtaatccgtgaggg

SEQ ID NO: 650495 - DNA, 126 bp, Homo sapiens
gtaaccaggtcggtcaggatcatgtcctgggtaagggcagctttctcttctgtgatcagaggatacttagaacaccaaccgcactgttatgttcccctatcttctttcctctttgctttgaggacg

SEQ ID NO: 650496 - DNA, 1083 bp, Homo sapiens
gccgggccgtgctggtgcctgtctgctgctgtgcgccgtccgtgtgtgcaggctgtgtgtgagcccatcatgcctgggactggccctggcctgcgcgtccctcacctgtgctacactctaccctgcgtctctactgcctcttctgccgacgtgcctgccgcggcacgacaccctgtgcagcactactagcccctggggcagtgccacctagcccagcacagggattcctagggaccgaaccaaacctaacttacgggaaccaggccattctctagccaaaagcgaaacaaactccacttcatattaacacctggcccggctggctaattgggctttctccagctacacatccaaaagccctccaaacgaggtcccccaaacgcaaacaccattcctacaccgctacgttcacgtgcaaacggcggcctgggaccaggggcacccgcgcccaaacaccacttgtcagctcaagccaaaggaatccgactccgccagcagccaagtactaataccagaagtgcgcttgcgctcctgcaaacacaaccatgaacctaaatggttccccagaccctggatcacaggcatgagccccaaaccaattttggcgaaccgtacaatcccgaaacacttcggccactaccaaaaagccaacatcaagcacctttggctaacccaacaacgggcagtcaaaggctcgcacccacaggctaggttgagaagttttcccccagccgggccacaaagccaggattggcactgcttggccccaatgcgataggcggagggggatccccgagttccttttccaatatatttcatacgaccttgacacactatgggcacttaacgaaccgactaggcaactttggcacagcagcacctaccaataatagaagatggccccaaaaatcaaaaaggagcccactattccccctcctgacaccctattaagtcacagttcggaaaacccaattgggaatggaggactagtcctcggcgatctctcacccataagcagcgcacgacagccgacgccccgcagaaggatcaccagcatcacctatattccgtacacgccccaca

SEQ ID NO: 650497 - DNA, 163 bp, Homo sapiens
  misc_feature (47)..(47): n is a, c, g, or t
caacatctgcacttggagcactgaaggttggcaccattttatctggnttctctgcctccaccttggctgcttcccccattggagaggaacctgctttggtgggcagggagaagaaaagtgacttcagattttccttccccgcagcaggcaaagcaacaagaag

SEQ ID NO: 650498 - DNA, 154 bp, Homo sapiens
ttagaggatcccccctttgaggtgctgacaggacaccaacctggtgtgaacagatggactatggttcaaggacactggaattgaggagctgatcaaggctctcttcagccttgctcttgtccctgcctcttatcagaagcacaggttagacaca

SEQ ID NO: 650499 - DNA, 909 bp, Homo sapiens
ttacgggcattgccggcaggcggtgtcgcggatgggctggtgccccgcagcatgttggcggggtgctggttgtgctggcggctggcatgggccttggggctgccggctgcgctcgtggcctgtgcgcggcggccgtgcgtgtgcacgccatggacttcaacatgaagaagcatggctgtctgtgacgctgggcatcgttcattcacccggtgcggtgcagttcactggagtgagaaattttggccaggcttgagaagactgagcttgatgcccactttgaaaaccattctggccctgggcatgacagcaccaagaactggacagagaagatcttgagtgcagacagaggtgcttgctgcagcccaaccccagtgcccgagtggaggagttcctgtatgagaagctggacagtgaagtgtcccctcaagggtcaccaacaggggaagctgctggctcaggtacatggacagacgcggacagtgagctggggccagaccacccccgtatgggaagaccactgatcaaggatggcagaagctgagaagcaaattgggaaccgcggagagggattataatccaacacagaccgtcacatacagcttcactcacaccacttgcgcaacttccatggaggggggactggaagaacagtctcgaccgcagagagcggattcatccaaaaccgggaggtcttggaccttggcatgccctgccacaagccgaggtgctgacagcaacgggccaaggaagcgggaggacaggcccaaaggacaaaggaagcgaggcgcactgacgctaacaacggaggacctagaagccaacgggcgagagcacaaaaccaacgacgagagcgagagaggccgacacgaagagcgccacggcgcaccgcgaagagcagccgcaaccggc

SEQ ID NO: 650500 - DNA, 105 bp, Homo sapiens
ctgttaccactgagccaggagctttgcgtcgaccataggtcaggagtttgcgtcgagcaacaggccaggagtttgcgtcgaccacaggtcaggagtttgcgtcgt

SEQ ID NO: 650501 - DNA, 219 bp, Homo sapiens
ctctagaggatcttatccccggctctgggtagcatagggaagttgttaaaaaactaaaaggatagatccattaatgaggtaacaaattattgccttcatgttgggacagaacagggccaaatggaaaagaatgaaagagaaagacagatagacacacacacacacacacagacacacacacacagatttttttttttaattaaaaaatatatattgttg

SEQ ID NO: 650502 - DNA, 254 bp, Homo sapiens
cctattatagaagtatcaatagcacttattatttgccactatttgaagtctgcactttacaacagattctatggactaggtaggattcatatccatacagctcgttcaactttagcgcctgtctcgtcccagtggcttttccagaactactgccttcaccatgaagctccatgagctatcccaattcaaacttgggcttcttcagccattttaaacttttcataacgaagaacatcatggagacggatacatag

SEQ ID NO: 650503 - DNA, 100 bp, Homo sapiens
cggcaacgaaggtaccatggaatattgagctttctgactgctacaccaacttatatgggtgcagtttatggcaccctaaaacagttgtagtaacatcaaa

SEQ ID NO: 650504 - DNA, 267 bp, Homo sapiens
  misc_feature (9)..(9): n is a, c, g, or t
gaagagaangcggcacagccccagcgccgaccagcagggggcacaggacagagaagaggaagcggctgcagctccagtgccaaccagcagggggcacaggacagagaagaggaagcggcagcagccccagcgccgaccagcagggggcacaggacagagaagaggaagcggcagcagccccagcgccgaccagcagggggcacaggacagagaagaggaagcggcagcagccccagcgccgaccagcagcgggcacagggacagaga

SEQ ID NO: 650505 - DNA, 104 bp, Homo sapiens
gaagcaggagaatagtatgaaatcatggaggtggaggtagcagtgaaccgagatcacgccattgcactccaggctgggcgtcagtggccactgcaccccagcct

SEQ ID NO: 650506 - DNA, 155 bp, Homo sapiens
agctcggtaccccttccaacctctggtggctgccagtttccttggcattcgttcctggttttgtagacgtgtgacagcagcccaggaagctgacccgatagacagcgtgaagtcgtacccgtgcgttgtggacaccgacgcgggacgctgctgca

SEQ ID NO: 650507 - DNA, 997 bp, Homo sapiens
agcggaggtctcgtcgcccctccctgcaagggctcagtgctctctcccctcctgttcttcgtccgccgctgtatcctcggtccctgagcggccctcaggaattccataccctcgataatctgcttactgtaggatcggtccactgttggcggccctgtcctgccgggtctccttcctgcacgatcatccgggggcgccctggatgagtccctgaagatctatgctcctctgtacttgatacttggcgacagttctactcatgcgactcctggctttggtgcctggtctgccaaggatcttatgtggccccttctccattgcagcgcaagaaacgcgaggagagggctgctcgacacatttatatggccgacttggccgacagaaggcactattcacgaatgggctgtagctagagaggaaacatcacgaacattaaggaaactggacgacgatccttcctgttgtatgactatcatcacgactgcccattgtaacattgattgctattccgcaggagtgccaatggcatgtgcttgagaagcgatttcacactattgtctggcaccgtttaggtttcatccgtcaggcgaacgcgaacgaagattcgccacaccattcttattgtcgacccaggaggcccgccatatgcggagaacgtaggtaacaaacacatcagaggagcaaacatgagcgaaaaaacccagaaagaatgaatatgcatttggtctaggtcgggaccatttgtggattcactagtgcagaatagtggacccaagggcattggacctgttgcagaaccccttaatgcgaatgattcacgttggcattcatccttagtttgcctttaaaaccgggttccagtcccgacactgtttcaaaccgttggcgtactttgagccccagatgctgacctccgaaattccctttctggcatttacacggcgctccctgtttaaaccggcaaccccgggttaatatctcctcattctaacagaaa

SEQ ID NO: 650508 - DNA, 349 bp, Homo sapiens
  misc_feature (349)..(349): n is a, c, g, or t
accaagtcaattcagagtaccttattctatgtggttattaatacagtatgaacaattagtctaactctgcatagacagggtctagattttgttaacccacatgtataactgcagttagcttaaattacaatttgaagtcttgcggcttttatatagttaggcactatattacactatcgaactggcacactccgttataggttcatgtgactgtcctgtcataaggtgcttattaatggaacaactacacagactactgttgtacaacctttagcatctagttcttttaccactattgttgccatgacactacctcggattatgcatgagtgagtatagtaccccgtgn

SEQ ID NO: 650509 - DNA, 261 bp, Homo sapiens
ctggcctatatactctatttatgataatctctcctcatatttaatactcaaatattgtgcatattcgtatcattcactattaagtctggcttatttctttgataatgaactgaatgtggccgtggcgcaatgtctcacgcctgtaatccctgcactttgggaggccaaggtgggtggatcacaaggtcaggagatcgagaccatcctggctaacacggtgaaaccctgtctctactaaaaatacaaaaaattagccgggcg

SEQ ID NO: 650510 - DNA, 275 bp, Homo sapiens
tatatgctgctcagtatacagtaacaaacaggatgatgctggagactgcagcgagaatcgctactgcataaaaatgcatgagagagagataggcggagatgtgctgaacagcgttctgtgatcccacaggagtgataaaatagtgtcgatgctggatatttcagagttgaaagcctgttaaaattattctcaggactttctgtctcttctgaagggccttctccaagacttggaacacctaagtctgtcaaccaagctgtatctcagagtagaaa

SEQ ID NO: 650511 - DNA, 1119 bp, Homo sapiens
  misc_feature (34)..(34): n is a, c, g, or t
  misc_feature (210)..(210): n is a, c, g, or t
  misc_feature (217)..(217): n is a, c, g, or t
  misc_feature (228)..(228): n is a, c, g, or t
  misc_feature (268)..(268): n is a, c, g, or t
ctgcgattacatcgccctgaacgaagacctgaanacgtggacggcggcggacatggcggcgcagatcacccgacgcaagtgggagcaggctggtgctgcagagcattacaaggcctacctggagggcgagtgcgtggagtggctccacagatacctgaagaacgggaacgcgacgctgctgcgcacagattccccaaaggcacatgtganccatcancccagatctanaggtgaagtcaccctgaggtgctgggccctgggcttctancctgctgacatcaccctgacctggcagttgaatggggaggagctgacccaggacatggagctttgtggagaccaggcctgcaggggatggaaccttccagaagtgggcatctgtggtggtgcctcttgggaaaggagcagaattacacatgccgtgtgtaccatgaggggctgcctgagccccctcaccctgagatgggagcctcctccgtccactgactcttacatggtgatcgtagctgttctgggtgtccttggagctatggccatcattggagctgtggtggctaagtgatgaagagcaaggagaaacacaggtggaaccaggaggggactatgctctggctccaggctccagagctctgaaatgtctctccgaggattgtaaagcgtgaagacagctggcctggaactggtactggagtgacagacgcatgtgtccaggtctctcctggtacattcagaagcctcagttccctttacacaaacattgtctgatgtccctgggaagttgggtccggggggagaaacggtggagcaccaaaacgtgcccggacacacaagggacgcataccgtgatgcccttggtaccctccaaagccacgttgggcccagcaacaccgggggcagactgtggcatgtttgaacgagtggccacaaagtgggcagcaacacacagaggacaaaacagacgaggtggaggcacaaaccaacggcagaggccacaagagagaagaccagccagggcgttaccaagcatgtgtcccatcaccgggcagaagttgacgatcaacaaggcagagacgctatcctgcttccttctgttcttctcttcgttctcttgtacggaga

SEQ ID NO: 650512 - DNA, 1373 bp, Homo sapiens
gctcatcactgttcatcgcctgtcaccgtctctctccctttggcctttttcttcgctttcttcttcgtcgcttttgtctctaatccccgctgcctgtccactgtgccgctgatttccgcgcgatattcgcgctctcgttctcggcctgtagtgcttcctcgtgctgttctcccccttctgctctgtgtcctttcgtctccattcccaccacttgcttcggctcttgttcccctgctcccatcttttccccttggaccctgtgtcacgtttaacgttgtctcgtcatgctctcctgtcggcccttcttggtttttcgtccctctgtcagccctgtacggcgttgcggcgtatgcttcccctgcctctcgggtgtcctccgctctgttttctccctctcgcgtcacttctcaacccttattcgtgccggctatcttcggacaccatcctcccagggcttttatccagctctgagtctcatctgccgcattttccctacgctcatctctgagatgcccctaactgttgcgcaagttccacctggtatcctctgtactacgtccacgtcagagccaagttactttttttttgtctgctgccctctgccctatccggttgacggcagttccgtactaatccaccctgtcagtaatgtacagattgtttgctcgcgttccatattcagccttttatccccatggcaaatgaccatctgccttctctcttgactcctgtccaatcagcagaatccacatcactagttttcgttgggccactgcattagccttaaacacttagggagagccatcacctataatacctctggcttagaaattttttcatgcacactgcttggaatcgtactgcctaacttgaaacatgcaattggggaagaatcatctagaatgatttctgctatttctagtagaaacgacaatgtctcgttttccaaagataatgttatacatcctactctttgtcattctctctctgatacaagttcaatgttcagttttccttagtttttaccttgttttctctataggtcatgatttctgtgaagcaaaaagatgccttttaccatgaattcttgagtttactatcaataatattgtatattaaggggatcagaagtaggatagcgtataaaataagagatagcagaggataaaagagaaaacatttcctcttataactttgaagtgaatttgtaaaaaagatttgtagagtcaatcagtgtgtctaaattattttatcaacaaacttgaacatggaagatattcctttttaactcttgtaggtgaacttctttgaagttatttagaaatatcctctggaaccaattattttattgtctaataaatatgacttctgca

SEQ ID NO: 650513 - DNA, 115 bp, Homo sapiens
tgggagagaacgtaggtctcagaacgaattagtcagcttcagtctcgtcagcagcgctgcttggattctttgttcttccgcacttcttcaatgtgcttatccttctctctccact

SEQ ID NO: 650514 - DNA, 931 bp, Homo sapiens
  misc_feature (499)..(499): n is a, c, g, or t
atctttggtaggattctgccagatgcttttgcatcttctgttcctgggtaatggtgggtcttaatggaggctgggtggaccactgcgccgatccagatctgtcaacgaggtaggaacagaatgctcatcgcacgagttaactacactagttagacgaaaggacgagaggtcttgctcgctttctctgactcaccgtttttctcgcatggtcgcccgtgtagcgattcccacctagtccgctccctgcgtatacaacctttgtctctcgtctatagtctgtgcgccgaagctcagtcaccttttgccgcacttgcgttaagatagctgtatctaacgtatgcaactgttacagaatcgaaatgaagtgagtctaggatgaccaatgtagtaacaccagggttacctgtttcacctctgaacttctgtgcgaaagtggtattacaagtagactcgctagacgtatcccgaagtgacgaggatccaagggcgctggtcaaancatcccgcaagagtcattggccatactcgccattagccagtttctaacatcgtgtttcagggtatccgagctgtagatgttcttatccccgatatttgtgagttctttggggtagcgcacaaatactaggggtatagggtgtattttaacaaatatatcctaatggtcatatctattctcttttgtagctgctgtcttgacagataaacgaaaatcatcgtgcgcttttctatgctagaatagaatagtcaagcatccgggaactggactcacgcctttttacgccgggctcgacctgccaaataaggtctttaaaacctatcgatgggacccggggccccccagagcgtaccgtgaacacgggagcaaaagcggcccccgaggagaaacacggggcacgcgaacaaggcgagcggaacgccacaaatacac

SEQ ID NO: 650515 - DNA, 385 bp, Homo sapiens
aaggaagatgtggggtgaaagtccatacacagagtctccatcggagactgcttagtgcagctgtgataagagggtcttcgacctccagaccccagaattgtaaaggcattgacagcttgcactgcacacctggaaaagctgcagacactcaatgccaggtcacaaaagcagccaggagggaggctgtgcatcattgtgacccaaatgtgagacatgcagtcaaaggagataactttggagctttaagattggacttccttgctggattttggaattgtatggggcctttagtaaaactgctatggagaacagtttggaggttcttcaaaaaaatcaaaagtaaagctaacatttgacccacaagttccactgcaccattgtatct

SEQ ID NO: 650516 - DNA, 511 bp, Homo sapiens
tgtttacgaatgtattagtcttgtcacgttagaatggttacttcaaatggaacaccctcgatgtaaatgaataaagtatataatcaagttgttgtatttatattatttttacgaaaattcgttagactaatctcgttgtaaatataattgatgttttatatgtcattttactttgtagaacaatttatccggacatccttttgttataaaatttccttatgtaaaagtacttagatgaaagtgtaaataaacaaaataacatagaatatcaatgatattagcaacacacgaaaacaatgacgttaaaggtcctagtaacatataagagtcatacggtcactgatatatacatttccattaaatttttcataatgagggtctcatttttgtctgtttgtttattctttagagtaaaaattacccttcaacacgtattttgataacatcataaaaatatctttacagggaattagtaatattcaagtagtaatattttacatatgataacatg

SEQ ID NO: 650517 - DNA, 379 bp, Homo sapiens
ttagactatataggagaaggctggtcttgaacccctagacctcttgatccgtccgtctcgagctcccaaagtagctgggattacaggtgtgatgtcaccgtgcctggcctatgccgagtgttgaaaacagattagatctattaaggtaactgcctgagtcagcgtaacaacactaccatatacatgaatcatgtccaagtgaaattacctaaagaataatctttcatctttactatatatattgtacagagacagaagtctgagtcactagtctcccggggtggattacaacggtggaatctcggctcactgaaaactccactccctaggttcactgctattctcatgtctcagcttctcaaatagcttcaattatagg

SEQ ID NO: 650518 - DNA, 147 bp, Homo sapiens
  misc_feature (88)..(88): n is a, c, g, or t
gagtccctgtcctgcgcccgcgcgccccgggagcctacccagcacgcgctccgcgcccactggttccctccagccgccgtcgtcatcncggtaccactccggagtcgccgctgccgcggtttcatggtcctctgcgttcagggacct

SEQ ID NO: 650519 - DNA, 1516 bp, Homo sapiens
  misc_feature (12)..(12): n is a, c, g, or t
agattttcatgntaaataaaattaaaaaaaaaaaacaaaaaaaaaaaaaaaaaaaaaaaaaagggagacagacaaaaaagaaaacccaaaagggacccaaaaaaaaaagacaaacccaagaaaaactagggacacaaggaaggagccacacaaaaaggaggaacgacgaataaaacgcgcacaggcatgggccagacagataagcgaaggactagagacgggcacaccaggcaacctgcggcaacatgggcgaaggacccttatacttctcggtgggggggcgcccatctatttgggacacaactactcccatacaggagacgatttaaaagcgcttcataggggcaaaaaattataacaattatctcaaagggtgtatctaacagggggtgatcaacaataaaagcgtgccattagtccatcgagacgacacggacaaacacgaaatgggccactaaccgggggcgcatcagcgacattcttgcggaaacacataattaaacctccccacgagagaaaccatagaggacaccaacacccaccaccccgacacccacaccacgcaccagcacaaaaaagcgcacaaaaccaaacaaaaaacaacagaccaaaatggagagagggggagaggacggagagtagaaggggaagagaggcgaaggatgacccgcgcgaagggagagggcgaacggagcgagaggaagatatagagagagagagggaggcggagaaagaagagaaaagaagcgaccgagtagggacaaaaaggaagggggagagaagagaggggagagagggaaggcacaggagggaaagacagagagaggggaggcgaggccagagagaggggaggtaggaagaagaggagacgggagacggtgagaggtgacaggaggggaaagagggagagaacggcggagtgaggagcgagagaagggcgtcgaggagagaggacgggaggcgggggagggaaggaacgagcaagggagagaggaggaagacgagggggagagaggagagagggagaacgagaaagagtaaaaggataacaagaacgcgaggagcggaacgagcaggagaggaggaaaatggcgaaaaagagcaaaaaggcaaaggaagaagagaggaaagggagagagaagggagaagagagatagacgaagatgaaaaaacagcgagaggagaaagcaaacaaggtcgacaagcagaaaggaagagaggaatagcaatacggggaaagagaacgagtaaaagagagagacataggggaaagagaagaaaagaagaacagaggcaagcaagcggaagcagagaaagagaaaagaggcagagcgagaagaaggagagaaaagacagagaatagacagagaggataggatgacgagagaagaaaagagaggcagaaggagaacacgaggaagggacgaccagaaggaggcaagcaaaacgagaacaagaagcaggaaaggaaggcaagagggagatgaagagagaaggaacgcgagcagaggggaga

SEQ ID NO: 650520 - DNA, 500 bp, Homo sapiens
accttagccgatctatttgcacagtctttattccgtggctttaagagatattccaagatctgcgtataagacgatgggctgtgcctgatctgggtcctaaatgtgtcttgatgtcaagacacacctcctcggtgagttccagagcataagtccagatgctgtcagtatactgaattcactctactacaaatgatgggccaagggctaggtgggctgttatcaaattgtgttgtttacacaaatgctaacccagggtcctcgcccatcagctgccagtgccctctgctactcttcgaggctatggttaccccaagtcttttcattgcattctcacctggtgtgaaattggggctccctcgcaaacgctggtttcgctgttcaaaaaagcggaatattgtatagaacagcatgttgtcttcagtctgttttgcagcatctaaaaattttcgtgcagaaatgttgtcatggacaccaatgccccggatacacgttcgcagggg

SEQ ID NO: 650521 - DNA, 163 bp, Homo sapiens
atggaaattatgactggagatgagatactcagttatactagatacatgtattaataagggaaaaataaagaactaaaatatttacatattaaaaatcaccatgcctggcccagaatcaataattgttaatgcttcatcgagactttcttaaatgaaactggca

SEQ ID NO: 650522 - DNA, 293 bp, Homo sapiens
actttagtcacctgcgatcgatggccaggtccaggcgattgtcctggacccccagttgcattcgtaggggctcatcaccgacaggtgcaaatgcaatgcagggttgctccagtgctgtaggcgccaatacacttcggcgaacggcaaggccttgtacgctagacggtggagtcgagcactccgagcttgagggtgccgccgacaattcgcctttcaacgcagcggtgttattgcctcgaaaaccttcgagttcgcccaacaggcccgagttccctgatgaaccagctcaccct

SEQ ID NO: 650523 - DNA, 224 bp, Homo sapiens
ttaaggacatgtaaccctttacagctagtttaccaatccccttgatcctcgctagaaaaaagaggagcgtgtgaccttaggaatcaacggggctggactggatcctcgagtaaatatcttagttcgaggagaagtttataaacgctctcctgagccagtatttcaaaacttctatgataaactaaaagtgccagtaccagagattccaggaacactatgtagga

SEQ ID NO: 650524 - DNA, 168 bp, Homo sapiens
cgcacatgagatgcatggaacgttgtcaccctgctgaagatcactctggtgccctgtggggaggagccaatgccctcaccccacaatggggcaggtgggggcttggttgctgaccctggcccggagtccccacagagcaccttctgtagctccagcttgtctcccttg

SEQ ID NO: 650525 - DNA, 138 bp, Homo sapiens
aagctgacattgaggatggccagcaaagggcaggggacattctcattctgggtgatgatgggtgtgtactcctcacttccactggatccacttgatgtgatagacagactgtcccgtgaagcgttccttggaggccgc

SEQ ID NO: 650526 - DNA, 160 bp, Homo sapiens
ttgagtttctgttctgattaatataggttatttgtatttttttattgatttgtacaaaacctttgtaattttaaattttagattttattaatttatatagtgcataaagtttagaatttatgcattatataagttaataaaattagcatggccttccatg

SEQ ID NO: 650527 - DNA, 84 bp, Homo sapiens
cagaaatatgagatcaatgttctccgaaacaggatcaacgataaccagaaagtataagtgtctgagctccaagacccgcgggaa

SEQ ID NO: 650528 - DNA, 195 bp, Homo sapiens
gaacaagggacgctctcccaggacgtcgggtcttctgcttgttttgttctcgcctcgaatctctggtcggtttggcagtgtaagtctggctcgggtgaatgttgaggccttgttcccgcctggcccatggagtccaaaactacttacctggaagaccttgccaccaccccctgagtatgaatttgccccgtccaa

SEQ ID NO: 650529 - DNA, 161 bp, Homo sapiens
  misc_feature (122)..(122): n is a, c, g, or t
  misc_feature (146)..(146): n is a, c, g, or t
ggatccggttgcagtgagccgagatcgtgccattacactccagcctgggcaacaagagcgaaactccatctcaaaacaaacaaacaaacaaacaaagaacatagatcaaataatagaacctnggaagggtgtggtggttaaaaccngtattcccacaattt

SEQ ID NO: 650530 - DNA, 403 bp, Homo sapiens
tacgaaccgctatgtcaagctctggatagatagagaaatcatagaacaaacagcacacgatagtattgttgggaagctgactagatgtacacaggacaatcacttcacaactgggggtggactgactgtgtgttatgtgtgcgcagcctactagataataccatgataaaagcatgaaggcaggctatcttgcccgtcatcatttgcgagtactaacatgggttggtacacttaaccagttcccagcatctttgtggcacgttggttggcctcatcagtgctgctcttgatggcgatctgccttctgcatgactctgtgtcggtccggcgatttctgtgtgtcgatctcgttgcccatatccagggccatgtgacggaggttcccgatgcgggtcgggtggcg

SEQ ID NO: 650531 - DNA, 299 bp, Homo sapiens
gaattatgctatgacctaacacctatttacatagtatttacattatattagccattgcgagcgatctagagatgattcaaagtatatgcgaggatgtgtgcaaattgtatgtgaatcacaaccattttatacaagggccttgagtacctgttgaccttgatggggtagggggtccctccgcccaaccccctttggatcatgagggatgcctatccactcgagcacctagccacttgctgtcctatagccattgtctgtgggcccatgaccttcgatccaacgtgtcattcttggtgacc

SEQ ID NO: 650532 - DNA, 702 bp, Homo sapiens
  misc_feature (317)..(317): n is a, c, g, or t
  misc_feature (473)..(473): n is a, c, g, or t
aaataccaaaattgcatgcaggattgtgtaaagaccaatgccaggttggactgccagaataagccaacagtgcgtgatacgcttccccctgcagagagcctatgacggatatgcagtcagggaggtttcacatcaccatgattcctatcccagaaaagcagatgttcatagctctgggaatggaatgtgactcttgtggagagcctataagcgaacgcatgaggggcgcctgtttatatggataagatggggctataaatgcccttatcttgcctcggctcttctaggcctctttagggttaaagcatactcccttntgagaatttgtggtctaaccagttgtctagcttcacgtcctgtttctatggattgtttgcaaccagcttttgctgcaactgttactgctgattaatatcttgctaatcataggttatggaaagactgtgtttctgttttaaggctctgttagaaantgctgatgcacacactatattgtaaattcttatctctgtatactgtacttctgcatactgatgttatgttaaattacttcaccctcgtgaccatctcacctcataatcaaatgaccataaatccctcactaacctatccccaccctcactaaacttaataataaatgctggtatatccagtgcattggcggcatcacaggaccagaagggggaccccccggacacagct

SEQ ID NO: 650533 - DNA, 349 bp, Homo sapiens
tgtgaagactgagatttggaggggccaggcaggggcagaatgatatggtttggctgcgtccccacccaaatctcaacttggattgtatctcccagaactcccatgtgttgtgggagggacccagcggggaggtaattgactcatggggactggtcattcccaacgctattctcgtgatagtgaacaagtctcacaagatctgatgggtttatcagggggtggcgcttttgcttcttccggatcttctcttgctgccacgatgtaagaagtgccttttgcctcctgccatgattctgaggtctccccagccatgtggaattgtaagtccaattaaacctctttttcatcc

SEQ ID NO: 650534 - DNA, 231 bp, Homo sapiens
gggggggccccccccccctttttttttcccccttaaaaaccccgggggggcttcccccccccggttttttttttgggggggggggggggtactttttttccccggggacccctttttccctttgggccttttttggggccccttaaacacctttttttccaaaaaaaggggggggggcgggcggggttttcccgggttttttttcccccccgggcccccccccggggccga

SEQ ID NO: 650535 - DNA, 424 bp, Homo sapiens
tgcactatctgtttgtaccaaatggctaaacctcttgccggagcacgtacatctactcccatatcttcactctacagataatttcacataaagatttacatcctggtctctggtgatcttatcttgtcacatctgtgcctatttgcgctttagttccgtctgccgttccacctttttctgagctcgatctacatttatttgctttccattgagttcctatccgttcatctcatccactgctattctgtggcatcttcactgccctttcaaagctttcttatttcagactcctcttcggattttccacttttccatccagtcattacctttcaccaccttattgcaggcccataacttgccgatagagattccttaagtgcgctcatcattcattttcttctcccaaaattcttgattgttgact

SEQ ID NO: 650536 - DNA, 405 bp, Homo sapiens
tcaagattgtctgcgacacctaacaatggaaggtgctaaaaaacgatatggtgaaattaccgaatcaattcaagaacgtttggattttgaattgctgacaatttcgaattctggatatccaggttactttttgattgtacaggatttcattgccgaggctagaaaaatggacgtatcggttgggccaggtcgtggatcagcagcgggttctgccgttgcatattgtctcggaattacgaatattgacccaattaaatacgacttgctttttgagcgtttcctaaatcctgaccgtgtatcgatgcccgatattgatatcgactttgatgacgagggccgtggacgtgtaatggaatatgtaatcaataaatatggtcaaaaacaggtgtcgcagcattccttgca

SEQ ID NO: 650537 - DNA, 788 bp, Homo sapiens
  misc_feature (8)..(8): n is a, c, g, or t
  misc_feature (85)..(85): n is a, c, g, or t
  misc_feature (136)..(136): n is a, c, g, or t
  misc_feature (157)..(157): n is a, c, g, or t
  misc_feature (164)..(164): n is a, c, g, or t
  misc_feature (171)..(171): n is a, c, g, or t
  misc_feature (173)..(173): n is a, c, g, or t
  misc_feature (175)..(175): n is a, c, g, or t
  misc_feature (177)..(177): n is a, c, g, or t
  misc_feature (182)..(182): n is a, c, g, or t
  misc_feature (199)..(199): n is a, c, g, or t
  misc_feature (202)..(202): n is a, c, g, or t
  misc_feature (214)..(215): n is a, c, g, or t
  misc_feature (221)..(221): n is a, c, g, or t
  misc_feature (254)..(254): n is a, c, g, or t
  misc_feature (258)..(258): n is a, c, g, or t
  misc_feature (260)..(260): n is a, c, g, or t
  misc_feature (264)..(264): n is a, c, g, or t
  misc_feature (266)..(266): n is a, c, g, or t
  misc_feature (270)..(270): n is a, c, g, or t
  misc_feature (274)..(274): n is a, c, g, or t
  misc_feature (278)..(278): n is a, c, g, or t
  misc_feature (291)..(291): n is a, c, g, or t
  misc_feature (295)..(295): n is a, c, g, or t
  misc_feature (325)..(326): n is a, c, g, or t
  misc_feature (328)..(328): n is a, c, g, or t
  misc_feature (331)..(331): n is a, c, g, or t
  misc_feature (333)..(333): n is a, c, g, or t
  misc_feature (336)..(336): n is a, c, g, or t
  misc_feature (373)..(373): n is a, c, g, or t
  misc_feature (379)..(380): n is a, c, g, or t
  misc_feature (422)..(422): n is a, c, g, or t
  misc_feature (433)..(433): n is a, c, g, or t
  misc_feature (442)..(442): n is a, c, g, or t
  misc_feature (465)..(465): n is a, c, g, or t
  misc_feature (467)..(467): n is a, c, g, or t
  misc_feature (500)..(500): n is a, c, g, or t
  misc_feature (503)..(503): n is a, c, g, or t
  misc_feature (509)..(509): n is a, c, g, or t
  misc_feature (537)..(537): n is a, c, g, or t
  misc_feature (546)..(546): n is a, c, g, or t
  misc_feature (559)..(559): n is a, c, g, or t
  misc_feature (575)..(575): n is a, c, g, or t
  misc_feature (602)..(603): n is a, c, g, or t
  misc_feature (667)..(667): n is a, c, g, or t
  misc_feature (711)..(711): n is a, c, g, or t
  misc_feature (783)..(783): n is a, c, g, or t
aatgatanatgtacaaaactgtgtattagtgacgacttatgagggtgctgaagacagaggtgactgggtaccaagaagtctgtanaccaaagaggaactggaactcaaggttttaatgaggacaagaaaaaaaganaataagggctttgttattttnttttttngtaaagnananancatcnattataagatgaaatcnganttaggtagaaannaaaaanatcgaaaagttacctaagtattttaatataacnaaantntctntntttnaccnttcnaactacacaaaantgangtgatataattctaactactgtagtaaatnncnccntnttnccctttctaaaggctcactgatatggcagcccttggnccaaannttcttttcttcatgagaccaccaccataactcactgcttaanaggcgtatgangggaaattntgctccccttcccaccccacttntngaaaaccatctatatacagaggcagagtaatgnggnaactgntaggcctcaactataagggggggggggngggtccttncccatgggtttgntaacccagctgcttgnggggagggagcaaatgcgactgcttgnncaacacaagtggtgacagctgttggaggatcaggggagaggagggctctgggaagggttaaganactcatcaataaccatgccatggttccacatgagacactaatcncatcacaagggctgcaactgtcactgatatactaggtcaagaaaagatctactttccagaaacttcaaagcntgtat

SEQ ID NO: 650538 - DNA, 481 bp, Homo sapiens
gcccagaagttgaagaccagcctgagaaataaggtgaaaccctgtctacaaaaaatacaaaaagttagctgggtgtggtggcgtgtgcctgtagtgctagctactcagaaggctgaggtgggaggattgtttgagcccaggaggttgaggctgcagtgagttctaattgcgccactgcactccagcctgagcgacagagtgagacactgtcttaaaagaaattgaaaattgtaaaaagatgaaaagaaaagttttgagcattatttgcatcattgggatacataggtcacttcacaagatggtcaagttgaaggaaataccacgcagtgtctaggtcctgttgtctgtagggtgcggcagtttttcatatggggttgagcctcctaaatcgtggagtcagggcaagaaaggagtagtgactggtgattcattgttgtagtggttgggaatctgtattgtagagttggggataattaaaagc

SEQ ID NO: 650539 - DNA, 100 bp, Homo sapiens
tgggggggggggggggggttttttatttttgggggggggaaggtttttttattaaaaaagaggggggggggtttaaaaaaatgtttttgaaaaaaagttt

SEQ ID NO: 650540 - DNA, 1173 bp, Homo sapiens
ggacagtgctgacactacaaggctcggagctccgggcactcaggacagtcagtgagtgagggccttgcgacccctcggaatttaattctcttacttcaatgctcttaataattatactcatcttcaaacaattgttgtatgcaatatggttgctaccgagagacgaatcttgctggcatcgttacgatgaagagattcgagataagtctatagtcacaaacatacactgtgggctattgccaagatttccatgatctactatagtcagaaccggaagtaggacaagggatctcatcaagtctatttgggagaggaacgatcgataactagtcagacgtttcgtaaccaatcggaagatcactccagataggttctaaacaagcgtgaattatagagccaagaatcccgagaacttcacgttgatcacactgcctgtagtgatatcattcagaagaggcgaacatagtgcataggagcgatctgaactacgttatggaagaatctcaggaaaaaatgttaggaaggaagatttatgaagatagtgtagagtcgaatggaatttattaatcatgaatgagctgccaagttattacgataagtatggtcaggacacagtatgatttgcattccaaaatgaatctaagaaagattccgttggaacctagagagagcagatagggtatgccctcagactttgcacatgcacaggtggccatggaaactcatatggcgaaaggacgacgggttggcgaagtccctatggatagtcaccgtggggcaacaggattgtgtccaaagaccagtgtggcaaataaagggaggcttaaagcagaagcgggcgttaaactattaattgaaacccgtctggaacagcttaaaccagacatctttcttaggtctacgtgtgcacacatcgattggggtctcggcaccactggcgactggggacctcggtcggtttccaagaaaagaacgaacttgggatggggccagtgggtcggcatttctccgacgaaaacaaaacgtggggaattcccacttatcaaaacgcaaagggatttggggaccccattctggtgctccctacggtggccccacacacaacaattccgggcctggggaaacctgacagaagcatcccttggaaagaggcacaccagggcggggcatccc

SEQ ID NO: 650541 - DNA, 767 bp, Homo sapiens
gcacatgtacttttctctgcgcgtgtgcgtggactcctcctccccgtcctcagggctccagggacaccatggcgctattgacgcgtgcagcaagctgtccgtgctggcattgattaggtcctttagcacgccggcgtgcagcagctaccatggtctcgtgtgagccggacgaaaccgcgcacagtcggtgttatggccaatgggcgacttcgtcacggcgacttcaggcgaagcgaggcgctggctgctaagccgagcaaaggagcaacttcgaaatgttacgttgcacgattcctcggattccagtgagaaggcaaccggctaaagattgcacccgaaatgtagctttccttgagctagcggtaggatgttgggatgagtcgggactttgaaattgatcgccgcgcatatcagtagcctaggctctgtgacgttggggaggtggagtccgtcacagaggcaatagtcgcactcagaagtcatcctttatggatgaattaaccatggcagggtggccaaaggcactttcaaaaacacatcaaattgtgtgatttccacccccaatggctgaaccagacgggccatcacacggccgtgggaccatccgctccggaaactgggcccgtgggcctctgggtggcgaacttgcgggataacgggtccatggattcacgcgtgcgcgaaccaacacaaggccaaggggacggggaattaggcccttacctcccggggaaccaagaagttgggacttggttggcgacgaacat

SEQ ID NO: 650542 - DNA, 2418 bp, Homo sapiens
cagagacagagagggctgttacattgtaataaaagtgtcaaacaaccgagaagacaacaatcctaaatgtgtatgcagaaaataacacagctgccaaaatacatgaaggaaaaactgtcataactaaaaggaaaaagacaaatctacaattacagttgcagacttcagcacgcctccctctcttactgataggtagaacaactagacagaaatagcaaagaggtagaactcagcaacaccatcaaccaacagatctaatgaacattgctaaagtgcttcacccaacagcagcagaatacacatccttttcaagtatccattaaatatatacgaggatagaccatatgctctggaccataagacctcaaaaaatttaaaatcatggaatgtgtgatttttttcaacaacagtggaatcagattagcagacaggaatatcacaaaacacttgggaaataacacttctaaatgatccatgggtcaaagaggaagtctcaagggaaattttaaaaatattttgaacttaatgaaaagtaaaacataacgaatttttttgaggcacaactaaagcaataccgagagggaaactcacagtattaaatgcttatactaaaagacaggaaaagggccaaatcagaaatctaagcttccacctaacctgaaaaaagaagagcaaaagaaacccaaagcaagcggaaggaaggacataataaagaaaagccgagaaatcagtaacattgaacatgagaaaacagtagaggaagtcaacaaaacaaagggctggctctttgaaaagacaataaaattgacaaatagcaagactgacagagaaaaagggaaggcaaaaatttccagtatcaggaatgaaaaggatataactatagatcttgcagatatcaaagggatcacaacaaacaactctgcacatataaatttgacaacttagataaaacgaaccaattctttgaaaagaactcaataggaattagataatttgaatagtcctgtaactgttaaggtaattacatttataatttaaaacctcttgaaaggaaatctccaaatcttgattgtttcactggatacttgtatcaaacattcgaagaacagtgaacaccaggtctgtacaatttcttttcaaaaaaaaagaaaggaagaggaggaaacccatagtcctgtgacactattcttacctgatattaaaccaagacagttcttaaaaaaaacagtatcccttatatgtgtagttggtaaaattctttccaaaatattagcaaatggaattaagcaatttataaaaagaattatatattgtgactaggattgatttccgggattcaagactggtcagtattttaaaaatcaatgagtataatcttccatattaacgagccaaaaaagaaaattcatatgatcatatcgatttagaaaaggtgcttaataaaattcaaaattcacttataataactcagattactaggaatagagggaaatttcctcaacttgattaaaaaacgtatctaaaatatctatagctaacatcatacttcattgtgagagactgctttcttcctagggaatggcacgcttgtctaggcaaggatgtctgctcctaccactccttttcagcatagtcctagaagtcctagccaacacagtaaggtaagaagaggaaatgaaaagcactactaaaggaagaaataaaattgtctgtatttttaggtgatatgattatctatgtagaaaatcccttgtacaaaaaaaaaaaaaaaaaaacaacacctgaactaatacgtgagtttagcaaggtagcaggataaaaataacataaaaaataaattgtatttcaagatactaacaatgaacatgtagaaagtgaagtttaaaatacaataccatttataattttgcaaaaagaaaaaagatggaaatccaacaaaaaatgtactggacctatgtgttcaaaactacaaaactttgaaaagattatgttaaataagctaggaccagaaagacagatattacatgttctcatttacatgtgggaactaaaaataaagctgatctcatgaaggtagagagtagaatggtagttaccagaggctgggaacagtgtgtttgagagaggcggggataaagacaggttggttaataggtacaaacatacagttagatagaatcagtaagttctagtgtttgagagcagattagagtgactatagttaacaatatattgtgtatttcaaaatagctagaatagaagattttaaatgttcccaatacaaagaaatggtaaatgttcaaggtgatggatatcctaaataacataaaaaataaattgtatttcaagatactaacaatgaacatgtagaaagtgaagtttaaaatacaataccatttataattttgcaaaaaaaaa

SEQ ID NO: 650543 - DNA, 94 bp, Homo sapiens
ggcacgagggttgaagagttacagaaacatagggctggcaattccatgcttattcctagcatgtgagggacaatggaaacaagcgtgattatga

SEQ ID NO: 650544 - DNA, 179 bp, Homo sapiens
tatgactcgagcgattcgaatctcgattggagcctgaacgagagcagtgccttctgaggttgccagtctgctggtccatgtaggccacgctgtacttgcagtggtacggtgatgttctgggaggcctcgtgtggacatcaggcgcagtgaaggtcagtctggattgccacattcggcag

SEQ ID NO: 650545 - DNA, 884 bp, Homo sapiens
  misc_feature (658)..(658): n is a, c, g, or t
  misc_feature (766)..(767): n is a, c, g, or t
  misc_feature (770)..(770): n is a, c, g, or t
  misc_feature (772)..(772): n is a, c, g, or t
gatgcgcgggggccatattagcagcggttattcggtgagcggtggtggtttattcttccgcggagttaagggctccgtggacatctcaggtcttcagggtcttccatctggaactatataaagttcagaaaacatgtctcgaagatatgactccaggaccactatattttctccagaaggtcgcttataccaagttgaatatgccatggaagctatgggacatgcaggcacctgtttgggaattttagcaaatgatggtgttctgcttgcaggcagagagacgcaacaatccacaagcttcttgatgaagtctttttttctggaaaaaatttataaactcaatgaggacatggcttgcagtgtggcaggcataacttctgatgctaatgttctgactaatgaactaaggctcattgctcaaaggtatttattacagtatcaggagccaataccttgtgagcagttggttacagcgctgtgtgatatcaacacaagcttatacacaatttggaggaaaacgtccctttggtgttcattgctgtacattggctgggataagcactatggttacagctctatcagagtgaccctagtggaattacgggggatggaaggcaattgcttgtgaaatataggtgagtggtgtcatgttgaacanactataaagagagggaaatgactgaagtcagattggttagtatcacgttataataacgacatggtgtagaattctgtgaaaggtgattgcctacaggagatgcagagnntcngntcacaaagtgggggttccaacggagaagcacgggtggaaaaaaaaaaaagggggggggaataatggggggataaattgcatggtttcaaagagcgattttattgcagcgcgc

SEQ ID NO: 650546 - DNA, 507 bp, Homo sapiens
tatgactatctcgccttaggacaatatctagtggagaaggagacttaaaggtatgcgggtgctatgatagaccttgctagtatgagagatagatgtccaacttcattgttttggttggtggctatccagttgtaccaataccatttgtggaaaagactattcttttcccaatgaactgtcaatgaatataaaggtgagggttgatatttatcccctcaattatattctgtagatctgtatgtttagccttagctactatgcccccaagtcttgattaatgtagctttataacaacttttgaaatcagtaagtgtgagtcttccaactttcttctctttggggatggtttaggctgtagccttgcatttccgtatcaatttcagggtcaggttgatctgtttctgcattaaaaacaccacggatatggacagggatcgcatagaatctgtagatgaagtgggggagtatagtcatcttaccaatattaagttttcaacctatgagctc

SEQ ID NO: 650547 - DNA, 844 bp, Homo sapiens
  misc_feature (618)..(618): n is a, c, g, or t
  misc_feature (726)..(727): n is a, c, g, or t
  misc_feature (730)..(730): n is a, c, g, or t
  misc_feature (732)..(732): n is a, c, g, or t
gatgcgcgggggccatattagcagcggttattcggtgagcggtggtggtttattcttccgcggagttaagggctccgtggacatctcaggtcttcagggtcttccatctggaactatataaagttcagaaaacatgaaggtcgcttataccaagttgaatatgccatggaagctatgggacatgcaggcacctgtttgggaattttagcaaatgatggtgttctgcttgcaggcagagagacgcaacaatccacaagcttcttgatgaagtctttttttctggaaaaaatttataaactcaatgaggacatggcttgcagtgtggcaggcataacttctgatgctaatgttctgactaatgaactaaggctcattgctcaaaggtatttattacagtatcaggagccaataccttgtgagcagttggttacagcgctgtgtgatatcaacacaagcttatacacaatttggaggaaaacgtccctttggtgttcattgctgtacattggctgggataagcactatggttacagctctatcagagtgaccctagtggaattacgggggatggaaggcaattgcttgtgaaatataggtgagtggtgtcatgttgaacanactataaagagagggaaatgactgaagtcagattggttagtatcacgttataataacgacatggtgtagaattctgtgaaaggtgattgcctacaggagatgcagagnntcngntcacaaagtgggggttccaacggagaagcacgggtggaaaaaaaaaaaagggggggggaataatggggggataaattgcatggtttcaaagagcgattttattgcagcgcgc

SEQ ID NO: 650548 - DNA, 808 bp, Homo sapiens
  misc_feature (582)..(582): n is a, c, g, or t
  misc_feature (690)..(691): n is a, c, g, or t
  misc_feature (694)..(694): n is a, c, g, or t
  misc_feature (696)..(696): n is a, c, g, or t
gatgcgcgggggccatattagcagcggttattcggaactatataaagttcagaaaacatgtctcgaagatatgactccaggaccactatattttctccagaaggtcgcttataccaagttgaatatgccatggaagctatgggacatgcaggcacctgtttgggaattttagcaaatgatggtgttctgcttgcaggcagagagacgcaacaatccacaagcttcttgatgaagtctttttttctggaaaaaatttataaactcaatgaggacatggcttgcagtgtggcaggcataacttctgatgctaatgttctgactaatgaactaaggctcattgctcaaaggtatttattacagtatcaggagccaataccttgtgagcagttggttacagcgctgtgtgatatcaacacaagcttatacacaatttggaggaaaacgtccctttggtgttcattgctgtacattggctgggataagcactatggttacagctctatcagagtgaccctagtggaattacgggggatggaaggcaattgcttgtgaaatataggtgagtggtgtcatgttgaacanactataaagagagggaaatgactgaagtcagattggttagtatcacgttataataacgacatggtgtagaattctgtgaaaggtgattgcctacaggagatgcagagnntcngntcacaaagtgggggttccaacggagaagcacgggtggaaaaaaaaaaaagggggggggaataatggggggataaattgcatggtttcaaagagcgattttattgcagcgcgc

SEQ ID NO: 650549 - DNA, 715 bp, Homo sapiens
  misc_feature (489)..(489): n is a, c, g, or t
  misc_feature (597)..(598): n is a, c, g, or t
  misc_feature (601)..(601): n is a, c, g, or t
  misc_feature (603)..(603): n is a, c, g, or t
gatgcgcgggggccatattagcagcggttattcggtgagcggtggtggtttattcttccgcggagttaagggctccgtggacatctcaggtcttcagggtcttccatctggaactatataaagttcagaaaacatgtctcgaagatatgactccaggaccactatattttctccagggacatggcttgcagtgtggcaggcataacttctgatgctaatgttctgactaatgaactaaggctcattgctcaaaggtatttattacagtatcaggagccaataccttgtgagcagttggttacagcgctgtgtgatatcaacacaagcttatacacaatttggaggaaaacgtccctttggtgttcattgctgtacattggctgggataagcactatggttacagctctatcagagtgaccctagtggaattacgggggatggaaggcaattgcttgtgaaatataggtgagtggtgtcatgttgaacanactataaagagagggaaatgactgaagtcagattggttagtatcacgttataataacgacatggtgtagaattctgtgaaaggtgattgcctacaggagatgcagagnntcngntcacaaagtgggggttccaacggagaagcacgggtggaaaaaaaaaaaagggggggggaataatggggggataaattgcatggtttcaaagagcgattttattgcagcgcgc

SEQ ID NO: 650550 - DNA, 1359 bp, Homo sapiens
cccctaataaaagttacttaaccactcactcatcgacctccgcgcaacccgatccaaacatactccgcatgatgaaacttcggctcactccttggcgcctgcctgatcctccaaatcaccacaggacatatatccatagaccatgcactactcaccagaacgcctcaaccgacttttcatcaatcgcccacatcactcgagacgctaaattatggctgaaatcatccgctaccttcaacgccaactggcgacatccatattcttatatctgacctcattcctacacatcgaagcgaggcctatataacggatccatctctctactcagacacctgaaacatcggcattatcctcctgctagcaacatatacaccacagccttcataggctatagtcctcccgtgaggccaaatatcattcatgcagggagccacagtacattaacacaacacttaactataccgccataccccatcacattgaggacacgacctagttccactgacatctgacggaggcatactcaggtagaccagaacccacagcacaacacgacgcagcctagaaccataacagctaacactactatgccacagtgccctacactagccagccccatagcacagaacgacgcaactcactcatgcatgcaacgacacacggggatccaaaaccaaaacacaccatagcgaaagtcgaacactgccacaaatgccgcgacaatacacaaagttccaaccgtgacccaacacccactaatagcaaccacaccacagataacgagagaacagaacaccacaacgcgagatataccaaacacacaagacgagaatccacgcgccagaaaaacgaacccgcatcacacgacccggctagaacaacaaagcccagcaaacacctacactaagagaccgaaacagccagaccaaacgaagctaagtatcgcccgcgacagcggaccaaggcacgcgcggatagaaacaagccgacgcccgacacaccccgaagaagagacaaaggaccgcgagcgaactgaagacaataagcgcagcacagacagaggcacacagagaacgcaccatagcgccgcggaaccagcgtgacggcaacaacgacacaccgaaagcgacaggcaggcagacgaggaccacgacgacgagagcagaaaaggcaatgcaaacaacgacggcacctcgcgagcaagcgcaccgcacaaagacaactacgagaagcaggcagcacggccgacgcccaaggagactccgacagacccgcgcgacacgaaacgaggcaccacagaactacggggccacacagagagcgacgagacggacacaccatgacacgccggacacgaga

SEQ ID NO: 650551 - DNA, 197 bp, Homo sapiens
caatcaggtatactcgcgggaccagatacataccggcagtctaccttcactggctcatctcttacaggaaaggtaacccatactagcaggacgtatgttataggctgacaagatcattatataagatacccagtcagtagtcgagaacaggtgctcaataaatggtaggatggggagtgtaggagacagtagggaga

SEQ ID NO: 650552 - DNA, 224 bp, Homo sapiens
ggtcgaccataacacttgctcttgcctttccccagaactatgaatccctgaatagtgacggattattggcatggcgaagagcgacgacgtagcaacaccacccgcaggcaagggcaagcttaagcttatcctgctgattgtcctggccttgttcctggcgatcggcctgtccgtgggggctacctggtacttcatgcacagcgcccagagcaaaccggccgcga

SEQ ID NO: 650553 - DNA, 386 bp, Homo sapiens
cgtcgacttcttctttgagcttatcactacttacccagtgtccacattatgttatgtttctccttcccctgtctttagacatgcgatgagaacagaggtcttgactgttctctgcatagctaaaacagtagccaagaatgagtaagcacttaataaatattgattgagtgagcgagcccatgcctgacaaagacagcagtatactagacggcaactgtggaaatcccctagctacatctagcttttgccaggctctgttccccctcccattcccagaactaatattactggctatctaacttggtctccctataaccagcaccaattgtcccagtagtcccttctatttttcactttaaagctagagccacatggctggtcgacgc

SEQ ID NO: 650554 - DNA, 810 bp, Homo sapiens
  misc_feature (623)..(623): n is a, c, g, or t
tctggagtgtacgcgtgtggctcggcaggtggtggacgggcgggactgctgaacggggagcttggtcgctgacgttgattctacgtctgttttggtcatggattagaatgggaggagtggtccgcgggataagtaggggagtagcggaggattggaatgaagcaaaagactgacagcctccaactgctgcagaagcctcgcacccattattcatcgtatgcaatgtaatcagcccctctccatggtccctagccaggcatccggcagtgaatcctaataatcttcatcaacacctagtggaaaaacccgggtagtgttctgtgctccctccaagcaagcgccacagccctggttggatgtgtgttcctgttgtaccccgagttagacagcaaagcgctcactaggcctaccagggtcagtggcggctagattgctgctcccgcagtggcagtacaggactagcagtgtgtcggcggatctccgaggtcccttgcgtgatgtgtgggaaagacaggaggaatagggagccagaatctgttgtgtataagtccatatgtgctctatgagttatcctgataacgctctcttgtgtgagagtatacattgaagtgtgacaaagacanacggcctaaattaacagagtgtagaacggatgtaatgcgagttataacagatcttcaaatataaccttccctgtaggcgcaaaagtcattacaaagggtgtgcgagaccattatttgggtatgagggattgtaattctttataaggggtaccacccctccgtgccgtgtgccttttattatggctcc

SEQ ID NO: 650555 - DNA, 348 bp, Homo sapiens
gctggcttcaaatataatccataggggttgggcaggttgtatacaccatcacgagtgaaacgaccactggagatggtgactgatagggaacgaggataagggaagggagagccactgacgactggcactgtagtgaggagcaccgccacctctcctcctccacttgcccctcctgtggcactggacgagctagtgggcttttcgttgtcccatgggctttttcggtggggatgtgacctgctttgaacccgtccccttttacatgctcctcctgcacggaagtatacaggggctggggtatacactctctccccacttaccagccttgccccagcgcgggggtaccga

SEQ ID NO: 650556 - DNA, 306 bp, Homo sapiens
acacaggcagaggctaacaatgcctataaggatgaaaggagttcggcaatgttaggtgagcttttgtgtgcacgtgtgctagattagttttaagagctacaacataatggcaacctcatgtattacatttcataatccttacaactaggctggcttaaatttcacaatgcaatggggagtgattcataggttttgctgcagcgttaggcactctcattatctgcattatctgacgcatgtggaacgtccttcttaggagtcctcactgtccacatgacatcttttacctattccttttgggcgtga

SEQ ID NO: 650557 - DNA, 803 bp, Homo sapiens
ggtttacagtttcagacttgatgagaatggataagattgtattgcgcataaggtgtgttgtcaaagtcaaagctactactgccttgcaagtttctgcacctgcttcgttattcacctcccttcaattggagaacgtttgcccacttggagaaggcagaatatagcacttaatttggagaagactagaagctcaagctgccggcgtgtcattgcgcggatcatattctgctaaagcaaagccttctgtgttggcattgtctatcattgcgttagagatccaagcacagcaagtgtgtagagttaacagaaggaatagaatgtcttcagaaacattccaagataaatggccagagatctgaccttctgtcaagagcttgatccaaatgtttaactgaaatattcatcaaataagttgttccaaaccaaatgttcagacagttgcacatggattgtttctgggcgtactgacgggaattgaagcatagctactacagaataactcaccttccaacaattcctgagatggtcccttaactggattattacagcaccaaaaaattctctgaagcctttctccacaatgcttgttcctaatgggattccataatgttacaatggattgaagctatgaagcctcataagatcacgagataagcatgactggtctccagagttggggaaaactgcctaagtattatgcctgtagtcgggcaatcatgttaaggatttgaagtcctcttgttgaagcctttcgaatcaagggttaaaagacaaaatgtggagatgctaatgccaaggctgga

SEQ ID NO: 650558 - DNA, 107 bp, Homo sapiens
agcgggtgggcaagttgggggagctgccttgtcctgcacttcagcagctacagggcttgtgaaggagggcctagagtgatcagtgcttaggcttgagctgcccttgg

SEQ ID NO: 650559 - DNA, 175 bp, Homo sapiens
  misc_feature (14)..(14): n is a, c, g, or t
  misc_feature (61)..(61): n is a, c, g, or t
  misc_feature (93)..(93): n is a, c, g, or t
  misc_feature (135)..(135): n is a, c, g, or t
  misc_feature (140)..(140): n is a, c, g, or t
ttggactcgaaatnagaagagcctaccatttcaaatgcaatcacttttggacatgcttttncagacagtccttaatgctgaaaacacagagantgggtaattcaagaggccttttttttaaaatagacttttgtnacccnctaattgtaaggtattgcaaggtcactttgcgtgt

SEQ ID NO: 650560 - DNA, 853 bp, Homo sapiens
agcacgagcctggtgctttctatcagggagggatcacaccggcgtcactgctgagaccggccaggctagacacatgcttgggctctgctggtgcatcataccttgtcactgggtaaacagtttgcccacttaccgcagggatgaaggctgcttgccatgggctctccgtgctctgatgaggtttgtggtatgtgcaggcagtcctttccatcgaggtgctggttggcgtgtgccaggggcatgtgtggggcccgcggcgagtggtgcatgccgctccccgtccaggtggtggcttgtcgcccatggctgattcctcccaccctgctggagccctggcattactgggagggactcagtgcgcgcggatgcattgccatcggtgtgtcggcaactgtccagcgggggggagccatcctgaataatgatcgacgtgaggcaggcgccattcagtcaagcaacccggcagttgcaaacaagagcagaaccggggaagcgctgatgtggccgccctggctcgtgtctgagctgcagccgacttccttgtcttcccatgtgcatcggtgaggtggcgcatgtcagcgcggatatcacctacacctccaagcaactctgtggaggtgcaggtcaacgtgatgtccgaaaacatcctcacaggtgcccaaaaagggtgacaataaggcaccctgtggtatggtgtcccctgtcgctgtaagaatgtggacccagtcctcgaggtggctccctgtgtgtgttttccccggcagagcacgaggactgaaggccgcaaacggtaatgaagccaaaactggagagctgtttggacactggggaaggcgatcctccccctctcaac

SEQ ID NO: 650561 - DNA, 412 bp, Homo sapiens
gatgtcctagtggcgcggtcccggttggaggcgccggaggtactcatcttgttgggttgtagcgatatattcctaccgcacgaactttgaagtgcgtagtgtggacgggttccagtgttaccatgcagtttgagcatgcggtcacgttcgtgtcttgcatcagcatgggctagcgccgttcttaaggggacggcgcgttgtcctccgttgccctcgggcgatcagacatggagtctggttcagatccccgatatcgtactgtcgaatattgctgccgggatgcgtgctttgcggtgacgcggagcgattcccggataatccgtcgggagcccgtgggcggagttctcttttctttgtgaagggcagggcgccctggaatgggttcgccccgagagagggggtttgtgggtga

SEQ ID NO: 650562 - DNA, 634 bp, Homo sapiens
cgcttgcgaggcgggctgcggctcggctcgcggggactgtgcacgaggttggagagccgccccgccgggccccagatcaggccgcagagatcgggacccgcgggagccactatggcgcacgggccacgagagaagcagccgggctcagagggtcccagttatgccaaaaaagttgcgctctggcttgctgggctgcttggagctggctggcactgtgagcgtcgcccttatattctttttggaaaccaacccggttggaccgaccactgggtgccaagattcctgatgaggtcgacaatgatccaattctggtacagcagttgccgccggacatacagaattatttccacaacgattataggaccagatgactcatcgagcccaccagccccttgccttctcccaagaccctctgcaggaacccgttacataccagccaccctacacgctcgtctgggagcctcaccggcgtccctcttgcatcctgagttggtcggctggccacgtggctggaggtcaagaagggcccaggcatcgagaccttgtcccagcagtttgcccctttatatgaaatgtcatctttacgtcagagacttgccatgattgcgttccactcattgatagtgtggacccc

SEQ ID NO: 650563 - DNA, 111 bp, Homo sapiens
agaatcaaactatattttcttttctgtttttttgaaacagagtctccattctgtcatccaggctggagtacagtggtgtgatctcagctcaacatacatagaaaatatctg

SEQ ID NO: 650564 - DNA, 656 bp, Homo sapiens
cccgtaacacaccatgagcgttccgggggtccccatgttacatgtaagacagaacttgccacattgtgggttatttacatttgaaagcaaatacacctaataatatacttattatgagccagatgataataagatacttattaagcaggatcatattatacgctagatgaagctcatgaacacgtcataggatcataggcatagaggattagctgacaatgcacatgctagggtagtggactcaagagtatgaataatcccatacaaggtcagtgaccatttaaggtgtagatgagtcagtagatgcaaccgcatgtatgactaaacagtcaatggagatggacgatcatgtatccaatccaaggtcaggatgtcaggtgtctagtgcccttgcaggtatagctgacgatagtcattccagagctatgggcatgcccaggaggcaggtgggctcatggtccgtgtgactgtgcagaagcagtaggcagcctcgtaggtatccagggtagcagtcttctcatgagtctccgtgagatcgggcaggcccataatacccagggatgccatgcacacccctcctgccatccagcacaggctctcctttgcaccgtagtcatggaggacctctcattcgagggagccccatggctccatat

SEQ ID NO: 650565 - DNA, 1060 bp, Homo sapiens
cccacgcgtccgcgcgccagctgagcggcggtcgggcggggggagcgcggcggcccaagctcgcttggccacgcgccccgccccctcagaggccggcctcccgcacgcaccgcgcagcctgctgtgcccgtgggtcccgagtgctccgccgcccgccccgacccgggcccagccgcctccacggcccgcgctcgtactggagcgaagagcggcctcctgaaggaggggaagggacgtgggggcggccacggcaggattaacctccatttcagctaatcatgggagagattaaagtctctcctgattataactggtttagaggtacagttccccttaaaaagattattgtggatgatgatgacagtaagatatggtcgctctatgacgcgggcccccgaagtatcaggtgtcctctcatattcctgccccctgtcagtggaactgcagatgtctttttccggcagattttggctctgactggatggggttaccgggttatcgctttgcagtatccagtttattgggaccatctcgagttctgtgatggattcagaaaacttttagaccatttacaattggataaagttcatctttttggcgcttctttgggaggctttttggcccagaaatttgctgaatacactcacaaatctcctagagtccattccctaatcctctgcaattccttcagtgacacctctatcttcaaccaaacttggactgcaaacagcttttggctgatgcctgcatttatgctcaaaaaaatagttcttggaaatttttcatctggcccggtggaccctatgatggctgatgccattgatttcatgggtagacaggctagaaagtttgggtcagagtgaactgggttcaagacttaccttggattgtcaaaatcttatgtggaacctcataaaattcggacatacctgtaacattatggatggggttgatcagagtgcgctttcaactgaagcttaagaggacaagctgatcctaatgccggagagctatctgaaacaggaggaatttccctgtgccgagggcagaggcaacttgc

SEQ ID NO: 650566 - DNA, 1165 bp, Homo sapiens
cccacgcgtccgcgcgccagctgagcggcggtcgggcggggggagcgcggcggcccaagctcgcttggccacgcgccccgccccctcagaggccggcctcccgcacgcaccgcgcagcctgctgtgcccgtgggtcccgagtgctccgccgcccgccccgacccgggcccagccgcctccacggcccgcgctcgtactggagcgaagagcggcctcctgaaggaggggaagggacgtgggggcggccacggcagcaaacttttaagaactgtgagcagaggccagtaattttggagacaggacctcggcctgaaagtgatagatgtctttgttgttactgagtgtgggccaggtgtaaggattaacctccatttcagctaatcatgggagagattaaagtctctcctgattataactggtttagaggtacagttccccttaaaaagattattgtggatgatgatgacagtaagatatggtcgctctatgacgcgggcccccgaagtatcaggtgtcctctcatattcctgccccctgtcagtggaactgcagatgtctttttccggcagattttggctctgactggatggggttaccgggttatcgctttgcagtatccagtttattgggaccatctcgagttctgtgatggattcagaaaacttttagaccatttacaattggataaagttcatctttttggcgcttctttgggaggctttttggcccagaaatttgctgaatacactcacaaatctcctagagtccattccctaatcctctgcaattccttcagtgacacctctatcttcaaccaaacttggactgcaaacagcttttggctgatgcctgcatttatgctcaaaaaaatagttcttggaaatttttcatctggcccggtggaccctatgatggctgatgccattgatttcatgggtagacaggctagaaagtttgggtcagagtgaactgggttcaagacttaccttggattgtcaaaatcttatgtggaacctcataaaattcggacatacctgtaacattatggatggggttgatcagagtgcgctttcaactgaagcttaagaggacaagctgatcctaatgccggagagctatctgaaacaggaggaatttccctgtgccgagggcagaggcaacttgc

SEQ ID NO: 650567 - DNA, 148 bp, Homo sapiens
  misc_feature (110)..(111): n is a, c, g, or t
aacacaggtgtcgtgaaaactacccctaaaaggccaaaattgggaaaggaaaggactcatatcaacattgtcgtcattggacacgtagattcgggcagtcaccactactnnaccattgaaaatttgagaggaggctgctgagatgggt

SEQ ID NO: 650568 - DNA, 270 bp, Homo sapiens
cctggacctgtggaccctggttgtaaaaagtaaattgtattttaggaaaccagtgtcccctttttttccccttttaattttatattatttgggtcatacatttcctgtaacggaagtgttaatttttctggactttttgggaccctttgggaatttaatgtattgtaaggtattttacacgtgtcctgattttgccccaacctggatattgaagctatccaagctttttaaataaaatttaaaaaccccccagcctgggggagtgtggga

SEQ ID NO: 650569 - DNA, 1109 bp, Homo sapiens
gagtgtgtgtcttggggccgaatctgggctgtggggtggtcggtgtgcttgtgaccctgcctttgtgtggctgtcaccggtgggactggcggggagctgtgttagagacggggtttcaccgtgttaggccagtgatggcctcgatctcctggacctcgtgatccgccgcctcggcctcccaaagggctgaattacaggcgtgagccatcgcggctggccactgaggagtaacttactagcgtgtgtccaaattccaaaagcttttttcccaagagcatgagaagagatgtcacgagatgtcaggattaacctccatttcagctaatcatgggagagattaaagtctctcctgattataactggtttagaggtacagttccccttaaaaagattattgtggatgatgatgacagtaagatatggtcgctctatgacgcgggcccccgaagtatcaggtgtcctctcatattcctgccccctgtcagtggaactgcagatgtctttttccggcagattttggctctgactggatggggttaccgggttatcgctttgcagtatccagtttattgggaccatctcgagttctgtgatggattcagaaaacttttagaccatttacaattggataaagttcatctttttggcgcttctttgggaggctttttggcccagaaatttgctgaatacactcacaaatctcctagagtccattccctaatcctctgcaattccttcagtgacacctctatcttcaaccaaacttggactgcaaacagcttttggctgatgcctgcatttatgctcaaaaaaatagttcttggaaatttttcatctggcccggtggaccctatgatggctgatgccattgatttcatgggtagacaggctagaaagtttgggtcagagtgaactgggttcaagacttaccttggattgtcaaaatcttatgtggaacctcataaaattcggacatacctgtaacattatggatggggttgatcagagtgcgctttcaactgaagcttaagaggacaagctgatcctaatgccggagagctatctgaaacaggaggaatttccctgtgccgagggcagaggcaacttgc

SEQ ID NO: 650570 - DNA, 150 bp, Homo sapiens
ggtcagtcacggtgctcacgtgtccgacggaatcttgtacagcgcaggcatagcaccgcagtggtgaatacacgtacgaccaggctaccatctattagcgatatatggaggtacagcagcggtagctacacgtgtctgacgcgaactatg

SEQ ID NO: 650571 - DNA, 973 bp, Homo sapiens
cccacgcgtccgcgcgccagctgagcggcggtcgggcggggggagcgcggcggcccaagctcgcttggccacgcgccccgccccctcagaggccggcctcccgcacgcaccgcgcagcctgctgtgcccgtgggtcccgagtgctccgccgcccgccccgacccgggcccagccgcctccacggcccgcgctcgtactggagcgaagagcggcctcctgaaggaggggaagggacgtgggggcggccacggcagattattgtggatgatgatgacagtaagatatggtcgctctatgacgcgggcccccgaagtatcaggtgtcctctcatattcctgccccctgtcagtggaactgcagatgtctttttccggcagattttggctctgactggatggggttaccgggttatcgctttgcagtatccagtttattgggaccatctcgagttctgtgatggattcagaaaacttttagaccatttacaattggataaagttcatctttttggcgcttctttgggaggctttttggcccagaaatttgctgaatacactcacaaatctcctagagtccattccctaatcctctgcaattccttcagtgacacctctatcttcaaccaaacttggactgcaaacagcttttggctgatgcctgcatttatgctcaaaaaaatagttcttggaaatttttcatctggcccggtggaccctatgatggctgatgccattgatttcatgggtagacaggctagaaagtttgggtcagagtgaactgggttcaagacttaccttggattgtcaaaatcttatgtggaacctcataaaattcggacatacctgtaacattatggatggggttgatcagagtgcgctttcaactgaagcttaagaggacaagctgatcctaatgccggagagctatctgaaacaggaggaatttccctgtgccgagggcagaggcaacttgc

SEQ ID NO: 650572 - DNA, 741 bp, Homo sapiens
gctgcaggattcggcacgagagattattgtggatgatgatgacagtaagatatggtcgctctatgacgcgggcccccgaagtatcaggtgtcctctcatattcctgccccctgtcagtggaactgcagatgtctttttccggcagattttggctctgactggatggggttaccgggttatcgctttgcagtatccagtttattgggaccatctcgagttctgtgatggattcagaaaacttttagaccatttacaattggataaagttcatctttttggcgcttctttgggaggctttttggcccagaaatttgctgaatacactcacaaatctcctagagtccattccctaatcctctgcaattccttcagtgacacctctatcttcaaccaaacttggactgcaaacagcttttggctgatgcctgcatttatgctcaaaaaaatagttcttggaaatttttcatctggcccggtggaccctatgatggctgatgccattgatttcatgggtagacaggctagaaagtttgggtcagagtgaactgggttcaagacttaccttggattgtcaaaatcttatgtggaacctcataaaattcggacatacctgtaacattatggatggggttgatcagagtgcgctttcaactgaagcttaagaggacaagctgatcctaatgccggagagctatctgaaacaggaggaatttccctgtgccgagggcagaggcaacttgc

SEQ ID NO: 650573 - DNA, 264 bp, Homo sapiens
aaattttcatgctttataatgttcttacttttttctattcaattttgtctatatattgatgattaagatgtattttatttatttttatccatagctttttccatataagtatgtatcttagggtcagaactgctgaaagagacaaactcagccaaaaacacttggaaagcatatttagatatgcaaagcaatgcagataccaaaatatgctttccatatctaaattttcccataaagtaataaagtaaaatggttgcagagtga

SEQ ID NO: 650574 - DNA, 908 bp, Homo sapiens
gagtgtgtgtcttggggccgaatctgggctgtggggtggtcggtgtgcttgtgaccctgcctttgtgtggctgtcaccggtgggactggcggggagctgtaggattaacctccatttcagctaatcatgggagagattaaagtctctcctgattataactggtttagaggtacagttccccttaaaaagattattgtggatgatgatgacagtaagatatggtcgctctatgacgcgggcccccgaagtatcaggtgtcctctcatattcctgccccctgtcagtggaactgcagatgtctttttccggcagattttggctctgactggatggggttaccgggttatcgctttgcagtatccagtttattgggaccatctcgagttctgtgatggattcagaaaacttttagaccatttacaattggataaagttcatctttttggcgcttctttgggaggctttttggcccagaaatttgctgaatacactcacaaatctcctagagtccattccctaatcctctgcaattccttcagtgacacctctatcttcaaccaaacttggactgcaaacagcttttggctgatgcctgcatttatgctcaaaaaaatagttcttggaaatttttcatctggcccggtggaccctatgatggctgatgccattgatttcatgggtagacaggctagaaagtttgggtcagagtgaactgggttcaagacttaccttggattgtcaaaatcttatgtggaacctcataaaattcggacatacctgtaacattatggatggggttgatcagagtgcgctttcaactgaagcttaagaggacaagctgatcctaatgccggagagctatctgaaacaggaggaatttccctgtgccgagggcagaggcaacttgc

SEQ ID NO: 650575 - DNA, 1006 bp, Homo sapiens
cccacgcgtccgcgcgccagctgagcggcggtcgggcggggggagcgcggcggcccaagctcgcttggccacgcgccccgccccctcagaggccggcctcccgcacgcaccgcgcagcctgctgtgcccgtgggtcccgagtgctccgccgcccgccccgacccgggcccagccgcctccacggcccgcgctcgtactggagcgaagagcggcctcctgaaggaggggaagggacgtgggggcggccacggcaggattaacctccatttcagctaatcatgggagagattaaagtctctcctgattataactggtttagaggtacagttccccttaaaaagattattgtggatgatgatgacagtaagatatggtcgctctatgacgcgggcccccgaagtatcaggtgtcctctcatattcctgccccctgtcagtggaactgcagatgtctttttccggcagattttggctctgactggatggggttaccgggttatcgctttgcagtatccagtttattgggaccatctcgagttctgtgatggattcaggggaggctttttggcccagaaatttgctgaatacactcacaaatctcctagagtccattccctaatcctctgcaattccttcagtgacacctctatcttcaaccaaacttggactgcaaacagcttttggctgatgcctgcatttatgctcaaaaaaatagttcttggaaatttttcatctggcccggtggaccctatgatggctgatgccattgatttcatgggtagacaggctagaaagtttgggtcagagtgaactgggttcaagacttaccttggattgtcaaaatcttatgtggaacctcataaaattcggacatacctgtaacattatggatggggttgatcagagtgcgctttcaactgaagcttaagaggacaagctgatcctaatgccggagagctatctgaaacaggaggaatttccctgtgccgagggcagaggcaacttgc

SEQ ID NO: 650576 - DNA, 679 bp, Homo sapiens
  misc_feature (30)..(30): n is a, c, g, or t
  misc_feature (320)..(320): n is a, c, g, or t
  misc_feature (331)..(331): n is a, c, g, or t
  misc_feature (338)..(338): n is a, c, g, or t
  misc_feature (352)..(352): n is a, c, g, or t
ggaggccatgtgacagagatgagggcgaanggcttgagagggctacactgtgggggccttggagtgttggaagccccacttggggccttggcagggacctgtaccaagacagttgaggtcctgcagcaagctggggtgaggagacggagactcccaggcactggtaaagcgcacaaggggcctctggcacccctacaagaggaggttggagtcacctgacgctgtcctgatgcggctcctgcagagaagactccttacttagcccacagtgcttctacccgccctgacaccgtcctgatggggtcctgcagagaagcctncttacttagcntacagtntttccacacgcccngacaccgtcctgatggggtcctgcagagaagcctccttacttagcctacagtgtttccacacgccctgacaccgtcctgatggggtcctgcagagaagcctcattaattagcttacagtgtttccacacgccctgacaccgtcctgatggggtcctgcagagaagcctccttagcccacagtgcttctacccaccctcaatgtataacttcacgttcagaaatgtgttacccccctcctcagacctcacacaattcacgaatttccaaacagcaggaaacagaaacttctaagaaagcagaacccttgagtccaggtgggagaaggt

SEQ ID NO: 650577 - DNA, 393 bp, Homo sapiens
ctagcatgcactgtaggcagtcccagctactcaggaggctgaagtgggaggatagcgtgagcctgagagatcaaggcttaaatgagctatgattgtgccactacactccagcctgggcaacagagggagacttgtctctggaaaaaacaacaacaacggacaaatccatagattagatagacagtggtattcccaaggtgaacactaataaaaagcatgtaattaaccaatattgtatggtaaagagaggcagaggagcagagaggaagacaatgtacacaaattttatcatttcttagtatcatcaaaagaaagaaggtatagtgcattgagtaaagttacaaagattgccaatagaatatacaaagctttgtaaatatcataagaaataaa

SEQ ID NO: 650578 - DNA, 979 bp, Homo sapiens
cccacgcgtccgcgcgccagctgagcggcggtcgggcggggggagcgcggcggcccaagctcgcttggccacgcgccccgccccctcagaggccggcctcccgcacgcaccgcgcagcctgctgtgcccgtgggtcccgagtgctccgccgcccgccccgacccgggcccagccgcctccacggcccgcgctcgtactggagcgaagagcggcctcctgaaggaggggaagggacgtgggggcggccacggcaggattaacctccatttcagctaatcatgggagagattaaagtctctcctgattataactggtttagaggtacagttccccttaaaaagattattgtggatgatgatgacagtaagatatggtcgctctatgacgcgggcccccgaagtatcaggtgtcctctcatattcctgccccctgtcagtggaactgcagatgtctttttccggcagattttggctctgactggatggggttaccgggttatcgctgttcatctttttggcgcttctttgggaggctttttggcccagaaatttgctgaatacactcacaaatctcctagagtccattccctaatcctctgcaattccttcagtgacacctctatcttcaaccaaacttggactgcaaacagcttttggctgatgcctgcatttatgctcaaaaaaatagttcttggaaatttttcatctggcccggtggaccctatgatggctgatgccattgatttcatgggtagacaggctagaaagtttgggtcagagtgaactgggttcaagacttaccttggattgtcaaaatcttatgtggaacctcataaaattcggacatacctgtaacattatggatggggttgatcagagtgcgctttcaactgaagcttaagaggacaagctgatcctaatgccggagagctatctgaaacaggaggaatttccctgtgccgagggcagaggcaacttgc

SEQ ID NO: 650579 - DNA, 357 bp, Homo sapiens
catacttgtaactgtttacataattatttatgaccatttttaatacctgtcttcagagtagtctataagctccatgagtacacagatcatgtttgctttattgagctctttctactaatatccagtgcagtgcctggcacatatagatgtttaacatttattgagtaaatgatttaggtttattctttataaatatagaaaataccttaaaaatatatacagctgacttatcatctaaaatacaaatagaatcttaatcctcagcccttactatcttttaattgccctcattccaaaagcctaaaagctaactccttagtctggcatagaaaaccttaactgcctttctaatgtcac

SEQ ID NO: 650580 - DNA, 390 bp, Homo sapiens
  misc_feature (303)..(303): n is a, c, g, or t
  misc_feature (330)..(330): n is a, c, g, or t
cggcgtttcatcagccagcgaagcagttgtgcggcgtcagcagcgttttttcatccacgccctgcgcggggataaactccgacgcctgacggttaccgagtgtgatggtgccggttttatccagtagcagaacgtcaacgtcacctgccgcttcaactgcacgtccgctggtggcaatcacattcgcgcctagcatccggctcatcccggcgacgccgatcgctgacaacaggccgccaatagtggttgggatcagacagaccagcagcgccaccagtaccgttacgctgactgcattaccgncccacgcggaaaacggccacagcgtgngggttgccagtaaaaagacggtagtcagggcaatcagcagaatggtcagggcatttcgtt

SEQ ID NO: 650581 - DNA, 209 bp, Homo sapiens
ggaggacatcagtggcacagtcgagctataaaaagaaagagagagagaaaatgtactcttcctcacatctggcacccgaacgagctgtagctccatctaatccccaaagcaagacaagctagctcgcttcccagactttaggcattccgttccacagtctctttcctcgattgtgcctgtggacaccctagaccgacgatccctccttg

SEQ ID NO: 650582 - DNA, 234 bp, Homo sapiens
gctgccccaaagggccccccccagggaaatgtttagtgtttagtggattccggccccaggaaaaagtgccttggggccgtggggcagcccccgaagtcaaaaaagatttttttttttccccagataccttttttttcccctgacccttttacaggatttgtttttttcccctccccttccccgggtgttttggggtaaacttttaagtaaaataaaaactgggtttgggcctca

SEQ ID NO: 650583 - DNA, 829 bp, Homo sapiens
  misc_feature (5)..(5): n is a, c, g, or t
  misc_feature (11)..(11): n is a, c, g, or t
  misc_feature (34)..(34): n is a, c, g, or t
  misc_feature (44)..(44): n is a, c, g, or t
  misc_feature (56)..(56): n is a, c, g, or t
  misc_feature (70)..(70): n is a, c, g, or t
  misc_feature (81)..(81): n is a, c, g, or t
  misc_feature (84)..(84): n is a, c, g, or t
  misc_feature (146)..(147): n is a, c, g, or t
  misc_feature (160)..(160): n is a, c, g, or t
  misc_feature (223)..(223): n is a, c, g, or t
  misc_feature (227)..(227): n is a, c, g, or t
  misc_feature (252)..(252): n is a, c, g, or t
  misc_feature (260)..(260): n is a, c, g, or t
  misc_feature (328)..(328): n is a, c, g, or t
  misc_feature (347)..(347): n is a, c, g, or t
  misc_feature (355)..(355): n is a, c, g, or t
  misc_feature (361)..(361): n is a, c, g, or t
  misc_feature (388)..(388): n is a, c, g, or t
  misc_feature (395)..(395): n is a, c, g, or t
  misc_feature (433)..(433): n is a, c, g, or t
  misc_feature (453)..(453): n is a, c, g, or t
  misc_feature (456)..(457): n is a, c, g, or t
  misc_feature (459)..(460): n is a, c, g, or t
  misc_feature (462)..(462): n is a, c, g, or t
  misc_feature (472)..(472): n is a, c, g, or t
  misc_feature (501)..(502): n is a, c, g, or t
  misc_feature (521)..(521): n is a, c, g, or t
  misc_feature (544)..(544): n is a, c, g, or t
  misc_feature (550)..(550): n is a, c, g, or t
  misc_feature (572)..(572): n is a, c, g, or t
  misc_feature (594)..(594): n is a, c, g, or t
  misc_feature (602)..(602): n is a, c, g, or t
  misc_feature (673)..(673): n is a, c, g, or t
  misc_feature (815)..(815): n is a, c, g, or t
gccgngatggngccccgaaccctcctcctgctantctcgggggncctggccctganccaggacgctgggngggcgtcccantcnagtggtaggctatttctactacctccagtgtgcctcgcgtcctctgcgccgcggggtaggcnncgcgttcatcgcnagtgagagactatcgcttgcgagcagacgacgcgagttcgtggcgtgcttcgggacacgcganagcngccgagcccatagagatggagccgngggcgcgngtggaatgatgagcaggagggcgccggacgtattgtgtgaacaggagacacgagaatgtgaaagagcncagtcacagactgaccgantggacctngggacnctgcgcggctacgtgacagacgcagancgagganggttctcacaccatccagaataatgtatggctgtcgangtggggccggtacggcgcgnttnntnngngggtaccggnaggacgcctacaacggcaaggattacatnnccctgaacgatgacctgcnctcttggaccgcggcggacattncatctnagatcaccataactcatattgnggaggcggtccatgcggcgganagcatganagcctacctggagggccggtgcgtggagtggctccgcagatacctggagaacgggaaggagacgctgcagncacggacccccccaagacacatatgacccaccaccccatctctgaccatgaggccaccctgaggtgctgggccctgggcttctaccctgcggagatcacactgacctggcagcgggatgggggaggaccagacccaggacanggagctcgtggaga

SEQ ID NO: 650584 - DNA, 377 bp, Homo sapiens
tggttcacctcgagattatagtatgaaatggtaccgggacaagggtgccgtgaaaggttctccctgagacccccagagagacgtgtggagggccggcttgcctgttactttactattaaattgcgcgatgggaatcgagaggaaaaagttattcagggtatgatgtctcagcctctcagcctgtacaagagaggctgagggcccggggccctcaccagtcatcgctgctggctggttggtaaggggagtcctcaggtccctggatggccaggcggggaggcccctccgcccttcgtcccccagcccctgaggactcaagccgccgaaactccaggggacgctgctgccggaatcgggaggtctcccgccgccactcg

SEQ ID NO: 650585 - DNA, 109 bp, Homo sapiens
actgctaccagcctctctggcctatggggaccaaggaggcaacatcccctttttgccaattctctctgtgtaatttggtggttttggttgtgtggtggttttctctctt

SEQ ID NO: 650586 - DNA, 569 bp, Homo sapiens
  misc_feature (327)..(327): n is a, c, g, or t
actgcagcgctggataagcgaggagcggcggcgacacttgaggccttccgcttcaccctattcagaagtcaacatccgctgggtcgggctcgcatcgctccacagccgactgctgccagccggcaagggctcagcgctctactctctggaagtgtcgcaccagccctgccgccacccttcccgccagctcgcgcactgctcaacccgcgccgcagccgcgcggccagaacccgaccgcctccgcttcaggatttttcctctatactccacagaaagtttttcttcccagctgatctggcaccccacggactcttcaaaaaacgcctnccagattgcactgatgacgtgaaacatggccagtctgtgacattagtgggcttcagttagcttgccgaacgccaatctgaattgcaacgcaaacaagcgagcttcccagtattctcagtgcccagaccgatcttctaattggatttgacagctcagttgcctctcagatccaaagctttagtcacggaccaaagccacctattaaagccatttcgacagagttattcgtccaccgcctccac

SEQ ID NO: 650587 - DNA, 651 bp, Homo sapiens
  misc_feature (254)..(254): n is a, c, g, or t
gttctgacgatctgagcggagaatgtagaaagtcagagtgtatacatcaggcatccgaattacaacgcagcacctacatcagctttagcacagaagggctttaatataaatgtacactgggtagaaagtcagtaaccaggtaactgggtagaaaaaggaaacttctagatctcaggaacgtagcaacgacaggaaacagccaccagccctaggcctgagggaaccggttagacttaaccttagaagcgtagccnaagggccctgaggtagagacttccttggaggagtggtgggatctgcagggagtgtggacgatgaggctggctggccagtgctgagataactgaagactgaatacaacagctacagctggggcaacaggaagccaacaggaaggacaaagccccatcttgctggtgcttctaccgacttctgctgatggaggtaggccggaagccactggcaaaagcagcagggatgtgcggacctagctccaaaactgcagaaacagaacacagagtactggagctgaaacaataatttcataaattacatgtagggatttttgaaaaatcaatctccatcaataccctaaggagagggtatagatactatacacagaaagatccccagacgagaggccgagcatca

SEQ ID NO: 650588 - DNA, 744 bp, Homo sapiens
  misc_feature (311)..(311): n is a, c, g, or t
gttctcgtttgtctcttgcacattttgcccagttggccacattggccaatttggcattttggcatacctgtatgggagaatagagtaagaggaatactccccagcccatgaagggtgaaagggcacctgtgcctagactaggcctgcctggtcatcccaggtgagcccagggctttctgcccctctccgggagggcccccaggttcctcccctcaccccactagttccagtcaaccttcctcctctgctctgggtggtaagggaagccctcccggttcccacccggctatgatgctgcacctgccacgagnccggtataacacccgcaactacatattggaaattttttatttttctaaatacccatgccgttttgctacggttaccattttgaaatattaactgagcctccaaatcacccctttctgtcaagcatatcttggcctctcccatgtctcagtgttgcccgcactttctccccggaacttgggggtggggtgaaaagcgtacccaaagatatcttaaaagggctcctggggtacaccagcccacgcacggtcctgagtgaaagccctgggccctcccaatgctcgttttatagccacctctctctaccctagttctcccaattcacttctgccttcctcaggtttgatatctggccggtttgactatcccgaggaaattaaatatttttatataaaaattaaattataataaatattcccccatgctttcccttta

SEQ ID NO: 650589 - DNA, 192 bp, Homo sapiens
cccagcggtgggatggtgaggaacgggcccttttagaaatcactcgtcagtaaggagcaaggctgcgacgcgaaatgcatctgttgcataaaacacacaactccgaatgggaaaaaggagacacttgtttgcaaagaacctcttccattaaaacgacgtcggtcttcagaacacccgctggcctacagcaca

SEQ ID NO: 650590 - DNA, 415 bp, Homo sapiens
tctagaggacccgctgccagaaggtatatcacgcaagcccacgatccataatccttctaatagctatcctcttcaacaatatactctccggacaatgaaccataaccaatactaccaatcaatactcatcattaataatcataatagctatagcaataaaactaggaatagccccctttcacttctgagtcccagaggttacccaaggcacccctctgacatccgcagggttttttcacacacgacaattattagccgaccatcctcgaatcatataccaaatgctctccacgtctagtaaacgtgaagcacttctcctaactcatctcaagcgttagccatcatagctagagcatcattagaggtagattaaccaatcactagatacgcgtggagagagtagggggatctacag

SEQ ID NO: 650591 - DNA, 146 bp, Homo sapiens
  misc_feature (75)..(75): n is a, c, g, or t
  misc_feature (83)..(83): n is a, c, g, or t
  misc_feature (109)..(109): n is a, c, g, or t
  misc_feature (119)..(119): n is a, c, g, or t
catgtgccgctcctgaatccgaatacagacctaattggtcctgaggtgcgaggccgttagcgacgagccacaaangggctggngtgagacacgtatggagtccttcgcngctcgcttcnctcgcacctcagtagctgcacctggcg

SEQ ID NO: 650592 - DNA, 722 bp, Homo sapiens
ataaacggacgattcttaagtcaagatattgaattcgctgatggggagagggacgttcaggcgcgtttcagagaggggaaagtgtgagctcttccctttattcctaatggctatctttgaagcaaagaaggccagcaacagtaggaatcatgccaactggcaagggaaccttgagtaatgtgaaggtctccttctgggattatgaaatcgtgttctcctcatctccaagggcagtgaccatcaagaacctaccagactccatctcgtctgtaagccttcgtgccaaccctgggctatcggtgctgacccttaaacacaggctgtccttaatcgcaactctcctgccctgtgatatgtctgttgagttggcctgtgcattgcctataggctgtagaaaggggagaatgtcaaggaagactttaggtagagaaggcgcagactgatgtgtatctgggaagaagaagacctctaggaggagctagtaggactgtacatgaagcaattagtctgaaactggcttccccagtcccccggtgctccttttcctatccttataggactgtaccttgactctgacctgggataggttggcagactaaaggacttgatgtacataactcctggtccttttcccttaaagggcgggatttcccttgtttgcgccatctatgtggccaaggcatgggggaaccatccaacatccaagggcctattagacctcc

SEQ ID NO: 650593 - DNA, 114 bp, Homo sapiens
ttatatgcaaggccaatgagttgtgtaggcagcggagcatgtgcagtgatatctagtcgagtcgaaattaaaaaagctacctactggagtgccttgagccttgcccatatgcta

SEQ ID NO: 650594 - DNA, 1225 bp, Homo sapiens
  misc_feature (851)..(851): n is a, c, g, or t
tcttgttatgactagtctcttgtgtcgtatagtttttacttctctctcgtctgtttttcctccgctagttctgatccctccttttttttactagttgtgtgatctgattctcacagtggtctcttcctggaccaccaatccctcaaatgctcgtgttttctgcgtgcccacacgcccaattacctcctggcctcacgaacaaccccgtcttttaaaatgtctcaaggactcttgggttcctggaggtcttaccccggaagcgtattgtgttgaccgggcccacccgcggtattctagaatttggcgttcaactgtattagtctaccacacatggaaatgtctaagaatgtaaacacatcagaaccattcaagttgtcccacaatgtgccacatgaatttcaccaccccttaatggaccaaaccatggaatgaggactttaagaatttcaaaaagcggatgaaggacccagttcttccagccttaaggattttgaaatctccctttgcttataccacaggacatgaatgcccaccaactcctgaatgccagaacttaatccagcagcgtgcctcccgtagaaaataaggctgaagttcacaagtattcttctatgaaagaaagagggaatgtacccggagaaaattctgccacggccctcgggtggtccacgcccctcgagtccacggacacttctgaactctcgttggctcttcttagcctcgtgggacaccactgggcccacagagagcctcgtgaatgagaaaccaccgtgagaactctcacgccacggaagctgattctaatatccctctggtgctaccacacaatgtttgttggctcaccacatagnttgccacgaaatgtttatggaacactaatgtgaaccccctacaccacttttgcacaagtcgaatatctctataaatgttgttagtcttataagtttaaaatggtcactagcgccactaagaaattctaaataagtgccacttgagattgcacaagagaaataattgtcttttcaccacgtattatgaacacgataagaaaaaataaaatgcttaccactttttaataagaatacaccccccatttaaccacgaatgttaaaatgaaaaatatggtccccttggaatcacctgaaaatgtgaaccacattaaggatataatccttatacattataaatattgacattaaaaaaagcctgctacattattctttta

SEQ ID NO: 650595 - DNA, 413 bp, Homo sapiens
cctcgaggcccggtataatagcacgctgttacccccttggccatagaggggaatattctgcatcacccctttgattgccgtttcctacaggtgaaacgccatcgttaggattcactgcaacgttagtgctattaaactcactagcatttttattaatggccgatatctacactaagctatactgcaacttggaaaaagaggacctctcagaaaactcacaatctagcatgattaagcatgtcgcttggctaatcttcaccaattgcatctttttctgccctgtggcgtttttttcattagcaccattgatcactgcaatctctatcagccccgaaataatgaaggctgttactctgatattttttccattgcctgcttgcctgaatccgagccatgatgttttctgtaaccca

SEQ ID NO: 650596 - DNA, 469 bp, Homo sapiens
ccatgtcctgtatcttcagagaatgggatatataatatttcgcacaaatgaattttttttttttgagatggagttttgctcttgtcgcccaggctggagtgcagtgagccgagattgcaccaccgcactccagcctgggtgacagagcgagacttatctcataaataaatagatagatactccagcctgggtgacagagcgagacttatagatagatagatagatagatggatagatagatagatagatagatagatagatagatagatagatagatagatagataaacggaattggagccattttgctttaagtgaatggcagtcccttgtcttattcagaatataaaattcagtctgaatggcatcttacagattttacttcaatttttgtgtacggtattttttatttgactaaatcaatatattgtacagcctaagttaataaatgttatttatatatgcaaaaa

SEQ ID NO: 650597 - DNA, 206 bp, Homo sapiens
  misc_feature (83)..(83): n is a, c, g, or t
gcggccgcctactactactactactgctcgaattcaagcttctaacgatgtacggggacatggcttgtacctgcatcacagcntctcaggaggctgaagcaggaggatcactggaggccaggagttggagaccagcctggatgacagagggagatcccatctctttaaaaaataaataaataaataaataataaatatcgaaaaaa

SEQ ID NO: 650598 - DNA, 256 bp, Homo sapiens
ggaacaagaggcagcctttctggcagaagggcatccagatccagaatgcagagctccagaggatggagcaagaggctgagaggcgcagcagccacaattaagcagagccagaatcagaagtagaggagaagaaagcagaaaggaggaaacgagagaccatggaagaggagaggagcagagcaaagccttgtctgaaactactctaaggccatcagctctgtccatctgtttcctctgccagtgcattgctacacct

SEQ ID NO: 650599 - DNA, 212 bp, Homo sapiens
  misc_feature (2)..(2): n is a, c, g, or t
  misc_feature (29)..(29): n is a, c, g, or t
  misc_feature (51)..(51): n is a, c, g, or t
  misc_feature (84)..(84): n is a, c, g, or t
  misc_feature (124)..(124): n is a, c, g, or t
  misc_feature (159)..(160): n is a, c, g, or t
  misc_feature (169)..(169): n is a, c, g, or t
  misc_feature (180)..(180): n is a, c, g, or t
  misc_feature (207)..(207): n is a, c, g, or t
gnagacaaaatacgggaacagcaagtcanagaacgaaggcagacagaaganagaaggcagagtaacctacaagaagttttaganagggaacgaagagaactagaaaaactgtatcaggaaaggnagatgattgaagaatcactgaagattaactaaaannggattaganatggaaaatgnattagacatgagtaatcaagacataanagaca

SEQ ID NO: 650600 - DNA, 412 bp, Homo sapiens
agtcgtacctctctgctcccagattcactttgatcttagtcatttttttttttcttctgctagcttttggatttgtttgctctatgcttctctagttctattaagtatgtagatagtatagggtattgatttgagatatttctagctttatgatagcgggcatattagtgctataaatttacctcttaacactgctttagttgcctcccagagattctggtacattgtctctttgttctcattggtttcaaagaacttcttgatttctgccttaattttattatttacccagaagtcactcaggagcaggttgttcaatttccatgtagttgtgtggttttgagtgagtttcttaatcttgagttctaatttgattgcactatggtctgagagacagtttgttgtgatttct

SEQ ID NO: 650601 - DNA, 743 bp, Homo sapiens
  misc_feature (182)..(182): n is a, c, g, or t
atttaacgccccccataaggggtttgcgcccccgggccagatttggccgcagcaacccaaaagaggccctaatttaaaatccctttgggggcccggtgggaggatggggggtccggttacccaactctaggggaagggaatcctgtgggcccttctgttccccccgcgcggcgctgtggtcntgatgaaactctccctggggggttccaccccgccgatgtccactgaggcgccccaaaattacctccctcttccaggggtttcccagttgttagccggtggcctgggggttaaaaccccccaaggggccaggggtttaaaaaaaccccggccccacccgacccccctttttaaactggggtttttccctggggggggggggaggggccaaaaccctggggatcccccccccccccccctttccccgatggtttggtttttttttttaggggaatggggaaaaatttaaaaaaaattggtttttcccgggttttggttggggtttcgtttgcctaaacccccccccccctagggtccccgggaaactttgttagggccggtttagttttccccccagggtttatttggtttcctggtaaaattcccaaaccgggccccctgggggtttgggcccccctttggtttgtttttaaaaattattttccgctttaaatcccctttctttttccccttttttttggaccttttttggtaaaaaaaaaaatccatttaaaaacttggga

SEQ ID NO: 650602 - DNA, 451 bp, Homo sapiens
  misc_feature (268)..(268): n is a, c, g, or t
agagccgatgcgtaggcagcgcgttcgcggcgcgtaagtgaacgtggcatagctgggtcataggagatcctgatgatagacagggcatgagtctgaccccccttaaacaacgacatggagtaaagccggtgcgttcatgcggacgaagtccatgaatgagagtccctaggagtgtccagttcactgaggagtcatattcactgcgaagtagatctcacagcacgagacggtccgaatatcgacagactcaaaagtcctcagacctctnaggagacacccaggacacatggaacaaagaaaaaaaaacagaaacaacagcaacaaaaacaagaaacgaaacagacatacaacacaacagcaacagaaaaacagataagaaaacaacaaccaatacaataaaaacaaaacagaacgacgaacaacaacgagacaaaaacaaaaaaacacacaa

SEQ ID NO: 650603 - DNA, 645 bp, Homo sapiens
caggagttgaagaccagcctagaaagcatggtgaaaccccaaccctaccaaaaaaaaaaaagacacacaggacactttctaccaaggaaccagctggctgcttccagatagctgcaccagacttctttcagatgcttctgggatatggtcttctgaccatgttctttagcctcctttgcttcctgttacctgctcagtctcaagagctcctgactcaggcttttggtctgttttcctgaaatcttctgcgtctggcccctccccagacctaaagagagcttcttgcctctccccagacctaaagagagcttcttgcctattttgctatctaaagacctctatgattaaaattttcctttaattgagtctcacagctttacttcagcacacttactattacatagtaatggataagcaggaaataaagatctacaaaagtcaaacaaatcatatatagttatagaaacatttgtaatatttgaggtaaggatttacaaagctgttttatcaaaggtcctgggtttcttctagcttacttagctctttatacaatgcattgtataaccacaaactttttgctaaccccacaccaaataggggtgcttgtgaaaactgtcagatgcatgcctaagcttcaaagagctg

SEQ ID NO: 650604 - DNA, 1851 bp, Homo sapiens
  misc_feature (123)..(123): n is a, c, g, or t
  misc_feature (844)..(844): n is a, c, g, or t
tataaaaccataataaattacttagactacaatgagcaaaacacatttgtgggtttggtcagcagatactgctctgatttgccattaaaatcttaaaaattcttaaaaagctctcttgaattngacctctactaccttccaaggaccttggaaagacttaagtatgtgttagaactctcctgaaggcttggtcttcctttagtgacattaacactcaggtttgttattccagtgggcagccccagttcatgcaaactgacctgttgtgtctggtgtccttagactttgatatgcaggccaaagtccaagggatatgcaaacataacacacacctgtacttccataaaaaccagcagaattgtagatcagctcattttactgaaattttaaaccctgtaaaaaaaaaaatactatgtttgaagaaagaaatcctggtgcatataaaaactacaatgagtaacagtaatacaggtaagaatcaagcaggccttgagcaaaacagtccattattactgcgtaaactatgttgctatgatacttattttgagcctttatgcaccagcacatacatagtaagacacacaagatagttcaacaaaatctaagtaatatacaaacactgtaagagcttttccaaccaaagaaactttaatgtagatctgaaatgagccatcatgatacagaaaaagatgattatcatttcgtgtcctttccaagtagaactatctgataaccttttctgtttgtatcagaagagatttcaactcaacatgaaaattctactacttggaattatttgaaaaatcaagtatttgaaggaaaaaattatttttcatctaaagangcattacatttccttttgctagaaacgattgacaatgatgtaatttttcctgacatataattaattatggtactcttcaggtggatggcagctgtatacctacactcattccaagtcatgttgaagtgagtccagcatttccctttctccagcatccagctatatctaaggagatttttttttccccacaaatgacagtggctgaaatttcatatgtattgttctcttctcacccaaggcaactcttaagaaagaacagtatgtggaatgttgcatgtaaaagatttttgcatactcaaaaaattgctctgacataacaggggcatgcatttaggggatatatggataaactagggaggaaactgacagttattgatggactcacatatcccatagtgaagtaggcattacatatattatttcagaatacctggtatgtttttgcctacaaatcttttatttgattttgaagaaagctattgtataatgtttgaagaccagtccctgtaagtaggactaatgtgtggtggtggcccatagtcttctggatattggtttgtttttgtcatagatttcattaataaatttatttctgccctcaactatatatacaactgagtaagccatttaagaattctgactccttggctgggcatggtggctcatgcctgtaatcccagtactttgggaggccaaggcagccagatcacttgaggtcaggagtttgagaccaacctggccaacatggtgaaactctgtctctaacaaaaaaaaaaaaaaaaaaaaaaaaaagaaaaccaaacaaaaattagcctggccaacatggcaaaaccctgtctctactaaaaaaaaaaaaaattagccgggcatggtggcgggcgcctgtggtcccagctactcgggaggctgaggcaggaaaatggcatgaaccctggaggcggagcttgcagtgagcccagatcgcgccactgcactctagccagggcaacagaacgagactccatctc

SEQ ID NO: 650605 - DNA, 364 bp, Homo sapiens
cgtgcattgtgtcagacaggtggtactatgctggccaggaaagcatgaaagtgtggtgctgacaaggaaagttgtaatggagtgcttctttcactggtaattgacatacgtatgggatgacttcagcaggtatagagaatgaaccggctttggtagaggtgagcaaaggtgtgctggtatcaccaggaggtgttgaaagtgtgctggcctcagaaggactcatcacagatatagggctgatgaggacagttgtcaataaagtgcttctttcactcgtagttgacataggcatggtggtggtgccttcaagagttgtaggagatgaactgccttcagaggcagtggtcatagacatgctggtgta

SEQ ID NO: 650606 - DNA, 331 bp, Homo sapiens
ctctgtgatgcaagtgtcactgtttgctgatgatatgattgtatacctagtaaaaccctaagaacttatccaaaaagctcctagaactgattaatgaattcagtaaagtttcaggatacagaattaatgtacacaagtcagtagcactgctgtacaccaacagtaaccaagctgagaatcaaatcaagaactcagcctcttttacaatagctgcaaaaaataaaataaaatactgaggaatatacctgttaccaaggaggtgaaagacctctacaatgaaaactataaaacactactgaaagaaatcatagatgacactttgcatccagag

SEQ ID NO: 650607 - DNA, 382 bp, Homo sapiens
ggtaagcatcactacactgcttcctccacttcattggacagcagctttaaatcttgactaacaaaaaggcacaggacaccagctgggtcaatgtggagctttattgggctgtgcaaatttgggcaagttacttaatctcccagcgcctggacatttttaaccatccattaatgaaagtttcatgctttccgatgatgataaatggtcagacttccctgaccaccaagagctgaaagtttggaagaaaagcttccgtggggcgtgactgcagtggttcctcgtggagtgaatttcacccactggcaggttgaaatagtagcctgggagccaggatggagttccggagctttcctattgcttgagaaagaggcttctaagaatg

SEQ ID NO: 650608 - DNA, 250 bp, Homo sapiens
gtatccaacaattaatagaagaaaataaataataataaatactaaagatcaagcagaaataaatgaaattgagacaacaacaatagaaaagatcaccagaaaggaaagagttgtctattgaagatgatacacaaacattgacaacacttttccccaggactaagcaaaaacagagagtagacccaaactaaataaaatcagagacaacaaaaggagacactataaccaatactgcagaaccacgacacag

SEQ ID NO: 650609 - DNA, 289 bp, Homo sapiens
  misc_feature (1)..(1): n is a, c, g, or t
ntctagcggatctgatgagcaagctggaggctgcgcaagtgttcagcaggacagcagatcagcgcctcgcccaggcctccgtgctgggacaccaccacccagggccagacacttccaggagcacccccgccagcaactggccaccagctccttcctcctcttctggctgacggggatggtgtctgtggccttcctgctgctcccactcccggacgacctaggcagccacggtgatgctcataccttaccttgcctcctaccctcttctcttacctgccagctggctcag

SEQ ID NO: 650610 - DNA, 939 bp, Homo sapiens
agttctggtgccctgggtcccctgaaaggcggatagcggagggagcccctggggctgggctgcagcgctcggcttcctcctcctgtgctggaaagggacctccatctcagtgccaaaggagtctccgtcttgccagaattatccccgaccccctccccgaatctgccgagatccctctgatcctgatactgaggtcaccaagtcctcctccttggcttggagaactacctcagcctccctccgaggattctcggagcactgaatcctccacgccgaatccaaagcgtccccacagtctccacggtgtcccccatgcggactcccggtgacccgaccggaggtcctaccagatgcctgtgctgcggattgatgtgagtcaggaatcccagagaaaaggctcgctcccgtgctcatgcgccagtctacggaggtccatcactacggggttgtagacgtccttacacggaccttgaatggatggcagaacaaggcctgccacaggaaaggccccagacgtcaagagaagccgagcgcagaacctgttgacccttccccgaagggcccctgtctgtcccttggtactggagaactctgtacatgtgcactgcactccatgagactaatggcgcgcccgacgggcacgggtccgggaccgacaggcggccagggagccaccgcagggtcggaaaggacctggagtggggcctgccgagaaggcgagagaggccggagccggcgtgaccgctagtcaggagtccaggcacccctgcagggcggcccatcggtgcccgccgggcaccggtggcagccgggacctcaagccaaaccctggccgaatcggaaagccgagcgaggcttaggacccgtttcgacctcggcagggaacacacgggttccgaggaccgaccaaacacttgccgggacgccacgggcagggcc

SEQ ID NO: 650611 - DNA, 352 bp, Homo sapiens
gaatgaccagcacctggcccagcccccaccggggatactcagtgagcctgctggggggcaggtgcaggtgtcatcccatctacctcaccaggggcgagaacagcagttgccccactcccaggttgctttgatgagcctcttgccaagttagggggacccagaaccacccagcctgaatgtgagacttagccctggctgagctctacttccaggatggtgagggaacccaagagtccaggagcagtggtgggcagcatcagctcagcctctgaaacccacgcttgtcaagcttcccaagggcaacacttttttgcccttcttgtttctaattaaaaagaattagtcagcaaaa

SEQ ID NO: 650612 - DNA, 142 bp, Homo sapiens
tgattccaggacttatggaggtggggtgggtggcccgtggtggaggaatgggctcgtacaagaagatctgatttccgagttcttgtttcaggacttcctccgtcaggcagctggaggacctgaaggatcacatgcgagacag

SEQ ID NO: 650613 - DNA, 903 bp, Homo sapiens
cacgcgggaattttttgaggaagtgggtacgccccgggttgatccccggatggggaactttgtgtttcacccagaccgggaaaaaattattgggggcaagctttttaaaccaccgctgtcgcgcgcggggcaacattaaaacggggttcccgaaccacttgtgcaaggctcttcaaaaaaccggtgttaagacacatgcccctgaccagaggcacacttcccgggcgacttggtcccaaatccgcgagctctacttctggcaatacagaactacccttcgggcgtcaatttcctaaagctttattggagttactttccaggacccggttgcattatacacgtgacctttctgggccctgcctttgattatacggcctagatggaaacggagcacacatgcggactggagtctatgacttggatatccaaaaattatcgcggtcgacattactattctcattcacgcccatgcagagccgctaccaccgtcccaccccccacggcacatctatacacatgggcacggcccatctcacatcaaggagatttccacgctttcctaaaggtctttacacatcatggaatctccacccacgagaaatattcgcgccaatacttatgatacttatcatcacgaaacagtcctttcccatcatacatatgacagatcgacaatttggggccaaggcggcacaacactggccaaatacccccgtctctagcttcaaaggaacaaatcaaaaagtccaggccacaggcttttggtagggaacacatcgtcctgcttaattcccacacctagtctactgggacgtctagaggcacccaggcactcacacttgaacacttgggaagcgcacgaaggttcgtccgtgagcctgggccaccgactgacactgtctt

SEQ ID NO: 650614 - DNA, 501 bp, Homo sapiens
  misc_feature (434)..(434): n is a, c, g, or t
ctgtgcataaaggtacatgaattattccagttttaaagtattatgcatgtttgtttaataaatgtggcatggttttaatacaaatgctatgttatttaaaagttagaggaacatttctattgacaaaaatatgcttcatttacatataatgttaccatatggtgttaatgattaaattagatctttacatagttcttacaaagcatcagtctaggaaatatgacttattactgatgcaaatgtgaacattttgtagtagttttgtaaaagaacatcctttttaaatatgtatgttaatgtacccttgcactcaaacgccagcacatagtcagtttgtctaacttttctgtgaaactttgccgacaacccctacaccatttcatttatatttgtccctaccatgttataaatgttcataagtcccttcatgtgtntataaaaactgtcatatctacacacctgtgcacttcacctaaaatttttgattatcctcagatccag

SEQ ID NO: 650615 - DNA, 1133 bp, Homo sapiens
  misc_feature (425)..(425): n is a, c, g, or t
gggaccccaagcaatggaagaccatgaccactgcctttgcatctgcccaggacgcagctgtgaaacctaaagcggaattggtctttagtcagcaactcacaccagtgtcacttaagtgaaatcgagctgcacaaatcgacccaaaggggtgccctccactcctgggcccacgttggtcctcgtcacgcttcccagatgtggtccccgagtactctcagggcccagctggaatccggctgccagccaattccgcggagcgacgacagcagggcttcattagcgatgcagctgcgcgggcgtcctacctgacgcctaggtggcgctgttccggcccccggcgggaccccgccgagtcggtgagtcgacttgggctgccatactcgtaggactacagcagttgcctccatctaatatacaggaagaantaatgattcagagagaaatgcagaaggctcagagatggggaactcacagcagtgcccgaggagcctccgtgttgctgcctgctgggttccaggacctgtaagaagctcagttgtacactgtccatggaggcacgagacacgtcatttagattcgtttacgttaaggtggcatgaggtccgtttccctgttctgggagtagactggaaatttgttggttccctcttccaaagacaggctgcacgagagccgtcatgggctgggtgtggtgggtatgcctgtaatcccagcactttgtggggcttaagcagaggatcacttgaacccaaggagttcgagaccagcctggggacatagtgagaaaccccatttcttcgaactttatgaacccattagccaggttgggtggttacacactgtggtccctgtattggaggctgagggggaggagccttagaccagaaagcaggctgacgagtaaaaataggcctgattccggctagaacaatgtaccttttgagaaaacggatgcacgggcacaaaaaaactcggctttttgtggaaagcaaaaaggcggaattgttgaccctataagcaacaggctagggttaggatggaatataataaacagaataatgaagaaataaatagtatatagaataaaatatatatcataataagtagaagtaagataaagaacgaaaggttgt

SEQ ID NO: 650616 - DNA, 403 bp, Homo sapiens
gaggagatgaccacagaacagactgaggtggataaagtgacgcggacctatatgaggagagctgctgagccttcctcattacacatcccatattccagacttggataagggaccagccggaagaaaacgctttccagcattaagcttggattcctctgggtcacagacaccaattgagacccaaaattctataggtaaacttacatggtgagcaaatggcagcaagtgtggctctctggcgttggaaagaaggaggaaactctaatgatgccttggacacgactataggagctgagggaatttgctaactttgagtttgagatctggcgcaatacatgccaaggatgaatcacacagaaatctcgagtgagaggactctttcaggagttgatgaccacgtggg

SEQ ID NO: 650617 - DNA, 560 bp, Homo sapiens
  misc_feature (71)..(71): n is a, c, g, or t
  misc_feature (249)..(249): n is a, c, g, or t
  misc_feature (514)..(514): n is a, c, g, or t
  misc_feature (552)..(552): n is a, c, g, or t
agttacaacagctagtaaagggcagagctagaatatgaacccaggaatgtcggagtactacaagctcttanctaccatgccatactggtggcaacaattagtaattaccaagacttcaaaggtatggtgactcacaggggcaagagttaatgtactcttctctttgcaaagatttccttccaggcaaatgatgataagttctatcgttcttgagggctgtggcagtttcccggtacatggtggcagcantgggatcacagccgtgggtaagctaggctagcaaaccaaagcatcctgtcctcagacagatgagaatgttaccatctgaacttcttcaggtcaattttcgaatactaagctgaatactgaaaagacaccttttctatttcattctccctctgaatgggtaatatccagccactccaattagtttcatattaggtatcttttcttaaaatctctgttggcatcatgtccctgcttagcctgagaatgtgcagagacagaacgctgngacgggagttatcctaggacacactgactactttcatnagaccatg

SEQ ID NO: 650618 - DNA, 686 bp, Homo sapiens
acgatactaagaaaagcggctttttctactggctactgcgcctgaaagaggctctataagttcattcacacagctggctgatctggttttaacatgatggacaggatgagtacctagtaactgcgcagtgcttacaatatgaaaatgactacattgccctgctattgccacagagactgtgtcctgctatcaacgtgtagatgagatgaccttcaaaacgaagtaatataaaattagctctaatgagcacttcatgtgacctctgtccatatggaagaagtgaaagaactgagccttcaataagattgaacattgtctctacagcaggaagctaatactaacatccaagagctgttactctgtaatgagaataacagactttcctagtttgcgattagtctaatggaaacttgcgcactgttgcaatgatcttcctataaagaaactgacattttatcaaatatagatgagcctatggatcatacactgaatacgatgtgaagtggcagcaatgaaatgttgagatagttacttctaatgggccaagtacctatatgccacttgtcatgaggatacttaccacaattcagattgtctcagacgtgtattctagctactctctatcgagcgcgcgaggagataatttgtaatctcagaattagcagctatgttcttggtgagctttg

SEQ ID NO: 650619 - DNA, 1086 bp, Homo sapiens
  misc_feature (127)..(127): n is a, c, g, or t
  misc_feature (813)..(813): n is a, c, g, or t
  misc_feature (815)..(815): n is a, c, g, or t
  misc_feature (823)..(823): n is a, c, g, or t
  misc_feature (833)..(833): n is a, c, g, or t
cgtccggaattcgcggatgtgcggaactcaaaaccgactgcggagagcccagcggcgggagctggggcgcacgttggggccctgccgaggggcgggcaggcccggtgccagccccggcaccgacggnacgccctcctccctccgcagggcgggaggatgccgccgccagcgaaggagggcgggcgcaagggcccgcgggagcgaagcgggaagagcgcgccaggcacggcgcagggtgaggagcgtgccaagggggcgcccgcgacagagccccccaagccgggctgggccctgacgccgcagggactggcggccatgctccctgcgcagcgccaccgccatctgctcttcggcgacctgctggaggacgtgggcgcggcggcctccaccttcccgtgcgggtcggtggaaccggggtaccgcatgcccgacccgcgcccgtggacgcagtcgctcgagctgcccgccgagcgccagaaccggctcctcggcgtcctcaaggcagcggaggcccgcgggcgagtccgcgccctgcggctgcgctacacccgcatgcgggccgaggagatcgcgctgctcatccagcggcagaagtccgcgcgcgccgccatccggctggagctgttcctgccgccgcagctgaagcccgcgcggatcccggacccctggaccgccaagaggtgcagacaagccccggtaggggcggggaaaggggaggggccctgcccgcctccgcacacgccggaccccagcctctctccccggcagcggaggcgcgtggagaccatcctggaggagaacgtggatggcacnancttcccgnggtgacggcnactgagagtgtgcgacgcgccccagccttcccacataaacgttataattctccgaaaaacaccctcaacccctcctcacccatcctccacccttccctccactccccaaacaaaattcaacctaccatcatcataaaaccactcctaccctaccatactacacatgcagccgcctcctcacaattcctcatctcaccaggagacatatccatcatccacctcaccgatacctcccacaacacaccgctcctct

SEQ ID NO: 650620 - DNA, 784 bp, Homo sapiens
  misc_feature (35)..(35): n is a, c, g, or t
attaaaagtctagagggttttattagatcaccgtncccattgcgttcccattcggaagacaatggtgaagagtctagtacgccctatgctaaaagccacttgcacaaggtataggctcgaagtcattagctgtgacagtcagttttcctaatcaggccctgtaattgtgcccaatcaatgtattctactgctatcgggagcaagagtcgaggcaccccctttgagtagtattgtgaggtagggaagtcataggagtatcacatacagttgcaagtcagtcatatactcactctcacagagagtcagttgatcgttttagcccatactccgatacatccgtatggtgagcagccttgagtagctggttcagctggttatttcaagcattccacctatcaagggaggaagaagaacacaggtcacagtctcagcttatcataaacacatggcacagcatccaaatccagtctctcatatcccgtattctttcgttagttcgtctactgtgttgaagaacgctatcatggcatcttccttgcaagtccattcacgctcattcaggatatcacactgtgcattgcctgtgaagtccacgatcatggcccgtagtgtatatatgtagcacacagatgattatcagtagtggccatagaagactgagtctcgtcatcagaggcctgttcataaggtcgcctggcctcctgagcagctttctcaccctcagcggcagacatgctggctggtccagcaagaactccatgcagccagccgaccaggaaagcac

SEQ ID NO: 650621 - DNA, 998 bp, Homo sapiens
  misc_feature (127)..(127): n is a, c, g, or t
  misc_feature (725)..(725): n is a, c, g, or t
  misc_feature (727)..(727): n is a, c, g, or t
  misc_feature (735)..(735): n is a, c, g, or t
  misc_feature (745)..(745): n is a, c, g, or t
cgtccggaattcgcggatgtgcggaactcaaaaccgactgcggagagcccagcggcgggagctggggcgcacgttggggccctgccgaggggcgggcaggcccggtgccagccccggcaccgacggnacgccctcctccctccgcagggcgggaggatgccgccgccagcgaaggagggcgggcgcaagggcccgcgggagcgaagcgggaagagcgcgccaggcacggcgcagggtgaggagcgtgccaagggggcgcccgcgacagagccccccaagccgggctgggccctgacgccgcagggactggcggccatgctccctgcgcagcgccaccgccatctgctcttcggcgacctgctggaggacgtgggcgcggcggcctccaccttcccgtgcgggtcggtggaaccggggtaccgcatgcccgacccgcgcccgtggacgcagtcgctcgagctgcccgccgagcgccagaaccggctcctcggcgtcctcaaggcagcggaggcccgcgggcgagtccgcgccctgcggctgcgctacacccgcatgcgggccgaggagatcgcgctgctcatccagcggcagaagtccgcgcgcgccgccatccggctggagctgttcctgccgccgcagctgaagcccgcgcggatcccggacccctggaccgccaagagcggaggcgcgtggagaccatcctggaggagaacgtggatggcacnancttcccgnggtgacggcnactgagagtgtgcgacgcgccccagccttcccacataaacgttataattctccgaaaaacaccctcaacccctcctcacccatcctccacccttccctccactccccaaacaaaattcaacctaccatcatcataaaaccactcctaccctaccatactacacatgcagccgcctcctcacaattcctcatctcaccaggagacatatccatcatccacctcaccgatacctcccacaacacaccgctcctct

SEQ ID NO: 650622 - DNA, 813 bp, Homo sapiens
  misc_feature (115)..(115): n is a, c, g, or t
  misc_feature (124)..(124): n is a, c, g, or t
gaggggggcgtcctgtagggtggtcggtgttgggtgtggagtgtcccagcgcccctcgggtccgacccttgagcgtctgctccgggccagctacctcgctcctcggcgccatgancacaaccancaccttcaagggagtcgaccccaacagcaggaatagctcccgagttttgcggctccaggtggtggatccaatttttcattaggtgtgatgaaccaacagaacaacctgtgaggaagaacaaaatgggctctaatatctttgggacacctgaagaaaatcaagcttcttgggccagtcagcaggtgccaagtctagtggtggcagggaagacttggagtcatctggactgcagacgaaggaactcctctggaagcaaggctccggagacttcttagatctgaagggaagaaggtgatattcatgaacaatgtggacacagacttgtccaggcacgcctggggcaagagtgaagagaagcccgtgcttgtgggctgtgccatccggtgggcccggctccagtgctatccagaagaaatccccctggggggaagtccagcctcgtcttggggttagctctgactgtcctgaacgctgtccgtcctgtcgtggttacatccatgcttgttgaacttggaccaacttggagtctgatgggagatctcctggattggttcattaaccaaaacgcggttagggaatggccggccttgggggagtcttctgacagacgaaggttcaccactgggcgaaattcgggggtcgggggacaggaacacagggtccacaggcaatggggcagacccattgtc

SEQ ID NO: 650623 - DNA, 475 bp, Homo sapiens
gaccagcacatgcatctactgctcatatcaccaacagcaacctccttacctttctatatcctaccaaaggctacttgcctagcaccgtcgccttctcatctgatctgacttgatagtgccgctgctgcagacagctgccttatccacccggatcttgctgatccctggcctggcgaagaatggtgtaccggcgcatggtctttgcctatgggtttagcttcaacatgattctcatgttgtcagttgggttcttctttccgactctgcgatgcctcttcttgcgtgctgctcgaagggctcttcggatctctgggacttctcaatattctagctaaaatctgtattaatcatcttgtgcatggaaagattgtaataactcttgatggaagcggctttacgccaattgccgtacaatccatcttaacttccggaaagcacttgcagtccaaatgcagaaacgtcccacatgcccacc

SEQ ID NO: 650624 - DNA, 1435 bp, Homo sapiens
tcaaatgccacttccccagctttagcatatccctgtatgcctgggactggcttcctgtgtcagagtatagcagatgagaccttttctttcatgctagactggggaagatggcagcgagacgcttcggctactgcaggcgcttactgccaatgtgggaaagggccccggttgccagaggctgtactgtgtcatcagtccgccttgtgctgcttcggcgtaagtatctccaaggtcctagatgaggtggagcgccggcagtgggatctccgctgcactcggtctatcctttcatgacgaagtctcatggagtcgccctatcccagccccagggtaagaccatcacagtgaacgacattcctgcacaggatgctggcacatgagtgttgtatagagctgctgagacaggaccaatggaactacaaaggctaggagacacagtggaacctatatgagtagcactattaaaacactggacataccagagatgccgcacaggcatacactccggaaaatccacagacactacactggcattgcagcgcagacgaccaggagataccaacaaacgaagagagccaggagtacaggccaccagctaacccacgtccacccacgcacatgccgacacccaacgccgtgacagagtggagcccacttctgacgttcactaaccacactaaatatacataacattggtgcaaagacataccaacacgttatttgcagtactaaccactttgctaatactatacccctgatgaccacatatcgaccactcgacacatatgagaacacaaatacgatacaatggacataggtacacactaaatacaacacacgtttcaccactgggtgtaagaggaccaatagtaatacatcaccccaagcacaacccaccactgataccacacacgaaaccaccagtaggacaccaagcgacaagacctcggacccaccggcactgagccacagggcacaacgtgacaagccacaggccacgtggagcgagaaacccccatgcgccgcagatccgtggccaaccagtaactacacaaacacgcagacaccacacgcaacagtgacaacagacacacgaacaacgcaacacgacccgaacaggaaaaataaaccacaaacgagagcacgcgcaaaacgcacaggagagccaagcgcacgccgcgaggggacagcacacagcgcactctgggtgaccagcaaagcagatccagcacccagctacatcaacgcacatagacacacaacgacaaaacctccttgaacacacgacacacagtaacggccacacacgactgcaacaggcataaaaaacacccacaactcacaaaggcgactatcgagagagaatccacacacagacgcgatccacaagacatctgacccgtcgcaatgaactacgctaagatacagcagcagc

SEQ ID NO: 650625 - DNA, 109 bp, Homo sapiens
tagccggtccggaaatagcaggaacactgaaaggtcattcggtcttattggctccattatacataggtccgcctctgaatactaaagtttgtagctcctgttatctcct

SEQ ID NO: 650626 - DNA, 154 bp, Homo sapiens
cagaagtgatttggccggggtgcgtgtacacgggggtgcgtgtacgcccgggtgcgtgtacgcccggggtgcgtgtacgcctggggtgcgtgtacggggggtgcgtgtgagccggggtgcgtgtacacgggggtgcgtgcaccccgggctgtgt

SEQ ID NO: 650627 - DNA, 250 bp, Homo sapiens
cccagtgaatacgactcgcgtactggaggatctctagagtcgacagtgctccatgcttaactgatattatggaggtcagcactggtgctcactgtgtcgacggaacttgtacagggaggcatgcacctgagggggtgaatacacgttgaccaggctccaggttaactgatatttggaggtcagcatggtgctcacgtgtcgacggaacttgtccagggaggcatgcaccgccagtgggtgaatacacgtc

SEQ ID NO: 650628 - DNA, 369 bp, Homo sapiens
  misc_feature (56)..(56): n is a, c, g, or t
  misc_feature (101)..(101): n is a, c, g, or t
  misc_feature (104)..(104): n is a, c, g, or t
  misc_feature (106)..(106): n is a, c, g, or t
  misc_feature (108)..(108): n is a, c, g, or t
  misc_feature (150)..(150): n is a, c, g, or t
  misc_feature (185)..(185): n is a, c, g, or t
  misc_feature (278)..(278): n is a, c, g, or t
  misc_feature (345)..(345): n is a, c, g, or t
ctcaaacatcttcacgctaatgaaccggcggccggaaggctgtttcccaaggcganacagagggttagctggcccagctagagtcagagcccaggcctccnccngncnttccggctctttttccgttaccccactgcccgaggggaaaantcatgctttccacccaccgctgtgattggtttaanaaaggcttagcccatcttttcctgggcttcaccacgctgtcctcgttcctcccttctcagatatgtgcccactgtttccaacttttcatcaanaaaaaggccctttccaactccttccaaattagaaggaccagttggtgtacacacagcacctctggancatgccccctgtgccggggccgga

SEQ ID NO: 650629 - DNA, 252 bp, Homo sapiens
ctattagtgatcattcgtatttccccctctattgatccccagcgctccatatatatctcatcaacaaccgactaatcaccactccaacaatgactaattcgatactaacctcgaaacaaatgattatcatacataacactgaaggacgaacctgatctcttatactagtatcctttactcatttttattgccacatctgacctcctcggactcccgcctattttacaccaaccccacggtgcgttggcccaa

SEQ ID NO: 650630 - DNA, 465 bp, Homo sapiens
caaggtttaccacccagactcacggggagatgaatttgaggtggaaaacctcatcctacacaaggaccacagcgctgacacgcttgctcaccacaaagacatagccttgctgaagatcccgtccaaggagggcaggtgtgcgcagccatcccggactatacagaccatctgcctgccctcgatgtataacgatccccagttgggcccaagctgtgagatcactggctttggaaaagagaattctaccgactatctctatccggagcagctgaaaatgactggtggtgaagctgatttcccaccgggagttgtcagcagccccactactacggctctgaagtcaccaccaaaatgctgtgtgctgctgacccacagtggaaaacagattcctgccagggagactcagggggaaccctcgtctgttccctccaaggccgcatgactttgacgggaatcgtgagtctg

SEQ ID NO: 650631 - DNA, 131 bp, Homo sapiens
atacttttccgtttccaagaggtgtctatagaacaagggtaaaaggcatatgacatattataatactggcacacagagactgaaagctcgtagagcaatccgctccattcaccaagtgattgttccccgct

SEQ ID NO: 650632 - DNA, 246 bp, Homo sapiens
cccttttttttttcccccccgttccccggggggccccccccccctttttttttcccccttaaaaaaccccgggggggttcccccccccggttttttatttggggggggggggggggaaaatttttcccccgggccccccttttccccttgggccttttttggggccccttttaacccgttttttgccaaaaaccgggggggggcggggccgggttttccggggtttttttccccccccggccccca

SEQ ID NO: 650633 - DNA, 687 bp, Homo sapiens
  misc_feature (596)..(596): n is a, c, g, or t
  misc_feature (605)..(605): n is a, c, g, or t
  misc_feature (678)..(678): n is a, c, g, or t
tgatattttgaccttctcctttgaattatgaatgttcttaatggcatctagaatggttaatactttcgcagaagattgtcaatttattttgcccagatccatcggaggaataactgtggcagctttagccctaggaaatgttatttcttaaataataagactttaaagtcaaaattactccttaatccatgggctgcagactagatgtatcagcagacatgaaaacattaatcgttttatacatctccatcagagttcttgggtgactatgtgcattgtcaatgagcagtaatattttgaaaggcatcttttctaagcaataggtcttaacagtggacttaaaatttcagtaaaccatgctgtaaacagatgtgctgtcatccagaccttgttgttccccttatagcacataggcagagtagattaaacataattcttacaggccctagaatttttagtatggtaaatgtgcattgacttcaacttaaagtcaccagctgcattagccccaaacaagagagtcagactgtcctttgaagctttgtttccatgcattgacttctctctagctataaaagcctcagatcgcatcttcntccaatggnaagctattttgtctgcatttaaaaatccgttgcttagtgtattagtccattttcaagctgctggataaagacntacccaagg

SEQ ID NO: 650634 - DNA, 281 bp, Homo sapiens
  misc_feature (4)..(4): n is a, c, g, or t
agantctaaggatccccagtctcactccacctctcggtcaggccatcttcactcagcctcttgagtagctgggactacaggcatgtgccaccatgcccggctaattttttgtattttaggtaaagatgggggtctcactttgctatccagggtggtcttgaactcctgagctcaagcgatcctcccaccttggcctcccaaaatgctgggattacaggacttgatttgttttttttttttttttttttttttttttttttttttttttttttttattttta

SEQ ID NO: 650635 - DNA, 620 bp, Homo sapiens
tttattatcttttttttttctcatcatcccatcatgtacattttatttaatcgccgattagatagtaggcaaattcaggatagtaggcaaattcagtatcatatacttccattcatagttttctttggcttaaaataatttcaaagatagaagagaaaatatgatggtatagttttgttaatagggccatgaacagtacaaatttgtgagaaaatttttatttggaagtgtctagaaagaggagtgcacagaactccaagtcctcttcatttaagtagtcctgagcatcaccagcacagatggcaagcagtgcttttttataatgcccagaatcaaaattaatgccgtatgaaatagggattttccatatcgctctttgtatcgctaccttatggtcagcaggtctatttaacttttggcaaatgaaaatcctgattacagttttattatggaaaaccaaagcatgaaattgccctatataaatcttataagccaaatagggctgggtttgtttcgaacacaagaaaacaattggaaaccagcagtttcctgaaagtttccaatcataacatttattaaatgccatttccccaaattttggcccaaaaatattttggaag

SEQ ID NO: 650636 - DNA, 356 bp, Homo sapiens
  misc_feature (355)..(355): n is a, c, g, or t
attagaggtcccgtcgaggtaccaacactgacaggcttagcaaaaccaaaagggtctgtagagctcagaggcaggcacgagattgggagagctggatgacggtttggtaagagaattaaacggtgtagtcctcctgtgtatcctttggattctgttatgctgttgcttgtagagggaaaaagttcatgtgtcatttatatacaagtgcccatttgacattgagtgagtcacatttattttaccctatatgaacacaaaatctctgttttaaaatcagattctagaactttaaaagggttcttatgtattgttctgaagtaactcagtggctcttggtgagcccgccccacctggnc

SEQ ID NO: 650637 - DNA, 274 bp, Homo sapiens
  misc_feature (167)..(167): n is a, c, g, or t
  misc_feature (254)..(254): n is a, c, g, or t
  misc_feature (271)..(271): n is a, c, g, or t
tcaagtactatttcatggtccaaacctgttgccatagttggtaaggctttcctttaagtgtgaaatatttagatgaaattttctcttttaaagttctttatagggttagggtgtgggaaaacacctacagatttattaatatagcattaaaaacacaccctaacccntataaagaacctttaaagggttagggtgtgggaaaatgctatattaataaatctgtagtgttttgtgtttatatgttcagaaccagngtagactggattgaaanatt

SEQ ID NO: 650638 - DNA, 848 bp, Homo sapiens
tgcccgggcccctagcttggagtttcgaagcctcaagcgtctcacactcgtggtcgcggtgccttcggcggtccctcctgtgccccctcccttgcccttccccttgccccccctggtgatccgcgatttcttggtgcaaatgccagagcccctctcagatggccccgttagttcttctcggcacaggacctggtcataggacattaccggaaagtgcaggggcccctgggaaccacaggtgaggtccccagggctatctgggaggatgtagaacggattgggctcccgttgcggtcccctattgcccacggtactgacgcggtgcccaagagccctggtcaggatcatggggccctggcgcaagccagatctggagcctgctgctccctgctgcggagtcctcggaggcttcgcgttgactccagttccttacagaactggctgatgggccaggaggtccaggcctgggctctcggtccctcctatgacgggccattggagcttgcagctcagacccccatctttgagttgttaccttatatcaaatagtacgttaggatgcttggcacgtcgtcctcgtaatagggatacccttgcctcactcagttttcctgagtttaccaagtgcaatagttttagccaagtgccttgagatgaagctgccatgtcaaaggtggacaccattctccagcattcagggtgatatgctcgtcccgcgcaccgttggcaggcagctggccttccggaataaggcagcctggccccacatctgcagtctggctacacacagagatctggcacccctgggtggagtgtccctcgggggcttttacgcccatgcaccctca

SEQ ID NO: 650639 - DNA, 253 bp, Homo sapiens
  misc_feature (26)..(26): n is a, c, g, or t
agcctagtttgaacatcctcatcccngtgttagaccggatccgatatacagagtcttaaggaaatcgcatcaacgtgcctgagcagtcggctgtgactctcgacaatgtaactctgcaaatcgatggagtcctttacctgccatcatggacccttacaaggcaagctacgacgcgaggaccctgatatgccgtcacccagctagctcaaacaaccacgagatcagagctcagcaaactctctctggacaaagt

SEQ ID NO: 650640 - DNA, 321 bp, Homo sapiens
tatgttctcgactcgttacatttacattattgggaaaatgacaactcatgggcgggcattatggatacatacaaacggatactggtgaaaggcctccaaataggaaagggctcataaaaatatatataagaatatctgatggtacaaatccacttaacaaataacctcagggactagggaccagaattctctcttataaagtcattcagcatcatcagggagcacacaagtccattcaagtttcaggcacacaaatgcaggcacagcattcagcattcacaggagttcagcatttttcagcacaggtgtcaagcttccagc

SEQ ID NO: 650641 - DNA, 110 bp, Homo sapiens
ggctgtcctatggtagctatggatgtccgcatccaagcccatcttcactgtcacccttaaagcatacatcgtgagggattgtttgagtttcccagacactttcagttgaa

SEQ ID NO: 650642 - DNA, 944 bp, Homo sapiens
gcccatgggcccagcggtctaccacgagaccctggtctggaggagcagacgagccctaccccgtccagccagcctccttacaacccggctacatggatgccccgcaaggtggtcctctgagcattccctggcctctctgggctggcaggttggatcatgttgtgtgtgtgcgtgagtgagtggtgctggcgcgcgattccttatcgaccccagtgtgatgctgtgtgtgtccaggcgacggttccttacgctccatggtgtgctgtggtgtgtcctggcctgttgatattgtggggctttcctgcgtgatgctgccctggggtggggagatcatagtccttggccagcacgctggtgctgggaccacgacttggtgctcttcctcacactgacgattatgcttcctagactctcaacgccaacatggtcataacgaatgggggttggtcggggggctagcccctgctgacgtggccccgtgtgagggtgggggcctcgtcctagggtcgacatgggtgggcagttcttctcctacgcgtatacccgtaggcggtgacctattgctctagtgctgttcacgcccaggtggtgtcccttttctgtgtggatcgctgatttgtgctgtttgcgtcagcgtggagcagcgtgcttgcgcgtgggcagggcttcgtcccgcggagtagcggcgggtgatccgtgtcgctgatgcctgcgtactcttgtgccgtgcgagcgctttgggtagtcctcggcctgacggagtggcctggggaacctaaggtgtagatgtcgccgtggttcacgggggggccggtcatgcccggttggggactcagggacctcctggcgcaggaagcttggggggggcctccagtgtccgtcggccggatgtgcccggtccgattccctgggcacggggggcctggaaatcttttgcccgtgtg

SEQ ID NO: 650643 - DNA, 140 bp, Homo sapiens
tctgaggtcctacgctggcgcagtctcagcggtatctgggcttatggtgctcagtttctgatgagacattgaaagaagagtagctgaggagctggcattggagcaagcaagaaagaatccgaagatcagaaacgactaaa

SEQ ID NO: 650644 - DNA, 875 bp, Homo sapiens
  misc_feature (218)..(218): n is a, c, g, or t
gaccgtcgtgaggtgtcccgggtctcacggtgtttttcggccggctgtcaacgtagctgctttacctcatcgtgtttaaatgctttggggaccttcggctaggactttagttcctggtccccccgatttgggaaagaagtaagcaaagtcacgtgacctaggattggaccttcctgcccttgttggctggcagacgcgcgttctatcgcaggatcacnctggagaaattctatgaacctgagacttctgaaggacccgcttaggttcttcacgtaggccctccatttcccttccggtttcccaggggcacccttagctcccatggccctgacacgacacacatttcccccttcctgttccccgagagccgctggccccccatgcaccccgtgcatcctgtttgaccagtggatagtacttggatggctttcccgaagtcttctagaatatgagagttctttctctggcagctttcccccctggagccggagtgtagatgttcattatcttgggcctgggaaccacttccccaggcttctccctccccccacccccataggacaggatttggccttagcttctgggcctatcggctgccttccctctgacttcctaccacctcttctgccttcctttgagctctgttgggcttggggatcttagttttcttttgtttatttccccgctcctttttttcttctctggtcaggttttttatagggggggtttgtggttttttgtttttttttgcattctgagcaagcatttgcctttcttcctctccccacataccatcgtggtacagaatgcgcctgctgatttaccgatgtagttcatgtaagttcataaaggtaataaagataaaaacaaaacca

SEQ ID NO: 650645 - DNA, 1150 bp, Homo sapiens
  misc_feature (1)..(1): n is a, c, g, or t
natatgggcgtttccttcggggtgtgctcgtatgtagtatggcttggctagtgggtacgttctaatagttccctcttggctttttcttgtggcgtgttatagaaatgagagccctctatccagcggtagtggatagctgaagcttctcctgtaatgtggaactatcgtggcttggcgggtggtcccttctttttcaagtgtcttgatcctgtgaaggtgattgattctgaatggccttgtctctctggcctggtgaacttgtgggtgctatgaatctcctttttggtaaattggtctctccttctgtcttctacgtcgttcggtagaaatgtcatgacaatgcccgcgcccatttccgtaactattgtaagatcaatgtgtcatcgtggctcttgtctgtctcaatactggggcttaccttttctttgctgacaggccttcggttcaaatatgtctttgggtatggaagtttctcataggcccctgggcctgtgctcgttccgtccaattcgtctgtgagatggcgcctccaacggacgtcgtaatgaatggtatgatgatgtctctgacttgatggtgatgccctgtgatgtgcctcaataacgcatatgtacgatatacggatgtggtaataatactgcatcatcatttggccgacaactggttaactttttggaggtctctctggaatcgcatgaaggcccatgtgaaccatcacacataggcaccttgccctgcgcatgttagaagcacggagaaccgcagcctcaccagcgtacagtctatcagatcctcgcgaggcgcagcaaaatcggcgaaggcccgatcatgggacacaaggtggattgtcggaaccagcaagagacacatagaagactggaggagccagagtccctcgctaccggggtagggactctctctcagcacatggagcgtcgcgaaggatcccacaggccaccgaccgagtcgcccgccaccgtccgcgagtcctccggcgagataggtctcgtccgctgcggacagacggaaatactgatttcccactggatcctgcctctaggggatgcagtgtccgtacctgctaggagcctgggccctcattccaccagacccagacaattgaggaaacttgggaagaaagagagaaacg

SEQ ID NO: 650646 - DNA, 127 bp, Homo sapiens
ggctgcactaaaggttgctgtatctttctcctaccatttccagcacagcgatggtttctggtcccagtgaggccctgttcttgtgctgtgtggtacccttacgtaactatgatgagcatcccgggta

SEQ ID NO: 650647 - DNA, 338 bp, Homo sapiens
gcgtcgacgtgtgtgtgtatcctggaacttgctctatagatcaggctagtctcgaaccattctttttaaatatgcatataggtattttgcctaaatgtgtctgtgcagcaaatgtgtgcctgatgcctgtggaagccagagaggtatcaaaccccatggaatttgagttacagacaattctaatgtgggcactaggaaatgaacccatatccagtgttcttaactaccaagctttgatgacacaattttaaaaagctcttaagactggacaagtcagacaggcagatcttttgttattatggtacgcactactcttttagtgtactaaatggtttttc

SEQ ID NO: 650648 - DNA, 208 bp, Homo sapiens
gagatactagggatgatatagtgctagatgaaacataatatttatttataaaagtgtgtagatggtgaaatcacgaaaaagagtgctatgaccattatgtatgaggaaacaggccgttggatctccgggaaaggcactggtcaataagtcattacgtgcccatgtttggacattccccaaagcgagaaagcttcttaggaaaacacgc

SEQ ID NO: 650649 - DNA, 207 bp, Homo sapiens
tatcagccgtgggcaacatagcccgacctcatctctgctaacaattaaaaataaataaattagctgggtgtggtggtgcatgcctgtgatcctagctactcaggaggctgaggtgggaggatcgctagagcccagagaaccaaggctacagtgagccatgatcatgctactgcactccagcctgggatgacaatgagaccatggctc

SEQ ID NO: 650650 - DNA, 986 bp, Homo sapiens
ccagcctgggcgacagagcgagactccttctcaaaaaaaaaaaaatgcataaaataatatgggatctatgttaatagggcactaattggtttaaacgacataattggttaacctatagggtagggggacagagaaagggagcagagttaatggtatgctattggaagctgagttggctatcagtctggaactagactttggaactcagcatggttaaatggaaatcttcatagtagccactaaaaaaataactttaaaaatatacaggaaaagaatttaagaaagggatcaaaatattacagggataaatcattaaccaaacacaaaaagaagggtactggaggagcaaaacacttcatggtagaaactaaacaggcatgatggacgtaggtaaggtccttgggtggtataggtttttctggttttcctttttcgggggttggtctggaaacagagtctggctctggtcgctcaggctgggagtgcagggttccattctcggctcactgcagccttggcctcccaagttcaagggatactcagcctcctgagtagctggggatggcaggcgcccaccaccaaagccaggtgatctcggggtcccgggtggagacagggtccactacatgggccaggctacactcaagctccagggctcaggtggcccacttgcctcggcctccaaggtgccgggcccggccatgacccacttgacccggactgtaggggaacggaacaggggcacggggctctgggcccaggtggattgagggaaagcacggtccatggcaaccttggaaacaccgggaaggtccaagggactcaaccggctcaagctcacgaagggcgggagccgaggggtgtcacaccacgggccacatcatacgacgatacgtgaacaaaagcagctagacaggggacaacgcgttaaagcggagcaaaacatcggcacctacaccccagagaagaacagccgcaacaaagag

SEQ ID NO: 650651 - DNA, 827 bp, Homo sapiens
gacttgacccgcgccgccgctggacgcgctccgtgtcctggagctggggctgtgctgggagcggggcccaccctctacctttacccctacttttaccccacactcacatgtgcataagaagctgtaaagacgaatgcctaactaagacagtcgacccacagcggagacacaggccgcaccaagcacccgctaggcagcgcagcagacgccggattcccacgcgacagacactaccacacacacgacgcccaaccaacaaaacaacaccccaacaaccacacacacacccacacccccaacacacccacgcgacccacacaccccccaccccacggaaaccagaaggaaacgacagcacacacaacccagcatccaagcaccgacggatccaccagtcgcatgcacgacacgacgcgcatgcctcagccccgacggacgagcgacggagcacgacgagaatacgcagcgtcgcaacaccacgcaacgtcacacgaaagcgcaaaccgtacacacccacaccaccgatacgccgacgacacaacccaacacagaccatacactacgcccacgaagaaaacggaaagaagcacgagccaaacggcagaaagacagacaggcccgacaccagagcatacagacggtcggagaggcgacgccgactagtcgcagaagcacaagagagagagaaacaaggaccagacggcaggctcggactccgacctagcgcgacgatcacgacacgcactgcaccccaacgcaagacagcccggaacaactcaaacaagacggcttacacaacgacagagacacgactaccgaaactgcac

SEQ ID NO: 650652 - DNA, 1158 bp, Homo sapiens
ggcacagaacttcggtcatgggacttcagcattgagcgattgtttcgcagagtttggacctgcgactcggggtccttgacctgaaggctctgaggcgagatagtgcgcgaaatgtggctgacgctgaggaacattcaggtgtgatcgcgtacatcaagtcagtatcgttgtgacattccaagggacaacagcaatccaggggaccttgcaaaaaacaagctagtcggacacccgtgacaactcctcccaacgaagtattgtccccaacttggtaccaggggcaacaagttaaagtaaccgacattagcacaacttttccaacactacagagtgtaggcaattcaattgggtcctcgtgactccaatacgtcgatgtggcacggggtctggcggcagcatgcggaactgtctggtcaggggcgtcccgggtctcaaaatggaactgggtcgaccctggccacgccttatttccccaagtcaagacctgagcacaaccagacgaatctaacccagaaagttcgggccattgggcccatcgctctcttttcaccgcactactgtgtgagccacttacacagttcattgggccaagtaagaccgtttggttcaccacacgtgaggaacaagcagtacgccaatccgtgtatccctctcacacaacaggaacacttacctgtaagtacaaaatggggttggcgcgagaaatgatggagccagggaggcgaccggtggagcacgtttcatcgggcacacagacataggatgcattaactacaagcccacgttgagtgattaatttcacacagtaatcttcccacatgacaacttgcacgacgaatcagtcactgtccacgcatgttctgtccatcacagattggctccgctcacacaaattttttggctattcccctacagaatctatggccacaaacgtcgcaacaacaacacatgtgatgaagcacaatacatcaacaaacttggcatgcgaacaaaagacagcgacccattcttcagcagaccagttatctagtagcgcaggccaaatatatgagacacgcgttgaaccaaaaactctctaaatagtacttggcgcgtggatcattcatgcgcactccatttgtgtaatcgtgtcaccagcgacacaagcgccatctgtag

SEQ ID NO: 650653 - DNA, 240 bp, Homo sapiens
tcaggagttcgaaaccagcctggctaacgtggtgagaccccgtctctactaaaaatacaaaattagccgggcgtggtggcggctgcctgtaatcccagctacttgggaggctgaggcaggagaatcgcttgaacccaggaggtggaggttgcagtgacgccgagatcgcgccactgcactccagcttgcgggatgggtcgagactttgtctccaaacccaccactcgtccccacaccatg

SEQ ID NO: 650654 - DNA, 995 bp, Homo sapiens
cctggtcatactgttagtttcgtgtgtagtgtcgactggcgcgtactacccctctgttcgaagcgtctccgcctggtaccacagcccgggcactgttgtgaagtatatttgtgtatagcaagatggcccgccccctgtggtctccgcgagtcaacctggcggtggaaagatttgcccgcgcccctagtggcttgtcgtttgctgctaaagggcccccgtgctttttgcaaacactacaaccccggggtggtgtctctggcgcaagagcaacgtgtccgcaggtttcaacagaaagtaccaggacgcgctttggaaagaatgtgtcacgaaaggtgcacgcgtggggacgacacaagtgcttgtgtatgttatcacaaaggtgtagcaagattcttttccctagccgttaactcaccgggattgtcaccagcgtcgctagccccctgctgtatcactatgatgtaaaataggacggccctcccctttgttcaacattggtttttacatgacagtatgcggcgcccgctcacactctgaagattgtctgtctcacacggaacgggtttagtaacttttgttagaccccacacgttgggcggcctgctgttagctctatctgagtagatcaccgaacaaagttgtttgccgagcgatgcctcttttgaagatcccggcattgtctatgaacaatttaaaattttgtgtgggcgattttggctcacatccttcgttttacatggcgttattccccctgatttcaagtgggatacaccccttagtgtacaaacaattaacgccgacgcagatccttcgtcgttccacgctcacgcactcgcgtctattacggacttcaacgtataggcgcctccacacgacttacgagcagacaggccggaacggggcgcgaggcggcatgtcgaggtacaagtagaagtcgatgtgttttcgaccccgcataacaatcggtataagcagtactttacccgaagttatca

SEQ ID NO: 650655 - DNA, 239 bp, Homo sapiens
ggaacacaaaagcgggaggaaatggagatgatggcattgaatctgaatccgtggctggggaagctacttagtgtctatgcgtgcacacaccccattcataagtaaatgtggttaggaattcctgtcgtggctcagtggttaacgaatccaactaggaaccatgaggttgcaggtttgatccctggcctcgctcagtgggttaaggatctggcattgccgtgagctgccgcttttgtgtt

SEQ ID NO: 650656 - DNA, 194 bp, Homo sapiens
ggttactgcaatggcagaccaaaaagaaaccttttttagcaatatcaagaatctggtttaacctaaaaccttctaattagctctaagtcttaacccctattaacctaaggggtttaatttccccttctctccccatctcccctcagtccccataaaaccttcattccacataaggttacacgtgggggtaagtg

SEQ ID NO: 650657 - DNA, 383 bp, Homo sapiens
aaggtcgatctagagatccccaggggggaacaatcacttacttcaccggaaggtgtcaataataccatttcagcctcaactcacggaggcatgcacatcggcttcaactcacggagtggctagggatgagagaactaccctagacgacttcttggtggaccaagacagatccggctataccggtattaaggtctcaggccaaagagataaaagtatggaaggagggaaagagagaagaaaacgtgtaaggctcggctacaataataggtatctaacggaagtcataattttaaaatacgtatacacatctatatacacacacacatccccacagaaccatatcccttagctctactacaagggcctcaaagcaataatactac

SEQ ID NO: 650658 - DNA, 904 bp, Homo sapiens
cgatgggacggcaccctggcaccctggctaccagttttgaggggaaaaaaattagaaatccttggccaaagaggggacaaattgagcctaaaatcaagccttggtgtctcactttttaaatctacttttacctttgtgtattggttgtgtgattttttgtgtactcatgtgtatgattgctgaatacacaatgaatacacaaaagctataaatagatttaaagagagaaagcaaaccaaaacccatcggtaatccactggaaaaacaagcctccaactctattcagaacattgtcaattaaaagaaaagaattaagaatttcccttttaaactatatttcaggataactcaataactctagtggacaacagcaagtattttggttttgttgttggtttcttttttttgagatggagtcttgctgtattgcccaggctggagtgcaatggcacaacctcggctcactgcagcctctgtctcctgggttcgggtgattctcctgcctcagactcctgagtagctgggattacaggcgcccgagacaggctctactaaaaaatacaaaaattagcaggcatggtggcgcatgcctgcagccccgagtagctgggactggggcgcgcacacacagctggtaatgtctatttttgacgagatggggtcttgcatgttgccagcgtgattcgagctctggctttcacctgggccacgaagctctgggttcacgggtgagccccgtgccagcctttgggtggtgtttaacagaacatcagtatcccgggaaggctagcactcgaaaacggttgcccccctgcaaatttcgcaggtggaacgagcacggtcggggtcgtaaccgccggctaacacgggcagggcatgaccgaatgggggagcacgcaatggg

SEQ ID NO: 650659 - DNA, 349 bp, Homo sapiens
atacctggagtttatctcagagcagtgagaagccactggaaagttgtttaattgtttttctgtttttgagacagagtctagctctgtcacccaggcagactgcagtggtgcaatctcggctcactgcaacctccagctcccgggctcaagccattctcctgcctcagcctcccaagtagctgggactacaggtgtgtgccaccgtgcctggctaatttttgtatttttagtagggatgagacttcaccatgttggccaggctggtctcgacctcctgacctcaggtgatccacccaccttggcctcccaaagtgctgggactacaggcacattgcaacacggtctctca

SEQ ID NO: 650660 - DNA, 517 bp, Homo sapiens
  misc_feature (62)..(62): n is a, c, g, or t
ccgcgagcaccgctccgagctgaacctgcgccgcctcttcgctgcctccgtggaccgcttcntccacttcagcttgaccctcatcacccaccatgggcgtatcctggtgggttactcccagaacctggtgacggaggacgtgatgcggatgctggtggtcttggccaagtccaggggcgtggtggccgcccgggagcggttgttcactggtgtgaagatcatcttcgccgagggtcgtgccgtgctgctcgtggctctgcggatccggtctttcgctcccatcctggttgtcggggtgggtgtgctgccagaggtcatcgttgttctggtcctgatgaagtctttctgtcctcgtgtccggcgcggtgcctggatggggttccctggcgtgaccgtcgcggacgtcttcttccttggccttggcggctccgccctgggacccctctgggtgctggtgcccttgtgcctgctcttgcggcggtccccgcgtctggtctgtctcctgctttgatggaac

SEQ ID NO: 650661 - DNA, 313 bp, Homo sapiens
  misc_feature (1)..(1): n is a, c, g, or t
ncgactctagaggagcccggactacatacttccgaggaggagggactctaggaggactttgtggaagaaagcagccaaagaggctggaatgggggtcaaaacaacaatagccagcattccccagaaaaactctggaaaccaaaacctgcacctgaacaacctgcctaatctgccaggggcgattgcccgggctttaaaggcctaaattcctttccaactttaccctgactgtaaagctgggcagtgcatggcaagaaggctgacaaaccagatcaaaacaaatggctttggtgctcccttccccggtcctcct

SEQ ID NO: 650662 - DNA, 883 bp, Homo sapiens
  misc_feature (30)..(31): n is a, c, g, or t
  misc_feature (304)..(304): n is a, c, g, or t
  misc_feature (334)..(334): n is a, c, g, or t
  misc_feature (344)..(344): n is a, c, g, or t
  misc_feature (353)..(353): n is a, c, g, or t
  misc_feature (355)..(355): n is a, c, g, or t
  misc_feature (358)..(358): n is a, c, g, or t
  misc_feature (368)..(368): n is a, c, g, or t
  misc_feature (376)..(376): n is a, c, g, or t
  misc_feature (389)..(389): n is a, c, g, or t
  misc_feature (397)..(397): n is a, c, g, or t
  misc_feature (401)..(401): n is a, c, g, or t
  misc_feature (416)..(416): n is a, c, g, or t
  misc_feature (430)..(430): n is a, c, g, or t
  misc_feature (433)..(433): n is a, c, g, or t
  misc_feature (437)..(437): n is a, c, g, or t
  misc_feature (440)..(440): n is a, c, g, or t
  misc_feature (443)..(443): n is a, c, g, or t
  misc_feature (450)..(450): n is a, c, g, or t
  misc_feature (453)..(453): n is a, c, g, or t
  misc_feature (457)..(457): n is a, c, g, or t
  misc_feature (461)..(461): n is a, c, g, or t
  misc_feature (463)..(463): n is a, c, g, or t
  misc_feature (635)..(635): n is a, c, g, or t
  misc_feature (883)..(883): n is a, c, g, or t
caccgggtgaagttgttccatccttatatnnttttcctttaggcctacagtgttcccctggggatttgagtttcaagtttgtgaacaaggctgtattatttctgtgggaaaaatcattcaggtttcacatgatggaaacagaatgatacaatccactgagtttgaagactccaggaagaacaaaaaattatatttgcaattacttatttcaggtcaaattaatagcttctagtatgataactttttttgttttaaaattaaccagttaagagactgggcgtggtggttcatgcctgcaatcccngagctttgggaggccacagtgggtggatcngttgaggtcnggagtttgngnccngcctgggcancgtggtgnaatcctgtctctnctgaaatncagnaattggctggtgtgntggccacgcctgtngtnccanctnctngggaggntanggcncaanantctcgctgctgactccagagtgcagaccacagagcaagatctgtctcaagacaaaacaacaaaaaactgaccaggtagcatggtattcacgttacttgcgaaggaaccctaggctccgctacgcaaggatttgcttataacaaacaacaaaggcggtgggtgcgttactgcnggacaccgaatacggcttgcgaggcaggtagtctaacaggccagcctgttgctgtaaaaacccggggttatgtgcccaataacgagacgggccctcgatgtttactgaacaccatcatcgacacgacaccgcgcaccaggagagtaccaacacctcgcgaagaacctcgaacaacacgtcatcccccgcctacgtacaacgcactacatagcacgcaggcaattactcgctcaatatcaatgagttgn

SEQ ID NO: 650663 - DNA, 431 bp, Homo sapiens
ataacataacttggttccgtgcaagtggatcagcggaatgacagtagttcaattccagaaaacaaaaatcaaaagattaaggatcccaaaatgttcttaggcctgattagatttcacggaactcaagtcattttggagtggggcgttcacaaggaccccattaacccagcacaggaattctcgggagccatgagcgcctgcatcaggcactctgacaatcaatggtaaccaatttgcgatctaaaaattccccttaattttgctctaaagtcatgaggcttttgaaaggcaaccacatcactgcccctgatattttaaactgttttatgtataggttgtgttgacatccttggatatcagagaaagtgcagtttttctggtaccaaaacaaatttgggattgcatcatgtatagagagagacctttaagga

SEQ ID NO: 650664 - DNA, 250 bp, Homo sapiens
tgaactgtgtgcagcagttcaaagaagaggtagagaaaagcgagacacgttaaagtctaccctacaggatagatgtgaagaaaggcaagattgaagacacaggaggcagatggcggcctcctataccatcaaaacccagtataactctaaggagcagtggacaaaagctctcaagtacatgctgacgaatctacagtggggtcttgcttgggtatcctcacaattttataacaaatgacttttttcctta

SEQ ID NO: 650665 - DNA, 736 bp, Homo sapiens
  misc_feature (5)..(5): n is a, c, g, or t
  misc_feature (674)..(674): n is a, c, g, or t
ctcanagtatacaagaaatatctagaaaaaacgaccgtcctaggcctggccaattgggcccattcacaatacaaatttcggggtccgaaatcgagagaggtgatcgtacggtgagcaaagtccaataacggttgcaaaacaaattctggttcaacgttctatgtcatatgacgagtccattctacaagttcttcgtcattttcaggttctattcaacttaagtcttggggttcctatttctttaatagggtctagatatgtttcacttgaaggtttactagctctccgttcctgagttgctccgtaacctaacaagctcgttctccaacagaactgtctccgttcctcactgtctctccggacgacggtgtcatgtctcgaccctattaagctctgacccgtcactcttgtcccatttgtgtacaccgtccgaacaaggacttcttttctgttcgccctgtctgacccttccaaactggaacggctaccagggactttggtttgttacgtcatctgtttccggacaagaggctcccgtcttagttcgtttcactcccaacgcctttcgatttagcggtctgaatctattgattgttaatttatctaacctttttttttctagcgaattgtgcattgtttcaacacatcagaagaaattttccttttgtagtctnatctcacaagattaccggggacgaagagctgattctctaaccaaaaataaaactcgtcggct

SEQ ID NO: 650666 - DNA, 727 bp, Homo sapiens
gctattgccagtgactcgaagctatcacaaagtgccttcggctactttatgacagcctgtgctgttatcattttgaccataatatgttacctggggctgccccgtctggaattataccggtactaccagcagcttaagcttgaaagacccgttgagcaagagaccaaatctcggagtgttcagacatgcaactctcagcccaccaatgaaagtcactctatcaaagccatgctgcaaaatatgtcactcctggctttgactgtctgcttcatctctactatcaccattgagatgattccagacgcgactgttgagcgtaagtccagcatcgcaggcaggagtacctgggaacgacacttcatatctgtgtactgattcttgactttcaatatctatgactgtgtgggccggagactcacagatgtattcatgtggactgggaaggacagccgttggcttgtcagcctggtgctgagccggctagtgatttgccacttgtggtgctgtgcaacactaagcgccgcggtcctgaacttggtctttgagcacgaaggctgggtcattttcttaatggcttgctttggcgtttctaacgagtacctggcagactctgattttcattcggccccagtgaactccgcgcggagacccccgaaccacttggcttttttctttgtcctggcttgggcctggggcttgtttctcctttctcttccggctttggtgg

SEQ ID NO: 650667 - DNA, 379 bp, Homo sapiens
tctttgtgagacagagtctcgctctgtctcccaggctgtattgcagtggcaggatctcagctcactgcaacctccacttcctgggttcaagcaattcttttgcttcagcctcctgagtagccacctggctaatttttgtatttttagtggagacagggtttcaccatgttggcaggctggtctcgaactcctgacctcaagtgattcacctgcctcagcctcccaaagtgctgggattacaggcatgaaacactgcatccaacccaaaataatatttttaaactattagattcgacagacaaaaaaattaccatctgtgattttttttttaagtttcagaatgttcactttcaatttctttagttatctctttgtgggc

SEQ ID NO: 650668 - DNA, 141 bp, Homo sapiens
tattaccagctctcttactccacacacagagttttacttcatattcctcacatcgagccgagctgggccagccaggcaaccttctaggtaacgataaaaccccctgccgagagaagaggtgttgtagcgagctgagatcat

SEQ ID NO: 650669 - DNA, 133 bp, Homo sapiens
gaactaatttgcatgagaaagaggtgcacgagccggattcaggacactcattatagatctaactagacctctaagtaaagtcaggtgtgagagagtaaaggggacaaacaggaggagggaatcaaagaaattg

SEQ ID NO: 650670 - DNA, 1285 bp, Homo sapiens
tgggccaaaaattggttcagttctataaaacccaaagttgtcttccctcctggggtttaatttaagggggtggatagcaaaacagtggaaacaaatgggaaagagtggtcatctccgggggggggtgcgaggggcctccacaaaggtgtgtatctcccgagccactgtggggaaagccgaaagggggcaagaatccaccgtggaggctcgaggagagttccaagacacccaccgcctggtgcacacaacgatgtggggaactctccctatatctgtgtggtcctataaaaaaatatacaaaatattatacccgagggagtgtggtgtggcccgagtgcctatatatatgtctcccgagactatacgatgtgggagagggcgtgagaaggaagaaaaaatatgtcgcttgtgaacaccctctgagaggaggtgtggagaggtgtgtgcagagtgagagacctgtgagagacactcgtgtgtgtccggctgtgcccactctcgcgagcgcccgtgtgtggttcacacccagagagtgtgagagacactctgctgtgtgtctctaacaaacacaaatattcataactataaatatacaatatatacagacatatatacacagagtgttgtgcgagcaagtgtatataacacacacacatatacaaacgcgcgcgggagaaaagcacattctttaatatatatataccccgcgtcgtgtggggtgtctccccacgtcgtgtgtgtggaggcacataacgtgtgtggcatttttatacacaaaagaaacaccctttataaaaatatgcgcggtggcaccacataagagtgtgttctctcccgagaaaaaaatttctccaaatataagacgagagaaacgagagggtgggtggtgttatcccggggggggccacaaaacaagagaggcccagaagggttaagagagggggggccccaaggaggcttaaaaacaacatagaggggagcacgcggggccccacaaaagcccccagggcaacaaactatataggaccccacatatgaagaatgtgggggaaaggctcaatcacccgcgtgaaattataaaaccccccccaaagagtgggggttccctccaagtgatgacgtcttccagaaagacatatgaaagcccccagaaaatgtgtctgccctcgtgaggaccgactactaggggggaaagggggctctccccacaaaaaagagagctccaatgcagtgacaacacagcacacacgggtgtctcaagcataaagaggccccccttaagaga

SEQ ID NO: 650671 - DNA, 395 bp, Homo sapiens
gggataacgagaaatgtgaggccaggactgagaggggtctttcaatgctgcagtgagaagtagcttgagcacttgctccagtgcgcctggacttgatggggcaagcaaggctggacaggaaagatgcctggggcctgtgacttgagttggggtgcctaacatttccggcagttgctgccggtagaccccatacccagggagctgatacctacaggtagcccacgcacgcatgaaccccctccgcaggtggtgttcaattggccgtcagggcgcgcacaggccgtgtgctcaccgctacgttcccgttgcacggagcgctgcagacactgccagtcactggccgggagcctgacacgcagaggtccccgcacacgaccccaccccgtcgggtggag

SEQ ID NO: 650672 - DNA, 882 bp, Homo sapiens
gtcggcacagagtgcctgccagctggcgtaccaggcatgggtgatcaacgcccaggcggtgctgaggcggtggcagaaggagcgggagcaggcgagggaggaacaggcgaggtacatgctacccacaggaggtggtcccagctaggaggtggagcccggagagggccccgagggtaggcagcgtgcaggtcgagagccatgtgtgtgcagaggtgtgctgagcacggcgcagttcctgtggatgctggggcaaggcgcttaggtggatgagctgacacgctggctgcaggagttcacccggcaccaggaagcatgagcgaccgtgctgcggggcaagagcgctacctcctcacacaggagctcctgcagggctggcgatgtgcagcagggggccgtgcctggatcagctgtaccacaaagccagggcgaggccaccgcttgccatggcccccaacgcgaggcccccaaggtgccccaagcacccgtgtccagtgggctgggcgcgagagggagccactcagcaggcattacgagacggatgttgggcttggccccctgaagccccgggtaaccacaagggtcgcatgtggcagtgacggaagggccttacagcctgacccctggggtagccgctgaagggatgtgttgcccctttcgtgctacccagggggtcgtgactgcggaccgggccaaggggagctggtcctggaccagggcggcttgggcaatcccacatggttgaggcagccagaggctgttggcggcaggggggccagggccgagaggctctggggatgtttcgcgcacgtcttccactgtgtgtgtgggggccccatcggagcagtgccgtgttcttctcatagatcttcaaccggttgttcg

SEQ ID NO: 650673 - DNA, 80 bp, Homo sapiens
ttcaacaccacaccccccaccccatcgtgggtgagggtatcccctgtgtgtcacaggccaataaaatttacctggcactg

SEQ ID NO: 650674 - DNA, 136 bp, Homo sapiens
tccctgctcatgtctagtgcccagcgtctatcatgaggctgcatccaatgcccagagccatgtgtcgcactcttcgcgctggtgcctttcctctgaggggctatcaatgtgtagactaagccgtcgtaggccgtga

SEQ ID NO: 650675 - DNA, 387 bp, Homo sapiens
  misc_feature (352)..(352): n is a, c, g, or t
  misc_feature (379)..(380): n is a, c, g, or t
cggcacgaggtttaacaagacattcttagacgtaaaaaactattccggggttcttttacttggcaaccccacctggggcttcagagggtctgcaagccagcctcgactttttaatatgatattggaacgcttagaaaatgcagcaaaacatccactcaaagtcagatgtgttgtgtgctaccttttaggatgttccagtcgaatgcagcttcacggtttggaaatgaaatcatatgacttttttgcttcattgaacaggatacctgatttttttttttgttcctattcctaatttttacacatgtcaagattttctctgaactgtgtgaccaaaacaaaacaagggagtggncgagcctgggcaacatagcgagagccnntctctta

SEQ ID NO: 650676 - DNA, 140 bp, Homo sapiens
  misc_feature (41)..(41): n is a, c, g, or t
  misc_feature (86)..(86): n is a, c, g, or t
  misc_feature (90)..(91): n is a, c, g, or t
ggttttttttttgaggttgatggtattgataagtttgatantaaattttattttcaagattaagcgccgaggattaattttctctngtcnnattcacatttatagtattaagttatcttcaattcaggatttttatatat

SEQ ID NO: 650677 - DNA, 155 bp, Homo sapiens
ccaagagggacaacaccacatccgtgtcccgcccggcgcggggagccgcgctgcaacgcagcgggctacgtggacgacacgcagtgcgtgcggttcgacagcgacgccgcgagccagaggatggagccgcgggcgccgaggatagagcaggaggg

SEQ ID NO: 650678 - DNA, 770 bp, Homo sapiens
gggggggcctttgatgttctattccattcaagatgagcatttgcgggcccacagaggctccctgcaaccttcatattggctgtttttcctgagatgaacgtgtgctgcccccagtgcctgctgcctagccttgtactcgttgccttgatcaatcgcgagctgcattcactgcggcttgctcagttcggccgcttattccgatgctcacttttcttcctacttaggattgttccactgcctatctttgtggagtgcatgcaggacttttgcctcttctcctgcctcattccctgacatgtgctctaggttagatgtcagtcccaaatcaggtatgtccgtcacgtatgcaggcctcgacgccctcacctgtgtttatttgggggctccagggaccaatctggggctggaaatgttaggaggttgccgttggtagctgcccccgagatcgtagtccagcagggggcagtatagtgatctctggtagtatccctggctgctaagcccttagggacaggggtaggtcctttcctacattcccattcacttaacagctcttttgggattgggtgtttcattccatttactgcccactccatctcctctcctctctggtaggtttaattttatgcttttcctgattccagctttctgcttgcctgaggactcccgctccccccaccccaaagtttgtcatgtggcgttatagtggtaactgcagttcctcctctggaatgtagactgtatatgtttaataactcaccttatactcc

SEQ ID NO: 650679 - DNA, 323 bp, Homo sapiens
gaaacctaataacgggatctggtttgcatgagctatgttcaggttgcagatgtggctagggtcccatgttgctgtggctatggtataagacagccgctatagtcttaattgacccctagcctgggaacttccatatgctgcaggtgcaccagtaaaaagacaaaaaaaaatttttaatttgtctaataagcagttgcatttatgacacattcttaagcacatgcttatgactgacaagtcagacatactccttaaccaacatagtggcgtaattaagggttccggggtacgggggctccgaattcgtaaatccatggtccata

SEQ ID NO: 650680 - DNA, 269 bp, Homo sapiens
  misc_feature (218)..(219): n is a, c, g, or t
  misc_feature (222)..(222): n is a, c, g, or t
  misc_feature (233)..(233): n is a, c, g, or t
  misc_feature (237)..(237): n is a, c, g, or t
  misc_feature (248)..(248): n is a, c, g, or t
  misc_feature (253)..(253): n is a, c, g, or t
gccatgggaaaacatgataaaatggtcatttattttgcagttagaattttggaagccccaaaatagacagaccccctgactgttgaagggaggtttaaaaacagatattcaatttaaatgtaaaagagccccccaatttagagcccaggttacgaagacaagcttgcctcgcctgacttttttgtcccttgttttgcaggattagtattttgttacannccnctagtttttanactnttcaattaaanggccnatggttataacctgca

SEQ ID NO: 650681 - DNA, 659 bp, Homo sapiens
tctttcgtatggtggcacgttaatgagatcgttttctataaaataaatacatagtcaatttcaatcaaagcacatgataactcccagatagggacgtgtggaaggggctcagatccatactgtgcgccggtcttacacacttcttttattgtaaattataattttacattttaccttttctgacagttcttattattgatctaagaataattgactgtgccaactatgactcacctttttccaaggtagtttgactacctccaggtggttttaagctatcttggtgtttccagctgtaaaaagtaaagtagctattcctcttcaaagactttcctccccatctaattaggaataaatagtaacttctcttagaagcaaaatttattcaaagacccttgcaaacattcttaaatatctgctagccataatgaagaaatcagtgtactttatgttcttagctcccacaatttagcctaaatatttgccctggcatgcttatactgctccaagcaagcattaggtcatagcttgttcctcttccttatttaaaggtgtattttttttaccttccccagcattccacaggttactttctccttcccttgtgctcctctgcctttgcctcttttaacaagttctaagttgcccgccaatcgaag

SEQ ID NO: 650682 - DNA, 436 bp, Homo sapiens
catttcactttatttctgaatccttggacagccctcttcaccatttcagcatcaggggaggcaggacaaagaaaactaatcaagggtggataagtgtccccttccatactccggaatgaggtcaagcttccccctggcctctgctaaaaaaaacctcagagtgggtactagctgggaacaaagggactcttctactcatcagggtactatacgacttctactgggattgcaaggagagaagcccaccagcgggggggggggctaggttaaaagcacggggctaggagtattatatgagattatgaccaataagacacataggtacgggggtggaccaaggcagcttcggtgggaattcggatgtctggagtgaagggactggctctcaatcagggatcccagacttgtgggccagtattggaaagcacagaccggt

SEQ ID NO: 650683 - DNA, 662 bp, Homo sapiens
  misc_feature (31)..(31): n is a, c, g, or t
  misc_feature (80)..(81): n is a, c, g, or t
  misc_feature (111)..(112): n is a, c, g, or t
  misc_feature (120)..(120): n is a, c, g, or t
  misc_feature (123)..(123): n is a, c, g, or t
  misc_feature (125)..(125): n is a, c, g, or t
  misc_feature (131)..(131): n is a, c, g, or t
  misc_feature (137)..(137): n is a, c, g, or t
  misc_feature (139)..(139): n is a, c, g, or t
  misc_feature (148)..(148): n is a, c, g, or t
  misc_feature (156)..(156): n is a, c, g, or t
  misc_feature (159)..(159): n is a, c, g, or t
  misc_feature (164)..(164): n is a, c, g, or t
  misc_feature (174)..(174): n is a, c, g, or t
  misc_feature (182)..(183): n is a, c, g, or t
  misc_feature (186)..(186): n is a, c, g, or t
  misc_feature (200)..(200): n is a, c, g, or t
  misc_feature (204)..(204): n is a, c, g, or t
  misc_feature (206)..(206): n is a, c, g, or t
  misc_feature (216)..(216): n is a, c, g, or t
  misc_feature (222)..(222): n is a, c, g, or t
  misc_feature (227)..(227): n is a, c, g, or t
  misc_feature (242)..(242): n is a, c, g, or t
  misc_feature (258)..(259): n is a, c, g, or t
  misc_feature (261)..(261): n is a, c, g, or t
  misc_feature (275)..(277): n is a, c, g, or t
  misc_feature (290)..(290): n is a, c, g, or t
  misc_feature (354)..(354): n is a, c, g, or t
  misc_feature (375)..(375): n is a, c, g, or t
  misc_feature (380)..(380): n is a, c, g, or t
  misc_feature (400)..(400): n is a, c, g, or t
  misc_feature (414)..(414): n is a, c, g, or t
  misc_feature (653)..(653): n is a, c, g, or t
tcccagcacccccaccccctgcacgaatgcngcatatgagctgtgtgtgggaaaatggggacagtgccctgggcaggggnnccccaagggggaaagtgcttgtgtccattnntcctaccnctncncagctncccagntnaagggaagntgttattnttnttttntgctattttnttggtaannttnaagttttgctgttnttgntnacgctgtttntttgcngattncaagtttttgttgtntgttttgggaggtaanntnatggttttgatagnnntgttgtggatatntaggcggaaggagatgcgctggtggaaggctagctggggctctcgggtggaatagatgttaatnatctccttgggttggattagntcttnttgtggttgatgctggcgtnagtgtgtctatctnggatggccttggcaacaatgaactctgcatcttcggggctatccaactgcagcttctgggcgatgtcagccaaggagattcgggaataggagaggctgatcatgcgtacacctgtcttaatcacgttgtgccgcagccggataattagggtgtaggtcccatctgcttgaaacttctccccaaactgatccaggacctggttgaacttggctaggtttcctgtcctgacagcttgagtnagaaggaaa

SEQ ID NO: 650684 - DNA, 455 bp, Homo sapiens
  misc_feature (227)..(227): n is a, c, g, or t
  misc_feature (292)..(292): n is a, c, g, or t
  misc_feature (437)..(437): n is a, c, g, or t
ctctggaaatgcagaaagccaataaagaaaagtgaaagttcttaaatggtcgctttgtccataatgccaaaattttagagaccatattctctaatttcaccaagaaaacttgaaaaataaaagtttaaagagatatccgaaaatttaaacagcaatttgtatagtattaaataactttggccaggtgcggtggctcacacctgtaatcccagcactttgggaggctnaggcgggcggatcacgaggtcaggagatcaagaccatcctggctaacacggtgaaaccccgtctntactaaaaatacaaaaaattagccgggcgtgctagtgggcgcctgtcccagctactcgggaggctgaggcaggagaagggcctgaacccaggaggcggagcttgccgtcagcagagatcgtgccactgcactccagcctgggtgncaaagccagactccgtat

SEQ ID NO: 650685 - DNA, 424 bp, Homo sapiens
  misc_feature (160)..(160): n is a, c, g, or t
  misc_feature (172)..(172): n is a, c, g, or t
gcggaaaatacctttcccatccctcccttaagggtgtgggcccaaaatatgctcatgtggtgtttaggaaaacaaccctttccccccccaaaagggggggaaaactcccttaggattaggtggaacgtgtgatcccccttatgcagaatcccccccagtncaagatccccgnctggttttttaacaaacaaaaggatgtaaaggatggaaaatcacccccggtcctaacccatggtttgggcaacaagcttccgtaaaaccctggagccccttaaaaaaattcgggcccataaaggggtgggtcccttttggggcctttgtgtccgaggccagccccccaaaacccctggcccccgtggcccccccgtgggggtgtccaaaaaaaaataagtctgtaggccctgtctgttaataaaaagttttt

SEQ ID NO: 650686 - DNA, 512 bp, Homo sapiens
  misc_feature (241)..(241): n is a, c, g, or t
tgaaagtttatcacctttactggacttttggaacattttgaaatgttttaagtgaatgttttattttcatttttattttatttgtacattgttcctttagagtgttcattcgttgaaatttttgaatctttatagagagaggttaactgatttaagaagggaaatcttgattatatgttaaataataatacaattttaatattgtattattaacttacacttgcaaacctttaatatagtnctgttataggcatattaatattatattattgttataatagtaaccaaaatataatattagccttaacaatagaaaaacagaaaaacaacaatattaacttaccttattagtgatatagcctgtgaagaaagagaagtgttattagagagtgtaaataagattgaggtcattagataagtgtgaaaaaatctagaatttgttttatttatttttatttatttttatatatatttctgtgaacattttacaatacaatcttttattattctta

SEQ ID NO: 650687 - DNA, 338 bp, Homo sapiens
gtaccgaagactttagatggtgcacttgatgcacagagtctcacaacgtcgacaatttcctggccaaaaaaactgaagagtcagctgatgccagaaggcaagccgacatgctacaaaatgaagcacaaactcttttagctcaagcaaatagcaagctgccacctgctccaaagatttcagcacacagcacacatatgaagcacaatcaaagcatacatagaagcataaagctcaagaattcagccagactggaaggcgaagtccgttcactcctgaaaggatatcagccagcaaagtggctgtgtatagcacatgcttgtaacagaggaggttatggg

SEQ ID NO: 650688 - DNA, 605 bp, Homo sapiens
  misc_feature (401)..(401): n is a, c, g, or t
  misc_feature (493)..(493): n is a, c, g, or t
  misc_feature (495)..(495): n is a, c, g, or t
gattacaggcatgagccaccgtgcctggccagaaaattgtaaacacacacaaactctcaagtggactaattccctctcaccaaaccaatcacaatacagataaagagaataacttgtgttcatttttgtacaaacaaaaaagatataaattgtgaatgatgcatgatttttaattacaagtaaactgggcaaatgcttctgcattatttaaagctaaaaggtgatcagtggaaactttcctctgttagtactctaatactttttatatttatcggctcactacaacctgtgcctaccaggttcaagcgattctcctgtctcagccacctgagtagccgagaccacaggcacgcactaccatgtccggctaattttgtatttttaatagagacagggtttcnccgtgttggccatgctggtcttgaactcctgacctcaaccgatccgcctgccttggcctcccaaagttctgggattacaagcgtgagccacngngcccagcctaaaacttaaatgtttttgacggtgtggaatcccaatgttgtttttctaggtggctacccagttgacctaactcatttattgatcacacggattttcctcta

SEQ ID NO: 650689 - DNA, 347 bp, Homo sapiens
gaaaaggaaaagccaagcctctgtaaatcatcactcagcctcctgattggtcccaggccaagctgaatagcccttaggaataaccttcaactcctgattggtcccgggccaagctgaatagcccttatgaatcatcacttcggttcctgattggtcccgggccaaggtcccagaccaagctgaatcacgctttctccaagacagcccgcaggctaagtgcattccttccccttcccagtccataaaaaccccggaccccagcctcatactgggcaacttatttggatccccatctccactgtggagagcttttttctttcacttattaaacttttactccaatttca

SEQ ID NO: 650690 - DNA, 214 bp, Homo sapiens
ggccttgaagatgtattaaccactgaaaaaatcattcataaattaacatacacaaatgtacaaacacatgagttaataatgtaatgacaaaggactatttttgtgaaaagtgatttttaaaacatatttagatttcagtgcaaaaaagtaccactggcacttattaaaacgtaagagcaagctcaaaaacacgtagtgatggcaataagctagc

SEQ ID NO: 650691 - DNA, 169 bp, Homo sapiens
ggggtgagccatctgcgaggtgatgcttcaggagagctcatctccatgttgggtggaaggctggtagtgaccatatggcccgtgagccaatccagactaaattctatggttctgccaaatttgcactagtataattactggttaaaaacaaaaagttagggccgggtgt

SEQ ID NO: 650692 - DNA, 328 bp, Homo sapiens
tcatgccgtgactataggtaccgattggacttctccagctcatgaacgttcttgcccacgtaatccttggagcggaccagttcttccatttcgactatgagcattttgttggaccgctcgagctcctctttggcttccaaggcctcttcaagggcccgagccaggcacagggccttggtttccttctccctggcttctgcctcagctctgtccctctcatccgcgtatttggaagagatgtttttctcctcggctaacaactgatcaaatttcctctgcttcttttccaggttggacacgagttgccggaagaagggaatcctctaga

SEQ ID NO: 650693 - DNA, 92 bp, Homo sapiens
tctgaggacggggctgattattactgcagctcatatacaaccaccaatagtctcgtcttcggcggagcgaccaaggtgaccggcctaggtca

SEQ ID NO: 650694 - DNA, 969 bp, Homo sapiens
gttctttcgccttcctgccttgggcatgacgtccgaccgggtgcgtccgagcccgttctgtcccccgtctgtcgggccttcccggccctgtacccggccagggagcccccgtttttttccccccccgtgacccctatggcttgtgctctctccccttgattctctgtgccgccgtgttcatcaaggcttttcaaggacatttatctcgcccgggcccggcgcccccctccccacagatggttttccgggatcccttttcggttttaaaaacgcggcggagctgtttccttcccccgcagggcattcacacggcccaatttgtgtttttccgggcatgaaaggccccgcttctgaacattggccgaagtggcctccccctttgggcaccctagcctgagggtacccatctgtgttgcgtccctggaggagaatcccttggtgtccctttgcctaatcgtgtgccccggcatcaggggatttatccccctcgttttcttctccccccacccctgtggactcccaggaggaccccctgttgtaggctttccccttctcgggctctccagggaaggttatcttttctctcgcccaccagagcctgtttgtgttgttttgtgttctgggaggtgtgccgggatatgggccaaacacccatctttgtaaggcgtttcccccggcgttcccaccacaatattaggcccagagggactttctgtgcccccgagtaacgggggtgtggccccttgatccctgtggagctactcccttttgtgaggtggcccacccacccagccacgatcctcggccagccctccccccattccccgaagatatccccctctggcccccaaatgggtttcctttcttcccccccggctgggcagtttccgggggacccagaactttgccgggagaaaaaagaaacttaatgctgggggcccccaataaaagatttttgtttattcccca

SEQ ID NO: 650695 - DNA, 688 bp, Homo sapiens
taaacagttttcaaaagttcttaaaggcaaaagtgaattctctggggatttaacgggtcccagctttaaggtctcttataaaacactaacaggactacataaaggcttttccagcataaactgtgtcgtctccgtgccagatggtggcaagatcaccattagcaaatgtggaaatttacttttgaaagccattagacttacaggtgatgcaagcattctaagagagaggttaatcacactaatagaggcactaaggtggtactcagtttctcaatttttctaatgtgttataacacgtggtgttttataccagcgtgttgcgcaagctaaatggggcgtgttacgcttgtgagcagtggcttacacagggtggtttggcggcgagcgcgcactttcgtgcgctaagtggctcttcggcctgctaacaaaattggtttcccaactcctccgtttgaatatgtgttcgctggaacaaacgctatgcggtgcgctgggtacacaatgttccacaccaaatcccgtgtggggtctgggcgtcatgttctctggcctatcgttataactatctccccactctgaaagccagtgtttacgcctgttcggaaccggtggcgtcattggaaaacacgcccttcgttattgcccttgtgtaccaattccttttgagggtggccttcttccttttccc

SEQ ID NO: 650696 - DNA, 263 bp, Homo sapiens
tctagtcaagtgcttcacatagtactttatatgtcctcgtgtaaaaacaaaaggaactacaaagtaatcgtgaaatctactgtgaaaggaaaataaaaacgcaggacttcaagttcactatgcaaagaggtagaaaagtaagctgaaagctgagtccctgaaagctgagtcccttggttcctaagcagggagctacaaataaaaggtcaaacacctctacaggctactttatgttccattttatcttatgtaaagtgccgact

SEQ ID NO: 650697 - DNA, 1402 bp, Homo sapiens
  misc_feature (416)..(416): n is a, c, g, or t
  misc_feature (866)..(866): n is a, c, g, or t
gcgtgtagtaagactaggcctatgagtctcgatctccaatgcatatgggcctaaagtaacgtagataggctaaaggcctacagcggaatggctgagaaactcaatgcagtgccgaactacctctgagtagttagctgacacactcgaatcatgtaactctctctgatacaaagaacccatccatatagtgtgttgcaattgcgagaccatcagagcgccaaccatagagcactgaagtttcatagagacggatcgatgcgccgtgctgagctcaatgatttgtgtgaaccgcagaacattccactctgagctaagcgcgtcatagtgagaactagttatccacccatatactcttgtacgctggccgtacccggcccttgaagacagaactcgctcgctcgtaccctcagatgagntaacacctgagcgcatagaaccatcgcttcatccgcgcattcaagggaaactcaaatgggtcagagtcccaaaaggggcccaatatataactccacacgctgcaaagccacctaaatcaataggagaaccacaataacacctcttagcacctccgtgcgtcagtcacctttaattatgcatcttcgcaataaactcacacggtacattcggcatagtaaatatcctcactgagaacgaactactacaaagcaatggacgcccagcgaggtccgaaagcgtcagcacatccacatcaactgtggttgtaacctatactcccatatgtcttactcccggggatagaacaccgaaacgaaggttattaaagtccacacacgaacaacattcctgtgggcgagtcactatcgaatccgcacatactcagggagctggatacgcggtggaacgantaaccgaaggacgcccaaagggaaaaatcggggcgcgttcgttacattggggacataggggccaactcgtaggtatcaatttgtgcccccgttaaataattcgataacacaagctctcgcgtaaacgttcaggtggacctttcccgcgttttggccaccctataaaacttacacaattgcaggcagaacaattgcatatgtctcactcactcatccattggagatccattacccacattaagggaggcaaggtccaagcggtagaaatccaaccatgtacttgtacgcataagagtccaaaaacgttcgttctcgacttaggagatccgcaagactgtgcaacgcgctaatatcgatagaaacgcattcgccgttgtatagtaccctaagaaaaagagaaggtactaaacagttaagttggacaccataaggccgttatataaacgatcacacacaattagaggacattaacagaacaatcacggctaaaacaagagacttaaccgcagatcgcgtagtattacatgaggtgacag

SEQ ID NO: 650698 - DNA, 1177 bp, Homo sapiens
cacgcgtcgcggcagctgcagcgggtcgcacggctccggcccatctcgtgggggctgggcggggggaggcgaggtgcgcgagccgagtccggggcacgatgtccgacgcgggcggcggaaagaagccgactgtgtgaccctgcagtgcaggaccctggtccggtggcctggtggctgctgacaggcatggggaaaggggccgtgtcgggggtccttcccccatggtcctgacagaacgctgatggagaaccccccgtgcgaggctgcgcctcgataaggaaaagtgggaacggaaaacgcttggaggatggactgaggcctgaaggccgcacagcacccatggctgtctcagcgctccctcagatgccacgccatcttgggacaagaccatcccactatgatggcgacatcgtttccacctgagatgtaccatgtgaccctgggaatgaaggtttcacttacttgggaagaaatgtgaatacccgcgggcaagaggcaaagaacaaatttggacacacaaggcttgcgttgcgtggattgtaagggaagaagctagaacaaggaaagggaggaccgttgaccaaagcagtccctattacagaagagagcgaattcccgcgcaacgcaaggtaccatcacatacccaaggtttgggcagattcgtttatacaagagaacggtctgtggaaaaacctggttgatccagacggcacaggagacagatcgtacacccttgggcacgcaccggggcacaacgggagccgaacgttccacccaaggagaccacaaaaataggaaagcacgcaaaaaagtaagaggcatggagcacacggaaggggagataggatgaaaacaaagcagagctaacagcgaggaacaccaacggagaccagaaacaaatgggggaatcacatcctatccaaagatagaatcgagcacaagggcgcggttaggttaagaggattcattatataaagacgcaacggtttgtgtggaatgtgcacagcgaacatgtatactggagtggaaggatgaagtggaaccatgttacaagggcacgagaaagagacacatagttgaatattaaagacaaaacgggtgctagaaagcaaaggagtactaaatgatcgacgcgcgcaagggaaacaaaaggatgggtgaattagacaagtggata

SEQ ID NO: 650699 - DNA, 233 bp, Homo sapiens
gggcccccccccccggggtttgggaatttttatgcctggataaaaggccgataatttatttcccaagggggttggttttagtaaaaggccggtaaaatgttaatggggcccatttttcccgcccttataaatatttttttcccctggtagggagcctttgttttggattttttgtttaaaggccccaaaaatgccactttttaaccccaataaaaaagaaattttttttggga

SEQ ID NO: 650700 - DNA, 410 bp, Homo sapiens
  misc_feature (7)..(7): n is a, c, g, or t
  misc_feature (26)..(26): n is a, c, g, or t
  misc_feature (119)..(119): n is a, c, g, or t
  misc_feature (163)..(163): n is a, c, g, or t
  misc_feature (166)..(166): n is a, c, g, or t
  misc_feature (355)..(355): n is a, c, g, or t
ccctgtnatgttttacccattttganggaactgtttagattccttttcccaaaagcaccctgcaccctttttatccttccccaacagcagccatagatgtttcccaatttcctgcatancctagcccaatacttattattgtctaccccaggcccaggtgtgngtnttacgcctgtaatcccagcactttgggaggccgaggtgggcagattgcttgagcccaggagtttgagaccagcctggctaacatggtgaaaccccatccctactaaagatacaaaaatgaggcgggtgtggtggtctgtgtctgtaaccccagctcctcagaggggctgaggcatcaggattgcttganccagggaggcggaggttgcagtgagccgagatggcgcactgcactccagcctggg

SEQ ID NO: 650701 - DNA, 128 bp, Homo sapiens
tggtgactctgaggatccttgtagcagcgcagcccatcaatacggtcgatcaaggccgaaccactgcactggtaggcgatgtgcgttccggcgtatggtgttgggcaaaatgtcgggtcgcggcttag

SEQ ID NO: 650702 - DNA, 458 bp, Homo sapiens
  misc_feature (375)..(375): n is a, c, g, or t
tgccaaagcgtagtacccaagagcgagggagggctgccagcacactcacctctcgccatctactcaggaggctgaggcaggagaatcacttgaacctgggaggcggaggttgcagtgaactgagatcgcaccactgcattccagcctgggcgacaaaatgagactgtctcaaaaaaaaaaagggagagtctagtgctaagtgtggggttcctacaagttggggggtaagggtaaagttgaaatcttacgttggacgagtgctgtagatgggttcctatatggtggtgatggtgattgcatgatggtgtgctggtgtctaagtatgtgaaggagtatgtgtgcctgaaaactttggtgagcaagtgcctgcatggnggggggggtgtgtgtactcggggtgggggtataagagagacagatcaggtggaagtgttggggtactacgctttggcagggta

SEQ ID NO: 650703 - DNA, 193 bp, Homo sapiens
cttacgggcacacagataggggcggggcaggctatgaccccaggccagacaaagccccacgctgtcattcacagccatagctatccctcgaacaaaacagaaagtacgaaacaaaggctgccttttaaattgctatcagatatacggatatcccgtctgatgtcagcaaggcccctgacgcccggctgtatca

SEQ ID NO: 650704 - DNA, 940 bp, Homo sapiens
gctaggactctgtggggtggagtggtgtggctgcatcagctcaggttccttgagaacgtgtccacaaaactggaattccatggtggccctgttgaggagccccgtccctgaggaatgacagagacctcttcagggagcagcaaattccagaaaagcagggaaatgttaagtggtggagccaagattgtacgcgggtcacctggttcctgagcctcttctctcaactgctgtactgctcagcctctgatgacagacagaaagaacatgaggcctcagggagttctgaaggtatcctaacatcttaacagtctccttgctggaaagaaatcttcagtggctcccattacctacggatccagcctggctttttagtccagcattcaagacctgtcaagctcttctgcatcctctcgtatgcatgtgatagacaggcactccacctagcgaagtacaacatcccaaacttattcctattacttttcttccattcattcgttcatacaatcaatcagtcatcattgaggatttattagacgataggttctggagacaaaaaggtagataaatacgacgcagtcttgccttgaggactgtatcccagataacatctgactggttgttcctgctgaaacattttccactccatgctttgatacatacttctcacctggagacctctctgcttctgacatgctttattactgtcccagtgcgtgagctcttctgaaggctttcgagttcgccttaccaccatgtggactggtggagctcaaattccacggactttggctctttgacgacctctttggagaagggggtccgtgggtcccctaacgttggggtccgatgggtacggtctcgaccgacgacgtgtccaaagcacggagagccttttttccgtgtccagagttgtttttttaacacaaaatctgttatttgt

SEQ ID NO: 650705 - DNA, 444 bp, Homo sapiens
gtggaggtgatggtccccaggccatattccccccagccccttcccctgtgggccacctcccgctgccccctgctgggtctcttcttcctttctgggtggcataacaggaagctatctcaggcttactgcctcctggtgtccacttgactcccagaaagtcacactgccctgacctgtagactggaggacattgctgtggtcacctctccccacccaggcacctcttgctagctgcctttctctagtccaggcaggcagcatgaagatcaagcatcacctgccttgggctgggggtggctggaggacaggagtgaacccggaacctgggaaggagatttccctctttttctctccctgctcatggacctcaagtcttctgttggaggtgggatgacatatggagagagtggaacattttgcaacactttttaataagccctgaaa

SEQ ID NO: 650706 - DNA, 286 bp, Homo sapiens
caggaacagcgctcatcttcattacgacgtcgctggacattgcctgaaacttgcaaactcaccctgatatcatcagggaagggtctgttatgctgcagggtgatgtacacacagtaaaaggggggctgaagttgaaccccaacttcctggaggacttcgagaaggagcctcttggcccagctcttgcccatgagctccgctaccctgggggcgattgtagctctgacatctggatttgaactccactctcatcacccacactctatattgtgggccctcacttctt

SEQ ID NO: 650707 - DNA, 476 bp, Homo sapiens
tgcattacctatggattgtgaaacgtgtcagaatctaggatgtgcactcgtgaaaatcagactttgaggcatgtctagagaccatgcagatggatagaattgttgggcagacgttagttactgcatgccttgctttcgactgtggttctaacaacggttggaccctaaggataaacttcaggatttgggaatggaaaccctccttttccctttgccctggacatcccaggtttcagggtatgttttttggggcccttttggtaaccccttggaacatttcccaagggaaaattgggggaaactagggaaaatttgtgttgaggtatttggcccccttttacggggccgaatttttcccaaacacagtcggggggaattcccgggggtgcctttgccccaggacacagggggatctttttgttgacacgggccaggcctgaggatcattgggctctgacatgacgatttgtgctggc

SEQ ID NO: 650708 - DNA, 472 bp, Homo sapiens
gacgacatagactccatccttgttcagtgtggggacagcatccgcccagacccagaagtccttggggccgccagccagctgaaagacatcttgaggcccctgagaacgtgtgactccagatttgcctatcgttacccagattgcaaatataacgataagttctgaagggctggtgtctagctggccttggggacaacacgcttggctctccattctcccagtcgggttgctgcaaggtagaaagaagcagctcttttttaaagatgagaagaaaggcacactcatttcttagggactgagaggggagttgtgagataccacgtggctgtctctgctggctgggacgtcctggcaaagcccgcggtgggcatcagaagacctgggtgtggacgctcactcaatgtctttgagcctcagtttcctctgttctccaccagactctcctgagggtgaaagaagacaccagatggag

SEQ ID NO: 650709 - DNA, 149 bp, Homo sapiens
  misc_feature (3)..(3): n is a, c, g, or t
cgnagtgcatggctggaattggcaccctccttccctttgtcactagttctctctggcagcgacgcagcctttaccagtgcactggtggcgtgctgcaatggacttgtgcgcttctagtatctgctcctccaagttccaggactcatctg

SEQ ID NO: 650710 - DNA, 839 bp, Homo sapiens
gctaaaagcccaactgggaaaggaaaagactcatatcaacatagtcgtcataggacacgtagattctgggcaagtccaccactactggccatctgatctataaatgcggaggcatcgcacaaaagcaaccattgaaaacatttgagaaggcggctgctgagcatgggacaatgggctccttcaagtatgcctgggatcttggataaactgacaagctgagcgtgaacgtggtatcaccattgatatctccttgtggaaataagagacacagcaagtactatgctgactatcatcgaagccccaggcacacaagagcactttatcaaaaacatgataacagggaaccatctcaagggctgactgtgctcgctcctgatagtagacagctggaatgtcgagtgaacttagaagactggatatctccaaagaaatgcgagcaagacacccagagcacgcatggacatctctgtgcaatacaaaaaatgagatgagaaaacaaactaatctgtacgaagattaacaaaaaagaactaccaaccggaaacacacacctacaagcacgacagaacactacgaggaaaaaggaaaacgggcaagaaagcaacacacatcacagcccaacaaggaatagaaagcaccgaaacagaccaaacaaaaacggaaaccccacacagtccactagatcaggaaaaaaggaagacaaacacaaggactagcgccgaccacaaaagcacaaccaccagcactagaggagccaaagcgagaaaagaccacacgaacacacacagcagacaggaaacagcaaaacagacccaccggagacaggacggacagccagg

SEQ ID NO: 650711 - DNA, 855 bp, Homo sapiens
tactataggaacaagacacgaaccaggtataccagtatctctaacggtctatgtatccccagaccataccccttcatgtggtgtcacccaatttgcccaactaaacttggtgtgttctctatcaagcaggtctttagtcccacgcaaaaatgggtgcactacaaccaacaaatcccgggcaatttgcgccaccacttcaccaaactccctgtggttcgttacaaccgtgtgtgtgaaaatatctcttgtgccccgccataaatatacatgttggtgcccccacacgtgtacaataagggcagctgaagttcctcgtgcccaacaatgcgatttcgcgttcatgtttcttccccaacagaaaccctcggggggaagtaaccccggagagatcgcaacccccaaggggggaaaaacacccttaccgtatcagtcgcacctccatgaggaagtctctttgtaatgtgtgtagaacacacacacagggtcgagtgcaacgaaacttagagccccttgcaattctcgcactccaccagatcatccttttgtctgacattcactaaacaaacaattggtgaggagacattaccgcaaaatttgacactagcccaaattttccctttccaatcatagaaatatatataaatccctcgacgttttcagtactgttcatgtacggaggatgtaacccaccactatgattagattacttgggggtaatcttatctcttccttgagtaagacaaaacggtccttccatacagatcaatcaacgcccgtcccccctctttattttaatataccgcggccccccttctaacaaaaaactcccaaggattttctttctcccacaaaaca

SEQ ID NO: 650712 - DNA, 82 bp, Homo sapiens
ctttgctctttggagataccgaagaccacgtgtatgccctggaactgcaattctttcttcccaaataaaacactacatttag

SEQ ID NO: 650713 - DNA, 191 bp, Homo sapiens
caagtcaaattcttagtgagccacgctccagtgctatgggtcgcagcgtgtcggagtggtagcctggtgaggaagcagctactccatggcagtgtcttgggttgaggcggttagttccagcagcggagagcactgggggtgcctcagctctgttggaggcggagttccaccatcaagtacaccacgacctc

SEQ ID NO: 650714 - DNA, 346 bp, Homo sapiens
  misc_feature (32)..(32): n is a, c, g, or t
  misc_feature (94)..(94): n is a, c, g, or t
  misc_feature (224)..(224): n is a, c, g, or t
  misc_feature (271)..(271): n is a, c, g, or t
  misc_feature (280)..(280): n is a, c, g, or t
  misc_feature (303)..(303): n is a, c, g, or t
  misc_feature (307)..(307): n is a, c, g, or t
atgcttaatgcacctgggatatcgactatccngggcgtggttgcggtgatctgaccggaaaacctgcgccgtatgtggggccacaggatgtggngctggctatcattggcgcggtgttcaaaaacggttacgtcaaaaacaaagtcatggtgttcgttggaccgggcgttaggcgctctctaccgatttccgtaacagcgttgacgtgatgaccactgaaacgncctgtttaagttctgtctggcaaaccgatgaagaagtccataactgncttgcgctncacggtcgcggccaggattactnccancttaaccctcaaccgaatggcgtactacgatgtctgcat

SEQ ID NO: 650715 - DNA, 548 bp, Homo sapiens
gcagcacttccccgcgagcggacgcggcagcgcctctgtctcgctttttcttatttttcccccctttcccctttcttttaattaccattaatctttttctcccgtacaccctataaaaaaaagaccaacggaggagattaaaccccgagacaaaggagaaaaaccgacgcggacaaaaccaacgaagaacacaaacagagccaacacaagaaagaacgagacaaaaagacaaacaaacacgacacaggaacaaagaacccaacacaagaacaaaaacaaagaagaagagacaggacaagccacaaagactacacgagacgacacacagcgccagacaaaccgaagcggcagaactcgaaaaagcgcaccaagacaacaaaaagcgaagataagccaaagcaaaccgacaaccacaaaacgacaaacagaacacacaagccgagacacacaaagggagcgagcacacaacccataaagaaagggcacgagccaggagcagagaagaagaacagcaagagcagagagagaaagaacagccaccagaaacg

SEQ ID NO: 650716 - DNA, 279 bp, Homo sapiens
cattcagtcattgttgtgctggttgtatattgagatcctatctgtagtatacctggtgccctagaccgccgaccctcgcttgacaccagtcacaactctgactctctagaacttctgaccaaccagcttcaagttggggtttccacaatcccccctttgggtttgattaatttgctagaatggctcacaaaactcaaggaaacatgtacttccatttactgatttgttataaaggatattacacgacgctatagataaagacatatactgaggaaggag

SEQ ID NO: 650717 - DNA, 249 bp, Homo sapiens
gcgcgctaccatgtgtggctaattttttgtgtttttagtagacatggggtttcaccaatgttggccaggctggtcctgaactcctgacctaaagtaattcacctgactcagcctcccaaagtgctaggattacaagcatgagccactgtgcccggtcacattttaaacatttttttgtagggatgaggtctcactctatttgcccagtctgatctcaaactccaggactccagctatctttccagctta

SEQ ID NO: 650718 - DNA, 109 bp, Homo sapiens
aagaagatttttgctgtctctggcctcatttctgatcgggaagcctcatctagcccagaggatcggaatgacagatgtgattcctgagggaggtgttgtgctctatgga

SEQ ID NO: 650719 - DNA, 498 bp, Homo sapiens
actggttacgagggtatcagacgcttctccactgtgatccgggattggggttaaaggttaacatccggtccagcaggtcaagggctatggagtctgacttggggaagaagcttggaccaagccaccttggacttggagggcagagactgttggtagtttcgggccttcatgttgatgatacaattcaggtcctcctgggatggggagcccaggatgcccagaatgtggtagagctgatccaggtagtgcttgccagggacagatgggccggttagagagcatctcagccagaatgcagcccacagaccagatgtcgatggacttggtatagcccttggagttcagcatgatctctggggcccggtaccagcgcgtagccacatactccgtcaggaagccggtgtggtcatgctcaggatcggcaatccgggccaggctgaaatcacaaatcttaaggtcgcaggtggtgttgatgagcaggttggaggggtttagatc

SEQ ID NO: 650720 - DNA, 162 bp, Homo sapiens
caaaatcagtcgaggttgaggctgcatgggaacaggtgaggccatgaccgctgagctttcccccacttgctggcacactgtatggttcagcagaagcagtcataatccccctgggaatataactccatcggaccagacaccacacccccaaccccgagctgg

SEQ ID NO: 650721 - DNA, 333 bp, Homo sapiens
ttgtgggtagctccccacgacacattctacacagctggttcagtagaggaagaccaaggcagaatggctcagtccttggagctcaagatcatgcagtgactgtgctaccatccgccatcctagaggctccccggtgcaggttctgggcttatgctggggccaggctttgtctttctctccagacttggttgtgtgcctacccgctcagggtgggagcttgtagagtgggcccagccagcaggcatggtcgttccaaggagggagaagcaggatgtgtgccccaggccttgctttctccacatccctggagaacaccctaaccacaatcaactg

SEQ ID NO: 650722 - DNA, 553 bp, Homo sapiens
cacgaggggtgtcagccacagtggaccggggctggttcttcctcagacccacctaaccgtcagaaccttggtactcgcggttgactcgaccgaccttctctcctttgttatgtcctggcttccctcctcggtttaggcctctatcaagtgtcacctcctcagagaaccttcccggaccaccctaaggtgggatttcccatccggatactcttatcggcttctctgatttgataatcaggctttctggtacttgacattattataatatgaattaatgtggcgttgggatatggtcgtgtcttccactgcaatgtaaactacttgaagcccgaggtggatttgtaatattgacggtagtgtcctccatgcctggaatggtacctggtacatggtgggcacttaatacggttgaatgcacgtagacatactgtatgactgacatttggatttctccagaggagggtctgttgtgtagtccaacacggagtgcatctgtggggtaacacgctgggctaactgccccagcagcccctgggacacccctcgtgcgggt

SEQ ID NO: 650723 - DNA, 357 bp, Homo sapiens
actgcggcccaagctactcgctacctcttcccaacaactcccttcgtggggacaaaagtgacaattgtaggcccaggacatcatgtgtcacgacctgtaatcccagcactttgggaggccaaggcgggtggattacctccatctgtttagtagaaatgggcaaaaccccatctctactaaaaatacaagaattagctgggcgtggtggcgtgtgcctgtaatcccagctatttgggaggctgaggcaggagaatcgcttgagcccgggaagcagaggttgcagtgaactgagatagtgatagtgccactgcaattcagcctgggtgacatagagagactccatctcaaaaaaaaaaa

SEQ ID NO: 650724 - DNA, 1246 bp, Homo sapiens
  misc_feature (282)..(282): n is a, c, g, or t
  misc_feature (302)..(302): n is a, c, g, or t
gacccgccaacatgggccgcgtgcggaaccaaaagcgtgaagaaggcggcccggggttcatcatagaaaagtactacacgcgcctggggcaacgacttccagacgaacaagcgcgtgtgcgatggtagcatcggcattatcccgcagcaagaaaagctcggcaacaagatagcaggggtgatgtcacgcatctggatgaagcgaattcgagagaggcccagttcagaggtatctctcatcaagctgctgggaggcaggacgagcagaaagggatgaggacanattagtgatctccgtgaggntctcagtaccattggtatcatggagtactgatcgaacgtatatgatcctgcagcaatagaaggataagatgtctgaagactgtctgggagctctacggtcaagttcctggtcacaatcgcgttcagggtcaacatcagcgcatagagtaggagactgacattcttgaaaatggctcgggcgacctggttttgaactgttgtttctgttagtagcgtagtaattaattattgcaaatgaatagtctgggtgacgatagaagataaaaacaccaggaaagacaattgatcaggggggggcactacttgagtgcccgggggagcgacagaaaagaccaagaaaagcgaagggccacatttttgggggcacttctggtgcacttggtacccttgggtgttttccttggaaccgcaagtgtgactctcggcaatcctactgggggagcattacctcttggggaggagttcaaaccctaactaagaataggacgggaatgttggaaattgtgtttaaataaaaagcccagggagtgtggagtcggaggccgatcttgatgaagaaggggcgggcaaaaaaaagggggcgttggaggttgtaggcccccgggaagagggcttgggggggttgggggccgaaagtaattcctacttttcggaaaagggcgtcgcatacttcttttaaaagggcacgggaactttaaggaaagcctttttcgttgaatgaccccaaggcggaatgtttctttgaaaagggggcgccccttttgggtaaaaggtaaattaggggggtttccatgggccataaaagagcatattaccctttccaaggcaaaatagggggaaagtttttctttaaaatatattcttaaacaaaggcctttgggacccaaactgtgggaacattaacagagtattatggattgcaaaaaaaagaataataagtaact

SEQ ID NO: 650725 - DNA, 283 bp, Homo sapiens
cgtaggctgggtgcggcggtcatgcctacttgggaggctgaggtgggtgaatcacgaggtcaggagtttgagaccagcctgtgccaacatggcgaaactcctgtctctactaaaaatacaaaaaattagctgggcatagtggtgggtgcctgtaatcccagctacttgggaggctgaggcgggagaatcgcttgaacccgggaggcaaaggttgcagtgagctgagatcgcgccattgggagtctgagagagaaagagagagagagagagacaaagggaaaca

SEQ ID NO: 650726 - DNA, 447 bp, Homo sapiens
gtactgataagggtgttcactatgtagtccaagctggtctcgaactcctggactgaagggatctcctgccttagactgataaagtgttgagattataggcatgggccactgtgcctggctcaatgtagctttttttttttggggaaataaattctcgtcaggtggcccaggtggtattgcatgggcacaatgtgggctcactaaaatttccacctcgcgggtttcaaccaacccttcctgcctcagcggcccaattagttggggaccacgggctcttgcgacaaggcggggctatttttggctttttatatgggagagggggtttacaccatgtgggccaggcgtgtctcaaactctgtgaccccaggtattctgaccacctcggcgtcccaaagtgctaggataatgggtgtgagacactgcacctttatgcttaaaaaatttggg

SEQ ID NO: 650727 - DNA, 226 bp, Homo sapiens
tcttgagttgagagtcgtcgagaaaagagtagagatcgaatccatgctctcagttcagcagcaagtgcgtttgcagctgtcagctacttgtctcatacatgacgtcgctgcagacacttcggtgcagttcactttgggtccatcagatcgagagagcttgtcagttgaggaaactgtcgctgaaagcaggagaagagacacgtcgactctgagggtaccgagctcg

SEQ ID NO: 650728 - DNA, 150 bp, Homo sapiens
tgtcctggttgtgttgacttcaaattatgtgtcgtttggaaagtcactgtcagatgttagtaatataattgtagggacgattagttttagcattggagtaggtttaggttatgtacgttgtctagagccatatgccaatgttgcgtgtga

SEQ ID NO: 650729 - DNA, 282 bp, Homo sapiens
acccgtattgagcagtattgtgataggccaaggcgggagggtaacgagaatgcatctctacaaaaataaaaataaaaaagttagctggacgtggtggtgcatgcctgtggtcccagctactcgggaggctgaggcaggaggcttgcttaagcccaagagattgaggctgcagtaacctgggattgtgccacttaactccagcctgggcaacacagtgagatcctgtctctcaaaaaaaataataataataacaataacatacacacaagcacaatcctggct

SEQ ID NO: 650730 - DNA, 132 bp, Homo sapiens
ctccctgcttagatacactgacctggcagcgggatggggaggccagacccatgtgacacggtgctcgtggagaccagtgcctgcagggatggaaccttccagaatgtgggcggctgtggtggtgccttctgg

SEQ ID NO: 650731 - DNA, 438 bp, Homo sapiens
cacatgatggttgatccatgtttactgtccacacgaagggctattgaatcattcttattgcttccacgattcctctccagcaactgttgtttcctgactttttattgatcgccatgctaactggtgtgagatggtatctcattgtggttatgattagcatttctctgatggccagtgatggtgagcattttttcatgtgtctttgggctgtataaatgtcttcttttgagaagtgtctgttcatatccttcgcctacttgttgatggggttgtaagttatttccttgtaaatttgttcgcagttcattgtagattctggatattagccctttgtcagatgaatagattgtgaaaattttctcccatcctgtaggttgcttgtacactctgactggtagtttcttttgctgtgcagaagctctttagtttaattagatc

SEQ ID NO: 650732 - DNA, 259 bp, Homo sapiens
  misc_feature (67)..(67): n is a, c, g, or t
  misc_feature (88)..(88): n is a, c, g, or t
  misc_feature (117)..(117): n is a, c, g, or t
  misc_feature (221)..(221): n is a, c, g, or t
  misc_feature (248)..(248): n is a, c, g, or t
attcgcccagatcaattggcaactacggccgcctgttggacacagttcctttggtttatgagttttntggccactgagggcaaaagtntcttttaaaattgcccctttaggccaggntctgctgacataattgctctagtcagtctcttgccttctgctatggtctttcttcccttctaccttttttttctggatagcccaatgtgtccgtctaccaacantggagcctttgggtgtcactgtttttnccctggttttt

SEQ ID NO: 650733 - DNA, 265 bp, Homo sapiens
tggaaagggggtttcccctcctgtgtgtgtggcccagcctctccacccccgggtgggggccagatatagagacctctccactctctctcagaaaaaacacaaacacaaaacacacacaactctctagcacacaaaaaaggagaattttgtgacacagaaatgtgtgtaagagggggttctcattatcaacacacaaggtgtgtgagagagacatgtgggtgtgtgtgtgtgtcgccgtgggggtgtatgcaccttttttatacct

SEQ ID NO: 650734 - DNA, 175 bp, Homo sapiens
gatctgatatgtagtgtataatgacttgttggttgattgtagatttgtgctagttaattgtcagttcagatgttttaatctgacgcatgcttattcggaggacaatgttttcatgttacttatattaactcttgttcttctagtaggttgactagattgctccctgttggggctt

SEQ ID NO: 650735 - DNA, 517 bp, Homo sapiens
cagctatacgcgattgatacctggataactgcaagatcgtcaagatctggacgactgtagaataaagattgcctgtgaggctcacttatgtctgtgaagatgggaaaacaatagaagaacattgttctactacaaggattataggtcatcaatgcattatcatttgagatatggttacactccttacgtgagcaacgatctacacacttaattaaaagatgagagaagagtatgacaaaattcagattgctgacttgatggaagaaaagttccgaggtgatgctggttagggcaaactaataaaaattttcgaagatataccaacgcttgaagacctggctgaaactcttaaaaaagaaaagttcaaagtaaaaggaccagccctatcaagaaagaggaagaaggaagtggatgctacttcacctgcaccctccacaagcagcactgtcaaaactgaaggagcagaggcaactcctggagctcagaaaagacaaaatcaacccaagaaaggctggac

SEQ ID NO: 650736 - DNA, 987 bp, Homo sapiens
gtgaactttagcgtgtcggccttgagtcctcactcttcgattccttgtaagaccctggtgcatgcttatcaagagggcccagtgattttgtaggatcccacatgtcctgtgacaatgggttcctgtcctatgatttcccacctcccaggatttcggactcaaggttcaaggcgaagtcacacgtcctccctgtattgacgaaatgagagtacgacacgatatgggcttgagagcaacagtctccgtagtgcgtccgtttcttaccaagagcctccagttcgcccatcgccctcggtctccctggtcagcgtcattggcgacatccattggagcgtaattacagggtctgggtctcgcctagggtgcttgacgagtcacggccttggacctacccgtagccccatccgccctgtggccttcctagtctcttgaccttcagggggagcctcaggctcgttgaatcgacacgatctctattgtatcagccttagacaagcgcaggcgcatagacgccccttggaagggtgccctggctcaaaggccctcagtgcccaggcgcacacgttggcaagggcccacgtgtttgacagggttcgtttgagtgtgtccagtcaccgtgcaaacgctcttatggcatgggcggcgcagaaacggttccagcaggggcaacttttggacggtcgagaaatcgcgtagcttgacgccaactacttccgaatacctacataagcacctttttcctctcgccttcgcgcccgggtgcgcaatcgcttcaagcatcccatgaaaatttttcagctcaccaacgccagggacgaggaaaacgctcacggttggtattgaacagaagaatttttccgagaggatccccttggggattcggaaatgcccacagtaacaaaagacccggggtacaagacagggaaggcttaagttggccgtaaacagcccggaccaaagcgttgtttaaccaagcctggtgttggt

SEQ ID NO: 650737 - DNA, 642 bp, Homo sapiens
  misc_feature (26)..(26): n is a, c, g, or t
  misc_feature (61)..(61): n is a, c, g, or t
  misc_feature (63)..(63): n is a, c, g, or t
  misc_feature (85)..(85): n is a, c, g, or t
  misc_feature (87)..(87): n is a, c, g, or t
  misc_feature (111)..(111): n is a, c, g, or t
  misc_feature (146)..(146): n is a, c, g, or t
  misc_feature (163)..(163): n is a, c, g, or t
  misc_feature (177)..(177): n is a, c, g, or t
  misc_feature (179)..(179): n is a, c, g, or t
  misc_feature (192)..(192): n is a, c, g, or t
  misc_feature (196)..(196): n is a, c, g, or t
  misc_feature (198)..(199): n is a, c, g, or t
  misc_feature (201)..(202): n is a, c, g, or t
  misc_feature (285)..(285): n is a, c, g, or t
  misc_feature (452)..(452): n is a, c, g, or t
  misc_feature (463)..(463): n is a, c, g, or t
  misc_feature (465)..(465): n is a, c, g, or t
  misc_feature (478)..(478): n is a, c, g, or t
  misc_feature (480)..(480): n is a, c, g, or t
  misc_feature (484)..(484): n is a, c, g, or t
  misc_feature (489)..(489): n is a, c, g, or t
  misc_feature (641)..(641): n is a, c, g, or t
tgagcttgggacctcgacccgttcantttcagctacgaagaagccactgctgagtgtggtntnggggggggcccggaggcagttntnggcacccgggaacgtgctcaggcntcggtggggccgggcaggcagggcgggagctagcntgaaggcgcccgggttntgctgcagcgcatntngcaccacgttttntttntnntnntggcagagggagcacgtggggtagacgagccgctgcagggaagggaaagtgagcgcgtggcacagggttcgctgttggaaccntgccagggcatgcagacgcaccgggctaggtgtgcctgccccgggctcttccagctgtttgttcggcatatccgagccactgcaggaaggatccagcaggatgtagtggacctcatggtagcgtggatccgagggggagaccgccaggaagtcctcctcagccagtncacagcaaganangccagcccgggcnancagngtggncatggatgccagccgcttggcatccaggtcaaaggcaaagatcttcccttggttcttcagaagagcagccaagtgactggtcttattgcctggggcggcacaggcatcgatgacatgggagcctggcggggggtcagcagcatggctgggana

SEQ ID NO: 650738 - DNA, 682 bp, Homo sapiens
gctggaaacattaactaagaggggcgaagtccggacgatttaaaccctcctctccacgtatgggctcatagaactgggccctgccaggaaacgaacctgcaacagctgacaacatgaccaaaaacaccggcacaacaaagaagaaaaggcaccaaaagttttaaaacaagagtaaaaccggcgtttttttcggagggggggcgcccaaaaaaaccaccaacataaaaaaaaatataagaaataattaaataaacatcatacccccccaaccacgagttgtcaacccctcccctcccccccgccccccaacctcttttcatactgtgtaatatcctctatccttccctcacataaccaaatctctccccgcgacccgcccccgccccccgtccccccccccccacccgcccccccttcttccctctgcgcccccctctcctcccgccttcctttctcctgctctcactccccacccggcggcgaccgaattattcgctccttcttccctttcttttcgacctgttatttctactccacacacttcactgcttccttcgtacttctcttcctcccctctgctccccccctcccctccctctcccccccctccccctatccccccccttcttatttcctctatttttttcccctgccgtactgattccgtaacaaaataaaaaaa

SEQ ID NO: 650739 - DNA, 1484 bp, Homo sapiens
  misc_feature (935)..(935): n is a, c, g, or t
ggagagaactagtctcgagttttttgtgttttttttttgtggggaatgaaaaattaactttttttctttgggggggggcgggccgttgtccagccctcgaaaatttcgtggcagcggtgtttctggggtgccggacgtgctgggtgaccttgtgccgtgttgagacgcgcatggttttggctgcaagaggtcgcggaactcgccctctggtgatcgatgtcgccgatctggcctttccgcatgatagcgggggggacggggtgcttcggcacgttgttctcttgtggggcccgcctttctcgagagcgcggattgatcctcttggcgcgatttgtttgtgtgccgaaatgataggtcctgcgggcgcgattgccccggagtgggctcctctcgtgggatcttgtctcgactcttgtggtttccacctcccgcggctccatagatggggggcattctcctacgcgctctcgacagtgtgtggccgactctcttttccccgcgtttgaaacgaggggggccttctttatgtgtgtgtcggcgaggtggttggtgtgtgcccccctcgaaatattaaggcgcctaccctgtggggggggcgtgttgttttgttgtgaacgcgcgcctagacacgcggatgtgtcttccttctggtgtgatggtcccaccccggggtgggggagcactatctctctcactgtttggccgagtgtattgtctctccccccgagggaggagtgggcaccccctctctgtttctgtgtggtgtttgtggggaacagagacaagtgtgtctccgggcctgttgctttatgtggtcgcgtgaggtggcccacccgccttctacgaaggctccgcgtggaaatgtgttctcccggcgccaaggtgtgttgtgccacatgtcttgttggccaaggagtctccgcggtgggagaggncctcctccacagaagagggtgggctgtgttcgcagggcacggcacgaggaaatagccctcacggctggaaagcacgagggtcgagaggaggactcccccgcgaagcagcggcccctccccgggggacgagaagggggggcgcccacacaaaaagaagaagctcggcgagaagatgagaacactcccgcgcggggtggcgtcccaccatccaataaaaagtgagcgagaagagacgatccgccgaggaaaagccgtgggtggacaccccacagagccactggagaggtcacccccccagaggaggggcagcctcttcctccccacaagtgttgttgttccccgccgaggggaggaagagagaaacgcccccccgccaagggtctcgggtggtggaaccaaccaaccaccgagagagctccccctgtgtgaggtgtcttgtgggaccacaagactggtgtggttgacgaacacccccacattcgcgcggcgcgcggcgcggctggattatcccccctccggaaagtgtgtccaccaaaaccctctcccgtt

SEQ ID NO: 650740 - DNA, 253 bp, Homo sapiens
ctaaattgcacaatcttagtcagccttcgatttacttttcctatctactgaatcacagcaatgcccattgcgctatctctgaacgcgtaactcgcatcttagtgtcggtatttctccaaattacgcagctgtttggaattgaacgctcccctttcttttttgtctttataactgaactgcatcttcgtacttcattcacattcaatcaaagcaagtgctaccagcacaggtgcccttcccaatcctgcaacac

SEQ ID NO: 650741 - DNA, 750 bp, Homo sapiens
  misc_feature (482)..(482): n is a, c, g, or t
  misc_feature (535)..(535): n is a, c, g, or t
  misc_feature (538)..(538): n is a, c, g, or t
  misc_feature (557)..(557): n is a, c, g, or t
  misc_feature (570)..(570): n is a, c, g, or t
  misc_feature (582)..(582): n is a, c, g, or t
  misc_feature (587)..(587): n is a, c, g, or t
  misc_feature (590)..(590): n is a, c, g, or t
  misc_feature (595)..(595): n is a, c, g, or t
  misc_feature (610)..(610): n is a, c, g, or t
  misc_feature (637)..(637): n is a, c, g, or t
  misc_feature (646)..(647): n is a, c, g, or t
  misc_feature (651)..(651): n is a, c, g, or t
  misc_feature (666)..(666): n is a, c, g, or t
  misc_feature (670)..(670): n is a, c, g, or t
gctgactgtggatttagacgggagccgaagatcaaaagtctgatatgagagagagctgagctgagatgcgggacacctccaggctgctacaaaattcttccaagaagatagaaattccagagcagaatccaagtaaggctcgcacatgaacggttacgagaagttctcgcgcaggagactagcttgtccagatggaggagctgaaccgagctggcggtgtaaggatcgcatggtgatagatcggcagtcgctggcagcgcatctcccagagccagaaggagcacgtacaagaatagctgggcctgcaggcagtcagccaacaagtcagtacaaggtgcacctggacctctgggttaagagcctgtctccccaggaccgtgcagcatataaagagtacatctccaataaacgtaagagcatgaccaagctgcgaggcccaaaccccaaatccagccggactactctgcagtccaagtcggagnccgaggaggatgatgaagaggatgaggatgacgaggacgaggatgaagaagangangatgatgagaatggggacncctctgaagatgncggcgactcctntgagnccngcagngaggacgagagcgangatggggatgagaatgaagaggatgangaggacgannacgncgacgaggatgacgntgangatgaagataatgagtccgagggcagcagccccaggctcctcctcctcacggcgactcctcagactctgactccaactga

SEQ ID NO: 650742 - DNA, 416 bp, Homo sapiens
tcgtcacgctgtgactacatctgtagtctcagctactctggagtctgaggcaggaggatggctacagttcgtggaggttacggctgcatgaagctgtgatggtgccactgtcctccagtctgggtgacagcaggatccctgtttaagaaagatggtgtcagtaattacatcatcagtcacatcattctgtacaccatcagttcagtacaccatttgtcaccgtctgtctggtagctgttgtactaataaattataaccatacacaacactaaaggatgaacctgatctcttatactaatatccttcctcatgtatattgccacaactttcctcctcggactcctgtctcactcatatacatctagcagccaactatctataaacctagccatggccttccccttatgagcgggctc

SEQ ID NO: 650743 - DNA, 923 bp, Homo sapiens
taaacggtatatacgggttaaatccaggtcaaaggtagtttacaaggggaaaggacaagtaccttggtatagaatatacagacacagcatcacaccacagggcccagcgggagggttcggggagacagacacttttttcccgtgggaaaggcagctctaattcccaggaagtggttctcagcagaggcgtgggttggccaggagcacgtgtcctcatagcccccctaactcagcctcgtgctacagctcggttcccatttccggcctctaaccccccaaactccttataaagagccccatgagctaagaactaaggagaaggatctatgtccctattggggcgtgtgccccaatgtcggggcagaagaatatatcacaccactgacgcaccgagcacagtggcgaaagggaagggaccaccacaaggagaagaagcagaaggcgaggtaccccaagaagggggagtgggccgaagctcccaagccaacccgtgaaaggaggcgcagctaccagggggtcctacacaaaagacgaaagaaacatcgattacaacccaaacgggggcgagggcgcacagcgataaaaggggccagaggcaagatgtggctccgcagtgtacaataccacccaacaacacctagacaaacacacaataccaaccgggccccatacataataccacaagtaatgcctatcagccaaccgagaggcagataagagacaaatgcgacgggaacctagcacagcggaagaggaacacaaaattggaggagcgagagaaatcctaagcaaacgcgcggtggcccccacaacaaagctccgctcccccaggcgacaagtggggtaacaaaaaacaaaacgggggcagcaaaacaaaatcatctacaaacagacagcacggacgacaagacccccacaaagac

SEQ ID NO: 650744 - DNA, 110 bp, Homo sapiens
aggatgtcgatgcgagtgcatgacgccgtcgcgctcggcgctccgtctgccgcgcgggccgtacatgccgaccgcatgcacctcgtcgacataggtcatcgccttgtagc

SEQ ID NO: 650745 - DNA, 648 bp, Homo sapiens
ccagatcttaggatagtccgttgatagccaccttaggacacaggatggtgccattgatggggtggtgtatctaggtgtcccaggcactgggtagagcaacctggtccacgtggagtttcttccagggaagccctgttgaaccccggaggtggatgcccaggcaagggccccatgtggccagaaggcccaagtacacggcccagaatttgggggttggggaaaatggcttccccacctattgggagtgaacgaggcgaagacgggaagcccttgctgcctgccattcccagagcgcccacgccctttgtgctcaaccctggttccaactggtctcgcaaagtcacctgcctaccaatgtaccaaaggcgaaggttctgatggctgccttgctccttggtcccccagccccctgtgaggacttctctaggaagtccttcctgagctacctgtgccccgagtgcccctacactgagactgtatgccctgctatcagatgcccgatctatgtgtctgtctgtgtgtccactcccgccgaccccccacgagctaacctcccggcatggactgaatctggttctcctcttgtacacccctcaaccctatgcaccctggagtgggcatccataaaatgaactcgtcgactgacca

SEQ ID NO: 650746 - DNA, 81 bp, Homo sapiens
ctagaagattcagcaaagtacttttgtgctcttgggtgtccctgggggacattcgtaacctgggacacccgacagatgttt

SEQ ID NO: 650747 - DNA, 855 bp, Homo sapiens
ggcggagcactctgcgcccgcggatgacaccttcgctcgcagtttgttcgcagtttactcgaacaccagtttgccccaacgcgctttggattagtgtgatctcagctcaatggcaacggtgggatatcatggcatctatctggagttggacaccgaggaacagtaagagattatccagactttgagcccatcagtggatgctgaagctgttcagaaagctagtccgaggaattggaacctgatgacgaaaatgctcagtcagcattctgacttggagaggtcaaattgcaccagcggcaagtcgtgaatgcgttcaacggacattatcaacgcacgcgatagtggaaaacggacgctggaaacgatgaacttgacagcggttgatcgtctctggaccaactttgcagcagtctcatgcgtggacccatagttgactttccatccgagcaagtctcctgattgcataacgcaagcctatccgcaacatcccatgcaagcgggcgccggtgacaccaaccacgcacagattgcccttgattcggacccttcttacacctaacccagggaaccaacgcaagggccaccatgcagggcgcattactcgtcctccaaaggcctaattaagtacaccagtcatacgcaagcacgcagctctttgccgagcattgaccattcacgtgtcccggaaacacccattctcggcgttgcaacttttccctgcgacaacagcctccatgctgtggacgcttatgggcccacgcaccgcgcccaagaaagaacacattgaccaacgttcttggcacacggtgcgaattgcagccattcttgcggcccaaaaccacaagcatgccccag

SEQ ID NO: 650748 - DNA, 437 bp, Homo sapiens
  misc_feature (353)..(353): n is a, c, g, or t
  misc_feature (368)..(368): n is a, c, g, or t
  misc_feature (413)..(413): n is a, c, g, or t
acaggacagtttcccagcatgttcctttctcttaagatttggtagattctgcacatgtgcacacatgtgtacacacacacacacacacgcacaatctttcccccaagagtcacagctcagtgactgttaaagtgacgtacacagtgtagctgttaaattaaacttgttgggatgagttcctaggttggcagagtaaagactctgaggtgacctgcagggaagcacactactgaacttgcttaaaccagtgttttccagatttatctgaccacagaacttccttcttttcccatgaaattattggggaaataaaattattgggataatgggcaaacatagtttgagagacactntgaaagctgtttctngaacagctttcaaagtgactggctgaattattcctagcaaatccnactctccatctgctattttattcc

SEQ ID NO: 650749 - DNA, 744 bp, Homo sapiens
  misc_feature (340)..(340): n is a, c, g, or t
  misc_feature (362)..(362): n is a, c, g, or t
  misc_feature (502)..(502): n is a, c, g, or t
ggcggaaagttggtctcgacacctggactagccgggttgtatttggaaacgcggagtgagtttttccgtgctgtgtaggggctaacaatggacacccagaaggacgttcaacctccaaagcagcaaccaatgatatatatctgtggagagtgtcacacagaaaatgaaactaaaatctagggatccaatcagatgcagagaatgtggatacagcaataatgtacaagaaacaggcactaaaagcattggctcgtcttttgatgctcgcatgaatgctgggaattcagcaggaatgtcttcacttatactgtggatttgctctcttcccattttctgactngttgtataggcttctcgatttnggcttacagtagttcccccttatcttcgggagatacattccaaggcccccagtgaactcctgaaacctcaaacagtaccaaacctttatacactggtattttccatatatatatacctatgataaagtataatgtataanttaagcatagcaagagattaagtaataatgtaatagaacaatgattatcttactataatagaagttatgtgaatgtggttggtctctcttgctttcaaatatcttcgttgtacagtactcacctattttagaatgtggttgactacaggtaaccaaaaccacagaaagggaaactttggatgaggggggcactactgtacttaggaataccactatttcctatgatttattttaaagaccat

SEQ ID NO: 650750 - DNA, 835 bp, Homo sapiens
agcgggggtcggatctcggagctgctgcttctggttctcttgtggccgccgtcgctgtcccggtctgccttgtgtcctgccggaagtagacagaggctgtgggccacagcatcctcagtagagccgacgcaggctctgacatcagtgggccagtgcatgcgtacgcggtgaggcgatcagcgtgtcaggagaggcgccgcgcgggcaggctgcggctggtcagccacacgggcgagagacgcgtgggctgcgcggtcacgcctgctgtgtcggtgccggccctgtggacattgtcgattgctctgaccggctgattgccggcttgtccccgtgcggtcgggggactggagctgaccgcgagcgtctgtggcagattcgtagtgatcgcctgatgaagtatctccttcttggctgccgttctgcaaggtggcctcacagaacgtctacatattccactgtttgacatgactgagcatgcatggagtttcaccaatatttccactatcaaagagtggccggaaggatctattgtctcgctcgagtctcatcagttccgtccgacatgtacctattctaacaggtgtccatgcgtgctattccttacagtatgactagccttcttgattgcatgcacggtttacgtccccctgaggagaacgcggtcataaaccaaacttccaaggcgactcgtcgagtgagactttctcgtggtgactgaactttttcagagcagcgtcaggaatctcgggacgccggggagattgagcattgcaggagcgaagaccttgtctgctcctgatttcactcaggaaacgtgctccgggggaagaaggcc

SEQ ID NO: 650751 - DNA, 853 bp, Homo sapiens
ggcgtcaaagtatttagctgactcgccacactccacggaagcatatatgaaatgatctgctgcagatgcctctgagcccctaggattcatctttcttttctaccgtaggtggccctgtagtggaagattgtgattagcaaatctcatccatcggtagacgatcggtactacacggacgacgtactacgataggtaagcatcactgtcccactatgtcctatcaataaggagctgtatttgccatcataggaggcttcattcgactggatttcccctgattctcaaggctataccctagacatagaccttatgccaagaatccatttgactaatcatattcatcggcagtaaagtctaacatttcattcccacaatcatctatactcggcgcgtagtccaggaatgccccgagctgttacctcggacgtaccccggagtgcatacgatcggcaggatgaagagcgatcctatcagtcgtgtaggctcaatcccggatttctctagacagcaagtagtatgaataactttccatgattttgaagaaggccttcgcttcgaagcgaaaagtcctaatagtatgaaagaatccctccataatagcctggggagtgtgactataatggattgcccccaccagccatagcacaagattccgaaagaaaccccggtatacattatgaatctagatcctaaagaagcgaaggagatcggaaaccgcgcgcaaaagctgggttatcaaagccagacccccatgggccttccatggactttgtgtcaaaagaacctaacgggcttggacagcaaaaataggagcggttctttggaccgcctgggccctaaaaaaatttaaaca

SEQ ID NO: 650752 - DNA, 527 bp, Homo sapiens
  misc_feature (77)..(77): n is a, c, g, or t
  misc_feature (79)..(79): n is a, c, g, or t
  misc_feature (82)..(82): n is a, c, g, or t
  misc_feature (84)..(84): n is a, c, g, or t
  misc_feature (86)..(86): n is a, c, g, or t
  misc_feature (90)..(90): n is a, c, g, or t
gtaaaagttactgcctatgctttttaccttaggcttacagaattaaataaaaattagccattccagaaatataaaananaanananaaanaaaaaaaaaaaaaaaaaaaaaaaaaaaaaaaaaaaaaaaaaaaagaagggggggcgcgtcacagatacatcagaggaggacgaaaagaaaaagagaggcaaccacaagaatttacttgagacaaaaagagggaggcgccctatcaaggagaggagagcgacaactctaaaaacaaacaaaagagagcagaggaagaaagcagagtgaaacaacaaggcacacgaacaggaggagaaaacaacagcgggagcacaagagagaagagaccctcattggtgagaaaggaggagagcaccgcttataatcagagagggaggcgtggacgcgaaaacaacaggtggagcgaacaacaacacaacacccatcaccgcgagcaaattatgacaagaccttctaggggagagaacaaacaaaaacacacacaactgaaggaaagg

SEQ ID NO: 650753 - DNA, 264 bp, Homo sapiens
tgacgtcacccaatcaacctctatgctttcttcttaaaaaaaaaaaaaaaggaaaaaggaaaaaaaaagggaaacccaaaacccctgttgtctgtttgtgcccaaccccttccaccaaaaaagctattctaggtatgaaaccccactttgtttgtacccatcaaaaatattaataataaccgggacagttaacaatcgtgggtttccttcacaacagggcctttttgggaaacgagaaaagggccagtcacgcgtttcccactg

SEQ ID NO: 650754 - DNA, 379 bp, Homo sapiens
tataggatccccagatatctattgatattgagctggatgaaaagttagtgtttactaaacagagatctgtgcagaatttacatagtatccattcatagaatggtcgatacacgtatatgcctattgtatggaatagttccatttatcaagtaatatacgtcacaaagtcttttgacgttcaccagactgtccattaatacacctctgaaaaagtggcatttaatttcagcgactatattttacagcattaagacgcttatgcatcagggtgcttctctgcacaatggcattgagcagacagagctgagtccattatcccacccagattcacatggtcacatttgagagctttataccagaaagcagggacagttactgc

SEQ ID NO: 650755 - DNA, 121 bp, Homo sapiens
ccactgcgctctgcgatatctacattatttaaagactttaatacgagaatatagtgcagataaatatcttcgttcattttattggtttattttttatggttttgagacggagttttactct

SEQ ID NO: 650756 - DNA, 299 bp, Homo sapiens
aaaaccccccccttttttttttaggggaaagggcccgttcttttcccagttccccccgggggggggaaagccttggttttgggttaaatttttaaagccaaattttttttattttccccccaaaaatttttttttttgtttttttttgaaaaaagggcctttgggcccccccttccccctttttttttcccccactttaaaaggtttaagggtttttgtttccctggggggggggggggggcacccggggtttccttttccctttttttgggcccgttttattaaaggggcccccttta

SEQ ID NO: 650757 - DNA, 273 bp, Homo sapiens
gctcctgtgaggctgcagtgcagagcccagtgggagcatctcgtatagcacagcaatggtatgtccatccccctagtgctccacttgctcccatagaagactttagcccaagaagaactgtctgacctgaattctgcagcacagtcttggccatcggatgggggtgatctgacctgaacactccttggtttactggcctctccagtatcccaactgagccacgcctgcttgcagtgcagccttgggtgccctggtggcccacatcacagctcc

SEQ ID NO: 650758 - DNA, 730 bp, Homo sapiens
gcattgctttcgtgtaaattatgtaatgctatcacctcccctgtgtggacttaatgattgatagttagtttatttagaatgatgagccttcgtgcaccccttcgccttgtcccccaacttgatatgtatgaaggcttgctctccctggagtgggtgaatgtgcatggttactgtcatgactgaacagtgaatagacgtgccccaccttagaaaaaccaccaaaacacaccacacgaccaaaccccaacaacggacggcgcccacgactcacacacccccacagcacggagccgacacgcacacaccagccacacccgcctgcagccacacgccgccccccccgcacccccgcccattcgacactctcaacccccaccccacctcgcgccccacctgcaaacggacaaccacccatcgaccgaaaaacgagcgagaccagcactcgagcacaccacctgagcgcaagccgaaccacaacaccaacacatggaggcagacagccccccacacgcgggtcaacatacacaccacacacgcgcaagcataccagcccctccgcggcacacaaacacaacacgaaccaaaacagaagacaacacaccggcggtaccccacacaccacccacgcactaccagctacccacggctacaccaaccaacgacgcgtcacaactgcgcaactcagacgcccacgacaacaccaccaaaccccacggacctccgcaacaac

SEQ ID NO: 650759 - DNA, 612 bp, Homo sapiens
ctctctctctctctctctctatctgtctctctctgtctctctctggctccataggcttttgattccatctatcctgctatctcttgtgtgctgatgtcaagttctggattggcttcagctgtgctaatatgaagggcgctgtctgttcaagcaatcttaaaaggcggtcaatcaaaaggccacagtctgaatcccttatgcggctgaaataattcgaggatcaagtccagtgtctagttaatccctgttctactgtgccagacactatctggcatgctgtaatatgttcaggttcaaaatcgctctttcataccaggggatgatagtaacgagtcacttgcaatggatcccttcatcttagttacaagatgatcactctagttaggacaaaatatacattgaataaagtaacgtttccaagtttacagaggaaaaatcagcagatctctgcctgctgtcgcgagagttagcactgggcaatagaatatatctactcctacacgagtctgtcagtatgtcatcactgaagaccggatgataggcacaccgaatgtccctcgtcattcattgtgcactacgtgatagagatgaagatcgttttggcctgccccc

SEQ ID NO: 650760 - DNA, 494 bp, Homo sapiens
  misc_feature (22)..(22): n is a, c, g, or t
  misc_feature (48)..(48): n is a, c, g, or t
  misc_feature (87)..(87): n is a, c, g, or t
  misc_feature (94)..(94): n is a, c, g, or t
  misc_feature (118)..(118): n is a, c, g, or t
  misc_feature (126)..(126): n is a, c, g, or t
  misc_feature (145)..(145): n is a, c, g, or t
  misc_feature (147)..(147): n is a, c, g, or t
  misc_feature (198)..(198): n is a, c, g, or t
  misc_feature (220)..(220): n is a, c, g, or t
  misc_feature (228)..(228): n is a, c, g, or t
  misc_feature (237)..(237): n is a, c, g, or t
  misc_feature (256)..(256): n is a, c, g, or t
  misc_feature (260)..(260): n is a, c, g, or t
  misc_feature (295)..(295): n is a, c, g, or t
  misc_feature (297)..(297): n is a, c, g, or t
  misc_feature (300)..(300): n is a, c, g, or t
  misc_feature (302)..(302): n is a, c, g, or t
  misc_feature (311)..(311): n is a, c, g, or t
  misc_feature (324)..(324): n is a, c, g, or t
  misc_feature (327)..(327): n is a, c, g, or t
  misc_feature (348)..(348): n is a, c, g, or t
  misc_feature (353)..(353): n is a, c, g, or t
  misc_feature (363)..(363): n is a, c, g, or t
  misc_feature (372)..(372): n is a, c, g, or t
  misc_feature (397)..(397): n is a, c, g, or t
  misc_feature (407)..(407): n is a, c, g, or t
  misc_feature (415)..(415): n is a, c, g, or t
tcctgtcccaacactttttaanacagttgaatggataaaaacatgganacaaacacatggatatagggatcattgaagcagtgtganaaaaaanaacatctatatatacaacactccnctgcaaanaacaaatgtaaagtaaaananacccaacaaatcattttgtttatcttgctatcatttcttaatctataacgnctccctcccatgtatccatgcnagggagcngtttcagcngcccgactagaggggagcncccncccttggggtacttttttttttttttttttttgtngngananagtctcacnctgtcgcccaggntanagtgctggggggcaggggggnaatcncagcccaccncaacccccnccccccgagttcaagcaattctccngcctctgccncccaagtngccgggaccccaggggggtgccgccacacctggccaatttcttttttattttagtagagacagggtttcaccatgttgc

SEQ ID NO: 650761 - DNA, 596 bp, Homo sapiens
  misc_feature (29)..(29): n is a, c, g, or t
  misc_feature (157)..(157): n is a, c, g, or t
  misc_feature (184)..(184): n is a, c, g, or t
  misc_feature (270)..(271): n is a, c, g, or t
  misc_feature (493)..(493): n is a, c, g, or t
  misc_feature (583)..(583): n is a, c, g, or t
caggtataaccaataaaattggataagangaatttgggggagaaaagtaaatgaaaatgtgtaaaaccccaagaacagactgtaccataatcccgagtaaaaaagtaacaagagaaacaaacccaagactaaatcaaaaccaatggaaagtaaaaanagcaaaacccgggggggaaggaagacnaaaaaaaaagcaaaaaaaagagtaaggggaaacaacagaaagagggaaaaggggaaacagtaacaaaaaaaaggaaacaagaatcnnaaaaaccccaggaaaaaaagcaacccggggaaacccaagcaagaaaagccagagcccaccagggaaaccgcaggggaaaaagagcccgggcccccgcccggggaaagggaaaagaaacaaaaggaaaagggcaaaagacccaaaaacaaccccccacccagcaaaagaaaccaaaagggaaggggggaagcaaaagaaagagaggcaaaagaaaaacaaaanaggccccacacgcagcaccgggcgcaaccgagagacagggcaagagagaaagaagagccggagagagaaggtgccggaaggccagccgangccaatcccctcc

SEQ ID NO: 650762 - DNA, 266 bp, Homo sapiens
tcaaactgcttaatacatcttaaataacagtacagttcaatatagtatctatcttgcatccagcttcctggcagtacactgagctttgaaattaaagtacataaggtggaaaggggtaagggtgcatagagctctacagagttgttggacggaaagaggagagtgggccacataactgcatactgcacccggaaagaggagagtgggtttttttttgggttttttttttttttttttttttttttttttttttttttttttttttt

SEQ ID NO: 650763 - DNA, 139 bp, Homo sapiens
tgtatatgtgttctttgtctctgcaaactcactgcatctgttatttttgactttttaattatagccattctgactagtgtgagatggtatgtcattgtggtttgattgcatttctctaatgagtacaacctgccggtgg

SEQ ID NO: 650764 - DNA, 443 bp, Homo sapiens
tatttgataaagatgatactgtaagtcactgtggattatttaaagatggtattgcgaagaatggccagctattagcagacaaataaacatgggtttctaattccaccaagtgtaaaggtgaattctagatggaataaagacaaaaatgttaaaataaaaccatgaaattaaagaaacaatatgggagaatatctttgtgactgatgacatgggggaaaattttaaattcacaagctgtaaggtgaaataataaattggattataacaaaattaagaatttatcttacaagagagacatgaatagtaagattaagagacaaatgacagatctgtctctgtcaaataaatatcaaaaatataaatatcaagaggtgatatttataaatgtttattttttttcaaatccgcaggaaaaacaaataaggatcaatagaaaaatggta

SEQ ID NO: 650765 - DNA, 375 bp, Homo sapiens
agtcgaccccaaatggcataattatttgaaagcaaaaggtagttcccatttggttactaggagaaaaaatgaataatctacaggtgcagggtgcccgtgtggttctttgacaggagccagaaatcacaatcctcatgaataaaatatatgaacttgaatgcattaatgcctatggattaaggacttctgttaaataattccatcatggcacgggtcaagactgttttcataataatagtaaggaaacaatgtgcgtttatcacgtttacactcatgaatgtaactttaccatgactcattacaagatatgtgaaacaattaaagctgaggagggaacaacacctcaattataccagaaagctccattaatcatta

SEQ ID NO: 650766 - DNA, 286 bp, Homo sapiens
gggacagtgtctctcacccagtctggagtgcaacagcgtggtctccgctcactgcaacctccacctcccagattcaaatgattcttgtgcctcagcctcctgagtagctgggactacaggcatgtgacactatgcctggctaatttttttgctatttttaagtagagacggggttttgccatgttggcccgaggcaggtggatcacttgaggccagaattcgagaccagcctggccaatgtggtgaaaccctgtatcactcttttaggcccttctgtcgtcttctc

SEQ ID NO: 650767 - DNA, 334 bp, Homo sapiens
  misc_feature (64)..(64): n is a, c, g, or t
  misc_feature (83)..(84): n is a, c, g, or t
  misc_feature (134)..(134): n is a, c, g, or t
  misc_feature (139)..(139): n is a, c, g, or t
  misc_feature (198)..(198): n is a, c, g, or t
  misc_feature (290)..(290): n is a, c, g, or t
  misc_feature (310)..(310): n is a, c, g, or t
aactttgacaaagagatagaaagtataaaatagtaccaaatagacatcaaagatgtgaaaaatnctgtaactgaactaaaaannttcaattgggaggtatttcaaccaggcagattcaatgaagccagaagaanccggntcgatgaaatcaaagacaggtcactgaaaaaattcaatctgcgcaaaagaaaaagatgnaaggatagtttaagatagtttatgcgacctgtggacacatcaagtgacacaatgcatatgatatgtcagaaagagaataattttcaagatancagaataattttcaagatancagaactcagctagtcagaacctc

SEQ ID NO: 650768 - DNA, 847 bp, Homo sapiens
gagtgtgtgggtttcttcggcggctgctcaaaatgcaaccgactcttcgagtgaaatgctgaacacctcaacgggctccggcgaccagcctgactgactgcataggtacggtgggacagggagagcagaatccattgacaagacagactttctcgattgggaatgctgagcgtagtggaagtactaaggagtcaggatcaagaagcatgagagagggttcctgcatgatgaaatatggatcaatgccagaaataagacctaggcgcgctctattagaagtccacaaggaggatgtatgcagcatgccaagcgtgcgactaacagtcttggcccaaagcaggtgcattcagacaatggaacaagcccatgtatatccactccaggtccttggaaaggactgcgcaagacccacgcgtctgactgctatgaaactgggagtctatggaaagtgaaggacaggcagtatcaagctaacgtgaagatcgatcagatcgaggatgtacagagaccacgcgtagacgcgatatgatggaaagatgcaaaatgaaatccaagaaagccactgagtcgcactctatggcaccccactaattggctgaaccatgaattcaagtaaagcggagttgcgatgccctcaggtggatcagcttctggctgatggacgaccgcctcttcattggactgacggcaggcatctgcacctgcaattcccgaaggtgtcccccctgactaccacgaccccgggtggcctccggcggccctgcattcccgtcgccccgttccgctccctcctcgctctgtcacctttgtgtcccccccctcgggctagggcttctcccccggcctc

SEQ ID NO: 650769 - DNA, 167 bp, Homo sapiens
cgtgtctctctgtggccggggccaccctgggcctctggggtccaatgtccaataatccccgggccctccccgggctcagtctgggagggtcccggggacttaacggggtaccagttttagcctggggtcctggcattgttgtcacaatgtgacaactggttcgaccc

SEQ ID NO: 650770 - DNA, 540 bp, Homo sapiens
  misc_feature (293)..(293): n is a, c, g, or t
ctcaggtctcggggcgcggtccagcttccttcgaaaggtctagggttcacggaaagtcctgtgcaagctcagcttggagggtgatcgactctacatccccaaggtgcgatatgggtctgtgcgaaagcctgatatcgtaactgtagatgctgagcgggatgctttgaacattggaaacagccagtcagagaccaaaggtgtggcatgaggtcatcagtggtgcgaacatttggagccagccggcaggcaagtgcgacagaggacgagggatatggcctgtgcgcctatcctanagaaaggtaccaaataaggcaacttgcgatcagactactgaaagtctagtcttaatctggctcatctggagaatcggtgagtaatctggagcctatattgaagacgaccggcgtcagtatggacgcttctagagattcaataagcttccatgataggggctggggaaccggacgaggatctctctcgagagagatcatctgttccagaacgcaaccaggacgcggtcgggaagttgtcgagagtcta

SEQ ID NO: 650771 - DNA, 156 bp, Homo sapiens
tgacaactcgagctcgttaccccattgagaacatgatggtaatgatggactctttcccaagaaaaatattcaatgcacaaaaagtcaaaatttcgcctacaattttaatgtcttcacaaactccctgaagccgagcgtcatcgaagaaccaattag

SEQ ID NO: 650772 - DNA, 139 bp, Homo sapiens
gaggatgtacatctactgtccccaccaatccaaggctgtgcagcagaactttcaaatcccggttgtctggggtgcttgcatccccttcccctctcccgtgacattagtatgtgctgtctgcgattagacgttgatacag

SEQ ID NO: 650773 - DNA, 296 bp, Homo sapiens
  misc_feature (6)..(6): n is a, c, g, or t
  misc_feature (106)..(106): n is a, c, g, or t
  misc_feature (123)..(123): n is a, c, g, or t
  misc_feature (191)..(191): n is a, c, g, or t
  misc_feature (259)..(259): n is a, c, g, or t
  misc_feature (289)..(289): n is a, c, g, or t
cccctnaacccccaagagagggaggacccggatccgaatgggcctgggtgagcacgaattaccgaggccttccctttgatacagtcccaggatttgtaagggatgnagacccctgggccccantttgttgggggcccatacatactctccggagatagcaacttgcttcaggtcaaagtggacccgagganagaggagaatcactcactactgctcttgccctgggctattcaggaagggcagcccgggtgttccatgntaaatcgtgacagaattgcaccaggcctgntgagttg

SEQ ID NO: 650774 - DNA, 167 bp, Homo sapiens
ggtgattgaggagttggacaccacggaagtacacttgccacatatttatgtcctaggcatacccatagaactcatttgtcatagctcttgtactgatgtgtcatgctgattgttttgctttattttaatttaatgctacatattaagttacggacttgtatattcca

SEQ ID NO: 650775 - DNA, 739 bp, Homo sapiens
  misc_feature (5)..(5): n is a, c, g, or t
  misc_feature (68)..(68): n is a, c, g, or t
  misc_feature (115)..(115): n is a, c, g, or t
  misc_feature (118)..(118): n is a, c, g, or t
  misc_feature (124)..(124): n is a, c, g, or t
  misc_feature (157)..(157): n is a, c, g, or t
  misc_feature (169)..(169): n is a, c, g, or t
  misc_feature (179)..(179): n is a, c, g, or t
  misc_feature (181)..(181): n is a, c, g, or t
  misc_feature (204)..(204): n is a, c, g, or t
  misc_feature (214)..(214): n is a, c, g, or t
  misc_feature (219)..(219): n is a, c, g, or t
  misc_feature (221)..(221): n is a, c, g, or t
  misc_feature (227)..(227): n is a, c, g, or t
  misc_feature (230)..(230): n is a, c, g, or t
  misc_feature (232)..(233): n is a, c, g, or t
  misc_feature (240)..(240): n is a, c, g, or t
  misc_feature (257)..(257): n is a, c, g, or t
  misc_feature (261)..(261): n is a, c, g, or t
  misc_feature (269)..(269): n is a, c, g, or t
  misc_feature (274)..(274): n is a, c, g, or t
  misc_feature (302)..(302): n is a, c, g, or t
  misc_feature (306)..(306): n is a, c, g, or t
  misc_feature (308)..(309): n is a, c, g, or t
  misc_feature (311)..(311): n is a, c, g, or t
  misc_feature (320)..(320): n is a, c, g, or t
  misc_feature (322)..(323): n is a, c, g, or t
  misc_feature (325)..(325): n is a, c, g, or t
  misc_feature (329)..(329): n is a, c, g, or t
  misc_feature (351)..(351): n is a, c, g, or t
  misc_feature (394)..(394): n is a, c, g, or t
  misc_feature (486)..(486): n is a, c, g, or t
  misc_feature (522)..(522): n is a, c, g, or t
  misc_feature (623)..(623): n is a, c, g, or t
  misc_feature (633)..(633): n is a, c, g, or t
  misc_feature (703)..(703): n is a, c, g, or t
tgttntcccagcacgttttggaggttgtggtgtgttcatgacgatggtctggggtttgagatcgtgcntgggccttcatggtgtaaacctccattctgctccttaaatagatatntantgtttnttgggtgtggtgtgctaggcctacctgttatcntagctttttggnatgtttaggngngagtgttgctttgtctcgggagngggtgcttgnggtcntncaagantangnnactacantgcagcctgggcaacanttcntgattccntcgtnataaaaaaaaaaaaaaaaaaattaatanaaananntntataaaaanannanatanaaacaaaaaaaaacacctgganaatgttttcattcagagaccccataggatttcaaaagccagcnaccatcagcagttatttttgcccccaaatcaccctaaaatgcaaatcccatcactgtagctggcaaaggtctgggatatggctcctggagtntagggagcagtccccaccaaggacggtgctggcttntcgggttcctctcccagatctacaatccggatggcgttttccttcttggaaagccagaaggcagcatagactggttctgaaaacttgcaggcaaacttgtnaaccagagtnatggaatcatactctacgccatagaagggaaaggatccctcctgggaagtcaatatagaccccgagcctncagaaaagggccagctttgaagtggggtctccatgt

SEQ ID NO: 650776 - DNA, 135 bp, Homo sapiens
  misc_feature (35)..(35): n is a, c, g, or t
  misc_feature (41)..(41): n is a, c, g, or t
  misc_feature (60)..(61): n is a, c, g, or t
tcgcttatatagccccccgactagcccgacagctnaggcgntcagcagcaccgctctcgnntggccgcagcccacgttcaccactgagttgaagaggtaggcacgcccctgactgccctgtcgggctagtcgggg

SEQ ID NO: 650777 - DNA, 668 bp, Homo sapiens
  misc_feature (346)..(346): n is a, c, g, or t
  misc_feature (351)..(351): n is a, c, g, or t
  misc_feature (358)..(358): n is a, c, g, or t
  misc_feature (365)..(366): n is a, c, g, or t
  misc_feature (368)..(368): n is a, c, g, or t
  misc_feature (372)..(372): n is a, c, g, or t
  misc_feature (387)..(388): n is a, c, g, or t
  misc_feature (394)..(394): n is a, c, g, or t
  misc_feature (396)..(396): n is a, c, g, or t
  misc_feature (398)..(398): n is a, c, g, or t
  misc_feature (412)..(412): n is a, c, g, or t
ggcattatgggtcgtcgtcttttggctctctaactttttttatggctgtttgcaaagagcaattccttatgaactgttgtaaggagtgagcggcgaccaaaatgagatatctttaaagaatataaaatgcaatgaacacttcatattatgcgtcttgaaacactcaaagctatgctcaagcctatacgaggtatgcgcttaatcctttcatactgtgtaggagaattagcggccagccataggtatgtaggaatagtcactcactggctgatacatttaaagcagcagtgtgaatagcaaggacagacaccttcaatttgtgaaatcaaagaactgatgcactatntagancgaattngggtttnnanaganatattaaaagtaggnnctgtangngntctaaaaccctgtnaacttcattctgtgggctagtggtgtgggacaaaatattcctaatgaaaggaagccccaatagctgatttgtggtggcattccccttttggaaagcacatgcaggtattgtctgcgtatggtattcacactagggaagcatacccaggcacagggctttaagaacacactgatgccttgataattaaaaagaatacaaccgttcctgggccacatgttaattagccagctagtgactgggccaaccttttttcata

SEQ ID NO: 650778 - DNA, 454 bp, Homo sapiens
tgtcctccaacaaatggggagagcaaattgaaaatgcgtaaattgtaaggcaagttctgaaattaaacgttgacctttggcctgatgttctgacttttaatgaatcaggagtttgtaaccttccaaatattaccaattctgaactgccgtgtaaacttgacgaattcccaggtcaccatcccagtttcccattaggatgtgaataatgtgtgttgaggttaaaccttagccatttgctttggcagtatttgaacgctttcgctttccggagtgagcttcaacaaatttaagagggcccatcacacatgtgacctcgcattaaagaggttttgaaatgtgcgtctttggcaaaaacactgttcttattagcacctgttgaacattatccctgggccttagcaatttgccttccatttttttgtgccaccctccctgggaccatttgttttttttc

SEQ ID NO: 650779 - DNA, 594 bp, Homo sapiens
  misc_feature (272)..(272): n is a, c, g, or t
  misc_feature (277)..(277): n is a, c, g, or t
  misc_feature (284)..(284): n is a, c, g, or t
  misc_feature (291)..(292): n is a, c, g, or t
  misc_feature (294)..(294): n is a, c, g, or t
  misc_feature (298)..(298): n is a, c, g, or t
  misc_feature (313)..(314): n is a, c, g, or t
  misc_feature (320)..(320): n is a, c, g, or t
  misc_feature (322)..(322): n is a, c, g, or t
  misc_feature (324)..(324): n is a, c, g, or t
  misc_feature (338)..(338): n is a, c, g, or t
gtgtagggctgaatgtgatgtggcagacattagagctcttataagaagtgatgatatgatagacaagtcgtattattcggggtgggatgctctatagtatacttgagtgtatgcgaggtaggtgctggatattacctaatgagtacgagactgggcagtcagccataggtatgtaggaatagtcactcactggctgatacatttaaagcagcagtgtgaatagcaaggacagacaccttcaatttgtgaaatcaaagaactgatgcactatntagancgaattngggtttnnanaganatattaaaagtaggnnctgtangngntctaaaaccctgtnaacttcattctgtgggctagtggtgtgggacaaaatattcctaatgaaaggaagccccaatagctgatttgtggtggcattccccttttggaaagcacatgcaggtattgtctgcgtatggtattcacactagggaagcatacccaggcacagggctttaagaacacactgatgccttgataattaaaaagaatacaaccgttcctgggccacatgttaattagccagctagtgactgggccaaccttttttcata

SEQ ID NO: 650780 - DNA, 679 bp, Homo sapiens
  misc_feature (44)..(44): n is a, c, g, or t
  misc_feature (149)..(149): n is a, c, g, or t
  misc_feature (151)..(151): n is a, c, g, or t
  misc_feature (161)..(161): n is a, c, g, or t
  misc_feature (163)..(163): n is a, c, g, or t
  misc_feature (193)..(193): n is a, c, g, or t
  misc_feature (215)..(215): n is a, c, g, or t
  misc_feature (246)..(246): n is a, c, g, or t
  misc_feature (323)..(323): n is a, c, g, or t
  misc_feature (355)..(355): n is a, c, g, or t
  misc_feature (380)..(380): n is a, c, g, or t
  misc_feature (405)..(405): n is a, c, g, or t
  misc_feature (432)..(433): n is a, c, g, or t
  misc_feature (514)..(514): n is a, c, g, or t
  misc_feature (529)..(529): n is a, c, g, or t
  misc_feature (549)..(549): n is a, c, g, or t
  misc_feature (576)..(576): n is a, c, g, or t
  misc_feature (588)..(588): n is a, c, g, or t
  misc_feature (597)..(597): n is a, c, g, or t
  misc_feature (670)..(670): n is a, c, g, or t
aaaaaaaaaaaaaaaaaaaaaaaaaaaaaaaaaaaaaaaaaaancaatataaaaaaaaaaaaaaaaaaataaatcatttacagacacactaaaaatgttattaaaatatcttctttctccaaagagtccaattgcgcatttcttaaagnanagatggggananattccaggcaaggtcacaatggcattttgntgccctcaataaagattttcantgcgtgtgcagatctgctttttttccttatntctgtgaaatttctcatactgttatatccagtcgactgatacccttcttggaggtcgcctgaaacctggatgactcnatttccacattccatttgggcctgaacaacanagtccttgtttgaaggcattggganccattgcacgggcacagaatccagnatctccaggtctaaaagccttctcctnncctgtaagcaccttttccaggtctcttctgggatgtctgaccaccagagcagttcattcttcgatcgttgaggcatctgtnctagatatctctganccctttcttctcttgtcatncctttgtagtttgaggtaagaacaaanataggcctagancactcattnattaatttccctgccaagtacttgttagaccttgactccttggggagtttatagagataaataactgctcgtncaatcccac

SEQ ID NO: 650781 - DNA, 135 bp, Homo sapiens
  misc_feature (42)..(42): n is a, c, g, or t
ctcccggctgaatgctcctcccggctgaatgctcctcccgtnccggctgaatgctccctcccggctgaatgctccctcccggctgaatgctccctcccggctgaatgctctatattttttttttttttttttgtt

SEQ ID NO: 650782 - DNA, 1340 bp, Homo sapiens
  misc_feature (256)..(256): n is a, c, g, or t
tttggttagcgtgttagtcgccgtctcatgcgcggactcacgttttataaaagtcccccgggatgtactgggtcatctatacaatgctctattccttgtgtgatactaacttgttgtggtacctctttgtgtttctagattgccaattttcatgctgtaggtagtcacttggcgcacattttctccctggttaaccctgtatatggtgttagcacttgggcggcggtctcaacattcccctctggggtggcctttnctcttatatacctcttttgggggtctttatcacgttgctcctctccccggcgtggcaacaccccgtggacaatttcaggggcttcactgggctcgccgtttcttttaccctttgcttgacacggtgggcccaatttctgcgcccttcctttttgctggccccctctggcgtttttaaccgttattcggagggtaccgcaggatttgggccggagctatggctctctccgaggtttttagcacaaggcattctcccttggccgtggtcctaacatgtgatgtggcccggtctagtcaccccaatgacgacggtttgggcctatttgcgcgaaccatggttccccaggaggcatcctccggggacacacggtatgatggctcctgagctagcactaactgaagcgggcacttccttggctttcattggggcacttgtcccacggttcaacccttacgcatgtctgtcgcacaacctttgtgtgtcaccggctctctaaacctcgggagggctcaaagctatggaggcctatgaagacggcgtcgagatgcttttccggacgggggcgcaagtttcccttcattcacacaaagccacaagttcgcacggtcttggagagccgtgttcccacaggagacacggtggaacacttctctttgctttccggagaagtgcccgttcctcggaacaaccacgaggagccaataatctgagcgcgaaggagcaccgccgtgccctgccgtgccacatcatgtggcccgaagccattgcgcaattcaactgcagaacgcctggaagagggacaggccgcttccgaagttgcagtcctggcgcagcaccgagctctgccaagcaacccggggagaaggagcaccctcaactcccacaaccccgggagagagacaactagaacatcagcacgaggggcactgcccctcacgcctgcagccgtgaaaggaaggctgggtcatcagcaccagccccgcccaaccccagcccctatgtgtgtttccctcaataaaggaggaatgccttgttcattttcagccactgcaaataaaatgccccgcccaacacttggcgttaa

SEQ ID NO: 650783 - DNA, 223 bp, Homo sapiens
tgcattcgatcaacccaatacaattactctccgcccagcaattcagacatgaatcaaccatcagtacagccattaatacatctcattgtcatcactgcagtgggtttagtatttggtgcacgactgcatggctcatggcagcaacagcctcactcaagcaatgaagccgggcacccggcacaatggctactgtgcaagcaagggtggccagcaagcacccagg

SEQ ID NO: 650784 - DNA, 111 bp, Homo sapiens
acttgaggacgtatctgagcgcatgggggtcaggcgttgaggtcttggtgagtgttttagtggcgttagcgatggacagtacggattggtgcttgccggctgaaatctggc

SEQ ID NO: 650785 - DNA, 245 bp, Homo sapiens
atctgatagaacaaagcatcaagactgacatccaaagatgccactgcaaccacttgcccacacgattagagactcattaatagaaacaaaacagtaagtatatagctttattgacatactaggcttagacctgtgtgtgtaacaagcaagcctaataatagcaccatggttcaactagcctgcttttccaagccatcattttataatttattaagcaaacaaaggatcaaatgtctctccatcca

SEQ ID NO: 650786 - DNA, 240 bp, Homo sapiens
taaatgttttaattttaaactaaaatttctatgaaacccggtatccaccttttaatgagtagggacataaagaaaaccctcctaatgaaaaactttttttaatgaaggacaacattaatctttgaaaaccggcatttttatttgttggttggattggaccctagaccctattttaatttttaaattgttttaaattgaaatgaagattgaaaatccttatatttaactcccccaagtgga

SEQ ID NO: 650787 - DNA, 556 bp, Homo sapiens
tcctcgtttgcggacacacttctgtcggcttctcccgtggcgtctctgtctcggcgaggtggtttgggcagccacctctttccgtgtccacccctgtgggctgcgccgctgcagctcgtgtgtggtttttgcacccccccctcggtgcggtgcctcttctctggcagctcctcccatgtgggtggcctcctcgcggggttgcacgctatcgcggcaccactttggggcacacccctcccttcagcccccgttgcgatctcccgtgcccccctggccctgtgtcccccagttctcgcccgctctacgtggttgatctggcgcccctcgcccaacgccgtcgtcggtgggggcgcgtgccctccgtctcctcctcaccctatggcgcctcccccgtcgcgcctcgcctcgtcgctcgggcgggctctctgaactcccttcctagccattacctccctatttgcttccttgtcgcgaatcgcttttttcttcgagtacgacaggtgatctttcccacgcgggcgtttatcccgagggaaaaccccacccacataacaaa

SEQ ID NO: 650788 - DNA, 528 bp, Homo sapiens
gagaataagagatgccttccgagaaaataagaatgtaaaagaccctgtagaaattcaagccctggtgaataaagccaaaagagaccttgaaataatccgcagacaggtccatattggccaactatactcaactgacaagcttatcattgagaatcaagagaagcccaggacataggaagccagcacaaggaaacagcctccacagcagaactgaccacctccagcatccattctatatggtggaacctcccagtactgggtgaaatagccactgctctgcctgccttgtaggcgctgataaactgagtcccatttgcattctgtcacagctgttatgtgaagaaatggctgtgtatcctcatttcgggtgtaagagtgaagagctggaggtcactcagaataatgctatatgttattgtgtctcctcgccatcctaccccatcttaaagatcacccacatttgtatagagcttttgcagactctgtgtcttggtccttaacagtaaacataattatctctctatcctt

SEQ ID NO: 650789 - DNA, 331 bp, Homo sapiens
aaataatttatgtcttttggacttagcatccagtatttcttttttaatacagaaaataatattctcttgcaatatactatgtttatctgggttttgaaaaatgatgtttcctaatatgagaaagccatttacatttttaaatctacaaaggcaaatggaatggtactaaattatttacataataatgtttagatggtggcccttattaacattctttctatacttcctacagagttggggatatgcaatcctagaatatttctgggagctaatcctttatcttgatgaatgaaacaagacttttaaataaaattaaactttcaaatttaaa

SEQ ID NO: 650790 - DNA, 105 bp, Homo sapiens
gttctgatggaaacacctggtgtgggttctggatgtctcaccacagactctggacccatcaacctgccgacggctgactgcacacagacgtcagacaagtcagta

SEQ ID NO: 650791 - DNA, 243 bp, Homo sapiens
  misc_feature (131)..(131): n is a, c, g, or t
  misc_feature (139)..(139): n is a, c, g, or t
  misc_feature (182)..(182): n is a, c, g, or t
atatgggtgtacgtctgtcacacattcaggaccgctgcgtgggggctcagtggcactgagacaggaaagaggaggtcagggactggggatagctgcctccagtacccctagtacctcgcatagcctcaganacctccanctctcctcacccgagtggacagaccaaatcagcccactaagancctcttcctgctctggcgcaggtgagcaaagggagggctgcagaggtgatgggacctgctc

SEQ ID NO: 650792 - DNA, 771 bp, Homo sapiens
gatgacaaggatggttcctatggagctcccacaaacttaaaaccatgaaagcatctattatgctagctattgtgtgttgttctagttaagtcccaaggtgtcaagacaaatgaggagggtttcttcagatgccccggtggttcatcgatgctcgcgtggacaagagagagagaatgaggctcccagccgtagaggccgtgccgcacgcgcacatcagtgggaggtggcttatcgggcatcgtccagccaaagcagtggcctagtcaaaagaacggagaaagaaataggcccctgagtgctggaggctgtctgtcacgctgaatccagagctgggggtgtgtgtgtccttacatggagtgtcaggcttgcaagaggcattggcatacagacaggaaatggccatttcatgaatatagtgttgatgaggtgaaatatagcaagtgttggaatgatgtgttaccagacactccctcgttcgtgtcgtttcaggaacatgtatttgatgacgaagatgctgtggtaggacagaggcgagaccggcgcaattgcagatgcgaaggacttctcggaaaccctgaaaggacctgttcattgacctggccacggggaactcggaagataagggtctgctttgggacctacttggattgtggtccgggcgactcactggcgtcgcccataccgcggcacggtagggtcaacagtcttatcctcccaagaggagccccggcctgtacaccctgtgcaggggacacccaccaccttaagact

SEQ ID NO: 650793 - DNA, 116 bp, Homo sapiens
cgtcctctctgactgatgcgctgactcctcatcttcctcttcttctgcctcttcctcctcctcttcctcttcttcttcttcctcctcttcctcctcctcctcttcacttagttgtt

SEQ ID NO: 650794 - DNA, 182 bp, Homo sapiens; identical to SEQ ID NO: 550433

SEQ ID NO: 650795 - DNA, 302 bp, Homo sapiens
agtttcgacgtgagactctcattgccaaatggtgatgaccttgtgccgtgaggtcagctcgtagactcttctcgagggaggagctgttaagcagcccgtgtgcctactctcttgcttcgacagctccagggacgatcgtaggcacacgacttctgccttaagtgtcacgtcacgcatttccgcgctcggtctgtggatggtgaatgctgtacccgccagctcggttgaggatcttgcaatgagggtatgtcagtcaaggtgcacgggacagaccaggatgcagaactcagtgatggacatgg

SEQ ID NO: 650796 - DNA, 227 bp, Homo sapiens
atagaaagctgagaggtgcttgggaagacgcttattaaatgatgaattcaagacacagtcaaagagtttccctgggcctgatatagagttttagaagtttcaatagcacctaatcaacatacagtcaaagagtcatgcagagactgagttttacaaattcattccaaagcacgtgacacctttacacctttttttttttttttaactatgctatggaaacttctaaa

SEQ ID NO: 650797 - DNA, 227 bp, Homo sapiens
aagctagtaagtggcagagccccgagattttaaccaggtttgaccccagtgccccctcttttcccccctaccctttgggagtactgtccttccagggcaaggaaggatagtcctttgcttttccccgaattagcaaaggttttgattgacttgataaggtagtttccattgatacggatgatagggcttttaggagggaaaaggtaataaagctttcccttggtcca

SEQ ID NO: 650798 - DNA, 131 bp, Homo sapiens
tatcagcacgttgtcactacagcacggaagtatcttgagggttgggtcaattgagacatttctagcattacttaatgacttgcatatattctggtatctgaatgttggttccttgatccaggaattcaaca

SEQ ID NO: 650799 - DNA, 175 bp, Homo sapiens
cagttgaccagagcaccagcagacacatgtggtagcagctgacaagatggagaagcatgtgcccctgtagagcgtccccccagaacagacccctagccactcgcttcctctgtgctgtgacaacattggtgccaggggagatggtgtttttcaaacgggacctactcgtagccac

SEQ ID NO: 650800 - DNA, 525 bp, Homo sapiens
ggggccataatcttgatcctcaccaaggtctggcagggatctgctcaccaggtggccgagataccggcccacgtgcccccagtcattgctgtgaccctggaatccccagacagcgtcgtcagtgcccatctgtacctgtggcatcgttccctgtgccatgtgcaatggaccctatgtccagtgatggcctgtggctagaaggacggtggaccgtcctgtggaagaacctttgccagtgaatgcttgtgcaacgtgcccgaaggcttctttcagatgaacgggagaatgttggatcatttgtgcatgactctgtgatggctgtcgccttggcctacctgggtcgtttacaacccaaatcgatccaattgctgtttgtttgtatccatagttagcccctgttggagttggatccctcgagatacacgcaactacactcccatggcctgggttctaccacgacctacaacttgcccgcacagaaactacactattgagggaacatagacacactgctttctaggaacc

SEQ ID NO: 650801 - DNA, 620 bp, Homo sapiens
  misc_feature (204)..(204): n is a, c, g, or t
  misc_feature (232)..(232): n is a, c, g, or t
  misc_feature (619)..(619): n is a, c, g, or t
ccccgggtaaagacaaagagatggatgcccatcttcttgctctttgctgcttcaacaagattggacgtttgtgatcgaaagggtcctggtgagctcatcaggaaaacctggcaacggatgacgtcatgcttctggacactgggaccaggtcttttgtctgggttggaaaggattctcaagaagaagaaaagacagaagccttgncttctgctaagcggtacatcgagacggncccagccaatcgggatcggcggacgcccatcccgtggtgaagcaaggctttgagcctccctcctttgtgggctggttccttggctgggataatgattactggtttgtggaccccttggacagggccatggcttaactggctgccttaggaggggcagggcccccccatgtccccggtcagtgccttttggaactgtccttccctcaaaaaggccttaaagcgagcaaaacagctttgctatgagtgtgtgtgggggggtgggttgtttcttttttttttttttacagtatccaaaaatagccctgcaaaaattcagagtccctgcaaaattgtttaaaatgtcagtgtttgggaaattaaatccaataaaaacatttttaagtgtgna

SEQ ID NO: 650802 - DNA, 883 bp, Homo sapiens
atgatttatcaatgtgccatacatacactacaacataacattggcttgttatgcatgattgctctggggacaccattgcactgcagtgcacacatatttataaccattgtatattttggaaacttgctactatttattaagtcatagacttttctggaggacttaaaaattccactaaaaatctgattatgtcttaactgtccagtctatcttggtttatcacaataaacaaaaaaactctacgattacacacagtagatatctctggaggcaattttccaaaatcaacattaaaacttggttggatgcatgagatgcaatccttcacaagaatggaatctgaaatatatttctcaactatttacttaatatccactgaagatatctttatgcaagacaagagtcagccatcagacactgaaatactatatgatagatccatgaagaaattttttctgtagacttatattctttccatggaacctggtagagtagatacagactccaaagggctttttcttccctttcttactcctgttttttccaactcatcttcccaagcagatttcctacagcttcacagcttaatagccttattactggaaactacggaatttctggttactgaagtcttccattcccgacatctttaatggaacttacagcacatttgagtcttggccctgaatcaaacgccagtaaatcaacgattctaattacagatggttgactctttcagtgaggatcggatatatgtaaacatcgggatcgtctggaacctcggatagcacgtttgagcaatataaattatacagacaaacatttcggccggataagcgaagagtaatccttgatacgaacaattaaaaacaaaaatgaagtc

SEQ ID NO: 650803 - DNA, 148 bp, Homo sapiens
ctggcagttaaggaggacctcggagtggacccgagccaggaataacgaatgacccaaggccaaggaagggaggacaaaaaggccccaggagtgggtggaaagtggagtgtgctgggacgttgtgtgcaataaaaaggtttccccccca

SEQ ID NO: 650804 - DNA, 813 bp, Homo sapiens
gcccggcccaggtccacacgtgctcggccgcaggaggcttcagcaccagcgattacgacgttggctgggagagtcctcacaatggctcggggacgtgggcctattcagcgccggtatctgctggggagctgggctcctgtagcctggaggagagccgcagaccggggtgcgcattcctgcgagctgcttcagactggtcgtggactaccaggagcgcgcgctgtgttcctggatgctcatcgcggctatcgagtcccggcgcgtggggctgcactgccgttcgtcatcgctgcgcctcgagttcccggacggccggccgcgccctggccgccctcagtcgtccgcccctttgcgctgcgccgcctcagcgcgggcctcttcgctgcctctgctcacctcggtgtgcctgctgctggttcgccgtgcacttcgccgtggccgatggcccgtacttggcaccaggggacagggcgctggcgcgtgctgtggctcggagccttgggcgcgtgtgtgcttgctggtgcgcgctgatccggtggtcactggttactggtacgcctcgcccatgtgggtgcccggtgtacggccagtggactccgttctcgtgcgtcggcggcgcgcgccgttagctaggcttcgaccatggtggcgctgtgattctccgtagtccgtggcctggtggtctctgctgtcttcctggttatggtcaagggtggccagaggtagggtgtggggcaatggtccgtctttgggaagaattatgcggggtctgccgaggtctggggggttcttgggcctggggtgtcggggtgc

SEQ ID NO: 650805 - DNA, 297 bp, Homo sapiens
ccgggaactagggggacgtgtgaggagcggagtaaaagaggtttcgtgtattgatggtggcgtttttaagtaaacccaacacaaaacaaacaaagcaagtacccatcggtagtcttgacttcaaggtgagcttcaatcattgtctgccttttttggcccagtgcacacttttggtcaggggtacaaatccatgccagggaagttatgtcatccctcttattatttatcatcctagccctaagtcgggcctatgagtgcttacaaaagggataagcctttccgtatggttgcaaaaca

SEQ ID NO: 650806 - DNA, 540 bp, Homo sapiens
gacactgagatcaaagatgacgcagccacaaaggatgattctcctgaaaaaaaacccaagaagatggtggtggaagccgacatagaggacattaaaaaaacgcaacagcgcagtttaatggactggagctttactgaatattttcagccaaaagtcctgcttcaggttcttcaggaggctcaccagcaataccgatgtgttgactcttactaccacacgcaggataactctttacttctggtttttcataatccaatgaatctacagcgtctgcaatgtgaacattggaatattgctcttcactccaacgtcggattcaggaattacttagaacttgttgcaaaatctattgaagactgggtcacacaggaagaagcgaagtaccaggaagccaaaatggctgaggagctcaacaggatcaggattgagttggaactgaaagccactgtcaaaacttctgctagcaaaattcctggccccaaaagatctaaaactaacaaagtatccagcaaaacagagctatcagaccaagaaaaagat

SEQ ID NO: 650807 - DNA, 528 bp, Homo sapiens
gtagtaataacagtactgagttaacaaagagttccagaacaacaggtatgagcgaatgattgacaagggtgaaggcgtctctgatggtcgtatgacaaaccggggcaaagatgctgtgtttagtagtgggtcatgttatctctgatttgaaataccttgcacagtgagtggcataataaatgatcaatcaatgtgtgtggaaaaagttgattaagtgaatgacgagttaatgtaagttacattatatagtacagtgatgcaaaaatagtaaaaatatgctgtgttagcaactgacgtacaataaagttgaattcacccgaatatctaagtcttaaaagataaatgcaagtagctggtagctgatttaggcaccagtaacagaagtgaacacctaaaaagtaaatgctatcacaggtaggaacatgtgagtgaccctgattacttgtcagtaggaaaagatgtggagtgcaggcatattctctttctactttggatcagcaatcagattcactcacagatcatcgattc

SEQ ID NO: 650808 - DNA, 298 bp, Homo sapiens
  misc_feature (148)..(148): n is a, c, g, or t
  misc_feature (167)..(167): n is a, c, g, or t
  misc_feature (185)..(185): n is a, c, g, or t
  misc_feature (187)..(187): n is a, c, g, or t
agcggtatgttctagaagctgcttcatccatccccatgactatcttagtctcggcttccatcatctttttctctctttccagtatctcatcgttttatgttattacttttgtgcattagtctaaactgtgtacaagtatttatgtgtnttccttaaaggcaattaanaaagtgacaatctctttntngtttttttttttgagatggagttttgctctgttgcccaggctagagttcagtgagctgtgatcacaccactgcactccagcctgggtggcagagtgagacctgtctctaat

SEQ ID NO: 650809 - DNA, 458 bp, Homo sapiens
  misc_feature (13)..(13): n is a, c, g, or t
  misc_feature (90)..(90): n is a, c, g, or t
  misc_feature (151)..(151): n is a, c, g, or t
  misc_feature (211)..(211): n is a, c, g, or t
  misc_feature (351)..(351): n is a, c, g, or t
tgagaggaacgtngagtgaaaaggagaagtcccttctggcccccatcccagactctcccgcctgtgggtggatgtgcacacctaccatanggacacacgaaaacacacggttctgcctccctgggtggtctgtgtgcttttaaaatccctnacgtattgttccgcagcttgctttttctcacttcacaatatgtcttggaaattttccatngacgcgtgtactgatctgtttcactggattttgctgttgttgccaacactctcaagaaattttattgaaaacggtgacacacagaaacaccagattctcattttaaagtaaaactgacagcatttttcagaacttccatngttctgaaccatttgtgtcactatctttcaaagcaaaacaaaacaccgagtcccagatcccaacgagcagaggtggccctctgagagccacggggagaggctccggg

SEQ ID NO: 650810 - DNA, 702 bp, Homo sapiens
aaaggcgtccatctccagtcaggaagccccggtgattcatcagtaggtgatcccgcatggaagggtccattagttccaatgaaagtcttaaacgtctaattctcaggagggtatcctctaataacaagcaaagtgccctctggagcctcatcgctggtatcccagtgcctggacagagtgggactcgccgcagcgcatacgcgtggctcagactcgatctcaacacgcagccagtcatcgagcctctgggcccttcctctgggtcctgatacacagctggcagctagggcctctgaagaggttacagtgagctcaagggagtgtcgaggtagcggcagcacggcggtactgaagggacagatgagggatccctagtaatcagctcgtgcacgcacttgactagcagttcgaaagcaaaaacagattcggatcacaagtgacttttcccttgcaaatggaagactgtatttaaatgcacattgctttagctggccagtctccagtaaggagctgattgttagtagagccattgttatgcaaataattttgcctgcagttcatactcttatgctattttctcccatgtaggagaaatagagatgatacctttcctgactgtagtcaagactcagggtcatgtatgattccacaagcaagaattccatggtcttggttcatgtattacagacaggtacatccgag

SEQ ID NO: 650811 - DNA, 676 bp, Homo sapiens
  misc_feature (221)..(221): n is a, c, g, or t
  misc_feature (347)..(348): n is a, c, g, or t
  misc_feature (351)..(351): n is a, c, g, or t
  misc_feature (353)..(353): n is a, c, g, or t
  misc_feature (358)..(359): n is a, c, g, or t
  misc_feature (362)..(363): n is a, c, g, or t
  misc_feature (368)..(368): n is a, c, g, or t
  misc_feature (394)..(395): n is a, c, g, or t
  misc_feature (399)..(399): n is a, c, g, or t
  misc_feature (408)..(408): n is a, c, g, or t
  misc_feature (419)..(420): n is a, c, g, or t
  misc_feature (423)..(423): n is a, c, g, or t
  misc_feature (425)..(425): n is a, c, g, or t
  misc_feature (430)..(431): n is a, c, g, or t
  misc_feature (435)..(435): n is a, c, g, or t
  misc_feature (440)..(440): n is a, c, g, or t
  misc_feature (444)..(444): n is a, c, g, or t
gcacgaggtgaattaccaccgattaaggaaggctgtataaccgaacaggtacgcgagttctatggacttgaatcaaagaaagggaaaaagggccagcatgttggatgctgtggctccaggacagacctgtctgctgacacagtggaactgatagaaagaatggacagattggctgaaaatcaggcgacagcttccatgtcgatcgttgcgttaccgtctancttccaggagagcaatagcagtgacaggtacagaaagtattgcagcagtgatgaggacagcaacacgtgcattcatggtagtgctaatgccagtactaacgtcaggactaatgctactaccactgnnagnancaacnncannactantgctactaccactgaaagtaccaacnncagnactagtgcnactaccactgnnagnancaacnncagnactantgcnactaccactgccagcatcaacgtcaggactagtgctactaccactaaaagtatcaactctagcactaatgctactaccactgaaagtaccaactccaacactaatgctactaccactgaaagaccaactccagcactaatgctactaccactgaaagtaccaactccaacactagtgctactaccaccgaaagtaccaactccaacactagtgctactaccaccgaaagtac

SEQ ID NO: 650812 - DNA, 420 bp, Homo sapiens
  misc_feature (225)..(225): n is a, c, g, or t
tcaagaatttgaagtaacttgtaaggaaaaataatataaagataccattggggcagtggctcacacctgtaatctcagcactttgggaggctgaggtggaaggatcacttgaagccagagtttgagaccagcctgtgcaacacggcaagaccccgtctctacaaaaacttaaaaaattagctggctgtggtgttgctcacccatagttccagctactcgggaagntgaggcagtaagatccctcgcgcgcaggaggccgatgctgcacgggactgtgattgttccactgcagtccagcctgggtgacagagaaaagaaaaagaaaaccttacataaattggctagagcataatacgattgattttatggtttttgactatttgagttgcactcaaaggacatttcagaagtgcgaattca

SEQ ID NO: 650813 - DNA, 365 bp, Homo sapiens
tcaaattgccatgtggtccagccttgaagtacgctctcagatttatctgtaactctaagtaaatgttctaatgtatgtgcacgccatagtcaagattcctttaaagcctatataaagcattcttgaattccctgtcaatgcaaaatgtgaatgttcctcattattaagacctcaaaaaataaggtccagtatagtataacctgtgtttttgtgtgcctataaaaccaatgtgttagacactttctacctatatttctctatccaaaaagcacttactgtcaacacccagagccaaatcacaaaagacgccccagcacagtggcgtcctctgtgtgcagaggctctcgtgccatattcgtacagcc

SEQ ID NO: 650814 - DNA, 410 bp, Homo sapiens
  misc_feature (22)..(22): n is a, c, g, or t
  misc_feature (59)..(59): n is a, c, g, or t
  misc_feature (410)..(410): n is a, c, g, or t
tgggccaccatgcccggctaanctttgtatttttagtagagatggggtttcacccatantgggccaggctggtctcgaactccctgacctcatgatctgcccacctcggccttacaaagtgctaggattataggggtgaggccactgtgcccagtgctgctcctttttttttgcaacatgcggattaccatacctttcctcttttcacctttagcccactttttccctttaaatactgaagccctcagcatcatctctggagaaaaggcacagaccagactgtttctgggattccctatttagttcttccaggcatgtccttaaccttggcaaaattaacttctaaattgttttagacctgtgtcagataatttttggtgtacagtatgtggtcactttcccccaagatn

SEQ ID NO: 650815 - DNA, 654 bp, Homo sapiens
ggtggggctaccaaggactccgcccccccgtctgggcgccgccctgcccccggggaaacgtgtctgtccaaccatcaccgcccaactgaggtgggtgtcctggttggccaaagacccggtccaggttttaccgtgaatgggctgacaccttgggggcccagaaaatagttccggtgatcccggactcactgctgccaggatggggaatttacgcctggatcttcgtacccagagccacccggtggggccccccaccctccaaagtcacctgtcacccagactgaccagacgctagtcctctgatgggccaaaaaggtgtcccccgtggtttgatcaaccagatatgttatgaaatggcctccccaccttcggcgttctcccagatactgacctcgtctgtccccttccccttctacccgctcccccaccagcatttgcaccccctttctctccccaatacaccaccaccaacccttttattttttgggcccttaccccctaccccctattgctgcccaaaccccctgggctgggggcccgggctggatggaccagacccctcccccctacccctatccctcccctgtgtggttggaaaaccttttgttttttggggttttttttttcctgaataaaaaagattcttctaaccca

SEQ ID NO: 650816 - DNA, 559 bp, Homo sapiens
atcagctcggcccccttagatactcaggctctgcgaaggacacaatagtaagactagatccaggattgtccagcagcacattacaataacaggcacatatatccaccccagagagcaagcaagacaattaactggggcctaaaaaggaaataccaaaaaaaaaaattttttttttttaagatggactcgctctgtcgcccaggctggaatgcagtggcatgatcatagtagcctcaacctcccaggctcatgcaaccctcgcatctacgctgggaccacaggtatgtgccatcacactagactatattttttaaatttttgtagagatagggtcttcctatattgcccaggctgatctcaaactcctgggctcaagcattcctcccagaatgttgggattacaggcatgagccactgcaccctgccttgaactgttgaactgtagtttatagtttagataaacaaaagaatggaacagcataaatacagagccaaggatggacagaagggacatgccctaatgcaacttgagaagggaactgtgagaatggagttagta

SEQ ID NO: 650817 - DNA, 277 bp, Homo sapiens
  misc_feature (204)..(204): n is a, c, g, or t
  misc_feature (248)..(248): n is a, c, g, or t
tctctacgatgacaactctcttccaaatgtatagacacaacactgatgttattaataggatatggatcatacacaaagaagcactgaatcccatgatagcaaatcctatgctgatgcatggaagtcttctggaattcttttctatcaggtatagtgcatcttttaaccagccgaatggagtcctttacaaactgccgacttggntcaacaaactgcattacctgatccatgactgcctacccaaccgncacctaaaatgccagggacacgtagcact

SEQ ID NO: 650818 - DNA, 980 bp, Homo sapiens
  misc_feature (4)..(4): n is a, c, g, or t
  misc_feature (66)..(66): n is a, c, g, or t
  misc_feature (68)..(68): n is a, c, g, or t
  misc_feature (78)..(78): n is a, c, g, or t
  misc_feature (418)..(418): n is a, c, g, or t
  misc_feature (518)..(518): n is a, c, g, or t
  misc_feature (525)..(525): n is a, c, g, or t
  misc_feature (586)..(586): n is a, c, g, or t
  misc_feature (591)..(591): n is a, c, g, or t
  misc_feature (611)..(611): n is a, c, g, or t
  misc_feature (788)..(788): n is a, c, g, or t
  misc_feature (792)..(792): n is a, c, g, or t
  misc_feature (872)..(872): n is a, c, g, or t
  misc_feature (900)..(900): n is a, c, g, or t
  misc_feature (915)..(915): n is a, c, g, or t
  misc_feature (918)..(918): n is a, c, g, or t
  misc_feature (973)..(973): n is a, c, g, or t
gggngcggctggtccggtccggtgttcccgggttgaccaggtctaggtctggggtttccgcttggncnctgaaccaancagacaaacaaagccagccggggcgcgccgtcctgccccgggcccggcttctctcctgccttcccccgccatggggggccatctcggcccccccctctgcctggtgccctttttcttgggcctcttgtctgggggtgtgaccccccctccctggtctttggcccggcccccggggtcctgctctctggggggggtggggttcttgggcggctccttccggcttctcccggggggccaggccctggggttcgtgtgtccttctggcttctccccgttccctgtgcgggcccgttcctgcggttcttcggggtcctggggccccctgggggctcagggcccnggggctgtcgggggggcggggtgcggggcgttcccctgtccggggccccgcggcttcggggccgggggttcctggccccggtctcccttcttctttgtgngtgttgngttctctttccgctgctatgacggttgcgctctccggggctctgccattcgctcctgcccngtgtntggccggtggtgtgggcggnctgcgatctgtgacaacggagcggggtactgctccaacccgggcatccccattggcacaaggaaggtgggcagccagtaccgccttgaagacagcgtcacctaccactgcagccgggggcttaccctgcgtggctcccagcggcgaacgtgtcaggaaggtggctcttggagcgggncggngccttcctgccaagactccttcatgtacgacacccctccagaggtggccggagctttcctgtcttccctgacagagaccntagaaggggtcgatgctgggggtgggcncggcccagggggacnacnggagcgggagatcgtcctgggcccttcaggctccctggacatcttcctggtgctngatgggt

SEQ ID NO: 650819 - DNA, 942 bp, Homo sapiens
  misc_feature (51)..(51): n is a, c, g, or t
  misc_feature (322)..(322): n is a, c, g, or t
  misc_feature (447)..(447): n is a, c, g, or t
  misc_feature (453)..(453): n is a, c, g, or t
  misc_feature (464)..(464): n is a, c, g, or t
  misc_feature (498)..(498): n is a, c, g, or t
  misc_feature (554)..(554): n is a, c, g, or t
  misc_feature (559)..(560): n is a, c, g, or t
  misc_feature (632)..(632): n is a, c, g, or t
  misc_feature (653)..(653): n is a, c, g, or t
  misc_feature (656)..(657): n is a, c, g, or t
  misc_feature (684)..(684): n is a, c, g, or t
  misc_feature (774)..(774): n is a, c, g, or t
gagttctcttaaacacattttaaaattcagaatgtaaaaattgcgtaaatntactactgaggggagtgcacttatttatttaacttacttatctggtcaaagccccaggaaacctaccaaagctagaattaatgacaactggtgggaaacctagcatttcctctcctgaagaataaatgtataaatgttatttttgatgtttatatataaactctatatcctaatttactaatactcatcagatgtcagcctttgctctccattttgacgttaaaaaacaacaacagatctagagatacctcaaggatatcatttttgattntgtgttacagtacacttgtagccaaaactggaagacaaaaccaatatataatttggctgctgattggcttacttttagatttaaagttactctgcgtatcctgtaatttagttgtaacatagaanatgaanaaacacgtaanaaaagtgaagtacgtgcaaagtgttttgcactgntgaactaagtaactgtgtaaatctgtgcaaaggtacgtatgtttatcttactcttnctatnnaactaaataacattacagcgttccgaatctacgatgggacatagtcagtgcttgaagtgccacttcatcaangtatgcatgcccttatataantanncatctagctttgaaaggccgtatgtgntgaacaggatggcttcaggggtaaaacttatctcttattaaatgcctatccatcattaaagggtattatcaatgggcaaacactgaatanttgatcgattgcaatcttgtagttcgctactatcagacatctggatctttaaaccaagactgcccagcatgttgggaccactggtatgacccttggtgactttggaaagccctactttaaccgcttaggactatccgtaatctaaggaaagaggcttttctaaataaa

SEQ ID NO: 650820 - DNA, 373 bp, Homo sapiens
gccggccccgcttctacaagtatataaatgggtgtcattttattgttctccttctctagatcttagtaagtttacataataaagcatttaacaatttcctactccgcttctgagctatgggttcccattccaggtgcagtatgtgattcaaggctatcacaaaagacgagagtacattgccgctttcctcagtcactttggcacgtaagttctttgtttaaaccatgctgcctgatgaccctactatgagggctccctcaaaaggagatacaggagttcccgttgtggtgcagtggaaatgaatctgactaggaaccatgaggtggcgggttcgatccctggcctcgctcagtgggttaaggatccggcgttg

SEQ ID NO: 650821 - DNA, 550 bp, Homo sapiens
  misc_feature (77)..(78): n is a, c, g, or t
  misc_feature (88)..(88): n is a, c, g, or t
  misc_feature (91)..(91): n is a, c, g, or t
  misc_feature (96)..(96): n is a, c, g, or t
  misc_feature (109)..(109): n is a, c, g, or t
  misc_feature (249)..(249): n is a, c, g, or t
cacgcgcacgcggttcaacaatcctcctgtctcagacttctgagcagctggaactacagacatgtgccaccccaccnngctaattctnttnaattnatttaattttttngtagatacagggtctcactattgttgcccagtgtggtctcagaactccattgggctcagagtgattctccgcgcctcggcctaaccaagggggctagagattacagtgcgtgagtcaaccacgcccaagccctgcatcantttctatttaaataatggtcaaggcacagcaggttctagtggccctgctacccataagtgggaagtgagagatacagtaatcatctaaatcttagccttaatagttaagatttcagaacttggttttctgaactgaataatctgtgggatgtttgtacccagaaattaggattctcattcatctcttttgcttctatttaatatgttggtttctatgcatttttagattctatgaactctctacccctctctcctgtactgtatatctggcttccaagacttgccatatttatcatcagtg

SEQ ID NO: 650822 - DNA, 436 bp, Homo sapiens
  misc_feature (49)..(50): n is a, c, g, or t
  misc_feature (280)..(280): n is a, c, g, or t
  misc_feature (287)..(287): n is a, c, g, or t
gggtgaaagacgggctgcctggattcagcctctggatcttagaccgggnnctacgaatgtaagatgaatttagtggcgcggctgcctccctgaatccgaacggtaatgatggatttatcaacggggattcgccttcagcccagcgagggaggtttactcagcaaatatgtcggcgagcacccacccaaatgcaatcatttgaccccctgcggacgatagctgccgtgccccttcccaccgctggtcctgcttggccagggtcgctgggggccagaacggncccggantgaccagagaggtggcctcacggatcccttggcctctcgccccctcctctgtttcctcctctcagcttgaggctctcctggcaagggggatcgatctggcgtgtaggtttggtggggagggagagggtggtggcggtgcagagcacaag

SEQ ID NO: 650823 - DNA, 359 bp, Homo sapiens
  misc_feature (8)..(8): n is a, c, g, or t
  misc_feature (327)..(327): n is a, c, g, or t
gttttggnggtacatgtgatactttattagatgcatagattgtaatgaccaagtcagagtatttgttgcatcttatcaccttgaatatttaataggagcggttcaggtcctcctctcaagctattttgaaatatacaattcattgctattggcccggcgcggtggctcacgcctgtaatcccagcactttgggaggcccaaggcggcggatcatgaggtcagaagatcgagaccatcctggctaacatggtgaaaccccgtctctactaaaaaatacaaaaaataagccaggtgtggtggcaggtacctgtagtcccagctgctcgngaggctaaggcaggagaatggcgtgaacccgg

SEQ ID NO: 650824 - DNA, 511 bp, Homo sapiens
attgtccaagaaatggaaatgtcacgcgttgcttcggtgttctggagattttggttttaccaccttttgtgacatgctccaactccacccttccactccattatcattttctggatttctttctggtctttatcttccgacacatcattcttcagctggtggctggagggaaattccacagaagcgccacgttcgggctgctttgcagttcactagctcctgccctgaatcagaggttctgatgaggcaagttctatattcccttttcttgattttccaccatcattcttgtcctcttgactattcggttccgttttctcagtggttgctgcgagctcttggggaacagagtttggcttctttatgttgatctcgatgctaccgttgtcttgtttcagctccagtggagacccgtgcactctggccacaccttcaaacatctgggatttggttaaggagtgggcaggtgccaccgtgggacactctctttccttctcctcctctctatgaa

SEQ ID NO: 650825 - DNA, 106 bp, Homo sapiens
aaggcaaaaaaaaatttcccttaacccctaggttaaaggggaggtaaaacctttttttgcattgatgaattttggatttgcttcccttaaaagcatacccccccta

SEQ ID NO: 650826 - DNA, 2282 bp, Homo sapiens
  misc_feature (2223)..(2223): n is a, c, g, or t
gttctttctgttgctcctctcgttcttggtgcgtgcggggcgcttcattggtgtggttggcctgcgcacttgtgttgttctgatcacgttctgttgttgtcctcttcttgtatctgtgtctttggtgcgtcctgtctttttaggcactttcggtgtggctcgctacataacttctggggtgtgactcaccacccgctgatgttgtgctgtgggtgatcacactggggtgttgttgtcgtcaggtctggttagtggtgtgttctatcctctcgctgtggtggtggagctatcacaactgctgtgtgtgttgggtgctgtttatctcttcgtccttggtttgggttgtggtgtgcccaacctgtgctgcgtgccagtcgctgtctgtggtggcggttgtttcgtccgtctgtcctgctcgccgctgtgtgggttttgtggtggtgcgtgttgctgtcgtgtggttttggtggctttggtagtgtggtggtgtgctggggctacgtcgcttctttggtggtgttgatgctgggcgggccgcgcgttccgtggtggtgcgccatgcatactttgtgtttagtcgagcgccgctgtgcttgtggtggtgtggttgtgcgccactacggtgcgttgtgtgtgttgtgtgttgtcttttcgcctacgctgtgcgtatgagtcgggggtttgcttctattctgtggttgtggtggggtctcctgcgatgtgtggtgcgtcgtcggtgggtgttgtgtgcaggcccccgttggtgttgtgtgtggcgcgcccctcgtgagtgggtagtggtgtccatctgggttgtgtgcttctctttcttcgtgtgggtgcgggctcctccgtcttcgttcttttgtgttggtttggtcgtgcggcctcgcgcgtcggccttcctggtggtgagtatcgtcctcgttgtgctctctccttcgtcggttgtggtttgtatcagtcgctgtcgtccctcctcagctagcttggtgtggtttttggttccgcttcttctctttctgctgggtgtggtgggctcgtcgttggctgcttcttctactgtgtgtggttgtggctgtggttgtgtctacccccagcagcagtggggtgggggctgtggctactagtgtcgtgttgtcttgttgtatatcctcccctgggccgtcggcccttcggtgagggttggtggttgtttgtttttcgttgtggtggttgttttgtgggcgttgcggcctcctctctctcgccttggttgggtgtgtcggtctccctgccgccctctcgctggtgttgtggctgctcctccccccctcttcttctggggtagtacgtaggagggcttcgtcagattcgtggtggtgttgcttctcccccccctccactgtggatgtgtgttgtctcgtcattgtttcttcgacctgctcgctgaggtgttgtgtgttgctgctccgtcatcaggagttgtgtggttgctgtgtgcgtggttgtgttccccccctccgcctgtgttggtggtagtgtcgctccccctctgtgtgtgatgattgtgtcgctgctgtagcggttgttgtggggtcctctcccccccctcgtttgggtgtttgttacagcgcgacgtcttcgcctcccctcactgtttatgttggcgctgctctgttgtcgcgcgttgctctactcgggggcttccaccgcgctgtgtgtctctctctctggtctgtgcgtccctcctctgtgttgtgtgggtgggcgcgacccctctgtggggtcctggggtgtctctctgttcctgcccaccactacagtgtggggagtagtgtgtgtgtgtgtctgtctgtgagtagagtgtgtgtgttacatattgtgggagagagtgtgtgtggattgctcgcgcgctgtgtgaatagatgtgtgttgtgtgtgtgtgtgtgtcgtgtgtgtgtgtgtgtgtgtgtgtgatatagtgtgtgtgtaaccacagacacctcgtgtgtgtgttgacccccatgtgtagtatgtgtgtgtgcgagataatataagtgtgtgaactcgcgtctgtgcattgtgtgtgtgtgtgtatataatagtgtcgcccttgtctcccacacctggtgtgtcccacataagatgtatataatatgtataatatgtgtgtgcgtgtataaaataaaagcaaatagggaaatttaattatacggttcgatggcagtaaaccgtcggggnccgatatagagtagtagtgtgttcgcgtgtggacctgttttgtgttgttttgttggttt

SEQ ID NO: 650827 - DNA, 519 bp, Homo sapiens
  misc_feature (456)..(456): n is a, c, g, or t
cctgttattggtcatcagagactcaacttcttcctggtttagtcttgggagagtgtatgtgtcaaggaatttatccatttcttctagattttctagtttatttgcgtagaggtgttgtagtactctctgatggtagtttgtatttctgtgggatcggtggtgatatcccctttattatttttttattgtgtctatttgattcttctctctttttttctttattagtcttgctagcagtctatcaatttggtggatcctttcaaaaaaccagctcctggattcattaattttttgaaaggttctttgtgtctctatttccttcagttctgctctgatttaagttatttcttgccttctgctagcttttgaatgtgtttgctcttgcttttcgccaagtcaatcctaagccaaaagaacaaagctggaggcatcacgctacctgaatctttcctttgngcttcagtttttattaggctttgcctttgtcctgtatagtttcttggatgcttctcttctcta

SEQ ID NO: 650828 - DNA, 365 bp, Homo sapiens
cagagatcgcgccactgcgctccagcctgggagacagcgagactccgtctcaaaaaaaaaaaaattgggttgcaaaccctgtttttctgtacaacctcaggcccaaagctctgttgctcattgaaaggcaatttttttgtaaggctgtttccgttaagttaggacttgtttttccaaaggggacttgcaagacgggagaggaagagggaattgctagttgccagttccccggttcaggattattttggcacatttgaggatggcgctggccttggttggaccaggggttctcatttctgaaaccacaggattagagagcttggagctaaaatgggccctgactccccacagttctaaaaggccag

SEQ ID NO: 650829 - DNA, 809 bp, Homo sapiens
  misc_feature (7)..(7): n is a, c, g, or t
  misc_feature (72)..(72): n is a, c, g, or t
  misc_feature (76)..(77): n is a, c, g, or t
  misc_feature (109)..(109): n is a, c, g, or t
  misc_feature (172)..(172): n is a, c, g, or t
  misc_feature (188)..(188): n is a, c, g, or t
  misc_feature (201)..(201): n is a, c, g, or t
  misc_feature (211)..(211): n is a, c, g, or t
  misc_feature (219)..(219): n is a, c, g, or t
  misc_feature (222)..(222): n is a, c, g, or t
  misc_feature (229)..(229): n is a, c, g, or t
  misc_feature (239)..(239): n is a, c, g, or t
  misc_feature (283)..(283): n is a, c, g, or t
  misc_feature (292)..(292): n is a, c, g, or t
  misc_feature (296)..(296): n is a, c, g, or t
  misc_feature (314)..(314): n is a, c, g, or t
  misc_feature (322)..(322): n is a, c, g, or t
  misc_feature (332)..(332): n is a, c, g, or t
  misc_feature (343)..(343): n is a, c, g, or t
  misc_feature (364)..(364): n is a, c, g, or t
  misc_feature (369)..(369): n is a, c, g, or t
  misc_feature (389)..(389): n is a, c, g, or t
  misc_feature (569)..(569): n is a, c, g, or t
  misc_feature (689)..(689): n is a, c, g, or t
  misc_feature (693)..(693): n is a, c, g, or t
  misc_feature (697)..(697): n is a, c, g, or t
  misc_feature (700)..(700): n is a, c, g, or t
  misc_feature (706)..(706): n is a, c, g, or t
  misc_feature (709)..(709): n is a, c, g, or t
  misc_feature (722)..(722): n is a, c, g, or t
  misc_feature (726)..(726): n is a, c, g, or t
  misc_feature (732)..(732): n is a, c, g, or t
  misc_feature (741)..(741): n is a, c, g, or t
  misc_feature (788)..(788): n is a, c, g, or t
gtaagangcgggtgtaagttatggggtcattaaattgggcgcagttacagttagttgaagatgttacgtttnatgnnttctcagattttccctgggacacacggctctntgggggggcccggcgaaaccactcggaccaggagccatcgtacacggccacatcaggcttgcngcagaggtaggcagcnaaggccacgtggnagggggtgantcccttgnggnacgtggnaatgagaggntgcgagagatccaccttcttggtctggaacagagcacggagctnttctgggcncttntcgaagccatcctcagtnaggaagtncatgaaaggnatgttgacggnaccacggatatggcccgagtncagtnctactgcatccggctccggntcggtgcccaggaaccgcccttgagaccttgaatccaccagctggaacctcttagattcaaggttctccagcacctgctcgtaggtcttgagcagggagcggtgccagtgtggctttgaagacggccggttctgggcgtgagggctcggatgtcaccgggtggccctccttcagccagtnccggaagccaccattgagcactgatacggtgcggtggccaaacacacggaacatccaccagacccggggagcatagaagctgcccaggtgttcaccatcatacaccaccacgtgcgtttngttnctgntgnccaggnggnccacatactcggngaanaggccntcgctgggnagcatcatctcgtagggcgacgccgtgtcccggcactcttctatgtnaaagaaagaggcggccgggta

SEQ ID NO: 650830 - DNA, 422 bp, Homo sapiens
  misc_feature (13)..(14): n is a, c, g, or t
  misc_feature (177)..(177): n is a, c, g, or t
  misc_feature (368)..(368): n is a, c, g, or t
  misc_feature (422)..(422): n is a, c, g, or t
actgttgctcatnntgcaggactggctgcggcactcgcgggaacctggtgtgggccatgcgaatgtactgtacaaccacatcttcacaatgtccagtagccgagttccaccagttgtcacagattggggtggtagccttccaggttgtacctaagtttggagttagacttgaaatgnaagtgctagcacagttgtgttgtgggtttgctacttccatagtttacttgacatggttcagactgaccaagcatagttttcagtgacagtctgtagcagttgaagctgtgaaatgtgctaggggcgagcatttgtcctcgtgtgtggtgactttgagtgtaacagcgtgatctgaccaatagtacacacangacgcaaggtttaactgggtacttgaaacacaggattatgttaaccaaaaatan

SEQ ID NO: 650831 - DNA, 741 bp, Homo sapiens
  misc_feature (28)..(28): n is a, c, g, or t
  misc_feature (33)..(33): n is a, c, g, or t
  misc_feature (42)..(42): n is a, c, g, or t
  misc_feature (44)..(44): n is a, c, g, or t
  misc_feature (68)..(68): n is a, c, g, or t
  misc_feature (71)..(71): n is a, c, g, or t
  misc_feature (74)..(74): n is a, c, g, or t
  misc_feature (88)..(88): n is a, c, g, or t
  misc_feature (90)..(90): n is a, c, g, or t
  misc_feature (99)..(99): n is a, c, g, or t
  misc_feature (101)..(101): n is a, c, g, or t
  misc_feature (112)..(112): n is a, c, g, or t
  misc_feature (129)..(130): n is a, c, g, or t
  misc_feature (550)..(550): n is a, c, g, or t
ctccctaaagggaatttggccctcaagnccaanaattcggcncnagggaccccccacgcctggcccanaanttntatcctaaatttcngngtaaagtananctaaagggttnaagtgtttttttttttnntttttgagacagagtctcactctgcactccagcctgggtaacaagagcgaaactccgcctccaaaaaaaaaaaaaaaaaaaaaaaaaaaaagaaagaaagaaagtgccaggaaggtgattgtagaattattggcttgtgagaatactaaccctgaatgccagtcagctattcacccagtgaaaggaaaggttccggtgggagttgatgtgattaatgaatatatcagggcatgtaatggagttggtggaatcatgcataaggctatgataatggttcaagccacgacagagttaaaagtgggaggtccaattaaaaacttttcaggcaattgttacaattgtgggcaatttggacacacaaaaaaggaacgtaagaacaaatcgaacaaacaggcaagatataatcaaataaaagaaccncctggcttatgtccccaggtgccagaagggtaaacattgggctaatcagtgtcacttcaaatttgacaaaaatggccaaccgttacaaccgcagtcgggaaacaggaagaggggccacctcaggccccgctccaaacgggggcattctcactccagcctgggtaacaagagcgaaactccgcctcaaaaaa

SEQ ID NO: 650832 - DNA, 1523 bp, Homo sapiens
  misc_feature (113)..(113): n is a, c, g, or t
  misc_feature (400)..(400): n is a, c, g, or t
gctgatgctgcctattactcctcttagctatgatgagaccatgctcgcatcctcgcgttgcagatgagttcatcgctctagatcagcaatgatcaagaatgggacctatgcangtgacagccctcaaggagactgcagactcgaaagaggcattacgcacgtagtcgccatacctacccacgggagaataccacgggagtgatgtatatccctcttctcgccaatctatcgacgaataggtatacacttaatgctgatgctaaacctgcaagcgggtggagtgcaaaatcttcagtgactcaggacactaccgacgagttgatgactgcatgtaagcgcctaagtccacttagtatagctcgagttggtaatgatgagttgattcttcacgactacgaantgcgccctcgcccagatcacatacgtctagagactctcagccgtgaagttagatccatgaaactctcaggttggaatcatcaaacaaaataggactacgaaaacagtgagcgtctgaatacagtagtgcgtgcaaatcaccacagagtaatgctgacagtgaacgcctgaaagagcctgtgtgtccattctcagtcatgacacccacacacgtggatgacttattagtccctcttagagaacactctcttcgacagggatttaaaacaatccaatcgaaagaacttgtgtcgaatcaagcaatgggacgttagctggaggcccaacaagtactatcatgaaaccctacggaatgggacgcttcgcgacacggcatgcgaatatctaggtagttcgctccttctgtatagatcgcggaggctcctcatagtgttgtcctggataaaaatcgcgaagtaaagaacccccccctagaatcttccaatacgctatctcatcctaagctcgttcttttggcggatcaaagcgccttatggtatttacccgggtcatattgcgataaccaccgtcggacaattaccctttgactgaaacgggggatatagcaaacaagattacagcccgcagaggtccacccacacgggtacaacaggaccggatacagagtacaaagagggatggtacgtcgccccacaggaagggggggggtcccacggacatacgtggggcctcaacgggtatgtgacctaagcggcctcgggaacaagaggctcacgggataaggcccgcgtattactgcaaaaccgtataaaggggggaatccgaacaccgggttgagcaattctcacgcagataggatcgtaaggaacaggttccaaacgatggcgttcacgctttggagactatgtggcccctgtaaagcggcgtgttataggcatcggggctcggttgaccaccattgcgtccccagggtatatctttacaatcggggcaattttaagcgtgaggaaaaccactacttcgcgttacatatgtagcaggtgagacacaaagagtcgttaaccatgtgccaaggtgttcctgggagcagaggtgccacttcggagtgaacactaccatagata

SEQ ID NO: 650833 - DNA, 130 bp, Homo sapiens
aaaattgtgccactgcactccagcctgggcaatatagtgagactcaatctcaaaaaaaaaataagtttggctttgaagaagaggacatctaagtcattattttctagtcggtaaaagtagctgagacgtc

SEQ ID NO: 650834 - DNA, 176 bp, Homo sapiens
gacagacagtcggggggaaaaaatcaaaacccacattaaaaaaaaagttaacagtggtctggggccacagcagaacccaaatgaacatattcgtataattggaaaaattctaggtgcttcataattggaccgtttggatacaaaatggacctaattaaatttggcaatttggtaat

SEQ ID NO: 650835 - DNA, 906 bp, Homo sapiens
ggactgacggtgacggggcggagaggctgtgcgctgagctgcgtaagatgaatgccatgagtgactttgggatctagagtcttaagacggacgagtgattccagtctcactggaacttttcagcgaagttggagccttttgagaagtcatgatcttcttcggcaaaggtttggtacttgtgtgactatatgaacttttggctagatcatccccttgcacattatcacgatcacaaatttcctatggctcatgcctaagataatatctgagattgttccacgctgcagaatagcgattcggggtctatttgctccgactagagaattacagatggaactgacatgggcagtgcagtcacggtgtgcaagtcgttctttgccacttctctttgacacttgctgcacaatgctttttcaggttggatagtttatcgaaggggtacatcgattgaagatcgagtgtcggtattcgagactgagatgatatcttcaatgagtccaattcggcagaaagccgaaacgttcctggtgcagacgcccacactttagacttgcgtcgtgaccttatctacactcgggcttatacttcgtccatcatgtggtcgcattgttccacttgggaataccctggaggtggcgctggtttctttgggtcgtcattctgtcccatctgttctgtccctggtccactttccaggattggtaacaaccataaccattttcaaagagaagttacctcgactcactccttgaaggatattttcctggcttcctaagttatgttcatccacgattgatccagtgtttagatgacatcatctgggagggggggttctatcgggttttcacaaagtcattggttgaacaaatttaaaataacgcccttagaacggggcaggaatccctg

SEQ ID NO: 650836 - DNA, 346 bp, Homo sapiens
gagatggagtttcactcttttgcccaggctggagtgaagtggtttgatcttggctcactgcaacctccgcctcctgggttcaagcgattctcctgcctcagcctcctgagtagctgggattacaggcgcgtgccaccatgcctggctatttttttttttttttttgtatttttagtagagacggggtttcaccatgttggtcaggctggtctggaactcttgacctcaggtgatccacccacctcggcctcccaaagtgctaggactccttggaaacattctgtgttgagtgtgaagatggctacatgactgtttgtccaaattcacagaatagtacatacatacc

SEQ ID NO: 650837 - DNA, 434 bp, Homo sapiens
cttgaatctgagaatctagaaatcctagaatctgccggtacatctgaatactttggacgtatccagatgatgctcacaagaaatcctactggagcatatcagatttcggattactggctctgggactggtacgtataatgcaacttgtacgtgtagtgcaaatatcattttcaaaaaccctgaaatatgaaacacttctggtcccacgcatttaggataagggctactctgtactaataactacaacaacttacctctatggctatgggccgttcctaacctcaattaacaacagttacagtgtctcctactatggtcccctacgaacaagctaccacagaacacatgcccttttccaacaaaacacgtctcattacgatggcatggtattatagttcgatagatttgttagtaccaatcctatatgtgtgtta

SEQ ID NO: 650838 - DNA, 311 bp, Homo sapiens
cctggacgtatggtcattagctttgggaatagaagagctacacagaagcacactgtctttgaacttgacaacagctctccctttaccctggacttcaacccaagctccgtctttggtctcggtggataaacacacagtgtggagatcccacgtactgcatgatagggatgatcttaggacagcctccctccatgctttcagagttaggagtgagaatgatccatgcactatgtaggtgatggagggagagtgtattgctaacccttccaggactagtgcagcgctcacatttggcgggtctgcatgagtga

SEQ ID NO: 650839 - DNA, 841 bp, Homo sapiens
ggatctcagactgctgtgctagcaatcagcgagactccctgggcgtaggaccctccaagccagatgccggatataatctcttggtgcgccgttttttaagcccatctgaaaagcgcagtattcgtgtgggagtgacccgattttccaggtgtcgtccctcacccctttcttgtgactcagaaagggaactccctgaccccttgcgcttcccaagtgaggcaatgcctcgccctgcttttggtcgtgcacggtgcgcacacccatgacctgcgctcactgtctggcactccctagtgagatgaacccggtaactcagatggaaatgcagaaatcacccgtcttctgcgtcgctcaacgctgggagctgtagactgagctgttcccattcggccatcttggttcctccgaaatccaatttgtgaaataaattatactgtggtaacatgtgtgtcaaacagataacagctacagagaaaatttatgaaaggagagtcaatagttgtagaaaatttgggggttaattttacgaaattatgacagcaactcaaacttagaagcaacaagctggatcagtccaggagaattttaacattgggattctggcattaagaagagctaatcaaggaaatcattctggctgggtaatcttataagaaattcggaattaatgaaggcgaataggagaagttgggactggggagcagaaggttggcagggaggataaatgtgcccagattgaagggtggactaaaggcgatccccggataaataaactccttagaaaagagctgtttcaaagcgtggaacctgtaaagagcgtgatgagcaaccctttgttcgg

SEQ ID NO: 650840 - DNA, 733 bp, Homo sapiens
cttccatcaggagcttagttatggcaggattccttgtagggctcatagcagtacagagaggtaagtcttgcctcagagggcctgtatcttgcggtagtttttaaatagggcatagtgtataggtatagaggacatttgtttgcacatagtttgttgccccgaatgggttttttacccagccttttttctttcagtatttaccagtccggagcaccagattctcttcttttccaaaaaccaaagtaattcgctttactttaccaaccactaaatctgggctcttgaatttccccgtgcattggactgattggattgttgggagttagaggctgttcccaccatccttagtttgggagagtggctccttctgcttgttttctaagcgtaccagtcaacgggtgccctattgtggtatttaacatagttaggatgattgttcccaatagctgagttgttttatattctagaagtgaaatagttcaccttaagtaataattcttctctcagactgactttaaaaaccaagtgtttatcattttccattgtatttgtatttattacagagtgttttagctttgatattctttgtattttcattcatttgttacatgagctttatcagtaacatctgtataaatggtttttaaaaattaactatgtatgtgcccatgccgaagtcgagccatataaatccatgctgtttgcactgtcacagcatcaacgttttttaaga

SEQ ID NO: 650841 - DNA, 545 bp, Homo sapiens
ggataacggaataccagcgcgtacgtcatgtatgggacacagcagcaattatgtggagggagtctgcatgcaagaaatagttgaaggttgtaccggagcccttcacatcctagctcgggatgttcacaaccgaattgttatcagaggactaaataccattccattgtttgtgcagctgctttattctcccattggaaacatcccaagagtagctgcaggggtcctctgtgaacttgctcaggacaaggaagctgcagaagctattggaagcttgagggagccacaggtcctctgacagagttacttcactctaggaatgaagggtgtggcgacatatgcagctgctgtttggttccgaatgtctgaggacaagccacaagattacaagaaacggctttcagtttgagctgaccagctctctcttcagaacagagccaatggcttggaatgagactgctgatcttggacttgatattggtgcccagggagaccccttgatatcgccaggatgatctagctatcgttctttcacgctggtgtatccg

SEQ ID NO: 650842 - DNA, 255 bp, Homo sapiens
gggttcggtgacctgttcggcaatctctatggggctagcggggcacgtcgcacagcgtcccggtcgccacgtcggggagctgacgttgagggggagacgacgatttccttcgacgatgccgtgtctgggaccaccgtcactatggacatggtctctcaggcaccctgccaggcatgtcgggggactggagctcgggctggtaccgttccgcgagtgtcgacgcggccgcgaatttagtagtagtaggcggccgct

SEQ ID NO: 650843 - DNA, 1086 bp, Homo sapiens
ccagcccggattgccacatggctaagtgacaagaaccattggggtgatgagatgattaccttcaacaccttcttcagtgagcacgggcgctgtcaaaactcggtgccccgggctgtgttatgtatacgtatggaacacccacagtcgattgacttgacaacgattcgcactggcaccttaccgtcatcatctctccaccctgcaacgtcaatgcatcattcgacaggcaatgaagatgctgacaataactatgcccgagggtattacaacattggcaagggagataattgaccttgctgtaggagcgaaattccgcaagcctggctgaccacgtggccaccagttctctcaggcgcttctatggctatatccatccacgcgttttgcgtgtcggaacctgcctactggggttcacttccctgatcatgcaacgtcactcaaataattatggactagaaatccgaacactgtatggtgctacatttacccggagacactcaggtttcgccacaagatgttaagataaggccctacaaattgcccatcctacatgcattccgagcacgcatccctgggagtcactcctgattgtgtccttgcatggtaagatcagattgaactgggcatcgtatgaactctctgttcggggataaaaagtcttagcagatacgaagccggcccaagctaacgatctaagcaatgatccggcttaattagccagattgtgtcctccatcactgttccctgaaattgatggaggccctgaagtgttgacctgaacagaatactgagacatacttggtgcctaaccccgattcaatttcctcaggcacgtatgccctgtcctcttgctgggaaagccgacattgagaggttctgtgacaagataacaatggtggtttgaccagcaacacaatgggaatatgaccttcacaggaaagaataggaggagcagtgaccgggagaggacaaagaaggatgggcgacagagcgataaagcgagacaatggtggccccgacgagaggaaaaagcactgggagggaaagaagagcagtataaaccaatggtaccgacaaaagaagaat

SEQ ID NO: 650844 - DNA, 162 bp, Homo sapiens
aactttggtagggagacgggtatgttaacgccataccagttctcagccaggcacggtgcctcacacctgtaatcccagccctttgggaggccgaggtgggtggatcacaaggtcaggagttcctgaccagcctggccaacgtggtgaaagcccatctctact

SEQ ID NO: 650845 - DNA, 139 bp, Homo sapiens
ctccctactctttatcactgttattcccatcgacttcgtgatttacatagtttcacgtgagcacattttcatctttcttgaattctttagacttattcatcaaattcaactgtcatttctcatcttcgtttctctttat

SEQ ID NO: 650846 - DNA, 652 bp, Homo sapiens
agcactctggaaacacgttgtgtgggaggcagggcatttagtactgagtttctgtatgcctgggtggtacagagcattaacctctaacatcttaaacatctcaatttaaattttctcctttctgaaagataaccacctgctgttccatctgtttaatacatcagtaaaaataatgataaatttacaaaacaactgacacaaatgtcaagtcttgttatcgttgtgaaactgttctgactgtgttgccaatttgcaaagctactgagtgtggtggcccgacacagtgaagttctgggaagtgacctcctggtgcatcactttgacactgagaggcttttcacggggctgtttatcattgaacctgtgcagcagacttgtttcagagaattgtatcacaccccttgagcatccttccacagttccttcgaccccctggggtgtttgagggactagaggtaagatcctcgttttgagcactcggtttgagctgccaaaatgtgttgagctacctgcaaccaattctgagtgacattccgagcaccatctctcgtttagttgccctttactttctactctcggactgaaaacttccaggtagtcctcccaccacaaacgtgggatccgtgcacgttaacgatacagcagaaaaaaa

SEQ ID NO: 650847 - DNA, 185 bp, Homo sapiens
gaacttcccgaacgtgacgtgaccgaaggtgccttcggtgaaggtcttgccgccgtgtgactcgaacggcagacagaacgggagcaccgtgctcttcatcgacgcggcgtaggacgcgtcgttcgcatccgccttgaacgccggggcgatcggcgcgtacgaggtcgagatggcctcgctgctcc

SEQ ID NO: 650848 - DNA, 263 bp, Homo sapiens
  misc_feature (110)..(110): n is a, c, g, or t
  misc_feature (137)..(137): n is a, c, g, or t
  misc_feature (152)..(152): n is a, c, g, or t
  misc_feature (176)..(176): n is a, c, g, or t
  misc_feature (233)..(233): n is a, c, g, or t
gagattgcgccactgcattccagcctgggctacagagcgacactccgtctcaaaaataaataaataaaaataaaacaatacctttaaattatgtgcatgtattctagtcntctggtttctgaagactgtaatgccanccttggtaaagctgnacagtctagttagattatttctanggtcttcatttctacattatgtttattacctacatttgcatttatcaatgtagtggnaatatcttttaaataaatcaaacttaactg

SEQ ID NO: 650849 - DNA, 449 bp, Homo sapiens
gttgagagagtctacgggccgtggcatcatctgcatcagcactgaactatcctgctactgcagggaggaagctccttactttgcatatgtggtagtcctctgctcgccgccgtaactcttgcgccgcgttgaaacattttcctatggattacaaccactttcatcatatatagcaccacttgcaggatgattttaattaatctgccatgtttctgtaatcctcacaactgtacccttactcaatctatctctccctagaaaacgtattcccgatggctagaagagtacagtctgagccggtcacggtggctgacgcctgtaatcccagcactctgggagggcggggcggatggctcacgaggtcaggaaattgagaccattgtggctaatatggtgaaaccccttctctactaaaaatacaccaaatcagccgggcgcggtggcgcgtg

SEQ ID NO: 650850 - DNA, 1160 bp, Homo sapiens
  misc_feature (218)..(218): n is a, c, g, or t
  misc_feature (767)..(767): n is a, c, g, or t
gctaggtgaggctgggttgatcggcgaggccacagcctcagctcgaatgtgacagttggccagtgagaagtcagagatgcagcgtcactatgtgatgtagctaccgagcatgtcctacggcttgaacatcgagatgcacaaataggcagagatcggcaaaaggctgaacgggattgtgcccaggtcctgccctacctctcccaagagcaccagcagcnggtcttgggagccattgagagggccaagcaggtcaccgctcccgagctgaactctatcatccgacagcagctccaagcccaccagctgtcccagctgcaggctcgctggctccgtgtcctctttgcactcgcctagtacccgtggggctgcagccggccttcgactgccggcggtcagcgacgaggcactcgggcatccttctcgtctgtccgctgctgggttccccaggtcgcacctctccaaggtaagacaagaacgggcatgatggtgacacccaccaggaggatgatggcgagaagtcggattagcagggggccgggacggggaggttgggaggggggacagaggggagacagaggcacggagagaaaggaatgtttagcacaagacacagcggagctcgggattggctaaactcccatagtatttatggtggccgccgcggggccccagccagcttgcaggccacctctagctttcttcctaccccattcccggcttccctcctcctcccctgcagcctggttaggtggatacctgccctgacntgtgaggcaagctaaggcctggagggtcagatgggagaccaggtcccaagggagcaagacctcgcgaagcgcagcagcccggcccttcccccgttttgaacatgtgtaaccgacagtctgcctgggccacagccctctcaccctggtcagctggcatgcacggcaattgctagcatgccccattctcccgtcctgggcacccacgagtcatcccccgaccaccggctcccacggtatgctcccacctccagcctgccccactcagccacctgctgcagattccgagacaccatccactgcgccacctggatcgatctccgcatcgcccacagaaacgggggggcacgagggacgagcttagctgagaatagccacgagcggtagaggtgcgaa

SEQ ID NO: 650851 - DNA, 199 bp, Homo sapiens
ctatcgtgtgaccgcgtggtggcacgaaattgacaaccctgggatagtatagcaagttaactttcgttcattgctaaaggttaatcactgctgtttcccgtgagggtgtggctaggctaagcgtattgagctgcattgttttgtgcttgatgcttgtccttttgatcgtggtgatttagagggtgaccacgacacagtg

SEQ ID NO: 650852 - DNA, 102 bp, Homo sapiens
gatttataaaaccattgtcggtaatcaaaggatgggtgtcattttcccattggccattgtagtctcacttaaaaaacaaacaaaaaggacaaggaaggggaa

SEQ ID NO: 650853 - DNA, 813 bp, Homo sapiens
aggtgaatgactggcaggaggactgggtcgtgtcttatgcccggcagcgcattcagccccagatggacatggtggcgaaggagtctggggacagggcattgccctccatgctttggtctgctctgcagttaacagatcccatgagctgtttccgtgacctggtagatcatcctcagcctttactccactggggacctcatggggtggaaacatagcagaggattcctctgggccggctgatttttgacccagcttctttctacggtcactcggtaatatgagctggcaatacgctggcatgtctgggggctttagccagctccttttactccagctaccacggtaaaagtccccaaggacccaggattcgacgaagcgccttcaggttgtatcagctctttcacgtacttgaaccactggaatcatgttggatcggggctacagaggatcctccctgaacatcatgaggaatctggtcaaggtgagcgtggccttactctggaaaggaggcctcagaggttactccacagtcctcttctgggcaaattcttgtttcttcaccaatgcccggactaagcattacgacctaatgcgcagcagcttatatccaaggccttgcaaaggtatataaactatctacgcaggaaacggcttcacgatcatacccaaacgtagtccactatatgtggggctttgtacggtagaacggaaccatcacatacattgcaaggactgagcagaagggatgtatgacgatagtgctgactctgaccctcacatgcctgctgaaacgcgggtacctgtcatggaccc

SEQ ID NO: 650854 - DNA, 236 bp, Homo sapiens
gtatgaataggatacagtccgctctgggacagttatctacggccagaaagagtaccgctgctatcatgaggctctgagtgagctgttcactgcgcataaagcacgagttgcgagctatcagtgactatgccagtaccttggcgaggatctatctcagacgcgtgaggactcccccagccatacagctgacatacctgacctacaggcagacgagtggggcctatctctagcttggt

SEQ ID NO: 650855 - DNA, 207 bp, Homo sapiens
  misc_feature (82)..(82): n is a, c, g, or t
tctaatcgacggtttctccaaagtgacaaacaatggttccatcactgtgccaacatattttctatttttcaactataattgngcgaacactaaacttctcccagtctgaaaatcttgaaacaacaatattcaatgggtgactagggtatacctcatatgtctgggcttcccaattctccaattccctaggtttcaagttcatgaact

SEQ ID NO: 650856 - DNA, 299 bp, Homo sapiens
ccacggggttttttggggattttttttagacccccccccccctctgcgcccctttggggggtgtgggggggccgggggccccgtttttaaaaccggaccttggttgggtccccgcccggccccccggaaccccccccccccctgttttccccccctttgcctcccccggccccccccccccctctggcctcccccctcgcccccggggcgggtccccctttccccctgttcccccgggggccccttgggcccctttttcccgctgtttgggggtctctcttttgggcctgcccgcgggg

SEQ ID NO: 650857 - DNA, 256 bp, Homo sapiens
accgtgtagaccgcctcagcttccagatgggtcattcagcgacgagtactggtgtccctcttctggagaatatgggacagataggtcccataccaactgtgctttcttagatctgccatcataggaaccagactttaacaaccagcagcagagctacacagcattgaggctttctttttcccttttcaggcttctggctgtaatgagtcggagatccctgatgaagtgcagctgcattggggtttgctcagttgca

SEQ ID NO: 650858 - DNA, 115 bp, Homo sapiens
agtcctcgtgctccatgggcattctctcaggcaaaagaaaacttatcacttcgtgaagaggaccggtcccctgccacagcgaggtcgcaagtcagccacagtaaaaccgtggtgc

SEQ ID NO: 650859 - DNA, 111 bp, Homo sapiens
gcgcgtaccatgaaaagaacaaacaaccctatgtgtcatgcttaatggactgaagaagatgtataaaatcaacatgatgctaccttcacaccttgaatcatgtacgatagt

SEQ ID NO: 650860 - DNA, 425 bp, Homo sapiens
  misc_feature (302)..(302): n is a, c, g, or t
tagaagtcaccaactgcttttcggtgccacacaatgagtcagaagatgaagtggctgttgacatggaatttgctaagaatatgtatgaattacataaaaaagtctccccaaatgagctcatcctaggctggtatgccacaggcatgacatcacagaacactcagtgctgatccatgagtactacagcagggaggccccgaaccccattcacctcacggtggacacaggtctccagcatgggcgcatgagcatcaaggcctatgtcagcactttaatgggtgtccctgggaggaccatgggangtgatgttcacacctctcacagtgaagtacgcgtattatgacacttgaacgcattggagtttgacctcatcatgaagacgtgttttagccccaaccgggtgattggactctcaagtgacttac

SEQ ID NO: 650861 - DNA, 1058 bp, Homo sapiens
  misc_feature (139)..(139): n is a, c, g, or t
  misc_feature (375)..(375): n is a, c, g, or t
  misc_feature (402)..(402): n is a, c, g, or t
  misc_feature (599)..(599): n is a, c, g, or t
  misc_feature (662)..(662): n is a, c, g, or t
  misc_feature (674)..(674): n is a, c, g, or t
  misc_feature (677)..(677): n is a, c, g, or t
  misc_feature (685)..(685): n is a, c, g, or t
  misc_feature (718)..(718): n is a, c, g, or t
  misc_feature (942)..(942): n is a, c, g, or t
cccgtgctgcaggaattcggcacgagttcttatcggtgtgatgaaaatgttctggaattagaaataatgatgatgtttgtttacataattcgtgaatgtactaaaagctatgtaattgtatattttaaagagtgaattntatggtatgtaaattatctcagtaaaagggttataaaaggagaaataaaaagaatttaaacaatgaacagggtattagagaatagtgaaatagcttcaagaatctaatatgtatgaaactggagagaagagcaggaaagaaaaataatttgaagaaataatggctaaaaatttctcatttgtaatgaaaactataacctccagatccaagtgtctcaaaaattccaaggacaaganacatgagaaaaacaagttagtctgttntctgctgctgtaatagaatgccacagatcgtgtaactttacatagaaaagacgcttatttgtttacagttctggaggctgagacagtcaagagcatggcttttgcatctggtgagtgtaattcatgccagaactgcaaaaggtggaacgtcaagagagcccatatgaatgacggtttgctatattacaaaggcactnctctacaactaccccactccgatgacaacacctttcatgagggtcgagcctgtatgaccaatntacctcctactnggnctcacttncaacactctggcataaggagtccacttaggttncaacacatggattttgtgcaaccttaaacctatgtaccaccaaagctattgtagccaatcggtcaaagtagtgatatggattacttaaaagagccagtaaaaaatctttgtcgggaaattaaaagaagcgtttgcttatgtgacctggcctataaatgcgggggcgaactttttaagattaaaccaagcaaaactgaacctggaattttacccggaaaaggatnttgatatttatccttgataatgagggtctacaaaatttaaaggtcaattttccgtggctcctttattaatttaaggaaactttgcgtaggaaattgcacgaaaatggtgacaaaca

SEQ ID NO: 650862 - DNA, 84 bp, Homo sapiens
ctgaggctccagcacagttccgtcattctcgtacctggggaagccccactctgacctgttattaaagttcacattttgaatgcc

SEQ ID NO: 650863 - DNA, 801 bp, Homo sapiens
ggcgctgcgtagtggagcacatgccgtgtagtgcgctgatgccattctcagatacgtgcgcagggttggtgatcccccccagacacttcgctgagcgagccaatggaagttcagtggagcagaaagagcttcctctgagcctctagcgggagatatgcttccccagcccctgggaacaacacgctagaaagagggccatgttcccgaggtccaactcctgctcctgaggtgtggtgcttcccgggatgaactagagactggagcttcagctagagacaagaaatcttgggacaagctagccaagtccgcccccagaatgggtccctgattatccacgcaggagcattcagaatgccagcggggacttgggtgaaagaaccggctagtgccgcacgtcgtgagttgagtgccttacgctcaaggtggtattgcctggccacagtgagacgcgaaagcctccggtctgattataccaaaagagcgacctgcaaggacagaccccaaggtactggttccccagcagcgttccgcgcagttgggtcctagcaggggccgtttgctgtatgcattcctttagcatcttttgcgtctatggcctctttcctcattcaatgggggacccgtgttccccccccttcttccctttcaccaggtacttttaaaggaaaaattcaccaaggttcgggattttttcctgggaaacgaacatacaaagggctcaaaaaatattccggggggcacttaaaagatcttgggcggtgggaggaaaagagggggtggatacgagaagggggtgcccat

SEQ ID NO: 650864 - DNA, 588 bp, Homo sapiens
  misc_feature (165)..(165): n is a, c, g, or t
  misc_feature (276)..(276): n is a, c, g, or t
  misc_feature (369)..(369): n is a, c, g, or t
  misc_feature (378)..(378): n is a, c, g, or t
  misc_feature (412)..(412): n is a, c, g, or t
taccaaagcgtggacgcggttatcgacaaagatctctctaccggtctgctgggccgctgaaattcacgccgacattcttgtgatcaccaacatggcagtcgaagacagtgtgtattcgagcatttggcgaatagccagcaagcaagcgaggtcgcttcgtattcngggatgtgatagttgcgcgaccaagtggaccacgctaatagtgctagagacagggccagtttcaccgcgcgcgtgacagacaatggttagcgcgaaaaagtcccagtcggncacgaggcgcagtgagagaaatgtagtttcaggcacactgaagggcgggccgagagaagagaaaggtggagtgtatcaacgcgacgactcggnaaattgtcnctggcctgtgcgggtcggcctgtcgtgcggtcgnaagacaggcgcactccatcattgattcaatagacggtaagggagcgtagagcatgcaacacgcaagaggcaatgagcgcgccgcgtgcacatttctttgagcccagcagccggtgaagcatcggtcaacccgccgtctctgcgccttggtattgggatgaccggtcgttgttgccg

SEQ ID NO: 650865 - DNA, 1031 bp, Homo sapiens
ggacgcgtgggtcgagccacgcgtccggggcgcaccattggcatagtcatggactctggagacggggtccacccacacggtgcccatctacgagggctacgcgctcccccaggccaatcctgcgtctggacctgggtggccgggacctgaccgactacctcatgaagatcctcactgacgaggcttacaggctttcagccaccacggccgagcgggaaatcgtgcgcgacatcaaaggagaagctgtagcatacgtcgccctgcgtcctttctgagcagagagatggccctccgctcggatcctcctcttctctgtggagaatgagctacgatgctgcccgatggccaggtcatcaccattggctaagtgaggcggttccggttgtccggaggtcagctgttccagccttccttcctgggatatggaatcttgtagtgcattccacgatgaccaacttccattgtccatcactgaagtgttgacggtggatcaatccgccaaagacccttgtatcgccaactagcggtgctgtcggggcgagtacccaccatagtatccgggcattgccgagcgaggcatgcagaatggagatcgccgcctggcgcccagctccatgagagattcaaggatcatcagtgacccccagagcgcaagtactcagggtgaatcgggtggcctccattctgggcctcatggtccacccttccagaagatgttgggattagccaagccgagaagtacgaggaagttggtcccctgccatcgttcagcgctaatgacttctaagggcctcgagagattggctaccatatgcttggcgggggtcatgtgacattgacatttgcgcgtggacatgcaaatgctttgttatctaggagacgggagatgcctgcaaaaactgtcttcggaagtgtttgcaattgggcgatttgacatgtgcatgacgtgtttgacgcgagaccgtttttgtacaacacaaattaaaaactacaggggacatgagaaaaagttggagaagtagaaaccatag

SEQ ID NO: 650866 - DNA, 380 bp, Homo sapiens
attaatggaactaaactttttaacctctcccttatatttacctccctttggagggatttatcataggtgcccatttttattttagggatggccttctctttttgaaagacttcctaaagtttggggggaatttttaaaacctggggttctaatgattggatttttgctaggccccccctttttaaatataccccatgggtttgatggggcctttagggccgaaataacttaaaccccaataacctttgccaaccttccagctggggtatattcccatggtgtttttttttttggatatatacttttatcccgtagggtgttaaacccgtttggccctgttttgtttcccaactttaaattaactttttaaaagctgggga

SEQ ID NO: 650867 - DNA, 966 bp, Homo sapiens
gcttgcccggagggcctcggcccggggctcattgtgtcgggttgcggtgatgcgaatccacggtttgtcgctgtgatgagggacccgtggtagtgtcaggagaatgaatattggctgcagtaatgaactacatgcagatcgtgggtggtcgacatggctgtgtaagcaacatgagatgtgggcttgtaataggaataggctcttatggagaatcattgagaaaatgtggatgtctaaattgagttgatataagaagcagtctcttcagcagggcacgtccacataaattaggtcgcgacacgagatgtaagtccacaggatggtgtgtaccagtgtacgctgggtctccctgacatgggcccttaccttaccagatattcctgacatctggcttagctagcaggaggacgagcactactacgcctatagatcggacgtgttggagatggtcgccggcgtaggacgagccattttcggaggaccatccaagagaactgttgtgtgccgggactggcgtcgtccgggtacgcgcaatgtcaactactggacggaaaatacgccgcaaggtccatgaacaggacccggagtgacttaccgcccgaaaaagtagaaaggtggtcccagagccagattggccgcatcagggccggggaccaaacccacgtgtgcttgaagccccagtgtagtgccccccagatgttgtcgaaaagggcccggggaagggcccgaaccaaggaaaaccgcagtttatcgtgcacaagaggactgggccaccacacctggcgagcgcagtgaacagtgcctgcgcacatcacccggatggcaaacaactattccttgtgccactccacacacacactactaatccagtgtggcacaccatcactatccgcacgaagcgcgactcaccagctcagctcttacctctacgtttttgactctcccgctctctacctccaccactcc

SEQ ID NO: 650868 - DNA, 522 bp, Homo sapiens
ccaaatgattagtcggctgctcgtgagtgtggatccaccagtggtgaggggtccacagaaaagtatatcttaaatctaagttccatgagcatgtgaaaaatacttttccggtgggtgtcaccggaaccggatgagaatcaggttccagatcaagctagttgtatgggcgtatctgcgcaccatagaaaagtccatcattgtgctagccgtccaaagagatgagggacggtgctctgccaatgtgactcgctattatgtgattccaagatacagaaccggtgatgctgtttcacctagtactgggcgtggaggggaaaagcaagaacttggttagcagggaggatagcaaacgtgggtgtgcaaaaagcttagaaaaagaaaaagaagatgccaaagcttcgctttggcagtagaatccgggaaaattcggaagaagcaattttaaacattcttaatatgtcatcttgtttgtctttatggcttatttgcctttatggttgtatctgaagaatatatgacaga

SEQ ID NO: 650869 - DNA, 737 bp, Homo sapiens
agcggatcgtccagtactccttcctcatgaggcctgctaagtcgtcactctcctagcactggttacaacgagatgtcggagggagtggtagtcagaataaacactctgataaataaaaatgctccaatgatatcttgagatgtcagagcgtgaaaatgtacagatttcactggacgaagaagctgccaagtggtgattgctcaaccatagagcagtggaggaaccaaggaggccaaatgtgtgttggaaaaatcacagatgtcatctgggaatgctcagagcctagggctttcacgctgagacagactcgccttccaccggaacctcagccttttaaggctaaatcaaggacgtgacttcctcaggtgaatcaacctgacactgtaccctgagctcactgggatcctattggcagatcgtcagtcccgtacatggaaagaatgcctccaccaggaggactgggttagtccccatccttgaactggatcataaatagccaccttgtcataaagctgctcccccagcccagcatgtgttctgaagttcaccacggaaggctatctcctcatttgctttggggcccgcaggctgctgtgtaacagctgggtcttcccatgaacgaattagacagtaaatgttccaggatgaagaggggcttcggggaacagaatcttgcgcaattttgacttgcttcatttagacacagtgccatcataaccaaaattaaaaaaaagaag

SEQ ID NO: 650870 - DNA, 155 bp, Homo sapiens
  misc_feature (30)..(30): n is a, c, g, or t
  misc_feature (141)..(141): n is a, c, g, or t
gtttctcccttgctcctgcagacatgaatnaacacagctctcggagccacagcatcttcctcatcaacatcaagcaggagaacatggaaacggagcagaagctcagtgggaagctgtatctggtggacctggcagggagtnagaaggtcagcaag

SEQ ID NO: 650871 - DNA, 103 bp, Homo sapiens
gtcaacccaagagctggcaatctggggcttgtaggccctttacttcctcttcgtggttcttcttcatgaagagcagctcctcactctgtacaggtaggagaga

SEQ ID NO: 650872 - DNA, 133 bp, Homo sapiens
tctaaggatccccagtcatgccaatgatatttcctattcggctacataattcgtccgatccggtcccttacaaacgtaggaggcgtgcttgccttattactagtccatcgctcatcctagcaaagagtcgtgg

SEQ ID NO: 650873 - DNA, 445 bp, Homo sapiens
gtttcccctttttggggaggaaaaagttccccatgtcccacactcctgtgcatgcctaaccttgtcaccccatgccgtcagcaaatagtacacggcaggttaatccaaagagaatagcagttagcatcccatattgccaaacctgttcttaggcgaaagggactttaccaatagggactttactgagaggggcctctaaccccctaaatcttagaaaggactctaaccctcctaagttggcctctagcccaaggtcagtcaagcatctttgccttttattaacaggggcctttaacccaccctgtcttaggagagactctaactcccctaagttgggcctctaacccgatcccatactttactggggtatatgcaccccacttacccaaagtcagccaatcagtgctgcagtctacttcctttgagtcaggaagtttcctcagta

SEQ ID NO: 650874 - DNA, 324 bp, Homo sapiens
tctgttgtcaagatacatcggtcctacattcaagtgtctgcagaagagtgaagatgtaaacgtacatctagtggcaacgattcactcctaagcatgttaccaagaacaacaaccaaaacaacaagcaaaaacaaaggaacgaaacgaaaaagctccccgtaccaaccaccagccgatgtagagatgaagtcctcacctccctgccccaaaggggcttcctttcagggatgtctgtgaagaagatggcagccccctggcctgggagtaaactctaggtaataacagcctttccccataccctaaggcttccttgtgccccaaacc

SEQ ID NO: 650875 - DNA, 346 bp, Homo sapiens
  misc_feature (28)..(28): n is a, c, g, or t
  misc_feature (74)..(74): n is a, c, g, or t
  misc_feature (119)..(119): n is a, c, g, or t
  misc_feature (139)..(139): n is a, c, g, or t
  misc_feature (159)..(160): n is a, c, g, or t
  misc_feature (226)..(226): n is a, c, g, or t
  misc_feature (237)..(237): n is a, c, g, or t
  misc_feature (245)..(245): n is a, c, g, or t
  misc_feature (258)..(258): n is a, c, g, or t
  misc_feature (264)..(264): n is a, c, g, or t
  misc_feature (267)..(267): n is a, c, g, or t
  misc_feature (286)..(286): n is a, c, g, or t
  misc_feature (330)..(330): n is a, c, g, or t
ttaccaacttttaatttttacttaattntttaatatttttttttgttttattccctactttccatcatgtcctngtctgttatttttctcaattttcttctttcctatataaggtattncctctttatgcatttacgcngtttattctccttttcaccnnctttccttagttccttgtttaacttacttttttggctttgtctaccatggatttttttttattttntgtttttttcntattttangagaatctatgtnggctgngcnttcttctcacttcagtatngcttttctctagaggtttactcactatctcattcatttatgttntctgttttctctattt

SEQ ID NO: 650876 - DNA, 128 bp, Homo sapiens
aacgtcagcacctcctgtttccagaaatttaggttattctaggttgttttttactacttcaaacaatgctgcaataaacattctgtacaccaaaaaaaaaaagggatggctccatcctaaaaaaaaag

SEQ ID NO: 650877 - DNA, 439 bp, Homo sapiens
acgtcgctgggtgactcagtagtattccatcccccggcacaaatgtcatacgtccactccgcgaatcttccctcagttgacacgctcgctgtcgtataatgcagcatcttcctacatgtacattttacattaggacttgtatcaggaagtggtacatccaaggcagacataaaatcaggacttgcaacattttccaaaaaacaatcattcactcattttttggcaaaaacaatagcagttataccagaatctctggcacatagctaaggcagtgttaatggagcaatttatagcactaattacccacatcaaaaaggtagaaagatctcaagttaacaacctagcatcacaaattaaagaactagagaaacaagagctaacaaattccaaagctaacaggagaccagaaataaccaaaatcaggtggcatcgattaaca

SEQ ID NO: 650878 - DNA, 346 bp, Homo sapiens
  misc_feature (25)..(25): n is a, c, g, or t
  misc_feature (35)..(35): n is a, c, g, or t
  misc_feature (223)..(223): n is a, c, g, or t
  misc_feature (271)..(271): n is a, c, g, or t
  misc_feature (287)..(287): n is a, c, g, or t
  misc_feature (330)..(330): n is a, c, g, or t
aggcccacggtctcggcgtagaggntgcctgcagncctgcagccgacgctgagcatgctcgtggccgcatgcaccagcgacttcgtaattcacgggatcatccatggggtcaccatgaccgtggagctgcaggaagtctgtcatcactgtggtggccgccgtgtcctccgccagacaccgccgctgttcaggcggggcgatccggggaccaggggctgacctncattcgtacccactgcgctgtggcgtccacccgggccaggcaccttcntcttcatgggctgganccgctttggggaggcccggctgggtgttgccaaccgattccanggaagttccgccgtgc

SEQ ID NO: 650879 - DNA, 875 bp, Homo sapiens
caagccagatcagaaacagagagataatatccttgcaaggagagccagggaaggtgtctacatcttcacatacttgcatagctacctgacttacatcaatgctatcaacgggcaatcaagctgtaatgatgaacatggccaaaggtctgcagatgggctctgctgcagcagcagccagaggatgacagcaatgcgctcaccccggacccaggacctgatccgactctatgacatcatcttacagaatcttggtggaatttgctccagcttcctggttatagaggaagacaaagccttccagaaatgagatagtgcctcaagcactctgcgtgttcaaagcttacagcgtgtaacatcaacatttgctcagtcctcatgtgctggtgacgcacagttggcacgcgcacacgcccttgtcctgtatgacagagctcctgaactatgcacctgacgtacattctgactgctggccctatcaagcaacacgcctaaaggaactgcctgcagcagtggcacgagctcatcactacaacgtgcggccagcattacacgcatagcctcccactgcatatggacccgcctgcccatcccattgctcttgcacactgcaccagtacgcacaacaccaacaactcaaaccaccaagcaccctccatcccataccacagccaatgtaacactaagcactcatgcgccaaacaactaggcttacgaacgacaaattgccttggcactgaaacccacaccccacacgggcacacccatgaccccaccaaaaagcgctgctatgaccaccattctccaacccagacgcatcaccaagccccacatccaccatgcggaccacgcgtcatgacaccagagtcccgcgtggc

SEQ ID NO: 650880 - DNA, 868 bp, Homo sapiens
  misc_feature (386)..(386): n is a, c, g, or t
gcggagcctgcatgcgcatagatgttgatgcctaagaagaaccgggatagccatttatgaactcctttataagggagggagtcgatggtggccaaggaaggatgtccacaatgcctaatgtcacccaggagcttggtcatgatccaaggacatggtgcccgaacccttcactgtcattgaacggaccaatgcaagtcttcatcctaagtcctcgacggctacctagtgaaggagatcaggatttgcgcttggagatcaatttctatcatggttaccattatccaaatgatgaggtagtccgatgtatctgccggtgattatccattcaatcatagccgcccgagaagattagtgcactagtcgctaccccatagctgccagtagcnccgtccaagaagtacttggtgaggctcttctggcacgtaaatgcgtctggaaaggtgagcggatcttgccgtaagactccatcaagatggtggatacgctgatagtaataattaccataacaagagtgagatgctgcttgttggtcaaactaggctcgaccgatcttagaatagtgccgaagagtctaggtgcgtctggggatcttgtcaatcctgagttgccagttttgagaagggccggactttccgtgtcgagggaacgttggtgcactgccaccttcgagttaaatattcgggtagaagggatgtctgtcttgcgatttgtgattgaatctttaccatggtcaggaaagcttgtgggcttttaaacgatccaatggtggaactaggtggtattatgggaaatattggatactcgcattaaggacaaaattaatttcataggtagaaggggagaaggttcaaatagataggcaaaactg

SEQ ID NO: 650881 - DNA, 730 bp, Homo sapiens
  misc_feature (293)..(293): n is a, c, g, or t
agcgggccacacctagtggagcagccggggaaggcggctcgttgggggctggggcggagagcgccgggggtgggggcggaagggcggcgggcggaaggcaggaggctgccggggcgctggtgctgctgctgggagaaggggctccgaggagtccgcctgcggctcgctctgtcgccggcgcgggattggggcgcgagggccatgtggcgctgcgtcgtccttatagtgctggcagtgtctgcctgggtgctggagacgtgcggacgtgacgtgccactgatgaagactggctngcatgtcgaatgtgcctgctgtggcccagtgacttgggcagctgagtgctggccggctgtgctggctgtgctggcaccatgcaccaccatgtcgctgctcatgtgctgcagcccagtcagcagaagctggcggagcaagctcaccatcctcaacgaccgcgggctgtcgtgcatgctcgacccgcctctacaacatcaacgaagcaatggacaagtttgcgaaggcatgtggccgaccccaaggcaaaaccatcctatcttatcgacaaaaacctggaatctgctgtgaaattcatagtcagaaaattccctgctgtagaaacccgcaaccaacaatcaacagcttgcacaactaccagaccgcaaccatcagagactctgaacaatctggcattatattacttcacactctgtagatgttatggaattaaggacca

SEQ ID NO: 650882 - DNA, 244 bp, Homo sapiens
gacgccgagtcactcggaataccccgatgcatacaccacatgaaacatcctatcatctgtaggctcattcatttctctaacagcagtaatattaataattttcatgatttgagaagccttcgcctttcgaaccgaaaaagtcctatatagtagaagaagcctccataatacctggatgtgactactatgtgatgcccccacacccatacacacgtcagtcgaagaaaccaacttagtggggatc

SEQ ID NO: 650883 - DNA, 129 bp, Homo sapiens
acacatactgcagacacagctagcttcgaggagtcatcatgctgtatgcgaggctaacctgggcctcccacgagaagatgcacgagggtacgagggccctggccaccaccataagccaggcctcgggga

SEQ ID NO: 650884 - DNA, 668 bp, Homo sapiens
ctgaagtctgcgcggtatggagggtggtgtgagttcctctggtgggagggagaacgcacatctcttctggtgcggcacctgaggagtgactccaagaagagttccggcagctttccccaggaaagggtgaccgggtgacactcggctctggctctgagatgaggcagacggacccaggctgtgatctgtcctgggcggggaccaggaggtatcggggtcgggatcacctgccagtgtgctgactctgggactgcgtgctgtctccggaccatcagggtaggcgctggtgtggttagagaccatggaagtcagggaatgatctggaattcagggctgacggtctacggttgtccgcagggctgtggcgcagcctcttcagcttgcggcgagcaaactgcgagtgatgtcacaggtagctcctgggcaagaaatgctcgccattagcgcaggtttacttgcaaagacttccctctctattgtacccagggcagaagagtttctgtgagtcccactgacgaaagtccgcatggggtgagcggtactcctggtcggtcggcaagtggagggtggctggcttggtggtattgtcttcaaggagctctttcgctgctgcatctgcggtgtccctttgtgcttgtcccattgcacccctctgcagaccaccaatg

SEQ ID NO: 650885 - DNA, 356 bp, Homo sapiens
  misc_feature (87)..(87): n is a, c, g, or t
cttggaaggtacccctaggggccggggggaggtcaacaggggagtttgggaaccccttctccccccccgtggccctggagtgtgaantggctcattttggaccccagcatggagccagcccgggaacaggggggcaccctaaagcccaagctctatttgtgtccttcagagctcctgggaaacataatgggcccccatgggaatggccttttgcatatcccccaggctgtcctgggagtcaggcagactggattgtcccgtgcggggggcatccaccagcttgtgccctccaggggacctgtggcccctttttaaaggggccccccaaataataaatgggtccttttttgttttta

SEQ ID NO: 650886 - DNA, 2797 bp, Homo sapiens
aactaacatgttttgggaggaagttttctcccttctgaggcacatgcctgtctctcagtaaacactggcctaaagcaaggttgggaagtgactttctccccgacaatatgtcaggctggtgggaagtctcctctcaggaacgtctgtgagaagaagcaagtgattacaagctggtggatgcataaggagctcttgatcttgggagtgggaaggggccactcccatctgcacatggcctcttgctgtttccctggcttgtagcatggagatttatgggcatgtaacttttacagtcacttttttttttttttgaaacagagtctcgctctgtcagccaagctggagtgcagtggcacaatctcagctcactgcaacctccgcctcccgggttcaagcgattcttctgcctcagcctcctgactagctgggattacaggtgcacgccaccacgccagtctaatttttgtatttttagtggagatggggtttcgccatgttggctaggctggtcttgaactcctgacctcaagtgatctgcccgccttggcctcccaaagtgctgggattacaggtgtgacccaccatgccctgccatgatgtcacttttctagcaagaggtctccttgtctgtattcaagtggggggaggtagaatggggagcaacaggtgtgaccagaaaacagtctccccacccagcccacccatctctttccccatcccaggagggtcctctgtggcctgtggagggtgacagtgccccacactgggagcccttttcctcccagatctgagccccttctgaaggggtgggatgatttgaaggggagctgctctggtatttcaggaggttgaaaaaggaaggtggctgtacgtcttgtgctggatttcctgggcctggagaggacaagggccatggaatctacagggagagatgctggagcccactcagaccctgcattctcgaagcaggaatcccttgggtgtgtttgtgcccagaaggaccggtgaagctggcactgtgtgtggaaccatcctcttctggaagcttacgctgctagtggtgtcactgcaagcaggagggcagcccttagtagcagaacttggtggcccgagctctggtggtctgagatacgctggagttcttacctacacaacaggaaatgttcagagtgctttccttcctccctgcttctctcccatcctccttccctccttccacaaagcatttcacacatacatcaaagaagaacgaagagagcaataaactctcttgtacctatcaggcagctatcagctacctacagtgagcatctcaggaccacttgtttcaccttttttttttttttttgagatggagtctcactctgtcacccaggctggagtgcagtggcatgatctcagttcactgcaacctccgcctacctggttcaagcgattctcgtgcctcagcctctggagtagctgggattacaggcacccgccaccacgcctggctaatttttgcatttttagtagagatggggtttcaccatgttgaccaggctggtctcgaactcctgacctcaagcgatacacccaccttggcctcccaaagtgctgggattacaggcatgagccaccgcacccggcctgtttcaccttttttcttttttttaagttctttttttagttgtagagacgaggtctcactatgttgctcaggctggtctcgaacttctgggttcaagcaatctgcccgctttagcctcccaaagtgctggcattacagatatgagtcactgcgcctggcctcttttttcatctttatgcactcacatccactcacacgatcagattatttaaaagcaaacctcagacattatagtattttacccataaatactttaggctgtatctctaaaggctaaaattttcttcttaagagatgaggtctcactctgttgcccaggctggagtgcggtagtgtgagcttggctcactgcagcctcaaactcctgggctcaagtgatctccctgattcagcctcccaagtagctaagactacaggcacacaccagcatgcctggctaattttttgtgtgtatatatggtcttgctatgttgcccaggctggtcttgaactcctggcctcaagcagtctttccacctcagctgggactacaggcgcatgtcaccaggaggataagaattttttaaaaacccaattgcactatcacactttggcacctttggcatcttttttttttgagacagagtctcgctctgttggccaagctggagtgcagtggcatgatctcggctcactgcaacctccgtctcctgggctcaagtgattctcctgcctcagcctccctagtaactaggattacaggcactcgcaaccatgcccggctaatttttgcatttttagtagagatgggatttcaccatgttggcctggctggtttcaaactcctgacctcaggtgatccacctgcctaggcctcccaaagtgctgggattacagtcttgagccagtgcgcccagccactttggcatcttttaatgcccaatccttatttgccttttcctgattttctcaagaatacatttttatatagctgtacccccttatctgcggggtgtatgttccgagatcctgtggatgccgtgaaaccacagataatgccgagcccttgtatactatattttttcctatacatacacacctataataaagtgtaattataaatgaggcacagtaagagtttaacaacaataattgataatgcactgtaataaaagttatgtgaatgtg

SEQ ID NO: 650887 - DNA, 244 bp, Homo sapiens
gggtcagacggacaagggtgggtcagcggcaagggcgggagatcattctttagaatatgaatcagttccacagctccattgccacatcctaaggcaaagatggttcttcatttctttacagattgtgtttctgtagaaaaaaagaaacaattaagaacttcctttgatatacagtgctagtcagttagcacacagtgccagacccctcatgtgtattagttataggctgaattgtgtcccccaa

SEQ ID NO: 650888 - DNA, 3431 bp, Homo sapiens
caccctatcctacactactaggaacttgcacagtccgcctcgggcagcccaaagctcctctgcccaccctggctcccaaaaccctccaaaacaaaagaccagaaaagcactctccacccagcagccaaacgcctccttcttgacgccagcccccaccctctgtctgctcgagcccaggaaaggcctgaaggaacaggccggggaaggagccctccctctctcccttgtccctccatccacccagcgccggcatctggagaccctatggcccgggctcactggggctgctgcccctggctggtcctcctctgtgcttgtgcctggggccacacaaagccactggaccttggagggcaggatgtgagaaattgttccaccaaccccccttaccttccagttactgtggtcaataccacaatgtcactcacagccctccgccagcagatgcagacccagaatctctcagcctacatcatcccaggcacagatgctcacatgaacgagtacatcggccaacatgacgagaggcgtgcgtggattacaggctttacagggtctgcaggaactgcagtggtgactatgaagaaagcagctgtctggaccgacagtcgctactggactcaggctgagcggcaaatggactgtaattgggagctccataaggaagttggcaccactcctattgtcacctggctcctcaccgagattcccgctggagggcgtgtgggttttgaccccttcctcttgtccattgacacctgggagagttatgatctggccctccaaggctctaacagacagctggtgtccatcacaaccaatcttgtggacctggtatggggatcagagaggccaccggttccaaatcaacccatttatgccctgcaggaggcattcacagggagcacttggcaggagaaagtatctggcgtccgaagccagatgcagaagcatcaaaaggtcccgactgccgtccttctgtcggcgcttgaggagacggcctggctcttcaaccttcgagccagtgacatcccctataaccccttcttctattcctacacgctgctcacagactcttctattaggttgtttgcaaacaagagtcgctttagctccgaaaccttgagctatctgaactccagttgcacaggccccatgtgtgtgcaaatcgaggattacagccaagttcgtgacagcatccaggcctactcattgggagatgtgaggatctggattgggaccagctataccatgtatgggatctatgaaatgataccaagggagaaactcgtgacagacacctactccccagtgatgatgaccaaggcagtgaagaacagcaaggagcaggccctcctcaaggccagccacgtgcgggacgctgtggctgtgatccggtacttggtctggctggagaagaacgtgcccaaaggcacagtggatgagttttcgggggcagagatcgtggacaagttccgaggagaagaacagttctcctccggacccagttttgaaaccatctctgctagtggtttgaatgctgccctggcccactacagcccgaccaaggagctgaaccgcaagctgtcctcagatgagatgtacctgctggactctggggggcagtactgggacgggaccacagacatcaccagaacagtccactggggcaccccctctgcctttcagaaggaggcatatacccgtgtgctgataggaaatattgacctgtccaggctcatctttcccgctgctacatcagggcgaatggtggaggcctttgcccgcagagccttgtgggatgctggtctcaattatggtcatgggacaggccacggcattggcaacttcctgtgtgtgcatgagtggccagtgggattccagtccaacaacatcgctatggccaagggcatgttcacttccattgaacctggttactataaggatggagaatttgggatccgtctcgaagatgtggctctcgtggtagaagcaaagaccaagtacccagggagctacctgacctttgaagtggtatcatttgtgccctatgaccggaacctcatcgatgtcagcctgctgtctcccgagcatctccagtacctgaatcgctactaccagaccatccgggagaaggtgggtccagagctgcagaggcgccagctactagaggagttcgagtggcttcaacagcacacagagcccctggccgccagggccccagacaccgcctcctgggcctctgtgttagtggtctccacccttgccatccttggctggagtgtctagaggctccagactctcctgttaaccctccatctagatggggggctcccttgcttagctcccctcaccctgcactgaacataccccaagagcccctgctggcccattgcctagaaacctttgcattcatcctccttctccaagacctatggagaaggtcccaggccccaggaaacacagggcttcttggccccagatggcacctccctgcaccccggggttgtataccacaccctgggcccctaatcccaggccccgaaataggaaagccagctagtctcttctcttctgtgatctcagtaggcctaacctataacctaacacagactgctacagctgctcccctcccgccaaacaaagccccaagaaaacaatgcccctaccacccaagggtgccatggtcccgggaaaacccaacctgtcaccgcgtgttgggcgtaaccagaactgttcccccccaccagggcttaaaaatcgcccccactttttaaccatcgtccattaaccacctggtgggcatagccagagctgttcgaacccagccagggatgaaaaatcaacccccgacatggaacccatgattcctaaacccggggtaggttccatgccaagtaacagcagagggagttaagccataggaatttggctgtggagtaagagggaatgcggtgaggcagtgtggaatatgaccctaccagaggttggagaacaaacttgggcagccggaacccgtcactattttagattcctggcattcgaggagccctttgaactttccaaagtgcagccacagctacaatgctgttaaatcctcccacatttcttggatgccccttcaccttgtgtggacagtgtctggtttccccattttacagacaggaaaactgagcttcagacagggggtgggctttgcctaaggacacacaaatttggttgggagttgatggggccagatgagccagcattccagctgtttcacccttcagcaacatgcagagtccctgagcccacctcccagccctctcctcattctctgaacccactgtggtgagaagaatttgctccggccaaattggccgttagccacctgggtccacatcctgctaagacgtttaaaacagcctaacaaagacacttgcctgtgg

SEQ ID NO: 650889 - DNA, 617 bp, Homo sapiens
  misc_feature (338)..(338): n is a, c, g, or t
cgagctcgcacccgtatctctaacattacattacaatttatttgattacatgtagcaggaatattttagacatgttgtattgaaagagtttttaaattgtcacctagttcttttttcttttttttaatgtggctacttgaacattttaaattacatacgtggctcacattagacttctgttggtcggggctggaaggttgcctactgggccaggcgggagatgatgctgcatagatgagagtagagatggagaggggttagatttggcaagtcttttgtaaacagacttgatagaacttgctaatggatttggtttgggagatttaaaaaaaaaaaancagacgtggtggtttacacctgtaatcccagcactttgggagtccgaggtgggcggattgcttcagtctaggagtttgagaccagcctggccaagatagcaaaaacctgtctctactaaaaatacaaaaattagctgggtgtggtggtgcacgcctgtaatcccagcttcttggaaggctgaggcataagaatttcttgaacccaggaggccgaggttgcagtgagccgagattgtgccattgcagtccagcctgggtgacagagtgagactccatctc

SEQ ID NO: 650890 - DNA, 1037 bp, Homo sapiens
  misc_feature (73)..(73): n is a, c, g, or t
  misc_feature (91)..(91): n is a, c, g, or t
  misc_feature (103)..(103): n is a, c, g, or t
  misc_feature (113)..(113): n is a, c, g, or t
  misc_feature (132)..(132): n is a, c, g, or t
  misc_feature (148)..(148): n is a, c, g, or t
  misc_feature (167)..(167): n is a, c, g, or t
  misc_feature (194)..(194): n is a, c, g, or t
  misc_feature (216)..(216): n is a, c, g, or t
  misc_feature (227)..(227): n is a, c, g, or t
  misc_feature (235)..(235): n is a, c, g, or t
  misc_feature (257)..(257): n is a, c, g, or t
  misc_feature (260)..(260): n is a, c, g, or t
  misc_feature (269)..(269): n is a, c, g, or t
  misc_feature (283)..(283): n is a, c, g, or t
  misc_feature (758)..(758): n is a, c, g, or t
ggaggcgatctagaggatccctcacgcccatgtcacaaagtgctgggatacaggcatgagccaattttttttngagacagagtctcgctcngtcacccaggcnggagtgcagnggcacgatctcggctcacngtaacctccgcctccngggttcaagtgattctccngcctcggcctcctgagtggctgggatngcaggcgcacaccaccacgccnggctaagtttngtattatnggtagagacggggtttcgccangtnggccaggcnggtctcaagctccngacctcaagtggttcgcccgcctcggcctcccgaagtgctgggattacacatttctcccatgagccactgtgcctggcacataatcaattttagaatatctttatttcctcagaactaattgagcattggcagagggtagagagaagggcaatgtgttggagccaggggcagggagagaagtacaagcccagggaagttcagattatgctggattttgagggcagggtgaggagctagagttttattctaacagtgtttgaaactgaccactctggaggcaaggagaaccgatggtgcggggctagaggggaagccgggagagcagctggaaggttgcctactgggccaggcgggagatgatgctgcatagatgagagtagagatggagaggggttagatttggcaagtcttttgtaaacagacttgatagaacttgctaatggatttggtttgggagatttaaaaaaaaaaaancagacgtggtggtttacacctgtaatcccagcactttgggagtccgaggtgggcggattgcttcagtctaggagtttgagaccagcctggccaagatagcaaaaacctgtctctactaaaaatacaaaaattagctgggtgtggtggtgcacgcctgtaatcccagcttcttggaaggctgaggcataagaatttcttgaacccaggaggccgaggttgcagtgagccgagattgtgccattgcagtccagcctgggtgacagagtgagactccatctc

SEQ ID NO: 650891 - DNA, 199 bp, Homo sapiens
  misc_feature (145)..(145): n is a, c, g, or t
  misc_feature (173)..(173): n is a, c, g, or t
  misc_feature (182)..(182): n is a, c, g, or t
ggcgagacgcaggaaagtctgaggcatgatacaaaagccctgttgagagaagagagagaccctctgacattgttttatattgttttatagtcagtaaaaacaacaggaagtaaaaccaaagacaggcagccccgcgccaggcccngaaaccaggcctggatccagcctggccnaaacccagnagttaaaaatcaactta

SEQ ID NO: 650892 - DNA, 531 bp, Homo sapiens
  misc_feature (73)..(73): n is a, c, g, or t
  misc_feature (91)..(91): n is a, c, g, or t
  misc_feature (103)..(103): n is a, c, g, or t
  misc_feature (113)..(113): n is a, c, g, or t
  misc_feature (132)..(132): n is a, c, g, or t
  misc_feature (148)..(148): n is a, c, g, or t
  misc_feature (167)..(167): n is a, c, g, or t
  misc_feature (194)..(194): n is a, c, g, or t
  misc_feature (216)..(216): n is a, c, g, or t
  misc_feature (227)..(227): n is a, c, g, or t
  misc_feature (235)..(235): n is a, c, g, or t
  misc_feature (257)..(257): n is a, c, g, or t
  misc_feature (260)..(260): n is a, c, g, or t
  misc_feature (269)..(269): n is a, c, g, or t
  misc_feature (283)..(283): n is a, c, g, or t
  misc_feature (407)..(407): n is a, c, g, or t
  misc_feature (482)..(482): n is a, c, g, or t
  misc_feature (509)..(509): n is a, c, g, or t
ggaggcgatctagaggatccctcacgcccatgtcacaaagtgctgggatacaggcatgagccaattttttttngagacagagtctcgctcngtcacccaggcnggagtgcagnggcacgatctcggctcacngtaacctccgcctccngggttcaagtgattctccngcctcggcctcctgagtggctgggatngcaggcgcacaccaccacgccnggctaagtttngtattatnggtagagacggggtttcgccangtnggccaggcnggtctcaagctccngacctcaagtggttcgcccgcctcggcctcccgaagtgctgggattacacatttctcccatgagccactgtgcctggcacataatcaattttagaatatctttatttcctcagaaagaaacccngtaccccttaatttagatcccccaacccccctgcactctccaggcaaccactaatctacttggtctctctagatnggcctattctagacatttcctattaanggagtcatacaacacgtagcct

SEQ ID NO: 650893 - DNA, 323 bp, Homo sapiens
agtgccgagagatgaaactgtgagtactgcccccacaacatgccgacatcgggcgcctggtagaggacagtggacaataaaatcagaagtacgcttaacgagatctactttggaaaaacaaaggatatcgtcgattgggctgaggtctgtgcagacttttgtctgactagatcaaaatcaagaagctctgaagaatgacctggtgtatgctttgaagagccagcggcaatgctgtacctctgtttcatgcttaccagacacgccgtgcactcgttagatcccttccttagaaaactcgtgggctgctcccttctctctccact

SEQ ID NO: 650894 - DNA, 670 bp, Homo sapiens
  misc_feature (657)..(657): n is a, c, g, or t
ctccgggcccctggtgttaaaaacactcataaaattttttttaataagggttaaggaatagggcccttaaggcttgctgcggatgccgacaaaccgatataaatccccaggttggtttttttcccggggggggaatgtaatgtaactgtaatgttaggccccggctttaaaaacgaggaaactggaaattaaggaacaggttgggcaaaaagaacagcccccaaaaggcctggaattaagacagtggggccaaccccagagagaagtaagtgtttcggtaacagcttttatcgcaccttgtggtcctcaaaaaggggatggaatctacgaatttagttttcccagcctccttaaaaattcattcatgccaggggcagtggctcacacctgaaatcccaccactttgggaggttaaggcaggcttattacttgaggtcaggagtttaagaccagcctagccaacatggtgaaacccggtgtttactcaaagtacaaaaaaaaaaattagtcacacgtggtgtcacgcacaagaaatcccagctttttgggaggttaaggcaggagaatctttttaacccagaagccaaaggttatagtgagccagtattgcgcccccccctcatttgggcaatagagtgaggccctgtctcaagaganatgagaaagagaa

SEQ ID NO: 650895 - DNA, 414 bp, Homo sapiens
cgctatattcaccaccccggcacacagtgcagtcgcttctccaccagctgtggttcttggaccccgagcctgtgaagggggaggtgagtttacaaaatggaaagcttaaaaggagaaaagtggaaccagaggtacgcagaagccctagagtggtagagtaagggctccagcgctgcctctgtgtacagggcagagtggcagaggagagggggagaggcactgggcaccatgggggcccagttcccacttcggggattctctctcgcagaaacgagggtccccttcatggggggtagatgcccagggctaacttgttgccactgtcttgttgtgcgacctgagtcgctggaacatgccctgagttgactcatggagtgggctagctttgggagcgggctcttgtcaaccctaagg

SEQ ID NO: 650896 - DNA, 459 bp, Homo sapiens
atcccatcttccatttcctatgcccggatagtggaaggtgccgttgaatgaacaccatcttgtgcaggggtatctaatcaggaagttgatttcataacgaggtatcatctttccaaaggtctgtggcattttctacaacagggggctgggccgcaagcaagtgttcctttctggcactgtataggtgagagggtcatggcggggaacatcattccacgggccattctcatgccaaatgattacaacacagtcttctccagcaaaaaagaagctgtcgggctggttgggtctccaatactcgtatggcaggtgtgtgccatcagtccaaggagaagtcatgcccaaaaatctggtcatggaggcctatccagggaataatcatggcccacacgattaccacccttttgttcttcgtagagacagagatgcttgtgagatgggcccctgcagacgggattc

SEQ ID NO: 650897 - DNA, 238 bp, Homo sapiens
gaaagggccgggtcggccccgcttcagaccgtgacccgccttcaacggcataggtgagcacggttgaccgtgcccagttgcgacgataatagaaactcagttccaatatacggaccagcccagatcgtcttgacgttagacggctgggcctggaccgtgggcattaggtatcgacaatgacgtcctgctttgacccttccactgtggaaattcccatcggccattcatcggcggtttt

SEQ ID NO: 650898 - DNA, 279 bp, Homo sapiens
  misc_feature (110)..(110): n is a, c, g, or t
  misc_feature (183)..(183): n is a, c, g, or t
  misc_feature (189)..(189): n is a, c, g, or t
  misc_feature (201)..(201): n is a, c, g, or t
  misc_feature (252)..(252): n is a, c, g, or t
  misc_feature (256)..(256): n is a, c, g, or t
gaattcggcagagcaaaaattttaaaaatgaacctgtgtgtgttattcagagaaagagaaccggtaggggagacatacatgctgatgctgtttagttgctaagtcatgtncgattcattgcaaccccatggactgtagcccaacccggctcctctgtccatgggatttcccagacaagaacanggagtnagttgccatttncttccccaggggatcttcccgacccagagatctaacctgcatctcctgcantggnaagcagattcttaccactagcac

SEQ ID NO: 650899 - DNA, 281 bp, Homo sapiens
tgctgggagccctcatcatcagtgggtatatgtaaggatgaacggtgaatgcgcattgcattctggtcaatgaggcagggcctgctcgggctcaggtcagcagggcgggtgtcgcagatcagcatgtctcggaatcctctgagcagcaagttcggaaattaacctttcattgatccagaggtcacagttccaatccctctcaagtacaagagcgattgtcaataatatgagtgtgccagtcaacatagtgtcatgatagtccatctgtagcacagtaggat

SEQ ID NO: 650900 - DNA, 183 bp, Homo sapiens
ccgtaataaacagtgaattgatggatccaaatgcaacagatgataaccaagcgccagatcaccagaacacagattaccgcttaaaccccatgttaagaaaagcctgtaaaggctgacattcctaaaattcttgtcacgggtacacttgaccaacggggtacccgaggctccgaaattccgtta

SEQ ID NO: 650901 - DNA, 868 bp, Homo sapiens
atcttttctaatttgcacaaagttatcacaggactagcagtggtcctatgattagagttggagttgaggtggagatgggaaggggagtttctttagcagaaagtgagattgtgagttcggggatggaggataagggctatggagggaggatcagggagaagtgctgtggttggtgaacgtggaggtggggcagagagcagtgggaatgtgtcaagggaggttggtggtgagaagggcgggttcatgctgacagtggcccctttagctgcgttcagggtacccctgggagtggtggttctcctgccccccagccttgctcactcctgtggtgtaagcagtggcctctttggagtggctccttctgccaagttcccctcttgggagaaatggcaaggggttaggttttctccaggcccctctctgagaggctgcaggctctgtagtgggtgttgccttactaccgtgggcctactagagaggcatggaccctgccctcagggaacttgccatcgaagggagcttttgtgcacaggtctaatgccagtggccttgtctcctggggcagggtctgtgggtattgcagacagtctggtttctgtgtagggctcaagtctggtctgaggcgaaggctcttaccctaggaccaaggactattgagggagtcacaaaactgggcctctcgtgggccttcagaaggtaaaaggatctgtcgggacaaattcttggggcccccaataacacgggagatatggaacgcctgagggggcaaccggaaaaaggtctgcagattaaaggaagtgcaccgaggtttggcaaaaaccctttcttggcggggtgaacaggcctccacggcgagagcctcattcgc

SEQ ID NO: 650902 - DNA, 340 bp, Homo sapiens
tcctctgtggggctcttcccccgtagtgctggctggctccacttcttcctgccggtgtaccctggagcaggatttaccgctactgtcctgtcttcctagcttttggagaaccactggcagaggtgggtgtgaaagcgatagttatacatccatcagggactgaggagcttactgtgaattggacttgaataggatacctcagaaattatccactcacagggcatttatacacgacacctacagtgcatacacaccgctgccgacgtgcttacgaggacggctgtacttctataacatccctctcgcagatgtcggtccgtcgatccaatcactcgctctc

SEQ ID NO: 650903 - DNA, 361 bp, Homo sapiens
tgctactgaggtttggaggtattcctctggagttttcacttataccattctctcatgcccaggaagctgctcatcaccaaaccacaagtcttcctctaactcagtcacaactaagcttctatccagacactgatgatactgtaactgttttgttgtgcttctgattagttgccctgtcaaccataagcagcctataaacagggcctgaatccatccatgttacatccccaatgcactgaattcgatattattccctcaagatagataatagagaagcagcatacctaaaaaaaactagttatatattggcaaaagataaatgtttcattaatataaatacaaccattagaaagcaaaatac

SEQ ID NO: 650904 - DNA, 269 bp, Homo sapiens
tactgtagtatatctcataatgcaatattattcattacctgaaaaagaattacatcctgtcatattcatgcaacatgggtggaactggaggtcattatgtttcgtgaactaagccaagcacaaaaacgaccaatagtctcatgtactcactcatatgtcggagctagaacatgccattgccaccagtccctattcccacccttgtaggaatacgtgatggagacccagaagataatgacataaaagagaaaagggaaaaaattacagag

SEQ ID NO: 650905 - DNA, 142 bp, Homo sapiens
  misc_feature (23)..(23): n is a, c, g, or t
tccccatcgccgcagagatttcnctggtaatcgcggtatggatgagctgagacttcataaccccgcccagtagaccgacggcggggctgtcggcgtcggtgagttcggtctggcgcagaccggtaagggatcctctagatca

SEQ ID NO: 650906 - DNA, 443 bp, Homo sapiens
cgctgttgcagtctcagtctccccgcgtctggaatacagtggtgtgatcgtccgttccaggggaatctccatctcccaggttcaacgtgattctcttgcctccgcctcccgggtagctgggcctccaggtgcctgcctgcacacccgattgtttttgggtttttgagtaccaacggtgttccgccatgtagcccaggctggtctcgaactcccaatctcgattagcattgctcaccttggcctcccaaattgcggcgatcaccggtgtgacgccaccgagcccatgcctgggccgttcatatttaagccatttctatttcccaggttttaagtaaataatcctcataactttctcacatattggtcaaacttgttacggggctattttgccttaaggggcctaaagagaatattcgaataacttaataatccatactgaaact

SEQ ID NO: 650907 - DNA, 374 bp, Homo sapiens
aagcatttgtagcggagaccaaccaaaacactggattctgggagcctctgtctgagaatggaattaactttgtttcatagaagactttataggctttataggggagacggggaaggacctagttgtacatatttcatttcaatgcataaacatatacctatatacctacaagacacaggatctggatccaactctctaagaaccaggacttggactgtgagtcccagaacatccatgaaagtgttcccacttcttatatggaagatgagagtagtagctgccctaataactggagggttgctagagagataaaggagacaagggataggtcactttgtgtagtcactttgcaatgcataaaagctagttcaacc

SEQ ID NO: 650908 - DNA, 755 bp, Homo sapiens
  misc_feature (567)..(567): n is a, c, g, or t
  misc_feature (592)..(592): n is a, c, g, or t
  misc_feature (629)..(629): n is a, c, g, or t
gagagccggcgcgtcattgtcgtcatcgttgcccgaccgctttccgggagactggagtcgaaggccgtgagtcagccataatggcaggtgaagaaattaatgaagactatccagtagaaattcacgagtatttgtcagcgtttgagaattccattggtgctgtggatgagatgctgaagaccatgatgtctgtttctagaaatgagttgttgcagaagttggatccacttgaacaagcaaaagtggatttggtttctgcatacacattaaattcaatgtttgggtttatttggcaacccaaggagttaatcctaaggaacatccagtaaaacaggaattggaaagaatcagagtatatatgaacagagtcaaggaaataacagacaagaaaaaggctggcaagctggacagaggtgcagcttcaagatttgtaaaaaaatgccctctgggaaccaaaatcgaaaaaatgcatcaaaagttgccaataaaggaaacaagtacaaagttaacttttgggtttggatgtacacatattcaaaaagtacatcttttcccacccccccgcanaataattctgtggcagggcgaagcntaaatgtgtttcttattaatatgtgaattcacacggnatatgtgctatatacttttcttttcgcattatcttattgagtagcactgggagtttacattgtggatatttatattataattaccccctcttgagagaccttattcttatatggagacttgcgggc

SEQ ID NO: 650909 - DNA, 110 bp, Homo sapiens
cctgctccagcaacatccacagcattcaaggcatcaaccatccaaggcaagcagtggtgcagttttcagcagcttggccaacacatgcaggggcatcctctcagcagtct

SEQ ID NO: 650910 - DNA, 758 bp, Homo sapiens
gagagccggcgcgtcattgtcgtcatcgttgcccgaccgctttccgggagactggagtcgaaggccgtgagagccagtgttttagaaggagtatgtggaagggcaaggagtacctatagaaccccggaggagggtgaggagcagagctggtcagccataatggcaggtgaagaaattaatgaagactatccagtagaaattcacgagtatttgtcagcgtttgagaattccattggtgctgtggatgagatgctgaagaccatgatgtctgtttctagaaatgagttgttgcagaagttggatccacttgaacaagcaaaagtggatttggtttctgcatacacattaaattcaatgtttgggtttatttggcaacccaaggagttaatcctaaggaacatccagtaaaacaggaattggaaagaatcagagtatatatgaacagagtcaaggaaataacagacaagaaaaaggctggcaagctggacagaggtgcagcttcaagatttgtaaaaaaatgccctctgggaaccaaaatcgaaaaaatgcatcaaaagttgccaataaaggaaacaagtacaaagttaacttttgggtttggatgtacacatattcaaaaagtacatcttcccccgccccgggaaaaaaaatttggggaagggcagggtttcaaggggttctttataatatgtaattccgggaattttgtaaggtaaaattttgctttcaaagatcattatcttaagatttgccggggt

SEQ ID NO: 650911 - DNA, 752 bp, Homo sapiens
  misc_feature (564)..(564): n is a, c, g, or t
  misc_feature (589)..(589): n is a, c, g, or t
  misc_feature (626)..(626): n is a, c, g, or t
caggttcacaataaaggtgctaagaaagagaatgtaagacaggaaaacaattaaatattcttaccgagtcagccataatggcaggtgaagaaattaatgaagactatccagtagaaattcacgagtatttgtcagcgtttgagaattccattggtgctgtggatgagatgctgaagaccatgatgtctgtttctagaaatgagttgttgcagaagttggatccacttgaacaagcaaaagtggatttggtttctgcatacacattaaattcaatgtttgggtttatttggcaacccaaggagttaatcctaaggaacatccagtaaaacaggaattggaaagaatcagagtatatatgaacagagtcaaggaaataacagacaagaaaaaggctggcaagctggacagaggtgcagcttcaagatttgtaaaaaaatgccctctgggaaccaaaatcgaaaaaatgcatcaaaagttgccaataaaggaaacaagtacaaagttaacttttgggtttggatgtacacatattcaaaaagtacatcttttcccacccccccgcanaataattctgtggcagggcgaagcntaaatgtgtttcttattaatatgtgaattcacacggnatatgtgctatatacttttcttttcgcattatcttattgagtagcactgggagtttacattgtggatatttatattataattaccccctcttgagagaccttattcttatatggagacttgcgggc

SEQ ID NO: 650912 - DNA, 215 bp, Homo sapiens
tctacaaaaaattcaaaaattagccaggagtggctggtgtgtgtttgcggtcccagctacctgggaggctgaggtgaaaggactacttgggcccgggaggtcgacgctacagcgagccatgttcacaccactgcactccagcttgggcaacagaatgagaccccgcctaaaaaatagaaactttatttttaaaaataaaaatgtaggccaggcat

SEQ ID NO: 650913 - DNA, 1220 bp, Homo sapiens
  misc_feature (1)..(1): n is a, c, g, or t
  misc_feature (166)..(166): n is a, c, g, or t
  misc_feature (242)..(242): n is a, c, g, or t
  misc_feature (269)..(269): n is a, c, g, or t
  misc_feature (577)..(578): n is a, c, g, or t
nattttctcaacaaactttccctcatcaactatgatgatttaattacttgaaataacgctcatccaagaaaaagagaataaatacttaattcttttcttaaattgtttctaatgtcagagccctagttacttcctagtgggggtagtatccagtgagtcgagtttntgtattttgactttgctttttcttactttacataataaactcatgggatttaataatcagtgtgattcagccaatngcagtcattatttttaatgccctaatngttctttttctgactaccttttaaatggtcttatcccccaggatccgtctatgatatgcttttcttccccctctgcactctttcctgactgacttcagtctttcctataactaccctccacattttaattactctcaaatcactctttcttacatgaatttaccaggcattagacctgtgtttctatttactcacctgcctggccctcccaaaacatattacatgcatgacttcacatctttgaactaaatgtatctttatttgctgttcttttcttatactcccagttatcagcattttcatgcacnntctccaagccagaaaccaggaaatcattttttattccttctctcttttgcataattaggtattctccaaattcgatctcagaattatttcactgttccagcctttcctctgaattaaactgcttaaagtattcagaaaacagtgacctcttacccatactatctgaccacattcctaagtcgattgcctaccacttatgacctcttcccactccaaattgttctctattacccttggagttaccttcttgaaaataagtctagtcatgttagtccagtttcaggacctctgctgcatccttgttacctaatacaatagtgtttccccagatttgtccaagagaatattaattctacaagatattaataggtattctttgacaaaggaggtgctgggaaataatacttacgaacatactgatttcaccataatccagcactttgagaggctgaagtgggaggatcactggagggctaggagtcaaaaccaaggctagtcaaacatggcaaaactccatctctacgaagaaaaacagacacgaacacgaaaaacgccggggggacaaccacgaggtgggccccacaaacggagggagagaccgagaaccccgtggaccaagaagggacaatgacaaccaaatgg

SEQ ID NO: 650914 - DNA, 214 bp, Homo sapiens
  misc_feature (78)..(78): n is a, c, g, or t
  misc_feature (93)..(93): n is a, c, g, or t
  misc_feature (173)..(173): n is a, c, g, or t
caggctacacaggagggctgaggcaggagaattgcttgaacctggggggcggaggttgcaatgagtccaaggtcgcgnccattgcactccagncctgggcgacagagtgacacttctcaaaaaacaaaaacaaaaacaaaagaacagataagcaaatacgtgtgtatatattnctattttgtgtgttttcattcaccttatttcattcagtctt

SEQ ID NO: 650915 - DNA, 105 bp, Homo sapiens
ggaaaagccatctttgcattgttcctcatccgcctccttgcccgccgcagttcgcctccgccgggggccttccttccgcggccgcggacttccggcaagctttat

SEQ ID NO: 650916 - DNA, 114 bp, Homo sapiens
  misc_feature (76)..(76): n is a, c, g, or t
gcacagattgaagtcacctctgagatagatgtgcatggtattctccgagtgacagctgaagacacgggtacagggnccatcgttcagatcacattcaccattgaccagattcgc

SEQ ID NO: 650917 - DNA, 320 bp, Homo sapiens
  misc_feature (95)..(95): n is a, c, g, or t
ggacgatgcagtatgtcatgattatataaaatgcgtcaaccagtaagacgcatttatgcatccatcatttcaggatgtgataacctgggcatatntccccaaataacttgcctccctgtgtcacaaggcccacttcactcacatttacctcagtgacagtctttggtaataacacccaaagttgtatacagcgggaatgacggattcttctttacaccaagtattggtaggcaaaaggtggctttcagttcaggttgtgttacatggactttcttgaaatgcaagcccattggcctgatgaatctttcatatttaggtgg

SEQ ID NO: 650918 - DNA, 269 bp, Homo sapiens
  misc_feature (204)..(204): n is a, c, g, or t
atcgactgatgacaacttaaaactatcacattattatttatttttgctttgcttttgttttttttgagacggagtcttgctttgttatccaggctggagtgcagtggcatgatctcggctcactgcaacctccacctcccaggttcacccgattctcctgcctcagcctcctgggtagcttggactacaggcgcccgacaccgnacccaacaccacacccagctaattttttgtgtttttagaagagacagttttagcccatgcaggcc

SEQ ID NO: 650919 - DNA, 380 bp, Homo sapiens
tgtgtacaagaccgactggtcaaggttcagctgtccaatgactttgacgagtacatcatggcatgagcgacatcaagtcggctcatgaggcaggttgcagagcgcgcatcacccatcaagtgcagagaagcctgaagctgaggagaagaaatactcatgtggggtctctcctccgatttctgggggacgagaagcccaacctcagctacatcatcgggaaggacacttgggtggagcactggcccgaggaggacgaatgccaagacgaagagaaccagaaacaatgccaggacctcgggccttcaccgagagcatggttgtctttgggtgccccaactgaccacacccccattcccccactcccgtaccaggggtaccga

SEQ ID NO: 650920 - DNA, 105 bp, Homo sapiens
gtgtatagcatgattgatgtgtgatgtcccgccccactgatgttcacgcgacttactgtggcatggagctgggcctgaatcccagccctctgcctgaagcaaagc

SEQ ID NO: 650921 - DNA, 269 bp, Homo sapiens
ttcagagtaccaaaatagaatggagatttggctgggcgtggcggctcatgtctgtaatcccagcacttcgagaggccgaggagggtagatcacttgagctcaggaattcgagaccagcatgggcaacatggtgaaatcccatctctacaaaaaaatacaaaaattagctgggtgtggtggtgcatgctgatagtaccagctactcaggaggctgaggcagaagaatcattttgagcccggaagagcaaattgcagtggcgtgatctcgg

SEQ ID NO: 650922 - DNA, 228 bp, Homo sapiens
ggggcggccggattgcccggaggccgcacccgcctccggcggggctctcagacggagtctgctctgtcgcccaggctggagaggagtggcacaatctcggctcgctgcaacctccacttcccgggttcaagtgattctcctgcttcagcctcccgagtagctgggattacaggtgcctgccaccacgcccgcctaatttttgtactttcagtagagatgaggtttcac

SEQ ID NO: 650923 - DNA, 153 bp, Homo sapiens
tcagccactgggtgatgcaatgctaggagtggttacttactatgatatgtaagagagtaagttgatgtacggggaggttgcgtgtgacacggttccacccaggtctggaagtgcagtggtatgatcacagctcactgtagcctcgtagctccc

SEQ ID NO: 650924 - DNA, 171 bp, Homo sapiens
  misc_feature (1)..(1): n is a, c, g, or t
ngatctagaggattcccctggcttgaacttaggcaactggtgttccccgctccgggaggtcacatattgatgcgaacttagtgcggacacccgatcggcatagcgcactacagcccagaactcctgggctcaagcgatcctcccacctcagccctaagttcagagccaggt

SEQ ID NO: 650925 - DNA, 1448 bp, Homo sapiens
cggcacgagcccgcagcgccggacgctggttgcgcgctcccaggcgccgagcggccccgggcacgcgcgcgcgccaccggcccggcaggtgctgtccttattcccagcccagtcaagagctaccggggctggctagtcatgggggagcccagtagagaggagtataaaatccagtcctttgatgcagagacccagcagctgctgaagacagcactcaaagccccgtctcttcaatgctacaggggcctggctagtcatgggggagcccagtagagaggagtataaaatccagtcctttgatgcagagacccagcagctgctgaagacagcactcaaagatccgggtgctgtggacttggagaaagtggccaatgtgattgtggaccattctctgcaggactgtgtgttcagcaaggaagcaggacgcatgtgctacgccatcattcaggcagagagtaaacaagcaggccagagtgtcttccgacgtggactcctcaaccggctgcagcaggagtaccaggctcgggagcagctgcgagcacgctccctgcagggctgggtctgctatgtcacctttatctgcaacatctttgactacctgagggtgaacaacatgcccatgatggccctggtgaaccctgtctatgactgcctcttccggcttggcccagccagacagtttgagcaaggaggaggaggtggactgtttgtgtgctgcagctgcaccgggttggggagcagctggagaaatgatgggcagcgcatggatgagctctttgtgctgatccgggatggcttcctgctcccaactggcctcagctccctggccagctgctgctgctggagatcattgagttcgggcggccggctggaagacaacgccagctgcccacaagtattactacagcgaagtctccgactaggcctccagatcagggcttcctcaccagactggcctttcttctacccacctctaaagctggcagtggagtctctgcctcacccaaagacttttcccttccagactttgagtgtcttcccttctagactttcccatctcctggtgagatgtttcccacttatgccgtggtcctgccctgagcccctttccccaccacaacccaccacggccaggcagagaagggcaactcccaagagccactgcactgtgtaaccattagtgcaactactaccttggtgcctcagtttacccatctgtaaaatgggtaagcatagccactggtgggatattttgggatgtcaaggggtggaggcagagcacaagtcacaccagaaactgctttttatacattttgtataaggacaactctggaaacaagcctatttcctccagccagtttcactgaatgctgcaccacatgctacaccagttcagcgtgagaattttctaataaatcttttctgatactaaaaagtaaaaaaaaaaa

SEQ ID NO: 650926 - DNA, 1256 bp, Homo sapiens
tagaacttgatcacttgaagctcagacctattggtcttgatcaaatcaacactaagaagacctatagaaataagctaccattttgccacagagcagcttataggtaatacactcttctctcagtgcagtgtacatttccacaaatctcacagcaattagccctcatacacaccatcagccaggcattattgggcagcttgcaaaacattttcccatatcattctaggaccatgcacatttctcaaaatgccttcaatcaggtttcatgtcagattgcagtaaacatttcggtgtatatgttcacacttcctatctttgtccacagcgcattcccaacagtttggccattcagcaggcaggtggagtgccacttttattactagggccagcacaattcatccttcaggtccaacaacacaaaaaaggattagtcacacgagtatatccattatacgtaagtatatgggggttggtgaggggaccactacaagttacaacacacggtggcctggccctggctacgcggcatggggaaacctgaaaggatgcactttgatgggtaaattcccattcctcgagagtagcccacctgtgtacgagcacagggcttccacgggcaagggccccaacacagcattcttcgacacatggaatcttactacaataacatctctacccacagccgcgggtacggcatcaaatggttggacaatattctattctgggctccaaggccacctacacttggcgctatcaactaggctaggtaaaggaagtgcccaaataaataggaaggtggttcacagtcagggtcctattgacaagccgttcccagctaaggttgcacgttagaagccttgaatgtgagagcacccagaggtccagccaggcaggtacttggcatcgactaattttaccacgtgcgtcaccacactaaggagactacgggccggactacttcataggcagccagatggagttcagctcaagggaagacaggagagacgacagaaaacaggggaaagagaaggaccgcacccagatgtcaacatcaaagacataataccaataaaatatcaacaaacgtaccctcgataaataataacgaaaaaacacataaaaaactaaaaaatacatccctaccaactacacacaacacaatatttcacaccaataacaacacaatcataccagacaaaataaccatcacaaaaagaaaaaaagagacatagcatataaatatcaaagctaccaca

SEQ ID NO: 650927 - DNA, 386 bp, Homo sapiens
aagtggggaagggcaccccccttgagggatggagggcagtgctttatcaggggttgtccaaaaaagcaaaaaaggacataatgctgaggaagatcgtttaagactggggctgggcgcagtgactcacccatgtaatcccagcattttgggaggccaaggcaggaggattgcttgagcccaggagttcaagaccaggcttgggcaacacggcgaaaccgtctctgcaaaaagtacaaaaaattagccaggagtggtgcttgcctgtactccctactactcaggaggctgaggtgggtggatcacttgcacccaaaaggttaagctacagtgagccatgtttgtaccattgcactccagtttaggtgacatagcgagacctggtctca

SEQ ID NO: 650928 - DNA, 1329 bp, Homo sapiens
cggcacgagcccgcagcgccggacgctggttgcgcgctcccaggcgccgagcggccccgggcacgcgcgcgcgccaccggcccggcaggtgctgtccttattcccagcccagtcaagagctaccggggctggctagtcatgggggagcccagtagagaggagtataaaatccagtcctttgatgcagagacccagcagctgctgaagaagcactcaaagatccgggtgctgtggacttggagaaagtggccaatgtgattgtggaccattctctgcaggactgtgtgttcagcaaggaagcaggacgcatgtgctacgccatcattcaggcagagagtaaacaagcaggccagagtgtcttccgacgtggactcctcaaccggctgcagcaggagtaccaggctcgggagcagctgcgagcacgctccctgcagggctgggtctgctatgtcacctttatctgcaacatctttgactacctgagggtgaacaacatgcccatgatggccctggtgaaccctgtctatgactgcctcttccggcttggcccagccagacagtttgagcaaggaggaggaggtggactgtttgtgtgctgcagctgcaccgggttggggagcagctggagaaatgatgggcagcgcatggatgagctctttgtgctgatccgggatggcttcctgctcccaactggcctcagctccctggccagctgctgctgctggagatcattgagttcgggcggccggctggaagacaacgccagctgcccacaagtattactacagcgaagtctccgactaggcctccagatcagggcttcctcaccagactggcctttcttctacccacctctaaagctggcagtggagtctctgcctcacccaaagacttttcccttccagactttgagtgtcttcccttctagactttcccatctcctggtgagatgtttcccacttatgccgtggtcctgccctgagcccctttccccaccacaacccaccacggccaggcagagaagggcaactcccaagagccactgcactgtgtaaccattagtgcaactactaccttggtgcctcagtttacccatctgtaaaatgggtaagcatagccactggtgggatattttgggatgtcaaggggtggaggcagagcacaagtcacaccagaaactgctttttatacattttgtataaggacaactctggaaacaagcctatttcctccagccagtttcactgaatgctgcaccacatgctacaccagttcagcgtgagaattttctaataaatcttttctgatactaaaaagtaaaaaaaaaaa

SEQ ID NO: 650929 - DNA, 230 bp, Homo sapiens
tcggccacccttgtcaacaccacacccacacactacacagttacacacaccgacatacactcacacacatgcacccacagacacagggcctgactcctagaagggacggcaggtgtgcttacctggacacacacgtattcatccgcaccatcatagccaccatcaccctccttaacctctacttctacctacgcctattttacaccaaccccggtgccgatgaatagcga

SEQ ID NO: 650930 - DNA, 1430 bp, Homo sapiens
gttctgcacagaactgaactgaaagtataattaacaaaaaaagaaaaaaagtcggggtgcgggggcccacgccggtaatcccagctactcgggaggctggaggcaggagaatcactggaacccgggcaggtgggcagactggcagtggggttggagatcatgccactggcactccaggctggggcaacagagctagactcggtctcaaaaaaaagaaagaaaaagcaaaagaaaacagagaagaaagaagctccttccaaattccaccactagcattgtggggggtggccagggttcacggaatttcccaccatttctaagtggggggggttgggggacattcatcatttgggattcccccgtaagtgaaaagtggtggtggacaacattattttccattattgcctatattatggacacacccgtggtattctctctgtgggcggcaacagtgccgcggatacaaggggcttctggggggaccacaaatttatacaaacaaaaggtggcgcagtaggggtgtgataccataaatattgaggggagaggtttataaaaaggggaggtcactatatggggaatatatatcaagtggggagaaataaaatagggtacccttataaaccatcgcgggcgcttattgtgggcagaaattattagttaatcacacaactcccgcaaaagaacataagtgggctgtggcccctatatatacacaatctcctgtggagcacgaagggtgtcatcactcacacaaagagagcgcacgaaaacaatttttcaaacaaccatttgggttacacgatgaaaaggccatccaagacactttaattcaccattatccacaggcgggagtggagctgccccattaggggcagggtaacactaactcgttaacaaaaggagttccatggggtggaaaacaccccagagggccccagggagacaaaaaaaccaccccaaacagacaggttataaaaagataacgggcgcactcaacccattaaagcgacccggagaaccccccatcctggcgcaaaccatcacaggcggcaacagcgactcgccaacgacacccgaggggcaccaaaaaatatcccacttttagggacgaatggaaactcaagcgactaaaatatgtatctcgcagcgccaaccaattggtcaggaaaaaatcttgtgttcaacacctttggcgcaaatgtgccgtgggaccccctttgggccacaagacacggaaaccatacataactacggggagccaaacacagagggcacccaaccaagggtcccaacagcatcgcaacaattggcgacaaaacaacatggacacgaaagagaagacaaaacgaatggagaacgaaacaaaggcgacgaaaacggacaaagagagcagaccacaataaaccgaaacacacagagtcgccaca

SEQ ID NO: 650931 - DNA, 519 bp, Homo sapiens
  misc_feature (90)..(90): n is a, c, g, or t
  misc_feature (92)..(92): n is a, c, g, or t
  misc_feature (109)..(110): n is a, c, g, or t
  misc_feature (118)..(118): n is a, c, g, or t
  misc_feature (124)..(124): n is a, c, g, or t
  misc_feature (138)..(139): n is a, c, g, or t
  misc_feature (175)..(175): n is a, c, g, or t
  misc_feature (184)..(184): n is a, c, g, or t
  misc_feature (187)..(187): n is a, c, g, or t
  misc_feature (192)..(192): n is a, c, g, or t
  misc_feature (451)..(451): n is a, c, g, or t
tctcatcctcgcccccatctcttcccaccaactcagacccttccgagcccacccagccaccaccttattatgtaagcaccaccccttccncnatccaaagaacaagctnnacacatanggcagnggccgcgccccacnnagttggtctgtacatgcgcagttcctagtgcccatngtctgttcnccngcctngcccccgcccgccccgtgccgtggacatttgggcccactcattgccccttcaggcccccggcgccccaccccctagagtgctctgtgtatgcggatgatttagaattgtcatttctctttactggatgtttatttataaagatctggcctgttcctgcgtctgcggagcggcccttgtctcccagctatctataaccttagctagagtgtcgccttgtgggttcctgttgctgagacttcctggatggagccgccctcnccgccgggcccgtggccctgcgcggagctgtgtccaataaagttcttggatgtgaaaaaaaaacccca

SEQ ID NO: 650932 - DNA, 410 bp, Homo sapiens
  misc_feature (148)..(148): n is a, c, g, or t
cacgaggctcggaatgtgtggtgtatggacagttacacccacgtttttcacttaatcggggatttaatccccattttggagagatttaaggggtcagttacaaccccaaatcctctataaatagtggattgatcagagagaaccaggnctatcaaaggaggaggagatcataccggagggagggctatcaaaaaaaaagggggagatcaagagatctaggcgtacacgcgtaaaagaggaggcaagtcttcttctcactcgtcccgaagagataaaaggagtccggaagtctcaaaaagaggcaattctacaccttcgctccaagctttggaggtacaggctcgtcaagggaggacaggagtcaacctcaatcgccaaaaaataagaacccggcataacaccacacaatt

SEQ ID NO: 650933 - DNA, 446 bp, Homo sapiens
cgtccgtatctctgtcaggctttggtatcaggatgatgctggcctcatgaaaggagttagggaggattccctctttttctattgtttggaatagtttcagaaggaatggtaccaactcccctttgtacctctggtagaatttggctgtgaatcggtctggtcctggactttttttagttggtaggctattaattactgcctcaatttcagaacttgttattggtttattcaaggattcgacttctttctggtttagacttcggagggtgtatgtgtcaaggaatttatccatttcttctagattttctagtttatttgcatgcaggtgcttaaagtattctctggtggtagtttgtatttctatgggatcagtggtgatctaagaatatcccacaggatatcaccactgatataaggatatcaccactgatcccacagaatcagtg

SEQ ID NO: 650934 - DNA, 791 bp, Homo sapiens
aacccacacaccaagcaccacaacacacatccacacaccacaccaccacaccccaacacaccccaccacctactcagataatactcacacaacctaaacactttatactattactatttgatactactacacaacatcatttctcctcatatatttttatcattacacaccaattctagtcactataacatcatcgcattaataacacatttacatcatatatttctcgagctggggcatgcgagaagataatagcaccctggaagaccagtgaagcgtatgaggatcggacctacaaatgatcgaggcatacctcgagagtgagacgaagaatttgccctcgtcaagccactttagtctgcgcacagcgcacacccgcccagcccgctgtggtgggctggactaactacacatcttcactttttcctaactcaatacttatctctttacacactcacccccttcaaatatgatacccttactctcttagtacacctaattcaccatacactcacttctatctctctcgcagtctcctttctacacaactacatataccaccacctcaccctacattactttatatgacccacctctccacaccacacccacaccacaccgcgtacgatacacttcccaacaaccctcctcaccaaaccaaccatttcttttcacttcatctacaacaccatatactcctaataaccctacaccctatagtattgtacctcactacctcacaacttcttattcttatctctatattctatttcatcatatgcctcccggca

SEQ ID NO: 650935 - DNA, 237 bp, Homo sapiens
  misc_feature (22)..(22): n is a, c, g, or t
  misc_feature (54)..(54): n is a, c, g, or t
aaaaaatcttagttgattatgntttatgtgtcatttaattaaggaatgaatttncttatttttatttcagtagcttttggggtacaagtggtttttggttgcatggatgaaattgtatagtggtgtaagtctgaaattttagtgcacctgtcacctgtaatagtgtgcattggtaccccaatatatagttttttaattccttccccttctgagtctccatagtccattatatcactt

SEQ ID NO: 650936 - DNA, 654 bp, Homo sapiens
tggaaaaagtcatggatggccagggggtgggcttgaaaccagcttgggggggttcgatcccttccctttttggtctaaatttaatgtatacgggtccttcgaatgtgtggtagggtggggggtgcatccatatagtcaccccaggtttatgggaggggttcttctactattaggactttccgcttcgaagcagaaggcttctcaaatcatgaaaattattaatattactggctgttagaagaaatgaatgacgcctacagatgataggatgttccatggtggtgtatgcatcggggtagcccgagtaacgtcggggcatcccggataggccgaaaaatgtgttgtggtggaaagaaatgttagatttacgccgatgaatatgatagtgaaagggatttgggcgtaggtatgggtctagggtgtagccgagagaataggggaaatcagtggaatagaagcctcctatgagggcaaatacagcccctatggataggacataggggaagtgagctacaacgtagtacgtgtcgtgtagcacgatgtcaagagatagagttggctaatacaatgccagtcaggccacctacgggtgaaaagaaagaagaatcctagggctcagagcactgcagcaaccattcaaattgctccgggaaa

SEQ ID NO: 650937 - DNA, 412 bp, Homo sapiens
  misc_feature (100)..(100): n is a, c, g, or t
  misc_feature (107)..(107): n is a, c, g, or t
  misc_feature (243)..(243): n is a, c, g, or t
  misc_feature (328)..(329): n is a, c, g, or t
  misc_feature (331)..(331): n is a, c, g, or t
ttatgtgtggaaaaatgcttggcctaatcctacaacaattataacaagcccttaagtcggtatcatgaaacttctgaagagaatagagcccaacttgtgntttaacnttttaaacttactgtcttctatacctatgttttacacaattataagattattcttatttttaaagagatctagaaatgaaacccctgaaagagacttctccctctacttgcccataaagatcctccagttttccgnacaggctttttcctagacatggaggaagtgcccagaaaaatactggacggatatacaaaaacataatgccacaaaaattttcctnncnagtaaggcagctgcggaaagtcggccagcgtcccgaccccagggacctgcagcctgggacttgtgaaggcccactgtgtag

SEQ ID NO: 650938 - DNA, 178 bp, Homo sapiens
aaaacagtgctgttggagatggagaggagataccaaattctggagacatttctgagttagaatctacagtatttatcagacaagggaaagattagacaaaggagttaagaagtactccaggtttcgattgggcaggtactaggcatagtttgaaagtagttattggatctctacatga

SEQ ID NO: 650939 - DNA, 513 bp, Homo sapiens
ttcacattttacatgaaatttaattttcatattttgtagtaaaagcccagaaaggtgctacttgaatgaagatgcacctgtctctacatagaaatctttttaacatcacagtagcgacgaccacagtcctagtttagaatcattattatgacgataggaatttgtagcagccctcaacccgtggccttctgaaccgtctctccactgtcctataagggagggctaactgtattcctggtcgctcctgggactgggagctcctggggaaggaatcctaaaggagtggttgtcaatgcattttcattaacagccgcgcttctcggcagcctcctagggctggggtggccacgtgctcccttaaactgttttcacaactcgaggctgtgctgtgggtggcaattgaaggtttccaagaacttttcgtttttctttgggccaacatttctgttttctgtcaatcaatagtttagttatttaaaaataagaaggtgaagagggagttatttagggtgg

SEQ ID NO: 650940 - DNA, 113 bp, Homo sapiens
atccatcaggattgttaagcctgggcctggacactggacaacagcaggatgctcaagaattttcaaagctctttatgtctctattggaagatactttgtctaaacaaaagaat

SEQ ID NO: 650941 - DNA, 480 bp, Homo sapiens
ttcacattttacatgaaatttaattttcatattttgtagtaaaagcccagaaaggtgctacttgaatgaagatgcacctgtctctacatagaaatctttttaacatcacagtagcgacgaccacagtcctagtttagaatcattattatgacgataggaatttgtagcagccctcaacccgtggccttctgaaccgtctctccactgtcctataagggagggctaactgtattcctggtcgctcctgggactgggagctcctggggaaggaatcctaaaggagtggttgtcaatgcattttcattaacagccgcgcttctcggcagcctcctagggctggggtggccacgtgctcccttaaactgttttctctattctttttgcgctgcgggggcaacgtgagggttgccaagggcgggggggggggcttgtgggccttcattttgtctcttctgtcaatcaacagcccagcctacctaa

SEQ ID NO: 650942 - DNA, 1408 bp, Homo sapiens
gttgggccggaggaaagcgggaagactcatcggagcgtgtggataagagccgacgcatatagttaaccctagatctcgaaatgcatcgtgattcctgtccattggcactgtaaggtattatgtcaggcacatcttgcgaaaccaatggccaaccaagcacggcacattggacactggagcttattggctcactcatggaaccactccgtacagctgtgtaggacgtaagcctcagcacaaccccacccaggctattgcctattaagtagcacatcttgcaagcatcccgcgcagcatgccagcctgcatagccaagtcctgcagcagcgtcagcatgcgcacagcacacacctcatgttgcgcctggccgcagctacacggaggctgcgcaaacttgtacgacaccatcgcgtcggcacacacaccaccaggcacagctaacacacacttcggttgggacaacataccttacaccttctctcggagggagcacggcacaccatcactatccgcacgcatggacactcaatccggcaactcctgagaacgcgcgcgtcactattccactaccctctcgaggtcctctcgctgatactatttctttaccacacgcacaccaggcggcacaaaacgccctcatcctatctgccgccactctacccgtggggaaccgacagaggtggcttcgcgcatttacgagcactaaggagaggaacttacagcgacaagaaccacgaacggaacgcagcgacttgagccggtgccaccacacgggccgacaaacaaatcacccatcacaacccaccacgccgggtaccacccaggacacccccccaccactacacacagcgccaccccgcaatacctccggaagcacataaagagatttcacaaacaagaacacagggggaaaaccataagccacacgaacacacgcaacgagcccacacaaccaaacggcaggcgacgaaccaaacgcacgcaacaaaaaaacaaacacccacaaccggaacgccagaaccaacaagcgcaacacgcgcaaccagagcccgagacacacccccagggacagcgaccgaaccacctccacaccaccaccaggaccgcgaccacccccaaccagccacagcccaccaccgccatgggccacctcaacatcaagacaaccgtatcctaacactgcaccgaccaacgaggccgaccgacaaaccggacgccaacaccaccgacacaaagaggcacaacagaacaacggagacccacctcaagccacgccaaccagagcgagggaacaacgccatctcggcacgcaaacaaacacaggagcacacgccactaccacaagcacggcaactagcgcacaaacaccgcctcacaacaaaccgccacaaacgagcatcacacaccc

SEQ ID NO: 650943 - DNA, 1258 bp, Homo sapiens
gcttcgggctcctggcagcatcgcagccccaggcggtgcctccatatgcgtcggagaagccagagctgcagggaccatggaaaaggaatactatgagccccgaggcgactctgcagtcgtgctgcgtctccgcgtgccgcggccagggctagcctagtggtctcaggctaaagtgtagccgcatccggtgacgacagttgtgtgccacatgttgtccgcagaattcctactaagcgagcgactggaactacgcatgatccagtcatgccagtctgctgccagcgcccatgtgaacccagttgatcgggcctcattgagggagcattgcacccgctatgcatacgaagcgacataccggagagaagcgccagttgcctgcatgccaagccgggtgaatgttcatgtgcgtgccgtgggaccacatcgaagatgtactacacgtgcagaagcatacttttcgttgcacatgcgccgtccagtggggcacttgcagagcccgcagctccaagagcatgcagagtctgggggaaggggtgaaacaaccgacgtggagtccccgttgcgacagggcaggggactactgtcgcgaggaataaccatccatcgggcccaaggcggtcccgcatgcgcaagtccccgcaacaggcagggtggttgaggtaaacacaaatgagtcttgggttggaagggacagccttccagggggaactggccccgagtacgcggagaaacagaggcctggcagaagaggaatcccagttagaaggaccaactgagccccactaagcacgtatgtccacgagagagccattgtccgtggatgcgcgttgggacacggtgtaccttggcagttaggcccatcttagggggacacgtttcgtttctccattgcatttcgcgttgtggcgcaacccgggactttaccttcggctggaccattcccttgggaagagcaaagcgcggccacttatactttctccctaggcaacgtggaaaaccaagagggaggaatccaggctaggggtccaaacgcaatggccagttacacggcattggggcatgacgggacaccccaccaaagtgcccaagggtttagcacttcaggcccacggacttcgaggcgaggccatctcggagatggtggcgcatgtccccataaatgttaacccttgataaatttgggtgaaccaaggccaactggggttaaccccaatgttacttgggaagcgatggtctacccacgagtaatcgcaagctg

SEQ ID NO: 650944 - DNA, 99 bp, Homo sapiens
gaagcggcgatagctgtcggtagcgaccgtggcgtccgagccgtcctttacgtggccggggaccttctcgaacacgtcccagacgctgggcccgcgccc

SEQ ID NO: 650945 - DNA, 88 bp, Homo sapiens
ggctttccaaattgcacacactcctggtttccctcacgattctctgactgcactttttcatcttcaccagcccttcagtcgtcccctc

SEQ ID NO: 650946 - DNA, 578 bp, Homo sapiens
atgagtgacatgaacttgcccacgaacacaaactctaggttcttcaacaggagaattttactgtgtatcttgtggttccactgtgtggagacattcctgggcacagttggtccgttagaattaaaagtcgaattttttttttttttaaattttttttttccccccaggactggtgtgtctggtcctgcgcacacaccgccaagtgtccccccacagtcagcagcaggtggggcctgaccatgggaacttgattgtcaagtcacgggaggtcttgacttttttatctcagttcatgtcctctcccataatgggaagggaccttggtctggtttccctctggggtgccttccaaaacgcatctcatgtccctggtgagggaataggtgagggcctgctgtgacctgctgtggctgcaagggtcacccagcggggcaaatcacgggagtagacaattggaccggtcacctgaaaaggatggccctcagacggcggggtacagggcctggggcaggctggagagagaaggggggcagagggtgacgggaccacaggggtctgggaaaaggggcaagaggggg

SEQ ID NO: 650947 - DNA, 501 bp, Homo sapiens
  misc_feature (492)..(492): n is a, c, g, or t
tgagatggagtctcgctctgtcacccaggctggagtgtagtggcgtgatctccgctcactgcaagctctgcctcctgggttcacgccattctcctgcctcagcctcccgagtagctgggactacaggtgcccgccaccatgcccggttaatttttttgtattttttaataaagacagggtttcaccatgctagccaggatggtctctatctcctgacctcatgatccacctgcctcggcctaccaaagtattgggattaccggggtgagccaccgagcctggccgacctcctcagcttctaaaggacacagtaccttggaggaatgtgcacggagggatggagtcctacactcctgggatgccgaaatgctgagagtcaagagactgggatttggggggacaaggcttccagggttccgcctgagcaagggagtttttgacttcttagacaggaggttctttcacttcctttggagtgggtctctgacctgngaatgtggg

SEQ ID NO: 650948 - DNA, 537 bp, Homo sapiens
gcaaggatgggggtaccttggagataatgataaatcaacaggttgaaccgtctaacaacagactttaatgtaattgtggaagcattgagcaaatccaaggcagcactcatggaaatcagtgaagataaaacaacaatcagaatgtcaccaagcaaacccctacctgaagtgactgatatgtatagaaatgatgtaaaaaacacataggtatatattaaaggcttcccagctgatgcaactcttgataacataaaagaatggttagaagatagaggtcaagtaataaatattcagataagaagaacgtagcatagagcatataggggatcaatactagttggagaaaatagcattgcatctgctaagaaaatttgaaaagaaccctggccagaagtagaaagaaagagagctggtaatacaaatcgaggacgataactatgccaaaaagaatgaagaaagaaagaataaaaggtggaagctaaataagaactaaagaggaaaagaagaaaacaaagtagaagagcatctgaaagaact

SEQ ID NO: 650949 - DNA, 213 bp, Homo sapiens
gtactggtgatatactggtctatatgagcgatttatacgaattgcattcttccccagattttgtttattcttgttgcgtaaataatcaaagatcaggtacctttaaaggacgaaagtaagtactggggtatcttacaccctaatctaaaattgttgcattatacatacatataacttggataaaaatgagtaacttggataagagtgcgtaca

SEQ ID NO: 650950 - DNA, 392 bp, Homo sapiens
  misc_feature (61)..(61): n is a, c, g, or t
  misc_feature (63)..(63): n is a, c, g, or t
  misc_feature (392)..(392): n is a, c, g, or t
atgtaatcagtaatctggaaaataaagaaaaattaaaatgcttatcaaatctaccaccagnangtaattagtgttaacatttgggtatattttcgtttagttttgttttttttttttaaaggcagtctcactctgttgcccaggctggagtgcagtggcgcaatcttggctcactgcaacctccacctcctgggttcaagcagttctcctgcctcagcctcccaggtagctgggactacaggcacatgccgccacgcccggataatttcttttgtgttttagtagagatggggtttcaccgtgttgcccaggctgatctccaactcctgagctcaggtaatccgcctgcctcggcctcccaaaatgctaggatcacaggcgtgagccacccn

SEQ ID NO: 650951 - DNA, 192 bp, Homo sapiens
tagggctcgatgttacatgatggggggtctggaccaagaggccccagaaagacaagggccagacgtaggcggggccatgggggtggaaggtatgtgatccttggacagctaatcatcaccagagctcccttcgttcgcggaacacgattcagccaggccatacctgcctgtccagccctcacctccacacac

SEQ ID NO: 650952 - DNA, 473 bp, Homo sapiens
catgtgcacagaacacatcagtctccagagcctctgggtctatactggcagcaaagtcacacaggggtgcacgggaactgttcccacaccagagtgtgaggctttgggcactcgtgggtgtggccacagctcttgccaggttggggaacttgcaggccacagggtatgtgcggcgaggctgaaaggtggccaacggtcgactgcaatgccctcaatgaccataaggcaccagcccgggcgtctcacagcatgttgatggactcgatcatgttggtgtccaggtcggtccagtaaaggctctggtcagcgtagtaacacggtaaggccgttgcaccgtcacaccttgtccaccagcagtcatacagttggtcctgtccatcaaggtcgacgcgattcgtgacatcgcgcctcactcggtacagtatatgtagcccttggtcagatccaggcccaaccctctcgggttgctcgcg

SEQ ID NO: 650953 - DNA, 1559 bp, Homo sapiens
  misc_feature (5)..(6): n is a, c, g, or t
gtcanntcgtcgaacccacggcgctctgcacactcaaagagaccgagaagattactgtatgtggggaggggggatggtccagttctatgacctcctcaacatatacgagctcaacggtttaccctcggagaccaacacccgtatatatttaatggtgactttgtggaccgaggctccttctctgtagaagatgatccctcacccattaatcgagacttcaaggctgcgctgtacccagttatcacatttcaccatccttcgaggcaaccacagagacagacaacatgaaccagaatctacaggtattcagagggtgcaggtgaaggccaagtacaacagcccagaatggtacgagacatcatattagacgaggatgattacgagagtggcgtcccgaatatggaaccagatgcactcacagcggcacaacgactgcttgaatcaatgacacagagaggaccttgatctcccgctgaacagagacaggcactgtcacaccatgagcaatgacaaatcacaggcaaagacacatacgacacgccggcaacaatcgacacgacacgacccacccagaggcactacacacagcggagccccccaaccggatgactcaaccacagtgcacaaacatgggactaccgagcacatccgcaggccagccaacacaagaaaaaccacggacggacgccataccgaactacgaagagacacaagccgcgacccgacaccaccgagcagcaccaggcaacaaagacaaagaacggcgaacgacactaggagacacaacaagacggaggcaaaagcgagaccggtagaccaacaggcgcacccacaagagagaaccacaccacaccacacacgtcagcagaccagacaaacatagcaagagacacacaagccacacggcataccgaagagagcaacagcaagagcgagaaagcgagaacaacgacagcacgcagcggcaaaccgcgacagagcacgagacgaccacgacacgagaacgagacagacggagcgaagaagccacgagaaggagaacagcgaatagcagagagcagagaacgagagccaagcaagcgccgaccagcagaggaacgagagcgacacgaggacacgagcgaacaaggtcagccgcgaggacaggggagagcaagaacacgtgacgaagggcgatcacacgacaaccgagccaagacgcagaagcagccaaggaacgaacagcaccaacgaacacccaccaccacgccacacaccatagcacacaacgcacgacgacacgagcgcagcaggcaagcaatgagacaacacaccaaccccacaaagcaaccggcgacacaaccaacacgagcccgaacacgcaccaaccaaccacgacaacgccaggagcacaggccacacacagaccacagacgaagacgagcaatcgcacgcaggcgaaccagacaatcaagacgcacgacaagcccgagaacggagagcagcaccgaaccaccacacacccacacacagcaacacacaggagcacgcacaaacgcgcaggcacgcacacgaccagc

SEQ ID NO: 650954 - DNA, 202 bp, Homo sapiens
attagccctgatgcggaagcgatcattcaggaggttctgacaggaacagcatggattccgtggactgctgttgcagtctcaagaagactgagagcttccaaaatgctcaggcaggctccaaccctaagaaggtcgacctctatcatctggagagatcgcaggtgccaacagcacttagctcggtcggctacattggcatcca

SEQ ID NO: 650955 - DNA, 316 bp, Homo sapiens
caaaccatgaagtagtgccttcagtgctcagtataggtctggcattcatcagcattcccattgcaaaggggtatgagaaaatgacttcttattatggtcccagttttttttcttgattcctaaaaaagacaagtacagtgttactaagggtacctactaagcttctgagtggtagatgaatatctaaaaaaaaaaatggtttgtaggcgttggatttgctcaatgttatgcccacccagaatgttataaaccttctgttgtttcaggcagccttctgttcatcctataaacttttaatgagtgcctgtttgtaaac

SEQ ID NO: 650956 - DNA, 202 bp, Homo sapiens
caggtcatcactgtgataaatcatgctcatatgaattttcccttgataggatgtgacatgaatgacactacctctgtagtcttcctctaagatacgtaagctcagtctcatactgagtgaagagagttgacaaatatcaactgcgggacattctaccaaacagctgtacttgaacccctcaataagtgtcaggggagaatga

SEQ ID NO: 650957 - DNA, 1011 bp, Homo sapiens
gacaatggcggagtgatgcctggtgcagcgggggggccgggggccctggtggccctgggatggggaatcgcggtggctaccgcggacgtgtttcggcatgtgcatccggggccgaatgtcgcgaggccgtgtgatggaggccggggcctgaggccgcggagcgtcggcggcaggcaacggcccgaggaataacggaggtggactgccgcgtcgaccggagagtagggccggcgtatgaatcgaatcggaacgtgacaccgatcataccgtccgctggtaggatgatcgtatcgtccttctcgctcgtgccccattagcggaatcagagactcatggatttcttccgtgtgggggatcgtcgtcgtccaaggatgacggtttggcaaggattcatgcacaaggtgctgagcaatcatcagccgtgtgtccggccaagcagccaacgaggttcaaggtcgatttgtggcttatccggggcactaacgaatggccaacgtcggggctggagtctgtgaaggttgttctcaaggacggtgggccagacgcacagtcgcagttgggggccaatcattccttggtccaagctttctcgcgagtcgctctcccgttgctgcagggagagcatacatggtgggaacaatgagtcggcaaatgcaccaccatgtgtcccattgcaaagggttaacaagagaccgccttgacgagaatcttgatgcatgagtaactgggcgtccataccgcttgatgccccatgggagtaaactgggaaaatacggtctgccggatatacatggtggcgcttaagaaaagcatagcttcgatgaatgggctcgggatatcgggataacgtgtgtaccccgtcatccccggaggctgaactgtcggcgctggggaaagcttcggtcagagcgcacctatggaatgcccctttcctaagaacgtaagataactgaacccccgaactctgaagagagactgattcaccaaagattcgtattagaattcatgacc

SEQ ID NO: 650958 - DNA, 160 bp, Homo sapiens
cataaaacaaaggtttatttagctactgggttctgctggctgtccattaagcacggtgccagtatctgcttctggtgagggcctcaggctgcttccagtcatggtggaaggtgaagaagagctcgcatatgcatagatcacatggcacgcgatatcgcca

SEQ ID NO: 650959 - DNA, 1323 bp, Homo sapiens
taaaaggttcagcttttaattggaacctggttataaaaaaggtttagtcaaaaaaaccaaagcccaggtcttcatcaaacctcctctcggatttcttcttttctttgtgcttctccacttttctttctctcctctcagctgtgagcagcagcagtgtgggagggggcgaggaccctccttgcgtggtgtgcagccaccgagcttgcttggaccaggttccaaccggcccctaaacattgtgacaaatgtaaaggctctcccaatgtgtgtgtgaccgttgtgcgccaggggcccttgttgcaaaacaagccacagggcacaaaaagggctctcaaacatttaacacccgggttgctttacatatagagggcgctattgtgactcttatattcctctccgtgtacatgtgtgtcaccctcatctcggctcgggtcgacaagaaattagaagtgcgcccagagatataaaaattcgcagggcgagaacctctcgggaaaaccaaaaggcgcacagtgggcgcgcgggcgcgcacagtgtgtcatagagagttcttgtgagcgatctgccccggaaagcgccgaggggcctattaatctcgccgcgcgaatgtgaaaaagtgtgaagggcgcctctacaacccccaaaaacggcacaaccacattatagatttctccctcgagaaaaagggaaacccgaaaagaacaacgcggggaaagtttgtgccacacgaagagaagcgttacaaccacaggaaagagggccgaaaaaggcgggcccaaggggggaaaagggggggggcgcccccgcgtggacacatttttgggcgcccaagaaagtcggaatggtctgtgtcccagggggtgcctttccggggccctgtggagggtgaacccccccgggtctccccccaacagaaaggtgccatctgtgggtggtgcccccagaggggcctctttggtgttgcgggaaagaggggtggccccccacgagggtgggcactttttgtgttcgaacccgcttgtttttttttgcccccaccaaaccagggtattcaagacccccctgtaggggcctatgtgttttgtggacaaacacacgatcacaacgcacattccaggggggaacgccccagggggccttgttggggggaagtaaacccagaccttaaggcaaaaggacggcgtcgtgtgagagtaaatgtaaattgagagtcctcacaaggagaggcaccgcatttgttctccacgcacagggagatttaagaaaccccacaacgagtgtagtcgtcacaactgacaaggcacgtggtgtcccacaaaaacc

SEQ ID NO: 650960 - DNA, 106 bp, Homo sapiens
atacctggaaaggctttctaccttcagctgttgaaatcaaaggaaatactgagattgcttcaccacagacaccaccttgctcaggtgaggtggcatctgataaaca

SEQ ID NO: 650961 - DNA, 539 bp, Homo sapiens
cattcttcctatctattcttcctataacacacctttatcaagcatacccaggagtaatcttcaaatcttttgttatattctgaaacaaaagattgtgagtgttgcactttacctgatacacgctgatttagaaaatacagaaaccatacctcactaataactttaaaatcaaagctgtgcaaagactagggggcctatacttcatatgtattatgtactatgtaaaatattgactatcacacaactatttccttggatgtaattctttgttaccctttacaagtataagtgtttacaagtataagtgttaccttacatggaaacgaagaaacaaaattcataaatttaaattcataaatttagctgaaagatactgattcaatttgtatacagtgaatataaatgagacgacagcaaaattttcatgaaatgtaaaatatttttatagtttgttcatactatatgaggttctattttaaatgactttctggattttaaaaaatttctttaaatacaatcatttttgtaatatttaaaaa

SEQ ID NO: 650962 - DNA, 791 bp, Homo sapiens
  misc_feature (45)..(45): n is a, c, g, or t
  misc_feature (74)..(74): n is a, c, g, or t
  misc_feature (147)..(147): n is a, c, g, or t
  misc_feature (159)..(159): n is a, c, g, or t
  misc_feature (205)..(205): n is a, c, g, or t
  misc_feature (215)..(215): n is a, c, g, or t
  misc_feature (230)..(230): n is a, c, g, or t
  misc_feature (284)..(284): n is a, c, g, or t
gggttcatcccaagcaaacggcggtttgagcgagagagtggtcanggttaaggccaagaactgggctcagctcntggtcgcagggtcgagaagactcgtttctgagctacgagcaagtgacgcagatggaagtgcactatgctcgcnccatcatcatcntggggccaacaaggaccgcgccaacgatgatctctctcgagtttcnccgacaagtntggatctgtgtttcnccatacgacacggcccaagcgggagtatgagatagatggcgggatttaccactntgtgtcgtcccgggagaaaatggagaaggacattcaggcgcacaagttcattgaggccggccagtacaacagccacctctatgggaccagcgtccagtccgtgcgagaggtggcagagcagagcagagcttgcagtgagccaagatcgtgccactgcactccagcctgggcgacagagcgagactctgtctcaaaaaaaaaaaaaaaaaaaaaatacaaaaattggccaggcgcagtgttctcaggcctataatcccagcactttggaaggccgaggtgggcggatcacgaggtcaagagatcgagaccatcatagacaacatggtgaacccccatctctactaaaaatacagaaaaattagccaggcgtggtggcacatgtcctgttatcccagctactcgggaggctgaggcaggagaatcgcttgaaccctttaggcggaggttgcagtgagctgagattgtgccactgcactccagcctggcaacagagtgagactccatctc

SEQ ID NO: 650963 - DNA, 267 bp, Homo sapiens
ctaattcgcggccgcgtcgacgattactccagagctgagagtaggaaggcaggcaggcagagagggaggcagagaggcagagagggaggcagagaggcagagagggaggcagagaggcagagagggaggcagagaggcagagagggaggcagagaggcagagagggaggcagagaggcagagagggaggcagagagggaggcagagagggaggcagagaggcagagagggaggcagggaggcagagagggaggcagagaggcagaga

SEQ ID NO: 650964 - DNA, 135 bp, Homo sapiens
attcgcggccgcgtcgactgtgttttctagttcgacgcctacctttagggacataacttcactttgtaacccaagccatactttattaaattaaccctagctgaatgaattgtgaaaatgtaagtgaccaatgat

SEQ ID NO: 650965 - DNA, 825 bp, Homo sapiens
cgttgtctggatttcccgtcgtaagttagagggaaattttcagcaatgtccggagccctgtatgtcctgcaaatgaaggaggaggatgtccttaagttccttgcagcaaggaacccacttaggtggcgccaatcttgatcttccagatggaacagtacatctataaagaggaaaagtgaagtggcatctatatcataaatcgtcgaatgaggaccgtggggagaagcttcgtgcgtggcgagtctcgtgcaattgttgccattgaaaacgccttgctgatgtcagtgttatatcctccaggaatactggccagagggctgtgctgaagtttgctgctgccactgggagccagtccaattgctggccgcgttcgactcctggaaccgttcactaaccagtatccaaggcagacctattccgggagccacgagattctctgtgggttactgaccccaggcgctgactcgatcgaagcactctcacggaggccctctgatgtggaacctagctacaacattgcgctgcgtaacacagattctcctctgcgctatgtggacatcgccatcccatgcaacaacgagggagctcactcagctgggtttgatgtggtggatgctggctcgggaagttctgtgcatgcgtggcagcatttcccgttgaacacccatgggaggtcctgcctgctccgtccttctagcggaactcctgactgagattgcccccgactcagccggctgctgttgcagaaggccgtgagcacggaaggcattccggctgcccggctgctcccgctcctgagttcactgctactcagcctgcgctgca

SEQ ID NO: 650966 - DNA, 168 bp, Homo sapiens
gtgcttcacataatatatagaagcatattatttatctcaatattccctagagcctgggctgcggacagatggctcatggctttaaccctagcacgttgtggtggccaatgcgtggcagatccacgttgagcgtcatggagttcgtagaccagtctgtgccgggagatc

SEQ ID NO: 650967 - DNA, 785 bp, Homo sapiens
ccgaggaaaaacgtgtactattagccatggtcaaccaccacacgtgttacttcgacattgccgtcgacggcgagcccttgaggccgcagtctcctttgagctgtacgcagacaaggtcccaaacgacagcagaacaattgttcgtgctcatgagcactggagagacaaggattaggttataagggttccatgcatttcacagaatatataccagggtttatgtgtcagggtggagacattcacacagaccataatggcactggatggcaacgtccatctatggcggagaaatcctgaagactgataacttcatcctaacagcataccggagtccaggaaatctatgatacagtggcccacaaatgctggaaccaatcacacaactggttcccaagtcctatcactcatgcaactgaccaagcactgacatgactatgcgcatggctagccactgtggctagacaggggcaacagcagacaacacagcgccatgaactacatcggcggacagcgcccactgcaaaaccgacccagagcatccaaagagcaatggccaaggaaccacgcaccccacagaatcaccaatcagcagcaacgatgaacaaaaatacgcaacataaacgtctgggacatggacggacgaaaaacgtacaaacaacaaggacacacacaacataaccaggaaagcacaacggcagaagacaccaccaaccaagccccccaaacaggatcacgccaacaacaactacaaaatctaggagaacccacgccagccaccacaacca

SEQ ID NO: 650968 - DNA, 116 bp, Homo sapiens
gtcaaaaaaaaaccagagtcttgtttaagtaacccggttcgaaattgggctttgaaaccccccttcccacgttgttttttcctttctcaataaaaaacaccggggggacgttttcc

SEQ ID NO: 650969 - DNA, 151 bp, Homo sapiens
tgagtgtctagaggatcactgaagtcaccgcgtggcttggccaagtgcatacgcacaacctatggtgaacaataacgagctggtactacgcattgcttcggacagcagatacttgaacttcgccaggtttgcagctacatctgctgatcaa

SEQ ID NO: 650970 - DNA, 350 bp, Homo sapiens
  misc_feature (3)..(3): n is a, c, g, or t
ggntcgacgtacaacatttggaggccccagcgagaaagccatgaggagagagccgggctcccccggaaggacggccggcttgtggggggtgccacctaaaaaaaaaccttcaggtcctcgaaaagtgaccgtcttccagaggagagcggatcgactacccggtgggtgcccataaaaattccacctctgagtcctcgacttctgaccctgaggtcacgtaggtcagatttgacttcagttctaggaagagggaagcggccctgatgagggtgtccctctttcgactctgcatgtttccctaggacgctagaaggtagagccctggttttctgttaggcacctctgtgtct

SEQ ID NO: 650971 - DNA, 1109 bp, Homo sapiens
ggcactgctctggtctagttacaaacaggctgcgtggcatggagggacggagtctccagctcctggcctcggagacagtcctcctgatgtaggtctgcccaaaggtgctagtgtgtccggagattgatgggttctgtggtctcactgagcttcacacggaagtgcaagccgggggaccctcggcagctcgtgcgtacatggtgctgcatgtctgcggcagagactgatgggtccgtcagggctccaaacgaggagcttgcaaactcaaaggtcaagtcctcatcagaggtatctgacaattccaggccgtgttccaccagaagagtgatttcactggtttcatgccaccgaggcgaaccctgaggccgtccgacctttctctggggtgaataaagctgcacagacagccgcagggagtggaaaagtcagtggggagactcccgtagttaaggatcttcgagctgcagtgtggtgtggaacgtgaatcaagggactcaatcgagatgttacgggggaccatggctgcaagggaaggtccaaacgaacagcattgtagtacgcaactacatcggacgtgaccacggtgaaggtatacgccaaacagccaagtacccgtggaagaccatcggggagttcttgggggatgagcttcatggggggcatctgaaggggttcctttagaattaggctccaacatcgacactggtgggctgggacgcataaggagttccccaaggtgggcgggcctcgtttatccaaaaagggcttgaatggcgttaggacaagggcttgggggaggattccacgcttaagaaagtcgccgttatgcttggggggccaccattcttactggactaggtgtcaacaaaaggcaaagtgttccgcaattgagtggccggtgaacgatttacagtgggcccttccaagggtacacaaaaggacaattgggggcgacggcttggagactcccttggagaagatcgaaacggggttaggaaccctccaccaacacgggggggacagagaaccgtacgtgaaccccgttttatggccgtcgatagtggaagtccatggggagcaggattacacccgcgaaggacccgtggaac

SEQ ID NO: 650972 - DNA, 102 bp, Homo sapiens
acggccgtgtattactgtgcgagagatttggacgatattgtagtggtggtagctgctaacgataagaggtttgactactggggccagggaaccctggtcacc

SEQ ID NO: 650973 - DNA, 135 bp, Homo sapiens
caccctaaatttattactgtatcttttcaaaagttgtaaaatttattcaaccgcctacgaccaactggagggagtatagagcggaattccatgaagtagagatgcattaagttcataataaatttagggttgatg

SEQ ID NO: 650974 - DNA, 198 bp, Homo sapiens
gcgcggaggccgcaacgatgcctggagttactgtaaaagacgtgaaccagcaggagttcgtaagagtctctggcggccttcctcaaaaagtccgggacgctgaaagtccccctatggtgggataccaacaagctcgccaatcacaaagatctttctccctacgatgagacttgttctacaagcgagcttcttacacag

SEQ ID NO: 650975 - DNA, 795 bp, Homo sapiens
  misc_feature (549)..(549): n is a, c, g, or t
gttctttcacttctaaaatgcatttaagatcatctatggctgtgttgttacatgattcaatggctcattccttcttgttgctgagtaatattccattgtatggatataccacagcttatctatttccttgttgaagacattttagttgctttcagtttttagtgactatgaataaaactggtatagacgttgtatatagattttgtgtggacatgttttaaaatcacctgggtaaatacttagaaatatgattgctggctatatggttaagttttatacttagttttataagaaactgccacactgtcttccagagtggctgtatcattttgcattcccaccaacaatgattgagagtttgctattctgcatccttgccagcatttattattgtcagtcttttggattttagccattttaatggggtgtgtagtggcaattcattgtagttttaatttattgctttaatgacatgatgttgagcatcttctcatgtgtttattgccgtttgtatattacagtatgttcaccaaactccgtgacatgcangtactattttacaaccgttatgtacctgaactaaataattaaataaatagcgtgcttttcaacaatggtttgcagacggggcgccacggagacatccggttacacaaaaaaaattccgcccgaattacatttcgcggagaaatgtgcacagggtcgcaccgcgctaggctcgtgtgtcgacagcacggagacgcgcaaaccaacacgcaagcaacaagcacacacacacgagccagcaacaacagg

SEQ ID NO: 650976 - DNA, 107 bp, Homo sapiens
attctgagattcagtttggttctcctggatgttatgctctgtattggtacctgtaatatagggaaacacaacttttttggggaaagccctttgaccccagccgatcg

SEQ ID NO: 650977 - DNA, 203 bp, Homo sapiens
acttctgacttcaaaataataaatcccacaggctgctggtattggatacgtactcgaacctgacgcggcatctatttggggttaagccaagacctgcatagaaacaggcaggaacacagacagtcacatgagatattcactgaaagatgacaaccttaaacacttcaggaacatatagagtcaaaggaacgatgtattatttc

SEQ ID NO: 650978 - DNA, 576 bp, Homo sapiens
gggtatttcagcacggtttttgaagggataaggtgtttttgacagcgggtgttatagcgcccgttgagctgaacaatgcttgacgcccagttgttttgagggccaccacagaaaaaataaggggcgacacccgcgcccaatgggtgttcccccccctggaaggtagcacgcgttatacccgtactatcgtgcgaaagaagcgcccgggtaaaaaagtgaggtaagaggaaaaaactgtagtgcacaccccgttgtcgccaacccctagaggcgagtttaccacctgctggttctcttttggacgtaaatgaaggagagaaaccacgccactggagcagcactattactctcttccgcacacctggggctgttccccaatctcgtgtgggcccccacccttggcacacgaggtgtaggggggaatatacaatatcaccatgtttctatattctgttaaaataatattctatcagccccccggggccgcctagaattgaaagtatagatccatgctggattccccgtgtgaagataacaagttcgacaccatactgtccccacaattagtcgagacaa

SEQ ID NO: 650979 - DNA, 149 bp, Homo sapiens
ttgcaatcctccaggtgcaggtctggctcagggcccaggggcccatccaccatccacacttccttggttttccttcccaccactcttgcaggcaagcaggctttccaacagtcacaggtcagcagcagccgggccagggtgtcacggca

SEQ ID NO: 650980 - DNA, 123 bp, Homo sapiens
ctgggtggcgactggaccgctcttctactggtgcctgtggatttcctgggcgccttcgtgggttcattcatcgcgcgcatctcgcgcgggcgcagtgtgcgcgagttcgtgatcggcgtggtg

SEQ ID NO: 650981 - DNA, 170 bp, Homo sapiens
tcactacgtgacctgacgtggtcacgtggttccctgagattcaagggccaatgccttcagaacaccatgcagtttttccgagcaattactgttctccatgcacacacaccatttgtctgtgtagagcacactgaggcgtacttacttaatttccgtcttgtcttttgacc

SEQ ID NO: 650982 - DNA, 111 bp, Homo sapiens
ctgtagtcaatatgttaagccactttcgtagtctatttgtgtccactggagtatttacaactcagtgagtatagcttattggggaggggtgatctaaacatctttacgcgg

SEQ ID NO: 650983 - DNA, 894 bp, Homo sapiens
accccaggcctgggtcagacatggcacatggcaggtgacacagtgacagaggggtccccagctgccacctcacccaccgcaattcatttagtagcatggcacatgggtgcagctcctggcacggctttctcagtgcctatgcctgtgatgcctcgatggtgcttggatgatgctggtgaatgacatggcatgtgctctggtgtgagtttgcatgcatgtgactgtcaccatgtgagtgtgctgaacgctgtgccactgtgtgatgtgtgtgtgtgcccctgtgtgtacatttgctgcatgcaagtgatgtgcttgcatgtggtgctctgttgcctgctgtggctgcctgtggtcccactgatggctacttgctgtgcccatgtggtcttgtgtgctgtgagatgtggcccgacagttgtgactttgtgtttgagctgcttgtatttgcccatcagcctgactcaggcctccttgggtgcctaggtgctttgtgcaatgaacattgtactatggcagtctcaaggggtgaatgtcaatgggtgacattgtgtgtgctgatgacgcagaacataggcagatgtgcgtggctgtggggctggaggttggaatagcagcttctccagtgacgtggactggattgtgttgcatgtggcagtgggtgttgacgcgagctgcacgcgtgggctgtgcctgaatgctgtggatggcacgttgtgccttccaagaagccctgttgcgccaaaggggcaggggcactctgctgggcgtgatgacgggaggcctgggaatcggttgccctcaggcgtatcgggcctggaggacagagtggcagtgtctccaagctgtgggtttgtgacgtgcccacgcatgtggccgaagggcaagacagccatg

SEQ ID NO: 650984 - DNA, 361 bp, Homo sapiens
  misc_feature (1)..(1): n is a, c, g, or t
nggattattttacaagataccaccagaggaagctcccctggtcttaaatcaacaaagtgaaacaacgtggttaggagcagtcctcctcacacttgaacatggctgagaacggcagtgagatcttattaagaagcaggttctgattcaaccagtgtgggaaagagtttgagaatcaacacttttttttttttagggccacatccttggcattgggaagttgccaggcagctagggggtcgaatgggagctgcagctgccagccacagccacagcaatatggaatccaagctgggtctgcgacctccattgcagctcacaggtgatgcgagcaaggtcagggacggagcccaaatcctcatga

SEQ ID NO: 650985 - DNA, 1053 bp, Homo sapiens
gtgctctgcgcttgctgtgctggtgtgtggctgttttgtgcgctttgttggtggttgtcgccgtgcgggtgtgcgtgcgtgtccaggtttcggctgttccgattttgctcgcccggtgttttcgcctgtgcgccctgggacccgcggaggccccgcgcggctgggcaccttacccctggtgagccaagtgtgcagcgctctttgcccggggagttgggtccagacttaccgttgttgcgcctgacccgggggttcgttgcgcgtcaagtgccgtggttttggtgggagcccccgctgggcccctaaggatcctctgcgcccgcatcgcctcccgaggggagattgaagcttctgaggaatcatgttctagagaccttgtgaccccctgtcacccctcatcgatgcttcatgaaagccagatttatgatgtggaaaatgacaccggattcccggaaggctatccgacccctatccccctgccctgtacttactggcccaagcccattttcgacccaccccgccttccacccagatcagcttcgggcccagatgatcctgtttgcttttggccagtgccctggctcaggcccggctcctctatgggaatgagtgcccacggttcttggaggccgcccctggtggttccgaggcgctgggcccggagtggaacgtgtctgtccctttcctagtgtttcacactggatatccaccacgacctggaactctaaacgagggtgtcacagaaatttggcctcgggtggaactcacgaccacgctccttctatcacgcactttttggtgttctccccgtgatccacaaagagagtggttgttggaacctcgttggccccggttggtttcacagcccgagacacttcagaaagtttttagctctatatttgcactggtgctgcgtgagcgcgaggaccccttctgaatcctgaaacccctcttgcctcttctttccaccggaagagggcctgggccccctggagcctccgtgcccctttggcctgctgctttcgctgaccataaagagcccctgcgttgcca

SEQ ID NO: 650986 - DNA, 907 bp, Homo sapiens
  misc_feature (38)..(38): n is a, c, g, or t
  misc_feature (72)..(72): n is a, c, g, or t
  misc_feature (78)..(78): n is a, c, g, or t
  misc_feature (85)..(85): n is a, c, g, or t
  misc_feature (98)..(98): n is a, c, g, or t
  misc_feature (102)..(102): n is a, c, g, or t
  misc_feature (110)..(112): n is a, c, g, or t
  misc_feature (118)..(118): n is a, c, g, or t
  misc_feature (142)..(142): n is a, c, g, or t
  misc_feature (157)..(157): n is a, c, g, or t
  misc_feature (159)..(159): n is a, c, g, or t
  misc_feature (181)..(181): n is a, c, g, or t
  misc_feature (193)..(193): n is a, c, g, or t
  misc_feature (198)..(198): n is a, c, g, or t
  misc_feature (226)..(234): n is a, c, g, or t
  misc_feature (246)..(246): n is a, c, g, or t
  misc_feature (262)..(262): n is a, c, g, or t
  misc_feature (264)..(266): n is a, c, g, or t
  misc_feature (271)..(271): n is a, c, g, or t
  misc_feature (277)..(277): n is a, c, g, or t
  misc_feature (279)..(279): n is a, c, g, or t
  misc_feature (305)..(305): n is a, c, g, or t
  misc_feature (368)..(368): n is a, c, g, or t
  misc_feature (444)..(444): n is a, c, g, or t
  misc_feature (755)..(755): n is a, c, g, or t
  misc_feature (759)..(759): n is a, c, g, or t
  misc_feature (780)..(780): n is a, c, g, or t
  misc_feature (801)..(801): n is a, c, g, or t
  misc_feature (819)..(819): n is a, c, g, or t
  misc_feature (906)..(906): n is a, c, g, or t
tcgaggctcacatgactctagacacttggtggaaagtnaggcgagaaaaacatattgacttgggccaattanacaaanacaaagntagaactgccaanaagnctcaaaannncttggnttctgtagaagttctaaggaagcngtacgaactccacgnangtggggcgctaactagcagggncccctgcaagtnttggnagggggcctcgagctgcctgggctgacnnnnnnnnnggggtctgtgtngccaacaggtgaccgntnnnttgcntgcccncngcttacttggccaaggggtttctgangttcctgccggcaaacttagccttgctgcccagctcctcttcaattctgaggagctggttgtncttggccaagcgctcagatcggcaaggggcaccagtcttgatctgcccagtgcacagccccacaaccaggtcagcnatgaaggtatcttcagtctcccccgaacgatgagacaccatgacgccccaaccattggcctgggccagcttgcacgcctgaagagactcggtcacggagccaatctggttgactttgagcaggaggcagttgcaggacttctcgttcacggccttggcgatcctctttgggttggtcactgtgagatcatcccccactacctggattcctgcactggctgtgaacttctgccaagctccccagtcatcctggtcaaagggatcttcgatagacaccactgggtagtccttgatgaaggacttgtacaggtnagcnagctggtcaggcgagatgtanctgctggggtcatcgggaganttgaagtccaggtcatanttcccagacctgaataactcggagccgctacgtccatgccgatgaccacttatcagtgtagcagctttcccatagcagtttcagcant

SEQ ID NO: 650987 - DNA, 1225 bp, Homo sapiens
agcaatggtggatactgaaggcggaggtggttgcccgaagaagggaactctggcggtgaaagctgacggcgtcgggggtggagcgcatgtaattgctgtgaccgacgcctatggcctgcctgatcatattcctccaagacgaaggcaggacggacagagtgtcggatcagcgatcgtacgagacaaactttctccgacggaaggaggtgaccctatgctgcacgtcgcacgacaagctgaacgggtggagtcaggggccagagtggtaggaacgaccgatgcgtgaggcaggtgacaacagagtcgatgtccagggaacacgaaccttgcggacgacttcggagagaggaatgagagcgagaggcgtagattcatctgagtaggaagcgcaatgaggggatggtagagaaagatgagtgaccaggaaattgctgggagagaaacaccgcacaggtggcgttgggtaggtgacttttcagtatcttgggaacgaagcgtcttggaatggttggcaccgaattgaaagataatgatgtgcatcgtagcgacacgaaggctgtttgcagggcatgcgaaagtctagcaagggaaccagtttcataggaaaagaaagggtatccaggatcgattcccgtgaaggcggatgccaaaagttattcggaagtaagaataggtccggtcgcttggggcattagatacgaactcaggtggtacgttgagcgggacctccaggtctggaggccttggcacaaaaaagcaccttcgtggcgcattggggggtccccgaaggacggatgaaacaataatggtagaccggttgtggggtttacgataagtgaaggaatcgaaagagataagaattcttgcgtcgaaaaggatcagtgcgtaagctcggatgaagaagatcgggagattgtgaatgcggagtggggactactgtcgaactcgaaggcgctccattctgtgaacaggaattgaatttcaaccaggggagagtaacaggaagtgttgcggtccggccaagtggtgtaaattctgccgggaaattcacacaacaatcattggtgccgcaccgtagagccaccaatgagtaaagagttggggttggatggaatggtatgacacaaaggttattatatgatagcgtatgcacttgaggaaaagggttgcttgtagacacgtaaggcaatttggacgaaaagtagggcagcacctgtagggatta

SEQ ID NO: 650988 - DNA, 1104 bp, Homo sapiens
ggctacgatacacagagcgtcaccagcaatgccatcctcttcgtgcagacagctatgggacttccaggagacggcaggcgccatgctggacctcccaagagaccagctcttcgggcaccagctacagctctgagttcagcaagcggctgctaagcacctatatctgtaaaggtgctgggcaacctgcagttgaacttgctgtgcaagtccaaggtgtacgaggacaccagactctgagacgccatacttccatgcacagacaactacaattacatcctacaagtccactggagaatacccctacacccgacccaggtctgaactgactccagcatggtggcagctgcacacagaagactgcatgagcgcgtcctaccgggcagcacatagagcacgcagatccagaccataccagcgcagcatggtcaaaggtgaaagataacatcgccagagacgaatctaccaatgtgataccagccagggagctcaagactccgaggcacacaggccgcgagcagcacaaatccacaggagccgtaccacacagggcaccaaccccactgggcctacgacaccacacccagacgcgaaatccccccaaagcgcctgggccactaccaagcacaccagaccccacaggagacaggactcagcccaggaccaagcacagacaccaaaagatccacagcacgcacccaacaggaaagacacgaactaccagaaaacgcgggggcacgcccgtggcccccctcaaccacaggaacacccgagagaaacgtacaatacacaaacaccagcgcgtgcacgccaggccgagacgcacaaaatggacacccgacaaagagcccaaaagcagaccacaacacacacgcgcagcgccggcacaaccacagagcaccagcacagagccgccaccgggcacggggaaccgcccaacacgaagtggccccgagtgccaacagcagcgacaaacggaacacaacacaccagcgacaaaccgcacaaccacacagcgccaaggagacagagcgcaaccacgcccaccgccgcaccacagcagaaacggcaacaaaacgcagcacccagggaagacaggaagacacc

SEQ ID NO: 650989 - DNA, 217 bp, Homo sapiens
acgggtgtcatgggagtcgaggcatgaaagagatgtatgcagtgatcccgttcctgagatccaaacagcaagtatacagcagtgaaatgtccagtcgtaacgtgggattatgtcttataagtcctttctttctttttttttttttattttaaggaaaggaattcgcaacaggtggccaaggttgaagtgcgggggtcaaattctcgattcccaatat

SEQ ID NO: 650990 - DNA, 156 bp, Homo sapiens
  misc_feature (152)..(152): n is a, c, g, or t
atactgtttgtggcggccaagcgctcattgcgacgttcgctttgatccttcgcactgctccgctcttcctcactgattgtgacagcaaacacttcaccacgcgttggattgttcacctcactacctaggcgaacgtgcagctgcgggttagntacc

SEQ ID NO: 650991 - DNA, 286 bp, Homo sapiens
ctactatggaagctgcatgaaggagaatctacttgtactcgggaggcagaggttgcaatgagccgagattgtgccacgtgtactccagcccagatgacagagactccatctctataaaaaagtgggggcgtaacagaacgggagaaaacatttgcaattttatagtcgttggactgaagattcatatagatttcctagctgtgtgattgctcaggagctgaactgtaagcatatgcactaagactccccaaacgagcggggagccttctctgaccacatgggcctc

SEQ ID NO: 650992 - DNA, 644 bp, Homo sapiens
  misc_feature (242)..(242): n is a, c, g, or t
gaatctgggccccaaaaattgtttttaaaaaaccgtggggttaaaagggcccgttttatcccaatgtaaccggccacgggccaaactttgagggtgcattttaaaagtcagtgcaaaccccctccgttttaacaacatgttttgccacccaaaggttacggttctttggacaaaagcacacatttggggcaggaacattaacagttctttcttggcaagggatccgttctggctcttgtganagacatcaacactaaaaggggtttaattggcccggaccttttgagtctgcacagttagtacccagctgtgtcttatgcaggaaaaaggcaaaggctttatctcagtttccaggtggacaatcggttcggcacgccaaatagtaatctgtagctaacaaaatggctcacagttgggaacaatgtccccccgctctctatctaaccaagggtccagagttttgcctagagcccgtgcactaaccaagaaaagccctagtaaggccatcaccattttaaccttgatcttgtacgaaaacccgtgtctgctaagtaaggtagggccagccccacgatcgtgatctcgtgttctctcacgagccatccctctcagcagtgttggatactaataaaatataagcagtc

SEQ ID NO: 650993 - DNA, 599 bp, Homo sapiens
  misc_feature (384)..(384): n is a, c, g, or t
  misc_feature (523)..(523): n is a, c, g, or t
acagcgataactccctcctgcacttcagctgactaagcgtggagttcacatgtataccttggcaaagctgccattcacaactggtttgggaactttagggttatcagtataaagcctgagtaacaaaacttagtcatccaatgtccaggctggatggtatttttatttggtgatcagtaattcagcacagggctggaacacattactcacattggtcttatgaccctgttctgtaatcaggggaatcttgaagtggataaagcaagtctagggggagagacatttttttaaaggcactagagggccattctggcatgtcgtgccttccctctttcagccggcatttcagatacatcaatctttgtctagcgctttcaagaaggnccaggctccttcactaaattagggcctgatcaccctggagagttagggacatatccacaagcctcgatggactccccattctacatcagctccttgggtacaggctttcatagaatgatgttcctttccaccataggtngcttgctcagtgtgaaatacacagcatgtagtgtgttatgtgatgaaccctcattcttatgcagaatggcgtctgg

SEQ ID NO: 650994 - DNA, 838 bp, Homo sapiens
  misc_feature (220)..(220): n is a, c, g, or t
gggaacgcggagagcacagcgcatgaaggccgtcgggcacggctaaggagagtacgaaaggtaggtgggtcaagcggcacgcccgatcgccaaagtgccacactgccgcccctctaccggatgcgaattcttatgcagcctaagtcatggtcgtcgcctaagtccctgctgtctgtgctactgtgtggtatcgtcaggtttacatagacccgactgaagnacagtcgttcatgagggagatggtgtacgtgctgcggcatgtggtttgagtcagaagtcccccctggcggtgtgacggaactgtcggggcatctggcttgtcctctgaatgcactccctcgtggagcctggatagctccactagatgattgtgaccccgcgtgtacactaaccgaggaaatcctgaaggcacgcggtagagacgacttggtttgaacacccatgtgggctcagcccggagaacccattggggtgctccgggtaaacacggcagttgcgcagaagcactcgagttcccagtatcgggatacagctggataagggtagggactgcgctgaatccagcgaaggggcacagccaaggggtgtctcaggctcgggagacggagcatggatactcaggcctagtggttcaacaccggaagatcgcaagaggaactccgcaagtttacgccggtgcttactcgccaaacgaagttgccttgttgggctcgttgcatttgccactttaatcccaaaggccatgtttacccaaccaaagagacgggcctcgaaggaaacccgtgcatttcgatagagatgccacgggggcccttttgattccggaggtggttgctcc

SEQ ID NO: 650995 - DNA, 132 bp, Homo sapiens
tacctgggactacgacccgtcgtgacgaccggttagttttaccctacctgatgcatcgtgttgttagccatggtcaatcctgctccagtaacgagaaggagaacctgcagggtccagacatttggtgtatgt

SEQ ID NO: 650996 - DNA, 404 bp, Homo sapiens
aagcggctatgggggtaggcatgagggtctgtggctttggtaggaggggctggtagtagtataacggtggaggctttggagggggcgtaggtgggggtttaggaggtggctttggtggtggcgatggaggtctcctctctggcaatgagaaaattaccatgcagaacctcactgaccgcctggactcctacctggacaaggtacgtgccctggaggaggccaatgctgccctggaggtgacgctccatgaatggtaacagaagcagaaccaaaacagcccagaaatgcgactacagacaatactatcaagaacattgaagagctccgaggaaaagatcatggacaacaaacaacgacaaatccagagtcatcctggaagatcgcacaatgccaggatggataga

SEQ ID NO: 650997 - DNA, 1089 bp, Homo sapiens
  misc_feature (1080)..(1080): n is a, c, g, or t
tggccgggcgctggtggcgcgtgcctgtagtcccgagtagctgtgcaattacagacgcctgccaccatacccagctaatttttcgtattttttagtagagatggggtttcaccatgttggccaggctgatttcgaactcctgacctcaaatgatccaccgacctgagcctcccaaagtgctggccttacaggcatgagccaccacacctggcctagactataccttttatacactttttaaatagagaaagtgaaaaatgataaactaaccattataaaatagaggtttgagtccacctctattttacagaaatttgccctcaaatgtttgagagggaagtcacatatgatagaaaaatatcttttcaagggtagaatgatatttccttataaaagtgacaatcaaaaaagactcatttgtatacttgccaaagtttaaaagttttttacattccttaccctaaacccactgccccatccacccagaattcagaaagggtttggcatagatccagggctccagggcccaggtcattttgttattagtctagggcttttgtcctccacagtctaggcagggcatctttgtatgtgtgttgctggttggggccagggacgggggcaggcgggagttgtccaggtttaagattgtttgttttccatcagatccacaagcaatatctgtgggctgaaatccaggttatacctattcactatgactttttttttttttaactttctactgtaattatttcagttccccgaagttgtatctcaaatgttggggaaatgctgccttgactattttactttggaaggttttactagatatcagtttagtagattaatgacgttgttaatctgtctgctcaaaagacaccagcaagggggtatactttgctgaactgataaattattctattaaggactaacccagtacttggcaaaattaggaataacttttcccctccttctttactaataaattttccaagttgcatactgttgttgcaagtttctgtaatttttttctgtatacctttctattgtctgaatttaaataaaaatgtttctaataanaaaaaaaaa

SEQ ID NO: 650998 - DNA, 1031 bp, Homo sapiens
  misc_feature (1022)..(1022): n is a, c, g, or t
tggccgggcgctggtggcgcgtgcctgtagtcccgagtagctgtgcaattacagacgcctgccaccatacccagctaatttttcgtattttttagtagagatggggtttcaccatgttggccaggctgatttcgaactcctgacctcaaatgatccaccgacctgagcctcccaaagtgctggccttacaggcatgagccaccacacctggcctagactataccttttatacactttttaaatagagaaagtgaaaaatgataaactaaccattataaaatagaggtttgagtccacctctattttacagaaatttgccctcaaatgtttgagagggaagtcacatatgatagaaaaatatcttttcaagggtagaatgatatttccttataaaagtgacaatcaaaaaagactcatttgtatacttgccaaagtttaaaagttttttacattccttaccctaaacccactgccccatccacccagaattcagaaagggtttggcatagatccagggctccagggcccaggtcattttgttattagtctagggcttttgtcctccacagtctaggcagggcatctttgtatgtgtgttgctggttggggccagggacgggggcaggcgggagttgtccaggtttaagattgtttgttttccatcagatcctttttaactttctactgtaattatttcagttccccgaagttgtatctcaaatgttggggaaatgctgccttgactattttactttggaaggttttactagatatcagtttagtagattaatgacgttgttaatctgtctgctcaaaagacaccagcaagggggtatactttgctgaactgataaattattctattaaggactaacccagtacttggcaaaattaggaataacttttcccctccttctttactaataaattttccaagttgcatactgttgttgcaagtttctgtaatttttttctgtatacctttctattgtctgaatttaaataaaaatgtttctaataanaaaaaaaaa

SEQ ID NO: 650999 - DNA, 608 bp, Homo sapiens
  misc_feature (85)..(85): n is a, c, g, or t
  misc_feature (156)..(156): n is a, c, g, or t
  misc_feature (266)..(266): n is a, c, g, or t
cccttcttcctgccgcgggggggggggggttctcccggttcttaattttccccgcgggcgccctccgggtgtgggggggaattcntggggcgggggggggccgcccattttccctctcctctttcttccccgcgtgttggggggagccccaaaaantgagggtgcgcccccccccccccccccccgggggggggtgttttttgtgtggtgttggggagaagccccctcccacaccaccccccccggtttttttcgcgagttttttnccccccctaagggggggggcgcccccccccttttttttttgtgggtgaaaaaaaagaggggttgggcccccccccccccccccccccccgagggggttttttttatggggggggggggggttttttttccccggcctttttttttttttggcccccccccccttttttttttttttttaaaggggggggaaaaacttttttgggcccgggggggggggggggaaaaaaatttttttttttttcccccccgggggggggggccgggggcccccccccccccggggggtttttttttttcccccccccccgggggttttttttttttttttcccgggcccccca

SEQ ID NO: 651000 - DNA, 282 bp, Homo sapiens
gcaggctcgatcggcgggcacttaccatgaatagacgtgcctggatgagtcaatgagtgtgaatgactgtgaagggcctaggacattactgcacactgtagacattataaatactacattgaggctaaacactatgctgaggctacactaaatttattttaaaattttttcttcctcaataataaattaaccttagtttatggtaacatttttttctttataaacttttttttttttttttttttttttaagggacagagtctaagtggcccgccaatcgag

SEQ ID NO: 651001 - DNA, 143 bp, Homo sapiens
agctcggtaccccgccgtgcagcagggcgaggcgctgctggcggcggtgcatgccgggcgacggcggtggcctggtggttgtcaagagcttggccgtcacggacctttttgtcgacatcaatgagcgatatacgcgagaagag

SEQ ID NO: 651002 - DNA, 208 bp, Homo sapiens
gtaaccatcccatggcttgaattgggaatgaaatcttctaaaatatcagaacagaaagctttttgttcaacatggaggacaaaagacggcgagcccgcgtacagggagcctgggctgctcctgccaagagccagcctactgcccagccaggtactgctgctaggaaccatctttcccagacaccagggcaggcctggaggacgaagcg

SEQ ID NO: 651003 - DNA, 175 bp, Homo sapiens
  misc_feature (58)..(59): n is a, c, g, or t
acagcggggctcaggtccgcgtgctctccgcaccaccccacttccattttgcaaccannccagcattgagggtgatgatggatctgtgtgtctggattgcctactatgagagctatgaggagctgcggggaagtactacagaggcagcagccaggtggtacagtgggtgagcttt

SEQ ID NO: 651004 - DNA, 116 bp, Homo sapiens
  misc_feature (33)..(33): n is a, c, g, or t
  misc_feature (101)..(101): n is a, c, g, or t
ccgatgggaggtggaagaggactggtgtctgtntgtcctccgctcctaccaggcagaacacgggcctgacttcccctggagcgtgggggaggacatgagtncagatggacggcggc

SEQ ID NO: 651005 - DNA, 824 bp, Homo sapiens
tctcgagttttattttatttttttggggcttaaggcacttgttgataatcaacaaacgtgtaagggtagggctcaagcctactccccaaacccgtttaactcctaacactggctcttcctctaacagatagacctgaacgtggcttcttttcaggcgtcctggtgttgggccccttcgtttgagaactccctttgctcccgtgctagcatcgggagttatggaagtctgacctcccctctagtagacagtattggtaggggctggttgtatagatcacttggggtggtggttgcgtcagatggcaccccgtggtggggggtctgcactttgacagccgccggagggcaagacactgtgagtggagtgaatgtgtggtagagcgagcttcgggttttcaccagttgaagagcttctttacatagtgcttgtgcacattatgaaacctccaggcaccattcctgtgggtgctacgttgtttgaagggttgtgacagccgacgccaagtgcagcaaggagtgaaggagaagccaggccagtgtagaaggcccagccataatttccaaacagtgtggtctccagtcttcgtggacccaagtttgacagtcgattggaagacttgtgaaataccttcatgttgggccaccactccccaggagaccgtgactgtgactgaggaaaccagcagaaaggcgcctcaatttgagcccaaaggcagtgttccccgggtatttgatgttgtagtagcggagaactgtataatgaatccgaataggacttggttcccggttaccgtgttttgccaaagccagtagggggggggggc

SEQ ID NO: 651006 - DNA, 321 bp, Homo sapiens
ggtatagccgaatatccgtaagtatagttctgttgaattagtaaactgaagattgtaggaaaatgagtgagcaaaagttgtttagtgtggtgaagtgtttcctacggcacgggtttaatcttggtgtttccaggtgtctgtactaatagatacatttctgtgcataagattataaagcatatactcacagttcagtagttttcgttaaggatttactgtgtgagtactttactgtgaggaatggcagaacctattcccctctactcttgtctaaaagttctgtgtggcacacagagatgcgacctacctatttcacaatcg

SEQ ID NO: 651007 - DNA, 646 bp, Homo sapiens
aggaaccccccgcaccactgcaattaacagcatttgcaacattctagggaatatccacagccatttatttttttctcaaatgcggaaatgtaattttacatcatttttcccctccatttcatatttatcaaaatattttcatgtcagtttcatttgaatcaataattcatcatatttttgtgatgaccgattactagccaagcaaaacaaacagagattaatggagttttactgtaagaaagaaaaagtaacaagataaccaatgattcgaagaaaatgtcagatttggaagcccttgtactctgtaatgtgttgttaaaaggaacatgctaaaaaagataattatatattttagtttagtacaaaaagccttggggagagaattaaagagagctaaaaattcagtaaaggctacaaaagttaactaagaaggcactcctgtttacaaacagcatgtgatgctgctaaaataaatgcaaaaccacacgtttctttcttaaccaatcagaagctttaatataaagaagcaagaaaaataaggctcagcaactcctatttgcatctctaccttaaaataaaattttttttatattcaacgaccaattcttatcattctggggaaaatacttatttagtgcatcagggg

SEQ ID NO: 651008 - DNA, 261 bp, Homo sapiens
  misc_feature (197)..(197): n is a, c, g, or t
accagtagctccttcctatcatcgactatttaactcacacacctagctcataacatctactactcactctcatgccaggaatatcaactctgagcaacactatatgactagctacacaatagctttatagtaaagatacctcgttacggactccacttatgactccctacatgccatgtcgaagcccccatcgctgngtcaatagtacttgctgcagtactctaaaaactaggcggctatggtataatacgcctcgtaaaa

SEQ ID NO: 651009 - DNA, 792 bp, Homo sapiens
tcgtgccgtatcatgagagcatggctcttccagcatctcacacatccgtacccttccgaagagcagaagaaacagttagcgcaagacacaggacttacaattctccaagtaaacaactggtttattaatgccagaagaagaatagtacagcccatgattgaccagtcaaatcgagcagtgagccaaggagcagcatatagtccagagggtcagcccatggggagctttgtgttggatggtcagcaacacatggggatccggcctgcaggacctatgagtggaatgggcatgaatatgggcatggatgggcaatggcactacatgtaaccttcatcatgtaaagcaatcgcaaagcaagggggaagtttgcagagcatgccaggggactacgtttctcagggtggtcctatgggaatgagtatggcacagccaagttacactcctccccagatgaccccacaccctactcaattaagacatggacccccaatgcattcatatttgccaagccatccccaccacccagccatgatgatgcacggaggaccccctacccaccctggaatgactatgtcagcacagagccccacaatgttaaattctgtagatcccaatgttggcggacaggttatggacattcatgcccaatagtataagggaactcaagggaaaaggaaacacacgcaaaaactattttaagactttctgaacttttggctgcacctaatacttgcactccagcttaaggatgtgtttcaaccccggcctttgtccccaataaatgtgccctga

SEQ ID NO: 651010 - DNA, 611 bp, Homo sapiens
gacaccgtcatgcattagacgcatttcccttggcagggattcgacgaagtgaccttactcccctttgttcctccataaatgtgtcctttagtttcaaacagatctttatagttcgtgcttcataagccaattcttattattatttttgggggactcttcttcaaagagcttgccaatgaagatttaaagacagagcaggagcttcttccaggagttctgagccttggttgtggacaaaacaatcttaagttgggcagctttcctcaacacaaaaaaagttattaatggtcattgaaccataactaggactttatcagaaactcaaagcttgggggataaaaaggagcaagagaatactgtaacaaacttcgtacagagttcggtctattaattgtttcatgttagatattctatgtgtttacctcaattgaacatgaattcttcttttctcagcacgtgttcctcactagaagaaaatgctgttacctttaagctttgtcaaatttacattaaaatacttgtatgaggactgtgacgttatgttaaaaaaaaaaggtgttaagtcacaaaaagcggtaataaatatttcatttttgatttttaaaaaaaaa

SEQ ID NO: 651011 - DNA, 197 bp, Homo sapiens
aggggaattccggctctatagggagataattccgaagcctggtaggataagaatataaactatcaggtaaccgaaaaatcagaataggtagtaggtatagaatggggtctcctacctaccggcggggtcgaagaaggtggtgttgaggtagcggactagtaagtagtataagtgcatgccagcagctaaggcactgg

SEQ ID NO: 651012 - DNA, 636 bp, Homo sapiens
gccgggcgcagtggctcatgcctgtaatcctagcactttgggaggccgaggcgggcggatcacgaggtcaggagattgagaccatcctggctaacatggtgaaaccccgtctctactaaaaatacaaaaaaaattagccgggcatggtggcgggtgcctgtagtaccagctactcgggagactgaagcaggagaatggcatgaacctgggaggcggagcttgtagtgagccgagattgcgtcactgcactccagcctgggcgacagagtgagactgtctcaaaaaaaaaaaaaaaaaaaaaaaaaaaaaaaaaaaaaaaaaaaaaaaaaaaaaaaaaaaaaaaaaaaaaatagaaaaaaaaaaaaaaaaaaaaaattacgtccaaatttcagcctaatttggccaattagccttaaagggagccgtttgacaattaacttgctcgccttttacaacgtgctaattgggaaaacccctgtgttacccaatataaccgccttgaaggcaatccccctttgggccgtctgcctaaatggcgaaaaggcctggccggtggcactttccaacaattgaccacccaaaatttgaatggaaatttgaaggggttaaaattttgtctaaccgggtgttctttgt

SEQ ID NO: 651013 - DNA, 417 bp, Homo sapiens
  misc_feature (2)..(2): n is a, c, g, or t
gntgcatgcagagagagtgaaactgatcagacgaactacgaacccctgtgacgggagagtctgccggcggagaatataaggagatggacaaaccgtgtgggtgccctccaggtgtgtgtgaccatggaacgggagaccggagggatccatggtattcaaccgtgggcctgttacctccagtacgagccatgagccagcggaatctgaatgcaaagacagaacaatggccgaccggagtcacaatgacatccaatcccataacatggggacagatcaagaaaacgacacaagaagctgagaaactactggagcgccaggctcaggcaaaaacccctgactccatgttcttggccatgctagctgtagtgtcctgtgcgtctataggatcgggtgaagcaccaaccggcaattgaaagc

SEQ ID NO: 651014 - DNA, 1096 bp, Homo sapiens
ggataggtagctaccggtccggccggcgcgcgagctcggaggctcgccgataccagaggcgcacgcgatatctcgaggacccgacaagtacacgtcatacccgggagccagtacatcaggcagcatcgcactgtcgtacgtaatgctcactctcgtccatcggttgctccagagcgaccatcacggccaaagcattggctccgctaagcacctgcatacctgcatgtcatgcaatcgttgcaactggagcggagatcctcttcgggatgcctagggatgaactcgagtggcatcgggttccgcactgactatgaatcgcatggcataaactacgcagaccttgcctcatctatttggtttgtttccgtgcgccttcggaactttaaggccccatatggaaaaccgagcgtacgcaaacattcgcactcggcatacgggcccaaggtgctaaagcctgtctctgcgacttcccctgccggaggacctgatatttaggcaccgaaggaacttcagataacgccttatcataatttaacggctataaaacctagctccgtgtgaccatgtaacattagactacagctctagcgtgtgactttgcgtgtgcgcccgtgcccaatccgtggtgcgttgcatccaggcaacctgaacgtacgtaacatttcagagagcatagcgagaccatgcgtgggtccacaacgtaaccaccacgttgcatactgtggaacgacctggatagcccgttaggcgttctaaaaccccttggccattggctgtgcccttttcccctcctgcaaacggtgttaacaaacgtgtcccaaaacacaaaaccgaccctccgagtgactaggcccccctaggacacaaacggactcagacaagctagcagaccaatcggtgggtaaacgccccagccaagacaccgttagagcggccttgaatcagcttgttagaatccgcccacaggagaactgccacacctcgacctttgattcgctatacgttaggtaatattccaaagaaaaacataagcagcctttctgcagggcaagggactttgggcccggggcaccatcgcgcagtaccttcgaaaggc

SEQ ID NO: 651015 - DNA, 401 bp, Homo sapiens
actatgagtgtctctgctctaagcccaacccgatttgcagacagcctctctggcttcctccaagtggcctctgtgctcggtctgctcctgctgctggtgaaagctgtccagttctacctccacaggcaatggctactcaaggctttccagcagttcccatcacctccttttcactggttctttgggcatgagaagttcaaaggtgaccaagaactacaggaaattgtgtcgtgcatagagaacttcccaagtgcctttcctagatggttctggggaagcaaggcctacttaactgtctatgaccctgactacatgaaagtgattctggggcgatcagatccaaaggctaatggtgcgtacagattgctagctccttggattgggtatggtttgctcttgtt

SEQ ID NO: 651016 - DNA, 823 bp, Homo sapiens
cggtgcgcagaccaagagtcgtttaggccgcgcgagggtccctcttggtaaccccacccaacgaagagtggctcaaggaggggaaacccatagggaattgcgagcaaccattgcggggcccaaaaactgaacaagtgtgcccccccggcccgcgaaagtcgcccccctgaagcgtagccgacggcttgttctttcaaggtgaaacgcatatctctggagacacctggttgcagaaccgaccagaagttggcaaatcgattggcaacttcgaggcacgcccactcgattattctttcgcccaaacactgtacttttaaatgtcgctgcggcgtcaaaaagacaaagacttcttgctataacagagtaaaaagctgaagccactcgtggaacacacccagttaggtgtgcccccacataatatttagagaacgattgtatctcacaacgatctctgtattaactaggccactcactaccactcgttgtaaacaacgtgtagccacaaaatttgtcggcatccaccagcggtatttgtggggggatatctcgtttgatttacgggggatctctatgtaacatctttcttgacaaagccggcgctattagcggtgcagggagtaccccgcagtgatatctatttgagacaccccaccccgtgtctagataacctgcatctgttgattttcaaaagtggacaacccctgcgccacgcacttttaacggaaggccgtcgtaataccaggacgcggtccccctaacatcctttcactaaggagaaaacaggcagcaggaaaaagggtaaaaaaaaaacacccacataaca

SEQ ID NO: 651017 - DNA, 114 bp, Homo sapiens
cctctactcgcctgtggtcgtgcagagcaagcgcgtcgcggtacttgacgggctagggcaagatctaccactcatcggttccgttcgtggtcttcagtaacatcaccgtcgtag

SEQ ID NO: 651018 - DNA, 147 bp, Homo sapiens
tactatgagatgtagccgattcatatgctcatactctacagcatatatgccatatttcatgtctcctcggactccaggtgtggctgtcaaaggtgagcttctcacctcccgatggagtttagcaaggtccttccggatagtttcgaa

SEQ ID NO: 651019 - DNA, 432 bp, Homo sapiens
gtgcgattagtgtgtgggaggaatggggtgggttttgtatgttccaactggcatatttatattttacgttgttagatattgggagtagtgtgagtgaggtggagtagaataggcgtaagtagaagtataggttaaggagggtgatggtggctatgatggtggggatgattgaggctattgttttttgggaattcttcgataattgtggcccttttgggccaaaagccggttagcgggggcaggcctcctagggagaggggggggtggattgggattaaggggtgttagtcatgttagcttttttcagggtgcgagatagtagtaggggtcgtggtgctggagtttaaagttgagtagtaggaatgcggtagtagttaggataatataaatagttcaattaaggaatgggactgttaggctatcaaaagacga

SEQ ID NO: 651020 - DNA, 255 bp, Homo sapiens
ggtaagagcggtctgatcgcaactatgagaccagaagaccaatctaggttcatattttgggcagaagcaatacttcaggaaaaaagagaaagaggaggcaaaagaggacagagaaaatgaccagtcacaaagacaggagaaaaatacaaaaatacagtacactgttccaaccatgaatattcatgagcttaaggagaaggtttttacctatcttgaattaataagacaagccgaaaataacactggggaaaacct

SEQ ID NO: 651021 - DNA, 218 bp, Homo sapiens
cgggtcagagcctgaactatgaaagaataatagctgagtcaccatggtgtaactatacaatcggactagggtagaatcctgatcaagtcctcaactcctatttgacacacaagttaaaaaattttaaaactaaatttacatgtgatgttttgagcatcacacagctactatctaaaaggattcagtctcccagagttcttggatctaaatgcactcca

SEQ ID NO: 651022 - DNA, 140 bp, Homo sapiens
ctacagcacacgcatcccccctagtgatagggataagaaattatcttccaaaaaatcatgcttcatacattgcatagtgagctatacaatatatactaccccccagagatagtacaggtccttcgataatgtaagagata

SEQ ID NO: 651023 - DNA, 245 bp, Homo sapiens
ccgccacatgggaaacccatctctactaaaaatacaaaatttagctgggcatgtgattatgttgcaggaaggttgcagtgagccgagatggcagcagtaccgtccagctttggctcggcatcagagggagaccgtggaaggagaccgtggagagagagggagacgagagggagagggagagggagagctgtttcacagtttttgatgattgtgaataacgctgcctatgttgcagtgtgcttccg

SEQ ID NO: 651024 - DNA, 1218 bp, Homo sapiens
cacaccacaaatacgatagactacgtgcgggggggtaaaccgccgctgtgggacgccacatggtccccccaagggggagaccgcccagtgcacgcaataacgccactaggcccgagggggccgcacgcgggtagcaacgaggtccgccgaccgctaggaaaacagcttgcagcgtgtttgtagtaactaaccccctctaatgggcagcccataggaaccaccgggcacgacacaaagatggggggctccacagcaaatcctgcgtatggcggccccccacagggcttatatcattgtaatgaaccaattcgtggcgattgccaagtccccatggcgtgtgattgtactttgaattggtgtaagagaaatccttggcggcgccaagttattcagggaaggagtgtctggcgtccggtcgggtttgcgggggttactcttgaggacagcgtctaggacagcagccacagcaaagcccagtgaaggtctcccccacacccatgctttgaggtcgcacccgtgagtgtcccaaccccgggggagtcgatagtggcctccaaaacagtctgtcgcaaggtagagacctgaggtgccccgttgagccccttcccgggggcaattgcggccagagtcgccccagccacacagaatgcccccaggtgcccccagtgaatgtccccccggcaaaattgtctcgccccttctgaaggcgcaaattggaagaatgagggaatcttgttaaatctctccaccgtgctttgagaatgtcttgccccctcttatcccccacgagggaaatttacacgaaaacttggccctcgggcctcgtgtcccccactggctaagggccgcgaaggggttcttttccctttctttcttttcctacctaacccctctgtttctctctggccacggggcctcgtattcctaccctttccttgtcccctgggctggctgcacacacagaaggattcgccccttgctcttttcacagagagctggcccctcgagatgccacaaattatgcaatttaagtaattttgcacacaagtctaagggaccactggctgcctgccttggggaggaaccatatctccctctgggccgcttctggcctcttggagccacatgggcccaaggccaaaggggaatgggcacagaaggtctgtgtttggtctggcccagttccccatcattaaactcagcctgactgctgcccta

SEQ ID NO: 651025 - DNA, 224 bp, Homo sapiens
gtcctcatttgtgccctcttatagactggctgggctgggggtactggtggacaaagaagctggggcgagagaccaggacacagggataccccatggtccccttcctctggctgtcccctggtggggtcactttggatccttggtgggagcatagcacagctccagtggccgggacaccttccagaatttctcattcaccagctccagggtcagcgagccattca

SEQ ID NO: 651026 - DNA, 463 bp, Homo sapiens
agcagggacactgtttgtctatgtcaagaacaaagacaggcaaagaaatgtcgatgccgcatttacaaatgcaagaatggacttgtatttgatatagcttattcccaacaaataagggaccatgagtcatttggggcatgttacagagagtttcagtaaaaattcagacaacaataataaatatgaacaggcacagcatgcccagaagcctttttatggagccaggcatggttgacctgctttccatgtctcaaaacattagtccctacaagaatcctatgaggtttatcttcttttcacccattttgagagaagaaaagttcagctcagagagctgcaggaacattggggacatctccaagtcacagccaataggtggcagtcatcagtgtgtcttggaagggacaaaacattgagcttctgaacagctactccagaaactatggtgctgtggtgaagtcct

SEQ ID NO: 651027 - DNA, 1907 bp, Homo sapiens
  misc_feature (1062)..(1062): n is a, c, g, or t
gttaggtgttccttgtccgaagagagcaacgcatgattgtttcttctattagttaagacggggtttgtgagggcgctccactcgagtgtgaagcttcgttatatctatagccggcgtcactcaatctacagagccacaccatattatatggtgcgataaacatacattgatgtcgccccaatcaccattgtggtcgccccactaagtcccgtcgatcgccctctgtttggtgagaacacacattcttgccccctctgtgggattgtacatactggagattctggtggtaagggagacgttcttataatacttacgttcctttgagtagtagggtcagagccttgctttcgtcctacacttggctcgtttttgtgtgccacctcaaaaaaaaaaaacggtggggggggtagtagaaactattttgtgggggggtggagacaaaaaaatttcgtcgtaggccgccacttcggcaaggttagggtatgacagtaatatgggatcccttctggtggctgttataccgcccttattagaatgtggctcccgcttgtcccccctccttcgggtgaacgaaaagttgggccacacacaaatttttcggatatacacctacaacgggggtatgttcttccgatgaggggaaattgtgtttgccaacaacggggagaaaactatctgtcggagcactgtattttgttagtacgcacaatagactacatcatggtgtaaacaacctctcgctctttgtgtggaagaagattttataatgattatatttggtagaagacgcccccctttctcttgtatgtctgacacgtgcggggccacccccgcaccagaggttgattgaagagcgaatatattgcataacagactcctagctgcgaagacttcttcctcctcatcctgcggggccgtcttcttgtttcgagatgattggcttgccgatgtggtggatcctcattgggattggtgcaatcatcattaatgcagaagagggtggatatcaactatgatcggcgccacactcaaggtcgttcgtcacaaaataggtggtgcgcnacaccagcatcttcgggggcagcagagagcgctccacatgcagcatcatcttcggcgtagaacaacacaagcagcgcaccgcctcagccacactagcgtcttctgcaccaacttcacacgcggctgctgctcgtcacaacggcacacaacgccacacagcgcagagagaaaccactggggagatctttcaacacagcgtgctctatatgaggagacacaacacactcttggcgcactcatagacacacgcgcctatacacaatgtggcgcacaccacacggcggctctctcccctgctctctcatcatcagtagagtagtatattcgcgcacacgcgcccacacatgtctcctcacgcgcacacaccacagcgggtgtttctacacacagcacacactctctctctcggaagagggtgaataactctccctgttgaggtagagggtctgtcacacacacagagacacaccgagagagtgtccacacaacaggtactactacgcgaacttgcgcagactctctcttatagacgtcccacatagcgatatatctccacactttcctggggcgcactctcctattgttcacacctatctccgctcagcatcgttctcatagacccacttctggacatgaagtcttcccgacacccctctttctggattgacaagcggcacagtgaccacacccacgctggtcacgaacttctgaatgttcgggtaacctggccttctgtgggcgactctcgtaaaccaccccgaggcgctctgtactagagacctgcttttaaaaataacggtgaataatggttgcgaccaaaacaaaataaaaaaaaacctcagact

SEQ ID NO: 651028 - DNA, 856 bp, Homo sapiens
tcccatctctacaaaaaattagccgagcatggtgttgggtgcctgtggtcccagctactcaggaggctgaggtgggaggatcacttgagctcgggaggttgaggctgcagtgagtcaagattgtgccactgcattccagcatgggtgacagagtgagaccctgtctcaaaaaaaagaaaagaaaaaagtaagactaaaatcagttagtgacaaaacttatgtattacagcatcttgacttaaaaaaaaaaaaaccaaaacccttcattttccgagtttttcataagccaggtattttcttaaattggaagtcttagaaacttaggttatttgggctcgctagctgtatgtgtagagtgaacaatagtatttctacattgggtcagtgtgcataatgttactataccttgtgatccatctggaatttatctgggtatgcagtgtgaagcaagcatcggattctgcttttttctaggtgactacccagttgtcccatgactgattttaaaaagcagtttattatataccaaatgtttatattggggtattcagggattctacttgttccactaaatccgttttggtccagatacgacacggctttcagctaatgttcctcctagtattttaaatatttggtgggctagcttccatttccttgggagaattgcctttggcgcgggcaaaggatatcctttcgggttggaggggaaattggctgttccccggcggggggaggggtgggcctggggcctggcgccggtaagatgtctccgcccctgggggtgatacgcgcccctgttttgcgggcgtcggggggtccggtgtgtacccccgggggggcgggtttaagtaag

SEQ ID NO: 651029 - DNA, 861 bp, Homo sapiens
gagacaggtagagtcagcctccacatttcacgaggcatcataagtaatggcaatcaattggctttgggatggacgtgcagaaaatagtgtcatggagttcaacaactcgatagacgagagcttatgtatgaggataagcgtctgtaggggcaaaggtttatatactatcgcgtcatgtgttgtccttccgttagcactaatgggaatgaagaatagataatatcagaagaggaagggaggcaatgggtgtgactgggtgatgacctcatcacgaggactatctggagagctgcatagaggattgcatgccatggtaggtcggaactataggagtgcaatgtcgtcatgactgtatctttatagatgtcatagatatagtgcagagaagatatgttcttgtgagcattgtatacaatatagctccccataatagtagtaaagatctagttgactagataatgcgctagatggagaatgttaggagatggctatactgatacaactgtggtcatgactgaggaaaggagctcacgccctagagactgggcatgttctcgccggaggccaatgtccaagaagggtctggcgagatagtcaggcgtcagggcagacgtctgacccatgctgcaagactactggagtgtgacacaggctgacatagaagtctcctttgaggaacagagggggtcctcaagaacattcttgtcgtaccctattagcttcctcattgatctgatgaactattggaggggggggaaaaggttataggggaggaaaggtgggactaagcgatggtatgtaataacataagataaccttaaaggttggtgaacaagtacataaaggtgggacaagaaaggc

SEQ ID NO: 651030 - DNA, 128 bp, Homo sapiens
atccagatttcttaaatttggccaagttataatagagagcagtagcttgagacccgaagtcaggaaactttgacaatatgattttgcttgggttaatccagacactcatagcggaatatgccttaccc

SEQ ID NO: 651031 - DNA, 197 bp, Homo sapiens
acgatccccgtcatgaaaccctggtcatcaaccctcatcgaaacccttctcaaaccctcatcaaacccgtcatcgttaaaccctgcttcttggttgggtgttgggttattatactaagttgtatgatgatctcatttactggggtgcaaggcgcttctgtgtaagttacgcccttattttctcttgttccgtttcgt

SEQ ID NO: 651032 - DNA, 252 bp, Homo sapiens
tatgacttctagcaagcctcgctaaactcgccttagcccccactattaaccaacggggaaaacactctgtgcgagaaaccatttactcctgttcatatatcactctcctacttacaggactcaacatagtagtcacagttgtatcctgcctcgacttgtttagcacaagacaatgttgctccctcggccaccatataatcatacatagcaaccttcatacacacgaaaaagacacccgtatgtgcatatatt

SEQ ID NO: 651033 - DNA, 362 bp, Homo sapiens
agcctggcgcctaggaaccagacccgaaaccaaggaaccagacctgaaaccaggcctgggcctgcctgacctaagcctggtagttaaaattccacccttgacctagcaactgatgttatctatagattatagaaagacattgtaaaacttcccggtctgttctgtttcactctaaccaccggtgcatgcagcccctgtcacgtacccctgtttgctcagtcgatcacgaccctctcacacggacccccccttagagttgtgagcccttaaaagggacaggaattgctcactcagggagctcggattttaagacactagcctgctgatgctcccagctgattaaagccactcccttcactaaa

SEQ ID NO: 651034 - DNA, 446 bp, Homo sapiens
gattctagaggatccctgagggtgaccttcgggggagtgacgaaaaaggatagttctaccacttactggattgtggggtaagcaacaagagagttatataggcaaatccgtatagcataatcttgagttgtgatgcatagtgaagacttcggtcgagtaacgaattgaatgatttcatgtttccaagaaaagcttctagtgttaattttttatcaacctgtaccgagaacgaacacacgttcccaagatgagtattctaaggcgagcgagaaaaccaatgttaaggaactctgcaaaataaccccgtaagttcgcgagaaggggcgcctatttttaataggccacagaaaatagggggggcaactgtttatcaaaaacacagctctctgctaagttgtaaaacgacgtatagagggtgaagcctgcccagtgcccgaaggtcaacc

SEQ ID NO: 651035 - DNA, 315 bp, Homo sapiens
  misc_feature (103)..(103): n is a, c, g, or t
gatttggcaaatatttgggtgagatttgaaaataaattacaccactgctgcacaagttaatgtgaatcaagcatctgtttatttcattcagtttatgcctttntttctttttttgtgcagtgcagttggggtcacagactctcaatttgacaagacactttaaaagcaggagtagaaattaggctagggttttacaactattacaggaactgtcataacaaacttcaagtggatcagtttatttctgatttaacttggggataaacagtgttcaatattttccaaaagattctccccatatagaagtcccaaaag

SEQ ID NO: 651036 - DNA, 397 bp, Homo sapiens
ttgtgtagaggagaagatagacagttacatcaagaacagctttgctgacttttatatgtttcagaactaacttaagtgactacattccgtcttatggctgcagtgaaaggtgtgttgaccatcgaatgaagtgctggcagaaatgggaagatgctcaaattactttgctcaaaaaacgtgaagctgaagcaaaaatgatggttgctaacaaaccagataaaatacagcaagctaaaaatgaaataagagagtgggaggcgaaagtgcaacaaggggaaagagattttgaacagatatctaaaacgattcgaaaagaagtgggaagatttgagaaagaacgagtgaaggattttaaaaccgttatcatccagtacttagaatcactagttcaaactca

SEQ ID NO: 651037 - DNA, 473 bp, Homo sapiens
attcacattcaccaatcagattcatttttatcatctcctattcctcatgagaaatacatttttttataaccttttaccttgaattcaaatccatttttcctctgaagcacctgaggtgaggtgggtatctcctcttgtcctaatcttatccacatgccatgatatggtttgtctgtgtccctacccaaatctcatcttgaatcatagctcctgtaatccccatgtgttgtgggaagaacctggtgggaggtaattgaatcagaggggtgggtttttcccatgctgttcttgtgataatgaataagtttcatgagatctgatggttttataaaggcgagttcccctgcaaaatgctctctttcctgccaccatgtaagatgtgactttgcttctcctttgcttccaccatgattgtgagtcctccccagccatgtggaactgtgagtcaattaaacctctttcctttataaatt

SEQ ID NO: 651038 - DNA, 243 bp, Homo sapiens
cccaggttggagtacaatggtgtgatattggcccactgcaagctcttctcccagggttcaagtgattaacccacctcagcctcccgtgtagccgggaccacaggtgcaccccaccatacccagctaatttttatatttgtagtagagacagggtttcgccatgtcggccaggctgatctccaacccctgtcctcaagtgatccacccgcgtcaggctcccaaagtgctgggattacaggcgtg

SEQ ID NO: 651039 - DNA, 908 bp, Homo sapiens
  misc_feature (16)..(16): n is a, c, g, or t
  misc_feature (26)..(26): n is a, c, g, or t
  misc_feature (181)..(181): n is a, c, g, or t
  misc_feature (234)..(234): n is a, c, g, or t
  misc_feature (250)..(250): n is a, c, g, or t
  misc_feature (309)..(309): n is a, c, g, or t
  misc_feature (342)..(342): n is a, c, g, or t
  misc_feature (383)..(383): n is a, c, g, or t
  misc_feature (395)..(395): n is a, c, g, or t
  misc_feature (417)..(417): n is a, c, g, or t
  misc_feature (433)..(433): n is a, c, g, or t
  misc_feature (470)..(470): n is a, c, g, or t
  misc_feature (483)..(483): n is a, c, g, or t
  misc_feature (493)..(493): n is a, c, g, or t
  misc_feature (531)..(531): n is a, c, g, or t
  misc_feature (544)..(544): n is a, c, g, or t
  misc_feature (550)..(550): n is a, c, g, or t
  misc_feature (557)..(557): n is a, c, g, or t
gggaacgaagggcggngatgtcaggnctggagagtgcccgtgtccttctgtgtgcattgggctccttcctccttaattctctgctttccacttttaggctgaactccagtgcacccagttagacttggagcggaaactcaagttgaatgaaaatgccatctccaggctccaggctaaccanaaagtctgttctggtgtcggtgtcagaggtcaaagcggtggctgaaatgcagnttggggaactccttgnctgctgtgaggaaggcccaggccatagtgtgatgctcttcttagaggagaaggagcaangctgcgctgagccaggccaacggtatcaaggcnccacctggagtacaggagtgccgagatggagaagagcacgncaggagctggangaggatggcggccatcagcgancactgtccagttcttnggaggagtactgcaagtttaatgaacactgaagacantcacccttccctnagtgtttacngtagggcttgaaggataaacgtctcgggcatccgcaancgttatcacgganatccancggtacncgttaatccagttgctggagaactataagaaaaagctccaggagtttgccaaggaagaggagtatgacatcagaactcaagtgtctggcgttgttcacgcgcagaatatggacttccatgagctgagtcccagcaccagggaacagttcctccaagtatgcgtatgacaatcacagtttggaccctgggacacacatgacaacaaggtatcttcacgggctgccaggagggagaaaccgctaggtccaccaaacaaaccacgcccctgggaagcattcctaacccggaacttccccagcggggttccttgcagtggcgggcaggtgtgttgcccagccaaagttggtaccg

SEQ ID NO: 651040 - DNA, 103 bp, Homo sapiens
ggtaccggcgatctgcgggcgcggcggcggcaggcgccgtcagcgcgcgagcttgccgctcgcgatctgcttcgccagctcgccgggatcgggcaatgtcgag

SEQ ID NO: 651041 - DNA, 395 bp, Homo sapiens
gatttcccaagacaccctcctctctccctaagcaagctaggtgatctgtgaaaatggttcgctattcaccttgacccggagaaccccacgaaatcatgcaaatcaagaggttccaatcttcgtgtacactttaagaacactcgtgaaactgctcaggccatcaagggtatgcatatacgaaaagccacgaagtatctgaaaagatgtcactttacagaaacagtgtgtacccattccgacgttacaatggtggagttggcaggtgtgcgcaggccaagcaatggggctggacacaaggtcggtggcccaaaaagagtgctgaatttttgctgcacatgcttaaaaacgcagagagtaatgctgaacttaagggtttagatagtagattctctggt

SEQ ID NO: 651042 - DNA, 264 bp, Homo sapiens
ggctgtttgaggatccaactcagggcgagctgcagcggaaggttagggataaagtcagcccccggagtcctccaggcagcggggtgggctgaagtccagctcatcaccatcatctagccaggctgagtgtacggtgtgagggagacccatgagagtgcccccatgcccagcgtgctgagtgactcagaaggaggaacgaggaggactcacgaggaggaggactcggcagctcgccccttgaggggtacctgagctcgaacttcg

SEQ ID NO: 651043 - DNA, 321 bp, Homo sapiens
tcactcaggctggaatgcagtggcatggtctcagctcactgcaacctccacttcccaggttcaagtgattctcgtgcctcagcctcctgagtagctgggactacaggcatatgccaccacacccagctaattttcatatttttaatagacacggggcttcaccatgttgctcaggctgatctcaaactcctgacctcaagtgatccacctgcctcagcctcccaaagtgctgagattacaggtgtgagccactgtgcctggcccattacctacattttgagtggtattttctgtgttcctaaggtcgacgcggccggcaat

SEQ ID NO: 651044 - DNA, 337 bp, Homo sapiens
actaagagcacatttaacacgtctcaccataaaaaaacactaggtaagtgaaggggttggctttgcctaactggcttcatttgaaaatcctacattgtaatgcatatattaaaacatccattgcatccataaagaaatacagtgaggatttggtccaatcaaaaataataataaaaaatttaaagaagaattgtatagcaaaggaacacctttcaggattgagaaaactctgtgaagaaggcacctagaaattctccaagaagtggcacctgtgtactgaaaacccctttaatggacttttgtggagctataggtgattcatacaagttcagacaaa

SEQ ID NO: 651045 - DNA, 330 bp, Homo sapiens
cctagaggatcccgtccactgtgcgatgaaagcatccttcatcgagtcttacagcatatgtaaagtaggacttactagggtcacaaagcacaagaataatatacaactggccaagggagctatgagataaataatcaggagagaatctattcatgcactagtttgatacagctaaattctttacagtacacaaaacccattaataatgtagtatagagaccaaaatgtaaagagagatagaatacattactgatgtgtggattaattcaagttcaggcatctacttgtgttacagcacagctgtcaaaaggcgataatgagtaaatcata

SEQ ID NO: 651046 - DNA, 224 bp, Homo sapiens
cttttggggtctttgctacttaaagtgacggacgggcgccaccaggcggggggcctgcctgttacttagaccgaccacgcacgacctaactcacccggcacgcgcacaggctggacagactgatagctctctctcgatcccgtccgcgagagtgcatgcacgttcttagttagtggagcgagctgtctggctgattccgaccgctaacgagcctgactcatgct

SEQ ID NO: 651047 - DNA, 175 bp, Homo sapiens
  misc_feature (46)..(46): n is a, c, g, or t
gagactatagcaagcagtaccttggtggcttactggggtgcacagntggggcgcacttccaacggaaaaatattcaggtaacgaggaatagcagagaaaggtgagtatatggtgagaaggcagctgtctgtgaaccagaaggagggccctcaccaagaagtgaccatgctggcac

SEQ ID NO: 651048 - DNA, 155 bp, Homo sapiens
cacgatccccatatacctaacatactatcccaagaatggtacactaaagaatctttgaaacaaaatttcaggtaatgaatttttaaaagttttattctttgtttttttccccgagacggaatcgtcgactcttgtcccaggtcggagtgtggtgt

SEQ ID NO: 651049 - DNA, 1054 bp, Homo sapiens
actcgtggcggatgggctagggcatgtgcaatctcaatggagtttgtgctgtctcttgtagagatcaaaccatgttgcgatcagtactagatgtgagtctccttaattcgtacgtgtacaggacagctcatcggcggcctcgtgaagcacccagatgtagggagacgctgagacgcgcgcaataactactggctgtgctattcagaaaggggttcagccaggcgaggcagacggacatccgtcgtgaccatgagtgtggcagtggtgtggtcgttcgtcgtgcctcacttctgagcaaaggctaagtgagctacggctagaggggttggcgaggtagacgatagtgtcgatctacatgtcgtgtaacaccggcgtttttgaagtggcagcaggagtgtcggtagatcatcgtagcagtcgatgattgtaagtcaaggaattttggaacggagatgtatcacctggagatagtggcgttgtatgagatacgaattgagatgggatatgtcgacgcgcgtgaattacgtatcgacttacgacgcagctgtcgtgtattcaaagagacttgagccttggattacttggaggtgtcattagagtgatgtagaccatggatagaattgaataggcttttgtgttgacgaggttattgtttaagcgtgttaagagttggtgacttcgtgattgaggtttggctgagtgaactaggatgaggtggttaaaagttgtctcatgggtatactgttggactagtagggggtcgtagtgcgataaatagggctgtcagtggtcaggttgtgcccgagattaggaaggccaatgagattcgtagttgtgaaaggggtgtactgtcgtaagtaaccccaggtccgtgtatgggctaaatggagtagatcatctaattgactaatgagattcgagttggttaagatgttgtggaattataaggagtctcctttagtggggtgtaatgtggtttgggggatttggaatttcaagtaaagaataagggtgaaagttcttaatcaaggaggaatgtgtggcatattgttgg

SEQ ID NO: 651050 - DNA, 103 bp, Homo sapiens
cacgtgaatggacttatttacttaatccatcaacctctcatagcacatatttgagaaaacaaatttatattcagattcttatctacacgtagggaagtaagaa

SEQ ID NO: 651051 - DNA, 449 bp, Homo sapiens
  misc_feature (19)..(19): n is a, c, g, or t
  misc_feature (24)..(24): n is a, c, g, or t
  misc_feature (217)..(217): n is a, c, g, or t
cacttcatagaaaatcctnttttngcttttcctttggagacagagttttggtagctcctaccagcctccaaattctcttatgtagctgaagatgaccttgactacctgagtttcctgtctcttacttcttttcagcttctgggaccacaggcctgtaccaccatggccagctttagagagtaaaacattttaatttgttcttgatttgtatgatgtngggggcgttagcattacgtgttgaatattttgagtaagaagaaaagaatccatcttcagaatatagggttgttctttgggaaaaagagtataagaacataatttctttgtcctagactttacaaatttttcaaaactgtaactttattttaaacttgtgtatcacaacttggttgatatgcctaaaatgatctactggcttttgcttatgattaaaaaacctcaaatctatc

SEQ ID NO: 651052 - DNA, 968 bp, Homo sapiens
gctccacttactaccagacaacttagccaaaccatgtacccaaataaagtataggcgatagaaattgaaaactggggcagatagatataagtaccgcaagaggagagatgaagataattataaccagagcataatatagctaggactaatcgctataacttctgcataatgaattaactgagaacataacttggctaaggaggagcccaaaaggcgtaacggacccccgagaaccagacgagcgtacctaagaacagctgaaagagcacgacccgtctatgtagcaaaatagtgggaagatttatacggtagaggcgactgaactcgtactcgagtcctggtgatatgctgggttgtccagggatagaatcgtagttcaagtttaaatttggccagagaacctcgaaatccccttggtaaatttaaccatgtccagtccaaagaggaacaggtctgtggacgacgtaggaaaaaatcttgtagcagagagtaccaaaatttgagacagccatagtagggctaaaagcagcgaagccacgtcaagaacacgggttcaagctcaatggcccactagctaaagagatcgcgaaagatatatagtgaagctcctcagagccaataggacgatctatcaacctatagaaagaactaatcgtgagtagcaagtcacatgaaaacattctcctccggataagcctgggtcaaaattgaaaacagtggcgtgaggattaagatgggcaatagggtaagatcaagcaagcaagtcgttattagcctcagtgtcagacccaagcacaggggtgctcataaagagggtcaaaaaaggaacggagcgcgggaatctaccccgctgttacaaaaatcacctcagataccaggttaaggacgctggccgagaacatgtaaaggggcgggccacggggaagggcagacatcgcataaaaggacggagaaggccaagggaggct

SEQ ID NO: 651053 - DNA, 1429 bp, Homo sapiens
  misc_feature (291)..(291): n is a, c, g, or t
  misc_feature (381)..(381): n is a, c, g, or t
  misc_feature (959)..(959): n is a, c, g, or t
agcggcatgagacataatctcctggtgtgcgcatttgctaagactgttggaaaagcacagtaattatgggtgggagtgtctcgatttttccaggtaccgcatcatgtgcgatgggcttcgccgttgggttaggaaatgggaatttccgccaaagcccttgtgcttcctggcgtgaggtgatgcccctaccgtgctctgtgtggctgcacccaccgtctgacaagaccacagtgaggtgaacccggtacctcacgtttggaaaatgcaggaagatcagtccagtcattctgntggtagcgtcaacatcatgggaaagcttgcatgatcatggaagctactatccttatttccggcacaatcttggagaaccgtcccccttgnttcataggtgtttatgttatgcatgggttgctttggtttttattctatttttcaatattcttgtggggggagagagtggggtgcaaaatcgtggggttaattaaggtgcgagggagaagtgcacagtgtgtcttgtgtgaatctggaagagaatctcaagtctaaatgtgtttattgaaacgctatttcccgaggcgtagcaaaagtgagaaaatctttttcgcatgatcttaaaacatgtctgggtgtaggtatatgcagtgcagagagtcataaagagaggtggtcacgtgtgcaacaaatgggcgatgttgtataatatgggggcaatataagtcccatgtactttctaatctcttttcgcagcatgtgtccaattattgttcgagagggtttagacataaataattacttttttctgtggcccagatgggtttgagccacgcaagagtgcggggtgtttgtgtcaaaaacaaggcacccttccgaggggtgccactgccaagagaaggtagagtgcgccagccaacgtcatgtgcgcgctggttagggagggcacctcgcaccaccagaggaangttgtcctgggggggttaatttttaaagcagccgggggtgtctgtgtttacaatcggcgcgcacatctgtaggtaatctcctccaaggcacgacaaaaagaggcgggcggggataactatatccacagcgaaagggagcgtttttcactcccacacaacattgtcttccccgatcaggaaaagcagcggaagttcttctcgcgaaactccatttgtcgtcgtgcccacacaagcgggcctgttcttaacggtactccacgagggacagtaattctaaacatcccatactcgccagcgccgggttgttcacccacgtttttgtacatctttccacaatacgaatgaccacacagaaaaagagcaaatcctctctcttccgcccggtggcgctgtgtaaacacccttcgcaggcacccactatgagggggacgcgcgtgatactcaccacgtgaaacagagaggcggggaga

SEQ ID NO: 651054 - DNA, 799 bp, Homo sapiens
taaaaaaagggtctttatggggtcggcccccccatcctgtgattttgtagacaagggtgttttgggggtaaggcgggtaagagtggggtctcccacgcccgaggttgggtgcaaatcaaaagttgggtgcaaacatgttcaaaaaaaaaaacaaaaaaaaaaaaaaaacaaaaaccaacaacaaaaacaacaaacaaaaaaacaaaacaacaaacacaaacaacaaaacacaaacaaaacaaacaaacaacaaaacacacaacaacagacatcacacacgacaacacacacacagcagacgacgcagacctcacaagacaaacaggaacggagagaacaaaaccacggacagcgagcaggcacgaccgcaagaaggagcggaggcagtcggaaccacacacaatagcatgaggacacatggacaaacacaccgatcccgccgacgcacagaatcccgcaacaagcacgaacgagaagcagaacgatgcagagaaaaagtacacgatcaccatcacagcagacgcacacgaacacaacaagagacgtcgggcacgcaacagacgcgaccagacgacagacaaaacaacacgatcagtaatcccgcagacctcacgagaagcagcaagaaagacacacaaaccaacaggcgagagcaccaccgatgcgacacaaaaacaacagatcacaacacgaccgccgacgacaacagctccacaccaaccaagcacacataacgaagcgacaagaacaactcacaccgaaggcgcacaagcacacaacaccacaaaagacagaaaaa

SEQ ID NO: 651055 - DNA, 210 bp, Homo sapiens
ttcatgtcaggcctttcatccgggtaaggcgagagtgcctaagacagaaatcgggaaagaactagccaaaatgtacaagagcacaccggatgtcatcatggtattgggattcagaactcattttggtggtggcaagacaactggcttgggcatgaaggccctcgacatgaagtcccccttcaggaagggatgagagcactcgaccatgaa

SEQ ID NO: 651056 - DNA, 260 bp, Homo sapiens
gaagaggtcttgagacactgatgctagctacaaagcgtgactagtctactcgaaagacacataaggatccacctctaatgaacaaactctcgagatgaaggcacgcattctgcattactctgacctttgtagcagaccttctggtctggcagtagtgaattgctctgaagtgacttcaaatggccatagataagagctgtaggtctatcatgttcacaaaataaactagccattgatgtcatagaaaccaatctcccggg

SEQ ID NO: 651057 - DNA, 457 bp, Homo sapiens
gttgctgtcttcaatctagagctcttgctcatcacgcccagaaaaagcagacagcctggagcccatggggtgagttgcaaaagctccctcctccagcccttcctcctggccagctcatggccaccattgatggggacagtgaggaacgctagcatttacactggacaacctttgcttcgttgaatctgcagagcagcctgtgagatttgcacccctcgatgttcccattttccgaatgaggaaactgaggcagagaggttaggtgagctgcccaatctaaaatgaaagaggattttgactcagtgactcccaaggccacactattaacagccatcttggccgggcacagcggcttgcacctgtaattccagcgctttgggaggccaaggcaagaggatcagcagtccaggagtttgagaccagcctaagcaacatagttagactttgtctctattta

SEQ ID NO: 651058 - DNA, 486 bp, Homo sapiens
tgaatgtgcactacccctctctgagccctgctgtctttagagcaggagtgacactgtctgcccagcctagtgccctggtgcttgaggattagaattagacaataagggttgtcaccacaaccagacgctatctagaggaagcaaatgaatggctcctgcagtgacagcatccagcctctgaagacagatgtttctgaattcttccccctcccccactccaaggctaaactttagggtaattcttgtgctccaaccaatcaagaagtggcgttaattcagcctgggcaacatggcaaaccccatctctacaaaaaataaaataaaatcagcccggcacagtggctcacccatgtagacccagccacttgggaggccaaggtgggaggatcgattgagcccaggaggtcaaggtgcagtgagctgtgatggtgtcactgcactccagcctgggcaacagagcgagaccctgtcttaaaaaataataat

SEQ ID NO: 651059 - DNA, 1414 bp, Homo sapiens
cactgatcttacactcacaataccctaggctcactaaacatgtctactactcacgtcgttccactgtgcccacaggacctctcatctgagactctctgatgccaacaactgaatatgtacttagtcgttacactatgtagcatgctatagtaagaggataccgtcgtattatgcgagcatcagaccttatgcatgtccactgaaagggcccgactgatcgaaagactccgcgccatcggcatcgggagtccaccatttacgctatcgtcttgccgcgggcgaggataaacttacttgtaatagacatcgtcacgagcagaggcgtggagtagcgcttgtgagaggtgatcggtcccttgcgagccatcgtccaagtatcgttccaaattcctccccatgttaaccaaaataactactaattaggccaataacacacacctttactcgtttgcttaaccttattctcccattttatacgtagaagttatataacttatatatgcacaccaatagctttccatattactagccacgttcacccgcacggaaacaccagtacccgttatacacattcccgctccatatttctgccacttcatgttcatttcccatatgtccacgtttcccacattattaatcccccctttccggttaagttacactaaagcccaattaccttcctattctctaaaaacccaaccacatgcaaacgccttttccaccatgcgactgcccatgctttaatttactcccaattaagttccagccacatccgcgtaacctcttaccaatttcccgtctaaatatacctcaattttcatagacaccttacgtccaaaaacaatcaaacaccttttaacagaacaccccgtgaacgtcccaccaaagtttccgctcactttctagagttattatttctccccttctttccattctaaaaggcgcaactttttccattagaatcctttcctatgttcattcccccacaatgtgaatacattaagccctattttatgtggcacgctgcaccttttcttatatcccacttgtcccttccggaccataattactctttacgaccccttctaattactctccacccaatttttatctttcaaaaccgcttaaaccttgggggaaggaaaacttccttcattgttgtgcctaaggattacaccctagcggctatccttccctttggagttcccacggattatttgcaacttcctctccgcattaacctatttaaccaagggtgaaccttcgaaggggaattacgcgttagggatcaacgaagggaccgccgttattaagtcgttccccactttcgttaaccaagtgattttttagtcccgaccatatagcagcaaaaaatgggacggggcgtccagacactccaaactcagcagtcaga

SEQ ID NO: 651060 - DNA, 812 bp, Homo sapiens
  misc_feature (360)..(360): n is a, c, g, or t
ggatgaccacttaacaccgggaaggaggttggaacccccctgggtgcctattgggaatggtccgcgcgggtactgaattggagtgccctcaacttggttttgtttttcgcgcgcgcaatgtttctcgtgtccgaacttccccagctcttcaatttttcccgcgcctctcacacgcgcccccgctctctacacacggggtgttcctggccccccccctcgtgagcacgcacgcggaaagacactcgggactgccacacccccctcgtggtgttgttctcacgctcgcccccgcctctcgctctctcgctccttctatgggggcgcgcatgcactcccgctcccgtaaatcacgctcggctntgtctgcgtctccgccaacaatattgccgcgccctcgtatctttctcgttaagagaatctccccccgccatgtacacacattaatatgcactctcatctatctatttccttccccctccactcttatatgtcgcctcgccttactcacccctcctcgcttttgataccctcgctacgttgcttaccttcaacatcacgctccaatctcttacttctccgccctctcctgatccgaactattgtcccgccgagttatctgcactacacctcggggataattgtataataactcccactgtgcgaccacaccctagcatcactcccccctcccttatctgctctctccaccaacgcacgtcgattgccgcccctctctcaccgctcttcattcgcagcccatgagtctcccccctattatgaattgaaaattcctccaactgacaatcgcaaac

SEQ ID NO: 651061 - DNA, 904 bp, Homo sapiens
acagtcaaacacatgtatcttcgtgatcacctccacacctcgactgccttcgtctgccatacgctgctggtaaaggctgggtggctgcactgtcttccccaacccaacattgctttcgtctgggaaaatgcgtctgataggcaattaagccatgggagtggacatttacacggaggctacgcacatctcaggggaacgctcaaactgcagctcgttcctcagacgcactgttgggtgcgaaggacacctggagggtgagggagacctggacacctggagggtgagggagacctcggcgcgttcctgcggggccttggccacgtggccattgcccgcaccctgtcccgtacaaattatggtatcatttgaatgattttctaatctacttatctcaatttatgtatttaaatgtcaaggcagagaaatacattgatcatgttaaggtcatgtgatgtggtggcgcagtaatgacttcctgaggaaacagagaaattggatgttttgtgatttagctatgtgcactaaacttattttccatgttttgagagcacattaaacattcacgtacaacgtgggactaggttggcttgtacccagaacgtccaacccaatgccaccctttgaatcgctgtgaacattgttctgttgctgttcagagaaaacaagcaaggttgtaatgttaatttttatatttatatttattgcccgggcccgggcagctccgctcttgtggtctgaggccacatggccccgcccaggggcagcctggccacaagcacgtggggtccaaggcaccaggacccaggcaggactgaggtggccccacagcgtggcccgaggcatcactggctgacgggcactcacacacaaccccaataacagcattctcacaataataacaatg

SEQ ID NO: 651062 - DNA, 386 bp, Homo sapiens
tttccagaatgatgccaaggtaggcgcgctgttcgatgaaagtgggcaaactaaggagcgtcctgaagtagttgagctcgagtttcaccctctgatggcttcaatggagcatctggccgttgatatcaatgatgtcgcggctgtggtatataagtgcttgacggatgtcgctagggctacctggttcagccagtacggatgatctctcgacattgcaagacatgctgccttacacttataccatcacatttaggacatctctacctaccctatgctagcagaacgaaacatttgatcttaagcttagtcacccgctgatcagagacatgcttcgacgacttaacgctgatgaagatgacggctatcttcttaccgacactaactcc

SEQ ID NO: 651063 - DNA, 276 bp, Homo sapiens
cgatctacaggatcccggaggcttgatgtcttccgggtgtcagatgagcatcactcactgtactgcacttcccaggtactggtgtgtgtaggggaagaccagcagtcccttgcttctatggacacctaggctgtgtccacagcaaaaaaatacttaattttgctcacagatcacaaaacggtgtcagcctccttatgcaaccatgtccttcccatgggcatgcgatgtgcagtctagtcatagtgccgatagccacattggacattcaacgcctcg

SEQ ID NO: 651064 - DNA, 728 bp, Homo sapiens
gccaaaccatttacccaaataaagtatacgcgatagaaattgaaacctggcgcaatacatatagtaccgtcagggacagatgaagaattatagccaagcataatatacggaaggagctaacccctatacttctgcataatgaattaactagaaatacacgtttgcaaggagagccaaagctaagacccccgaaatcgaagacgagctagctaagaacagctaaaagagcacacccgtctatgtagtcaaacatagtgggaagattataggtagaggcgagaaacctacacgacggacctggtgatagctggtaagtccaagatagaaatcttaagttcaacttataggaattgtggcccgacagaaccctctaaatccccgtgtacagtttgaagctgttagtccagagagaggagacagctcttctggagcactgagtgaaaaaaccttgtagagagagtacaagaaatttgagcacccatagtaggcctaaatagcaggcaccaattaagaaagcgttcaggctcaatagccactactaaaaaattccaaaattataactggaagtcctcaaacccaatgggaccaatctatcagcgctatagaagaactaatgttagtataagtgtaccattgaaaacattctcctccgagataagacctgcgtccagattgaaaaacctgaactgagcaatgaccagcccgaatatctacggttcaacaaccag

SEQ ID NO: 651065 - DNA, 199 bp, Homo sapiens
acgaaattacggtcatatactgtactactttcacagaagatcacacagttttgcaaaacgacttgtcatatgtactatgctatattcaaatgagaaaagctgtaagcaattatattcgctaaataaatgcggtacttacagtttgtcaggagacattagaaatcatctatcctttaaatttctgtgcccttttcaaggc

SEQ ID NO: 651066 - DNA, 232 bp, Homo sapiens
gcatggtgatgtgcacatctagacgtcagattgggagaattgcttgagcccaggagtttgaggtgcagtgaactatgaccacgctccagcccaggcaatagagcaagaccttgtctcaaaaaataaaaataaaaaagatacctatgatagaaataatgataaaggggagaaattttaacatacaggaaggccccaaattagaatagtttgacttaaaattttggactttatg

SEQ ID NO: 651067 - DNA, 501 bp, Homo sapiens
gcgaattcactagtgattgtgagctgagatcgcacccggtccaagcactggctttgagataagcaatattaaaaacattttcagcttcatcagatgctgactaactgacctccaaccactgttccaccagccataactacagctttggttggacaagtgactgatttcagtaactttttcctgacaaggtgactacccatcatggactggttctggctggcttacagagctcctgcacttgcatgtctttgtgtcctgaaaagaccttttgccatatagggcctaattataatacatttaaatgttaagtctccaccccaaagtgaccatgggttgtatgttgcatgcatgtttgttcaatatgcatgtgtcagaaccactttcatgaatattcatagctcctcatgtaacctgttgaatgtgtatgtttagtcaatccattgagcatgaagctcctaacctaaaccctccttctttgaagtgcctgtctctggtcttggt

SEQ ID NO: 651068 - DNA, 176 bp, Homo sapiens
  misc_feature (55)..(55): n is a, c, g, or t
  misc_feature (105)..(105): n is a, c, g, or t
gactgccggtcggttttacaactgctcgttacatggagaataccgtgtcgtcggnctgcgcatgcgtcgccacacgccagccaccgcgcaagcattccaacctangaagtaaggctagcgagcgtgttgttctcaacataggtgcagctcgctcacgtcgcaggatgccgctgtaa

SEQ ID NO: 651069 - DNA, 1177 bp, Homo sapiens
aacgtccctcttgggtctgtgttgtgttgttgtggctgtgggggggagggccccgccgcgggccggccaccccccgcggcgggtctctttttttgcttgtgttttgggctgaggaaccaccaactctccctcttcttgtggttttgtttcgtgcggtgcgccgtcgttatcgtacatcgcgtgtcgcgctccttgctctcgtcgcgacgtctgtgttgcttgtgtctgtcgtttgcctggttggggtcccgtggttgtgcctgtgtctgcccgcacttcgcacatgtctttctgattgcccgggtgttgggtgtacgcgtccctcccggcttcgtcagtttctcgtgggtgttgtgtgggccttgccgggagttttgcgtggcgcactcgcatgtttcagccgcgttctttgtttggtgtcctgtcctgtgcggcctgcccgcacgcttccgtttgtattgctcttgctcctgcttgctcgcggcgctcgtcttctatcgttcggccggtgtctgtgggtttcgtcctttctgcacctatcgctcccctctctcttcgctcgcgggcgtgcgctctcactctccccgaccccagatttcgttagtgtactgtatctatgttgttgtcacctcgccgctgccgtggggcgctcgtgttctcatcactcgccgtcacgctcctcgtgcgcgggcctaccactcgccacgcgccacgcacgtttgtctttctcccctccgaccgcgctacgctcctcctctcgcgccgagccgtctctgctcctccacaccatggtcctcgctcctccgccgggtggagtctgtcttttctccgccccgcggcgcgtctggggcgagatatatatgggccacgcaggcggctccggttgcttgtttttttcttcgtcctcgcggcgctcacgccgcggtggctgcccgtatgtagtgctagcccatttgtgggagcgagcgggcggcgagctcagggatcatgttcttgtcccgccgccctcctcgcagctccccccgcccggtgcctccagccttgcagaattctattttgtctgtgtctccccccccctgcccccccccccccccccgccccccgcccccccctctttttttttttttgtgtttttcccacaaataagctgtcggttttttctctctgccaccaaaca

SEQ ID NO: 651070 - DNA, 517 bp, Homo sapiens
tattgtatgtcggacagaacaaaagaagaggcagaaaatattgcatataacaaatcctagcttataaatgtagtttttaagcggtgatgtctctaatcatcattcagggatttttttttttttttaaattggctccacggggtctcgagcacggatatgggagaaaagcacatccggcataaagtgtaacccagggtctcaaaccacgggaaggacccgggagagcaaacatgatttttctaattccctctaagtaatcttccttaagtaaaacaccaagtgatcttgggcatagatccatacttaaagggcatcaatatggcattaatatcaggcaagcaactatacaaatatgcggagggcctggaaaactaaccatcctcatttaaagggaaatagggaaagcctgagtgtcaaggaccaactaaagtggtacacatccgaggtggggaacaaccacacagcgaggggcggaaagcaaggagtgtcaggcaaggttcatactccttgacccatc

SEQ ID NO: 651071 - DNA, 241 bp, Homo sapiens
ggtccctgcctaccaatatatactacaaaccccttagtctggcacacaaggccctgatgtgaccacgctcccactttcttctttcctagccttcccccaacccacaaatgcctttacataacaagcaacctttctttcctctaactgcacttagcgctgctcttcactacccttctgcatcagacttacttcccatcctcagccccagactcccctaccctccatgagaaacaccctactt

SEQ ID NO: 651072 - DNA, 373 bp, Homo sapiens
cccccttccagggcctttgctccaaaggaggcctttggaacccaggactttggggtttttcaaaagggctggggtgtggaagggcaaactgccccaaaaacggtggatataacccccgccccccccccgctgcctagcatttgcttggcccattagttcagcctcagaccatggcccttttagggggtctcttcctccccctccacagctgcagggggaccccagtgccaacttcctctcccactagggccctgccttcagctggggcttgctgcgattcctgtgccttatgtaactgcccttccttcccctgccctaggaaaaaggctgcatctttatatgttaccttcatataaactttgtaactttttta

SEQ ID NO: 651073 - DNA, 244 bp, Homo sapiens
  misc_feature (90)..(90): n is a, c, g, or t
  misc_feature (149)..(149): n is a, c, g, or t
  misc_feature (160)..(160): n is a, c, g, or t
  misc_feature (223)..(223): n is a, c, g, or t
  misc_feature (241)..(241): n is a, c, g, or t
cgccgcagctgcgagaagggttgggggcggagttgggagtttagcgcagtcgccggagtgcgtggacaacgaccgtccggccctagcctngccgagcgggtgccgggagcttccctttctcagcgcggcgcgaaggtggctcgacgtcngcgcctgcttncctcgacctagtcctcctaaaaaatccgaagctaaacagtagatgtggcgcctatgactacanttattcccgaccactatnaaa

SEQ ID NO: 651074 - DNA, 1006 bp, Homo sapiens
tctcacgatgggtgggtttctttcaaggggggtacatgcatcggggggtgagccaggtttccgctgttttgtgggggcgacgtggttccgaattggtgttgagctgtcgaagaggttgccccgcgcacgggttgtttgccaggtgagggggtggcccccaggagagtggtgtgtgcaccaaggatgcgttgccagccgggtggttgtcttatatagtggggggatttgtgcgctctgtgtgccattggcacgcacccgcacagagcggcgctggtgtccccccgccacggtggttccccgggcccaccgggtgcttttgttgtgcccacgcgacgggattgaatagtgtccgccccaatttcttgccctcttgttggaggcggccccaaccgttgtggggttccttgttgggtgctgtcctcagccgtcgctgtgcccaccccctggaggtgtctgcacccccgcaccgatgcctcgcccggcggcgtctgcaacccacgtgatgagcacggagggcgtgtgcgtggtagcagtctggtgcgcttcttttttgttttttgaaaagagagcccccccttgttctggctccacgacgcacttgtgcgctacagcacggggtgtttttcagttctcccacgcgaagcctctccaccacacgacggatggggcccccacgggcaatcccgcggagccttccctcgttttctcagcctatccttttacccactcgcacttctgttgatggacgccgtaaaactgcacctcttgggtgattattccgcgttcaccactcaccacgatgaggggacttttcgcgagcccttcacaaaatgatgtgcttttctgataaagttgttcaattatttggccaactaaagggttgtttttaaaaccatgaaacttaaccaattcctcgcgggggtttctcgtaaggacacccggggggccaaccctttcttttaaaacaacggcctcccctggaaaagaaattaacccctttttatta

SEQ ID NO: 651075 - DNA, 116 bp, Homo sapiens
gatgttacatcgctttaaaccctgcgtgcaatccctgacgaccgccgtgatgcccatgtatgacagacgacttgagtcaactacttcttaagatcatccacttattgattgatatc

SEQ ID NO: 651076 - DNA, 179 bp, Homo sapiens
tctgggaccagcaataacagggggcgatcctcagctttctcgctatagccataatgattattaatgatgagtatcgattggtagtattggtcatggttcattgtccggagagtatattgttgaagaggatagctattagaaggattatggatgcggttgcttgcgtgaggaaatacttg

SEQ ID NO: 651077 - DNA, 263 bp, Homo sapiens
ctcaccctgaccacacttagtttattgatggcagttccaccaggcctaatcgccacacaccagcaaaagcaggctatgctatagtacaagccactagcccgcctctcagaacctctcgtttcctttccatcgtggaaatctatcctcaaggaaataacttctcagtgttccatcagctattctactactcctcagggattcttcagggccccctccctttcccttacacattcaaggttcagggggttttgcccccacccggg

SEQ ID NO: 651078 - DNA, 519 bp, Homo sapiens
tcgcaagtgcgccgatcagggcgtaattggagtttgatgctcaccctgaatcaaaggattgattaaacggctaggctaaagggtggcataaaaataaattaggaggccataggtttgagggttgaccagggggttgtggcttatggggaggggggtccatagttaaaagagcgatggtaggagaccataaggctcgggagcggatgactgttaaagggtgcatggaaatgttgcgccgcggtaccaaccagaggcccctccactagggacagcaaacacccccacacagcggccacgctacaagcgccaaaacgaggctacgacgaacaatacaccaccccaacaagggagcgaccaccaacacaaaagcgcgagacggcggacacactctgcgcccacacacactcacccccctcactacgccccacaacaaaacacctaccagccgcgtccgccgcgccaaacgccccactacccggcaacagctgcccccactctgcccgacctaaacccacagcg

SEQ ID NO: 651079 - DNA, 200 bp, Homo sapiens
tgaacattcgtcttaaacaagaggcatgcatgaccccctcattcttcccatcatgtgaggtcagaacaagaaggtgtcatctacgaaccaggaatagggcccacaccagacactgaatttgccagcatcttgatcttgggtttcccagcctccataactataggaaactaaatttctgtttgtttggacacgaatgttca

SEQ ID NO: 651080 - DNA, 170 bp, Homo sapiens
tttgtacacccgacgggggccacccactcttttcttccccccacttcatctcgggattgcggaccggtcccacctcccccgcacactggggcgcggctcaacccttcagtgccccagcaggcaggctgtgcatggcgagcagtgacgcccatcgagcccaagcaccggga

SEQ ID NO: 651081 - DNA, 374 bp, Homo sapiens
ttgtggtcgatctctagcaggatcccctagttttcgtgaaaggggggaatatagctaacaaacaatattcaacagtgcggagctccctctgctggtctgcatctaggttggtatgttacaatacacattcccagagacatcttctaatttgctggagaagtggtctaaagacaggctgtgttgggctttgcctcatgagagtaacacttatgagacagctgagacacagcgaggtttattttcccgtccctaccgactctcacagtagcctcggatgtgaatctatcaagatcatgagtccagacccttcacttctgcacttcactgcctctctccatgttcattagctccaccttatttctctcggaccaatg

SEQ ID NO: 651082 - DNA, 664 bp, Homo sapiens
  misc_feature (500)..(500): n is a, c, g, or t
  misc_feature (553)..(553): n is a, c, g, or t
cgcggtggatcacccctgtaatcccagcagtttgggaggccgaggcgggtggatcatctaaggtcgagagttcgagacaagtctggccaaagatggtgaagccgcactcggtctctacgaatagatagcaaaatagattacgtcctgcgggcgtggctgtgtctcactgcgcgtgtaatactgcagtcatagctcggggaggactgacgatcaaggagatatgtatgagcccgggagtgacgcgtaagggtagcagggatccgagatctcgcgatcgaactccagccgggggcggcagagcgggactccatctcgcaaatataagagtacatggaagaaaggatagaactttaggagtcgtgagcagagcccaggcgcacggcctagagatccttatgtcaaccactcgagtagtgggctcaggccacaatacagaagggggatcagtgggacataaggagggactaccataggagcgccctcgggtgtcacggccatgngctcggggaggtcaccaacagatgcagatagcatgccgcgctggggaaaccgngagagtgtgcaaaggcaaaacacacattatgcggtggtgtaagccggtggacgtgggccttgataatgcggaaagcggaagatactgtactccaaatacatcccggtgggt

SEQ ID NO: 651083 - DNA, 950 bp, Homo sapiens
gccacctctgaccagagtatgtcaagacttgtacattaagttggacatgctgcaggtggtcacgaagagacatgtatacaagtattgactatgtctcgacacgatgtgatccagtatatagtccagtagttgtagcactttttgactagcctattgactgtatgctagtctcggtggcctgtactagtaacaagcactttaatctcattggaaaagtacaactctatggctaaataatcctggtaattgcgctcactaagagtctgctaaatgtaatttctcttttaaacaacattactgctattttctgattgctgatgttgctcttcccagtgtttcactagtttgcacgtcattaccggggaaatgcaagcgattcttcatggttccaacaactgcttgccccatttggcattgtatgatactaggaggctgtgttggcccatatttcggttcttgatatgcacaattgtcttcgtcccaaaggaataggcagagattccacatcttgtgaagtttttctataatatgggcccgcattgtatgttgacatgggagctgcccctgtgtatcgcatgtggggtgagttccaagaaataaacctcgtaatatgggtatggcggagtctttaggcaaattgaggtccacattatgctccctaacttgttgtgacacacacatgtgataggatactcttgctcgaagcggttgcttgcgcccagccactaatcaatttcgcccgttttgtcgccctcacagccacgagatactgtaatgaaactctttgctgcaaccttactcaccaagcgtcttggaacattgggtacaagtagcacttctggtccctgagcagggtgaatcctaccagttccattattgctggcccatactgatttctgtaaaaaaagtaatggtcactctcttatgagtacacatgttgatcagaataa

SEQ ID NO: 651084 - DNA, 275 bp, Homo sapiens
tgtcctttctttctgcccaggctggtctcaactcatgatctccagcgatctgctgcctcgtgtctccccaaaatgctatatttacgaggcatgagccagccggttttacatttcgtgtaggtcagaaagcccacatggtgcacagtgggctaatatcaaggtgttgcccaggtgagcccatggtgctgggttccttgcctttttccatgcctgttgtaggccacctgtcgttccttgtctcagtggtcccttccgctccatgcatcagaggctca

SEQ ID NO: 651085 - DNA, 792 bp, Homo sapiens
  misc_feature (17)..(17): n is a, c, g, or t
  misc_feature (65)..(65): n is a, c, g, or t
  misc_feature (72)..(72): n is a, c, g, or t
  misc_feature (87)..(87): n is a, c, g, or t
  misc_feature (234)..(234): n is a, c, g, or t
  misc_feature (236)..(236): n is a, c, g, or t
  misc_feature (243)..(243): n is a, c, g, or t
  misc_feature (245)..(245): n is a, c, g, or t
  misc_feature (301)..(301): n is a, c, g, or t
  misc_feature (303)..(303): n is a, c, g, or t
  misc_feature (311)..(311): n is a, c, g, or t
  misc_feature (365)..(365): n is a, c, g, or t
  misc_feature (367)..(367): n is a, c, g, or t
  misc_feature (379)..(379): n is a, c, g, or t
  misc_feature (421)..(421): n is a, c, g, or t
  misc_feature (467)..(467): n is a, c, g, or t
  misc_feature (475)..(475): n is a, c, g, or t
  misc_feature (496)..(496): n is a, c, g, or t
  misc_feature (584)..(584): n is a, c, g, or t
  misc_feature (591)..(591): n is a, c, g, or t
  misc_feature (634)..(634): n is a, c, g, or t
  misc_feature (652)..(652): n is a, c, g, or t
  misc_feature (659)..(659): n is a, c, g, or t
  misc_feature (710)..(710): n is a, c, g, or t
  misc_feature (722)..(722): n is a, c, g, or t
  misc_feature (782)..(782): n is a, c, g, or t
taacttactgctatatnacaaattacaacctcaagaccgcacgccaataaacacatatgaaaaangcttgtnattcagaagtgtgcnaaaattttgaatggataatcgtccttcttctgaataaagcatggattccattactcggtaatacaagcgaaacaaccaagtttgtatcgctgtgatccaatttcgacacaaccctgtcccacagctttagcaaatttctctttaaanangtatccnanatccttcactcttttcagtatactttcttttggattcactgtgcagtcgtaaaaanangaaaacanaatttctgaaggttgaacacttgctgaatttaaaaacatcattaattgttgganantgtccaaaacantcctaactggagtgtgtggaggaattacattcacctctccancaaggttactttttcgtggtgttctctgtgtttcaaaactgtctanagaatcantctgaagagttttatcatganccaaaaataatcttgcatctagatctttatttttaagaaaaatttcttcgtatcgtttagaaagaatttcaacctctggaagtccatnagatgtnacaagtccaagagaattcataaaaggtataaaatttttgaaanaaacatttttcacctcanctatatnacattcatgttctttacagagaacttcaataattcttgtatcaatttctanttgtgttgctanccgtgcactcctgttctgacctcgcctgggtgttcgaggtgaaccattaatgggtataanagctgtttta

SEQ ID NO: 651086 - DNA, 153 bp, Homo sapiens
acagagagtacatctatcatctcagtaacaaccctttccaacacatagttatcacatgatcttcttactctatgcaggatacgtcaagacccaacaaatgaaacacttctcctggcacattcatatccccattatggtttatcttttttcaaa

SEQ ID NO: 651087 - DNA, 321 bp, Homo sapiens
tatttagcagagtcgagcgagaactgatggatgtcgcctacaccggtccatctgcggggctcagtgggggctgctgtatgtcttggctgccgaacgggcaaggtgacctaggcttcatagccgaagaggcacgtagcgattaggcccagtacccctgcgacgatttaggagtggttgcctctctcaacaaggacaacactagaggtgactcaggtcgagtattgccgctataagggttcggaagaaatcactccagggccagttgatgaatggtatcttggagtgcaggtcacgcattttgaacacaaatcgtcagcagca

SEQ ID NO: 651088 - DNA, 180 bp, Homo sapiens
cggcacctctcttatttgtatcctaaacatacgtactatcatgcttttgttcacacacgctctgaagaatcctgtacgcccctgcattaagccgacagtcttcgtggcttttctggtcttcggctgctcagagttcatctgaagattcgaatgcaaagaaatgcatgtttcctgctccgg

SEQ ID NO: 651089 - DNA, 151 bp, Homo sapiens
gactttagctcggccccacaccacctgagtcacaccacctgagtcacaccacctgagtcacaccacctgagtcacaccacctgagtcaataaagtgattggcttagtgggcgaaatattatgctttgttgtttggatatatggaggatggg

SEQ ID NO: 651090 - DNA, 148 bp, Homo sapiens
cgcctttcttcaaatggtcagcctgagaaccgaggacacagccatatacttctgtacgcgggccccgggttattatgatggtagtggttattcagggcatgatgatcttgatctctggggccaagggacaatggtcaccgtctcttca

SEQ ID NO: 651091 - DNA, 470 bp, Homo sapiens
  misc_feature (4)..(4): n is a, c, g, or t
ggtnggggggcccccccccggcggcaacggctttggacgagggcagaaccccaacgtgcaagggttccccccctaccgacggtaggccgcggggccgcgaagtttgcacggcccagacccaggattcccaacttgtgaactcgtgacaatcccaaacttggcggcaaagtggcgactcaaccttgggggggggggcggggggagggccccaggcttttggaacggctgtgggtgtcgtttggactgagggttttaaaaatttctttttctaacccatcagccccaataaaaaaaagtccctggttcaaccacagggtttaaaaaaaatgttttcagctttaattcaaaacttcagggtttttttttttccttttttttgggaattattttcctgagccctttgtttttcgggatattgtaaacttttatgttaaaaaaaaaaaataccttttccaattgtgagattttta

SEQ ID NO: 651092 - DNA, 877 bp, Homo sapiens
tgcacgttggtgtgagggctgactaatattgcgtcgctcattagatttatgataccgtcccttgtgctggccccaccagtgtttcccggggggaccctttgttttcacacgctggtgggttcgttctccctgtgcaagtcggtggctctccttgcggccttggtttcctcacgcgtggcctacgaatgaacaaccctcggctggttccttaaagaggtgtgttcacaacgctcctttagcaaatctaatcgttcaaactcatccattctgggcgccgaaatgatatcctcgcggtcggcttgcccccccgagtgtgacaagtgaaaatagctcccacccgttttagctaactcttggccaccggttcctatcccccctcctttgctagttgtctcccccgtacaaagagtcttctgctccttctgcgtggagacaaatgttggtgtccttgtctatgccacccaaagaagaagatggggggcaaacattttgtcacacgcccccccctggtctgaggatcgctctccttcttgccttgggggaggtacatatcccactaaggaacaagaataaactgggcgacaagttcacttctcagtaacagtcccatgcccgaccactggctccagatgtgaggatcatcctgtccccacctactttcagcgagtgacttctcgaagattacaggttctaaccatgtagacctccccccaactgttgtttcaaggtccaccagcagtgggtgaagcaattctttcatcagctccctcattgttataggttttatcggcgtcctaacacgtctcagggacacaaattgagcagtgctgaaggatatcccaaaaaggaataaattgggaacccgccccacaaaaca

SEQ ID NO: 651093 - DNA, 228 bp, Homo sapiens
agaggatctgatcatccccttcgtgggccaccgtcatattccctgagtgcacagtacggggggctccaggtgtcagggcagccctgccatggcaggtgcaagggggtccagactcgatggcagagggtcacgagggatggaggccctggcctcccccacctccctgtgcagggaggtgacacttgtggtggcctgagaggatgtggcagtccctctggaggcacgggg

SEQ ID NO: 651094 - DNA, 572 bp, Homo sapiens
gaattcggcacgaggggaatagtgcacgagagacaagatcacgcatgcacctgcgatagaggctggtgagatattgagaacactgcagttattagcctgtggcaaagctagagttctggcgaaaaattcgcgcaactttttacgattaagatcaatcctatcccgatttaagaaacggttgtagaacaagcactcactacacatagagtgtttcaagacagacacgtatcaaattggtgctctaattgcgcgaattctgaagatgagaaagacacttatgcacaatctcctttgtttcgaagtgttcaaccagttggaattttcactcaaggctgctgatgtttagaaagagatataatcttctcatgacccggactacatggtaagagataaacgctcgaacccggtcaactatattggatagaatggtggccctgcagcattttgcgtcatattccggaaccacgggatgaacccacccggtgaatccaattatttggctcccttttgtcttcccgtgaaccaatggaaggtgcccctaatggtcagctgagtggaccttttcttggggt

SEQ ID NO: 651095 - DNA, 309 bp, Homo sapiens
cacctctgtacgattccacctctgcacctagttcctcatactctaaagtgtagtctgcctccaggatgacatcgttcttgaccacgatgctaccgttgtagcaatctccgaatgttcacccctctatactgaggaagattgtcgcccttcaaaacgacatccatccgattcttgaagagggtactgaagttctggtattcctgggaggatgcgtcattcatcttttctgtgaaatttctgtaagtcactttcactgtcatacctaaagtggcgttgagtttttccggggtttctacagggacggattcc

SEQ ID NO: 651096 - DNA, 262 bp, Homo sapiens
ggtactctagaggatcgtctggacgagacgactacaataaaaagtacagtactattccaataaacactgcagagggagcacccctcggttgctgagtcccctcttccctggaaacttccacccagtgctgaacttccctctctcataccctccctccctaccctaaccaaggttccttggcccatgcagaaagcatccctcacccagtcctagaggccaggcaggagcccgttctatacccacgccagaagtgagacatcca

SEQ ID NO: 651097 - DNA, 101 bp, Homo sapiens
ggaagtgtagaaatgactgagaaaacgagactgtttcagaggaacattgtcacaacgaatacttctggaagcttaacaaaactaacctgctgtccttttta

SEQ ID NO: 651098 - DNA, 121 bp, Homo sapiens
agttagctatggctgtatcaccaccctttattcagatgatctacctcatgctttgagagagaaaagaaccacagtggttgcacaactgaaacagcttcagagcagatacagaaccaattgt

SEQ ID NO: 651099 - DNA, 610 bp, Homo sapiens
gtggaaccaacagcagctcgatgacttgtacttggatcgccatctgccatcgccggggcatcagatccctacgcgaccttactccggatgcacttgccgctgctcaggaacatcctccaccaggggcaggaggccatcctgtcgagcgctaccggatgaagggagaccagtctgcgatgtatacctgcactatcctgccctcctactacgcacctgcgatgtgcacttcagccgcccgtgggcttcgaggcccccggtctcaggcggtggagcgggcccagctgctggtctgaggtgatcgagaacttggagtgtgaccctaggcactagcagcagttgcagcgctcaccttctgaccctcatggggctgtacgatccccctgctcaatgctcttgcaggaggctcagcaaagctgaattaactcaggcagacagatgcacagatgtgtgggatcgcgggacggagtggtggcacaagatgtgtatctccaagtgaattggctacaaatgtattttataccggcttattcctagtatggaataaactagcgggctcactcaaaaaaaacaaagaggggcgaccacgaagattcccctagagagaaaccgg

SEQ ID NO: 651100 - DNA, 167 bp, Homo sapiens
actcttcatggggctatagcttcctacctccttcaccctacactacctgcctttctagcatctaggctagtgtaggccaggtaggtcttgaactcctgggctcaagcagtcattcggacctaagcctcctaaagtcctgggatagtaggggtaagccaccaacccac

SEQ ID NO: 651101 - DNA, 667 bp, Homo sapiens
tcctccctctggtggtcatcattacacctcctatgtatgcctcgctgtgctgagcccttgccttgtgtccattccaacagactaactaccctgaggtgcgaaatacgaacgattgggtggaaacagatgcaacgccagaggcccacggtgccgcaggacttgtctggtccagcattcatgctgtccttctttgtggggagcagggtgacatacagagagataactctggctgtgtgcttagcgaccctacgaagtgggctggggttggtggttcacgcctgtaagcccaacactttgggaggctgaggtgggaggatcctttgagcccaggagttgggacagttgggcaacaatagtgagaacccctgtctctacccgaaaaacagaactaaaagccaaagagagacatgaaaaaaccgggcgaggagcaacaagggcccgaggggaaacggagtataaacaaaaagagatgctcgggagcaaccccaggcggaaacgggtacgcaatgtgaccaaaggggcaccaacaaagacccagcaaagacaaaagccggggggtagtccccaaaaaaaacggcggggggcagaacggctgaacaaacacaagagagacagagcacagggggagacacaaggggaccagggacagataaatcaccggcgggga

SEQ ID NO: 651102 - DNA, 313 bp, Homo sapiens
gtcgacggcctctagtgagtctggctgaggttttatctatcttgttgattttctcaaagaaccagctcctcgtttggttgattctttaaatagttcttcttgtttccagttggttgaaactcgcccctgagtttgattatttcctgccatctacttctcttgggtgaatttgcttcctttttttctaggtcttttaggtgtgttgtcaaactgctagtgtgtgctctctctagtttctttttgagggaactcagagctatgagtttccctcttagaaatgctttcattgtatcccataagtttgagtcgacgc

SEQ ID NO: 651103 - DNA, 423 bp, Homo sapiens
  misc_feature (21)..(21): n is a, c, g, or t
ccaccgaggatgttccaggcntgcgcgatgagcgtggcgtagagcgccatcatcacgaagttcagcatgacgcccgactgggtgaccagcggcacgcagccgacgaccacagcaaagagcgcgatggccgcgagctgtctgtatccggcgttgattcccgctttcatgccttggctccgaacatgccctgcgggcggaacagcaccacgccgatgaagatggcgaagatgccgatctgcccgagcgactcgcccaggtacagcccgccgagcgactcgaccacgcccacgaggaagccgccgatgagcgcgcccacgaagctgcccatgccgccgagcacgacgatcgtgaaggccacgagcacgaagccgctgccgacctgcgggttgacgtagtacgcgggcagcaggaagcaagcggccg

SEQ ID NO: 651104 - DNA, 337 bp, Homo sapiens
aaggcctaggtgaggctgcagttccatgatgtggccggcgacatcttccaccagcagtgcaagcgcaacgagctggtgatccgcgtgcatcccatcgaggccttgtacaccaagatgatgaccaagaagccgggcatgttcttcaacccctaggagtcggagctggacctgacctactgctacagattcaatatcgtgaatctccctgacgcctacaagcgcctgatcctggactttttctgcgggagccaaatgcacttattgctcagatacgagcttccgtgaggcctgtcgttttatcaccccattgcttgaccagattgagctggataagccc

SEQ ID NO: 651105 - DNA, 472 bp, Homo sapiens
  misc_feature (449)..(449): n is a, c, g, or t
ggcagggcggtgcccctaatactgggtgatgctagagttgatgtttgggaaaacaggcgggtaagattggccgagtccctttaacttttttaacccttcccttatgagcatgcctgtgtggggttgacagtgagggtaataatgactggtgggtggatggtagatacggggctgtaattggtcagtccagggtttaaatctgacgcaggctaatgcgaagaagaatgtttcatggtccttatactaccataagtcctcctataggggtgatagatggtcccacgtggggtgtgagaagtcagtaatatgtaggggatccaaaaggtagggggtgtggagcttgaacgcttcctaaatggggggctgctttaaggcctacaaggggtgtcaaatttttaactctctctacatggtttttccctagtgtccaaagagctgtccctctttgncctaacagttaattctacagggg

SEQ ID NO: 651106 - DNA, 314 bp, Homo sapiens
  misc_feature (47)..(47): n is a, c, g, or t
  misc_feature (221)..(221): n is a, c, g, or t
  misc_feature (248)..(248): n is a, c, g, or t
  misc_feature (295)..(295): n is a, c, g, or t
cgaacaagcgaaacatgcgattcgttgagtacagattcgatgttacnacaaatgatttcccccatttcatgaaatggcgggctgctgcacatggcggcgagaatattgccttcaagctggcgaatctgccgttcttcggtgatatccgaaaaagtcattaccaggttctgcagatgcgcgagcacgtcataaaccgggctgatagaggctttaatccagantttttcaccggtgcgcgtcaacagcanaaattcgtcctgattgcgggcggttttccatagcaactgttgtaaangaatgcggttatcggcagg

SEQ ID NO: 651107 - DNA, 771 bp, Homo sapiens
cgggaacattgatgtgagctgctgaggcgcgagctgtgctgcagctctgtcagtgtccacgggccactcggggggcggtgtgcatcagccagggccggagctatgacacggatcaaggacgagtgttctgtgaaatgtgaaccccagatggctggaggccaggagacgacatgttttgaagtgtgagactggcaagtttaacgtgccatcctgaaaacaaacactggtgaagagtgcccaatgcccatcaaggttcttggattgccccatgtgctggctgggagcgtgctggtgatggaagcacatggacatgagtgcatctgagcagtcatgctgcaaagctttggagcccagctgtgccggatttacaccttgataacaagaagcttggaggagatgctgcctgaaggaggctgggacacatgtgggtgagaaggaggtgggcaggaggggaactggccttttgttggcccggttcgggattttgacgtggtgactgttgctgtgtgatacctcccccatggtgagtgactggcatggatggactgggtcgtgttctatgcccgggagcgcatacagccgccagatggacatggttgagccgtgagtctggggacagggaggccctccagctttgtctgctctgcgtaggatccttgactgttcggtgaccttgagataatccaggcttactcaggggcctctgggtggacgtcgcgagggtctcttggccgtggtttggccagttcaggcactcggatttgtggttgt

SEQ ID NO: 651108 - DNA, 1163 bp, Homo sapiens
ccacgcgtgcgtggacgcggtgggctgatgctgtggggtgtatacaatcagctgaggtaaactaaaaaccttaacgtcttcgtccgaatggggaattgcagaccagatgaacgagacgtggaaaattgtagcaacggctaggagagacgatgtaaagactcaagtaacgtccactacgttggtggtatctcatacctcacccataggtaacactactggcatctatctcacctatcatcactgtgatggaattgcataagtactgagcgtcaccatcgtaccgctctggaacatccataacaaaaacaactaactatcacgatcaacaccaacaacacctgaagtgtcttacattcttgcctcgcctctacatttgaggtgcgcaagataggacattagatgcaacagcacctttcctgccatgttgagtccgaaacctacaactacgaccaagttgccctactcgaatcaaacatcttcctcgttaaactattatcaatctcccataagcgggtatgcgtttaaaatattgatctagtgggtcctcctacttaataacagttaaacaatacgtcgtcgcgaaggaatactatgccgcacgcgtctcaaagaaggtaagagataaaagaagtgggagacacaaaagagacaaaaaagggtaccgcaaccaaaaaaacagagcaagagagcagggggaatgtgttgccaaaaggcagcgtaggattttacaagaggggtcgcccacgagtgggcacattaagtggggccgaaagtaagaccatataaggcccaagagagacagcctaacggagttcgataaccaaaaaaaaagatacaacaggaatgggtccaatgagacaacaaaggatgggagagaaagggtggccagtaacgcagggttcacccaaagaattaacagtagaagaagaacgcggctcaggaacagaagaaggtgcaggggaaaccaacttggtgtggacgacattttgaggagaaaggctgcacggatgggacatgagcaacggaaggaagctaatatgaaataggtagaccgtggtgtaaaataacgccacaaagtggaagagagcgagagaccaaggaggccacaagattgagaggggaagacacaccgtgagtcttcatacaagacgaattatccatag

SEQ ID NO: 651109 - DNA, 127 bp, Homo sapiens
actacacaacaatacaacagccttaacttcctgggctcaaggagtcctctcaccttagcccctcggatagctgggactacagtgcactgtgcacgcatgcccaaattaaatttttaatttttgtgta

SEQ ID NO: 651110 - DNA, 1353 bp, Homo sapiens
  misc_feature (1122)..(1122): n is a, c, g, or t
  misc_feature (1142)..(1142): n is a, c, g, or t
ccagtgagggatccaaaaggctttttgcagcagcacatcttgaaaggactgggagcagttggccaagatgctgggacacagtgccgacgagaccatcggcgtggtccacctcgtcctgcgcaggcttctccaagagcagcaccagctctctagcagaagtgaggaaaggggcaagggctgggcggggatcacacagcacaacggcagcgcaagcaggctcgctgtcttgtgggccaccccacacacagccagtctgagctctgtctgtgctgttgctggaaagaatgagagaacacacagagagaaaaccgtgtctagggaaggcgatgcctggggctggaaaaaggaagcactctgcttgcccagaggctggaaggagctgctctgttccctccattcacccctgcctggctaagacctgcggtattcgggagcgtctgcacgcaagtgttcagtgtgcatatatggggagtcttcagttccgaagtcagccccgtaggtcattcccctaccatgctgggagcacgtgtcgtccacacagagcgtgcgtgtcaaaggatcaatcaccatcacagttgtgtgctgatttattaaatgtttatatgtccacagttatgttaaaaaaaaaaagctataaaatattgtattcactgagctaactttctattttaaaaatttaaatccatacagaaagaaaaggtctgtaagacaacttagtaaaatggttatatggttatctgtgagtggtggaattaagagtgattttcttttgctaatctgcaaaaatcacaatgaccattgtgaggacaatgttaatttaaaataataacaataatagcaagaagaagtcctgccccatgacaagaaaatctgctcccacctcaggtacttctttgcctgaaactggcattcctatttattttccattttgaacaatctgattttattttaagcctcttattctggtgggatttcagcaaagtgagcacacccagagtcacactgatgaaatgacagaatcctggaagcaggtggacagttcccgcagcactccacatctgtgtggtctgcctcagggtttgggtggcagcagctgagacggctggcggtagcctgggccantcttactattgagctcaagntctgttctttcagtaatttttttcaaaatggatctaagattacaattatgtaggatagaggaatttttagagattgatgttatcttcaaaaggtcattaagttggtggtaacaacaggaactacttcaaaatacttagattaatttagaaagctattacctcaaaacgagtgttatttctattaaacacttatttagggtttataaaacgc

SEQ ID NO: 651111 - DNA, 459 bp, Homo sapiens
agaggctccccccgtaatgtagtaactgtgttcatcccagtctattcgatcgtggtgaaaatatttacgttacctggtctggctgtatcatatgataaggtagaggtccaagaatcctttccatcattgctaaatgctccttactatcgtgtgttggaaatacggttaacccatgatagtatgcaataagaatgcatccaatgctccagacatcacatggttgggaccaccctagggctaataattatacttacaggtgctctataatgttcttgtagataccaatgtactgtgatgttcgtcatcatatgtagcactaccaaagtctaccaactttatatatctggattcattaaggtgcgttcatcacgtttaatcctcgggataatacgcctctgtgtagtcagactgcaccaattatatgttttcaggctttaggtctgtgtgagtctacttata

SEQ ID NO: 651112 - DNA, 121 bp, Homo sapiens
gcttaccgaatgatatcccgttctgctgctagccctccattccagcctgacccaggtgcccagccaaacctcagtcctcacttgcagagcccatggtatgagacgagacttcttgcctgct

SEQ ID NO: 651113 - DNA, 531 bp, Homo sapiens
tctagaggatctcccccaggcatccccacccaggaactgactcagcacaagaagacagctctgacttcctgtgatttcatctctgaccaatcagcactcctggctcactagcttccccccacccaccaagttatccttaaaatctctgctccctgactgctaggggaggctgatttaagtgataataaaactccggtctcctgcatggccaactctgcataaattactctttctctattgcaatgcccctgtcgtgatgaatcggctatctaggcagtgggcaagatgaacttcttgggtggttaccccagttaggattaggtttgactgcatataactgagaaacctcaaatatcgtagcttagaacgggtttatttttgtcttatgtaaaaaagtttgtaggtggacagtccagaagacaaagaggggcatgctccctctggttaagtactctttcaggaaattgcacacattatttttcttacaccttattggtcagaacttagtttcataactatggctatctcaag

SEQ ID NO: 651114 - DNA, 1059 bp, Homo sapiens
agcggctcgggtcgctcaggcccgtggggccgacaagatggcgcaagtgtcgcggacttcgctactggctaggaagctccgtatgtcaccgactgagaccagaagtggcatagataaacagatatacagacaatgctcatttgggcacagagccataaaggccgaacccgtttcgcaaggtgcgttctcactgcgacaacaggaactcgctgctggcaacaaaagtaggcacggttgaagcgcacaacagccaaacttcctgccacttacgggacagtgtgtaagggtccagcctgcatcaagcaatggcaagcacaaatcaccagcctttgtagccaactgacgcgcttgccttgcaacttctatctgcacgcaccacatgcatgcacagtctctgcgttgcctgcgcatcccggctcggccaaacggctccctgcctgctcaggctgcatcatctcgcctcgcgcagctccaggcttttcacagggcttcgtcccacacaagctcagccccaatagctctctcctcatctatcacggccccttcatcaccccacagcggcccacacgcacaggggccacacagcaacccgacaaggatcccatacacacactccatttcaactggccgttggaacaaccactcgctaaggcttacagcttaacacgcctttctcgacctcagttggccccaacacaccaccgacgaacaacagacaaaagaaccacgcccactcgcaacccgacgcggggtgtaaattaccgcgcgccccaaatatgaggggcgggccgcgagacccacgccatctccactcaagacgggagcgtgactccccccacgcgaaacacccccaacgaccagtagtcgagaggaagcccccccgacattacagcaaggcggaggcggtaatacaaaatgtacaccgacaacacctaggtgggcgcgcataacactaatgtcggcccacaaaagaaaacggacggccaccccgagtggtgcaacaaaagaagcgataaaaggcgggatgcacaacaaacgactcacagaaggcaagcccag

SEQ ID NO: 651115 - DNA, 102 bp, Homo sapiens
ctgtacgaagctaccaaatgtgtcttccaaatgtgcgcatctattttgtgttcctaccaggaatgaatgggaattcctgttgctccacatctcaccaacatt

SEQ ID NO: 651116 - DNA, 852 bp, Homo sapiens
acacctgttccttggcaaaggcaatcaccctcttccaaagagagctccttgctggagtgtaaacccagcaggttggccaggtgcagtggctcacgcctgtaatcccagcaccttgggaggctgaggcgggcggatcacctgaggtcaagagttcaagaccagcctgaccaacatggtgaaaccccatctctactaaaaatacaaaaattagccgggtgtggcagcagctgcctgtattcctagctactgaggaggctgaggcagaaggatcccttgaatccaggaggcggaggttgtagtgagccgagattgagccactgcactccagcctgggcaacagagcaagactccacctcaaaaaaaaaaaaaaaaaaaaaggaaaaaaaaacccggtggccttggccaaaagctattcccgggtgtcacccttgagcccaaagccagaggtgacagccgcctgggttcccttttcacgcttgccctttaatagcccggggactacgattggtatggtggcctcttttctcatcccactggaattaagaaatagtggtctttctaatcatatgcgggataaagaaggggaaatttataaaaaagggaggaattgcgtggtggtattctcacacagggtcttgggcctttaaatatgtggaacatcaattaattacttccaaagggaaattgttctgggggggtgtgtagtgggacacaggcgttgtaatcccaaaaattgtggagaggccattggcaggaggatcattggccctaggagttggaaccagttggaacatattggggcggttttggaaaaatttaaatccgttggcagggtacccattggcagattga

SEQ ID NO: 651117 - DNA, 361 bp, Homo sapiens
  misc_feature (331)..(331): n is a, c, g, or t
  misc_feature (333)..(333): n is a, c, g, or t
  misc_feature (335)..(335): n is a, c, g, or t
acagcttaaaaaagagtatcctaaatttgaacacaaaaatatgatttttccttgaactgaattaatgaaataaaaccttttcttttcttttcttctcttttttttttttttttttttgagatggagtctcactcttgttgcctaggctgcagtgcagtggcatgatgtcggctcactgcaacctctgccttccaggttcaagggattctcctacctacgcctgacctcagggtatccacctaactcggcctcccaaagtgctggaattacaggtatgagccaccctgcccggccgaaacctttccttaaaagtcaaattcggctgggtgcnangngcacgcctgtaatcccaacactctgg

SEQ ID NO: 651118 - DNA, 345 bp, Homo sapiens
aaaaaaaaaaaaaaaaaaaaaaagttgggggcggcctgggccctgaaaaattttaaacccttcgtgggggggggggccccacagggtcaagtggagaacctggggtcacataaggcctggtccccccaagggaaaatccggggtccatgaactctatgatgctggggttcgctctccaccacaattaaaaaaacgcccggggggggacacaccaggagcgtgttcctggaaccaactctccacaagaggggagtctcggagggtccatcaacggggtctcctcatacaaccgggatgccccaagggagagacccaatatcaaaattcaccccccgacgcgggaga

SEQ ID NO: 651119 - DNA, 323 bp, Homo sapiens
ttttccaaaaaaaccaattttgggttatttttttttttggtgccgggggggtaaccgttaactcctgtaaaagtttggggtttcccccatgggtggtctctctctctgtaatcccccttgccaattttcccccgggcagggtttttttattaaaggggggctttggccccgtttgcttttatttagccgggacttcccgatggttttaattttcgatgctgtggtggcccccctatggttttttggggttttgggcggctctcctttccttgtttgcccgggggggtcgttgctgttgccccataaaggttgggggcgttcca

SEQ ID NO: 651120 - DNA, 309 bp, Homo sapiens
  misc_feature (43)..(43): n is a, c, g, or t
  misc_feature (212)..(212): n is a, c, g, or t
gcctttttttttataatttttcctttttggttccccccactcngggggtaaataaaaaaatccccccctttggggggggggtttgcccctttttcccccgcccgggtccctttttccaaaaaattttttttgggaggaattcccttttttttttttgttttagaaatggccccccttttcccccccccttgggccctccaaaaaattacccngcccctaatggttttgtctcccctttttttttttttcttcccggccctaggttgggcctttggggggctccaaaagggttttggttggggtgtttta

SEQ ID NO: 651121 - DNA, 242 bp, Homo sapiens
ggcggtgtctagaggatccctaagagcggctgcccaattgtgatttgctggttctttgccttaggagacagatcaataaatactgctttgatttatgtcagagtgtcctacctatgttttcttctaagagttttatggtttccagtgttacatttagatctttaatccatttggagtttattttggtgtatggtgttaagaaaatattcttgagaccgctcttaccgagaccgctcttaccg

SEQ ID NO: 651122 - DNA, 357 bp, Homo sapiens
acgttggggaaatacacatgcagagatcacccgttcacccacactgcgtctcactccagtccaaaggacaaatttccaccaatctaatgtccattgctcgtgtttcttggcccaagcaattggtgtcctttagtagtggttggttcctttgcagcaatttgaccatgaaggcctgattcacgtaggctcctctgaacagttcatgttgagatgtgtctgttatttgaattctgtgaagcaattatttgggttgcaatttctgaggctggtaactctaatgaacttctcctctgcggcagaggtatctctgggtctttcatagttttgatgtatacactattattctatgtcgacgcg

SEQ ID NO: 651123 - DNA, 424 bp, Homo sapiens
  misc_feature (228)..(228): n is a, c, g, or t
taaaatgcactctcaatgctattgggaaaacttactttatttccacagaaaattcttcttcaaatcctctgcaaaaaagctatttcactcctcctgttctcaaatcttgaacacgtttctccctggccgctccactcataacatggtcccactctatatgaaaaaagtagaagcactcagacccaaactccttcattctcacccttcacatttgtgaaacccatattntaggtcttctcccatttcaacggaagaattgtccttgatcaatcaaaagtgatttcctctggatctcatctcttgtggaattctcaagtcccagcttctgcaattagcctccctcattgtccggaattattgcttttctccctttctactatgtgattccagcagcaaacaagcatgttagaatgtcctgtggttt

SEQ ID NO: 651124 - DNA, 910 bp, Homo sapiens
gggcggatgaacgccggtgacagcgggggggcccggaggcccttggggccctgggatggggaatcgcggtggcttccgcggaggtttcggcagcggcattcgagggtccgtggggtcggccggacgatgtgacggggaccggggccgatggtctgcgtggaggcctcgcggaggcaacggccgaggactaaggagtggatgctcgcgctgagcataggtggtggccgcattgtgtcttggggaccatgaacgatcaagatccccgttggaaggacgattcttactctctgttctcctctgtggcgcatctaaggaatcagagattcatttgatgtgtctttccgtgggggcctcttctcaacggatgatggtttgaagatctatgccacatgttgcaagaaggcaaggacaccgtgccggccaggcgacagccaggttcacacggtcattcgttcgctatcggggtactacaaagtggccaagtcggtctgggtgttaaggtggtccacacggaatggttggtcacgcgccctctccgttgtgggtcattcatcctggctcataagctcgtccatcgatccctcgatgcctgcaagagcgtgtactggtgggaagcgacgatcgaggccttgacactgtgccattgctgaggtggagcagggcggctgcgggtctggtgctggtacgggtctagtcctgcgaccacagggggaccgtggtggtcgtacttcgggatgctgttggctaacgaatgctggtcctgagtgggtggtatggatgagggttaaccctcagccggggtgtgaatggtcacctgggaaatttcggcaaggcacctttgatgcattttaaccttaaataactgaacgcgacttggagggatgttcacaatctccatagcgttatggat

SEQ ID NO: 651125 - DNA, 89 bp, Homo sapiens
  misc_feature (54)..(54): n is a, c, g, or t
aattcaagcttctcgatgtacggggacatggttgtggttaatctggtgttattntttgttccacaagttaaataaatcataaaacttga

SEQ ID NO: 651126 - DNA, 354 bp, Homo sapiens
acatcgcccaccgtaaaggctggctgtcgctgcacacaggtaacctggatggagaggaccatgccgcagagcaaccggtggaggatgttttccttcgcaagttcatgtggggtaccttcccaggctgcctggctgaccagctggttttaaagcgccggggtaaccagttggagatctgtgccgtggtcctaaggcagttgtctccacaaagtactacttctcgtggctcagtaaactttgctgtctactttacaatgtctgtgcgactcactcaactgtgcctaagtgtgtatagtactctgacatccctttttcatcagcttagctcgaatgaacgtggaagattgtattggg

SEQ ID NO: 651127 - DNA, 337 bp, Homo sapiens
ctatcaagcaaactgaatatagatatacaccacatatagatacatagaaattacctacaatggcttgtagctctaaatgtaagagctagaactgtaaaacttctagaagaaaccagtgaagaaaatcttcataaccttcagttcagaatacagttcttagttacaacaccaaaagcacaacccatttaaaaaattggtacgtaaaactcactcagcatttaaaacttttgtgcctgaaatgacaccatcgagaacatgaaacagataagccacagacagggagaaatatctgaaaatcctatatagataataggactagtgtctagaatatactaaa

SEQ ID NO: 651128 - DNA, 247 bp, Homo sapiens
tcaacgctttatacttcctcaggctaatatgttccgtattgaattcaaggtataatattaggtatgcaggggaagtataaagggtagagaagtataaagcgtgagaagtataaagcgttgagaagtataaagcgtagagaagtataaagcgttgagaagtgtaaagcgtagagaagtataaagggtcgggaagtataaagcgtggcacaagtataatagcgtggagaagtgatatacagcgttgcag

SEQ ID NO: 651129 - DNA, 743 bp, Homo sapiens
atcagtagcatctgtaacagcgttacctgtcttaaagagagagagagagaattccgaattggggaacacacgataaaaaaaaaaaaaaaaaaaaaaaaaaaaaaaaaaaaaaaaacaaaaccaccaacaaaaaacaaaccaacaaaaaaccccaaaccaacataaccacccaacacttttttggagctcacccccccaatcccccctataatcagtcgtcctccaaccccctccccgttgccccccacctaccccccccgtaccacccccgccctcccccatctcaacccccttccccccccccccccttccgccagctggcacaataacaaaccggcccccaccgacccccctcccaaacagtttgccaaccctgaatgcccaacgcaacttgaatccttaattatttttgaaaaacccgtcttacatttctactaaaccaacccatttcccccccaatgcgcacacacccgccacactccctaaaaaacccaaaaaacccacccagaccgggccccccgctcccccccggaccccccacccaccccccatccgccccccgttcctacccaccaaaaccccgaacacccctcctatcccccttatgtccccccctccaccacccaatcactttaacccggtttctgcgccccccacccccccaaacccgcctcaacccgccccccctccagccaccccctattttatacatggcccaataacccccccgccaacccggcgcc

SEQ ID NO: 651130 - DNA, 246 bp, Homo sapiens
cgacgacctacgcacacgagaacatgccctctcgcaaaggatctccttcatccctctccagaggaggagaagaggaaccacaagaagaacgccttgtcagagccccaattcctacttaatggatgtgaaatccccaggatgctataaaatcaccacggtctttagccatcacaaacggtagttttgtgtgttgctgctcactgtctctgcagctacagagggaaagcaaggcttacagagggtgtt

SEQ ID NO: 651131 - DNA, 204 bp, Homo sapiens
gacagagtgacactctgcctcaaaaaaaataaaaagcaaggaggggccaggtgtggtcgtcacgcctgtagtcccagcactttgggaggccgaggtggatggatgacgaggtcaggagttcacgaccagtctggccaacatggtgaaaacccatctctactaaaaatttgaatttttttttcaacactcttacacctgttatgg

SEQ ID NO: 651132 - DNA, 290 bp, Homo sapiens
ctcaagtgtatacgaagtcaatagtgaatctgcagtatgacaaaaggtatcattcatcataagatcatgccgataagtcttgtaaattatatacataaattctcccacagattctaagcagtagtctgtaactgggcagttaacttatgcacgcttacctctcttaccaagctttgagtgcaagagatagaagagttcaaatctgaccaagatgttgatgttggataagagaatactctgctccccacctctaagtggccagccctcctagagcgggaggttattggcat

SEQ ID NO: 651133 - DNA, 500 bp, Homo sapiens
  misc_feature (400)..(400): n is a, c, g, or t
aggtctggttatgctgcccaggctggagtgcagatattttctggtgcaaccacaggggactgcagctataaactgctgggctaaagcgatcctaccgcctcagcctaccaagtatgttgggactagatgcacgcaccacccgcctgactcaggacattattcttaaaggtattatccatgaaacagataacgtcattcataagacacacggctcatactctttagctcagtgtgaacaatgaaagtagattccactattgaagcacaagttgtgaatgggtgacatagtgaacatattgctgtctgaaagggagatcagcgaggcgtgtatatgagcacttgaactgttcaaggcgacataatccagctatctgccacaaagaatttacattgcacgatntgatgtgcctcagaggaagacactgacgacatttgaggtcatgcactctttatgatcaacagaccataccggtcgagtgtctttaagctgctgacatcgg

SEQ ID NO: 651134 - DNA, 312 bp, Homo sapiens
attattcgtaggctaggtagaggcgtcggaccagggtatgcaaccacttgtacaggttcattcgcctctagaggtagcctaggtgtcagtttgtcctaaccttcaaggtcgcgattcctagtgtgccataccataccttccgatcattcgaggtctcccatctccaccccactgttcaacttttgggcttgtacaaaaaaccaactcaataagcagtttccttgtgcacttaaccctaagtgtgtttgtacacagagcagatttcattttctttaggagctaaccaaccggggcctacgaataactcctccg

SEQ ID NO: 651135 - DNA, 480 bp, Homo sapiens
ctatcacgcaccacgatacggccgggcagatatgcggtttgatatagaaatcggttattatttctaactatattaagtgcttgctgtcaatatcataatccagacaagatgttctgtggtccctggatctaggagaatgaagacgccactgacttgctctccttggttgtccaggaaggccaccctaagaatacaacaaaaccttgatttctttagtccacgtgtgtgtgtctgtgtctgtgttgtaagtatgcgtgcatttgggtcctcacctgatgaagaaaagtgagaaatctagtatatttgtgggtacaaggtgtctcagagttgatgacatgcatctgtgcttttccatgatcatctttgatgtccaaaacggtatgagactacttcgtctagtagacaatatatgtaaattaagctgcataaacaatttagtcattagcctcaattctcctaattagtaaagattggaaccaa

SEQ ID NO: 651136 - DNA, 256 bp, Homo sapiens
  misc_feature (31)..(31): n is a, c, g, or t
  misc_feature (36)..(36): n is a, c, g, or t
  misc_feature (66)..(66): n is a, c, g, or t
  misc_feature (85)..(85): n is a, c, g, or t
cttggccctcctcctcgcccacgggcctcanatttnaggaccctcctcctcgcccacgggcctcanacctcaggaccctgccgtntcacgcctttttgaaccccaaatatctgagaccagtctcagtttattttgccaaggttaaggatgcacctgtgacagcctcaggaggtcctgacaacaggtgcctgaggtggctggggatacagtttgcctttatacatcttagggagacacaagatcagtatgtgtatgg

SEQ ID NO: 651137 - DNA, 1409 bp, Homo sapiens
gacctctcttggtccagcgagcgttgccgggccaggtcaagcggcagggctccgacggcgcggacgcgagcgacagcgccgagccatggacgcaccaaacggcgcatccacgccacgcgaagcagctgcaaggaattctcttgaccaaggacacgggcctggctctgctgccggctcactcacacggctctgtcgactccgaccagaccgaggcacgcctcgctgccctgaggctgccctcgacaggacgcccacgctacggccccgcatggcgtactcacgcgaccctaatgcaccacgcgcccccgcaaacatgacacaccctgccctgccgcacagacacacagcaccagaccccccatgaccatacccccatgcctccctaacccgacaccatccagaaccactcaccacgcacactcgccactccaaccgccccctctccgcacaatgagcccttccctcctccccttccggcccctgggcctccggccccctgccactacaccctccaccacccggcctgccccaggcccttgcacccgcacctgcccctgcctccccccgcccgcgaccccaccccccgcgcgccccccacccacgcctgcacccccccccgcgcacgcctccccgcgcacacccgcctcgcgcccccaaccacctccaaccacgcccacctccacccccctccacaccgcgacccacccctcgcctcgcacaaacccggcacctcccacccccacacacactccctccctaccgcccctcgcaccgcactatcccaccgccaccacacccacccccctcggacccagccacaccgcacctgccaatagccccgcacggcccaccccccatagccccccaccagccccacacgccacccccacctacagccgccccctcgcacccacaccgccaaccgccaccgcgcccatcccacgacctcccccccgccaacactccccccgccccccccccaaaccccccccgaccaccgcaccgccgacccgcaccccacgagccccacaccacccaacgccccgcgctcgcgccaccaccccacgccccacacaccgccccccgccccaaagcaccacacccccctgcacacacagcacggaccccccacctccccaccccccctcctaccaccacgcccccccactctcacccaactccacacacctagcaacaccaatcaccccccaaacccacgcaaccccccacacccatccccccccacaccccccccaccccctctccccacaccgccccccaaccacacaaccccacacctctccaccctccccccccacccatcctacccaccatcccccccaccaccaccctcccacccccgccccctccccgaacccccaaatcacaacccaccaccccgcgcccaa

SEQ ID NO: 651138 - DNA, 750 bp, Homo sapiens
caagagacctcctctgcgggggtcgcaccacagacccgcgaggaggagagagaaaaaggcccgtcccctcccgctgtttggtccccccgatgtctccccgtggttagagagtagtgttcgcccctcataacacaggacgcccccccgcccacaatccgtctgtgtctgtccgcccccctctacagggggcaccaccactttgtgttccctcacaccacagcggtcggtgccactgcgtggcccaccaccactctcacaccgtctctttctgttacgcagccgccccctctctagtggggaagttcaccccgcccctcccgcgcgcagtagtaccccgcgcgtgtcacgcgcgcgtcgcacaaagcttctttctccgccgcacgcgacgccgcacgcggaggggttcttacaccaggcccccaccagagagacactaggcaggtgcaccacaattcagggcgctattaagagattgcgtgtgaggagcagccgcaaacaatggtgtccgcccggagggacccccccgacgcgccgcacagaggttgttaatgggcacttcttctgaaatagtaataatttctatgatacggcacgttagtgtgctaactctccccgcacttgtgctagtttctgccgctcttctccgcgcccctttatgacacgctcgttgagaccccacttgtctctcccgttacaacaaacagattctctcctcccaccctgtcaaacacccccactaatagtcagaaa

SEQ ID NO: 651139 - DNA, 201 bp, Homo sapiens
  misc_feature (171)..(171): n is a, c, g, or t
ccgctgccgtacagttgcgtgtgtttctcaggccagtgctggtgtgcgctcccagcaacatcgcagtggaccagctgactgagaagatccacatgtcgggcctgaaggtggtgaggctctgtgccaagagcagagaggccatcgactcccccgtgtccttcctggctctgnacaaccagatccgcaactggtacggcggga

SEQ ID NO: 651140 - DNA, 426 bp, Homo sapiens
ggaggtatgtttttgacaaattgaaggaattatacaaaagtttcatttattctttagggtgaccctgggaaacctggagaagcaggaaatgctggagttcctgggcagagggtaaatatacattttctgctaaagaaaaataatgtaggtactatttaaattatcatagactcacctcacaaatatctgtgtgtgatactagggagctcctggaaaagatggtgaagttggtccttctggtcctgtgggcccgccggtatgtgatttttgtgtgtgtgtgtgtgagaatatatatatacacacattgcattttttcgatgatgtttgttcaagacttatgcgtaagtttcagggaaagtgaataagaatgtatgggaatgaagaatttctgttataccttctcttttgatttctgtgagataatgt

SEQ ID NO: 651141 - DNA, 173 bp, Homo sapiens
ttacaccttcctagcagtcccccatagtcttaacttatttgagcattaactccaaagtccacagttcaacatctcatccgagacaaggcaagtcccttctgcctatgagcctgtaaaatcaaaagcaagttcgatagttgatatacatgggggtacacggcgttggttaaata

SEQ ID NO: 651142 - DNA, 129 bp, Homo sapiens
gagctcggaccctaacgcaaacccccgacttcaggcgatgggcggagtgtgtatctgtgtgtggagtgtgtgtggtgtgcgtgtgtgtggtgtgtctgggtggtgtgtgtactgtgcaatgtgttttgt

SEQ ID NO: 651143 - DNA, 113 bp, Homo sapiens
  misc_feature (109)..(110): n is a, c, g, or t
cagcggtctctcaacacagggccacagagctggagctggatctaccatgaaagacctctgaacccaggaagagagactgactgagcaacatgttattcatgggtctccnnatc

SEQ ID NO: 651144 - DNA, 416 bp, Homo sapiens
ttgagattatagctagcacgctgaaaccccatctctactaaaaatacaaaaaattggctgggcagagtggtgggcacctgtaatcccagctactcaggaggctgaggcagaggaatcacttgaactgggaggcagaggttgcagtgcgccagagatcacaccactgcactccagcctgggcaacaagagctaaactccgtctcaaaaaaaaaaaaaaaaaatttatactttcagagactattggctgacatcataaaatgcccaacatttaagtaggggatgcaatataacaaattaagtcacttttctcctttacaaacctttctctcccccttttttcacacacattggacatttcttacgttcatttacgcgtgataatttcctaaaaggaaaaaccacctgaaatttaatgc

SEQ ID NO: 651145 - DNA, 828 bp, Homo sapiens
cggctaggatgtttaaatgtctaaacagcaggagttttggtgagtgaaaccggcaaggattatctgagaaagggataagaagaattactgggaaaagtagtggtggtcaatttaataaataacttctttttgaagagcgctcaccattagtaattgtaattgaaccctcttaagcagataagaccatccttaatgactagcattcacagaccttagaatgctcatcttaatcttttctgctttcctaaagagatactgttggagaggtggccttgtaggtttgtgcatatatccttcagggtaagtgcattagcccgaagttcctctgaaatacttcttaatggggtttttatttgaacttgggtgacaattaaagggtctcactgttgaaccgtccaacagtgaatagagtatcttcagtctcagggtgatcacagcttcttccttgaaaactccctgtctcatttcagtctgggctcttaactttgcccttagccactggtaaatgtatgggcactttagatgatcagaccccagtgtttgcttggtgtttgacctctgtcccttggggggcaggtggcaagctatctttgagtctctttatcttttcagctgggatacttcctaagaaactgcaacacacgaaaggtgtcaaaaactctgcagagaagccatttaagcatgggttgctggggtacctggtgactccattaagacttgcccggggtttgaattcctaagtcctggccattatgttgccaccggcacagtaattaacccggccgtcaccaagtttccctccccaacatggaataaaataaacctttt

SEQ ID NO: 651146 - DNA, 1161 bp, Homo sapiens
tcgaacacacgtcgtccgtctaccgttgactatatctctacaaaccacaaatgacattgtgaacactatacctattattacggcgcatgagctaggagtcctaggcacagctctaagactctccttatacgagccgagctgggccaggcaggcaaccttctaggtaacgatcacatcgtacaaccgtctatcgtacacagcccatgccattatgtaatacatcttcttcatagataataacccatcataatcgcgaggcttcaggcaatctgactagtacccctaataatcggtagcccccgatatggcgtactccccgcataaacaacataagctatctagactcttacctccctctctcctactcctgctacacatctgctatagctggaggccggagccacggaacaggcttgaacagtctaccctccctttacgcagggaactaactccacaccctggcagcatccgtagacctaacccactcttctccttacccctacgcaggtgtctcgctctattcttaaggaggccactgacgtatccatcaccaacaaactgagtcagtaatctggcgccccctgtccatcatagccaactaccgacaccgaccaatactacggtactgactccgccctacactctcgcaccagagcctagcgttcgttctaagtagtctgaccgctgtccatcatctgccgggtcagtcacgcataacgtcaccaacaaggaccgcaaccctcacaaccacacattcactaggaactccagacgctatcaaggcatgcgccgcactcccccaacccacgtacatctcatcctttcgtcgcacacccgtcaactagcccacttaatcatcaccacaggcaatgagcggacaacaaacacccgcatcttagagcgtgctaccctcgcaagccatcccacctgatctgcgtgaacacaagccttgagccctgcgcaccctatcgtcatcgcgcctcctcatgcgttacacgtctacacctcccaacactataaacgatcgtaatatgaccgaacagcgaccacatatctcatcgcgtaccaacttcgctctccgactgattccagctctacgcattactaccacgagaaagcgagaaaactacgacgcgcgcacaagacatatctacagtgagt

SEQ ID NO: 651147 - DNA, 106 bp, Homo sapiens
agccttgcgcagctctccaccttctccccgccaggcacaggagccagcagctggagcgtgctctgagtttcaggggaggccccccccctcaaaaaggatgggggct

SEQ ID NO: 651148 - DNA, 814 bp, Homo sapiens
  misc_feature (59)..(59): n is a, c, g, or t
  misc_feature (76)..(76): n is a, c, g, or t
  misc_feature (106)..(106): n is a, c, g, or t
  misc_feature (325)..(325): n is a, c, g, or t
  misc_feature (537)..(537): n is a, c, g, or t
  misc_feature (599)..(599): n is a, c, g, or t
  misc_feature (617)..(617): n is a, c, g, or t
  misc_feature (623)..(623): n is a, c, g, or t
  misc_feature (638)..(638): n is a, c, g, or t
  misc_feature (649)..(649): n is a, c, g, or t
  misc_feature (671)..(671): n is a, c, g, or t
  misc_feature (679)..(679): n is a, c, g, or t
  misc_feature (686)..(686): n is a, c, g, or t
  misc_feature (697)..(697): n is a, c, g, or t
  misc_feature (717)..(717): n is a, c, g, or t
  misc_feature (720)..(721): n is a, c, g, or t
  misc_feature (804)..(804): n is a, c, g, or t
cttggacattgtctttaaattcttgtcactggcccaatctttttcttttgtttttggtngctgcgagctggactanaagttacattcttcagctaatacgtgcttntctaatattttccccgagatattacatttagaaaatacgcaaagaaaccttttaggagttaacaaaacgcacccgaactattcattataaaggaaagaataaaaaatccataaataatacattgtaatcaaataatataaagtattctgcagacataattttttttaattaataaactccttttaatttactcaccacaaatattaaaatggttcaagngcacttgtttaattaataaagcattttatatgcaattattaaggtgctaatcattaggaagtttacgttggttgagtgcaaatcactaggctcagacattaaaaaccattataaaaatataggctacaagggtcaggtatcaaattacccttccatagggacagctcaagggacagcttctatggtggatactgaggaatactttttttaanacacccaatatccctgctcaaaagcacaggaaaacctcaaggagcaggtgacatggaagggnagcttggaaacacagggnaagggncctttcccaacaaangaaaatagggngggggtccacaggcatatgggngattattnagttttnaatagtctggnggtaaatttttaaaaggtangannttaatttgtcaggccttcggctctggtcttcctccagctcttggggcttccttttttcgtttccccgtccttcacctcctgcngggaaacggg

SEQ ID NO: 651149 - DNA, 122 bp, Homo sapiens
atttccatttattcaagtcttttaaaaaattttttaaagcaaaacttttatctccttggttaaatttattcctaggtattttattcttttggatgctattataaatataattgtttccttga

SEQ ID NO: 651150 - DNA, 191 bp, Homo sapiens
tcgatacgactaatttttttgtatttttagtagagacagggtttcaccatgttggccaggctgatcttgaactcctgacctcaggtgatgcatctgcctcagtctcccaaagtgctgggattacaggtgtgagccaccacgcccggccctatgttgtattttttaaggaacctcccttctgtcgtcttctc

SEQ ID NO: 651151 - DNA, 348 bp, Homo sapiens
ccccccgggggcccctacggccagggggccaaaatcccttttcccaaattttttttctcaaaccaagaaaaaacccggaatgttcaccatgagctcccccttaaaaaaattttttcaaaagaatccccctgggctaaaaaagggaagggcccatttttccgggaaaaaaattttatgggggtatttacggacccggctcaaccaaaaaaatttccctataaaaattccccagagctaaccccagggctttttaaaaaaagaccaaagggaagttttgttttacaaatcaaaggggacaaccatccccaataaaaaagccaaaataaaatttttttttaaggcccccca

SEQ ID NO: 651152 - DNA, 220 bp, Homo sapiens
acttcacagagctgttaatccattctggggaggagagaacttagccatctgctcacattctgactaaagttaatttggcacttcaaataaaaaaaaaaaaaccccccaaactggatttttaacccaaaaaataactaattagcaatgggtttttaccaaaaaaggtcccagtcttatccttgggaaaaacgtggtagaccggaaaggaagctacttaaag

SEQ ID NO: 651153 - DNA, 194 bp, Homo sapiens
tcgatggaactgtgacagatgggtaccctggctctgacatcctggcccatgattacagtggactacaccaacgccttcaaaatcgacctcgcacatcactggccttcgtattacatttcacagatgaattggttcccagtggcaaacaatatggtttagtatgtcagcatgaccaatcggattaggtggtatag

SEQ ID NO: 651154 - DNA, 681 bp, Homo sapiens
catgcgggttgctggggccacgggatgctgtcctggatgcctgagagctgccgttgcgcttgtggcgcccatgcacagctccccggtctgcgccaagaaccgggctgtggcctgagatacaactgtacatgcaaaggagggacaatgcctggatgatcgtacggagtgagtgcacacggctgcccggactacgattcgcacctacacgctaacacgagcttgagctcgtcctgcgtggctatcactaggggttaagcccttggtagttcggagatggacgcatgcccgtcagagcggaactggtggaggatgtttgtcctctcgcagagtttcatgtagggcgtaccttcctcaggctgcctggctgagcagctggtatttaagagcgccgtgggtcaccaggtttggacgatcgtgtgccggtgtgtcccgttggtaaggaggccaaacggttttcgggaattaccttttgccgccaaagcagaatctcgaccaaaggggttaacccgcttaagtcgttattacccctttcgagattgggaggaccttaagcgaacgggttagaaaagacctttctagtcccggtgtcgcttacctttattgtaaacggaacttggtagcttggttggcgaggaaactttcccgacccttcccaacaattggtggccaccccttccaaga

SEQ ID NO: 651155 - DNA, 587 bp, Homo sapiens
  misc_feature (110)..(110): n is a, c, g, or t
  misc_feature (119)..(119): n is a, c, g, or t
agaggattcaccggcagaatcacactcaaattatggagagcagcctgctttactcagtctacccattcatatgtcaatctcatccaaaaacaccctcccagacacacccngaacatatnactgaatgtttgggcaccgcatggcccagtcaagttgacacatgaaagtaaccatcacagtagctaaaactgaaatccacaatttaggataacagaggaaattcacttgactcaccccaaagtcaaaatgccagcctagtctccaggaagacacagttctcagccactagagaaagcacacgtgttttgtttcagatggtcatcttgaggaagcgaactcagtataacgcaacttgagatggacacttaataaatgtggttttgatcaaattctcataataaaaccgcacagaagaacccaatgtctaatgtttccattcacccaagctcaaggaactttgtacctcagggcatctgagtcagagagccgcttagcgactcaggcccggtgctgacaaaggaggctgcctgagtcactgaggctgagtaactggccctcggcacaggacaggagtaaactactcctga

SEQ ID NO: 651156 - DNA, 125 bp, Homo sapiens
ttgagtgcaatgagctatgactgcactccatcttgggtgacagagcaagaccctgtcacccaagatggagtgcagtcatagctcattgcagcctcaaccttgggtgacagagcaagaccctgtca

SEQ ID NO: 651157 - DNA, 758 bp, Homo sapiens
caaccaccactcaccgctacgcgcgagctgggttgttaatcgccgcaggcttgagggcagccccatgcgccgcaccccgctgcccaagcatttatgagattacccaggagacagccctggctactctcgaaattggacatgcgaggctgtgcccagggccacctgctgccctggacgtccagcctgagtgaagccgaggaccatctctgaccaccctggcaccttaaataagtgaatgaggcccagattgtgaacacggacccatatatccctacctcccaccacctctgtcgagaagacacgaaactgcccgtgagttcaatagctcggagagaggtccagagtggttcctataagtgaaaaactatttacatacatgacctaggggatgtgcctaaaaccctttcggtggatcatgtcccatcagtccccccactagacacagcgtcactgccaaggcatcaaggccactcgggctcagcagtgtcactcacgctcaactactcacgggtcatgcgcacgcgttctgcacatccttgtgtgtgtccaccctatgtctctgacacctggcgacagtgtgtgctttttgctaccttaggcatgtggtcattcccccacacctgccctgcctccttcacggatctcgaacctgaccttcctggcaggcactggtgggcagctcagactccacatgctggctggtgcctgacggtctgctggctctactatccttgcgtcctctactctccccctcatcc

SEQ ID NO: 651158 - DNA, 108 bp, Homo sapiens
  misc_feature (23)..(23): n is a, c, g, or t
agttcgacggagactctcagggnagagaggtgtgtcaccttcaacaatttttaaaacaatggataagaaatggagccagcgaatgcatgattcatgcagcacatctca

SEQ ID NO: 651159 - DNA, 659 bp, Homo sapiens
  misc_feature (17)..(17): n is a, c, g, or t
  misc_feature (73)..(73): n is a, c, g, or t
  misc_feature (88)..(88): n is a, c, g, or t
  misc_feature (93)..(93): n is a, c, g, or t
  misc_feature (98)..(99): n is a, c, g, or t
  misc_feature (126)..(126): n is a, c, g, or t
  misc_feature (138)..(138): n is a, c, g, or t
  misc_feature (171)..(171): n is a, c, g, or t
  misc_feature (215)..(215): n is a, c, g, or t
  misc_feature (224)..(224): n is a, c, g, or t
  misc_feature (250)..(250): n is a, c, g, or t
  misc_feature (259)..(259): n is a, c, g, or t
  misc_feature (317)..(317): n is a, c, g, or t
  misc_feature (319)..(319): n is a, c, g, or t
  misc_feature (337)..(337): n is a, c, g, or t
  misc_feature (341)..(341): n is a, c, g, or t
  misc_feature (350)..(350): n is a, c, g, or t
  misc_feature (363)..(363): n is a, c, g, or t
  misc_feature (373)..(373): n is a, c, g, or t
  misc_feature (383)..(383): n is a, c, g, or t
  misc_feature (398)..(398): n is a, c, g, or t
  misc_feature (423)..(423): n is a, c, g, or t
  misc_feature (427)..(427): n is a, c, g, or t
  misc_feature (437)..(437): n is a, c, g, or t
  misc_feature (439)..(440): n is a, c, g, or t
  misc_feature (451)..(451): n is a, c, g, or t
  misc_feature (454)..(454): n is a, c, g, or t
  misc_feature (463)..(463): n is a, c, g, or t
  misc_feature (465)..(465): n is a, c, g, or t
  misc_feature (478)..(478): n is a, c, g, or t
  misc_feature (487)..(487): n is a, c, g, or t
  misc_feature (489)..(489): n is a, c, g, or t
  misc_feature (493)..(495): n is a, c, g, or t
  misc_feature (503)..(503): n is a, c, g, or t
  misc_feature (522)..(522): n is a, c, g, or t
  misc_feature (526)..(526): n is a, c, g, or t
  misc_feature (528)..(528): n is a, c, g, or t
  misc_feature (543)..(543): n is a, c, g, or t
  misc_feature (569)..(569): n is a, c, g, or t
  misc_feature (573)..(573): n is a, c, g, or t
  misc_feature (580)..(580): n is a, c, g, or t
  misc_feature (590)..(590): n is a, c, g, or t
  misc_feature (640)..(640): n is a, c, g, or t
ccgtaagtcatacagtnaattcttatgtatcaaagtccgtgtcgtaggtaacagcagtagtccagtccgtagnaaagtagtcagtccngtctncaagnntaagtcatacgttaatctgccaacgtncgtgtgttaaangctcatccactccgcagtaatgctgtaatgtcnacttccgccgttagtcagccagtcagtgtgtctgtcgtccaaangctccagtnacgtcagtccagtcatactcgttaanacgtcactnacgtccgtctcgagtcagctcccagtagttcccacaatagtccgtcgtcaaacacgtnantcagtgtccccaaaagtnaaancaaaacccnaaccaatccattnaaagtcatcnaaagtccctntcttttttcagtccngagtaagtgtaagtaaaagtcaaantaangtagtcgttntnnaccccccaaanccncgtagtagntntcagtcaaaagtnatcccccanancgtnnnctcaaagncccaaaccccaaaccccancgtnancccccaagtcagtcnaaaccaagttaaacaaattcgtcaancccncccgtantcattcaccnacccatccccgtcaactcccaaacaaaagttcccacaaaaaaagttaaanagcaagtgttgtaagtttt

SEQ ID NO: 651160 - DNA, 423 bp, Homo sapiens
  misc_feature (1)..(1): n is a, c, g, or t
  misc_feature (141)..(141): n is a, c, g, or t
  misc_feature (154)..(154): n is a, c, g, or t
  misc_feature (159)..(159): n is a, c, g, or t
  misc_feature (170)..(170): n is a, c, g, or t
  misc_feature (176)..(176): n is a, c, g, or t
  misc_feature (181)..(181): n is a, c, g, or t
  misc_feature (214)..(214): n is a, c, g, or t
  misc_feature (327)..(327): n is a, c, g, or t
  misc_feature (365)..(365): n is a, c, g, or t
  misc_feature (414)..(414): n is a, c, g, or t
  misc_feature (419)..(419): n is a, c, g, or t
nggggctgcggacggacaacatcagactgaatcagaagtgcggccttctaggaaggactcacttcttcgggacttgtaagaaaaggtggacaagaccgaactgcttcaccggcgcctggaatccctgaagagccaccacgntagcctcactttntcctncagaggccatnaggcancacgntcagggaggccaaagcctttatcccttcttgancagatcgatgagaagagtctgccaaaccactttcatcctcaggacgtgctgtcctgctttattttaccttcgttgctatttaaaaaggcctgtgttcatttggggacggggantcttatttttgtatttattcttcaaaacgtttttaggnttcccaaatcagtggctggaggcccaaacccggggtttagggatttttnttctngggg

SEQ ID NO: 651161 - DNA, 120 bp, Homo sapiens
tttctttatatgctgtgcgaccaatgaaaagtcgcacagcatgtgtctactgaaacatttttcacttttgctcgcacacctccctcctctaccgccacactcacctctaaaccgggcaat

SEQ ID NO: 651162 - DNA, 441 bp, Homo sapiens
  misc_feature (6)..(6): n is a, c, g, or t
  misc_feature (12)..(12): n is a, c, g, or t
  misc_feature (39)..(39): n is a, c, g, or t
  misc_feature (59)..(59): n is a, c, g, or t
  misc_feature (73)..(73): n is a, c, g, or t
  misc_feature (266)..(266): n is a, c, g, or t
  misc_feature (291)..(291): n is a, c, g, or t
  misc_feature (313)..(313): n is a, c, g, or t
  misc_feature (329)..(329): n is a, c, g, or t
  misc_feature (437)..(439): n is a, c, g, or t
aatggntggggnagaaaataagagactgtgacatttganaaactatgttaaaatcgaanttggactgtgccanagtgtcccccgggcttggtgaatgcccccaagcgtccttccatggaacctctggcggctttccttgctgcagcagtgtttacccacacccagcccaagtcacccttgaacttggaaaatgacttcatgccctccagcccactgaaggattatttttcctctcagcccctagtggtttctttacctaaatgtcncggtacaactgagaataaggcagcncggtcagttcaatagaagtaancctaaagtccaacaanccaggttagatattagccacggagggatgggaggaggagtcttctttttttttgagacggaatctcgctctgtccctcaggctgaagtgcagagtgagactccctcannnaa

SEQ ID NO: 651163 - DNA, 214 bp, Homo sapiens
taagaggtcacgagattgccacatcctggcccaagcgatccgcccgcctcagcctcccaagtagctgggaccacaggcacacaccactacgcccagctaatttttgtatttttagtagagacggggttcaggatggtctcaatctctctttttttttttggaaatggattttggccaaggtggttgtgcgtaacaaaaccccttcattgagccc

SEQ ID NO: 651164 - DNA, 310 bp, Homo sapiens
  misc_feature (60)..(60): n is a, c, g, or t
ggatcttcggcgagtgcaatggctactgtaacattatattgggggtgcattcaatcagtnaagagaatacataagtattacgacagaagaagcaggaagtgtgcggtggctcaacgcctgtaattctccacgctttgggaagcccagggcaggcggatcatgaagtcaggagtttgagaccaacctggcaaaaatggtaaaacccatccctactaaatatacaaaaaattagcagggcgtggtggcgcgcacctgtaatcccagctacttgggaggctgaggcaggagaatcgcttcaaaccgggaggcg

SEQ ID NO: 651165 - DNA, 303 bp, Homo sapiens
  misc_feature (137)..(137): n is a, c, g, or t
  misc_feature (139)..(139): n is a, c, g, or t
  misc_feature (153)..(153): n is a, c, g, or t
  misc_feature (181)..(181): n is a, c, g, or t
  misc_feature (189)..(189): n is a, c, g, or t
  misc_feature (191)..(191): n is a, c, g, or t
  misc_feature (193)..(194): n is a, c, g, or t
  misc_feature (206)..(206): n is a, c, g, or t
  misc_feature (210)..(210): n is a, c, g, or t
  misc_feature (213)..(213): n is a, c, g, or t
  misc_feature (216)..(216): n is a, c, g, or t
  misc_feature (218)..(218): n is a, c, g, or t
  misc_feature (220)..(221): n is a, c, g, or t
  misc_feature (227)..(227): n is a, c, g, or t
  misc_feature (230)..(230): n is a, c, g, or t
  misc_feature (232)..(232): n is a, c, g, or t
  misc_feature (235)..(235): n is a, c, g, or t
  misc_feature (238)..(238): n is a, c, g, or t
  misc_feature (244)..(244): n is a, c, g, or t
  misc_feature (252)..(252): n is a, c, g, or t
  misc_feature (254)..(254): n is a, c, g, or t
  misc_feature (260)..(260): n is a, c, g, or t
  misc_feature (265)..(265): n is a, c, g, or t
  misc_feature (268)..(268): n is a, c, g, or t
  misc_feature (270)..(270): n is a, c, g, or t
  misc_feature (274)..(274): n is a, c, g, or t
  misc_feature (281)..(281): n is a, c, g, or t
  misc_feature (283)..(283): n is a, c, g, or t
tcctgggcgcccctcctccagcttagctgtcagctgtccatcacctctcccgtactttctcatttgtgcttttttctctcgtaatagaaaagtggggagccgctgggagccaccccattcatccccgtatttccccntntcataacttctccncatcccaggaggagttctcaggcctggngtgggccncngnntgggtgcggggncgantcnacntntnngctgcnaangncgnganttcttnttgaacantntgctgntgtanacntntttnaaactantnccaataaagttttgtttaaa

SEQ ID NO: 651166 - DNA, 185 bp, Homo sapiens
  misc_feature (29)..(29): n is a, c, g, or t
  misc_feature (54)..(54): n is a, c, g, or t
  misc_feature (101)..(101): n is a, c, g, or t
  misc_feature (118)..(118): n is a, c, g, or t
  misc_feature (149)..(149): n is a, c, g, or t
ccacggtgccagctctctgcaagattttnggcaagtcacttaacttccctgtgnctcactttcctcatctgtaaagtgggaataattgctacctctgggtnaatgtgagaatcaaatnagttagaatagtggcatataccattttaatntttttatttattttttaaaatttattattattattt

SEQ ID NO: 651167 - DNA, 371 bp, Homo sapiens
atgcctggggccctcccatttgtttcccctggtgtcacctggctccccctggtggggggtgggtttccatttttccctccacccaccctcagaagaatttgtttcccatgccctcaccatcacctcattgcccccaggccttttgccctttttgggtgttgagctccccccccccccacaggcactttatgggaaaaggttttccttttgggaagggggggggtggtaaacccctttgctttttttagccctcttggggtggggttgggcacaaatccccaggcaggttttggagttgtttccatggtgatggggccaaatgtaaagtattcagaaaaaattttgtaaaaaaaatgttttgggggtaggga

SEQ ID NO: 651168 - DNA, 1037 bp, Homo sapiens
gtattcttcctgtctaccgctaaattcagtcctatgtgtgattgatgcacggctcatatgtcgtgctgcataagtacctagatttaataggctagaatcactgtgtgatcctcatcatcatggtcatcctgatcatcaggaactccactcttctacacggtggtggcgatcggcctgtccagtccagattcgacgcttgcatgaacacagtggtgcacgtaccactcatgttgactacctaaccgtcctcccttatattccacctcgacagatgatcaattgtcgtgaaattcttaccgcgagaagggtcgaacatagaggccagtgcacccagtctaaatccatattgtagttaactctacctttgatgacttgcagcgtcaccctagaaagatcctggttgctactagaattagtgatcctccaatgcagaacttcagtttgaaaatttcatacatcggccacatgacccacagctccttggagaccataatcacatatgtggcatttagtgccgtatggacaacaatctcgcacagcctaatttaaacaacctgtcctatttagtgttcttccacatcgagtgccttggtccgatagagagcactaggcatatgttccgcaaggtccctgacgttcgtggacctactccccacgtggtgtactgcagacggaggacttgggttcaccttaaactcccagtaaatattctcctgccacttagggaggaatacacctccctatgtgtaccacttcctgtttcctccagaaaccagcagacttgagtgtctaagcctgtgcccaggaaaatcagtgggcactcaactgaaagattgtgccgaaattttaattacagatactctcagtgttcttacggccttattcatcgaaatcataacgtggtccaagaccttaaccctggacgtctggaccagattggggcgccgccggccacttcggccccattggagagtcggcaagggccccaaccagaacaagcccggatctggcgttccgccggctggcgaaaactttgt

SEQ ID NO: 651169 - DNA, 344 bp, Homo sapiens
agcaggtgccttgagagctttaggggaaatggctgcagcgcagagtattactgcagaccttagagatatggttgattccatggataaaacttcttccagtatttcacctattattctactgcaatttttgcacatggctattgccacaggttgccgagacaggtgaacaaggacaggatcttcaacaggatgctaatgaatgttgcatacaaatgatgccagtattgcaacagaaatatggagccctagaggatgaatctgttaaagagacacgactgctcatctgcatcggctgcgacaccttctagtcagaatctggagaagaagaagtcaccataggggtt

SEQ ID NO: 651170 - DNA, 144 bp, Homo sapiens
gctcggcaccctattcgcttttcattgggacagctgccccattgtgaagcggattccaccttccgtgcatgacacggaaggcttgccgttcatgaagcatggttgcgtcttcagtgcgcaccgccggatgaacgacatgctggg

SEQ ID NO: 651171 - DNA, 176 bp, Homo sapiens
ttggatgatggcatacgggttgatcgagaacagaatgagacagtcttgtcatgcgctttgtagtagaaagtgtgtcggggaagtgcagaggcaatgcatttagtgtcttcagcatgtcctcggtgctgggccacatgtcaagaggggcagcaacaccaccagccattgcactccgg

SEQ ID NO: 651172 - DNA, 577 bp, Homo sapiens
  misc_feature (148)..(148): n is a, c, g, or t
  misc_feature (238)..(238): n is a, c, g, or t
ctgcccatcgtgtggggggcagctgggaggaggccatcaagttatcaaaccagggtggaaggccccgggccctctcatgttttccagcaacgacaaggtgattaagaaaattattgcaaaaacatccagtggtggggtggcggccaanaatgttattgtccacatccccttgcactttttgccctttgggggggtggggaaaaagggcatgggttcctcccatggcaaaaaaaggttngaaattttttttcccccccgtttttgcctggtgaggccttttatgaataataaaggcctgaaggtcaaatccccccccagcccggcccaaatttccccagccttaaggaggggttgctccgcctggcctggccaaattgggtcccatggggggggggccccccctcatgggttttttgggccctgggaaaatggttcctgcagccccagcccagccccattcttttgttgacctgttgacctggggacccccccttcccaaagggggccgggcctccccattccaagtttccccccctttttagaccaaaaaaaaggggaaaacaatttttttactcca

SEQ ID NO: 651173 - DNA, 116 bp, Homo sapiens
gcagtgagcctgatgcttaggagatagtttatgaactggtatacagcccccagcgtcgtggccctcatgaactttaccccaatggccaggaatgagggggtgggtcagaacataag

SEQ ID NO: 651174 - DNA, 927 bp, Homo sapiens
gggactcaactggcttctgccatgccagcgtcacccctggtctcaggaagccaggcaccccgaatggagagaccagtgaagccgggagaagaacaaaaatgtgaagattgaatggacatttatcagttcccaaacattaatatttttataatttcttacgccctgtctttactgcaatctctgaacataaatggtgaaagatttcatggctatttatcacttccccaatcaatacctcttataatgtcttatggtcgtctttaatctcttaatcccgtcatcttgtaagctgaggatgtatgtcacctcaggaccctgtgatgatgtgcaattaactgtacagatggtaacaacgtgtgtcggaacaatatgaaaccagtgcaccctgaacaacaggacagaagtaacagagattttcagggaaccaaaacgagatcatcatacaggcctgactgcctgcggggttgggcagaacaagccatatttactactcgaagaaagctatagatgggatggtgtgagtaggagaacatatgctgaatcttagtccccagcaacggcactattgacttcacctggattcgcccctgggcgacaggaatgcattccctgggggggcggtcctatgaaacgccggctctgggatagtctcgcgcatgtgcgtcgagcatacagggctgaaatacacccgtggtctccggaagcgcctcagggttgggaagatggggaaactccagccgggcatccactccagaccgggggtgtggctcaaccccgtccgtccacgaggttaccacgacatgttcgacggaggcaggcccgcgcagaattcaaggagcgcagagaaaatgggctgagaaggctgggacagcccggcgaaacctacactaaaggggagggaagagcgcagccacaggggcacgggaa

SEQ ID NO: 651175 - DNA, 400 bp, Homo sapiens
atggcactgtattgacgactgtgccattatggctaaaacaagcttatatcctgcttatgtctgctaaccatttcatttaagtatttatgacaaatcaaagctacattttacagcatttactataaagtttttaaatacttcagatttgctgcaaccctgcatcgagcaagtcatcattgccattgattcaacgagcatgttctccattagattctctgtgcatcatctagattatactcgacaatatttcaaactttctcattatcattacatctgttgttcttatctgtgaacacccggtccggttttcatttttagaggcagggtctcactatgttgcccaggctgatcttgaactcctggcctcaagcaatccccccaaaacaactacagtagtaac

SEQ ID NO: 651176 - DNA, 139 bp, Homo sapiens
cacgccagccccgcggggaggtctgaccatccagcttctgcagcggcgaaagccccagcgcccgagctcctgagccggcggggagcaagtaaaggttggccgatctccggggagccccggagtaggcgggcggcggccg

SEQ ID NO: 651177 - DNA, 1020 bp, Homo sapiens
gattctgaatccgggttgcgacgattcgcgtatctcatgggatctcaccgctggatccgcgttacgcctgttgctttgccgtatgtcctgtttgaggctctcagtgcgaaatatcggacaatgtcttgagaggatcaggctggagtatagtgactctcgcgtaaaagggacagagaacagacgcgccgcgcttacactagacgtactgaacagtagctcgggttgggtgcccgtaggtgggtcgggattgtagtccagaccagcattctaaattctagagagaggagatcggtcaatatgggaccttgtgcgcgcttgtaagatggctcgcatcgggtacaccgcaatatgacgtggctgggatgatcgtctcctcgcaacagttggcttgcatcttgccttggaaatgcctacagaatgggtcttctgggcaaaacgacgtttttatcgtactcctggcaatttccaagttgggacatcaatgacagttgagaactaggtctacccctcagtcgaggaaagccagtttaagtttgggccagcgttccgtgaaacactctaaattttcgtattgcctagttgtgggtaaactaaagacctacatgaggaattgcgtattgcttgcaatccgggattttgtactcagaggttgtcagagaagtggtttcccaggacgggttcttgtagtgactgctcggcattagcacgatcttgacgatgtggaatggttgggtttccccaacacattgtggttgccttgagccattagactcgtggccaagagacatgaatgcagagtggttcttgaactgccacaagacgtcgtattatggaggagtcaacaatgtggtgaagtcaccggactatcggttctcagaaagatgtcttcctttgtttagtttgttttcttatgaactatagtacagcatatagagatacagctagctacactacactcgacgcaagccaagtctcacatctgacagagacacccaaaaataacagcacaccgcgactgaa

SEQ ID NO: 651178 - DNA, 748 bp, Homo sapiens
  misc_feature (525)..(525): n is a, c, g, or t
  misc_feature (531)..(531): n is a, c, g, or t
  misc_feature (545)..(545): n is a, c, g, or t
  misc_feature (555)..(555): n is a, c, g, or t
accagtgctacctccacaaacagtgtatagccagtggaatgtgtgcatgtatgtgtacatgtctgctagtatgtgcctttgtgtgtgcatgtctgtgtgtgtgactgtacgtatgtgtacatgtctgtgtgtgcctatgtatgcatgtctgtgtgtgtgactgtgtaggtacatctatgtgaatgtgtgcatgtatgtgtacatgtctgttagtatgtgtgtgcatgtcatgcatgtgtacatgtctgtgtgactgtatgtctatgtgaatgtgtgcatgtatgtatacatgtctgttagtatgtgtgtgccttgtatgtgcatgtctggacagtgtgtgactgtgtgtacgtatgtctatgtgaatgtgtgcatgtatgtgtacatgtctgttagtatgtgtgtgtgcctgtttatgtgtgtgcatgtgctgtcagtgtgtgtgtgtacgtatgtctatgtgaatgtgtgcatacgtatgtacatgtctgttagtatgtgtgtgcatgtatatctgtgtctatnggaacntatgtacatgtgtncatgtgtctnggtaggggtgtgtgtgtccctgcacacctgtatccatgagtcagcacctatctgtgctggtgtccagtgtgaatgtgtgtgcatgtgtctgtgtgtggaagtgtgctgcagcctctgtcaaggcagggcaggggaggtctcagcctggccatcaccttccccaccaggcgcccccacatagttcagcgtctga

SEQ ID NO: 651179 - DNA, 342 bp, Homo sapiens
  misc_feature (320)..(320): n is a, c, g, or t
ccgctatgtaacatgctaaaatggactgaaagaagatgtataaaatcaaaatgatgttaccttcacaccttgaatcagtacgataaacccccctccccaatcacaaaagaaaaactaaacacaaaaaccaggctttggttgctcagacaattttacaggtgagttctagcaaacatgcaaagaacgtttaattgcactgttacagaaattcttctggagacaagaaaataagacacatcacccaaccaatttcataataacaatgtcaatgtataataacagaaaaagtggatctccaaagaaataaatttatttggaantaaacaaggattataatctgaa

SEQ ID NO: 651180 - DNA, 1266 bp, Homo sapiens
cgcctcggtccagcgccatggcgccctccaggaagttcttcgttgggggaaactggaagatgaacgggcggaagcagagtctggtgggagctcatcggcactctgaacgcggccaatggtgccggtcgacaccgagtgtgggtttgtgctcccccatactgcctatatcgacttcgccctggcagaagctagatcccaagattgctgtggcgtgcgcagaacatgctcacgaagtgactaatggggctttactggggagatcagccctgggcatgatcaaagactgctggagccacgtgatgtggtcctgggtgcacctcatgagagaaggcagtgtcttgtgggggagtcagatgaagctgattgtggcaggaaagtgtgcccatgctctggcgagagggactcggagtaatcgccatgcattagggtgagaaagctcagatgaacatggggaatgctggcatcactgcagaaggttggttttcgatgcagacaaaggtcatcgcagataaacgtgaaggactggagcaaggctcgtcctggcctatgaacctgtgtgggccatatggtactggacaaggactgcaataacccgagataggccagtgaagtacaccgaaaagctccgaggatgggttgaaagttccaagcgtctctgatgcggagggctcagagcaaccggtgactcatacatggaagggctctggtgactagggagcaaactggcaaggaggactgggccagacaggcttgaatgtgtgatagggcgttaccttagtgaggtaggaggctacccatccagaggccccggaacattccgttgggacgatcaattcgagtggcgaaacgaattggaggtcccgagcccagtagtaccgctaaccattagcgttggcagggcccatgggactaaagcagagcgcaagaaagcgcacagtaacgtaggcctttcacttgggatagttggctcttaaaagtggcgagtgacacagctgagtatacctattcacggtgtatgggcaagaatctcgaaacgggtatatatttcctttatgttgtgatataaaatcattcacccctgggtaattagtattggtacaccaaggaggccaaagcacgatttcctcagatcacaatgaaatggtgttgcaaagatacagtgcacacaaagggtgatcgttatacctttgcgagataaaattgacagaggttgtttagtatattggccctagtattccgcaaggcgacttgaggtagacagaaaaa

SEQ ID NO: 651181 - DNA, 806 bp, Homo sapiens
  misc_feature (583)..(583): n is a, c, g, or t
  misc_feature (589)..(589): n is a, c, g, or t
  misc_feature (603)..(603): n is a, c, g, or t
  misc_feature (613)..(613): n is a, c, g, or t
accagtgctacctccacaaacagtgtatagccagtggaatgtgtgcatgtatgtgtacatgtctgctagtatgtgcctttgtgtgtgcatgtctgtgtgtgtgactgtacgtatgtgtacatgtctgtgtgtgcctatgtatgcatgtctgtgtgtttgtgactgcatgtatgtgtacatgtctgtgtgtgcctatgtatgcatgtctgtgtgtgtgactgtgtaggtacatctatgtgaatgtgtgcatgtatgtgtacatgtctgttagtatgtgtgtgcatgtcatgcatgtgtacatgtctgtgtgactgtatgtctatgtgaatgtgtgcatgtatgtatacatgtctgttagtatgtgtgtgccttgtatgtgcatgtctggacagtgtgtgactgtgtgtacgtatgtctatgtgaatgtgtgcatgtatgtgtacatgtctgttagtatgtgtgtgtgcctgtttatgtgtgtgcatgtgctgtcagtgtgtgtgtgtacgtatgtctatgtgaatgtgtgcatacgtatgtacatgtctgttagtatgtgtgtgcatgtatatctgtgtctatnggaacntatgtacatgtgtncatgtgtctnggtaggggtgtgtgtgtccctgcacacctgtatccatgagtcagcacctatctgtgctggtgtccagtgtgaatgtgtgtgcatgtgtctgtgtgtggaagtgtgctgcagcctctgtcaaggcagggcaggggaggtctcagcctggccatcaccttccccaccaggcgcccccacatagttcagcgtctga

SEQ ID NO: 651182 - DNA, 1132 bp, Homo sapiens
  misc_feature (2)..(2): n is a, c, g, or t
  misc_feature (61)..(62): n is a, c, g, or t
  misc_feature (68)..(69): n is a, c, g, or t
  misc_feature (75)..(75): n is a, c, g, or t
  misc_feature (78)..(78): n is a, c, g, or t
  misc_feature (80)..(80): n is a, c, g, or t
  misc_feature (82)..(83): n is a, c, g, or t
  misc_feature (85)..(85): n is a, c, g, or t
  misc_feature (91)..(91): n is a, c, g, or t
  misc_feature (93)..(93): n is a, c, g, or t
  misc_feature (98)..(98): n is a, c, g, or t
  misc_feature (124)..(124): n is a, c, g, or t
  misc_feature (128)..(128): n is a, c, g, or t
  misc_feature (136)..(136): n is a, c, g, or t
  misc_feature (139)..(139): n is a, c, g, or t
  misc_feature (141)..(141): n is a, c, g, or t
  misc_feature (147)..(147): n is a, c, g, or t
  misc_feature (149)..(149): n is a, c, g, or t
  misc_feature (151)..(151): n is a, c, g, or t
  misc_feature (158)..(159): n is a, c, g, or t
  misc_feature (165)..(165): n is a, c, g, or t
  misc_feature (225)..(225): n is a, c, g, or t
  misc_feature (321)..(321): n is a, c, g, or t
  misc_feature (329)..(329): n is a, c, g, or t
  misc_feature (359)..(359): n is a, c, g, or t
  misc_feature (367)..(367): n is a, c, g, or t
  misc_feature (370)..(370): n is a, c, g, or t
  misc_feature (379)..(379): n is a, c, g, or t
  misc_feature (381)..(381): n is a, c, g, or t
  misc_feature (389)..(389): n is a, c, g, or t
  misc_feature (402)..(402): n is a, c, g, or t
  misc_feature (410)..(410): n is a, c, g, or t
  misc_feature (428)..(428): n is a, c, g, or t
  misc_feature (815)..(815): n is a, c, g, or t
  misc_feature (953)..(953): n is a, c, g, or t
gntgtgcagcactgctgtagaaaagtattaatagcttcatttcatataaacataatttacnnccaaanncttatntanantnntnaaaatntntcttntatttaagtaatcttaaccagttctncaanttactgtnttntntattantntnaaaatannaaaatntagttaattacaatttaaagagtattccacataacttcttaatttctacattccctcgcnttactcttcgggggtttgcctttcagtaagcaagcttttcgcatgctgcttaatgtattgcctttttagtaggaatccggaagtattagattgaanggaaaagnacttgccatctctgtctaggggtcacaaantgaaaggntcntgatcacananggaggttngtgatctgtggcnacaggggnttccttattcactctttnattgctgctgttgaagttgccaacccccccccccaaaaaaaattcacttaacacctccggcctttgtagttctggtattcactttactatgtgatagaagtagcatgttgctgccagaatacaagcattgcttttggcaaattaaagtgcatgtcatttcttaatacactagaaaggggaaataaattaaagtacacaagtccaagtctaaaactttagtacttttccatgcagatttgtgcacatgtgagagggtgtccagtttgtctagtgattgttatttagagagttggaccactattgtgtgttgctaatcattgactgtagtcccaaaaaagccttgtgaaaatgttatgccctatgtaacagcagagtaacataaaatanaagtacattttataaaccatttactatggctttgtaacaattgcatacccatattttaagggacaggtgaatttactactttctaaagtttattgatacttcccttttatgtaaaatgtagtagtgatacctatattnccacattgtgcattttgacacacttgtttagggatgcctggaagtgtataaaattgactgcatttttttgggtttttttctttaaaccgtttccttggcccatttttcccccagatgtaattgatatttggttaagtgttatttggaataaagtggacattttaaacttaaaaaaaaaa

SEQ ID NO: 651183 - DNA, 914 bp, Homo sapiens
  misc_feature (141)..(141): n is a, c, g, or t
  misc_feature (149)..(149): n is a, c, g, or t
  misc_feature (152)..(152): n is a, c, g, or t
  misc_feature (161)..(161): n is a, c, g, or t
  misc_feature (163)..(163): n is a, c, g, or t
  misc_feature (171)..(171): n is a, c, g, or t
  misc_feature (184)..(184): n is a, c, g, or t
  misc_feature (192)..(192): n is a, c, g, or t
  misc_feature (210)..(210): n is a, c, g, or t
  misc_feature (597)..(597): n is a, c, g, or t
  misc_feature (735)..(735): n is a, c, g, or t
ataatccacccccccccccaggtgggtgtcttcaaaaaaaaaaattttcccgcccctttaaaatttctcttttaggaggacccccggaaaaaataagatggaagaaaaagccctcccccattttgttggggtcccccaaantgaaaggntcntgatcacananggaggttngtgatctgtggcnacaggggnttccttattcactctttnattgctgctgttgaagttgccaacccccccccccaaaaaaaattcacttaacacctccggcctttgtagttctggtattcactttactatgtgatagaagtagcatgttgctgccagaatacaagcattgcttttggcaaattaaagtgcatgtcatttcttaatacactagaaaggggaaataaattaaagtacacaagtccaagtctaaaactttagtacttttccatgcagatttgtgcacatgtgagagggtgtccagtttgtctagtgattgttatttagagagttggaccactattgtgtgttgctaatcattgactgtagtcccaaaaaagccttgtgaaaatgttatgccctatgtaacagcagagtaacataaaatanaagtacattttataaaccatttactatggctttgtaacaattgcatacccatattttaagggacaggtgaatttactactttctaaagtttattgatacttcccttttatgtaaaatgtagtagtgatacctatattnccacattgtgcattttgacacacttgtttagggatgcctggaagtgtataaaattgactgcatttttttgggtttttttctttaaaccgtttccttggcccatttttcccccagatgtaattgatatttggttaagtgttatttggaataaagtggacattttaaacttaaaaaaaaaa

SEQ ID NO: 651184 - DNA, 635 bp, Homo sapiens
  misc_feature (141)..(141): n is a, c, g, or t
  misc_feature (149)..(149): n is a, c, g, or t
  misc_feature (152)..(152): n is a, c, g, or t
  misc_feature (161)..(161): n is a, c, g, or t
  misc_feature (163)..(163): n is a, c, g, or t
  misc_feature (171)..(171): n is a, c, g, or t
  misc_feature (184)..(184): n is a, c, g, or t
  misc_feature (192)..(192): n is a, c, g, or t
  misc_feature (210)..(210): n is a, c, g, or t
ataatccacccccccccccaggtgggtgtcttcaaaaaaaaaaattttcccgcccctttaaaatttctcttttaggaggacccccggaaaaaataagatggaagaaaaagccctcccccattttgttggggtcccccaaantgaaaggntcntgatcacananggaggttngtgatctgtggcnacaggggnttccttattcactctttnattgctgctgttgaagttgccaacccccccccccaaaaaaaattcacttaacacctccggcctttgtagttctggtattcactttactatgtgatagaagtagcatgttgctgccagaatacaagcattgcttttggcaaattaaagtgcatgtcatttcttaatacactagaaaggggaaataaattaaagtacacaagtccaagtctaaaactttagtacttttccatgcagatttgtgcacatgtgagagggtgtccagtttgtctagtgattgttatttagagagttggaccactattgtgtgttgctaatcattgactgtagtcccaaaaaagccttgtgaaaatgttatgtcccataagaacccaccacgaggtaacatataaattaaaagatgtctattttttgacccgaaaaaaaaa

SEQ ID NO: 651185 - DNA, 343 bp, Homo sapiens
  misc_feature (14)..(14): n is a, c, g, or t
  misc_feature (70)..(70): n is a, c, g, or t
  misc_feature (79)..(79): n is a, c, g, or t
attgaaaaacgggncttcatcaaaattgaaaccccctgattatttatttatgagatggagtctggatcanacccgtatncctagcatcttgtgaggcccaggcaagaggaatgcttgaggtcaggagttcaggatcagcctgggcaaatatgctgagacctccattgctacaaaaaatttttaaaaaaaaaataagctgggcatggtagtatgcacatgtagtcctagccactagggaggctgaggcaggagggtcgtttaagcccaggagttagagggtacactaagttatgatcacgctactacactccagcctgggcaacagagcaagaccctgtctcta

SEQ ID NO: 651186 - DNA, 151 bp, Homo sapiens
  misc_feature (21)..(21): n is a, c, g, or t
  misc_feature (29)..(29): n is a, c, g, or t
  misc_feature (34)..(34): n is a, c, g, or t
  misc_feature (37)..(39): n is a, c, g, or t
acaattataccctagccaacnccttaaanccctnccnnncccccagggctggggtagccttcccgcgtcttctctcgctgtctccctccgtctctctctccctgtctctccctctgtctccctctctccctctgtctctctctctccgtct

SEQ ID NO: 651187 - DNA, 352 bp, Homo sapiens
gattgagcccggctgaggacaagtgaacacttgaaagctcagaactcggagctggcgtcacgtgcaatatgctcaggtaacaggtggcacagaattaaggagaaagtcatgaaccacagttaacagtgggtgccaactcatgctaacgcagcagttgcaaacattttgaagagagaccgtcgggggctgaggggcaacgaagaaaaaaaataacacagagagacagacttgagaacttgacacgttgcgacggagagaaaaaagaagtgtccgagaactaaagccaagggtatccaagttggactgggttgcgtcctgacggcgcccccagtgtgctcagtcgaacggactg

SEQ ID NO: 651188 - DNA, 294 bp, Homo sapiens
  misc_feature (171)..(171): n is a, c, g, or t
  misc_feature (262)..(262): n is a, c, g, or t
ccgtttgtccaggctggtgtcaaaatcctggctcaagcaatcttactgccttagcctccaaagtgctgcgattacaggcatgagccactgcacccggcccaatttcaggttgttaatggaactgcgtggttgtgaccatcagctgaccggacagcatgcagcagtctgaanggaccaataccaaggcaagtgctgccatcatggagagatgtcggacgaacccaagaaaataacaacaccgcatgtcggggagatgacccangcagtgacaaagcaatcctacagtgaacaaaa

SEQ ID NO: 651189 - DNA, 115 bp, Homo sapiens
  misc_feature (76)..(76): n is a, c, g, or t
gcaccacataacaaaggggtcatgaaaactaccccttaaactgccaaaattgggaaagagataagactcattatcntacattcctacgtcaatccgacactgatagaatctctgg

SEQ ID NO: 651190 - DNA, 1222 bp, Homo sapiens
  misc_feature (1034)..(1034): n is a, c, g, or t
ggattcaagttagaagtttctagatctggccgggcgcagtggctcacgcctgtaatcccagcactttgggaggctgaggcaggcggatcatgaggtcaggagatcgagaccgtcctggctaacacggtgaaaccccgtctctactaaaaatacaaaaaagtagtcgggtgtggtggcgggcgcctgtggtcccagccactcaggaggctgaggcaggagaatggcatgaacctgggaggcggagcttgcagtgagctgagatcgcgccactgcattccagcctgggcgacagagtgagactccgtctcaaaaacaaaaaaaccacaaagaagtttctagatctacggggcatgatgaacacaaaccccacagacactgaggaacccaggggtggcaggtgacctcgggcatcctctgctctctacagctccattggcagaaacagtgggaggggccgggcgtgggggatacacgccggatcatcccagccactctggggaggactggggcaggaggaacgcttgagcccaggagttcgaggaccaagacgtgggacaccatagtgacggctgatatacgctaacattaaagataaaacaaaaaaggtagagctggaggcagtcgcaccatgtgcgcctggggtcacagcatcactcaggaagcgcattaaggccacgaaggactgcttcgagccacggaagcttgcatgttgcacatagagcccaagacccggacccatgggcactccacaatgaggccaacggagcaaaacaccgtgtcgccggcagacacacaacacataaacaggaacgcctgaagagcgcacgaaaagcggacacacagcggagaaaaacgatggagatcaccaagccaagacaggaacgggcaaatgaggagtagacacccgagcagaaaagcacgaagaagggggcagaccgcgaaacgccagaggagacccgtggcaccaaagacgcacccagggagagtagaggacaagcacggtacaccggcagagacaagtactagagaaacanaaggaggaagcagtcggagagaggtaggagaccaggaaggaaaacgagacagaagtcagcgagcaagtagtgaccgcagcaacaagaggtcacagccagacggccaagagacagacaacgacgacagacagcggacggacgcagagatacaggagagtgactgcacgacgcggcgcaaacatgagaga

SEQ ID NO: 651191 - DNA, 814 bp, Homo sapiens
  misc_feature (438)..(438): n is a, c, g, or t
ggtacgacttctcggctgtgcaggaactgtcagagagatgtagtctctgtcagacttcaccctccatgaggcttactgcctgcgggtcctggtgctgtgtccggagtgtgacggagtcctgtgcccagggaaaccatggaggagcactgcatgcttgagcacctaggaggccaattgagtgccaggagcgctcacttgtctgagtgtcacatgcttctgcgaaacttggacggatgcacgcgtcatgctgagctggagctccaacgtagtcctacatgttggcgagccggactagagcttcctgcactacaggcgtgtggcctagttcatctatgcaacgctgaattgcgtcagttcccaagcaaaatgagatgtctgtcatgagtgcaagcaggcgcctagccatcggagaacagtgggaagaggagacttttcagnctaccgtgcaccagggacaactcgtagcgtgctacagtttatctggcaatatcgcgaacatgattccccgagataataagtatttccaccatatgggtaaagtgtcgtgccaaaactcagacttgtaagaaacacttgccttgtgtggaccatgccaggaacattcttccttcattctcttccaagtcgagctgctgcacaaatctacaacttccgcgactggaaggaaagatgtgtcggtcctgagacgcaggaagtattacccagagtgtcctcttcattctgacatttcatcaaaggaaagcacctgagaagcatgaaagcggaacaccgttggactccacttgtgatgtcagaggccaaagccccagggaac

SEQ ID NO: 651192 - DNA, 820 bp, Homo sapiens
  misc_feature (547)..(547): n is a, c, g, or t
  misc_feature (565)..(565): n is a, c, g, or t
  misc_feature (574)..(575): n is a, c, g, or t
ggtctgagtcaacgcggctgcagggcctgcagctgtgctgtggtctacctgcatactccatggtgggcagctggggctgagatcgatcaggcgaatgacttgtggggggagaccagagatctagcgactgaagcagcatggccaagccgtgtggggtgcgcctgagcggggaagcccgcaaacaggtggaggtcttcagacagaatcttttccaggaggctgaggaattcctctacagattcttgccacagaaaatcatatacctgaatcagctcttgcaagaggactccctcaatgtggctgacttgacttcctccggccccagctggacatcccgatcgccgattgtacctcttgcctaagccaagggatggagtgagatggcacaacagatcaagcaggagtaagaaagagagtccctaagtgtggatttgtccgctgggaatgagaaagtcgctgtccctgcttgcctctggttaagcacagaaagtctggactctcaaaagagaaatgcattctggtgattacatggatccaacacctgatncccaagattgaagatggnaatgacttnnggggtagcaatccaggagaaggtgctggagaggtgatgccgtcaagcatcctaatagtggaagctttccacacgaacaccattgtaccgaagttactatctcagaaggtgggggatgctgtcggccaaaggcctcccagaggagaactcatgtcaatggattcaccgaggccttgggtgacatgagcgagcatgaggcagcctcatcggggaggtcacgggccgtggtcgctggcacctaggagg

SEQ ID NO: 651193 - DNA, 672 bp, Homo sapiens
gatttgagccagcctgtggatgaacacatttaaaattttatttataaatacatttactgttacatttgacttctcttattaaatacatttgtgatctatatcgctatggtctctgtgacaagtcatgcataactgggtcacgctgcatgtttctgataggaagtatcctttaaaaaatgcatgcagataaactggacttcataaaagctaaaaactttctgatgcaacacacactatcaacaaaacgtgcacacacacacgacaactcacggaatgagagaaaagatgtacaacatccatatgtctgcataaagaaactgtatgcagaatttacaactcaaccatacaaagacaacccatttgatgaatgataccaaggttttgctttagccaaaaaagctcatgcaaatgtgctcaacatcagtagccatcatggaaaatgcaaacgcaaagccacaataagataccacttcatattcagtcagatggccataatcaataagacagatgataacaagtgatggcaagatctggacacattgacacccttagacaactgctggtggaatgcgaaacagtgcagttgcttagaaaactggttaggctggccggcacggtggctcatgccgtaatcccagcacttgggagggcgaggtggcgtggatcaattag

SEQ ID NO: 651194 - DNA, 252 bp, Homo sapiens
tctcccacagtgctaggattacaagcgttatccaccacacctggtccattcttccttacctttttgctcttagccgacgaatggatattatttatcaatctgcagggaagagaggttatttctggttttcatgtcaccccctcgtgcgaattggttggttaatgataacctgggcatattatcattcattttataaggatttattttccttggtatctatctctgtgctctgaagggctcggaagatcagga

SEQ ID NO: 651195 - DNA, 179 bp, Homo sapiens
ctagtgcagcaggtcagtcttcaagcatcccaaggtaagcattgccttcagtctgcatgtttgttctcaaggcacttatcccctcacaatcattctcccactccatacttctccttctcaccccacccatgtgctccctgtgcactcctccagatggtcagcaggggtaaccacaagtc

SEQ ID NO: 651196 - DNA, 102 bp, Homo sapiens
gggggggggggttttcccccccccccccaaaaaattttttttgggggggggggggtttttaaaaaaccctttttttttcccccctttttgggggggccccca

SEQ ID NO: 651197 - DNA, 1045 bp, Homo sapiens
gtgtggtgtgctgcttgcatcagtgcacagagctgtgccctgcagcagtgccagaggcactggtgcctgtgtgcactgctcccacgtgtggcgtggcgcttcctgtgctggatgtctcctgcatggacagtgcaccagacctggtgatgaactgcccagctagtgcaggagactgtgctacttggaggacctgcctgctcagccagcttgtatatgtgcccactgaggagaactgcctctccaagtctgcagatcacatggactggccctactggatacctgcctgcctatttgcgcttctccacacatgatctacaatctgggccggactgactttcgtccaaagactggacgcgatagctgggttttgtgcaccagtgccacagtgcattaccacagcacttgaggtcttcacccactacgacctcctcactctcaatggctccaaggtggctgagtgggcacaagggcagcttctgtctggaggacacaaactgcccacaggactgcagcggcgctacgcatgtgccaactttgggacgaacagggagtgactgtaggctgctgggaccactaccggcatgacattgatttgccagtgagtggatatcacagatgtgggccccgggaattatatcttccaggtgcattgtgaacccccattatgaagttgcagagtcagatttactcaacaatatgctgcagtgccagctgaaagttttctatggcacgggtcttggctgcacaactgccacacacgtgcattcattaccaagtgcagatgcgaacgttaccggacaaccaggcaccaggcgcccaagcagaacgtctctgaggtgtaactgcgcagttcctagatgatgcgaatacacacaatccgtcaggaacttgggccgagccgttcagagtcccaaacagtaaaggcagtgcctggcaccggaccgtcgtagaagcgctcaatgtcacatcaccaaagtaagcccacgagagataggaccacaagggtggaaagaattcacgagcgaatcgaccattagagacgaac

SEQ ID NO: 651198 - DNA, 204 bp, Homo sapiens
tcccaggctccagctaacgatattaggacggtcagcacggtgctcacgtgtcgacggaactatgtacaggaaggcatgcaccgcaatggtgaatacacgtcgaccaggactccatgtaaacgataattaggaggtcagcacggtgctcacatatcgacggaactatgtacagagaagatatgccccgcagtggatagaatacac

SEQ ID NO: 651199 - DNA, 1157 bp, Homo sapiens
cccgtatgtgtagttcctcgctcgtcggttcgtctctgtgtgtggtgtggtattgtctgtggtttgttgaccgacagcatgtgcggtccgccttgcgcctgtgttttttcgtgcggtgtgtcttcccccccgtgtgccccgtttttgtcatatatgtcgggtctcacggtttccccccaggttattggggataggggggaagcatggataacacagggcggaccctgtgggtccctcctctcgtctcttaggtgcacccaggggttttctgccacactttagggaggacccccgtcccttgaggttataaacttcatgagttcacaagaactttgtctgtaagatgatccccccatggtggaccaaggaagggcaacgatctgggattcaaccacggggaaatgaggaaagcctatgtgatgtctttgacacggccaccacagtcctgagagatgtgactactgtgttgccatgtcccaaaatggcgcccgtgtgacaccccccatgaccagactaccagatatataagtggaaacttacttcctgggagtcccagaaaataggggaaaagctgtcccaaataccacgcccttgaaataggtttcacaggcacttccccaagagagcccaccacgcccatgagagataaagagcttatttccgccacggcgtataaggagcaccacgatgttatcccacgagaaccacttccctggcacaaggtgagaaagtgtcttgcaccccatctttcttgagacgtataaaaggagaaatatgctgagaaatgaaaattcttaaaaatattttgaggaaagaggcccaattttaatacgcccttttggagagttcacaagatgaaagccacccactgtatcacggagtttccgccacttatataaaatgaactataacacttgccttggctatatttcaccccaaaggagcttacttcttgttttttcccacgttttatatagaggaaacacctcgtctatgataggagtttcccaaagtatttgtggaccacgttaaatgctaattaaatatacactctgtagttattctaccactttttcttgaaatttgggaaggttaatacccagtattcatttcatgatgtaaagaaactgaaccgtgaagtggcttgattgcttata

SEQ ID NO: 651200 - DNA, 1518 bp, Homo sapiens
ggaactctaactgtctgacagagcgttctccgtgcctcatatagtgggtccctactgcgttcctgctctcggaacatgcgcagcagcatgtattgtgggacaggtgcacagagcttccctagaaggagtgacccgtccaagccggttccacctcagagtcttcctgtggatacaccggctgtgcatgactcacactcgttgcggtcaagtcgacaggccgagtatccatcggtgaacaagaaggaggtggatggcggcctgtgagcagtagtgaaaacaccaccccatggtttggcattgctgggcatagttgggcgtacggtggacacaggcccatcgagtgcctccggacgccttcaagaacttgtcgttaagcatgcagcaccatcaagcgatagagatcgcagggcaggggcgtagcgtatacgagcaatggcgccatcagatcgttccgcacagcacagggccttctacccaaggttacttgcaatacagaacatgcgcaggacttcagccatggccactgcaccgccagcctgggattgcaggcacttatccagcccccgtcattgaacgccccgtgactgcacacaggtcaatcgcgtgttcatagggcacactaccacaaggagtgatcgcctgcatattccttctgacgccagaatgaaagggccccacctggatgggaaggatcccgcggtcgaaccaggagggccctgttggccccgcacacacctgggactgggaccgcgctaaggactgcgctacggaaggccaaggcacgcggtaaccttgctgagacccacacgcagtcacgcgaccccagggatggcagattgcactccgacacagcacaaatcgcgcagctgcaccccagcgggcccaaagagcctcaccacaggggggatcaaccgagagacggataggccgaccacccacagcaacagccgtgcacaccgcgacagagcccaccagaggcccggcggacacggtacggacctggcacatatggcggacactgtgcacattcccagactcccggatgctactacgccaatctccactggcgtgctcacccggcgtgcctggtggccatgcaaacaggcaatacccaatccaccccacgccaccctcgcaacaacacaacagccgccgcacctcctaaccatacgcaactgggcccccacggctgtagcactaacccaaccggaccagagccaagaccgcactacacacacccaacagcccgaccccacagtaacacaatcacacgctacctaccgacaagacgaccaccaaacccccctgcgacaggcttgcccccaccaacagcgtaaccgacaaccacgacacacgaccacagcagaccacacccacgccacgcacgaagccacaaacaggccgcaccaccccacaaccacacccagcgcagcgacaacaccaacgcacggaccgccaaacccaccaacgcagcacaaccaacaagccacagaccgcccccaaccagcggaaccaccc

SEQ ID NO: 651201 - DNA, 407 bp, Homo sapiens
atccccatttcttatcattagaactgacctgacattaaagcaatgcttaattttttaccataagagtgaaattttgagattataattttaaagtgtaaaatatttacacttaaattacacttataattttaaagtgtataatatttacacagattaaaataaaatatgggaaacaatgaagcaaaacattctaaacttgaaaagtaaattgatattacaaacacagagtgacttaaaaacaaacaaaaacaacaaaaatcaaacctccgttataattgcagatttgttgactaaatgtttactaaaagactggctagcttgagcccagggggcgaaggtttcagtgagctgagattgtgccactgcgctccagcctgggcaacagagcaagacttcatctggaaaaa

SEQ ID NO: 651202 - DNA, 305 bp, Homo sapiens
  misc_feature (284)..(284): n is a, c, g, or t
  misc_feature (301)..(301): n is a, c, g, or t
tcgaggacatcagtatacgaatagacgcaaagaagcatatataatctctcactgtatatgattaaagcactagggcaaatatcacgtagatgtcaatattagggtctaaactcagaggacaaacaccaccatctacatctctatcaaacaatattagtagaagatccttaatatatatgtatattgtcagtatacggtttaatttaaacccattaaattctatttatttaaataagaattaataaacgccaatgcttatttcatttcacaaaacataaagtatnttaaatcacaacttcanggtg

SEQ ID NO: 651203 - DNA, 169 bp, Homo sapiens
cacccccacccccatagtacctatcaaaagccttaaaacagctccattttgttcacatttttcctctctttgcctgtctttcttttttatttttgtctgtttgtttattggggattgatccaagggttagatgagtgtcccaccactgagctacacccccagtcgacgc

SEQ ID NO: 651204 - DNA, 521 bp, Homo sapiens
tctgctgaatggggttataaaaatacaaggccacttgagttttgtaagctcatgaaaatgtacagaagctcacacttagtatgatattgcaaggcacttataacacacaataagatacttcgaaacccatctcatagattacaattgaaattgtctttgagaagaatttctaaatatagaaatagataggacgggcgactatgtcttcttttccaaaacacaggatcgcatttgccccatgttaactatacagcaccataaatgtggacacctcgtcccattttagttcttgagacaggttgatcctccagctgaaattactaagctagcttttcttcagttgagtctccattcggtttgacctaaagccaaattcttaatgagtatccaggatcttttagaatacctggctgatttcatgttgttgtaactcacaattcattaaataggaagatgatgatgcccaaatttaaccagtacttactatctagctgcccaaatcaccctaagcaacaatattt

SEQ ID NO: 651205 - DNA, 192 bp, Homo sapiens
  misc_feature (49)..(50): n is a, c, g, or t
tttttttgggggccctaaaaaaaaaaggggcccaacccggggccccttnnaggtttttcccccccccgggcccgttgggggggcccgggggaaattttggccccccccttctacggtcaaggggcccgggcccccccgggaaaaaattttagggggcccccccccccccgggaaaaaaagtttttgcgggga

SEQ ID NO: 651206 - DNA, 144 bp, Homo sapiens
  misc_feature (42)..(42): n is a, c, g, or t
  misc_feature (128)..(128): n is a, c, g, or t
taaacatgattgaaatcactgcttataaatgtgtgatgaganctagatgaccaaaactgttctgaagaatgtacccaggtgcctttttgctaatttgatactataatagaatgaggcataaaattcgntaatgggagcacctcc

SEQ ID NO: 651207 - DNA, 178 bp, Homo sapiens
  misc_feature (97)..(97): n is a, c, g, or t
ggtagatgttagtatgagaaatctcaacgcttcacaggactgactaattacatttccacacaggtataatgttctcttttctctgaaaccttacggnatgttattagacttctttacaatagccattcctaactggtgtgagatggtatcttatggtggtttggatttgcatttctct

SEQ ID NO: 651208 - DNA, 209 bp, Homo sapiens
tccgtacgagcgcctcctaacaccttccgtaacgagcgcctcctaacgagcgcctccgtaacacgcctccgtaacgagcgcctcctaacagctcctccgtaacgagcgccagcgcaactggaggagtcaggggcgtgttaagaggcgctgttaagaggcgtcgttacggaagggggttacggaagaggggatatcgagcatcgcggttc

SEQ ID NO: 651209 - DNA, 229 bp, Homo sapiens
gaggattagacagtcggtaggctaactactcccgtagagacgatagcgaaccagtactgtgaagggaaaggtgaaaagcacttcgaatagaagagtgaaatagtccctgaaaccatgcgctacaagcggtcggagcagcgtaggtgtgacggcgtgccttttgcataatgaacctacgagttactttttccggcaaggttaagcatcttgagtatggtgtttcggcgtg

SEQ ID NO: 651210 - DNA, 809 bp, Homo sapiens
gtgaatccagtcagagtccttgtgattggagcagctggtcaaatagtatattcactgttgtacaggatggaaatggatctgtcttgggtaaagatcagcctataattcttgtgctgtatggatatcaacccgcatgatgggtagttctggactggtagttactaatcggtacactgtcgtatgcactgttgactcctttgcactcctctcgtgcatacagtatagtcatacgctaggcatgataaagtagatgatcagtctagacgcttcagaagaccttggaagtgttgggccattgcttgatggagcgttccatgaccacagatagggagaggcattggagcatgaacatactttacttggatagacgccaaaatgtgccatagattctttcatatatcccgagaggatgctatgcactatatgagtaggagtaccgtcccatatgatacgtcaagatataacgggttacttgcttgctgggtaacttcaagtcacatagcaaactgcctgaaatgcttccaacgcttaaggtccaatcccaaatccgcgaaagggtatgaacctatcaagtttcgccttgacctcgctgttggattcagcatacccgtatctgtaatgggcatcaatattttagctctgtatagcattgtgtgtgactgtgtattgaggttgaggaatgttattattctaggtgaaaccatttgtcgtatatgtatgcgagatggtgaacatgcgaaggatgaaatttggtaggaaaggaagttggagtttatgagagtatgaaagatgagaattggtgagggaga

SEQ ID NO: 651211 - DNA, 171 bp, Homo sapiens
accccccccccccggttggggcccccccttgttcccccccctttggggccggggaaaggggggggttctttttcccttttccgggggcccggggggggggggggtccccccccccaaacttttccccccccctgggggggggttcccctaattggggtttttccccgggta

SEQ ID NO: 651212 - DNA, 88 bp, Homo sapiens
cccccatcctgccccactgtgtaacccactcatttttcaagcgtttttaaatgttatacatacaaaggtttacaagttcaaaaaaaaa

SEQ ID NO: 651213 - DNA, 429 bp, Homo sapiens
agccggcacccgagctgaaaattcctattaccaagtgatgtcataaccatcatcatgtcacaatgcaatgctttattcacgtttgtggggatacaggtataaacaaatctactacatctgccagttgtataaaagtataatatagctaggcgcggtggctcacgcctgtaatcccagcactttggtaggccgaggtgggcagatcacgaggttcaggagtttgagatcagcctggccaacatagtgaaacctcatctctactacaaatacaagtacaagaaacacaaatttggcctcattgtgctggcacatgctctaatgtcccaactactcgggaggctgagacaggagaatggcttaaacccaggaggtggaggttgcattgagctgggattgtgccattacactcccagcctgggggacagagcg

SEQ ID NO: 651214 - DNA, 754 bp, Homo sapiens
gaagaagaatgttgtaattgaccattatctcaatcatcatagttataggaaggaaaagaaaagtcatctcatgctcggaggaagcctgggaccaggttatgttcatatgatcttgatcatggacaaatatattgtgatactcctcttctgacattgtgagaaaatgggaagactattctacataattccgacttgtgaagacaatttaagaaacagaaataccaccctctagagtcaatagagatccattgatagcgaaagtatctactaattcacttaatattattgtcagacaataagacaatacaaggagtgccaatgtcgggggggggatgcccttaggactgaggtattgggcgtactatagaagcttggtactttggattagctatcttataagggacgattatttggggcttggcaaaaatgccgtcctccctttgatcagaacacccaaattccttttgaaagactatagtgctgctcatcgagcatagaaccatttcgttgaaaagcacctacggtgattgctgggaaatggtcttaccgatattccggtgtcgggtgacgggagtgggtgtgaaaatacaaaagaataacgaatgacaaagttctttccaaaagttatacgaacatatgctatgctaacgggttacggtagagatattttaaacgtgcttggaaacacggtaacgagactattcatctgctgttgtgaggggagtcggggggtttagaaaatgttcctatgggg

SEQ ID NO: 651215 - DNA, 279 bp, Homo sapiens
  misc_feature (56)..(56): n is a, c, g, or t
gggcggtggtcgccggctggggcgcgacggtggcccagttctgggcggggtgggtncccagccgggggaccccttggcgccgggccctccctctccccgttcttttcccccttcccagttctttcttctgcggaaccttcacccctccagtgggtgcgggaccctaggcaggaggccaggcaccgccgctctgtctgggggccccgaagcagttaacgggccggtcagcaaagtggtaaagccggtgccctctgtgggggctttgggccaggggtctcc

SEQ ID NO: 651216 - DNA, 168 bp, Homo sapiens
tattgccagcagcagtcccagatgcaagtggaacaacaacctcatctagccactccaaaaactcaggtcgtggagaatctacacactcacgcatcagtccaggctcaactgaatataacaacgttaactggcagtaacacaacaccaggcctcagagaggcatatacc

SEQ ID NO: 651217 - DNA, 409 bp, Homo sapiens
cttcctgacctcgtgatctgcctgcctcggcctcccaaagtgctgggattacaggtgtgagccactgcgcccagcctaattttggtatttttagtagagatgggatttggccatgtgggctaggctggcctcaatctccgggcctcaggtgatctggccaccttggtctcccaaagtgccgggatttttttttcttttcttctttttttttttttgggagagggagtctcgctctggtcgcccagcctgggagtgcaggggcgcgatctcgggtcattggcaagctcggccttcggggttcacaccattctccggcctcagtttccccagtagtggggatggcgggcgcttggccatatgcccgggtaattttgggtatttcacgagagcgggggttcaccacggtagt

SEQ ID NO: 651218 - DNA, 913 bp, Homo sapiens
  misc_feature (910)..(911): n is a, c, g, or t
tattcaaaatatttcataaggacctgtggtttgtttccccttaaaaagcaactctaggccgggcgagaagggctcatgcctggtaatcccaccacttgggtaggccaaggcaggtggatcacttgacggtcaggtgttcgagaccagctggttaatcactggtgaatccccatctctattaaaaatacatagaatctagcacaggttgttggtggaacgcgcctggtaatccctagctacatgggaggttgaggcagtgagaatctcttgaaccgcaggtagggtggaggttagctaggtgttagcctgcaaataatttaccatgtgcactccagcctgggtgacacagggagtgtccattttcgaaacataattctaacgtctttgttcctgtgtcgactcagcacattgagttctatagtcatttagaaggtgttacgccataaagtccagctttgactaatatggtgtgcctggaaccatctgttcgtcgggaggagagttccattatccccccttgtccatttgtccttgtggaactcatgctatgggacatactgtaaaaggtaaaacttcatgcttatgaaggctctctgataaggtcactgaggctagaatctttggatagggtgaaaggggttggatccaattaagtatggggtataggaaggaagttcccgaaagcaaaggtgtttagaaggcattgggggggggaaccccagggaaggtggggaactaattggtttgaggcaagattagagggtaagaggagaagatcgccgcggggaaaaaatggacacgtgtaaaaagaatatcaaggagctcgagagatgtttcaatggtgaaaaaagagtgttataaagatggtgatcaatattgttttttattttttttatatttatatagtgtnntg

SEQ ID NO: 651219 - DNA, 338 bp, Homo sapiens
  misc_feature (139)..(139): n is a, c, g, or t
ggccctgttttttgggaggggccccccctggaaaatgggtttgggtttgaacaacgggtttttttgcaacaaaacccgcatttggggtgacctgccaaattttggggttattccggcaaaaaccggggccaaatgggtnccccaagatttggtccccaagggttgaaacattcaggggaacttttttaaactttggtgggaagagggattttttttttagaaaggtattggttgggaaaaaaggcttttttaacccgggaaaaaggtttcctggaagggggtggaaactcccccccccccttattttttttttatcaaaacatggggaagggaccaga

SEQ ID NO: 651220 - DNA, 432 bp, Homo sapiens
tggcgccggttacatagcagcgatgcagggagatttcagaggtccacactattccatctgcggaaacaaacctagactggtctattaagtcacctggcgtaagtcacctgcttggcccttcaagtcattcgacttggcaacccttatgtacttctctgtttatgagacaaagtctcgctctgtcgcccaggctggggcgcagtggtgcaatttcggctcactgcaacctctgcctcctgggttcaagcgtttctccgtgtctcatcctcccaagtagctggggttacaggtgtttgccaccacacctggctgatatttgtatttttagtagagatggggtttcgccgtgttggccaagctggtctcgaactcctgacctcaggtgatccacctgccttggcctcccaaagggctgggattataggcgttgag

SEQ ID NO: 651221 - DNA, 679 bp, Homo sapiens
cttggagttcgaaacttctgagctccccgccgtcgtacctgtgcctggccaatggtggctggggcatggctttcctggctgtcggggccctccagtccctcaggaatgcctgtcctgggacgcctagctggacaccatatttactgtctgcttgtgtgtatgcttgatgttgaacatgcctgtgtggtgtcgactgcccctgcaccccctgctgctgctgtgtgatgatgctgcctgccctgctggtcaccttgtgtgccctgctgtgggcagatgatgttcactggttccttgcagcctcgggtacatgctttgactgccccctgtggctgtgtgcttaacactgtaacactgcgtggacctcgagagctaagcaagcatgggctgactaagacgcagccctctgcccagtgatccctgtctctccctgcgagctaccctgttccctgcccaatgtactcctgggtaaccgaggggagtgaccgtctgctccccgcctcgtggcccgcgggcggagccggaactgtcgggacaccgcggacgtgtctttgggcggcatgttttatgtcgcgaatctgtgtggatttcttaaattctgtattcccctaaaatagcagtgtatataatatgtaatgcttctaccctgaaaatcacaagcgaaatataggctccatgcaga

SEQ ID NO: 651222 - DNA, 155 bp, Homo sapiens
cccttggtttgctatgctcttccccagacagctgcacagctcatttaatttagatctcatttaatttagatctctcaattaatttagatctctgtttaaaaaaaaaaaaggaccctgggcggccaagggtttaccattatcattccctcaattta

SEQ ID NO: 651223 - DNA, 1528 bp, Homo sapiens
gctcaaagcctgtgctgctatagcgcagcagaacccttggaccactgagtaaatacagccaccaagggcgatggtgaggagaccccagcgcagggagagactgagtgcgtgcagcatctctctcatctcctccgaggtaggcctagtgcttgctggatcagcgggggaccttgccgagtcatctgaggtgtatgacgggacggcggggacgtctacacgctttctcagtaccgctacgcagtcccaccgcgtctgcacgcaaacgcgacagaattctgtccgcattccctccgaccgtatccgtacatcccgtcatccgtgattctaccacctcacccacaaaaatgacgcgaacaggccatgacgatcagtgtgggttcctggaagatctattccactagaatcgaccaggaccgtgcaccacccacgtcggaatcactcgtggacaccggctcaggcctggcgaaccagactagggggcggacgcgacaagtgcaatggcgtacgagacacgcagatggaagacgggcacgaggcagaggctcagaatcaggcgcaaaccgcgaggcaagcgcgacaccgacaccagcgagggcgcgaccttagtccgacacgaaccccaggagggcgccacatagctgcccgcacaacgccgccacgcggcggaactccacacaggagcctgcacacggcggaagaaccacgcccaagccaagcgcgcccgagtacacaccagggggcgtagcacagcacctaggaggaagcaacagaacagcccacgacacgcaagcacgcgcgcccagtgggggcccccaggacccaggccaaagaaaagaagcgcgacgcacacacaccagagaggccccaacggcgacgccaacaccacagcgagcagcagcagcacccccgacacgcagcacctcggcctcagagtacagccccaacaccggaagccagccgccgaaacgcagacgccgcactagcggggccccgcccgggccccacacaccccagctacagaggggaacgcccggccccacaaccaggacaccaagcagcgatcaaggcaccccaccggagacagcaagcacaccgcccgcgagaccccctcacaagcccacaggaaccccacccgacgaaacacccaaaccgaacacacgagcacgaggcccgcacaacaacgcagacaagccagcaggacacaagcgtcatgacgagaccacgcacccacaagaccacaaagaccgccccacaaccccagacaccgccaaagcaccccccgggcacgccagcacgagccaggacgccacgggcaggcacccggccaaagccgccacgccatcaccgcgcggagaacaaccccgccgacccgaacccaggcgaccgaggcgaagcggcccaaggcggcacccgcaagacacgctgcggacgccacaaaccaaccgccccgcgcacgagcgacaagcagaacgccaccgacgccacagcacacaagcacaccaacacacacggagagcagacccgccgg

SEQ ID NO: 651224 - DNA, 155 bp, Homo sapiens
  misc_feature (24)..(24): n is a, c, g, or t
  misc_feature (82)..(82): n is a, c, g, or t
  misc_feature (152)..(152): n is a, c, g, or t
ggcggacacataatggcaccgtcnggcagaagtacacttaacggaatgcgattgatatgagtaataaattaactttttagtngctttatattttcttattaccactattagtgtgaagttttttaaaaaggcagtatagtcagtttcttttnggt

SEQ ID NO: 651225 - DNA, 115 bp, Homo sapiens
cagatttcacccgcctggccgatcggcagatcgcggccttcgtcgtcgcggatggcgatttcggtgcccggaatcggcaagccgacggtgcccgagaacttgtcggtatcggttg

SEQ ID NO: 651226 - DNA, 558 bp, Homo sapiens
  misc_feature (169)..(169): n is a, c, g, or t
cagtcggatcgagatcgaaaggaagcaagactcgagtagcagcacggactcttggaagatggcgccgagtaatagtcagtaactgcaacaatgatagagtacggataaggactataactagaattgatatacttgttgtgaattgcccgagaggcgatgttctggcatntgtaataaagtcagcattgccagacctgaaccgttaactcagtctgcacactcctgtttctaactatctagcgaacatgtatattctgttcacgacactttatctcttagtcgcttcgatttcagaggaacaaagaagcaactttgaagttacctcatctatggaatttagaataaaagtggcacattacatatcggatctaagagattaataccatctagaagttacacagcttttagttgttgtggagatagtgtttggtttgtacagaacaaaataatatgtagcagcttcattgctattggaaaatcagttacttggaatttccacttgatatggctatacaactaatataactggtagttctataaacaccggcaatgtctgtt

SEQ ID NO: 651227 - DNA, 396 bp, Homo sapiens
tttgcagtggagaggagcaattttggttcccggctgagtgcacattctgcattctcgccatagtagctaaggctcctgacagcccagatcgagaggcgcaggccagaatgagtggctaatgggatctcagcgtttgtgcgaatggccgtgtctcaccatggtctgtaggggcttcagcagtatctgaactggatcccggcccgccttgaacgcacaacgtgctggccataccgacggcggctaccgggtccaagcgtcactgtttgtagaatcctgtgtatcttatgcatcgctagctcatatataggcctactagtcattgccgtaagctcgccaatgtcgcagcctaatccgttgccattatgccgtacttcactcccaccgcttgtctccttc

SEQ ID NO: 651228 - DNA, 157 bp, Homo sapiens
cctcccacggtgtaccgcatgccacacctggatccggtcctcccactggtccctggtaggtttgtgctggtccatcactctttgagggatcagccgctcagagctgaggtaccccgacttgtgcacttctttgttgtattccccgaacttcgcctgc

SEQ ID NO: 651229 - DNA, 737 bp, Homo sapiens
  misc_feature (49)..(49): n is a, c, g, or t
  misc_feature (89)..(89): n is a, c, g, or t
  misc_feature (114)..(114): n is a, c, g, or t
  misc_feature (171)..(171): n is a, c, g, or t
  misc_feature (178)..(178): n is a, c, g, or t
  misc_feature (194)..(194): n is a, c, g, or t
  misc_feature (202)..(202): n is a, c, g, or t
  misc_feature (217)..(217): n is a, c, g, or t
  misc_feature (221)..(221): n is a, c, g, or t
  misc_feature (224)..(225): n is a, c, g, or t
  misc_feature (228)..(228): n is a, c, g, or t
  misc_feature (230)..(230): n is a, c, g, or t
  misc_feature (238)..(239): n is a, c, g, or t
  misc_feature (254)..(254): n is a, c, g, or t
  misc_feature (260)..(261): n is a, c, g, or t
  misc_feature (286)..(287): n is a, c, g, or t
  misc_feature (316)..(316): n is a, c, g, or t
  misc_feature (319)..(320): n is a, c, g, or t
  misc_feature (324)..(324): n is a, c, g, or t
  misc_feature (340)..(340): n is a, c, g, or t
  misc_feature (350)..(350): n is a, c, g, or t
  misc_feature (361)..(362): n is a, c, g, or t
  misc_feature (440)..(440): n is a, c, g, or t
  misc_feature (469)..(469): n is a, c, g, or t
  misc_feature (496)..(496): n is a, c, g, or t
aattttttttaactatggtttgtttccttatgttctttttttgtcagtnaatcttcacaatcccacctgtacattttaacattcatggncttgtaatggtgatgctttggctancagcctagtagatgtattttatttcaattttatgatactacagtttcaaagtatttnttcaganctctgaatataaaatncccctaanccttaaaggccaaancccnttnnccntncgggtttnnatctttggccacgcngttagnncttagtgactcctcttctcctttgnncttttaaaatactgactattcataatggnggnnaatngcaaccaactcttttngtcccattanacatggttggnngttctggcctatggcttgaaacaaataaccctgggcatacatttttgaaaaacattgtcagattcattgctgtaggtntgaggggttaataatctggaggggaattntggaattaagctgaacccatgcctgcntatttaaaaaacaaagcggcttattttaatagtatcaaactcttcagtatggtattgaatagtcagtcatattttctagctaggcatatgggtttcttatgataaaagctgaacttgttctctcaagtttaagtgaaaaaaattagttgagaaaaaataattatttaaaatataagccttcatattattgtacaatatttctcctttgagaagataggatatatgattttcccaaaaatca

SEQ ID NO: 651230 - DNA, 573 bp, Homo sapiens
gaggaactccactggaatatttgctcaggggaaactaactaatcatctgtttcaaggttggtattcattttagtctttgacctctgattatggggactttcagggaaagctgtttgcaaggtgagcatgaatcaggtgaaacagcaagatctgaagtcaggacagagtaagcaaattatccacagacctaatatgtaccctctgaagctggaaagtgggggccacctgggtagcatttgagcaggggtcacttatgttcccccataagtctgcacagctcctaaacaaggtccagtgggcaacttatttttatgtggtccctttatagcatgctgttaaggggtgcataaccacaggccagttgaggaaggaaccctactggatttaacccagtgacattatataagcaatcgcttggagccacataggtagttcgcaggtcctgaatatgtggtgcctgaaagcataggtgtaggcagtgttcattgcataggcattagctggacaggtttttttccatattggcacttattaattgacaaggtcagggtacacttccaatgagtgtaggga

SEQ ID NO: 651231 - DNA, 1119 bp, Homo sapiens
  misc_feature (14)..(14): n is a, c, g, or t
  misc_feature (21)..(21): n is a, c, g, or t
  misc_feature (1113)..(1113): n is a, c, g, or t
  misc_feature (1115)..(1115): n is a, c, g, or t
  misc_feature (1119)..(1119): n is a, c, g, or t
gaatttcgggcacnagaaggnaaatctcatcacgtttcccagaatccaacccatttcaaaggatgatttcagacgctatcggggagctattgcacgcaagcgaattcgcctaggcagaaaatatgttatttcccacaaagaagaggttccactttgcatacactgggatatcagcaagcagataaaaatatatactctggaagagcatgatgttttatctgtttgggttgaaaagcacgtgggaagtccagcacatttggcttatcgtctcttgtctgactttacaaagcgacctttgtgggacccccattttgtgtcctgtgaagtcatagactgggtgagtgaagatgatcagctgtatcacatcacctgtcctatactgaatgatgacaaacccaaagacttggtagtactcgtatcacgaagaaaacccctcaaagatggtaacacttacacagtggcagtgaagtcggtcattttgccatcggtccccccgtctccacagtacatcagaagtgaaatcatatgtgccggatttctcatccatgctattgacagcaattcatgcatcgtatcttactttaaccatatgtctgctagcatccttccttactttgctggaaatcttggtggctggtcaaaatccattgaagaaacagcagcctcttgtatacagttcttagagaatcctcctgatgatgggtttgtaagcacattttaaaggtcaactttcaattactggtaatttaatttccccacttttaattccaagcacccttagccctgacatctgtcaagctttggggccacaaaataatttaatataaccctaagcaaaatgcagtgacggagttaaaaaacaaaatgcatcttaagtcaaataccagtgatttggattagcattaaaagagctttagaattctgttgtaagtcatctgtgctctgcctcttccaggggcacagatagtggaaaattgcctgtatgcaatactatgtgttctataaaatggcatgaatttagtttaaattatcgtaaacatttttaggttacagaggtgaaacatgcattctgtgtgaaattccaaaaaaaaaattataaaatctaaaatgatnancttn

SEQ ID NO: 651232 - DNA, 149 bp, Homo sapiens
ctcatcacgggcagcagtcagcacagctccacagcccccagcacaacagcccagcccatgccggtccatacagggcccgccagcagccagctgcacagttcaacacccaggcaggccactcacagctgtccctcgcggctcacggtcag

SEQ ID NO: 651233 - DNA, 930 bp, Homo sapiens
tgagacttgtctctaaaaaaattaaaagaaaaaaggtgagaaagtctgttaataagagtccagtgacctttaagacagctgcaataagggcttgaagaacagttaggaaaatgctatggaaactgatggaaaggagatccttgtgtagcggcagaaagtttagcaacactgtctcctgcattagtgtggagggtaggaaatatacctaaggaacggatggtctagctaaggagctttccagacagaatgttgaaggtgccacctggcttcttgctgcttatagtaaaactgaagaggagagagtaagttaaagaaaaaaaacacttaaatgaaaaagagcctgaaacttgtgggtttgaaaattcccagcctttccagataacaagtgatgttaaaattaacaaatggcttccgtgcaaagattaaatacaaggcattaaatacagggaaatgtggtctaaaggtcaagctgaggatgtgatgaaaaagtcctttgttaagacctcagaaataccaacaagatgcctcagaggggacttccagtcgaatgaaataataatcacgcttctgagaaggttaaaggtgttgtctttcagcgtctcagcacaagcccaaagtagagaagggcttaccttgcagagattttcttttttctttttcttttcttttttttttttttgagatagctcactgcaacctcctcctcctgggttcaagtgattctcctgtctcagcctcctgagtagctgcgattgcaggtgcccaccaccacgcccagctaatttttgtatttttagtagagatggggtttcaccatgttggtcaggctagtctcaaactcctgacctcaggtgatccacccacctcggcctcccaaagtgctgggattacagcgtgagccaccgcgcccggcccacattcccttccagt

SEQ ID NO: 651234 - DNA, 1203 bp, Homo sapiens
  misc_feature (14)..(14): n is a, c, g, or t
  misc_feature (21)..(21): n is a, c, g, or t
  misc_feature (1197)..(1197): n is a, c, g, or t
  misc_feature (1199)..(1199): n is a, c, g, or t
  misc_feature (1203)..(1203): n is a, c, g, or t
gaatttcgggcacnagaaggnaaatctcatcacgtttcccagaatccaacccatttcaaaggatgatttcagacgctatcggggagctattgcacgcaagcgaattcgcctaggcagaaaatatgttatttcccacaaagaagaggttccactttgcatacactgggatatcagcaagcaggcatccctgagtgacagcaatgtggaggccctcaaaaaactggcagccaaaaggggttgggaggttaccagcactgtggaaaagataaaaatatatactctggaagagcatgatgttttatctgtttgggttgaaaagcacgtgggaagtccagcacatttggcttatcgtctcttgtctgactttacaaagcgacctttgtgggacccccattttgtgtcctgtgaagtcatagactgggtgagtgaagatgatcagctgtatcacatcacctgtcctatactgaatgatgacaaacccaaagacttggtagtactcgtatcacgaagaaaacccctcaaagatggtaacacttacacagtggcagtgaagtcggtcattttgccatcggtccccccgtctccacagtacatcagaagtgaaatcatatgtgccggatttctcatccatgctattgacagcaattcatgcatcgtatcttactttaaccatatgtctgctagcatccttccttactttgctggaaatcttggtggctggtcaaaatccattgaagaaacagcagcctcttgtatacagttcttagagaatcctcctgatgatgggtttgtaagcacattttaaaggtcaactttcaattactggtaatttaatttccccacttttaattccaagcacccttagccctgacatctgtcaagctttggggccacaaaataatttaatataaccctaagcaaaatgcagtgacggagttaaaaaacaaaatgcatcttaagtcaaataccagtgatttggattagcattaaaagagctttagaattctgttgtaagtcatctgtgctctgcctcttccaggggcacagatagtggaaaattgcctgtatgcaatactatgtgttctataaaatggcatgaatttagtttaaattatcgtaaacatttttaggttacagaggtgaaacatgcattctgtgtgaaattccaaaaaaaaaattataaaatctaaaatgatnancttn

SEQ ID NO: 651235 - DNA, 902 bp, Homo sapiens
  misc_feature (816)..(816): n is a, c, g, or t
tgagacttgtctctaaaaaaattaaaagaaaaaaggtgagaaagtctgttaataagagtccagtgacctttaagacagctgcaataagggcttgaagaacagttaggaaaatgctatggaaactgatggaaaggagatccttgtgtagcggcagaaagtttagcaacactgtctcctgcattagtgtggagggtaggaaatatacctaaggaacggatggtctagctaaggagctttccagacagaatgttgaaggtgccacctggcttcttgctgcttatagtaaaactgaagaggagagagtaagttaaagaaaaaaaacacttaaatgaaaaagagcctgaaacttgtgggtttgaaaattcccagcctttccagataacaagtgatgttaaaattaacaaatggcttccgtgcaaagattaaatacaaggcattaaatacagggaaatgtggtctaaaggtcaagctgaggatgtgatgaaaaagtcctttgttaagacctcagaaataccaacaagatgcctcagaggggacttccagtcgaatgaaataataatcacgcttctgagaaggttaaaggtgttgtctttcagcgtctcagcacaagcccaaagtagagaagggcttaccttgcagagattttcttttttctttttcttttcttttttttttttttgagatagctcactgcaacctcctcctcctgggttcaagtgattctcctgtctcagcctcctgagtagctgcgattgcaggtggcacgcctcggtggtcccggctacttgggtggttgaggcgggagagtcgcttgancctgggaaggcggaggtttgcggttgagccgatattacaggcgtgagccacttgtgccccgggccaatttgcagagatttcaaggt

SEQ ID NO: 651236 - DNA, 1473 bp, Homo sapiens
  misc_feature (14)..(14): n is a, c, g, or t
  misc_feature (21)..(21): n is a, c, g, or t
  misc_feature (1467)..(1467): n is a, c, g, or t
  misc_feature (1469)..(1469): n is a, c, g, or t
  misc_feature (1473)..(1473): n is a, c, g, or t
gaatttcgggcacnagaaggnaaatctcatcacgtttcccagaatccaacccatttcaaaggatgatttcagacgctatcggggagctattgcacgcaagcgaattcgcctaggcagaaaatatgttatttcccacaaagaagaggttccactttgcatacactgggatatcagcaagcaggcatccctgagtgacagcaatgtggaggccctcaaaaaactggcagccaaaaggggttgggaggttaccagcactgtggaaaagataaaaatatatactctggaagagcatgatgttttatctgtttgggttgaaaagcacgtgggaagtccagcacatttggcttatcgtctcttgtctgactttacaaagcgacctttgtgggacccccattttgtgtcctgtgaagtcatagactgggtgagtgaagatgatcagctgtatcacatcacctgtcctatactgaatgatgacaaacccaaagacttggtagtactcgtatcacgaagaaaacccctcaaagatggtaacacttacacagtggcagtgaagtcggtcattttgccatcggtccccccgtctccacagtacatcagaagtgaaatcatatgtgccggatttctcatccatgctattgacagcaattcatgcatcgtaagtttgatgaaacatctgcagattaattggctctgccagatagcgaaaaatctcttaatttacccagatgtcctaattaattgtaatcttgttatttgtgtccacactatgggaatcctaaggtcatcctttcggatcatctattccagaaggtcccccagaagattagggtcttagcctcccctacaccagcaagactcagatcctttcttgaaaaagctccaagtcaataagaaattaaaatattgtactttttttttgaaacaggtatcttactttaaccatatgtctgctagcatccttccttactttgctggaaatcttggtggctggtcaaaatccattgaagaaacagcagcctcttgtatacagttcttagagaatcctcctgatgatgggtttgtaagcacattttaaaggtcaactttcaattactggtaatttaatttccccacttttaattccaagcacccttagccctgacatctgtcaagctttggggccacaaaataatttaatataaccctaagcaaaatgcagtgacggagttaaaaaacaaaatgcatcttaagtcaaataccagtgatttggattagcattaaaagagctttagaattctgttgtaagtcatctgtgctctgcctcttccaggggcacagatagtggaaaattgcctgtatgcaatactatgtgttctataaaatggcatgaatttagtttaaattatcgtaaacatttttaggttacagaggtgaaacatgcattctgtgtgaaattccaaaaaaaaaattataaaatctaaaatgatnancttn

SEQ ID NO: 651237 - DNA, 318 bp, Homo sapiens
cgatgtctgaacataaaaactaaaaccaaaaaactttttcaagaatgcttaggagaacatcttcttgacataggtgggcggagatttttaggtgaaatacactacccctaaaattaaaaattgatggccaggcatgccggggtctcatgcctgtaatcccagcactttgggaggccaggggggggggatcacttgaggccaggagtttgagaccaccctggccaacatggggaaaccccatctctactaaaaatacaaaaattagccccatgtggggacgggcacccgtagccccagctgttaaggagactgagggaa

SEQ ID NO: 651238 - DNA, 672 bp, Homo sapiens
ttcacgagaaatatttatttatgctttgtggggttgacggttttaacatagcaaaccaagatggattaccacttgtgctgaaagcacattattctccattataacctactggattctgctaacacagatgtgcattcaagtaggaccgtatgttagggatgagctcaaaagatccacgctacagctttctttgcgtcttaaggacctaatcctcttcttactaacagtctatggcctgatcaccaagagacaggaggacaataatgggggtgtagtgccggaaaagtttcctcgctcctctgaagaaattcacatccggtgcgattccttcagctgcaaggatatagaaactctttgactgtgttgagggatctgatactgcctttcagggcttctagtaaaagagcccgtgatatactagcggggactggctccttgttgtgtttgacaagttcccccaagagtgtgggagaattggttacctaataatccgtgaaggacaaaccgacggggctctataagacgtttaaaaggcccgggtgcagaaaaccgccagggtttcattagtgaaggcaacctggaatctcttttcttccgaggcctggccgggtaagccggtttttccaaaacaattggttccgtttttttacaggcaaccagggtaattttatg

SEQ ID NO: 651239 - DNA, 133 bp, Homo sapiens
actagcattagttgttgtgactggagggtgtcaggctcagtccaggtgaaagcaaataggttttgggaatcagggtgtagggaaatggtaaagaaggcatcctccatggtgctgacatcctccatggtgctga

SEQ ID NO: 651240 - DNA, 878 bp, Homo sapiens
aaaggaattgatatatttgtcatagtttacaaaaaaaccacaaactttagcactgacgcaggaggcaaggtgctcatctttgatgactcctttgagcacgaggtatggcaggatgcctcatctttccggctgatattcatcgtggatgtgtggcatccggaactgacaccacagcagagacgcagccttccagcaatttagcatgaaatcatgcaagcttgggaaactctggagagaggctgcctttctggttccatctccttgggtgtgaggatagaatttcgaacaccaagagtcaattcccttgacttgcagcccgagtaaattcaaagcctcctcctacggtcagaagacactaaagggaatattttgcctcgctgcaattcattcaggaaaacaccctgctggggggcatcttatgacagcactggtcttctgccaggagttaaggtgaacatttgatagcttcttaccttaaccagccaaaaaatttttctccaccataaataaggtctaattaaattgtattaatgagaaccttctgtctaaaactgtaaatggattgcccaacactgtaatcttttcatagccttatatttttctaatgtgcgtagactatcttggcctgacgggcccactccactatttgttttgtcaacatcaaaaactgcctcaatctgttctctttcttcctatttcatcgtttccacatctgtgaacctcacactccccgctttttcctcttctcaccaatagctcctttcagaaaaagccgtatctcatccccccacaaaaaaaaaaaatatatgtcttctcttgactcaaaatgtggaacttatcgcccctctccctttgtggaggttatctaataaacaccg

SEQ ID NO: 651241 - DNA, 822 bp, Homo sapiens
  misc_feature (243)..(243): n is a, c, g, or t
gaagagaaaatcagccgagaaggatagattaatggttagtaccaaggaaacatgaatgcagcgttttccagcttgtagaaagctccaagcaatctatgactgagaaggagaagcggaagctcctcaataaactgacgaaatcaactgatgagagttggaaacaggatagatgaacaagtcactaccaaaaagagcatggctggtgttgattctacctagactgcacatcgggaataacacacntagagaagctgctaccgagagcattcgtggagctgggagaaggacaagaattcaactttaatgtcaataagttaaaccagtacagccaacatatttctctttttgggcaaaccctgaccgggatgccacacgctagattcactggtgccatcagcgaagattgacattgacccaagatatccaggctggtaatggaagaaacggcaatgatatctacgggaaaacagagtctggagttccgtgttaacgggattacttcgaagaagatcctgaagagtgcagtggataaagagagacgaaagtctttagtaaaaccagaattatggagactggcagtagaagaacttggagaatagcctcaagaagacaaggaaggcctggaacgaattgcttaaaacgtactccagcgacctcctccttgctctgatgcaaagagccagaaggagacagcagcgttaatggatgatgaacaatttgaaactatgacctttgggaagcgaactcctacaagactgtcatcaatgtcagcagaaacttgagcaaagacctcaatccagccatccttggtagtaaattcca

SEQ ID NO: 651242 - DNA, 119 bp, Homo sapiens
tggcgccgtcctctattgctcccgctgtggcgataaacttgtcgcgtgtcttcctaaaatctctctttgatcctgtcctttgataacaccgtcagtgcctactactgggtctagacaga

SEQ ID NO: 651243 - DNA, 179 bp, Homo sapiens
gtaattcgcccaaaattgacgaaacaaaggagaggagaggcaccgatatatgtctctaggctttagaaaacatggagttgtctcttgcacattatgcgaatctataagaggtgatatagtagacatcaagggaatgggtacttgtcaaaaaggatgccccacaagtgttacatgcaaac

SEQ ID NO: 651244 - DNA, 469 bp, Homo sapiens
  misc_feature (459)..(459): n is a, c, g, or t
  misc_feature (461)..(461): n is a, c, g, or t
  misc_feature (463)..(463): n is a, c, g, or t
  misc_feature (465)..(465): n is a, c, g, or t
  misc_feature (467)..(467): n is a, c, g, or t
ctaatgtaattggtaccactgccttgatttatgctgagaaaccagccattgtacccacttttgcttttatataatcatggcaagtgtcaatgaaaaagcaggcaatgactttgtattactttcacaaatttttaaaatttttcatcagctttctcaggtttaattagtatgattcagaacagtgttggccaggcacagtggctcaggcctgtaatcccagcactttgggaggctgaggcaagcggattacctgaggttaggagttcaagaccagcctggccaacatggtgaaaccacatctctactaaaaatacaaaacttagccaggagtggtggcaggtgcctgtaatccctgctacttgggaggctggggtaggagaatcacttgaacctgggaggcgaaggttgccatgagccgagatcacaccattgcactccagcctgggcaacaagagtaantnangntntc

SEQ ID NO: 651245 - DNA, 164 bp, Homo sapiens
ctaaatgtccagaatgtaagatatttcatactgaaatctgattaccagaattaattacattagaagaaatattttaaaaagctcataactattacgtagcagatatgttttcaaagaacttgttataaggtgggtcttggtggctcacacctctaatcccagca

SEQ ID NO: 651246 - DNA, 116 bp, Homo sapiens
atgaggatagggagaacagttcgagaagaacgtagagaagaaatttgagaaatacacagaggtattcaagagccacggactcctggtctgagcccaataaagactgttaattccta

SEQ ID NO: 651247 - DNA, 507 bp, Homo sapiens
  misc_feature (10)..(10): n is a, c, g, or t
  misc_feature (18)..(18): n is a, c, g, or t
  misc_feature (32)..(32): n is a, c, g, or t
  misc_feature (52)..(52): n is a, c, g, or t
  misc_feature (112)..(112): n is a, c, g, or t
  misc_feature (133)..(133): n is a, c, g, or t
  misc_feature (138)..(139): n is a, c, g, or t
  misc_feature (161)..(162): n is a, c, g, or t
  misc_feature (211)..(211): n is a, c, g, or t
  misc_feature (229)..(229): n is a, c, g, or t
  misc_feature (438)..(438): n is a, c, g, or t
cctttcatanaaagggangaagggaaatgtcnagagacctatgtgaaccatngagcatctccattcttataataagaaagctgggtaaaatgagggctgaaagttactgggnctgcattcccagacgtgatanaagcnnaatctaagtcattgaatgtcanngcacaaaataccagggtcattaatggacccctttgctgataaaacaggnttggcagtaaaaggagcnccagccaaaacctaaaatggtgaccaagactgatcctctggtcgtcctcactgctacactcccatcagcaccatgacagtttacaaatgccatggcaacgtcaggaggttaccctatatggtctaaaaaggagaggcattaataatccaccccttgtttagtatatcatcaagaaataaccataaaaataggcaaccagcagcccttgnggctgctctgtctatggagtagccattcttttattcctttactctcttaataaacttactttcactttg

SEQ ID NO: 651248 - DNA, 278 bp, Homo sapiens
acgtgatttggaagaaagaattatccctgccagacggggtggctcacacctgtgatccccagcactttgagaggccaaggtggtaggatggcttgagcccagcagttcgagaccagcctgggcaacatggtgaaaccccatctctacaaaaaatacaaaaattagcttggcatggtggtgcaagactgtaccaagctactcgggaggctgaggtgggagaatcacctgagcctgggaggtgggggctgcagtgagcggtgatcctgaagtgtcaacgt

SEQ ID NO: 651249 - DNA, 538 bp, Homo sapiens
  misc_feature (89)..(89): n is a, c, g, or t
  misc_feature (208)..(208): n is a, c, g, or t
  misc_feature (261)..(261): n is a, c, g, or t
gtgatgttatcccaacaccaagtacacggctaaatctgacattattgatcttttctccctctaagaatatctttgtaggccataagtgngagatggcagatctcctgagcttcattcagtcctttatggaaatatttatgaaaaccctactgtgtgctcagtagctatcagagttcttggcatataaaagatttcaaaataaatttgnctagtattgctttgggggatgaggacttggtgatatcttcctctccccaaaanaaaaagtggtgtgtgtgtgtgtgtgtgtgtgtgtgtgtgtgtgtgtgtgtgtgtgtgtgagagggagagagagagagagagagagagagagtgtgagagtgtgtgtgtatacagagagagaatgtgagtcacagtcttatctttatcttctctcatacaatgcacgctatgtggaattgtagagctggaagtgatcttagctaacattctcccaatctcctacccaatacaggagcgtcttataacaataaccttcatcagagggtggaccgctaaa

SEQ ID NO: 651250 - DNA, 651 bp, Homo sapiens
tgagcccccccccccccccccccctcgatatgagatacaaaaatccccaacgaaggaggatatagtctagagtttccttatacgtggtttaatttcgttttatggagattggttacggtaattgtctaactagaaggcgcctccgacgtggttggttattagttcaaggacgcttttgactcctcctcgttagccggtgacgcttccggatatggtgtattatagtcttttacgttgaggtctcgtatctctatagtgtccttctattcttcttcgtcgtcttctagcgttacgtcgtagtctaaatccgcagaagaaggtttaggtactttttaggcttgagctaactcctatagcgtggcggaattatctttcggttccggcgactccttgtcgatcttaaaatagtccggttatggttaggagtatacgggggctacgtctatatcctcctagggtacttatgtctccggcttcttctcggggttccgttctgaggaagacggttctagattataggacattggagccggggtatcttcgtagtgttccggtttcgagcgcacccgtgacggctcctagttttgtatgggctcttaattgcatggatcttaattataatttagggcctcccgggcctcctagatgaga

SEQ ID NO: 651251 - DNA, 299 bp, Homo sapiens
agcggatccagttcctgtccccggcaggctccggcccagaccaggcccccggcctctcaccccgacctcaggtttccgccacagcccccagcccaggccctggtacacgcgtccggcccctgtccgtccgtgccctggcccccacgccgactcccgtccctcagatctccttttctggcgtcccgcgacgaccggtcccgaataggcccccgtgctgggcccttcttcagctgggctgcgcacctactccttggacgtagacgctgccagctgctgctcctgctgcttcttccggataa

SEQ ID NO: 651252 - DNA, 308 bp, Homo sapiens
ggctaccagcgcgttgcctggccactaagagcagccagagtgtgtggctgtgtgaggcgagaggggccaggagcaataaagcaaatcagatgtgggttctagagctgggtcgacatggtggcagggccagacaaggcccactgaaggacccatagggccctgtgtccttcgttaattcttctccggtcggtttctgttcaggacagctttaggggcaaattccagcttgtccttaaggctcaccacctgggtgtggtccttgcctagcagctcatccagcttgcggtcctccctgttcggtttatact

SEQ ID NO: 651253 - DNA, 717 bp, Homo sapiens
ggccgctgccgagttacgagtcggcgaaagcggcgggaagttcgtactgggcagaacgcgacgggtctgcggcttaggtgaaaatgcctcgtgtaaaagcagctcaagctggaagacagagctctgcaaagagacatcttgcagaacaatttgcagttggagacgataataactgacatggcaaaacacacggaactggcaacgtaggattacccattggccaaggaggctttggctgtatatatcttgctgatcactgacacttcttcagagtcagttggcagtgatgcaccttgtgttgtaacacagtggaacccagtgacaatggacctctttttactgaacttaaagttctaccaacgagctgcaaaaaccagagcaaatccagaaactggattcgtacccgtaagctgaagtacctgggtgttcctaacgtatcggcgggtctggtctacatgacaaaacatggacaaaagtcaccaggttcatgatacactggatcgcttcgcggagtgaccttcagaaaactatatgaacgcaaatgccaccacggttccctcggaaaactgtcttgcggctaagcttacgactcctggatatccctggaatctactccccgagcatgagtatgtgcctggcgcatatcacggcctcaaatcttcttctgaactacaagactcctgaccaggtgtactcgcgcagattatgggcctgctt

SEQ ID NO: 651254 - DNA, 1087 bp, Homo sapiens
ctaatcaggcctatcttcctgtatggtgaacggacacagcatggtcagcgtctccacaccaatctcagcaggtgtatgagagtgagaaagatgaagcatggattcctgtacatggtctatgcctcccaggcagacgttcagggatgcacacattgtccagttgtacaaaccgagaacaaaatgcagctcttctagaattgtttaaacccttaccaaggaaaaaaaagggatgttaccaactgagatcgatcagttcatccaatcacagatcatcatacagtagtgttcccacctaggagtgtaaggaagtagtgtttgtgtttcaagcagaaaacctgagctccaagtgagcacattcagcttcggcaactatattatttactgtaggctagcttgtacacaaattttaccagtttaaaaataaaatacttagcattctaagtagccaataaaatagaccttcaagttatgtgaatgctcttacactcactactaggaccttgtaattccagcagtaatttacaggctttcagagagaccctgagtcttctcttcaggttccacagaacccgcgccttacgggtaaagttactactcagctagcgagatctccctaagaggatctctaggactggagtgtgacgcgcaacccccggcacaacgcatatggccatcacagacgcgacctatacgcagggtaaacgcgctgtgtgagcaccacggcactgatggcaacagctgaaggtcctgaaacctacaagaccaaaccaagtcctccccaatgcagggctaacatacagggagagacggcccctcgcaagtacacaataaagaacacactccacagggaccgtgagacaccaccaacaccaggaccaccaccataccagaccgcgacacaaagggccccatcgcgaacacggtggcaagaaacaaaacaccccagaccaacacaagcgaaaaaccaccgcacctcggcagccggaactcaaatactgtgcaccagcgccaaccctgcgatcaacaggacacccgtccctagcctcaacaacacagccgagataggacgacgaccacacggtgaagc

SEQ ID NO: 651255 - DNA, 342 bp, Homo sapiens
ttttttttgagaaggagtttcgctcttatcacccaggctgaagtgcaatggcgcgatctcagctcactgcaaccttggcctcccgtgttcaactgattatcctgcttcagcctcccaagtagctggaattacaggtgcctgccaccatgcctggctaaattttgtatttttagtaaaaatggggttttaccatgttgtccaggctggtctcgaactcctgacctcaggtgatccacctgcctccgcctcccaaagtgctgggattacaggcatgagccaccgtgcccggctgactgctgacttttaaaagaacaatttcattaaggttgagaagttaataat

SEQ ID NO: 651256 - DNA, 1126 bp, Homo sapiens
ttttgttggctatgtggtgttgttgtgttgctgtgcttgtcttgtggtctgggggtgttccgtggttgtcatggttggtggtggagtggcggggttgaatggttatgttcagtgggggtgcggtgtgtggtaactagtgcaggtgtagtttggcgctgtgggtggtgtgttggtgccgccaggtagtaggcttggggggagtgagttaggtgtgggcaggtcgcctatgtggtggctatgaagttgtgctgtttggtcgggttgattgtttgtgtatttgattttggttgcttgtggggagggaattattcgtttgcgtttgggtatgcgtggttggggcttcgtttcacatgtctcaggttttgtaaggtgcttggatagagagggtcttgtataatttaacgtggggtgatatggtatggcttggataaggttgtccgatagatagttttgaatgttcaattggtgaatgagggatgaatggtagcgcctgggtaaatgtaacgtaattgagtgagcattattgtgagcacaggggaaagcgtgtagtggggagtgcaggtgggtgcgcggaaaagcgaagctcgcttgagcatagttaagtgcaattttgttgttgcgtctcataaattatctgagatgtatatttcttcgttggtattgttgggagaaatgaacagttttagtagatagtatttgctggtaggtgttgtgctgcttccgtgtgaggagtatcattatatgatgccgtgctgatcagttagcgtgtctgcgtcatgtggttggtggtcatggaggttgagtgtcttgttggtttggagcgagttttggcttgccagtccgcctgatagacatgggtttaaaaagtgtatgctaagtataataagctggatgaaagtatggagatgttgtgaatctctctaagaattgtatgcaatctgttgaaaggttatgtgttttatttacctgactatatggatagttatagaagtctaataatgttaagcatccagtaagttattagtatttttgtacaaatgctgtgtatgctgtagatgtctgtattattgagggtcaactcgggattttaagttccataaattaacttgtatccggatctcgtata

SEQ ID NO: 651257 - DNA, 793 bp, Homo sapiens
ggcttccggttctgacggacgcttcggccgtaacgatgatcgtgagacatcctgctgtacgggacgttgtctagatggacagtgccggtggcgcgctgctggatacctattaatgctcgacccatgtaaggactcgcatgatgttggggaggagtccagggcacgccctggcaccaggatggaccagcatcgcgggcaattcttgactggagtcctcagaatactttcgtacctctttcagtcgccctgtggaagcatcttcattgatgtctgcatgatgagtgctgctcagagtctcttgaatcccgagcgatgagaccaggaattcactttcccggttgatgccgcagtctctgttgcctccattcctgatgacttctagaatgtttctgatcagaaaatcagacaaccttcccagaaggtccaagctcgtggtgtggtgcgaaaacgtgttcgccgaggtgtgcctggttgcccaggtgcacgtccctgctctacaaagatgagtcgcgcttgagtctctgagatggcaatgcttgtctactgacaggggctccgggggagcgtatatgtagcggggctgtgctgaccgtttgcttcccctgtggatcttcgctactcgttttctatcccagagatctgagcccaagggtcggcttgtagttgaccccaggccgggttttgggccttccgcgtgtctgctgagtcctgccctctgtgcccgcggggccctgttgcgcagtggttccctccccggttgtgttgcccccggcgtggttaccttaggttggag

SEQ ID NO: 651258 - DNA, 115 bp, Homo sapiens
atgtatgggacggggtattgctatccactctacttatggatggcatctgaccccactgctgcaggagctcacgaaggatcactgggacacactggagttcttcctgtgcggcatc

SEQ ID NO: 651259 - DNA, 328 bp, Homo sapiens
aatgagaaggatgaaagaggaaagtgaagtgatacacacacaaaggacacccagagagagagagacaggacttaactctctttgcaggaatagttaaagtaagaaacacctggactgggtgcggtggctcacacctgtaatcccagcacttagggagcccgaggtgggcgaatcacctgaggtcaggagtttgcgaccagacctggacaacatggtgaaaccccatctctactaaaaatacaaaaattggccgagcgcggtggctcacgcctgtaatcccagcactttgggaggccgaggcgggtggatcatgaggtcagtatagata

SEQ ID NO: 651260 - DNA, 185 bp, Homo sapiens
  misc_feature (154)..(154): n is a, c, g, or t
  misc_feature (167)..(167): n is a, c, g, or t
gacttatcgacggttctccctcacctgtctttaatgtagtgtgacaattttccataataaactacttaaagagaagcttggtcaagaatggaatgaaatcgcaaaaaaacaaacaaaaaaatttactgcttaaaaaaaccaacactttcaccanattttatattcanaacaaaaccacacgggca

SEQ ID NO: 651261 - DNA, 445 bp, Homo sapiens
attgactgtgcaaaagaggaagagaaagaagtagaagtaaccagacatctgctaatcgcgtgccatgtgccaggtgctttacccaatcgctgcatgtgtagctcccaatgactctgataaataagatattgtaatatctactttatataggaagaagaatgaaggcactgagactataagtaaccacctccaaagctgggatttacaactcgtatctgggattcagaggcctgtgttctttccactacacatgctgtgccctatgattcaaggcagaatgtgataaatccttggggagaagctacagcaaggtagaagaggaagagaagagattgctccttgccctgagggtaaaggtacatgacaaaggtaggtcttagaggtcaggaaggcttacgtttgacagagatggcagggtgcaaaaaattgcacaagcagagcagaa

SEQ ID NO: 651262 - DNA, 1523 bp, Homo sapiens
gttcttttgggccacatcgtaagaaatctttgtctagccaaaagccacaaatcaatttctccatttccggcttctggcacagcatgtcaccagtgtcacacatgttcatcatttgggcactgttcatcctcaatttgcattcaacattgccactcgtcaccacatcatgcatcatttgcacattgcatgcacaacacattcagtcacacatagttcaatcatatttttcaacaagtcagcccaacatctatgccacatcttcatcatcatcacatcagcagcacagcactcagcaacacatccccgcacatcatttcatcttcctctatcactatacgtcacttacactcacacacatctcgagtcatatatacaggcaattctcggctttcgtcccagcatcacaccccattacaaccattgccccccagctcatcatgggtatcataaatactagggcctaagggtagcacagaacgaatagttgggcaaacccattttcacacgcaatagctgcaagcccagcacagttcacattcaccatcaacccaccgggcctcatctctctatcacagtggtacttctaccacactctggcaacactatgcgcgcaatccatacagcgcccccccagtactgtctgatctccttatccccaagattgttctatataaccgcaccgtagccacaatcaatactagcacccactagctctacacgtcattatgtcccccacaccatcattgtggcgcagcaacacacaacttccacaacagtgcgcacccacaagcaacatttccaacaaggcaagcttaacaccaacaatagcgctcacagaccacactcttcacttcaggcaccaaggctctgggtccccgttggaaagagtatttctaacgtaccacaacaccccacacatttcagcccccaccactgggagccaatttctcacaggaaaacagcccccacacccccttatacagccaagagctatatcccattaaggcaggattgccacttccatatacaacttaagtttaaatttaggaaaacaaaactaaggggataggaataagcctaacgagctacacgatagaccacgttactacattaatattacatcaaagctaccattcccgacagcagcaaaccaggccacgctcacccccctgccacaaaccagcctacccaccaccagcgggcacaccaaccaaccgcgcctggccaacaccaacaaaccaacctgtccacagcgagctcacgaaagcccacaaacacaacaaagacgcggcgaaaaaatataacaccaagcccaacggcaaacacaccacaagcacatacacagcacaacgcaccgcaccatcagacccaacccgaccgagctcaatcgaacacactcacaacacaacatcaatcaaacaacacactaaacaccaatacaccacaacccaccccaaaactagccccacaacacccacaacaacaacaccatcaaggaacacacccaacaccacgcgacacaa

SEQ ID NO: 651263 - DNA, 166 bp, Homo sapiens
gaccgagttctctctgtggggctggacgttgcacctcctaggccccagaaacgagtatcagggtcaggtcctctgtgtgcattcctgggggtcatgtaccagctgtgacgacgtccaggggttgggccgagaagcagacacccttggggaaactggctctgtccct

SEQ ID NO: 651264 - DNA, 608 bp, Homo sapiens
ctgcaatataagcaatgactgaaaataaagaggagaatatcactgaaacataaggaacacctctcttgctgcaaatttcgaaaactggcggtgccttccgttgtacagacatggcgtataatgttcttgaacaactaaataacgaggatattcctgctgtagcagtgaaaaatatcagtattgcgttaaaagcagatgcgaaagtacatagcccaaagttctgcaatgcaacaacccaaggactagaataacctgttcctactgaaatctgcctataatcaataccgccgcgacaattagtcctaagtctccagtccattcctgtgccttttataatggcttcatacctcttttcggaaataccaggaaaatatgatagtagtcttggatcgccactgtatatgttgatgcctaccgaaaaaatcaaaaaaacgtaagatatcagtacaatggaaaatgtcctttttgtagcagaaggaattgttttccttggatttatagcttccccactagctaaaaaagtcatctcaacaccgctaaacgcaaatgttgaaattagcattactgatgccgtagctaaaaatcggccttttgggcctgaaatgcct

SEQ ID NO: 651265 - DNA, 106 bp, Homo sapiens
taagaccttctgtctggaaacagccagaagtcacaaattattaaaaaagttttttgtctgtattttgagacaaagcctcactctgtacccccaacgtctgcagtgc

SEQ ID NO: 651266 - DNA, 454 bp, Homo sapiens
  misc_feature (32)..(36): n is a, c, g, or t
  misc_feature (65)..(65): n is a, c, g, or t
  misc_feature (101)..(101): n is a, c, g, or t
  misc_feature (107)..(107): n is a, c, g, or t
  misc_feature (185)..(186): n is a, c, g, or t
  misc_feature (189)..(189): n is a, c, g, or t
ggagacaccattgtcggaagctccccaaggcnnnnnggcgggggcgcttgggctgggcctgggcngctccagccgggttaacgccgggccttcggagcgcnggccancctgggaagctgctcaaggttgggtaagctgctgggaaaactaggtcatatgtaattcacatgtcggtcacacgtcannaangttgaggaacggtgtgtggaggctccagggcctgcctgttccaggtctatcactggtttctcccttcactctaaacaggccaaacgtaccaagaaagtcgggatcgtcggtaaatacggggacccgctatggggcctccctccggaaaatggtgaagaaaattgaaatcagccagcacgccaagtacacttgctctttctgtgggcaaaacccaagatgaagagacgagcttgttggggatctggcactgtgggttcctgcatga

SEQ ID NO: 651267 - DNA, 137 bp, Homo sapiens
agcagtcccctgcctgtcagctgcgtgctgcctaagccctcaccctgagatgggagccgtcttcccagcccaccatccccatcgtgagcctcattgctggcctagttctctttggagctatgttcgctgagactgtg

SEQ ID NO: 651268 - DNA, 103 bp, Homo sapiens
ctgcaggcatgctcataaggaatggttaaaaaaatgtaaaggaactcggcaaatcttacccctgccttgtttaccaaaaacatcacctctagcatcagtggta

SEQ ID NO: 651269 - DNA, 109 bp, Homo sapiens
gatcccccttgcattaccggggagggaggagccttccctcaggcagttggggtgaagccccagaacttgctgcaggtgcttcagaaggtccagctggacagctcccaca

SEQ ID NO: 651270 - DNA, 720 bp, Homo sapiens
  misc_feature (32)..(32): n is a, c, g, or t
  misc_feature (93)..(93): n is a, c, g, or t
  misc_feature (99)..(99): n is a, c, g, or t
  misc_feature (130)..(130): n is a, c, g, or t
  misc_feature (143)..(143): n is a, c, g, or t
  misc_feature (146)..(148): n is a, c, g, or t
  misc_feature (150)..(150): n is a, c, g, or t
  misc_feature (152)..(152): n is a, c, g, or t
  misc_feature (188)..(188): n is a, c, g, or t
  misc_feature (191)..(191): n is a, c, g, or t
  misc_feature (197)..(197): n is a, c, g, or t
  misc_feature (201)..(201): n is a, c, g, or t
  misc_feature (212)..(212): n is a, c, g, or t
  misc_feature (215)..(215): n is a, c, g, or t
  misc_feature (234)..(234): n is a, c, g, or t
  misc_feature (238)..(238): n is a, c, g, or t
  misc_feature (267)..(267): n is a, c, g, or t
  misc_feature (348)..(348): n is a, c, g, or t
  misc_feature (356)..(356): n is a, c, g, or t
  misc_feature (360)..(360): n is a, c, g, or t
  misc_feature (362)..(362): n is a, c, g, or t
  misc_feature (430)..(430): n is a, c, g, or t
  misc_feature (435)..(435): n is a, c, g, or t
  misc_feature (438)..(438): n is a, c, g, or t
  misc_feature (448)..(448): n is a, c, g, or t
  misc_feature (481)..(481): n is a, c, g, or t
  misc_feature (489)..(489): n is a, c, g, or t
  misc_feature (645)..(645): n is a, c, g, or t
  misc_feature (710)..(710): n is a, c, g, or t
ccccttcctggcattctgttaccagacctcancctggcttggagggcccaggtttccttgttaggccctgcctcgcaccaggcaacgctaacncaggangggaggcttaggctaaggcacatttacagtngagggcccacgcnatnnngngntcacgttccaacgctgcagtgcccaccatgtgaganttncggggncgtnggtgcagccantgngccgtcccttctacaagcnagangtgttccctgcccgctgaggacggaaggngactcatggggccagatcgcagccctgactgcacactcccgttttggcaggtaactaaaatttgggggggatccccaagtntcatatgnacanancctgctgcccctcctttgtcccgttcttccttccatggcaggggctatgtgggcaccgggcgcttttnctggnagntgcgcttgtngtgcagacctgcagcacagccaccagcagcagnaccgccangttgacagctgaccagaagttgacccgctccaagttgccctcttgcaggttgcggtcacgtgcctcgaaggcccgcagtagcgtgagcatctggatgctgcgctccagccgggtccgcatggtctcaatggactccttgatgtcctccattttaanatccagcatctcctcgggctccacagcctctgcacatccttcgacctcctcgtcatcctggaggntgtcaaagat

SEQ ID NO: 651271 - DNA, 647 bp, Homo sapiens
agcggtgggtatcctgaggcgggatgtgcgaggagtggggactggagctctggagcactatggggagcggacgtcctggaggcttaggactagtgaagccgggtacgaggtagtggggacgacgtgagcaaattcggtggatgccactgaggttggggtgcggtcacgggtggatctttgggttagggctagttttgaagcttgagtatcctcacgacatggcagctggattcctgagagagagtgatctgagagagtgacgaagacagaagccccagtgtcttttaagaatatggtgtaagatacttcttcaagattggacagctggggaccttcttcttgattacccttaaaccaacttgtagccatagagacacctcaacaaggttcccatttaagtagaagtacgtacgttgattttctgctcacacactttcctgaccttgcaaaccatgtatggaaagtgcccgatctgttgggaaaggtggagccgacgcagccagagccctgggcgttcacccagagcttccacgttcccctcgctttgggtcaccgtcgaaaccaacagtaacgggagcggcagtacgcggaaggcagtgtaaggcaagtaggcagtgggaaaacccttacaatggacaatatacaaa

SEQ ID NO: 651272 - DNA, 373 bp, Homo sapiens
gagtataaaaggctgattagagatcacgcacatcttctcaaaagtgcactcctgggtctagagaagcagtttcagataacatatgggcggggctgggctgatgcttgctttgagcccacaggagctccctttttgaattgtgtggagaagtgtgttctgatgaggcattttactatgcctgttgatctatgggaaatctaggcgaaagtaattgagaagattagaaagaattagccaaccaggctacagttgatatttaaaagatccatttaaaacaagctgttagcgtttcgttaagcagtacatcttgtgcatgcaaaaatgaattcaccccttccacctcttttttcaattaatggaaaactgaaatgag

SEQ ID NO: 651273 - DNA, 1218 bp, Homo sapiens
tttcgtgttttgtccgcaccacccgcctactgatgtatgtgtgttgctgccgggtcgcccccctggtttgttagtagtttaggaattttatccgccgcgctcgtctgtgtgttgttgtttgtttgtctattcactacgacttttctctcgggttctttttttggtgtgggatgcgacaacacccctagtgttatgtgatgtgtgtcctcgcgtctgtataggagtgttttctcacacccaccagcatctggtgttgtgtcgcgtaccactattatcgtcacaccacgccgcgtcgtcgttttgtttatatctctctctcgccgcgcgcgctctcgctgctctatagattactcatcgcgctgctctctagatgagtgggatgcgcgcgagcgcgcgctgctgtgcgggtggtgtccgcgagattatcttctcgctcctcgtctagtggtgtgcgcgctcgctgttgctctctcacgcactccaccctcgctacgcgagaaagagagagtgcgcgcgcacgcgcgcgcgctctctctatatatagagaaatatgattgattctcacacgcacggcgctcatctcgcgcgcgctgctcgcgctgctctctctcctccacgccgctcacacacagcagaggcgtgtgtgtgcgagagagagagagagtagactcctctctctctctctcacacacacaccacacatatattattctctctccgctcacacacacagatatactacacgcgcgctgtgtgtgtgtctctccgcactgctctgctgctgtgtgagagagacagactattactctcagcagagagagagcgccccaccacagtagagagagaggatatctctcctctccatcccccgcacagcacagagagagagagagagagagagagagagaagagagagagagagcacacacacaataggtgtctctctcgaggggtctctcccccgcgcggagacacacacagagagagagagattgagagagaaagaatactctcgcacaccacaagaggagaaatatttataaatatgatgtgtgatttcgcccaccgtgtttcccacaccctcctgggctcctcctcccccccaccacgggggggagaatttctctcacacacccccgggggcgaccctttttatattttttttgtgttgggggggttattttctccacaaaaagtgggggcgcaccaccacacaca

SEQ ID NO: 651274 - DNA, 115 bp, Homo sapiens
ggatttgctggtgcagtacaactaggcttaatagggataccttagaacttaaagtaaaattaaaacaaaacaaaaatcaaaatatgtcagcaaagaaaaaacagtaacaaaaaaa

SEQ ID NO: 651275 - DNA, 843 bp, Homo sapiens
tgtgtgcacctgtctggatgtgcggactcgcctgtgagcgtattcaatcttatgacggattgctctttcccttgttcggcaaggcgaatgtctgtcctatacctgtaacacccattttatcctggaaaggtggaaaacgttgcctcaattcttggaggttctacaagtaagactctgggaatacggacttcttgagccgaagggctagatgctgaaatgagtgaagtcatttggggctatgaggatggaaaaaaacgtataatgtatttaaacgcttgttgagaaagacataacattgttggagactccaacgggcagaacactacaccgtgaaagtttgttccctctgaaattcatgtagcagtgaacttgtgtccccagtgtggcagtatcgagagtttaggccttcaagaggtaattggatcacggccctcatgagggaatttatcaacctaatggattaatggattaatgaatcgtcatgggagagatattagtggtttcaaaagcagagaaagagagacctgagctagcacactcctccccttcaccatgcgatgcctttcactaccggtggcaactctacagcgagtcgccaccagcgatgagatgctcatcagatatggatcctcaaccctgaaaggcttcatctccatactgcttttgaaataatcattaaaactatacatttaacaagatcggagtcatatggtgcgcatctgccagtacagcaataatacagaggactaagcaccaagggaatgagcctagaccaagaaaggtactaccaactgggtggtgaagcactggtgaacaggtggaagaattaactccagcactttt

SEQ ID NO: 651276 - DNA, 284 bp, Homo sapiens
tttgggttttttcccttagcaaagggttttccccctttttcccccttgtttccaaaggaaagatttcccccccttttacggtggattggttttccctgtggataccccggttttgggaaaaaaccttccttttttggttgaaaaacccccgtgattagaaaatttttttgtttttaagcctggtttgggattccggatatacctgtttttgtaatagttttttttttcccaatgcttcccctaatactggttttttgtttattaattttttttttggcccggga

SEQ ID NO: 651277 - DNA, 322 bp, Homo sapiens
  misc_feature (73)..(73): n is a, c, g, or t
atcccgtagaagagtgtgccatactcacttgaggatcttccttacagtctagcattctagaggaaggcatatnacagttaaactccaccattttgcctcttaatgtgcatgcttgagctcactcacccatctcttcagatcttattgggaagctgctgatcaccagttgcaggtttttttctatctatatagagactgcctttccctttcactggctgtgaccaattactattttagagaaacatttaacaacctcctgtccatcacctgatggtcacctgacattcctggtcaggtggaaccctctcctgccctgctcatg

SEQ ID NO: 651278 - DNA, 257 bp, Homo sapiens
ctcagcagctcgtcatccaccaggtgggtgagcacaccatttgatgactgctgatgattgtcgtgaaatataataacagtggaagtccagaattgccccgaagtccagaattgccccgaaggtccacgaacttgccccggaagtccagaacttgccccgaaggtccagaacttgccccgaatgtccagaggttgccccgaaagtcaaggatattgccccggatgatccagacattgccccagagatccaagaattgc

SEQ ID NO: 651279 - DNA, 130 bp, Homo sapiens
  misc_feature (118)..(118): n is a, c, g, or t
acttgttctctcgctagcagatgatacacagaataatttctgaaaaactgaagagcaattttattttagaaagtaatgcttaatgcttacacgtcgaatagccacaaacaagcatatnatattgaacaag

SEQ ID NO: 651280 - DNA, 245 bp, Homo sapiens
  misc_feature (236)..(236): n is a, c, g, or t
gtctgctctagaggacccccacgcgcaccgcgagtccaaaattaaaaattgtgtattgagggatactataaagagaaccacagaagtgggagaaaaatattttgcaaattatgtatctggataagggattaatggccacaatatatgaagaactcctaaactcagcaacaaactgattcaaaaatggggaaaggactttaatcagacttttctccaaagaggcacaaattgaccanacagacaca

SEQ ID NO: 651281 - DNA, 495 bp, Homo sapiens
gctttgaacacacagcgaaacgaacctacatccgcttcattgacgcttcgcatacggcgcactttcggatcttccatgaacactactggtttatggaggagatctcctggctgccgagcgggctcgtgcagaccaagctgcgccgagggttcggtcggctgttgcgccaggtggtcaagaagcgcagaccggaggggatcgttcctgcatgggggagcgcctattgggcgctcacgcgcgagtgctgcgagttcgtgctcgagtacatgcgcgagcgtcccgacgtggtgcggtgggtgcgcacctctttcgcgcccgacgagcagttcttccacacggtggtggcgaactcgcgattcctgcaccgctcggacgggttcgtgccgtaccaggcgccctcggtacacctgctgtccaacctgcacctgattgcgccggggctgcgcaaggatccacaccgagcgcgattacgacgatctggtcgcgtcgccgaaa

SEQ ID NO: 651282 - DNA, 277 bp, Homo sapiens
ttagatcgagctcggcccgatacctaattacgcgggtacgcagtaaaacctgggtctgaacgtcaaactcttcgcgattgactaaatccatgcggctgaactgcgcctgcaatacctgacggattttcttttcggcatcttcaccaaactcacggatccctttaggcatagattcgtgaacctggcgggcaatttgttcaatttttttcgggtcaatcatgttatttccttttctcgaaggaggtgcttttccttagtgtaatcgctgatgctgttt

SEQ ID NO: 651283 - DNA, 157 bp, Homo sapiens
tggctgcacctcatccctccagcacgctgtgccccctcaagcgcaccgtgtagaatatcatggatcctttgttcaggttctcttgagatgatgaagtgaacgatgtgcgcacgctgctctcaggacgttcgccaggcccttgcctatccccgtgagc

SEQ ID NO: 651284 - DNA, 441 bp, Homo sapiens
ggctcgtgcactagtacggcgcagttgctggactatcggttacggccgccctatttatagctaattttttacaggagatggagtctcactctatatgcccagtgctgcagtgcagtaggtgcaatcttggatcacatgcaacctactacctcccaggttcaagtaattctactgcctcagcctctgagtcgctagggcctacaggtatagctccaccaaaccctgctaatattgtatttttagtagagacagggttaggccatgtaagtccgggccggtctaaaactcctgacctcaggtgatctgcccactttggactcccaaagtgctgggattacaggcgtaagccaccgtgccccggacctctaaaaccatttttaagtatgctgcagagtgtagtacatatacactgatgtgcatacaatctgcagaactcttcat

SEQ ID NO: 651285 - DNA, 956 bp, Homo sapiens
  misc_feature (531)..(531): n is a, c, g, or t
gccgccaacatgggccgcgttcgcaccataaccgtgaagaaggcggtccgggtcatcatagaatatgtactacactgcgcctgggcaacgacttccacagcgaacaatgcgcgtgtgcgaggagatctgccattatccccagcaagaaagctccgcaacaacgataccgaggttatgtcactgcatctgatgaagcgaattcagagaggcccagtgatgaggtatctccagtcaagctgcaggaggcaggacgagagaacatggacgagaccacattatgttcctgaggttctcagcctatggatccagcgagacttatctgaagtatgatcctgacactacagcgaagagtgctgcaacgcttgtcggacttcggcacgtgctgtactcaagccttcatggtcactcgagcctactagttgaggtagtgaactttcaaatagcgcctcgtggagaccatgtatcgaagtttatgtcctgctagtcgctagtaattgcatttatccacattagaatcgttggtgaccaacnagcctagaaagaggagcagctataaccaggtacgaagcgttgtatgtaatacgctgggtgtgacgcggccaaagggaggaccaatggcactgtggcaccgtgtcggctcccggatagacgctgtgtgcactcctagacccacctagggtttcccttgtgttccggacaagctgagggccaagcgtctatcttcccgtggtgtctatcgccaataaaaaggccgaggttgagctgctttcccatccgcagaaaagaaagctccaggggggttaaacctcggggagtgtacccgatctccgcgagagaaaaaaccatgggggttcggtttaaccccaaggccaggggaatccctgggggcccccagttccccccaatgttggaagacggccagcaggaaaggcgcggcgtctatttcaacaattccg

SEQ ID NO: 651286 - DNA, 430 bp, Homo sapiens
acactacaaaggttagtgtgcatacaaatatagctgtcctttcagtagcctcggcacatagcataggcgctagtagaataaccttctgtagcagcaggtacggaaagtatggagcactcaccagtggtacagagcacattaacgaaaagacatgagagtggatacggctacttaaatgcaaaatgtctaggacagaactgtaagttcagttcagttactaggaagcagacactagaacttgatataacttccaaaagcgctcactcaagtagtagtccatattattctaagtgacaaaaaggtgctaagttatttacagatatcatggttgtacagtaccttttagatctgccatttcggtttcagattgtccattacgaatgaactgcactgaaattctttacctgatacttacgcaattcagttatgc

SEQ ID NO: 651287 - DNA, 160 bp, Homo sapiens
atgaccccaaactatgccgcaaaccaatccaatcagtaccacttatgtctgagaggaataacagatgtggaaccttatatctaagagtaataacagtgggagcatgatctgtaagtcatgtgcgttactactgtcggcttaatattactatttgcgcgga

SEQ ID NO: 651288 - DNA, 128 bp, Homo sapiens
gcagactgaggagcttatggtgtgggtgatcacggcccccgcagatggggctgatggagcagccccgttcttcacctggcacaagagcaagaagacggacatgctggcttcgtgaaggagatcctggg

SEQ ID NO: 651289 - DNA, 967 bp, Homo sapiens
  misc_feature (380)..(380): n is a, c, g, or t
  misc_feature (420)..(420): n is a, c, g, or t
  misc_feature (426)..(426): n is a, c, g, or t
  misc_feature (442)..(442): n is a, c, g, or t
  misc_feature (451)..(451): n is a, c, g, or t
  misc_feature (466)..(466): n is a, c, g, or t
  misc_feature (520)..(520): n is a, c, g, or t
  misc_feature (629)..(629): n is a, c, g, or t
  misc_feature (644)..(644): n is a, c, g, or t
  misc_feature (646)..(646): n is a, c, g, or t
  misc_feature (649)..(649): n is a, c, g, or t
  misc_feature (652)..(654): n is a, c, g, or t
  misc_feature (662)..(662): n is a, c, g, or t
  misc_feature (666)..(666): n is a, c, g, or t
  misc_feature (673)..(673): n is a, c, g, or t
  misc_feature (700)..(700): n is a, c, g, or t
  misc_feature (703)..(703): n is a, c, g, or t
gatgccctggcgggcgtagtgcagttgggtgacacggcgtcctgctttggcgcgtttggtgttagtacgccgctaaaacgcagttcgtcgaggccatcatctgccagccgcgctttagtgtaatcggaactgcgcacggtaagttcttcgagtatcgccgcgcgcatcgatccacggctggcgtagttttgccagcccttgctgcacgttaatggcaatctgcggatcaccatacgggccggaggtgtcgtagaccggaatcgcttcgttttcttcgtactgcggctgttctttgctaccgccaattagcgtcgggctaagctggatctcacgcatcggcacgcgcacgccggggtgtgtgccagtgatataaatgcgtnttgagttgggaaaggcggtgccttccagggtgtcgataanaatgtngggcccgggcgcgtangttcgcggncgggtcagttatgtngcagacatagctcattccaaaaagttaaggacgtggcttgtcagacgacggatngaagcaagagacgatcgccgcaggggcgatgcgatacgcagattaactcttgttccccttcgcaggtataagcctgatcaggttccgcggatcccgaataaacggtctnagcagtaaggactcngnacngannntaagcccngaanggggcantgaatgtacatacgcgtaaacaggcanacntcaccacaggatgtcagagccggcggcgtcagccacaaagatcgctatatacagacaagggcacacaggcgccgcgagcagacaaacccgcgaacccaggaccacacgatcgagcggcccaagggaagcagaacccaacgagaatagcagacggaaaatcccgacacaaatcgcgacacatagacagcgcacacgcaacggacatcccgtccgacgcactcgcccccccaagagggacccactcacagacccgaaagcgagtgg

SEQ ID NO: 651290 - DNA, 290 bp, Homo sapiens
agtagatctggttgtgtaaatataagacgagactgagacaacacagttgcggaatcagctatgacttatacttacatcagatctttctaatatctactacttgggtttcctagctccctaacacactcctataacctgtattatgaattacatattacaagtcataaatgtgcctatggatatacagtacattctagttggaatcgtttactctgctagaatttaggtgtgagattttttgtttcccaggtatagcaggcttatgtttggtgcttcttggtgcggtcgtt

SEQ ID NO: 651291 - DNA, 130 bp, Homo sapiens
ctaccccgattctgaggatccccagtgacggaatgaacattgatccgatcccatggatggagaagaaaggtggacagccgtgttcgtctctcatgtcagcctagggctgggaacagtatagtgaggactt

SEQ ID NO: 651292 - DNA, 284 bp, Homo sapiens
  misc_feature (256)..(256): n is a, c, g, or t
  misc_feature (263)..(263): n is a, c, g, or t
ggtatggcacggcatgatacgcttgatagagtcaccttctcctgcaggaatgtacctatcctgatgtttctctgccttgctgtggagtggacgtctgcaatgttgatcactatgatcagacccaaaccagggctatgcaccaaagagaggctcacctgtaccactgaacttacggactcatgtaacacagatattgactgcacggaactccataagtgctgcttttacgcctgtcaaaacaagagcatggatcccnttttatncagaagaagtgcatggatccc

SEQ ID NO: 651293 - DNA, 344 bp, Homo sapiens
aatcttagagttattagatacaactctaagggtgggtgtggtggctcacatctgtaatcccagcactatcagtaggccaaggcgagtggataccttgagcccaggagttcaagaccagcctgggcaacatagtgaaaccttgtctctacaataaaataataaattttaaaaacctcaaacaataaaaacggtgcatttagtacgaattatgatctgggtacacagaagagactaaaataacagaacttagagacccaggactttatcattaagagaagtgttgagtgaaccaaattttaattgggtgattgatcttcatatgagtatcaaataactgaaaagag

SEQ ID NO: 651294 - DNA, 946 bp, Homo sapiens
aaggtgtgtgtgtgtgtgtgtgtgtgtgtgtgtatagctatgtcttctcctatagaatattatagtggaagagataagaagggccttcacttataaaactatcgtgtttataaagagagaagtattcttcgtgatatatgagacactttacccatcatattatctgtgcgccaggtgtgttggaacgtcgcctataaggcatctgatcagggattatggtcttcccgcttctgacaattgacgatgagatgatcatcagaagcattctcatcagaaagatgtgatggtcatctcctctttgccgaagccatcctggtatgaaaccgaagaggagattgatgagaaaatcctggtggctctgttgtggaggaaactaaacattcccttgatggctctcacgtctatgatcagaagcactttaaattatatatttctcatcctataacgcttaatagtaggaaaggtttcttcaagcaggatcacagtgtagtctatctacatgctgaaaaatatagcctttaacatcatttatatattataacctctgtataatagagcataagtccatttctttaaaaatgttttccccaaaaccataaaaccctatacaagttgcttctagtaacaacacgtgcacaaagatgtctatgtcagctggaccattaacgtcgacgtccacgaagaccaaaaaaaacacaagcaacgacaacacaacaaaaaaaacacacagaccacaaaaacccacaaaccacaaacacaccacacaaaacacgaagaacaacacacagatggcgaggagaggcgcggcacgcgcgcgggaagcgcagagcagtaggccggtggggccgcgcccgcacacgggagaagaggcaggagccggccggggagagaggacgcccgaacggagcggggggacgaaccaaaaaaaacgcgggcgcggaccctc

SEQ ID NO: 651295 - DNA, 437 bp, Homo sapiens
cccatggtagaaggggcagatgggcaaaaaaaaaaaaaaaaaaaaaaagggcaaatgctgtgtgtagcccctctcataaagggcttaagctcattcaccagggaaaagctttcatgacctaatcacctccaaagaccccacctcttaatactattgcattgcagattaagtttccacatgaattttggagggatacaaatattcccaccatagaaaatagggaaaaaggaaaagtaaatattttttgggtctgtctgcttttgctcagtgtaatgtttttgaggttcatttatgttgttgcatgtattagtaggttgtatctattggtgcatagttattccattgtatgtatggaccacacttttcatttacctgctgatggatattgcattgtttccagttttgggttattatgaataaacctcctgtttccctta

SEQ ID NO: 651296 - DNA, 186 bp, Homo sapiens
cgcgcgacccacgccttgacgctgctctgccgggcccgcgctcctcctcttcccgggctgttcgctcacgcttgccttcttcccttcgctcgcggccgggggtctccactccctcgccccgctctcgttggtgggccggtgggtggcttttttcgggtccctggcgcaccctctctacttcccgcc

SEQ ID NO: 651297 - DNA, 155 bp, Homo sapiens
ccttggtaattttgggcctcccagaagctagtgactcacttactgttaacgtgtgggtgtgggggctggacatccttgggaacgccctgaggagttgctagaagcagggttcctggtctcctcggaggctgggccccccaccagtgcctcgtgcg

SEQ ID NO: 651298 - DNA, 1308 bp, Homo sapiens
  misc_feature (106)..(106): n is a, c, g, or t
gatgcttctatgctccgtctcataaaagaacttctttagcttattcactgaatacatctgcctcgtactattaaatccttcttctcctagtttttgcttccctagntccatggtgtgcccctttcttccctattcccatacactcaacactatacactactccttaactatctatatcactttcatgtaccgtactcatgcgtatatattatgacacattccgctctgacaccttattcctctagaaacgtactacttctaatgcactagagtatgcactttccattcgtgctcgctcgcgcagattcccatatcgatcactccgtataattcatatatgagcaccgaaagtgatacagatcgtattactcacttgcacacatgtaaactcgaatacacatattctacctttgtgacacgacgcaactgtgggagctagtactcgtaatagaagtgtacaagcctttgacatcatgtggaacgtgacctacggtacttatataatatatacgctcattaattacactccacgcccacaatatgaattctctttagaacacaccttgtgcagagtcatgggtgaagcgtcactatgtacagtttaggactaatgcgggaagttagatattacacacagaattttgacatgcccaccacattacagatcttcacatcaacatgtactcatccaacgatatgaacgttctttgcctatcttcaatagcagggctcgtttcctcactaacgaagcacgcggcgtttaaaaacaactagtagtgtcacatatcccgggcaggtactttaggcctaggggtccaaactttgcaaccccgtgttaacatcagaagcacggttgaagtggtgagtatctccctgagtccaaaaaagcctacatgacaaaatcttagtagcaagataaacagcgggtagtaaaacacttgtctgcaatgggaatcctactgacacttgatataactctccctaaccagttggtctttaggaaaactaggtggcggacacaggaaaagttagtagcccctgacgtcaagaacgaggccccatggtaattaatacagccacaggtggaaagaacagggcaaaacataggacgaataagaaccgacgctaccaatcgcgatacacccatgggacaaatagcacccatacagtaaccacggtgatgaacacaaaccaacagaagaaaagagaagaagacgcatgcaagcaggaaaaacagatgcacgaaccgcaggagcaagtgacacccaagtaaacccgtcaagacaatcacgacaagatcgccagagg

SEQ ID NO: 651299 - DNA, 282 bp, Homo sapiens
gccacttttgtgcatttatctttgttaggatcaaagcacaagctcaccatcaatgagcctggacaaaaagggaagctgactctcactgcattccttaaactgatatgtatatggggggggttaggaggcttaataaactttagtctgttattttgtttctgtttatacaaagaaaaaaattcagctttcatgggtctgatcccagattggaaaatatttctatatggcctgtcgtatctcgtggaaatgaaatcactgtgtatcacctagctacaggccaca

SEQ ID NO: 651300 - DNA, 712 bp, Homo sapiens
atggcacatgcagcgcaagtaggtctacaagacgctacttcccctatcatagaagagcttatcacctttcatgatcacgccctcataatcattgtccttatctgcttcctagtcctgtgatggccctttgtcctaaacactcacagcagaagctaacctaatactaacatctcagacgctcaggagaagtagaacaccgtctgaactatcctgacccggcatcatacctagtcctcatcgccctcccatccctacggcgatcctttacataacagacgaggtcaacggatccctcccttaccatcgaactcaagtatggtcgaccaagtggtactgaacgctacgaggtacaccgacgtacgggcggaccgtaatcgttcaactccatacatacttcctcccattagttcctaggaacctaggcgagctgcgactccttggatgtagacaactcgaagatagatacttctccgatgtgtgataggcccccctattcgttattatatacattaccattcatgcatagaaccgtatcgttgactactgtcgaatgagcctgttccctgcacaatttagggtccttaacagaaccagattgtcatagttcccaggtacgatctcaaaccaaaagccgactttcacactgtcatacactgagccgtgggtgttcatactacgggtcaagtgcctctgaaaatcctgtggaggcaaa

SEQ ID NO: 651301 - DNA, 141 bp, Homo sapiens
tcggcccaggtctatgttagccctcacatgccgtgttcaaagtgaggcaccaagtgcatcaggtacctgctgttcggatttaacttcatcttctggcttgccgggatcgccgtccttgccattggactatggctccgattc

SEQ ID NO: 651302 - DNA, 431 bp, Homo sapiens
agagcaccatattctcggacgctctaagccgtgtcgagcttcaatcatctccaccacacaggtacagcagacgctatatctggtaagtcgcccattagatgtcattgctggatataatacatacagagaacttgaccagtactttctcttgaattcagacctcaattttcaacactgtccactatcactagcggagcgaccatagattctagatcagagaccttaatctcgcgatcccctatgcccttcatgagagtcatacagccgaatcagcaaaatacaggagcttgttctagaatgcactagaaccaggttcaggaaagcatttaccaggtctccttaaacctctttcctgatgcttaccaacatgtcataagggctgtaactcttgtacctatcaaatacttactggaggtggggcacgctccgaa

SEQ ID NO: 651303 - DNA, 322 bp, Homo sapiens
gtgcacaatggacccctcgcattgtgcacatgtccgcagaccttgctgctgcttcaatgtacgcagtcgcatagacatcgccctggccatctaccatgtgatcatgagcgtccttgtgcgttcatcgagcactcagatacacgtgacccatgctgaggcgttctgcaatctctcccagatgggctacctcaggatcgctgatgtgatctccatcttgctgctcatcaccatgctcttcatcatcagcctgagcctactgatcggcgtagtcaagaaccgggagaagtacctgctgcccttcctgtccctgcaaatcatggac

SEQ ID NO: 651304 - DNA, 884 bp, Homo sapiens
ggtaacgatcgtgacgggctgaccgagcatgacactgctccactatgcgtgcaacagctggggcccacggagtcgtgggaccccgcggctagccgtgtcgcctctcggcagtcagctgctgtgcgctgggcgcgagatgtgacgctgcgcagccggtggaccaacatgtacacgcgcttcactacgtcggcctattttgatgtgcccgacctcgtgcgtgtgctgctgaagggtgctgaggccgctgagtggtgaactccactgtgcatgtgacttcaatccagcgagctcagaccctgcacatcgctgcttccatgcctgtgcctggtgcgccgccgaaagtgttatgctggatgccagcggtgccaaccctgtcgctgatggacatcgacacaggactagtgtgccggccgagagagtgagtcccaggatcctactgtgacatgtccctgggacaaaggcagaaggcgggtaccttggtggcccaaacggcagcctgcggacgcttctggcaagaggcacgctgccactatcttgcgtccctccccaaggttcacgcctacccaactatgacaagcgtcccagggcaatctcatgcttagcgcacttgggccttgctcctggggacgaccgggtgctgcctggattggccacgaagaccggccacactgccggaccctgtgtggaccacggaactcctgcccagcggcccagatggccttgcccgttggagctgcgacgaaccctgaggggcaaagaaccgactcggcaagcactcggggcccgtacggtaacttcattctgccctcccaagcaaggatctctttggctccgtgtccaacatctccaaggccgtgacgccaccgacctgctatgtgacctca

SEQ ID NO: 651305 - DNA, 550 bp, Homo sapiens
  misc_feature (246)..(246): n is a, c, g, or t
cacataactagtatgagagcggaggtggtggcggcggaggctttggcagctcgggactgagtgcaagaatcagcatgattcttcagaggctcttcaggttctcctctgtcattcggtcagccgtctcagtccatttgcggaggaacattggtgttacagcagtggcatttaataaggaacttgatcctatacagaaactctttggacaagattagagaatacaaatctaagcgacagacatctgangacctgttgatgctagttcagagtatcagcaagagctggagagggagctttttaagctcaagcaaatgtttggtaatgggaaatggattatttccacacttcacaatttgtggagtatcccaatatgaggtgtcctcgaaaaaccaccgaggtgctgaagataatgacagtatatattaatgcgtggtaagttgtcacggattagttgtacaatagttagaagttcagaaataaacatgatttcataactgtcaaatgttcttttaattctgagtccaaataaattatttgggtgatgtcgaac

SEQ ID NO: 651306 - DNA, 448 bp, Homo sapiens
cttatgagaaaggacctcatggaagcccatccgaagagccagcaaatggagaacctggtagaaaagatcaccaacagccggcctccctgtgtcatcctgtgactaagaaatgattcttggaagcttggttctggggtttaaacctttccttgtggttacgctaggaatccctctacctttagcccctcacttggccctaggtaactaagaccctgacttcactttgcctcttagggcacaaggagggactagacatttctgtgccaaaggcagaaaagagatgttctctgtgaacatcaccatcgctctcccgggatctgtgccctctgcagtttggtcctctccccagcgtggcaatacctttcagatgccacggttgctataacttattttccctgaatcctgggcagtgtcggctcttggcaataaagagtaattacaaatgcta

SEQ ID NO: 651307 - DNA, 969 bp, Homo sapiens
gagatgatcctcgtgagacatgatgaaactttccgaacgcatcagaggactccactcgtctataaacgctagcactcccggcgtaggtatgctgtccaagagctcgctgggctcacacatgacacaacatcgcacctgtaactgtctgcagccctgtatcaccttatagcttacagttcctaccacgtgtgtccattgtggcccgtgcttcggggagtggaatgaccgcacgtgttcctgtactagtcgttgcgtagacggtggcgtgatagctaggatgagacgagactagcggcgtgccagatgccgttactgctgttagagaagtgtcacgtggtagtacagccaatagtctgcttaggataacaccaaaagcgctgttatgtaaatgcgagccaagtgtctagctgacaaggaagaatattcgcttattctgtggcttctggttcacagtgggctgaaactctattaacgcatagagaacggtcttgattacgttgaagcgacttcgagactcccttctttaagaaggtggcatgccctattctctcctgggacgaggtatgactggtttcgatttaatggcccatgtgaaccaccgttgcgatccgtggtaatgggttaaatatcatgcactgttcgcggatgaaggcgaccagaatcggtgctcctatttacaacggtggatgaacactctttcccacgaggggctcgggagtccagcatggatggtggtagccgtgattgaaagcaaggtccaagagggccaagtacaaggatcctctcccaaacggttgtgaatgggcgtgggggaccagccgtttgtggttgccaaagaggggccaccatttggagtgggcacctggctttcctgaaaccgggagggctcaggcgggggcagcatttcctggagattacacatacagggctcgtggaaactctcggaatgtggctcataacttggcaatg

SEQ ID NO: 651308 - DNA, 463 bp, Homo sapiens
gagctcgattccctatccgtgtccggggttgggatggctcggagctttgagactgctgtgactgctgtactcgcggcacttgcggtgtaggctgaagagatggcggctgttgcagctgatgtggcgtgtgacgaggcatctgttgttttccttgtgagtaaagatccaggattcggagacagatgtcttccaacacgttcgaccgggacatcttgaacaaactgctcccaccatctactatacatggctttggaggtccattcttgtatttcaaatttgcacacacgtcctgcgagatacatcactgctactgctatgatctctggttcccactgcagtgacaaggtggtgcagagactgtcatttacaaatgtccatgccatttgaaccaacttttgaattttgtttttatcacctttgagttgctttgcatattttagtaggaactggtatggatgttctc

SEQ ID NO: 651309 - DNA, 221 bp, Homo sapiens
catcttagactgtaagcatgttttatggcgtcagagaagcggtgtagtatcccgtataagagcctacaacgttggggcctaggcagtagttgtatctagcctagaatttttcgtatcggtaagcagttaggaatgccattgcgcttagaatgggtacaatgaggagtatcctgaggcatgggggtcaggggttgaggtcttggtgagtgttttacgtgggg

SEQ ID NO: 651310 - DNA, 688 bp, Homo sapiens
gcgcggaagctatcggtcactgtaatccctatcaaatatcaatgacatctgcacagaaagaggaaaaaaatcctaaaatttatatggaaccacaataagaccaagaatagccaaagcaatcctgagcaaaagaataaagctggaggcatcacattacctgacttcaaattatactacaaagtgatagtaaacaaaacagcatggtgctggcataaaaacagacacatagactaacggaacagaatagaggacctataaataaatcaatacatatacagtcaactaatttctgacaaagctgccaagaacatacgttgggaaaaggatggtctcttccaaaaattgttctggaaaaaccagataactatatgtagaagaatgaaacagatcactatcttttgccatattaaaaaaaatcaaaacaaaatggcttgaagactggaatctaagatttgaaactattgaaactactagaagaaaacgtgagggaaatgctccagaaccaaatatttcttagtaagaccttaaaagcacaggcaagcaaagcaaaaatggacaaatgggatcatgccaaagctaaggaccttctgcaaagcaaacaacaaagtgaagagacaaccatcaagtgggggaaaatattgcaactaaccatctatcacagataatagcctataataggagccaacat

SEQ ID NO: 651311 - DNA, 405 bp, Homo sapiens
ggacagtttacaaaggatatacagattctcctaacttgttcggccaaattcttgagaggtgttagaagcgatgagcatcccaaagtgtatatctatgctccagtatgtggatgatatactagtgtcagggtaacgctgtaccaacaagtatctggcttttccatcagccttctcatgcatctctgtggagagggactatgtggtgtggtggcacacatctgaaatcccagctacttgggaggcttagaaaagagaattgcttgaatgcaggaggtggaggttgcagtgagccaagatcgcgccattgcactccatcctgggcaacaagaacaaggctctgtctcaaaaaaaaaataatgtaacaagctcatgtatgggccccacttttacattgaccaggggctc

SEQ ID NO: 651312 - DNA, 276 bp, Homo sapiens
  misc_feature (4)..(4): n is a, c, g, or t
gtanccgcagccttcagcagcagcagttcttcagcaggtctgctggtgcttctcttgataaagcacacttttttttggtttcccccgagacggagtctatgctctgtaggcccagagtcggtagtgcaagggcatgatctcggatcactgcaacctctgcctcctgggttcacgcaattctcctgcctcagcctcccaagtagctgggattacaggtacccaccaccacgcccttttaatcttggtatttcaagtagagacagggattcctcacgt

SEQ ID NO: 651313 - DNA, 386 bp, Homo sapiens
tgactttgacgttagatgaatagcacaatagatcataatggtcccaataagtgacagctattatattagtgaacttggtcccggcagatttcaacatgcatcaaggctgaggggagagaataaatattatttttcttctgaattaagatttgagtcccgaggtatctcacagatgaaccattacctttatttggagcccgggaaagaaaactctcccatttatgggcacatatcccagtgagctaactaataaagtgatcatctttagactgccacaagcacttttggcaaagcagccaaaataattctttaccacagagggggtgaaagaggagtatttcaaagaatctatgcacttaggacataatatttacaaaaggtgctat

SEQ ID NO: 651314 - DNA, 322 bp, Homo sapiens
cattcaccatcaaatcataatgagggatggaactgggattcaaatccggttctctctgatgccaaaaatggtgcaatttaacgaggaccaagttacacccagaagatggagggatcaaaacatgtggattcccttttctggcctctcatgtgggaatttcaatagctttcactgcctcagagcaatcctaaactccctcccaggttgccttgcaatggcccccttattcgtggggatgattaggaatctgcatttttggaccacaagcatctataaagagttgtgttgatcaagaaataaaatttactaggtcataaaaaaa

SEQ ID NO: 651315 - DNA, 607 bp, Homo sapiens
gggaggaggggaaatggattcgcctctcctacagaaattctgaattcatttacagttctatgactattgattatatgttgatttgatacacggttcgggattctagtttagcggaaaatagtgtttatgtccaggttcgtggataaactatttcatccgctgtgtcctccccaaaacgactagcacacgagagcagagctcctcatttcagtaatacagcctctcatatccactggccggccccgtttacacatcatggtctccatgtgtaaccgcaaagtcaattatgtttgacacgccttgtggtgtgcatgttatggggcacaagttatgatttacacggaagcaactgccaaatctgtggtgcaaccactatctccagtgaaatattgtataacagccatttggaactactggaacagacagtggctttgctacagtactcttccttattgcaccatctgttgtatgaacgtagaaactaagcatcagaatttagtgaacgaagaatatgtgattttgccttttgctctacaatactgagatttggggaagcaattctttttttaaaaaaatttgaataactatcttttgataacacattcgg

SEQ ID NO: 651316 - DNA, 434 bp, Homo sapiens
  misc_feature (383)..(383): n is a, c, g, or t
  misc_feature (385)..(385): n is a, c, g, or t
  misc_feature (405)..(406): n is a, c, g, or t
tacagacaccttaggcaaacatttaccaaaataaaggatatgccgattagaattgaacccctggcccaataaattttccccccagggggaaagtaaaaatttttaccccccgttttttttttggggggggttccccccccttcccctctttgggtttgggggagaccccgaaaaaacttttttgggggggaggagaaaatatattaacccccccacaaagaagggggttttttaaaaaaaataaaaaaaaccccccccttttttttttaaaaaagggggggatattttttttgggggggacacccccccccccgccgggggggggggtttttgcccaaaaaaatatttttttttttttttttttttgttgcccccctcccccncncccccccttttataatgggnnagaaagaaaaaaagactttttttttttt

SEQ ID NO: 651317 - DNA, 1163 bp, Homo sapiens
gtccatcgttgattagcagcacgacgctttaggctgacgccactgtctgcgcaacataaaggatatggcagagtagatcattgatgactgtgagcgcgaagagagtatagatatcggcaagtcaaaacgagtgacaaaattatacacgcaaatcagtaactattggcaagggattaagctcctatttagctctctgtcactaaagtgtagtcatatgtagaaaattaacctaggcagatggtactaggaccagagagtctgagcatcgcacgcgacaaatcccagactgacgtctatgcgtaaaacacacgctgacggaccacacacgcagatcctatgttctctaaatagttgggaggaattccatagagttggatggccgacaaataccatagcacggagctctgggggtaataactggtcagaaccagagaatgagatctcttatccgttgacaatctcttgacgatgggctccagccacgtagacccctctaaaatcccctcgtttgtaagagggtcatagcatggtgagcttccacagattgatacaagtctatgtgtggcaagcttagggaacaacaagctagttccgcagagaacgtaagtaatgtaacatgctgaacctaggctgtacaagctgactcactacttaaaccaataaacgttccaatgctacacaacctcactaacgtaatcaaattacaaatacattttatagctgtgatcaccgtcagtggccacagtggtatcaaatctactcagacctagttgaagaactaaagtgagtatgactaaatattgacggttttgtcccttgcgattaggcataccgtcagagtaactgaatgagtgaagcctggaagaagcccgaaggggtacgaacaagcaagaggtcattgttaccgcatgtggaccgcacgcaaggcctccataggaagggaaaaccaagaagaatgagaactgagccgcgcccgtgcgaggagggtacctgaaaacacggagaagacaccgtggcggctccacagaatacggggccccagccgcagatgggaaaggggtgaaaaacgaaaggcccgaccggggataaaaccagacgcggggagggccgcacaaacagggcaacaggtgcacaacggggagaagaggggcgccaagaaaaaa

SEQ ID NO: 651318 - DNA, 135 bp, Homo sapiens
cagggagagctgtatgtaactcaggggcgagctgcgcttgagtgcttacatcacagtacagagccacattggcaggtgaaatatttgcttttgatgtcccagaagcggtcgcaatagtcgaacccggggatcctc

SEQ ID NO: 651319 - DNA, 928 bp, Homo sapiens
  misc_feature (309)..(309): n is a, c, g, or t
  misc_feature (851)..(851): n is a, c, g, or t
  misc_feature (862)..(862): n is a, c, g, or t
  misc_feature (880)..(880): n is a, c, g, or t
  misc_feature (885)..(885): n is a, c, g, or t
gctgctgcacatcaggctgatggcagctaggccctaggaaggagccaggggccatggtgggggctctgctttcccacagggctggcacagaggaggcctagacatatgttgctgaaagagtgtcctaatactagagtggcatgcctcgtgtctacaaaacccttatatgtcacctctgctgtccttgaccgatggcaggggaactcccattagaatgatgatgaatcccctgcagaggggaggctggcagggacaaattccctaaaagagggaccaagcgtcagctccaattgcatcttaaaagcaaangtgaagtaatgcacagatggaaatttaaaaagaaaacaagcagtatgactcaagtggtgtttttcacagtcagaacttgaatatcagtagatttcgtcatttgtctattccttttgtaccagaggcatattgttaaattggttaatggaaaggaaaaatgttgaacagataatgttattctttatgagacgtaccatctgtgtattgagctctgaatgtccctggatatggaagagaggaaatgtgatggaatttcaagtttgccttctttgctgtctttatcttgggttgagtatgacaaacataatcacatttatctcctggagcataaagagttttaatcaccctattaaccaggatgacatttttcacagacttaaaaaggaatagaacagacattatctccctataagcaatccatttcatggaggctgagcactagaaatgctttaaaggatggataacgcaggccatttccatttcctgtctaagccaacattaaggaggctttcggtaaggctgttgcttccactgggtggtgntaagctttacncttagagctcagcgcccnaaagngctattagagaagccccgggcaggggaggagtggctttcgaga

SEQ ID NO: 651320 - DNA, 404 bp, Homo sapiens
  misc_feature (14)..(14): n is a, c, g, or t
ggtcgaccggcgtncggacggtgtacaccccacagaacggaacagaaatagtggcaggcctgctgggtattgaagcgataactcttcagcacgtcggcccctttcaggatcttcaggcccgtgagggaacggtgcccataacggcgcctcgctcttgcaaagtgaacagttgcatcgtttcggatcaaccacgccgttcggtagttccagctcaagcaccacctccccacagtggcaggaagcgttgtgaaccggtttgatttctgtctcaccaatacgcttgatcatcggtttcgtccttgtacggcacggttgactccacagtacccgcagattaccgaagcgccaggctgggccgactctgattgaccagggtcgggaggctacgacgcagcgctccgtcg

SEQ ID NO: 651321 - DNA, 1525 bp, Homo sapiens
  misc_feature (1)..(1): n is a, c, g, or t
ntgtcccctcgtgtgaagttgtgtctgctccccggggatgggcttctcactcgcgcctggattgactgccctcgcgcgcgcgtgccctgatggtgttgtcgtgggggagctgccagggtcgtcctccctgattgtgtgcgcacacggcacgttgttccccgaaaggcccctgttgtgattttctctttggggacaatgtgtggagcagcacgtgctgttgtgtggaaaattagtgggagcccccgcgggattgtctagggggagacctgtgccagagttgttggggcggctaatgcatggccccgtgtgaaagttttcccgcagtaaaattgtgtgttccgagaagacattgttgtcgcctgaaatcctctttttttgtggaacggggaacagaaggagtgttggtcgctactaactagtgggggggacaccccacttggggaggacccccacctcatgtataagtaatgtggagaaagtcgtttgggttaaccagttgcacgtcgccacacgtttgtgagggctgcccctctgccctgcagatttattttttagcgggaatgcttgggttgtggtgccacaccacacatggtcctgtgtcgtggggtgtttgcccttcgtgatattttgtgtagcccgcccacccttgaggtgtttcttagcgcttcgttggcccacaagtgtgctcgtctggtggacctcctggaaggctgttcccaccggctttcagcggacacctggttggagcacagccccccctgcctagatgtcgtgtgccaccacttcttgtggcggagagtttttttattatcttcaaatcttctggggtagaagagcacacacttgtggccacccccacgcacccctgtgtgtgattatacgggatagtggtgcgcttgttctgtggcgtctgcggtgccccctcacaagacgcgctgttgagagagtgttgtctacacggcacacacacagtatgtggtggccgcacggtgtgtgtcccacgtgcccggctgagccccacatctgtgttgtgtcgcgtttgtgtgagaaatattgtcgcgtggccacgctcttctaaatatccacgagaacgcttctaccgcggttctcgagccacgctgtaatatattatgtccacgcgcgtgccacactgttcccacgagagggcctacacactagaatgtatatttgggcttctatatgagaagacacgcttgtctgaggagaatggtaatgagagtgttccacgaactcggcacgctattgcccagatgggagttaatccacgtgggaactagctgtgtacaccacgctcaattgtttgtttcttctcgagaaaatgtcactgcgaggacccacaaggaggccccacgaggtacaccacgtgttgttatggagttttatgagtgccaaagatgattattgacttgtgagatagcgttagcgttttggggggcccctagttccgtgagaatgtttaagtttaccactagcccttcccccgttaaacaaaagaaaaaataaa

SEQ ID NO: 651322 - DNA, 456 bp, Homo sapiens
  misc_feature (1)..(1): n is a, c, g, or t
  misc_feature (15)..(15): n is a, c, g, or t
naacacccaaacccnggtaaatacactacggcaaccataaataaagctacagatcggtatggctgatgaacatagaggcaaattttcatttaagaaagatcattcacaatgatccaagttgtctatattttagacactcgggcatgatttaaaatacctaaaatgataaatataataaatcaaagaacttgacttaaagacaaagatcatatgattatctcaataatgtataaaaagcctttgacaaaatccaacccaacttcatggtaaatattctgtagagaacaagactggaggaacaaaactcaatataataaacattatatatgagaaacccctggccaaaatcaccctaaatgtagaaaagttagaagaaattagattaaaatcaggaatgagacaaggctgtccaccctctcctgaagaaataatctcttataaacatcacctgtcaat

SEQ ID NO: 651323 - DNA, 621 bp, Homo sapiens
actctacaggactcacatgtagtgaggaatcaacaacagtcactagcagccaggtgcactggaacagcactcttcctacccgctctgaacttagttcttgttggagaacctacaacgtcaccatcagttcaggctcaacggaaacaacagcgttacctggcagtaacacaacagcagggctgagtgagatatctaccaacttctacagtagccccaggatcaccggaaaaaaaaatctccacctgccagcacgacaagctcaggggtcagtgaagaaatccaccacctcccacagccgaccaggctcaacgcacacaaacagcattccctggcagtaccaccatgccaggcgtcagtcaggaatctacagcttcccacagcagcccaggctccacagacacaacactgtcccctggcagtaccacagcatcatcccttggtcccagaatctactaccttccacagcggcccaggctccactgaaacaacactcttacctgacatcaccacagcctccggcctccttgaagcatctacgcccgtccacagcagcactggatcgccacacacaacactgtcccctgccggctctacaacccgtcagggggtactgagctcgaa

SEQ ID NO: 651324 - DNA, 892 bp, Homo sapiens
  misc_feature (846)..(846): n is a, c, g, or t
  misc_feature (858)..(858): n is a, c, g, or t
agagtccattagttatatatatttcttttctatattcacttcatggtcataatcaagaagtctattaagtgtctgattaaaaatatcaaagagttgcagaatttaaagtgaaagaacttttgggttaactgataatgctgccacttcataaacttaggaattcattacattgaacgctatgtgcttttagtttctttgaaaatttactgaaacatgtatctaaaaattcaattatagaatgctagacttcaaacaatagttctctagcttcaagtttaaaaccttcatgtctttcttgggcttctgttacttgtaatatcaacctagtgcttacatttgaacaaaactctctttttagttccaactctatattctccttgtgactgttgttgctccaaagcagggtttatccacttctgcactattgacgtcttgaaccagtctttgttgtgtgggctctcctagacattgtaggaagtttagcagcattccctagtttctgcttattagataccaacagcaagccatggttatgacaaaaatgtcttccgttattgctatatttctcctatgggacaaaatacttatcagaagtcaaatttaaccaggtgttctgaattttatctgacaactttatcactggggttgagaaccactgattcaaagtcctcaactttaactgtacatttagatcccctgagggcatttagtactgatgagttggcctcacacccacatattgatatcattagtctgatgaggtttggacctaagtactttttaagggtttcccagggtgtttcagtgtgcattcagggttagaacctctggtcggtcctaaaactncagtaatagttngtgggattagaggcctcttaagggaaataagagt

SEQ ID NO: 651325 - DNA, 517 bp, Homo sapiens
  misc_feature (103)..(103): n is a, c, g, or t
  misc_feature (230)..(230): n is a, c, g, or t
  misc_feature (277)..(277): n is a, c, g, or t
ctgaggaagccagacaccttttaacaatgcactctcttgggaattaacccattcccaagaaagcgagaactcgctcttccagcaggaggacgttcatctattngtgagggatccgcctcgatcatccaaacacctcccaacactgccacattggcgatcaaatttcaacatgagttttggttgggacaaaccacattgaaactgtagcacagagcaaagcaataggaaanatacaggtgatttagtttagttttttgtttgtttgtttctttgtttnagggtagttttatgcaaattttaattctggctgttaaatgagaaagcgattttgtacatttactacccttcaagccagcagagcatgaagaaactttcatcttctgagactcgggtgctatttcttgccctcccatatcaaagctaattttataagtactgcagccgggagtcttagtcccataaagcactttgtacaattcttattaaaaacccaggctgtttgtttagcctccccttc

SEQ ID NO: 651326 - DNA, 352 bp, Homo sapiens
tatgttgattggtgtaaaatgatatcagaatctgacccactcttatgtgtgaaaaaagtgtgtacagagttgaggatacatatgtcacttattaacatgtaagattcttgcctagggggcaatgctgaagttagctttatgtatcgagtcgagactctgggctcgcagtacctgtcattggatatgtgcctccagttccaggtttcatttttgttcccactttcgcatctgaaaaatcactgccagttactcagtgagtgaagtaaagagatggcacttgacctccccaaaaatatatcattatatggattttaaacatagggaagagtgcgagctttgggtaccgagctcg

SEQ ID NO: 651327 - DNA, 252 bp, Homo sapiens
tactgtcctgtgcgggctttccctgtgcgtttacgcgcgtggcccactaacgagctgctggacgtgccgtcgctgtgccaccccctcaatgcccacagagctgccccctctgcatattgtcaggctccttcacactgtccaacttgactctcgccgattttttgtcataacacgtagtacatctgtcatagctcgttctatcttagaagcttttctgtctgggaggaaccccagctctgaaaggcacccacg

SEQ ID NO: 651328 - DNA, 88 bp, Homo sapiens
tcgatacgacttttttttttcatgttctccagatgtcctttatttatattcgtattcataagttctcatactacttctgtcgtctctc

SEQ ID NO: 651329 - DNA, 124 bp, Homo sapiens
ccttggtgatgaggccctcacagcttgtgcaatggcattccctatcgataccaaacatcttcagcagctcagccggcttcccacttacttggtacccggttaactgccaggtgggtatagaact

SEQ ID NO: 651330 - DNA, 244 bp, Homo sapiens
tttgagcctgccggagggcaagggtcgaaaaaacggattgggtcctgggcctttgtgatgaggcaggcccccctgtcggttttggcttgctgctaaaattagggccttttgttcgcccccctcccccccctacctggaggggcccaggcttggggactttgagctgtgttaaggagaacaagggcaaggagacctccctttgtgctccctccctccctaataaacatgagtttgatgttttcca

SEQ ID NO: 651331 - DNA, 524 bp, Homo sapiens
  misc_feature (106)..(106): n is a, c, g, or t
  misc_feature (118)..(118): n is a, c, g, or t
  misc_feature (126)..(126): n is a, c, g, or t
  misc_feature (157)..(157): n is a, c, g, or t
  misc_feature (160)..(160): n is a, c, g, or t
  misc_feature (184)..(184): n is a, c, g, or t
  misc_feature (197)..(197): n is a, c, g, or t
  misc_feature (209)..(209): n is a, c, g, or t
  misc_feature (212)..(212): n is a, c, g, or t
  misc_feature (220)..(220): n is a, c, g, or t
  misc_feature (232)..(232): n is a, c, g, or t
  misc_feature (234)..(234): n is a, c, g, or t
  misc_feature (242)..(242): n is a, c, g, or t
  misc_feature (248)..(248): n is a, c, g, or t
  misc_feature (250)..(250): n is a, c, g, or t
  misc_feature (252)..(253): n is a, c, g, or t
  misc_feature (258)..(258): n is a, c, g, or t
  misc_feature (261)..(261): n is a, c, g, or t
  misc_feature (270)..(270): n is a, c, g, or t
  misc_feature (273)..(273): n is a, c, g, or t
  misc_feature (288)..(288): n is a, c, g, or t
  misc_feature (294)..(294): n is a, c, g, or t
  misc_feature (299)..(300): n is a, c, g, or t
  misc_feature (304)..(304): n is a, c, g, or t
  misc_feature (311)..(311): n is a, c, g, or t
  misc_feature (315)..(315): n is a, c, g, or t
  misc_feature (322)..(322): n is a, c, g, or t
  misc_feature (325)..(325): n is a, c, g, or t
  misc_feature (330)..(330): n is a, c, g, or t
  misc_feature (333)..(333): n is a, c, g, or t
  misc_feature (337)..(337): n is a, c, g, or t
  misc_feature (342)..(344): n is a, c, g, or t
  misc_feature (346)..(346): n is a, c, g, or t
  misc_feature (351)..(352): n is a, c, g, or t
  misc_feature (356)..(356): n is a, c, g, or t
gagctaccccaatccctcacagcctgaccctcctcattccatcagatgcatttgtagaatcggggcaaatttccttatttatttatggcccatgcctttccccctnttcatcctgatnccgttttnctttgaagagaccccagtaccaaaaaacagnctncagaagccaaaaccatgcctgganctcccatagcttntcctttgttccnganaaagttcnctgaaaaaaaantnttttggcnttttgngngnncaaanacnacaaaaccnggnggggaaacgggaatntttttngcccnnaaantgttttnaaancaaaaanaanggggnttntggnggttnnngncgccnntttntatttaaaggaagaaataaatttggcaaaaaaataaaaaaaaaactcggggggtggccgggaccccaatggccctttaatgagtggtattaaaattcatggccgctgtttaaaacttgtgggaatggaaaacacctggggtaccccacttatattggcttggagaatt

SEQ ID NO: 651332 - DNA, 628 bp, Homo sapiens
  misc_feature (409)..(409): n is a, c, g, or t
  misc_feature (448)..(448): n is a, c, g, or t
  misc_feature (477)..(477): n is a, c, g, or t
  misc_feature (491)..(491): n is a, c, g, or t
gaatgattataacaaagaaacattcaccttgaagcataaaatgatgaacagatgttcccttgtcgatgtcattacaatagttccacgtcttgtcctggggacccagctttaactttagcatctggtatgtgaacttagtggcagttgatgatccgttgatgatagtacaaccttgtctcaacctggtatagcaagtaccgggaacaggaagctattcgcctttgcctaaaacacttcagacaatcacaactatacacgaagctcttgcagtcccactgccaaacaggagcaaaccgaaggacttggcaccttgggaaaactattcccgagtgctttaaacgagagtatgtcatgacagagcgtggtgtgtgaacgggtgagttttgatgcttgcgaagagttgattganaaggctgtaaatgatggcttgttcaatcagtatatcagncaacaggaatataagccacgatggagtcnaatcattcccaaangtaccaaaggtgatggggaagataagcgtccaggaatgcgaggaggccatcagatggttactgatgttcaaacagagactgtgtattgcgtttggtggctgggatggaacacaagatcttgctgacttctgggcgta

SEQ ID NO: 651333 - DNA, 407 bp, Homo sapiens
aacagttctttatatattttagatacaagttctttgtcaaacaaatgttttgtagcttctggggaaaagaatgaaaaagaaagtttaaaagaagacaggactgggacagtggctggctgagtgtggcggctcacgcttgtaatcccatcactttgggaggccaaggcaggtggaccacctgaggtcaggagtttgagaccagcctggccaacatggcgaaatctcgtctctactaaaaatacaaaaattagcccggcatggtggcgtgcgcccgtaatcccagctactcgggaggctgaggcaggcgaatcgcttgaacctgggaggcggaggttgcagtgagccaaggtcgcaccactgcactccagcctgggcagcacagcaaaactccatctcaaaaacataaa

SEQ ID NO: 651334 - DNA, 500 bp, Homo sapiens
tgcaaagcgtagtacccaaacaacaaccttcaatcactgtaagttttaaatagaggtgaaaaaatgtagtcgatttttctcaatttctactttatacttctctgtaaactgacagcagtagggctaaaaaacaaaggtctgattcctagcatttctcattatacatatcccgtattgctctcttgatatttcactgatacatgtatcttctttgatccctgattatagatattacatcttctagttcctttttgtattttttttttttttttaaattaaagacggggtttcaccgtttgggccaggatggtattaatctcctgacctagttatccacccttctcggcctcccaaagtgctgggattgcaggcgtgagccaccgcgcccggacttttttttttggaaacagagttccactctgttccacgggcgggattgcaggggcgcaatctcggcgcactgcaccctctacctctggggtacaacgcttggggcgggg

SEQ ID NO: 651335 - DNA, 296 bp, Homo sapiens
  misc_feature (75)..(75): n is a, c, g, or t
  misc_feature (80)..(80): n is a, c, g, or t
  misc_feature (94)..(94): n is a, c, g, or t
  misc_feature (153)..(153): n is a, c, g, or t
  misc_feature (192)..(192): n is a, c, g, or t
  misc_feature (251)..(251): n is a, c, g, or t
  misc_feature (259)..(259): n is a, c, g, or t
aatggtgagaggtgggactacatgggcataccggagctgtgtggtgtgtggcgtgactgggcaccaagatgcctnactgntcagctgacaacanttcgtctctgggctgtgacagaaagcagtggcccttctcaagccaattcggctgtccgncctgcggttttgactttggggcaacatcatcatgttctncacggcaagagatggctacagtgctttgtgagttttttacctgcgggatccggcagttncaacaatnagcctacatgaagtccttgaatgactctaaaatcacc

SEQ ID NO: 651336 - DNA, 836 bp, Homo sapiens
ctagttctagatcgcgagcggcgccctttttgtctttttggcattaaaaatgtttaatatgtttaaacactagaatgacgtgccactgaattaggcaaggtgggcaaaacaaggtctgttacaataaaatacattagacatttaaataaataaccttaaaaactatgctgaagggacataaacccagctcgatggaatcgtggaacaaggtttccctgcacaagcgagtacggggcataccgtcgtcgtgaaaacggagtgtaaacagaacgaaccagtcacaactccttaaagaagaagccaagcggggacgggggcataagggtggggagaggctgggaatggggatggggtgaacggaggccaaagggggggtgaggggacagtagccaaaccaagaacgaaatactgacgtgagggtcaccaacgactctggctcagggtgcaggaaaacaattgggctccatgcaactaaacatttagcacggttgattatcaaaagttaaaagtcccggaatcatctagtgcaacaatgaccaacaaacatacagtgcttactcgtcccagtttctctcagggaagaacgaaacaataaaccccagccaagcaaactatttaacaattgttcccccttaaaaaatcctggtctggcgccaaatatcaaacttatgggcttggaacaaaatcggtcctggccggggcctccaaactcaatgtttttctgatatattcacccaagggatagaaggtaattcacaccctagaaacactgggcaccatcgccttttttgcacatcccttacgaacacaaacatttttggccataacaccacggg

SEQ ID NO: 651337 - DNA, 4928 bp, Homo sapiens
  misc_feature (4917)..(4917): n is a, c, g, or t
cagaactattctccccagtatgattcatatgatgtcaagtcgggcggagtagcagtaggaggactcgcaggctatcctggaccagctggccccccaggcccccccggcccccctggtacatctggtcatcctggttcccctggatctccaggataccaaggaccccctggtgaacctgggcaagctggtccttcaggccctccaggacctcctggtgctataggtccatctggtcctgctggaaaagatggagaatcaggtagacccggacgacctggagaccgaggattgcctggacctccaggtatcaaaggtccagctgggatacctggattccctggtatgaaaggacacagaggcttcgatggacgaaatggagaaaagggtgaaacaggtgctcctggattaaagggtgaaaatggtcttccaggcgaaaatggagctcctggacccatgggtccaagaggggctcctggtgagcgaggacggccaggacttcctggggctgcaggtgctcggggtaatgacggtgctcgaggcagtgatggtcaaccaggccctcctggtcctcctggaactgccggattccctggatcccctggtgctaagggtgaagttggacctgcagggtctcctggttcaaatggtgcccctggacaaagaggagaacctggacctcagggacacgctggtgctcaaggtcctcctggccctcctgggattaatggtagtcctggtggtaaaggcgaaatgggtcccgctggcattcctggagctcctggactgatgggagcccggggtcctccaggaccagccggtgctaatggtgctcctggactgcgaggtggtgcaggtgagcctggtaagaatggtgccaaaggagagcccggaccacgtggtgaacgcggtgaggctggtattccaggtgttccaggagctaaaggcgaagatggcaaggatggatcacctggagaccctggtgcaaatgggcttccaggagctgcaggagaaaggggcgccctgggttcccgaggacctgctggaccaaatggcatcccaggggagaaaggccctgctggagagcgcggtgctccaggccctgcaggccccagaggagctgctggagaacctggcagagatggcgtccctggaggtccaggaatgaggggcatgcccggaagtccaggaggaccaggaagtgatgggaaaccagggcctcccggaagtcaaggagaaagtggtcgaccaggacctcctgggccatctggtccccgaggtcagcctggtgtcatgggctttcccggtcctaaaggaaatgatggtgctcctggtaagaatggagaacgaggtggccctggaggacctggccctcaaggtcctcctggaaagaatggagaatacggacctcagggacccccagggcctactgggcccggtggtgacaaaggagacacaggaccccgtggtccacaaggattacaaggcttacctggtacaggtggtcctccaggagaaaatggaaaacctggagaaccaggcccaaagggtgaagccggtgcacctggagctccaggaggcaagggtgatgctggtgcccctggtgaacgtggacctcctggattggcaggggccccaggacttagaggtggagctggtccccctggtcccgaaggaggaaagggtgctgctggtcctcctgggccacctggtgctgctggtactcctggtctgcaaggaatgcctggagaaagaggaggtcttggaagtcctggtccaaagggtgacaagggtgaaccaggcggtccaggtgctgatggtgtcccagggaaagatggcccaaggggtcctactggtcctattggtcctcctggcccagctggccagcctggagataagggtgaaggtggtgcccccggacttccaggaatagctggccctcgtggtagccctggggagagaggtgaaactggccctccaggacctgctggtttccctggtgctcctggacagaatggtgaacctggtggtaaaggagaaagaggggctccgggtgagaaaggtgaaggaggccctcctggagttgcaggaccccctggaggttctggacctgctggtcctcctggtccccaaggtgtcaaaggtgaacgtggcagtcctggtggacctggtgctgctggcttccctggtgctcgtggtcttcctggtcctcctggtagtaatggtaacccaggccccccaggtcccagcggttctccaggcaaggatgggcccccaggtcctgcgggtaacactggtgctcctggcagccctggagtgtctggaccaaaaggtgatgctggccaaccaggagagaagggatcgcctggtgcccagggcccaccaggagctccaggcccacttgggattgctgggatcactggagcacggggtcttgcaggaccaccaggcatgccaggtcctaggggaagccctggccctcagggtgtcaagggtgaaagtgggaaaccaggagctaacggtctcagtggagaacgtggtccccctggaccccagggtcttcctggtctggctggtacagctggtgaacctggaagagatggaaaccctggatcagatggtcttccaggccgagatggatctcctggtggcaagggtgatcgtggtgaaaatggctctcctggtgcccctggcgctcctggtcatccaggcccacctggtcctgtcggtccagctggaaagagtggtgacagaggagaaagtggccctgctggccctgctggtgctcccggtcctgctggttcccgaggtgctcctggtcctcaaggcccacgtggtgacaaaggtgaaacaggtgaacgtggagctgctggcatcaaaggacatcgaggattccctggtaatccaggtgccccaggttctccaggccctgctggtcagcagggtgcaatcggcagtccaggacctgcaggccccagaggacctgttggacccagtggacctcctggcaaagatggaaccagtggacatccaggtcccattggaccaccagggcctcgaggtaacagaggtgaaagaggatctgagggctccccaggccacccagggcaaccaggccctcctggacctcctggtgcccctggtccttgctgtggtggtgttggagccgctgccattgctgggattggaggtgaaaaagctggcggttttgccccttattatggagatgaaccaatggatttcaaaatcaacaccgatgagattatgacttcactcaagtctgttaatggacaaatagaaagcctcattagtcctgatggttctcgtaaaaccccgctagaaactgcagagacctgaaattctgccatcctgaactcaagagtggagaatactgggttgaccctaaccaaggatgcaaattggatgctatcaaggtattctgtaatatggaaactggggaaacatgcataagtgccaatcctttgaatgttccacggaaacactggtggacagattctagtgctgagaagaaacacgtttggtttggagagtccatggatggtggttttcagtttagctacggcaatcctgaacttcctgaagatgtccttgatgtgcagctggcattccttcgacttctctccagccgagcttcccagaacatcacatatcactgcaaaaatagcattgcatacatggatcaggccagtggaaatgtaaagaaggccctgaagctgatggggtcaaatgaaggtgaattcaaggctgaaggaaatagcaaattcacctacacagttctggaggatggttgcacgaaacacactggggaatggagcaaaacagtctttgaatatcgaacacgcaaggctgtgagactacctattgtagatattgcaccctatgacattggtggtcctgatcaagaatttggtgtggacgttggccctgtttgctttttataaaccaaactctatctgaaatcccaacaaaaaaaatttaactccatatgtgttcctcttgttctaatcttgtcaaccagtgcaagtgaccgacaaaattccagttatttatttccaaaatgtttggaaacagtataatttgacaaagaaaaatgatacttctctttttttgctgttccaccaaatacaattcaaatgctttttgttttatttttttaccaattccaatttcaaaatgtctcaatggtgctataataaataaacttcaacactctttatgataacaacactgtgttatattctttgaatcctagcccatctgcagagcaatgactgtgctcaccagtaaaagataacctttctttctgaaatagtcaaatacgaaattagaaaagccctccctattttaactacctcaactggtcagaaacacagattgtattctatgagtcccagaagatgaaaaaaattttatacgttgataaaacttataaatttcatgattaatctcctggaagattggtttaaaagaaagtgtaatgcaagaattaaagaaatatttttaaagccacaattattttaatattggatatcaactgcttgtaaaggtgctcctcttttttcttgtcattgctggtcaagattactaatatttgggaaggctttaaagacgcatgttatggtgctaatgtactttcacttttaaactctagatcagaattgttgacttgcattcagaacataaatgcacaaaatctgtacatgtctcccatcagaaagattcaccggcatgccacaggggattctcctccttcatcctgtaaaggtcaacaataaaaaccaaattatggggctgcttttgtcacactagcataggagaatgtgttgaaatttaactttgtaagcttgtatgtggttgttgatcttttttttccttacagacaaccataataaaatatanattaaaattca

SEQ ID NO: 651338 - DNA, 347 bp, Homo sapiens
gcaaaatatcgaagtaatagctcattccggctaaatcctggccatatccatgtgggtttaataagaatatgtgtggtgaccaaatcatccccaggggaataccacagttctctgtaaacgtaagctattaggcattttcaactcacctttttaccatgagtaattccatatactggtgatatgatttgtcgctggagcgttcgtgttataatccgccgtgaggtgccaactttcctccacggctatttatataaccgttattgatgagcgcacgccttttttttttaacagatttagatattgataacgatgagcaccactctaagactagtcatgaaagttgtaat

SEQ ID NO: 651339 - DNA, 4219 bp, Homo sapiens
cagaactattctccccagtatgattcatatgatgtcaagtcgggcggagtagcagtaggaggactcgcaggctatcctggaccagctggccccccaggcccccccggcccccctggtacatctggtcatcctggttcccctggatctccaggataccaaggaccccctggtgaacctgggcaagctggtccttcaggccctccaggacctcctggtgctataggtccatctggtcctgctggaaaagatggagaatcaggtagacccggacgacctggagaccgaggattgcctggacctccaggtatcaaaggtccagctgggatacctggattccctggtatgaaaggacacagaggcttcgatggacgaaatggagaaaagggtgaaacaggtgctcctggattaaagggtgaaaatggtcttccaggcgaaaatggagctcctggacccatgggtccaagaggggctcctggtgagcgaggacggccaggacttcctggggctgcaggtgctcggggtaatgacggtgctcgaggcagtgatggtcaaccaggccctcctggtcctcctggaactgccggattccctggatcccctggtgctaagggtgaagttggacctgcagggtctcctggttcaaatggtgcccctggacaaagaggagaacctggacctcagggacacgctggtgctcaaggtcctcctggccctcctgggattaatggtagtcctggtggtaaaggcgaaatgggtcccgctggcattcctggagctcctggactgatgggagcccggggtcctccaggaccagccggtgctaatggtgctcctggactgcgaggtggtgcaggtgagcctggtaagaatggtgccaaaggagagcccggaccacgtggtgaacgcggtgaggctggtattccaggtgttccaggagctaaaggcgaagatggcaaggatggatcacctggagaccctggtgcaaatgggcttccaggagctgcaggagaaaggggcgccctgggttcccgaggacctgctggaccaaatggcatcccaggggagaaaggccctgctggagagcgcggtgctccaggccctgcaggccccagaggagctgctggagaacctggcagagatggcgtccctggaggtccaggaatgaggggcatgcccggaagtccaggaggaccaggaagtgatgggaaaccagggcctcccggaagtcaaggagaaagtggtcgaccaggacctcctgggccatctggtccccgaggtcagcctggtgtcatgggctttcccggtcctaaaggaaatgatggtgctcctggtaagaatggagaacgaggtggccctggaggacctggccctcaaggtcctcctggaaagaatggagaatacggacctcagggacccccagggcctactgggcccggtggtgacaaaggagacacaggaccccgtggtccacaaggattacaaggcttacctggtacaggtggtcctccaggagaaaatggaaaacctggagaaccaggcccaaagggtgaagccggtgcacctggagctccaggaggcaagggtgatgctggtgcccctggtgaacgtggacctcctggattggcaggggccccaggacttagaggtggagctggtccccctggtcccgaaggaggaaagggtgctgctggtcctcctgggccacctggtgctgctggtactcctggtctgcaaggaatgcctggagaaagaggaggtcttggaagtcctggtccaaagggtgacaagggtgaaccaggcggtccaggtgctgatggtgtcccagggaaagatggcccaaggggtcctactggtcctattggtcctcctggcccagctggccagcctggagataagggtgaaggtggtgcccccggacttccaggaatagctggccctcgtggtagccctggggagagaggtgaaactggccctccaggacctgctggtttccctggtgctcctggacagaatggtgaacctggtggtaaaggagaaagaggggctccgggtgagaaaggtgaaggaggccctcctggagttgcaggaccccctggaggttctggacctgctggtcctcctggtccccaaggtgtcaaaggtgaacgtggcagtcctggtggacctggtgctgctggcttccctggtgctcgtggtcttcctggtcctcctggtagtaatggtaacccaggccccccaggtcccagcggttctccaggcaaggatgggcccccaggtcctgcgggtaacactggtgctcctggcagccctggagtgtctggaccaaaaggtgatgctggccaaccaggagagaagggatcgcctggtgcccagggcccaccaggagctccaggcccacttgggattgctgggatcactggagcacggggtcttgcaggaccaccaggcatgccaggtcctaggggaagccctggccctcagggtgtcaagggtgaaagtgggaaaccaggagctaacggtctcagtggagaacgtggtccccctggaccccagggtcttcctggtctggctggtacagctggtgaacctggaagagatggaaaccctggatcagatggtcttccaggccgagatggatctcctggtggcaagggtgatcgtggtgaaaatggctctcctggtgcccctggcgctcctggtcatccaggcccacctggtcctgtcggtccagctggaaagagtggtgacagaggagaaagtggccctgctggccctgctggtgctcccggtcctgctggttcccgaggtgctcctggtcctcaaggcccacgtggtgacaaaggtgaaacaggtgaacgtggagctgctggcatcaaaggacatcgaggattccctggtaatccaggtgccccaggttctccaggccctgctggtcagcagggtgcaatcggcagtccaggacctgcaggccccagaggacctgttggacccagtggacctcctggcaaagatggaaccagtggacatccaggtcccattggaccaccagggcctcgaggtaacagaggtgaaagaggatctgagggctccccaggccacccagggcaaccaggccctcctggacctcctggtgcccctggtccttgctgtggtggtgttggagccgctgccattgctgggattggaggtgaaaaagctggcggttttgccccttattatggagatgaaccaatggatttcaaaatcaacaccgatgagattatgacttcactcaagtctgttaatggacaaatagaaagcctcattagtcctgatggttctcgtaaaaccccgctagaaactgcagagacctgaaattctgccatcctgaactcaagagtggagaatactgggttgaccctaaccaaggatgcaaattggatgctatcaaggtattctgtaatatggaaactggggaaacatgcataagtgccaatcctttgaatgttccacggaaacactggtggacagattctagtgctgagaagaaacacgtttggtttggagagtccatggatggtggttttcagtttagctacggcaatcctgaacttcctgaagatgtccttgatgtgcagctggcattccttcgacttctctccagccgagcttcccagaacatcacatatcactgcaaaaatagcattgcatacatggatcaggccagtggaaatgtaaagaaggccctgaagctgatggggtcaaatgaaggtgaattcaaggctgaaggaaatagcaaattcacctacacagttctggaggatggttgcacgaaacacactggggaatggagcaaaacagtctttgaatatcgaacacgcaaggctgtgagactacctattgtagatattgcaccctatgacattggtggtcctgatcaagaatttggtgtggacgttggccctgtttgctttttataaaccaaactctatctgaaatcccaacaaaaaaaatttaactccatatgtgttcctcttgttctaatcttgtcaaccagtgcaagtgaccgacaaaattccagttatttatttccaaaatgtttggaaacagtataatttgacaaagaaaaatgatacttctctttttttgctgttccaccaaatacaattcaaatgctttttgttttattttttacccattcgcatttcaaatgtcctgataagctaggcgggtccgagcc

SEQ ID NO: 651340 - DNA, 227 bp, Homo sapiens
tatccccttcgtgtgtcatcccctatgtgtgtcataccacacttcgtgtgacaggttatcacaccatcgctgggccctttgggcctgcatgtagtgtgggaggctcctggtcagctcctcacgtgtggtaaatgccacacacccttgacagtagataagcagacgactaggttatcctgttctcttgagcttaagtctcacttcggctccgacttttcctctctacc

SEQ ID NO: 651341 - DNA, 5008 bp, Homo sapiens
  misc_feature (4997)..(4997): n is a, c, g, or t
cagaactattctccccagtatgattcatatgatgtcaagtcgggcggagtagcagtaggaggactcgcaggctatcctggaccagctggccccccaggcccccccggcccccctggtacatctggtcatcctggttcccctggatctccaggataccaaggaccccctggtgaacctgggcaagctggtccttcaggccctccaggacctcctggtgctataggtccatctggtcctgctggaaaagatggagaatcaggtagacccggacgacctggagaccgaggattgcctggacctccaggtatcaaaggtccagctgggatacctggattccctggtatgaaaggacacagaggcttcgatggacgaaatggagaaaagggtgaaacaggtgctcctggattaaagggtgaaaatggtcttccaggcgaaaatggagctcctggacccatgggtccaagaggggctcctggtgagcgaggacggccaggacttcctggggctgcaggtgctcggggtaatgacggtgctcgaggcagtgatggtcaaccaggccctcctggtcctcctggaactgccggattccctggatcccctggtgctaagggtgaagttggacctgcagggtctcctggttcaaatggtgcccctggacaaagaggagaacctggacctcagggacacgctggtgctcaaggtcctcctggccctcctgggattaatggtagtcctggtggtaaaggcgaaatgggtcccgctggcattcctggagctcctggactgatgggagcccggggtcctccaggaccagccggtgctaatggtgctcctggactgcgaggtggtgcaggtgagcctggtaagaatggtgccaaaggagagcccggaccacgtggtgaacgcggtgaggctggtattccaggtgttccaggagctaaaggcgaagatggcaaggatggatcacctggagaccctggtgcaaatgggcttccaggagctgcaggagaaaggggcgccctgggttcccgaggacctgctggaccaaatggcatcccaggggagaaaggccctgctggagagcgcggtgctccaggccctgcaggccccagaggagctgctggagaacctggcagagatggcgtccctggaggtccaggaatgaggggcatgcccggaagtccaggaggaccaggaagtgatgggaaaccagggcctcccggaagtcaaggagaaagtggtcgaccaggacctcctgggccatctggtccccgaggtcagcctggtgtcatgggctttcccggtcctaaaggaaatgatggtgctcctggtaagaatggagaacgaggtggccctggaggacctggccctcaaggtcctcctggaaagaatggagaatacggacctcagggacccccagggcctactgggcccggtggtgacaaaggagacacaggaccccgtggtccacaaggattacaaggcttacctggtacaggtggtcctccaggagaaaatggaaaacctggagaaccaggcccaaagggtgaagccggtgcacctggagctccaggaggcaagggtgatgctggtgcccctggtgaacgtggacctcctggattggcaggggccccaggacttagaggtggagctggtccccctggtcccgaaggaggaaagggtgctgctggtcctcctgggccacctggtgctgctggtactcctggtctgcaaggaatgcctggagaaagaggaggtcttggaagtcctggtccaaagggtgacaagggtgaaccaggcggtccaggtgctgatggtgtcccagggaaagatggcccaaggggtcctactggtcctattggtcctcctggcccagctggccagcctggagataagggtgaaggtggtgcccccggacttccaggaatagctggccctcgtggtagccctggggagagaggtgaaactggccctccaggacctgctggtttccctggtgctcctggacagaatggtgaacctggtggtaaaggagaaagaggggctccgggtgagaaaggtgaaggaggccctcctggagttgcaggaccccctggaggttctggacctgctggtcctcctggtccccaaggtgtcaaaggtgaacgtggcagtcctggtggacctggtgctgctggcttccctggtgctcgtggtcttcctggtcctcctggtagtaatggtaacccaggccccccaggtcccagcggttctccaggcaaggatgggcccccaggtcctgcgggtaacactggtgctcctggcagccctggagtgtctggaccaaaaggtgatgctggccaaccaggagagaagggatcgcctggtgcccagggcccaccaggagctccaggcccacttgggattgctgggatcactggagcacggggtcttgcaggaccaccaggcatgccaggtcctaggggaagccctggccctcagggtgtcaagggtgaaagtgggaaaccaggagctaacggtctcagtggagaacgtggtccccctggaccccagggtcttcctggtctggctggtacagctggtgaacctggaagagatggaaaccctggatcagatggtcttccaggccgagatggatctcctggtggcaagggtgatcgtggtgaaaatggctctcctggtgcccctggcgctcctggtcatccaggcccacctggtcctgtcggtccagctggaaagagtggtgacagaggagaaagtggccctgctggccctgctggtgctcccggtcctgctggttcccgaggtgctcctggtcctcaaggcccacgtggtgacaaaggtgaaacaggtgaacgtggagctgctggcatcaaaggacatcgaggattccctggtaatccaggtgccccaggttctccaggccctgctggtcagcagggtgcaatcggcagtccaggacctgcaggccccagaggacctgttggacccagtggacctcctggcaaagatggaaccagtggacatccaggtcccattggaccaccagggcctcgaggtaacagaggtgaaagaggatctgagggctccccaggccacccagggcaaccaggccctcctggacctcctggtgcccctggtccttgctgtggtggtgttggagccgctgccattgctgggattggaggtgaaaaagctggcggttttgccccttattatggagatgaaccaatggatttcaaaatcaacaccgatgagattatgacttcactcaagtctgttaatggacaaatagaaagcctcattagtcctgatggttctcgtaaaaccccgctagaaactgcagagacctgaaattctgccatcctgaactcaagagtggagaatactgggttgaccctaaccaaggatgcaaattggatgctatcaaggtattctgtaatatggaaactggggaaacatgcataagtgccaatcctttgaatgttccacggaaacactggtggacagattctagtgctgagaagaaacacgtttggtttggagagtccatggatggtggttttcagtttagctacggcaatcctgaacttcctgaagatgtccttgatgtgcagctggcattccttcgacttctctccagccgagcttcccagaacatcacatatcactgcaaaaatagcattgcatacatggatcaggccagtggaaatgtaaagaaggccctgaagctgatggggtcaaatgaaggtgaattcaaggctgaaggaaatagcaaattcacctacacagttctggaggatggttgcacgaaacacactggggaatggagcaaaacagtctttgaatatcgaacacgcaaggctgtgagactacctattgtagatattgcaccctatgacattggtggtcctgatcaagaatttggtgtggacgttggccctgtttgctttttataaaccaaactctatctgaaatcccaacaaaaaaaatttaactccatatgtgttcctcttgttctaatcttgtcaaccagtgcaagtgaccgacaaaattccagttatttatttccaaaatgtttggaaacagtataatttgacaaagaaaaatgatacttctcatattttttgctgttccaccaaataaaacaaaaagcatttgaattgtatttggtggaacagcaaaaaaagagaagtatcatttttttgctgttccaccaaatacaattcaaatgctttttgttttatttttttaccaattccaatttcaaaatgtctcaatggtgctataataaataaacttcaacactctttatgataacaacactgtgttatattctttgaatcctagcccatctgcagagcaatgactgtgctcaccagtaaaagataacctttctttctgaaatagtcaaatacgaaattagaaaagccctccctattttaactacctcaactggtcagaaacacagattgtattctatgagtcccagaagatgaaaaaaattttatacgttgataaaacttataaatttcatgattaatctcctggaagattggtttaaaagaaagtgtaatgcaagaattaaagaaatatttttaaagccacaattattttaatattggatatcaactgcttgtaaaggtgctcctcttttttcttgtcattgctggtcaagattactaatatttgggaaggctttaaagacgcatgttatggtgctaatgtactttcacttttaaactctagatcagaattgttgacttgcattcagaacataaatgcacaaaatctgtacatgtctcccatcagaaagattcaccggcatgccacaggggattctcctccttcatcctgtaaaggtcaacaataaaaaccaaattatggggctgcttttgtcacactagcataggagaatgtgttgaaatttaactttgtaagcttgtatgtggttgttgatcttttttttccttacagacaaccataataaaatatanattaaaattca

SEQ ID NO: 651342 - DNA, 1240 bp, Homo sapiens
cagcatcagactgtcgacatccagaaaatgtcgaatatactctgaagggacgcacagttatcgtgaacggtgccccagacggaacccatgcgtgagtgtgactatcaatcacatacaatgtagaactacagcctatctatgtgaaagaaaaaaaagaggctccggtgtagacaaatgtgtgtggtgtaacagaaaggaactggctaccgttcggactataatgtagtcatgtacatgaacatgatacaagggtgttacactgggcttccgttacaagatgaggtctgtgtatgctacacttcccacatcaaccgttgtaaatccaggagaatggtgtctctatgtatgacatccgaaatatctatgggtgaaaaatacataccgacagggtaacggatagagaccagtgtgttagcattgtatccagatatctacaagcaccaagacaatgatgaacttaataccttgaaatgtgaaattgacatatgacgctatggataatcaaagtaacaagaagagctctaagatatcagacaagaccaacaaaaagtataaaaacaacggataatccagagcaaacttaaatgggatggtaatctaatagtctactgaacaaaaggaaactagatcaagcaagtgctgaattgaaatacagcactctaaaggaggttaaccctagtgctaaccagaacagaatgataggccaagaagtgaaccacctataaacgaaacctatccttggatggactcgttgaaaacttgactggcacatacaaaggcacctaatgcgacactatgcgaacacaacaaaacagtcgcagatcaaaaacacaaaatcagcaaaacacacatgtagacaacacacattggacagcaacagcgacaaacagtagaaacacacaacgcaggaaacaagccagagaacgtagagagcgaaaacaaaaaacaggaaacaggaaaaacaccatacacaagataccaaaaccaaagagcacaagaggaagaagaataacgacgaaacaaaagaaggaacacagcgaagaggagccaaacaaaaggagggacaaagccaccaacagaaaagccacagaaaatagcacggagacacaagaagacacatcaaaagcagcaggaagacgaaaaagccacaaagaggacaaagacccacatatgggagaagcaaaatacaacgactacaacaaccacacaccccaacaagcaaaaaaggcatgcagtcgaa

SEQ ID NO: 651343 - DNA, 3791 bp, Homo sapiens
  misc_feature (3780)..(3780): n is a, c, g, or t
cagaactattctccccagtatgattcatatgatgtcaagtcgggcggagtagcagtaggaggactcgcaggctatcctggaccagctggccccccaggcccccccggcccccctggtacatctggtcatcctggttcccctggatctccaggataccaaggaccccctggtgaacctgggcaagctggtccttcaggccctccaggacctcctggtgctataggtccatctggtcctgctggaaaagatggagaatcaggtagacccggacgacctggagaccgaggattgcctggacctccaggtatcaaaggtccagctgggatacctggattccctggtatgaaaggacacagaggcttcgatggacgaaatggagaaaagggtgaaacaggtgctcctggattaaagggtgaaaatggtcttccaggcgaaaatggagctcctggacccatgggtccaagaggggctcctggtgagcgaggacggccaggacttcctggggctgcaggtgctcggggtaatgacggtgctcgaggcagtgatggtcaaccaggccctcctggtcctcctggaactgccggattccctggatcccctggtgctaagggtgaagttggacctgcagggtctcctggttcaaatggtgcccctggacaaagaggagaacctggacctcagggacacgctggtgctcaaggtcctcctggccctcctgggattaatggtagtcctggtggtaaaggcgaaatgggtcccgctggcattcctggagctcctggactgatgggagcccggggtcctccaggaccagccggtgctaatggtgctcctggactgcgaggtggtgcaggtgagcctggtaagaatggtgccaaaggagagcccggaccacgtggtgaacgcggtgaggctggtattccaggtgttccaggagctaaaggcgaagatggcaaggatggatcacctggagaccctggtgcaaatgggcttccaggagctgcaggagaaaggggcgccctgggttcccgaggacctgctggaccaaatggcatcccaggggagaaaggccctgctggagagcgcggtgctccaggccctgcaggccccagaggagctgctggagaacctggcagagatggcgtccctggaggtccaggaatgaggggcatgcccggaagtccaggaggaccaggaagtgatgggaaaccagggcctcccggaagtcaaggagaaagtggtcgaccaggacctcctgggccatctggtccccgaggtcagcctggtgtcatgggctttcccggtcctaaaggaaatgatggtgctcctggtaagaatggagaacgaggtggccctggaggacctggccctcaaggtcctcctggaaagaatggagaatacggacctcagggacccccagggcctactgggcccggtggtgacaaaggagacacaggaccccgtggtccacaaggattacaaggcttacctggtacaggtggtcctccaggagaaaatggaaaacctggagaaccaggcccaaagggtgaagccggtgcacctggagctccaggaggcaagggtgatgctggtgcccctggtgaacgtggacctcctggattggcaggggccccaggacttagaggtggagctggtccccctggtcccgaaggaggaaagggtgctgctggtcctcctgggccacctggtgctgctggtactcctggtctgcaaggaatgcctggagaaagaggaggtcttggaagtcctggtccaaagggtgacaagggtgaaccaggcggtccaggtgctgatggtgtcccagggaaagatggcccaaggggtcctactggtcctattggtcctcctggcccagctggccagcctggagataagggtgaaggtggtgcccccggacttccaggaatagctggccctcgtggtagccctggggagagaggtgaaactggccctccaggacctgctggtttccctggtgctcctggacagaatggtgaacctggtggtaaaggagaaagaggggctccgggtgagaaaggtgaaggaggccctcctggagttgcaggaccccctggaggttctggacctgctggtcctcctggtccccaaggtgtcaaaggtgaacgtggcagtcctggtggacctggtgctgctggcttccctggtgctcgtggtcttcctggtcctcctggtagtaatggtaacccaggccccccaggtcccagcggttctccaggcaaggatgggcccccaggtcctgcgggtaacactggtgctcctggcagccctggagtgtctggaccaaaaggtgatgctggccaaccaggagagaagggatcgcctggtggacagattctagtgctgagaagaaacacgtttggtttggagagtccatggatggtggttttcagtttagctacggcaatcctgaacttcctgaagatgtccttgatgtgcagctggcattccttcgacttctctccagccgagcttcccagaacatcacatatcactgcaaaaatagcattgcatacatggatcaggccagtggaaatgtaaagaaggccctgaagctgatggggtcaaatgaaggtgaattcaaggctgaaggaaatagcaaattcacctacacagttctggaggatggttgcacgaaacacactggggaatggagcaaaacagtctttgaatatcgaacacgcaaggctgtgagactacctattgtagatattgcaccctatgacattggtggtcctgatcaagaatttggtgtggacgttggccctgtttgctttttataaaccaaactctatctgaaatcccaacaaaaaaaatttaactccatatgtgttcctcttgttctaatcttgtcaaccagtgcaagtgaccgacaaaattccagttatttatttccaaaatgtttggaaacagtataatttgacaaagaaaaatgatacttctctttttttgctgttccaccaaatacaattcaaatgctttttgttttatttttttaccaattccaatttcaaaatgtctcaatggtgctataataaataaacttcaacactctttatgataacaacactgtgttatattctttgaatcctagcccatctgcagagcaatgactgtgctcaccagtaaaagataacctttctttctgaaatagtcaaatacgaaattagaaaagccctccctattttaactacctcaactggtcagaaacacagattgtattctatgagtcccagaagatgaaaaaaattttatacgttgataaaacttataaatttcatgattaatctcctggaagattggtttaaaagaaagtgtaatgcaagaattaaagaaatatttttaaagccacaattattttaatattggatatcaactgcttgtaaaggtgctcctcttttttcttgtcattgctggtcaagattactaatatttgggaaggctttaaagacgcatgttatggtgctaatgtactttcacttttaaactctagatcagaattgttgacttgcattcagaacataaatgcacaaaatctgtacatgtctcccatcagaaagattcaccggcatgccacaggggattctcctccttcatcctgtaaaggtcaacaataaaaaccaaattatggggctgcttttgtcacactagcataggagaatgtgttgaaatttaactttgtaagcttgtatgtggttgttgatcttttttttccttacagacaaccataataaaatatanattaaaattca

SEQ ID NO: 651344 - DNA, 1323 bp, Homo sapiens
  misc_feature (1312)..(1312): n is a, c, g, or t
ctccgatcagaaaagcagatacaaaacaaacaacaacacacttggtcccttcagaccacatatcactgcaaaaatagcattgcatacatggatcaggccagtggaaatgtaaagaaggccctgaagctgatggggtcaaatgaaggtgaattcaaggctgaaggaaatagcaaattcacctacacagttctggaggatggttgcacgaaacacactggggaatggagcaaaacagtctttgaatatcgaacacgcaaggctgtgagactacctattgtagatattgcaccctatgacattggtggtcctgatcaagaatttggtgtggacgttggccctgtttgctttttataaaccaaactctatctgaaatcccaacaaaaaaaatttaactccatatgtgttcctcttgttctaatcttgtcaaccagtgcaagtgaccgacaaaattccagttatttatttccaaaatgtttggaaacagtataatttgacaaagaaaaatgatacttctctttttttgctgttccaccaaatacaattcaaatgctttttgttttatttttttaccaattccaatttcaaaatgtctcaatggtgctataataaataaacttcaacactctttatgataacaacactgtgttatattctttgaatcctagcccatctgcagagcaatgactgtgctcaccagtaaaagataacctttctttctgaaatagtcaaatacgaaattagaaaagccctccctattttaactacctcaactggtcagaaacacagattgtattctatgagtcccagaagatgaaaaaaattttatacgttgataaaacttataaatttcatgattaatctcctggaagattggtttaaaagaaagtgtaatgcaagaattaaagaaatatttttaaagccacaattattttaatattggatatcaactgcttgtaaaggtgctcctcttttttcttgtcattgctggtcaagattactaatatttgggaaggctttaaagacgcatgttatggtgctaatgtactttcacttttaaactctagatcagaattgttgacttgcattcagaacataaatgcacaaaatctgtacatgtctcccatcagaaagattcaccggcatgccacaggggattctcctccttcatcctgtaaaggtcaacaataaaaaccaaattatggggctgcttttgtcacactagcataggagaatgtgttgaaatttaactttgtaagcttgtatgtggttgttgatcttttttttccttacagacaaccataataaaatatanattaaaattca

SEQ ID NO: 651345 - DNA, 979 bp, Homo sapiens
  misc_feature (968)..(968): n is a, c, g, or t
tggatccccgacttgccattgtcttccccagttatttatttccaaaatgtttggaaacagtataatttgacaaagaaaaatgatacttctcatattttttgctgttccaccaaataaaacaaaaagcatttgaattgtatttggtggaacagcaaaaaaagagaagtatcatttttttgctgttccaccaaatacaattcaaatgctttttgttttatttttttaccaattccaatttcaaaatgtctcaatggtgctataataaataaacttcaacactctttatgataacaacactgtgttatattctttgaatcctagcccatctgcagagcaatgactgtgctcaccagtaaaagataacctttctttctgaaatagtcaaatacgaaattagaaaagccctccctattttaactacctcaactggtcagaaacacagattgtattctatgagtcccagaagatgaaaaaaattttatacgttgataaaacttataaatttcatgattaatctcctggaagattggtttaaaagaaagtgtaatgcaagaattaaagaaatatttttaaagccacaattattttaatattggatatcaactgcttgtaaaggtgctcctcttttttcttgtcattgctggtcaagattactaatatttgggaaggctttaaagacgcatgttatggtgctaatgtactttcacttttaaactctagatcagaattgttgacttgcattcagaacataaatgcacaaaatctgtacatgtctcccatcagaaagattcaccggcatgccacaggggattctcctccttcatcctgtaaaggtcaacaataaaaaccaaattatggggctgcttttgtcacactagcataggagaatgtgttgaaatttaactttgtaagcttgtatgtggttgttgatcttttttttccttacagacaaccataataaaatatanattaaaattca

SEQ ID NO: 651346 - DNA, 211 bp, Homo sapiens
gtgagattgtatccagcacagcctggccccaccctcccttatcaccgacagtcttgcgtatattccgacgtgagcgatagtaaggtcattcgcacatgtaatgactaatacaccgcctaaatacttcaacatacgtctcctaagaagaagcgtgttctcgtacataaccacagtacctatgtcacacccaagacattcatcaatgatgcag

SEQ ID NO: 651347 - DNA, 341 bp, Homo sapiens
ggcccccccccaacccccttaaaaacaaaccttggggacatggcccattaaggatcagggagccccccatttggggcttatctggtcccattgtttccaaaccctttcatgggccccactgagggaagtttaaaacctgaaaaggggaccttttttttttttaggggttagaaccaaccatataaatgtaaaaaaaaagttttagaggtctgttttccaaccctgctagggggttaggtaaccttagccgctttaaatttgaaaagcttttttttagatcctgccccctttcccggacctttttaggagggatgtagtaaaaaaagcttttttttaagcca

SEQ ID NO: 651348 - DNA, 146 bp, Homo sapiens
cccattgcggttggggtcacaatgctcatgatgcgggcaattctgcttctccctgggggtcgttgccaatatctatataaccaagctgatgaggtagagaaccagattctgtaccgggatgtccagggcatcaggcaggagcagat

SEQ ID NO: 651349 - DNA, 217 bp, Homo sapiens
atagctcggtaccacagaggctgtggacgaggtggtgatcacttgaggtcaggagtcagagcaggctggtaacatgtgaaacccatctctgaaatacagaatactaaaaataccaaaattactgcgtgtgtgtgtgtctgtaatccagctactcaggaggctgaggcaggagaatctcttccacctcccgggttcaagcaattcttccattcagcct

SEQ ID NO: 651350 - DNA, 117 bp, Homo sapiens
ctagcatatatagcaaggtactaacccctataccttctgcatatgaattaactagaaataactttgcaatggagagccaaagctaagacccccgaacctatacctgcgaacctatga

SEQ ID NO: 651351 - DNA, 1683 bp, Homo sapiens
caacttggaagactgtctatatataacttcataactagtaattggtttcccccaatgaaaagtaagctcctaactgttctttaacgtgcaactgacacactaacacaaacattctcagcaactttaacttaacagacagctccacgtagcagctcagtctttgcgcaaactacatacacttaactctagcaactccagctctacctactacagcgcattctctcactctctaacttctccttatcctcctctctggcatactagcacctctcactctactagctcatattctctgccctcactcatctcctggcaccattacacctccctacgcccacaaccctcctaacacgcgcacgcctcctcagcctacacatgtgcacgcctaccactctctgtggatacccttcaacttctcacacaaacccactgctaactacgcgcctctccgactccccatcctctccctaacttgcttctacacacacgcttaaacctctagcctcgcccctctctacttcacttgcagaaccaacccattaacctttcccaactctcaacacccaacacgcttcctccaaaccacctttccacactcacactcccgcaaccactgacaccgcttcgcgcttccccagcagaatcaccactccctccttaccacacacgcacgcccccttccaaacttgcttccacaccagctaacgcagccccccaacaaccttcttgcgcccccttacgccctctgccacacttccccctctccaccccttaaccaacccctccaaaccctcctccacacccaaacctctccccggccgccgcgccgcatctcccctccccgcacggcacacaccccttctaacccttgcgccccctctaaccctcacacccacctggcgccacttacccactttaccccacacgccacctgcgccgccctctctctacacacaccacagtttccaacaccctacttttctcaaccacaaaacaactctcactcctacacttcccattcccccttactacgtcctttaaacacacaaaccccttttctaagagagtctgattccactagtcctctgaagtcttctcccttctttgcaacaacctctccacgggtcaacacaaaaggcctcttcagctccaacacttacaccaagactacacaacacattagcgcaacacgttaatctcggatccccttacacacctccaacacggcacatcaccactttgcgacctccaacactctgcgctcacacctcgcacacgcacgacgcctcactctacaaacactctctaattcaccctaaatcctatattcaggcacattcctggcaatttctctcacaaccgtaaacttctacaccccccaacttacctacttctcgcacccactttgaggcccccacctacttttccgctccaacacaaattaacccaggcctcccacccataaataacaggggacacagtcacactacgctcaccacgcacctaacactcaaacactatgcgttctcacttctcacaccgactccactcgtcgctcacacaaccacacacattcgcccacccctcaccaacatcaacccacacatcacccccacaccagcctccagcccactcccactacaccacctaacaacccatctgccgccgcccacacacctcacc

SEQ ID NO: 651352 - DNA, 329 bp, Homo sapiens
atctcttagaggatcccattaggtccttctgcgtgtccatcatgatagacgggacgcggtgcccagcgagggcttctcgcgggtcagcctcctcaggtcggctacccaggcatccttcctgcgcgctccgctcattccctggcccggcactgcccgcgcactgcgcggactccgcctcactccatcccagggtggaagacccagccggcaaagtgccgcttccccctgacaggggtcctgctacctccctgtggcactcacgctgaaccgcgcctaaatgcgtaccgatgctcgatcttcgttaaatctctagtcatagctcatgtcct

SEQ ID NO: 651353 - DNA, 445 bp, Homo sapiens
ttccttggcgtgtggcagcagaactcccgtttctgtctctgtcctcacatggccgtcttccctctgggtctgtgtcctcacatgctgttttcctgtctgtgtatggctgtgtcgaaagtgctctcttttaataaggacaccaatcataatggattagcgcccacactaacgacctcatcttaactggattgcctctccaaagaccatatttccaaataagatcacattaataagcactggggattaagacatcaatatatttcggggtaagggggacacaattctcattcattgctggtaggaatgcaaaatggtaccatgacttggaaagataatttggcagttttttataaaactaaacatactcttaccatgttatccagcagttatccttcttggcatttatccaaaggaattgaaaactcatgttcacaccaaaaaaaaa

SEQ ID NO: 651354 - DNA, 885 bp, Homo sapiens
  misc_feature (30)..(30): n is a, c, g, or t
  misc_feature (268)..(268): n is a, c, g, or t
  misc_feature (272)..(272): n is a, c, g, or t
  misc_feature (370)..(370): n is a, c, g, or t
  misc_feature (379)..(379): n is a, c, g, or t
  misc_feature (387)..(387): n is a, c, g, or t
  misc_feature (400)..(400): n is a, c, g, or t
  misc_feature (430)..(430): n is a, c, g, or t
  misc_feature (435)..(435): n is a, c, g, or t
  misc_feature (442)..(442): n is a, c, g, or t
  misc_feature (449)..(450): n is a, c, g, or t
  misc_feature (453)..(453): n is a, c, g, or t
  misc_feature (512)..(512): n is a, c, g, or t
  misc_feature (517)..(517): n is a, c, g, or t
  misc_feature (524)..(524): n is a, c, g, or t
  misc_feature (529)..(529): n is a, c, g, or t
  misc_feature (537)..(537): n is a, c, g, or t
  misc_feature (540)..(540): n is a, c, g, or t
  misc_feature (552)..(552): n is a, c, g, or t
  misc_feature (559)..(559): n is a, c, g, or t
  misc_feature (571)..(571): n is a, c, g, or t
  misc_feature (580)..(580): n is a, c, g, or t
  misc_feature (592)..(592): n is a, c, g, or t
  misc_feature (596)..(596): n is a, c, g, or t
  misc_feature (606)..(606): n is a, c, g, or t
  misc_feature (642)..(642): n is a, c, g, or t
  misc_feature (677)..(677): n is a, c, g, or t
  misc_feature (800)..(800): n is a, c, g, or t
  misc_feature (808)..(808): n is a, c, g, or t
  misc_feature (833)..(833): n is a, c, g, or t
ggatcttaattacatatataattatcaaangatagtccttaatttccaaaaaaattcctcttttgaaaatcacagaatcagaaagcataaactttaaaacaagttctctgaatatttacaatgtggtataaacattatagaagaccatggatattaaattgcctgggtgtggctaatcagcaaggcgtattctttattgcatatttaactcacatatgtgggattttaaatatgacagactactaaaattcaaatgcatgtatctgcnagcngggcagggggtaaaatcatgaatgggacagggcggtcagcccaaaaccatgcaattaggttgtgggtttattattttcaaaagtgaaatttctatgtnccatttganactatgtngcatattcatttngcattcacattaaacccccatttgactctnacgcngattcanggggggnngtncaacattcactcagtggctaggtccacaactcaactctcaatgttagggcggcccggcnacggnggtagcnacgcnaaccaaanggnaatggacatttngtcactngccagccctttngttacaacngtgtggtaattncccnagggcaattngcggccgggtaattttcggcggttaaggggcttccnctggggggaaacaccacaaatttccgagtgtgagngtgagtccatggtggtataaatatatatatgcataattacacaatttacactgcacacatcgtttacaggggacaattaactgagagggttaatttaaatgaccatacaaaatacttcagtanacaaagtntgacaggcagtatagaaaacattcntagactcctagaaataatctgaattccttacattctgaagaaatatcatttc

SEQ ID NO: 651355 - DNA, 213 bp, Homo sapiens
ggtcgacaacagaatccgatcctgagatgatccaagtcaaacagaaacttgacggaaatagtagagtctgaaaatgatgcactctgcgcacacatatacaagacacacacacacacacgaatccacgcacacgaggcacggggcgtgcgggctctcggtctctggttgcacgcccacaccccccctactcctgtattcagatgccctccatgg

SEQ ID NO: 651356 - DNA, 214 bp, Homo sapiens
cttactgattacatattcttctccttgatgggttctaaactgtaattatttatagtagtgtatatggatttatagatgcacacctattaacttgtacacatctaccttgaggtgataattttaaatgggctaaataatcttattttctgcccctcttctgtactttcccctttttgtatttctaccttcatttggcttacttggataggggtga

SEQ ID NO: 651357 - DNA, 729 bp, Homo sapiens
agcggcatatttgataagatatgacacaaatggcactttacttgtgatcttccttccctaaatccataatacgagtcttatcataaagaacaacaacaaaagaagcacactaaaatatgagacatattctaatacaggatagaggaatattttgcaaaatacccaaccagtatttctcatatctattaagatcatcaaaagcaagggaagtccgagaaacagtcacagtcaggagatgcctatggaagcatgacaactaaatgcaatgtcatatcctggataggatttggaatagaaaaatgactttagctaaaacaaaaacacacagaaaaaaactgaataaactatgggctttaattaataataatatcaatattaatcattaatgaaaacaaatacaccataatagtgtaagatgttaacgataggagaaactgggtgtaaggtatatgggaactctctttttaaaatttttcagttaatctaaaacagtactaaaaattaaaatctattttttaaaaaatgtgatctctgataataatgccaaacttccctttaaaagagccacatcacgccaggcatggtggctcatgcctgtaatcccagcacaaagccctgaaccaggcttgggtaaaactcttctagttagaaatagtctatgtagccaggcatggtggctcacacctgtaattcccagcactttgggaggccgaggtgggcggatcacct

SEQ ID NO: 651358 - DNA, 423 bp, Homo sapiens
tgtgggtggaatgagggacgaccatatttatttcagtcagatccatctggagcttactttgcctggaacgccacagcaatgggaaagaacctatgtgaacgggaaaactttccttgagaaaagatataatgaagacctagaactggaggatgccattcatacagccatcttaaccctaaaggaaagctttgaagggcagatgacagaagataacatagaagttgggatctgcaatgaggctggctttaggaggctcactccaactgaagtgagggattacctggctgccatagcgtgatgaagatgtgctcacacactcgactttttcatgtttaaagtatgttttgtttgtgcagacttatttctacatggtttagtggattcacattttaaaaataatcataataaactgttaaaaccaaa

SEQ ID NO: 651359 - DNA, 150 bp, Homo sapiens
  misc_feature (16)..(16): n is a, c, g, or t
  misc_feature (19)..(19): n is a, c, g, or t
  misc_feature (22)..(22): n is a, c, g, or t
  misc_feature (38)..(38): n is a, c, g, or t
tgacggcctgcagganctnatngctgcaggttgtcctnccttccgcccacgagtgcgccatgtttcagcggcgcagttgtgggagaagccacgtcgtgtttcacatgtccggagtcgaatgcatttgtaaatccctaagtcaagtaggct

SEQ ID NO: 651360 - DNA, 303 bp, Homo sapiens
ggactctgtggtgtgtgaagggagtgtgagcccgattggcgtggaggggtgtgtgtgattgtgtgtgaagagttgtgcttgggtggagtgtgtgtgtgaattgcggaggggctgtctgccgacgagctggatgtggagatgcgtcgcacgccgattgggtgttgtagtgctgttgggagtcggagaggagtggtgtgtgtcgatgcgttgtggtgtgtgaagagggaattgccttgggcgtcggctgcctcaccggctgtgtctatgccatgtctccctgagtgtgatggccctagtaatgcc

SEQ ID NO: 651361 - DNA, 920 bp, Homo sapiens
agcggctcgcgggccagccagccagccagccagcctgggcctggcggcgggcaccaggcctgtcccgatgccctggagccagtgccccagtgatgaactggcttctcgctggtgcgagctgtgctggctcttctgctgcccaccctgccctgagcctgcatcgcctgccaagctggccttcctgcctgccctgagcccacctacacggtgctggctgcctggagcagcgctggctgcctggctgcgtccctgccccaggccaactggcccagggcttacctgcctgcactgcctgcctgcaggcccatggcactgtgcacctgcaagacagccgcgacggaagggggctggcagggccggcaggaggccccgtgttgctggtgcagagaactttgacagccatcgagacagatgctgccgccagaaccagtgtgctatgataagcttccaggcaatgcctagctaatggccttgggaaccagcccctgtttactgaatgagttccctttactttacattccttggcgggccaaactgtggccactgtggggaacaaacactggaggcatctcgtggctttgccagttggtttcccagttgcacggctttgttgcgttggcactctatcacatgacacctggcatttaccacttgccttagagtcccttttcgttccggcgaaccgggtgacacaaacggcacgggatggtgaaacccatggggggccccgcatgtaattggcttgccgaagtgcttatgatcgtaaccaagttgtgtggcccgttcacggagaagtacaaccggtagagatacaagacgggtggcgaagccaaggtcctttgcgttcccgataacgtgcacaattacactccgggggaaattaacaggcgtccggatcaaagaccgtccgaggagcataa

SEQ ID NO: 651362 - DNA, 492 bp, Homo sapiens
tactaagttatatccttgagcaagttggctgtttcctgatcaaataggaggtcatttgtgagcaaaggtcatccatacagcatttcatatggattaagccccatttttttaggagaatttcggattcttaacaaggccatgggtgagagctaggctatgggagatgagtttctttcgttagtttccttaagtgcctcttgagctgttttgtcttcttggccttccctgaggattgtggcctccaggtgcagtgacaggtgacattgtatccctagcgccctagaaattccctgagttattgtggccttaaaagctggaccattgtcactttgtaagctttggggaagcccaaatctaggaattaggactttaaccacttaccaagccttctctgtcttgtagggcaaagggcttctaatcgcaatctctcgtgacaggtgtcaaccactaggcccaaccaacgttagttcgacacattcccttttgaactta

SEQ ID NO: 651363 - DNA, 260 bp, Homo sapiens
cttgccatgtcactttgattccccaaaacttaactgctaatagctactgtgactggtaaccttattgataacataaataattgattaatcccatacttaaactagtatctacatattattctatgcattcatgacatacctaaccttttcttgatttttttttttttaatgtttctaggctacagggttcatctgggtagttttttcattttggtcacaattcccaaaaaaaattttccaatatgtgtattgggaaaaaa

SEQ ID NO: 651364 - DNA, 143 bp, Homo sapiens
gtcgggagaagggagggagagaattttattaaatgtgacgaactgcccccccccccccccagcgggaaagcggcaaattttttgcaatttttggcggggtttccctggtccggccgggttaaaaccctggattttctggtaaa

SEQ ID NO: 651365 - DNA, 1094 bp, Homo sapiens
  misc_feature (585)..(585): n is a, c, g, or t
cccacgcgttcgagggctgtggtgaccgggctggttccactagtgggcatggaccataaaacgacgtgatcctccactgtgctcccgtctgcaccacgtccagtggttgtggtcaagcgcgctgctctgtcctctctgggtgggatgccatcctgtgtgtactgatgcctgagttcagccctcatgtgaggtttggtgaataagttcttacatgcttctgtaaacgccgcttggcatcaatgtctttatgagctatgttgccttatcaagtatacaccaagtctgcatggcacgatacatacagcacgagtgcgagtttgtcacccaacggcccgtcgagcgtccccatgtgcacttatccattggccgtgggccatgtgtgtgttgcacatgcaagacaaaaattagagacttgcattgtggtccttcatgggctcgatcatgaccccgggcaccactcccaggcttgcttggagaacgtaggaaagaacaatcgactggtgctcactagccgcttcgctggtaggtccgagctatctcgcgaagattgatcgctcgacgaagtcgggctaggttgtgcttctntgctccaaggagcccccttgtatcccactttgcactagtgcctgtccctttgtcccaggtgatatcccagatgggggtcgaccctccgaacttggtcggcctggaagctaccagggctgtccgcattgagttctccatgtatacatatccactactaagtagaggaaaataccatgacatctcgtaactccgcaatcgcacgtgccagtaaggggagcaacgcatgaagggagtgaaccctaaaggttgacccaccccaggggtctgagagaggaaacccagtgacgggggggaaggcgagacattgggttgaaaggagagaaccccatgccgctagtattacgaagaaaattacctagggacagttataccccacgtaaaagaaacccttaaagtacattgcatttcaccccgtgggtaatgggcctagggttttacctggacaaagccgagaacaaccgcggactcgatcaaaagcgaagttgccccaagaaacatgggaatcctga

SEQ ID NO: 651366 - DNA, 100 bp, Homo sapiens
ctactgtctgcccctcacaagacctgctcaccaagacctgctcctgcttctgccttctgcaaatggctgcttcctgcttctgcctcctcaccaagactct

SEQ ID NO: 651367 - DNA, 435 bp, Homo sapiens
gtgagcggaagtgtgtgaagtctcccggcgataggtcttagtggtagcgggctggggcgtactagagcaagggccctaaatcttggcgctcagtgtcctggaacgccggtctatcccacccatcatgcggtccccaggcctcccttcctcattccttccatgatatcgtctgcggaggttgctgggatccccaatgctgtgctcctgaatccgggtctctaacggatgtgtccgtgcgacagtcattagattaatactcttgctgtggcacttgatgaccatgggatgatggggggcctcgtggctatccaggccctggcctgtcctgcaggctctacacgaagttctcttcctcttctgcagactcaccacctggcggctcctcaggggtgcctgcgcagctgcccgcgtggcgcacgccgatggagcggccca

SEQ ID NO: 651368 - DNA, 606 bp, Homo sapiens
  misc_feature (142)..(142): n is a, c, g, or t
  misc_feature (150)..(150): n is a, c, g, or t
  misc_feature (152)..(152): n is a, c, g, or t
  misc_feature (163)..(163): n is a, c, g, or t
  misc_feature (196)..(197): n is a, c, g, or t
  misc_feature (226)..(226): n is a, c, g, or t
  misc_feature (234)..(234): n is a, c, g, or t
  misc_feature (254)..(255): n is a, c, g, or t
  misc_feature (262)..(262): n is a, c, g, or t
  misc_feature (286)..(286): n is a, c, g, or t
  misc_feature (288)..(288): n is a, c, g, or t
  misc_feature (299)..(300): n is a, c, g, or t
  misc_feature (302)..(302): n is a, c, g, or t
  misc_feature (311)..(311): n is a, c, g, or t
  misc_feature (328)..(328): n is a, c, g, or t
  misc_feature (335)..(335): n is a, c, g, or t
  misc_feature (345)..(345): n is a, c, g, or t
  misc_feature (350)..(350): n is a, c, g, or t
  misc_feature (356)..(357): n is a, c, g, or t
  misc_feature (367)..(368): n is a, c, g, or t
  misc_feature (378)..(378): n is a, c, g, or t
  misc_feature (380)..(380): n is a, c, g, or t
  misc_feature (386)..(387): n is a, c, g, or t
  misc_feature (389)..(389): n is a, c, g, or t
  misc_feature (391)..(391): n is a, c, g, or t
  misc_feature (406)..(406): n is a, c, g, or t
  misc_feature (451)..(451): n is a, c, g, or t
agcggctcgcgccgcccgacgacctggacctgttccccacgcccgacccccactacgagaagaagtactacttcccggtccgcgagctggagcgctcgctgcgcttcgacatgaagggcgacgacgtgatcgtcttcctgcncatccagnangacgggcggcnaccaccttcggccgccacctcgtgcagaacgtnncgcctcgaggtgccgtgcgactgccggcncggccagnaagaagtgcacctgctaccnngcccaancgccgcgagacttggctcttctcncngcttctccacnngngctggagcntgcgggctgcacgccgnactgganccgagctcancaacntgcgtnncccggcgtgnntggaccgccncngactcnngncngcgctgcgcacgccncaggaagttctactacatcaccctgtacgagaccccgtgtcccgntacctgagcgagtggcggcatgtgcagaggggtgccacgtggaagacgtcgttgcatatgtgtgatgggcgcatgcccacgcctgaggagcttgcgcctgctacgagggcacggactggtcgggctgcacgctacaggagttcatggactgcccg

SEQ ID NO: 651369 - DNA, 148 bp, Homo sapiens
ctatccagcccaaaacacctaagaatggaggtaaagcgaaggcccagcacagtacccagaggaaactgccaagccaaaagatgactaaagaaatacaagttacggtatctggtatctagcatgtaaaatcttcagctggtggatggtc

SEQ ID NO: 651370 - DNA, 991 bp, Homo sapiens
  misc_feature (991)..(991): n is a, c, g, or t
ttaaggctctcctcggtgtccacggcaccctctttccttggttgcagcgatcctactgccagaaattcgccatgtctattctcaggatccacgccagagagatcttgactcccgtgggaatcccactgttgaggtcgatctgtacaccgcaaaaggtctcttccgagctgcggtgcccagcggtgcgtccactggcatctacgaggccctagaactccgagacaatgataagacccgcttcatggggaagggtgtctcacaggctgttgagcacatcaataaaactattgcgcctgctctggttagcaagaaagtgaatgttgtggagcaagagaagattgacaagctgatgatcgagatggacggcacagagaataaatctaaatttggtgcaaatgccatcctgggagtgtccctggctgtctgcaaagctggtgccgtggaaaagggggtgcccctttaccgccacatgctgacttggccggcaaccctgaagtcatcctgcctgtcccggctttcaatgtgatcaacggtggttctcatgctggcaacaagctggcatgcaagagttcatgatcctgcctgtgggggcatccagcttccgggaagacatgcgcattggagcagaggtttacacaaacttgaagaacgtgatccaggagaagtccgggaaggacgcacccatgtggtgatgagggtgggtatcggactaacattcggggaacaagaagcctgggagcggtcaagaagggagggaaggcggtaactgacagggggctcggcggagggggcgccaagatcaaaggctgcaggtgacggatcaagtctcgggacccgggttcacccgccaccggggtggaacatcgcgaaacacggggaaaacgtcgagagagggggcggcaaacacagtagggggagacacacaacggagggggaagagcacagaacaacaaaccacgaggcagaacgccgtcccacacaccaccacgcn

SEQ ID NO: 651371 - DNA, 159 bp, Homo sapiens
aggctgacgtcctcttcaccaggagcagcagcctgagcactatgaggtcagcccaaggagctcgctggagagatacgatggtatcgggcctcccttcagcgtgcatcttcaggatccagaacttgggcttgtcccccatccacgggatgatgatgaaga

SEQ ID NO: 651372 - DNA, 356 bp, Homo sapiens
gatgaccgcgttgccggcggtgcgcgcggtgatatcgagaccgtcgaggatcgggacacccgagctcaacagcgttgacagcgttcgacagaacgcgccaccgcgatcttgcgcatcatcatcccgagcaccggcatcttcagcatgatgccgtcaatcctgtactgccctcccaccgtcccgtagtacgtcttgaacgcatagcccaccgcgaagatgccgacgatgatgaatggcatgaaggcgacgaggaagtcgctgaggaagatgacgatgcgcgtcggcagcggcagcttcgcgccaaggccggcgaacaaggccgcgaaagtcggaatgaccttccagagaatgacgcc

SEQ ID NO: 651373 - DNA, 113 bp, Homo sapiens
aagaagattgcggatgagaatgttttcatgttacttataccaacattagttcttctatagggtgatatgattggtccaattcggtgtgtgaggagttcagttatatctttggg

SEQ ID NO: 651374 - DNA, 393 bp, Homo sapiens
ggtggtggtttgtttggttcgttaggtaatttaagttacactttaaacacatagatctagaggggagaagtacctcagaggacacatctccaatctaaattaggtcccactagtatgaaccttcacagcccctaattcttttctgtagcacttacctcaattggtaatggcatggctgtgtgtgtgtgtgtgtgtgtgtgtgtgtgtgtgtgtgtgtgtgtgtatcacctcttttctcccccaatagactataaactgcctgagggtgtgaatcaaatctgttgcgctcgcgtgtctcagtacagatcgtgcgacatcatacgtgtgtgagaacatatcgataggaatgaatgagtgaggatcttggggacactcctatcacttccctctgtc

SEQ ID NO: 651375 - DNA, 915 bp, Homo sapiens
  misc_feature (636)..(636): n is a, c, g, or t
  misc_feature (673)..(673): n is a, c, g, or t
  misc_feature (724)..(724): n is a, c, g, or t
  misc_feature (734)..(734): n is a, c, g, or t
  misc_feature (740)..(740): n is a, c, g, or t
  misc_feature (744)..(744): n is a, c, g, or t
  misc_feature (751)..(751): n is a, c, g, or t
  misc_feature (769)..(769): n is a, c, g, or t
  misc_feature (775)..(775): n is a, c, g, or t
  misc_feature (782)..(782): n is a, c, g, or t
  misc_feature (796)..(796): n is a, c, g, or t
  misc_feature (800)..(800): n is a, c, g, or t
  misc_feature (811)..(811): n is a, c, g, or t
  misc_feature (817)..(817): n is a, c, g, or t
  misc_feature (819)..(819): n is a, c, g, or t
gcctttagcagctgaaaggggatttaggcccggaagatccgagtccatccgcggcggggagagggcaatgcgggaccggtaggggccggagcagcggcggcggcgctcggactgtcccatccgccccgtattgaggcgctgggagcggcggggcgacaggaaagcgatggtgaaagcggggccgtgaggggggcggagccgggagccggacccgcagtagcggcagcagcggcgccgcctcccagagttcagacccaggaagcggccgggagggcaggagcgaatcgggccgccgccgccatggagctgagagtcgggaacaggtaccggctgggccggaagatcggcagcggctccttcggagacatctatctcggtacggacattgctgcaggagacagaggttgccatcaagcttgaatgtgtcaaaaccaaacaccctcagctccacattgagagcaaaatctacaagatgatgcagggaggagtgggcatccccaccatcagatggtgcggggcagagggggactacaacgtcatggtgatggagctgctggggccaagcctggaggacctcttcaacttctgcttccaggaaattcagcctcaaaaccgtcctgctggttgctgaaccanatgatcagtcgcatcgaatacattcattcaaagaacnttcatccaccgggatgtgaagccagacaacttcctcatgggcctggggaangaagggcacnggtgtncatnatcgatngggctggccagaagtccnggatgncgcaccnccagaatccccttngtgngaacaaactcncgggangnggcgggacgcgcccactaaaaaggagcttgtgttgtgagcccacaaaatctggggctgtggcggcgaatgtgtgtacgggcgccccccgagagagg

SEQ ID NO: 651376 - DNA, 191 bp, Homo sapiens
aaccctttggaaggggggtggcagtttttcctttttggccccccccccggtttttttaaaaattgggcataaaccggggatttgttttacccggtcatttttttaactggggggccctatagtttggtttccttggtagattttgcctttttcaaggggcccccacccgccataaacttttccctttttga

SEQ ID NO: 651377 - DNA, 464 bp, Homo sapiens
  misc_feature (40)..(40): n is a, c, g, or t
tataagtactttgtcactaatgtcacgtcattgtcataanacgcagtgcactatcacatcaacctctggtctcaccagtcggcggaggtatgcacagcagtcaaccatttcaccataggtttcaagaagagttacaactgtgcataatcggtgtccaaaaagggtatgaagtgatttgacacaagtttcatctgactcatcagcaacacatgctttggcaaatgcagttcctgcagtcaatagttatccatgatcttcaaatggacacggctgaagatactgagcaaaggcagtcaacaccaaggcatagaaattttcgtctcccaaagctttaagccgatgagcatccgcactagtgtgagcatcacgacgaaacacacccctgaaataagccaagttaaagagaaaaagaagggtaataaaggttaaccgtctcagtgtatcacacgcgcgcggggtcgacc

SEQ ID NO: 651378 - DNA, 207 bp, Homo sapiens
tataacatacagaagggctattgtaagtaggtctcatgagttggagtgtaagataaatcatgctaaggcgaggatagaaaccgatatcgccagatacgagatagtataggattgcttgaataggctagctaagtagtaggcctctgccccacggtagtcaatcagcgccatcatagatgagcgctataaaccccacggaagtcatca

SEQ ID NO: 651379 - DNA, 451 bp, Homo sapiens
aaaatctggaacacattcgggcccgaggtccactgtttgccccccccgttggaggagttggccctgaacgagttggtaacgttaacgtgcttggcacgcggtttaagccccaaggaagtgttggttcgttggttgcaggggtcacaggaattgccccgggaaaagtaccttatttgggcattccggcaggagcccagccagggcccccccccttttgttgtgaccagaatattgggggtggcaaccaaggattggaaaaagggggaccccttttcttggatggtgggccaagaggccctgccgttggccttcacaaagaagaccttggcccgtttggggggtaaacccacccatgtcaatgtgtttgtttttatgggggggggggggggcccctgttattgagccgcccgcctgtccccccccctgaataaattccatgttcccccaagca

SEQ ID NO: 651380 - DNA, 301 bp, Homo sapiens
  misc_feature (33)..(33): n is a, c, g, or t
ctcggtacaatcagttaacaacaatatgaatgngcaattttatgttgaattttacaataatttttttttttgaaacagagtctcgctctgtcgcccaggctggagtgcaggggcaaaatttcggctcactgcaagcgccacctcccgggttcatgccattctccggcctcagcttcccaagtagcgaggactacgggcatacactaccatgcccagttaattttttggtatttttagtagagacggggtttcacccggttgggccagacgggtctcaaactcctgacctcaggtaatccac

SEQ ID NO: 651381 - DNA, 1468 bp, Homo sapiens
ggtccaggccgctggtgtggagatggtgcaatcgcatctcctcggggatgttggttgcaagcaactcctaatcctcgctaaaggcagtgactccgagacgcgccggtgggcgtagcagtagcgtcctgactactcccatgtctgtgctccgttggaggtcacgcgtgagctgaggagagacttgggaggtgctggtcctagggaatgctcaagtgggacctggctgctgtcgctatgcacagtgatttcctggccattcattctagcaccagtgctctctctagccccgatgaacagacaggtcctatggctcaagaaaagactagtgcctcaagtaccattttcttagggcgcgcatctgttgactcatcaggattcaatatcgccttgtgaccccacttgtatccgcgcgtcaccatccctactgaatcggtcccatcggggggcagggcccatttggggggactaggctagcttgccacaatgggcacttgaggggttgcccaattgcattcccgattggtccccgggcggacttgacacgccttcgagctaatgaaagctttcgctctagtgcccacgtgtggaatttacactttgtgccaccctagaaaaaggttcggaaccctttgcctgtggccagtggggcccctttggtccatgcgaacgccacggaagtccggacagtgccatgacaaccattctaagggtgggcactggaatggtccccatccaggaggtgtcaaaaggtctccggtcgttaccaaggaaaccccaagagcatgcgccatagtcctcacaaggggccgacccccacaggaaagacgccgccccccaacggtggggtggggcattctctacggtgccaagcggcgccaacaagcggggtccgcccaatggccctaaggaacgcgcaagatccacgctggtgcgctataaaccaagaaaaatgggttcgaaccaaagggcgccacattaattaggcgccgttggttagggtgccccactttgcgagcaaagaacggggcgccccttcccgtgtcgtaacggttagggcccagcctttagaagggccaacggaaacgtggaactgcggtgtggccacatgcgtagtagagcgccaagagcacaaatcacctatacgcccctttgggcgccttctccaaggcggagaacgcaccaatcgaaggcccgaacactttcgttatacgtgcccgttgaacacggggtggcgccggtccctcggttgttccccgccccgtttttcgacgcaataagtgtcccccaaactgtggggaatttccttggggttcacctaaacaccctaattccgcccgccgcccacagcgttggtttgccaaccttaagacgtggggggtgccccccagagtgactccaacgagacccaatttgtgttcctatgggcaagttattcccagcgggtaggcgcgcattaaaggattcagag

SEQ ID NO: 651382 - DNA, 379 bp, Homo sapiens
cctagatatgtatgaagtggaggtatcaggacaatcctatattactatttatggtcttatttataataaggatcctcctaagtagtaatgtttctggaaactcttaatgctgatccattctgagacaggcacgtgagaacttacttacgttcattagcaaatagtatctgcatgatgtggagggtccaaagaagatgcgcaccagtctacggtaaacatctagctaaggctgagtctgtatgacacatggagtctgcaggcatgtcggacggtcagatactgtccctaaccggagttgctgtctgagaatgctgatggataagggttaagcacctctgtcaaggagtgtggaaatttctgtgcccatttcaaggggatc

SEQ ID NO: 651383 - DNA, 1009 bp, Homo sapiens
agcggacttgctgctgatgaaccgtgggcaaccacgggtcggctgaaggatcccaaaatggttgggcgaaaagttgctctattcaaccattgactgtggtaacttttgtgtgagagttcataccccgagaaaccgaaaaggcagattgctaaggttacccgtaagacaaatccttggcaactgagagctctctaccatcacaaggtccggcatgctatgtaggcgtgaggaatcccatcaagtctatcgacctgggccttcactacagaaggcctaattgtcggtctagggctggccttggctgcgactgactgtctgatgaacgaacgattctaatagcgcatgaaaggctgtcccggtgccacgaggactaaaactagtacctgagccaggatggcaatgccggatgagacaacacgcacaggagtgtgaccaatcattgctgctgcagttggagtgctcgtcgtctcaagagagggccgaggcattggttgcaatgatgcagcagaaagcagtattggctagagaggatgcaatgacacgttagaattgccagtattgaatgctaggattgcacgcatttgaaggggactctgaaatcgaatagcgttttctcctaaggataaacgcatacattctcaagtaccatagcacacagaaaagtaatcccgcgtcactttgggcctccacccagaacccgaaaatatatgacggaaatctctcatgagagagagtttcgaaggttccccagggaaggggaaacgtctaccttgtggacccctttgggtcagttataaagccacgcaacttactatgagaagcccctttgacacgggagattcaactcagaatgttgaagttagccaaccgaaagacagaactaacacacctaggaaaaactcatatcccctaagggatgcggtcaggtggagatccgaaaggcgcacgcaaaagaagggaggggactcaaggaatagaacgaatgcctaaagagagtagaagatgcacc

SEQ ID NO: 651384 - DNA, 127 bp, Homo sapiens
gcttaaataaccagaacgtattttcacacaattctggatgcctagatcaaggtatgtgcagggttggcttgctttgaggcctctctccttggattgtagatggccgtttcccttctgtcgtcttctc

SEQ ID NO: 651385 - DNA, 130 bp, Homo sapiens
agcgaattctgcgcgcgcgtaggcttacatggagctagcttctggacactaccgattaagtggcccgagtagcatagtgggtgctcgactatcgagtgtgtagagccggtcaagaaggtgagcttcgagg

SEQ ID NO: 651386 - DNA, 357 bp, Homo sapiens
tgctgtattcacacactgcgtgtcgatgccatccctgtacccgttcctgtcgagacgtgcagcactgtgcttgactccaaatatcgcacagctgcagcctgatcgagtctcgaggatccaccagtacccgagctatgcttgcatagcctgcttgtcgacgtgtactcagtactgcggtgcatgccatccctgaacaagttccggggacacgtgagcaccgtgcttgagctaccaaatatcgtaaagactggagcctggtcgacgtgtatacaccaatgcggtgcatgccatccccttgtacaatgtaccgtcgacacgtgagcaccgtgcttgacccaccaattatcgttaagctgg

SEQ ID NO: 651387 - DNA, 221 bp, Homo sapiens
ctggtccccaaatcccaggtggttcagggaacaagccccctcaaaaaagtttttttttgaaaaacctttttttcccaattttccggtttataagacctttcctaatttatgggggttttaattgaaaataaacctgagtccccaaaaagctggttttttttcccttcctcccaaaagccaaagccaaataaaaaactaaacagcctttgtttgggtttgga

SEQ ID NO: 651388 - DNA, 206 bp, Homo sapiens
tggaccagcaggctgggcccagattaagatgtcaggtcattaagtgaaagataaagtgaggcctatattcaagttcagcaagataacaatccttacaaccaaggacaggagcttaagggaaaaatgacattccaaaataagagaccctcattatacctgaggcatgacatcttaatctgggcccagcctgctggtccggctcactc

SEQ ID NO: 651389 - DNA, 137 bp, Homo sapiens
actggtccgtcttgttactgctttgcaccgtggtcagagggactgtagctgagcttgatgctcccctgtgagccagcatgggctgtgatgtggctgagtcctggagccccacccagacctaaatgctggcacagagt

SEQ ID NO: 651390 - DNA, 124 bp, Homo sapiens
ctgtctgagcagctgggaacaggcacgcacacacgccggcaatccttgccatctttagtagagatggcatttctccacgtaggtcaggctggcctcgaactcccaacctcaggtgatctgccca

SEQ ID NO: 651391 - DNA, 231 bp, Homo sapiens
ggagctgcctctgtctgtcttctcaggacttccgagaggacctgccaaacaagtcgccccgccaccgagcccagtacaacacctatcccatcatgctcttctatacgtccaacatccacatcatcctgcaggctgccctgaccccaacctttatgtcatctcccacatgctctcagctcgcttcagagtcatcttgctgctcagcctgctgtgcacctggtcgaacacgtg

SEQ ID NO: 651392 - DNA, 399 bp, Homo sapiens
gtcgagctcggtacctacttttccacaggctgtctgtgctggatacagaagttgcgtgacattgggcacataccatctgcagcatctctttcttcttgcagccctcttttgagcaacggtatgtaaaaatctaagagagcaaagtgacttcaacaagcaattctttttttggagacagggtctcgctctgttgcccaggctggagtgcagtggcttgatcttggctcactgcaacctctgcctcccggactcaagcgattctcctgtctcagcttcccgagtagctgggactgcaggcgcatgccaccacatccagctaacttttgtatttttagtagagacagggtttcactatgttggccgggctggtcttgaactcctgaccttatgatctgcctg

SEQ ID NO: 651393 - DNA, 135 bp, Homo sapiens
gaggaccagaatcattccctgccctggtagtgacttggagccctgaagaagggacaatcatggagacacagccactgtgccctggtgtatcctgctgagcccctgcatatgcccctgagcctggggattgcacgt

SEQ ID NO: 651394 - DNA, 261 bp, Homo sapiens
agaacattcagagggttgggagaaaaaaaccaggggcaagccgggcttggtgccgtacacctgtggtcccagctacacagaaggctaaggtgggaggattgcttgagtccaggagttcaatgctgcagtgagctatgataatgccactgcactccagcctgggtgagactccttctccgaaaaatagagagagagagagagagagagagagagagagagcgcccacattctcatgaggacatcagcagtgatatttgtttg

SEQ ID NO: 651395 - DNA, 210 bp, Homo sapiens
gcaggtgtgtctgcccaggcataaagaaggaaaattggcatctttcccacctctaaattctgtaaaattatagactttgttcaaaagattcctttttatcatccccacgctggtgtaagtcggaaagcggcatttgtgttcgcgtgtgtagtccagtattagcagcgtgctctgccacccgtagctgtgttattgtgacaactctccctg

SEQ ID NO: 651396 - DNA, 286 bp, Homo sapiens
  misc_feature (202)..(202): n is a, c, g, or t
ctaggattctgccatttgtctgaaagctttagaatcattctacacagatgccaattttccatcaagttctgttactccacagccctgttaaaaattctcagcatggtggaacatgatccctgctaagaatacaaaaattggccgggcgtggtggcgcctgtctgtggtctcagctcttggggaggctggggcaggagaatcncttgaacccgggagtcatgggttccagtgggccacgactgcgccactgcacttcaggccgggcaacagagtaagactctgtctt

SEQ ID NO: 651397 - DNA, 788 bp, Homo sapiens
ctgtcataggggtcccatgctgacagattactcacctcagctccagcaagcctaaattgtcgatgttgtgttactggccaagaaagaagcaatgttcttcagtctcagaatgagttggtttatggggaaaagagaagagaatctaaaatgtaagccccgttgcggtcaccaccgctacagtacaaggtgaatttcttatccagacttgccgcacaattgatcaaatctatgctgaaaaacgtgactgaggacacacgcagtgttctgcgttcctcgatgccaggagtgatggtggccgtctctgtcaagcctggagacgctgtagctgaatgtcaatacatttgcgtgagagaagccatgaaaatgcagaatagtcttacagctgggaaaactggcacggtgacttctgcgcactgtcaagctggatacacattaggagatggggatctgttactgactctgtaatgaaggatttataacctgttgagaatgacccaatctaattaaccatttgcatgacgcttatacacacaattgattcatgccttatacaagaacacgtgtgcgcagctacatttacgtgcccatatcttcaacagagtccagaccattgttttgtcacataatctcccgtggaaatgtctattgatataaatacttggacatatgattaggacttcagctgcgacattcctttatggaaacattaagttactcaatgctgatcgcgtcgttctcttttattgagggatcattcctgattccggatcactgactcgctgcgctcg

SEQ ID NO: 651398 - DNA, 288 bp, Homo sapiens
ccgggcccggggcccggggaggcactcaccctgcttcatggatggagtggaggaggggacttgtaaatgacatcagtcaaacctgcttcaataacttctctgcacactcgcccacaccctgtcttccgtccttgtcctgtgacattttccttttgttccctccttcctaaagctgtatacacacctggaccttgttcattaacattaattgattcctcttgcgggtctctgacttgaacacctcttgtcttagacattctagctgtcttgcccattatattgctacat

SEQ ID NO: 651399 - DNA, 1004 bp, Homo sapiens
ttatgatctgcctgaggcctctctcctacccagatagcgatgttatactgatgtgtttctccatcgacagccctgattagttaactagaactatccctacgaaacaagtggagccccagaagtcaagcatttctgtcccaaggtgctccatcatcctggtagggacaataataaggatcttcggaatgatgatcacacaaggcgggagcctacgccaagcatgaagccatcgatccaggtgacatcacctgaatcacaggctcgagtatctggcgaaaactagtgcattggtccgcttgtatcggagtacactggagttagttgtccatgcgacatatgacccaaaatgatgtgagttgtaggatgaggtataccgacattgagcctgacgtccagccttgcatctgtccaccttagaacgtgggacagaaacaccatctgcggtgccgttgtcttagtgaaaaagccttgcatggtcaaatcctatcaagaccttagaagtggcggttatagagttatagataagtggccttgtattaattcaatctttagatgtctcgtatatactaggccctatagttcattattatcttattaggtttattcctaccgattacagagatctagaagtcatctggctctcaaccatgcactttcagaaagaccaagtactgattattaaccgattgtcctaccccgtctggccccacccaggggtcccttctgtgaactactgggtctattctgcatctccttctgcattcccgatctgacggagcagggcgctcatttcaatggctctcttaatttcttgctccttatctatgacagacgaaccgtttgggtaacttttgggcaattcgctgtgctccttttctctctcatgtgctgcccaattctgccactgaggtttcgggtgggttccccctcccgggttctcccacccctttgtggggttcgcggggggcgccgtttaacacaggcctcccccaaatcactgcctt

SEQ ID NO: 651400 - DNA, 202 bp, Homo sapiens
  misc_feature (3)..(3): n is a, c, g, or t
  misc_feature (23)..(23): n is a, c, g, or t
ccnatggcccattaatcccttancccttttgcacccagcttcttctggatgagttctaatagtgtcccttgggtcttacattggctataatctcaaagttccattttatgatgtccatggactcagttacatactgcaatataaccatacgtgccagctttttctggatctacccaaatttgataattttctccccaaactg

SEQ ID NO: 651401 - DNA, 206 bp, Homo sapiens
ctctagcgctaatgttgctgcatttatgagctcgttactttgggatcttgcgtgatccgggtgctgggtccggtccgcgcgccaggtgagccactgccacgctccccgcgccctgccactcgtggccccctccatcctcctagctcattgtcccgcgtcccccgacccgtttactttgaccgcgttccagtgcccttatcccgccc

SEQ ID NO: 651402 - DNA, 227 bp, Homo sapiens
tcaggagcgaactagtgtgcccagacttccttatacaatatattaatagcactacacacacacaaacacaccttaacaggagggcatcgcccttaatatgtagttcgacatctaggtctgaatatcatttcggaagtggttctccattaaatttatactatacttcaaaaaacacttagctagcactcatagaggactggtccagtccactcatttggccatgactg

SEQ ID NO: 651403 - DNA, 472 bp, Homo sapiens
  misc_feature (95)..(95): n is a, c, g, or t
  misc_feature (126)..(126): n is a, c, g, or t
  misc_feature (130)..(130): n is a, c, g, or t
  misc_feature (160)..(160): n is a, c, g, or t
  misc_feature (162)..(162): n is a, c, g, or t
  misc_feature (289)..(289): n is a, c, g, or t
  misc_feature (298)..(298): n is a, c, g, or t
  misc_feature (315)..(315): n is a, c, g, or t
  misc_feature (318)..(318): n is a, c, g, or t
  misc_feature (330)..(330): n is a, c, g, or t
  misc_feature (336)..(336): n is a, c, g, or t
  misc_feature (369)..(369): n is a, c, g, or t
  misc_feature (378)..(378): n is a, c, g, or t
  misc_feature (391)..(391): n is a, c, g, or t
  misc_feature (399)..(399): n is a, c, g, or t
  misc_feature (401)..(401): n is a, c, g, or t
  misc_feature (459)..(459): n is a, c, g, or t
tgatttgaaccctgcttcgacgtgtgtgtcatggcttaaaaatagctgctaatctgtcaacctgtcttgggcagaaacagcggcggcgaccacanagggagcgtcatggccgtgcgctgtctgcgngcgnatccgctttcggactgaggcccagcgcagntntgcaaagagcagctacctggcaactgaacccatcatcaccacagccactcctgcagctgccacggtttctgccacctctaagatgtgccctgggtaactggctttgggcttctatgacttttatggnccgcttctnccggagtagctcaaggnctnctgttcgaactngagggnacctgggaggagatgccaaccgtttcaacatcntttcctcantgtctttgggttnggagcggntnctttacacagggaaggacagcttttaaccttgccgacgaggttttggccagggttttntttttgggggacc

SEQ ID NO: 651404 - DNA, 118 bp, Homo sapiens
tccaaccgggactcctttgtagagaagggacagaggctcagaagtgaacccacttgcccaggtcactggggagaggttggagccttgagctctggaatcaggctgtctggattccaat

SEQ ID NO: 651405 - DNA, 200 bp, Homo sapiens
atagatgcgtcttctgagtataggctacaactaaaattttacgtggtttgtgcagtggctagaaaacattaattgtaagcagtttttcagaatttaagaactctcttagctttgaacatgtataatatgtaatataagcatagagacttgttggcgacgttatgtttatcacataaacataagaatgaaggcacaggagg

SEQ ID NO: 651406 - DNA, 1158 bp, Homo sapiens
  misc_feature (138)..(138): n is a, c, g, or t
cgtgtccggtctgtgtccggggcctgtagcatgagcgtaccggccttccatccgaccatccagagcaagcatagatcgcaggctgcttgagctttcggggcttcatctggaaatctaaagcgagcgtgcaggatttgnaggaagcagaactctggcaaggtggaacttccatgttggattttgacctcaaattattgaaggccctgtggatgatgtcgctgcgtgagatggagggatgactaaagcatgtggaacagtgtgcatgacacagccgtggatagtccctacctcttggatcctggatatccagacgagcaaagactcctttgcatggtagaaagcactaatgtgcacaaagactggtcgaaacttttcagccgagagggttgagattgctccggttctactcgaagcactggccacggttagttgacagtcggacccgtttctcgcaacagtgcgaatggggaactaaacgaaattacttcccttgtatacgactacacactaagtcagtaagttagctaagggcctctatagtttaaaatagtagggcgatgccactcttggctgcgcgagcccaatcccaagataacaattccccgaaaactcgacgcctgggagtcaaacgctatagaaacagatgggcactattccatgaacttggtaacactacgttcaacccgaaccttgtcaaaagacaacaaaggacaagcgacccccttttttaaaagaaccttaacatttttactcgcaagagggccaacatatgggttgggacattttggtcacaggacacgcaagctggaatcgactggccttattcaaagcaaggtacattggttgggcaaactaggctcggggcaagatcaaccaacaaggaaggggaacaaaaatggtgactatcccccccaaggactctgaacgttctgcatggcccccaacaagaggttggatattgggaaccggacagccattgggaacaacagaaagtcccaaacaatgggcacatattacacttgtagtgaagcccaaacgatatctttaaccttgtaaaaaaaaccccaggtacacaaggatatatagggcacaaaggagaaagacctaacttgcaataaaaccatatgtaaaaccacaatatatgggaggagcgattca

SEQ ID NO: 651407 - DNA, 862 bp, Homo sapiens
  misc_feature (476)..(476): n is a, c, g, or t
tcagccatgtgcagactagatgtatttcaatgctcgaccaagtttaacttttgtccaataccggaacatgagaattggggctgaaccccaacttccatgaaactttgaaggtgcccttttctgcacccttagtgcaatacaatggtgctgtaactgttgaagtggtttgtgaaccaaatgcttgatccacaccgcggcccatagagggtcataacaatggggtgaccgcatacacttgtgcgccgcccgttggcagtgtatgttgaaaacttctgctgggtttgctgcccacactatggggcaccgcttatcgcccccgccgccccacaggcacccactgtcgtcgcccacggtgcaccaggtgcccgcgtccctactcaccaccccaccaacacagtacgtgttgtctcctcgccttcctcgcttgtgcggtgcccttcttcacgtgtgcacaccaccgccccaggtttttaggnttttggccaaacacacaaatacacaatgggacacgggttgaaccagccccgtgggcgtcccatgtggcaagggaattttgaggcgtcctgcatctctagcaacgcacaccgatttttcttcatggccataaagctccggctttgtagattttgtgacccaaaccacggtgggttctcccattcccgttcaaaaccacctgtggccacaactcttggaatgggagggttggtttccccctacctcagagcttcccccaaggccacttatggtgttccccgcctcaattcctaattttctttgggataatgttgaaacttcacttttgttaacacacacggtgactcttgtcccagtttccaacgcccattacttctttagagtgtgg

SEQ ID NO: 651408 - DNA, 863 bp, Homo sapiens
ataggttctctgcttcgaattgggtaatcaagaacctcctatacttgactactaattagtcatcaccttcatgaatatcaccacattcgatcaggaagacgtacgaaaaatctctatccacatgtatcgaaatgcagtgtctgccggaccatattgagtacacgcgcggacggcgtcacgaaacctgctcaatactgattctttcattagactaagatactggctcattcgcttagtaaatagcgaatctggaagacttcgtcccctcggtattttggtcaccattgcgactgaagtggtatacaaaaaccaaacgtacaggcatagtacgaatagggtaagtcagtgtccactcgcctcgttaagtagatttccacctcatcacgtgaaactgcgtagagatcttggctcatatttaacgctcgacgtatcggatagtaaggacttagaacttgaaatcccgaaaacaagctcataattgatgccaaaattaaaagcacgtgttggtaacccccatttaacgatatggcaattatttgaaagaacataacagtacagtttgaagacgcttccccaaaaaagagaaagagagaacaacatgtggggcgaacaaaacaagtgcgtctcccgctcgagagagcagcactctcggggggccgctaggaaaaaaaggatggtcttgaaaaaaaacccctcccggatgaggaagcaaaccgccgcgccgagggtaaagacccaagggcgagcgctgggaacgaaaaacctccgagtatcccggaagagcaagaagcggcggcacaacaagagaaccttcgccgaagaggggctctccccagaaaaaaccagcgcccgggaggtaacgc

SEQ ID NO: 651409 - DNA, 109 bp, Homo sapiens
aatggacctcataactctctggaatgatgcagtgtaccaaacagtgaagaactgttgttgttttttactgatttacataactaataataatatcatagctaacatttat

SEQ ID NO: 651410 - DNA, 538 bp, Homo sapiens
  misc_feature (9)..(9): n is a, c, g, or t
  misc_feature (12)..(12): n is a, c, g, or t
  misc_feature (25)..(25): n is a, c, g, or t
gttaatccnatngctgtaaatagcntgtgtgatgtctttacggagaacaaaagagttgtgtctataatttcaactgcagcttttggaaaggtagcttttgttgctattggagcaacaatggttggcagcattacttttactagggaggaaggtgactacgttcagaagggcgaggagtttggctacttctcatttggtggaagcactgtaatttgtgtctttgagaaggacgtaatcaaactggatgacgatctcctagacaatagtatgcgttcacttgagactttggtacgggtaggaatgacactaggtgtatccaccaaaactgacggacgataaagctatcggctaccaattctttacctgcttcaggtaggggatctttattgtaaaccatgtaatgagcttgtgtgttgcatctctctctctctctttttcactcctttttatagagtaactttggatcgctctcccattaacctgttggttgatgacaatgaggatgtttatagtgatgggaaagtcattttgatcctgg

SEQ ID NO: 651411 - DNA, 1288 bp, Homo sapiens
  misc_feature (396)..(396): n is a, c, g, or t
  misc_feature (495)..(495): n is a, c, g, or t
ggggggttgtggagtggatggtttggcaatatggctggtggagccaggcgatccgcctaatgcttacttctactcgcgcagactacctttcggtgaagtcccatattcagtcggcgatcgatgtaaacgaggattcatagcaggtgcacgagcgtgcggcgaagcggctgactcgtcgcctgtgtgatcagagggaggtggccgaaacactgtgctagcatgttccaaagctggggatcattcgctcgtggtagacactaggagtacgcggagattaagacgtccgagacgatataggtgtgtgatggaagagaatttgccctatcgtccacaacgaccctctagggtgggtacgagttgctgtctgggtcaattataagtggcgcacacagatcngaaacgttgggagtagaacacaagtgtaaacacgtaatggtacacggcaggtggaaacaactactgggttcatgggccgagtctcatctccgcactggnacatactatgacaagcgctcaaggggcacatataaggcatctatcgctaaattcgcaaaaggattgcttatgctaggtgacacatcagtaatccccaagtaggagaaggtccattattcaacgtggtgagaaacgaatgggcaagcggtttcggttatgaacttcattctgtttgatgtagggcaaccccaggaaatttataacaggttcaagctttaagtgaaccaagaaggcgtagcttgacaaacagagagattacctaccccaaagggcgacattatacctttaggaaatgtaataaccacatactaggtgcttgagggcgcttgtgtggggggcaccccctggggggaataacaggggctgtttttctcaaccaatacagacctttgggctttcatattggagaaagaccggtcctgcctcccacggttttggcttttaattggcggcaacacagacaggggtgccacaaaaggacttggggaaggtttccatgactggaagtatatatcaccccgcgggtgcagaccacccaaagagtgtgttgtcagaggagtgttttcgtcaacggtattggaaagacacaccataagcagacccgttcccgagtgggcactccacacccagaaggcgctattgatggcgaaacacccttttgggtcaggcgacgtgagttgggattctggtggaggacgttcccaattgggttggggagccatttgacagagaccgagtggtgtcttcgaacgagtgcgcaggtgcggtgagatataaaaacatatgaactcga

SEQ ID NO: 651412 - DNA, 225 bp, Homo sapiens
tctgatcgccagtgaaggtaagcatttcttcatgtgtattatggctagctataacaaacccacagccaatatcatactgaatgggcaaaaactggaagcatatccctttgaaaactggcacaagacagggatgccctctctcaccactcctattcaacatagtgttggaagttctggccagggcaattaggcaggagaaggaaataaagggtattcagttaggaa

SEQ ID NO: 651413 - DNA, 454 bp, Homo sapiens
aagcttgacgcccactaaatatttgattggtttgtaggtgaggcatgagcactcctttgtagaagctccccatttccatagggtgctaaatacagcaaaatctcacttttttgttgttgttgttgtttaaatacagacgaagtcttgctctgtcacccaggctgttagtgcagtggtgcgatcacgagctcacgtgccaacctccaccgcccaggttcaagcgattctctttgcttcagccatcccaaaagtgctggtatttacaggcgtgaagccaaccatgcctgggatcttgtattttccccttttaaatccgaagatacttaggtggcaataatatttgggctgttccataattctctttgaaccaagttacttggtttatatatattcgagtggccaggagttaaccagtatctagtcacaccgtggcaatcaagctcggggtaccgag

SEQ ID NO: 651414 - DNA, 381 bp, Homo sapiens
  misc_feature (238)..(238): n is a, c, g, or t
  misc_feature (289)..(289): n is a, c, g, or t
  misc_feature (376)..(376): n is a, c, g, or t
gtgcgtttttgtaagaaagcggagatgccttcatgacgatcttctgttgccgccagcaaggtgaataactgtcgctcctgggcaagtccggcttgcaaagccacttcctgcgactggcgcaggcttgctttgccgcttgtaaggccagcggcgagtgacgtgccattttcgatgccagctgtaaggcgtattcgagggttaaatcgctggggaagacgtcgctaaccagcccggcctnctgtgcttgctgagcggtgatactttctccgctcagcaccattttgctggntaacgatttaccgacactacggataaacgttgcgttccgcctgcgccaggcatgatgccgagagtgatttccggcaacccaaaacgngcgtt

SEQ ID NO: 651415 - DNA, 553 bp, Homo sapiens
gcagacatgctctctagttgtgatcccgtgacaaagttcctaggcatatttgcgagtactcaacaccaactatcgatgggcgggggaaaatagccttgccatcactgccagttaagggtgtgggccgaagtatattgcgtcgatggtgggtggttggagggaaaggcgagagcgagtgggacctcaccaggagggcgggagaactcactgaggatgaggtggaacgtgttgatcacctattatgctgtaatccacgtccagtactagatgatcccaggactggttgctggaagagacgagaaggatgtaaaggatgggagatacagccaggtcctagccaattggtctggagccaacaagctccgtgagagacctggagcgactgatagaagattcgggcccatgagagggctgcgtcacttctggggccttacgtgtccgaggcctagctacgaccaagtaccactggccgccgtggccgcagccgtgggtgtgtccatgaatgaagtaggtctgtaggccttggtcgggttgataaatagttgatatgacc

SEQ ID NO: 651416 - DNA, 102 bp, Homo sapiens
aggacttccatctcaatggttttgaccacaatttctgtctgaagggatctaaagaaaagcatttttgtgcaagggtgcatcatgctgcaagcgggcgggtac

SEQ ID NO: 651417 - DNA, 187 bp, Homo sapiens
tgagatccgagaggcgcagcacttcacctcacagtggatacagtgtcagggtaccgtgggtaggtgtcaggatcagcatatgcatttgtagggatcatggattcaccgttcactcaccatccatgtgctcattgtgcaatgacggcgtgagactctcatggggcactacattagtcacagttccaat

SEQ ID NO: 651418 - DNA, 199 bp, Homo sapiens
cagctcggtaccgcttcgtgagactggtgatgatggaacagagtcagctctcacagagaggccggatgaaaaagccacatgatatgtaacaaaatgtatcccgtgcagttaaggtggggccaccaaaaccatcttttccataattttcatgttttcttttttctttttgtctttttagggccgcaactgcagcacatgg

SEQ ID NO: 651419 - DNA, 615 bp, Homo sapiens
  misc_feature (81)..(81): n is a, c, g, or t
cttctttctttccttcccgacccttttcgttctcttaaaaacacatcgcccctccagcatccaaccactcactcccccccncccccccttcctgggggggccgaaaactttgacattcccccttgccccccccccccaaacccccactttgtgaggacaaaaacccccgccctatagggaaataacctcctcccccccccagggggttctccgaaaaaaaaaaaaaaaagcccccccctccgagggcgggcccccaccaccgcccgccccctcctggaaaaaggcggccctcccatcggggggcccttttttttttcggggcccgcttgaaaaaacctccccgggggtttccctagagacccccccaattttccccggggcggccccccccaattcccccccccgtcgcgtgctcccccccccccccccgcaaccccgcgctccggtgcttcccttgggcccccccaatggggcggacactaaacaccccccccccgcggggaaagtctttgtcccacctcgccctccaataaggcgtgaataaataataacccccggcgccctctctgtacttccccaacacagttgggcccccccctccttttattgtggacc

SEQ ID NO: 651420 - DNA, 335 bp, Homo sapiens
ggttaaatttccaagggattctaaaaggtctctgtgcccaaattaaaagtttacctagatctctatcttgcacacacagctgctacataccggggtgagctcttttagctgttctataggtagctcgtctggttccggggttcttagctttggctctccttgcaaagttttttcgagtttaatccattatccagaaggtaatagggggttagcccgggttatttacgcttggcataatttcctcttccctcgggcctatatctattgcccgaggtctcaatttctatcgcctatcctttatacgggtatatggtttgtataaggctgtgtgacag

SEQ ID NO: 651421 - DNA, 454 bp, Homo sapiens
  misc_feature (448)..(448): n is a, c, g, or t
tacatctccatctatctccctctcccctcagaagagggtgctctttaagcatcagccatccggcccttctagcagtctcatttttcagctggttcccatgtttatgcctgttctatgtttttcttttcctgttaagctgtctgttgtcagctcatttctgcagtgaatcttcagagaggagattggaagctttccttccacccatacgatagaactataaagcagaagagtttagaaagaatttcctatttaagtgacgaaacctcatactccatttgtgataaatagcacaaaggttaaaaaaacttatttttgaccaaaagctctgttgacattctattaaacaaacaccgacctatttaattttcataatgcaaatggcagatgttttcataattcttatactaataaatcatttccctgattttttgggtaaaaccacatattnataaaa

SEQ ID NO: 651422 - DNA, 115 bp, Homo sapiens
cgccttatacaaatgagtgggcatacacagtctgaatatgaaaataagatttcctctgaaaacacactttttggcacagattaaacaaaacgtatgtcgggggctgttggaatga

SEQ ID NO: 651423 - DNA, 494 bp, Homo sapiens
ggtagcgcctgcacgtcgcgcgcggtgttcgattgtcgctgcctggggaggaggagccgtgtggggcgccgccgccgccgccgccgcgggcttcgttcgtaaggaagggggcctaggcccgggcctgcggtggtgggggttgctgcgcgccggggggtcgctcctgctgtgtctttcctgctccatgcttcgcccaactttccccttggcaggggggggtggggcgcgaaaacgcggagcaggggacgagggtccgttgcagagatggaagagggcaaaagaagcgtgggctggttgtaaggagtagatatccttgaccggaatacgagcccagatcggatgcgtatgtatcgagcgagtcagtgagaagtactcttggaagctccatcatcctgaaaattattagaggccatcctggaagactgagaagagaagaactgcattactcgcaaaagccgagcagagagaagtcttcagggaatgagcacgaggtc

SEQ ID NO: 651424 - DNA, 158 bp, Homo sapiens
aagctgctgtgggtcttgcagaataaacagcctgtggttgatcctatctcaaccccaggctgggagctcgtcagagtgccacctggagctgtggaggtggcaatcagtgccaaccgactcagtatctacaggacagagtggtgctcgggatgacagga

SEQ ID NO: 651425 - DNA, 669 bp, Homo sapiens
ggagagagagagagagagagagagagagagagagagagatggctagaggcaggaatatgtccaagccccgcgcggtggaggcggcggcggcggcggcggcggtggcagagacggccccgggcccggagatggtggagcggaggggccgcgggggagggccccgcacgagagggggagaactgtatttacgcggggcatgatcaagatatctattctctactaggtgacgcccgaacaatagtgctctggatagtgctggttctcccctctttcagggaagaagaatctcatgattactaactatcacgaatgtcaatagtgccagggggaaaccattagccggatatctacagggaaagcgagaagagaaaagaatagtgctgggaacgcagtagcgggagcgccatgaatgtccgaggaacagaagatcaagagacgccagggaagagggtcccctgtgtatcttttccaaaccaaatatctgaagcagcagaatctccaaaaatctccatccctctctatcgtttgtgtatttcccaccaaagtgcagaccagtcggccagagcagacgcctctgaaaagagccctatcaggggcaaacagggccccccgaaaaaaacgctcggggaaaaagcgcaacagattcgcaaatcttacggatttcttccg

SEQ ID NO: 651426 - DNA, 401 bp, Homo sapiens
attccagggccaaaggaccggaggtttgcataccccccccctggatttgatttgcttccctttggtttcttgggttttggttttgctcgattttgtcctttcccccccgtttagttttgtccccattaccccaatagttttccaaatcctcccccttttaaaatggggtccccctgaaaaaccaacccccgggtttgccccccccccaaatcttgcccccgttttttatattttaaaggctttttgccccaccccgcccccatgttcacctttgggtcctttcccctataatttgagggggggtttccccttggccccccgtgttcccaattcccagggctattttccttattattgtaacggaaaaatctgtggcctagaataaaagggtttttcgaata

SEQ ID NO: 651427 - DNA, 108 bp, Homo sapiens
ccctggttacacagaggatgctatttattgggctcatttatgggctattctcctctgagctgtccagtgctgtccaccccctgtcttcctctgtgcgtgtccctgtga

SEQ ID NO: 651428 - DNA, 272 bp, Homo sapiens
aaaatggggggggggggggggacccccccccggtggggggggcccccccaacccaaagggggggcccccccggtttttagggggggcccccccttttgggggggggggaaaaataaaaaccccccccccgggggtccgggggggttggggggccccccaaaatggggttttcccaattttaaaaccccccgggttttccccccctttttttttgggggggtttcgggggggggcccccgggtttttgaaaaattaaaaacccccgtttttta

SEQ ID NO: 651429 - DNA, 152 bp, Homo sapiens
tctcctcctcctgggcaattctcctcctcctgtgcactgtgtctactgctgggtggagggggtcgggcgagcaggtattgtgcggcagccccatgatgtgggctcccctgccctctcttcacctagcagtagacacagtgcacaggagcgag

SEQ ID NO: 651430 - DNA, 436 bp, Homo sapiens
ctccatctcatcatgccacttagtatggcagtcgtccaggtaggtctgcacttcgactgtcacctccttcagttcctggctcatcgcatgccacaggccataggtctccagctacaggttatcccaggactcatgggtcacaagcccgagctgctcgtgcagcttcagtaaggtgatggtcacacagtggcagtagtcgagtagccttaggcctagatgttatggccaggcagagctttcaatctcaggcacatagtatctgcatatgtccttcagcacatgcctgtactcagaggactggtcgtttcactatgatcctaagggcatctgagcgtggttcgtcattgatgccagaaatgctgagcaatggctccccgtcagttaagagtcgcgcctcggtcagcacagcagctttcatcgtgaaggtccgtgtggg

SEQ ID NO: 651431 - DNA, 591 bp, Homo sapiens
ttggcgtggggtgtgatggaggggcaccttcagtctgcgggggcccctcagagtcggactgggaatggagctgactcgctgactgcggtgggaggggtaacatcacactgtcggacctgtagcattcctcctggaggcggtggggctccccctgattgagtgaggggctttccagattcttcagtgggtacttcactggcaaaccactcaagaggctagggattactgaacgagggtgaaagctctgtcttggggtgcttgtatacacaagaggacacgaggcataaatcgacatcctgacgggcttctgagggggacttcttttctgcagtgtagcataggtctgaagtctcgtaggcatatgtggatgcctgaggggttctagtgattttctctgcagtctcgtaacagtatgtggaagtctcaggggttcgtgttgtctttgtagatgtctcataggactaaccttcagactcagggaaactggtcatattctcagtggtttcataagagtagctggggtccccaagtgtgtgggcaccatcctcagagtcatcatagccattggtgatgtcatcccgcagcctttag

SEQ ID NO: 651432 - DNA, 218 bp, Homo sapiens
gcacgagctcgatacgtgttttgcatttatggtagcatcagtgactacaagctacttttgaagaaacacattgatattgaagataaaatccacatcgtacgatcggtttttattctacctggattaacggtaaagagtgcagaactttatggcgcttcccgtgtcattatatatacagacccatttgacgatggtaaagttcctgaggaaaatgggtt

SEQ ID NO: 651433 - DNA, 262 bp, Homo sapiens
  misc_feature (61)..(61): n is a, c, g, or t
  misc_feature (64)..(64): n is a, c, g, or t
  misc_feature (68)..(68): n is a, c, g, or t
  misc_feature (86)..(86): n is a, c, g, or t
  misc_feature (91)..(91): n is a, c, g, or t
  misc_feature (93)..(94): n is a, c, g, or t
  misc_feature (137)..(139): n is a, c, g, or t
tcttcccacaacactttctcggcctatccggaatgccccgacgtaaaaaaaaaaaaaaaanaanacanacaccacatgaaaacatnaaatnanntgtaggctcattcatttctctaacagcagtaatattaataatnnncatgatttgagaagccttcgcttcgaagcgaaaagtcctaatagtagaagaaccctccataaacctggagtgactatatggatgcccccaccctaccacacattcgagaacccgtatacataa

SEQ ID NO: 651434 - DNA, 515 bp, Homo sapiens
ttcctccagcattcccgatggagtctatgcagtcaacggcctcgttgaacatctagctcatgtctgcctagtggttgtcctccacagggatgctcttgtactggtagtgaccctcaaaatggttgggacaattggctgagacgttgatcaaggcagtcatgcacaaggcatccagcatgtccttgcgggaagcgtgatacgcactgcccaggtacagaaactgcaggatttccaccgggccaccctgatagtagagtgggcgtatgcaggatctgcacccagattccgcgctgtcagggacgctagtactcaggggaaggatgagccccatgggggtcgactgtttgttgcacagctccgggcaggaagctgaaaacgcttcgtatcctcctttgaggaagaagacttgcgcggcgcgcgcctcgcggcagagcgcgccggccgtcagggccagggtgccgtcgcgcttggccccctccagggcggcgctgcgctcgtactgattcaccacggcg

SEQ ID NO: 651435 - DNA, 422 bp, Homo sapiens
acaagtaaggcatgatgccaagggaagggggagaatggaaaggaaggtaggagggaggggcagaggggaaataaggcaaggtaggggaggaaagaggggaagggaagggactggaggaaggaatgagggtggggaagaaggaagggaggagaggaaagaatggaatggaaggagggaggaaggaagggaaagaaggagggaaggggtgggtgggaaggaaaggaagtaaggaaggaggggacagtagagaaatgagtggaggaaggaaaggagataggggaggaaaagtgggaagggttagggaggagaggaaagagtggaagggtagagaaggatggaaggaaggagggagggaagggagtaaagaaggaaatgaagaagaagggaaggaaagggtcgacgcggccgcgaatttagtagta

SEQ ID NO: 651436 - DNA, 122 bp, Homo sapiens
  misc_feature (80)..(80): n is a, c, g, or t
agaacaattcttttatttgaaaactgctggcatgaatttcctccttccctcaattaggccaaaaactcaacacgcctccngcacagtttctacaggaggaagccccagcttgtgggggctag

SEQ ID NO: 651437 - DNA, 168 bp, Homo sapiens
taccgttatgccgtgggaaaatggagcagatctaatctttagcaccctcatggctcaaggactcatctggcagcgggctcatgtttttcagccaagtagcttccagcttacagcagccctcaaatttggatatataggtatggtctgagctatgatatcaattggctt

SEQ ID NO: 651438 - DNA, 157 bp, Homo sapiens
gatgttctcagctccgagtcagacgaccccgttcccccacgatgctgtccagctgcctcctgagtgttgttgatgatcttgctcgatacaactggctccagtgttctgcctctactagtcttgtgtgccctgctcctgcagcagtggacccactcgt

SEQ ID NO: 651439 - DNA, 120 bp, Homo sapiens
gcatggctcgtggtcccaaggaaggcatcttaaggcgggttggcaacttccaagcatttggattgcttggataaaatatacccccttttttttcttcctggtccattcaaccggttccca

SEQ ID NO: 651440 - DNA, 399 bp, Homo sapiens
attgttgtcatagtactctctaatgatcctttattgtcacaatggacacatagaaatataaaggatcattagagagtactatgaacaacaatataccaataaatttgaaaatttaaaggaaatgaataaattcctggacacatacaacctataaagattgaacccagaaggaaaagaaaacacaaatagaccaattacaagtcatgagagagaatcagtagtaaaaggtctttcaacaacaaaaaaatccaaaaccagacggctttactgctgaattctaccaaacctttaaagaagaattaataccaattctttccaaactatcccagaaaataaaagaggagggaattcttcctaattcattctacaaggccagcagaaccctgataccaaaactag

SEQ ID NO: 651441 - DNA, 802 bp, Homo sapiens
ggcattcggtcgctcctctcacgcggctgcttatcgggaaggaaattgttgccaaataaagactgacacagaaaaccaaaaaaaaaaaaaaaaaaaaaaaaaaatttgtgggcggtgggccgagaaaggttttcaagaaccttcctgggtggggcggcggcggcccaagtgtggtgtttactttggacacttgggcataagaggtggtcccaaggagagaatcgtggcaagggattatgcggtctggtttctctccacaaataaaaaaagggcgccggggggaagacccgcggcttctcagagcacaattcccaagagggggtcccggaggggccatccgggttcttatacaacggcgctccagggagaggtcaggtatattacaaattccgcccgcgcgcgtgggaaaaatacaaaagacatgagcagagacgagaaggaaagcagctgagcgagcagagaggagaggcaacagaaaaccagaccagagagaacaacagaagagcaagagcagcagagaccgaagaagcgacggagctgggagatcagtacaagcagagaggatacacaggagaacgaaagggagggcacaaaagacgagacaaacacaaaaaacagggcaaaaagacacagaaaggaagcaacaacaacaactgcaaaacaccggaacaagagacaagcaagcgcaaacaaaccacaggaaaaatgggaaaaccagaaaaaaaggaaccaacagcagagacgcagaccacaaaggcaagagaacacaaaaccacgccacgacaaagagaaaacagaacag

SEQ ID NO: 651442 - DNA, 101 bp, Homo sapiens
caccattggtgaacattgccgtctctatctatcaatacaaataattagctcgagtacatgtgctgtctatggatgccttgtatactcacataggctcatcc

SEQ ID NO: 651443 - DNA, 426 bp, Homo sapiens
aacatgttgggcctcatgcacgggacctgcccggagacttcaggcggccttttgatctgtttaccacgtgagcaagcagctcggttttgtgcaaagataaagtcccccaaatatggtgaaggcccccaagcatggattattgggattgtagaaaagggcacccgcccagccagaatcatagacaaaccccggatcattgaggtcgccccccaagtggcccctcaaaatgtgaatcccccccccggggcccccttttaatttaaacaaaaaaaactgtttggttttgtttttaaatagatctatttcccttatcccttcaattaaagactataaacaccaaaaatttcattgtgtttacacatcggggtgaccttaggtcggtttgtaagtggatacaattaataaaataaaatcccttgcctttta

SEQ ID NO: 651444 - DNA, 175 bp, Homo sapiens
  misc_feature (3)..(3): n is a, c, g, or t
tangatgacttcgagcgcatcctgcaagaaccgcacgcgtcgctgaccgagcagtaccagccaccgctcaagaccgaaggcctgaacatcgcgttccaggctgacggcatcaagcgcctggccgagattgcctaccaggtcaacgagaagaccgagaacatcggtggcgccatca

SEQ ID NO: 651445 - DNA, 432 bp, Homo sapiens
  misc_feature (2)..(2): n is a, c, g, or t
  misc_feature (11)..(11): n is a, c, g, or t
cnattttgaantgttcccctttgcctgtgcaaaaaggttttcaaacttgaatgtgatccccatttgtcccattttttgcctttggttgcctgtgcttgtggggtattatcgcctcaagaattttttttgtcaccgggtgcggtggctcatgcctgtaatcctagagctttgagaagctgaggcgggtggatcacttgaggtaaggatttcgaggccacccttaccaaagtggtgaaaccccgtctctgctgggaacacaaaaattagccaggcatggtggcgtacacctgtagtcccagctattggggaggctgagacaggggaattgctttgacccaggaggcggaggttgcagtgagctgagatcatgcgattgcactccagcctgggtgacagagaacgactctgttcccccgccccaccaaaaaaaaa

SEQ ID NO: 651446 - DNA, 121 bp, Homo sapiens
ggggggggggggggggggggggggggcaccccccctcccacccccccccccccccggggggggggggggaaactttggtttttggggggttttttttttggaaaaaaaagggtttccccca

SEQ ID NO: 651447 - DNA, 1566 bp, Homo sapiens
  misc_feature (329)..(329): n is a, c, g, or t
tctgtatattatccagctgctcaaatcgctactgaagctcctgtgatcctgttcgagtgtcctgatgatcattgatagtatcgtgatgcgtcaatccctctaagaatcaatagtgtcctagtgcctaatgaatagacgcaacactcttcatagagcatcaagcacgaagattcacttatgcataaccctctgttgatctatgtaactcgttacgaggtttgccagtcgacggtccaaaacaaaggtgacatttacacatgcccatagtccaagctcctaacgttcgaatgtgtactctgagtagtacaacacaggctcccagcatcgcncatcatgacacgcacttgtccacatttcgcatttgtagcaaaaagtccacgcgcatgggtactgctcgcacacccagttgtacatcgtatccattctgtaaagtttcctatacatagtgtgacctacacaaaagttgggagcagatagatgttttcccatcccatgtgtctggcgtgtccacaaacatccaattgaacatttgcttgacatcattgttcacgagtcacagtggggtcgggttcaccacatttttggctaggaccattgcgtttggtgttccaccgccaaaccattgtacactttcacatatcttcgagggcaccggattgccctaggccgaaaggtcatccgattataaaaggcagaccccatagacaatgccttaatgccaacattggaccaagactttctaatggattgcaaagagactacctggttaagtaaaaacaacaaggccgtttgtaccacatggggaattggagtggctttcggcagaggaattcctagtgggcatgtaacggaaaagaccaaaggggttatttaggagggagtttacctgggtgaaattattgagcaggacaataaaaggagagtcgtgtgaggacttaatttgttccaacacaatgggtccacttgaaatacatgataggtgcacgtgtggaatttgtatgacatacaaagtgtgtcagcacggattactttttgtagtctctttggcagatttaattgattgaaacagttttctgaaggtgcaatgcgttatcagttgtgacgtgaagcacttggacgttgtaataaggttatcttgggtttgagagagagtttaagtaaggaggttaatacggtgacactcttctgatgtgcaagggcgtatttacattatgtcgcttgaaaattgtcctcgtgggcaatggtgtgcacttgaacagtaacatgacagactatatccttgcacgtgcaagtagggtttagtgaccgatgggacaggaaaagctggacataaagcaccatagtttggcacacacagaacacatcaaaagcgaatatactcagtgggccgccccagcccactaaatctagggctagaacatcttccgcgagacccgggccacaaacacgtgggagcaacaatcgggcacgtagtgactcaactagtgtgcaccagtgtcgccctggagcagagagaggagaagggtgtcgcacgcgacagaggagtgacccagtacattgacgtga

SEQ ID NO: 651448 - DNA, 153 bp, Homo sapiens
cccctatcgtactatagcagaagaaagaaaatacccaagattgtcattacttcattcacatttggcccagaaaataggtgcgcaaaaacacaacttatccacttgaaaaacctcattgcgtttaaacaaagccaacagaaactaaaatgagcc

SEQ ID NO: 651449 - DNA, 196 bp, Homo sapiens
gtccaaggcgagggcagcagacgtcagctgcagagtaaggctgacgccagccaccaatcccaaccccacctccaggctaatgcatgctacttgcacgtgctaaggcctaggaccaacctgcaggctgcaacatggagagtgttgagccctgtcacttcttacagcttatagttagtcctctagcgtctcgcgggac

SEQ ID NO: 651450 - DNA, 414 bp, Homo sapiens
  misc_feature (370)..(370): n is a, c, g, or t
cagattacccgcgtgagccaccgcgcccggctgcaaataagggtttctttttttctgagacagagtctcgctctgttgcccaggctggagtgcagtggcacgatctcggctcacggcacgctccgcctcccgggttcacgccattctcctgcctcagcttcccgagtagctgggactacaggggcccgccaccacgcccggctaactttttgtgtttttagtagagacggggtttcaccgtgttagccaggatggtctcgatctcctgaccttgtgatctgcccgcctcggcctcccaaagtgctgggattacaggcgtgagccaccgcgctcggcggcgaaacacgatattggactaacatcttaattntgttataaaatctcacaaaccctctgacatagtctcagagatct

SEQ ID NO: 651451 - DNA, 582 bp, Homo sapiens
gtgtgtgcgcctaatctcaggtggtccacccgagacgcccttgagcgaccaaccctagtcccctcgcgctggccccttattcgctcctgacaagatgacaagacactaatcatgaaccaggaaaaacgtcgaccagacgtgcaggcacaagtgcgcattggtgggaaaggaactgctcgcagagaagaagacaggttggttcagtagcagacagccacagcagatgacgaagaacttcagttctccttagagacgtcaggggtaaacaattcatctctggctatggaagaggtgagatatgttatgcaaaaccaaggaacagtgatccacgtttaacgaaccgctaaaagttcgaggcgatcatcttggcgagctgaacgactttgtcaaccacttacagtgccgtgctggagacgaacgcagcatgagcagaagatggctaccccaggcatcttacaagacccgaggcgatgggtggcggagtacgatcactgagctgaggtcaggacgggagcacggtgtgccccgacagggctccattggcaccccaaaaaaaaacacacttccttggtgggacattgg

SEQ ID NO: 651452 - DNA, 414 bp, Homo sapiens
  misc_feature (279)..(279): n is a, c, g, or t
ggttgaagttaaccttcttattctgaggtagggaagaaaatgaggatgttctgccttttgctagactgaatactgtcctccaaaaattcacattcaccaggaatcccagaatgtgaccttattagaaaataggggcagggcatggtggctcatgcttgtaatcttagcactttgggaggctgaggcaggaggatcacttgaggtcaggagctcaagaccagcctggctagcatggcaaaaccctgtctctactaaaaacagaaaaattagctaggcatngtgcatgcacctgtaatcccagctacttcggaggctgaggctgaagaatcacttgaacccaggaggcagagttgcagcgagctgagattgcgtcactgaactccagcctgggcgacagagcgagactctgtctca

SEQ ID NO: 651453 - DNA, 371 bp, Homo sapiens
ccgtaagcacactgcaacactagtcctgtcttgaagaaggcaagtaggtttgtaataggcagacgttcattttaagaacaacctgactggccaggtgcagtggctcatgcctgataatcccagacactttgggaggctgtggcgggcaagtcacctgaggtcaggagttcaagaccagtctggccaacatggtgaaaccccgtctctactaaaaatacaaaaactagctaggcgtggtggcgggtacctgtaatctcagctactcaggaggctgagtcaggaaattccttgaacccaggaggcagaggttagcagtgagccgagatcgcgccactgtactccagcctgggcgactgagcaacacttgtctc

SEQ ID NO: 651454 - DNA, 148 bp, Homo sapiens
  misc_feature (76)..(77): n is a, c, g, or t
atcagggataaaatggagatttaaaccacaggtcttgttcacactttaaggtacatttttaggttattttattttnncacaatgattttttttggttggatttaatttgtgcctcctaaggacattctttgtggtggatactatactt

SEQ ID NO: 651455 - DNA, 121 bp, Homo sapiens
ggtcggtactgtggtactgctggaggtgaagaggtaggtctcagtgactcttcctggacttctaaccagcatggtgcggactttgtcagcctcggggaaaaggtgcacactttcccattca

SEQ ID NO: 651456 - DNA, 520 bp, Homo sapiens
tattcattggaagctcggtctccggctccaaggctgctgtcttgtgacaattctgtggaagactggatcacagaggagtgcagtgtccagccagctgactgtcctccacctcccaggtgcacaaggagtacagcaagtgcctgcgtcactcctactgctgcatccgatccccaaccgggggcactcacggatacctcaagaactcagccatgcgaagcaacacccgctattatacaggcacccaggtatcgggccagacaggactccctggggctgagtgtcggaacctggagcctgagaggtggggagtggcttggcctaggtttctgatcgtgatgatcaggtgagcagtctcagaaagacgccagagggtgggtggcccaaggataccctcacatatgggtagtgtacccagagccgaattcgcaggatgtggaatgacactgtgaggaaacagacggactcctccttcatgccgggtgacatcacccggcacccaagcctgacacgcagtgacacg

SEQ ID NO: 651457 - DNA, 522 bp, Homo sapiens
tattagattgcgggcgtcttctgcgtgcgcctgtaaagagtacgcgaatgtacatgtctcagagccattgtagagtgtgagttaacaaatggtactatgtgcgtgcgtcactggaagcagatgatcgtgtggtgacttgggtgtgaataacgcgatgtaacataagtaataataggaatcagtatactggaggtaataattggagtaagaatattggaggtaaattacaaggaaagtgttcatgctttcataggataggcaacacacgcctgcccgaccgtaacgagacaccccagaactacactgtcagtgtaacagtcgatcttcggtggactcaactccttcaaggtccaacagtacgaacaccttcccatatcttcatgcaagtgcaattcctgcacttgcaatcgaacacccccatgcaaaagtctctcccaccgagtggccagccacaaggcatcctatattcagtccaaacgcgcaacataaccttcgttgacataaattaattaaatcccgtag

SEQ ID NO: 651458 - DNA, 428 bp, Homo sapiens
ttttttagggctgaataatagtccattgtatttatgtaccacattttgtttaactgtttatctgtcagtggacatttgggttgtttccaccttttggctgttgtgaataatgttgccatcaacacagggatacaaatatctgtttgggtccccactttcactttcacttcttctgggtatataccaagaattggaattgctaaatcagatggtaattctttgatttttgagggactgtcatttgatttgattttgattttttaagggactgccatactattttccacagcaactgtaccattttactttccaactagtgttgcacaagagttccgatttctccacatcctcaccaacgtttgtgttctcgtttcatttgtttgttttgacaataactatcctaatgggtgtgaatggtatctcattgt

SEQ ID NO: 651459 - DNA, 902 bp, Homo sapiens
  misc_feature (414)..(414): n is a, c, g, or t
  misc_feature (799)..(799): n is a, c, g, or t
gacggcccgttttccgccagctcgccgtcgctaatggcgtcgctcaccgtgaaggcctaccttctggcaaggagtgacgcggcgcgcggagattcggccggcttcagctttcgtgttgcaagcccccggagccttgaggcggaaggcgaggggttggcgggagcgtctccggggccccttggcggagcggggttggttggaccccgggtgttggcccgcccttggttcccccggggcttgcgccctggggggggcttcccagggcgggacaactataaccgggggcgaaattggagggcgacggggggaaacctttgggggtttgtgcccttttttccccaggtgtggaccccggaaggccaatttgtggaccacattgtggccccatgtgctcacataacggggtagaagagnggacattgcacacaattttcttgagccggcggagaatttccttaacctattttataagcgggccgtcccggcaacacctcatagtacatcatcatatagtcgagcaagcaaacaacgagctgttttgtgtggccgcaggcgcgacacccgccggcacacttatgcggggcacccccccggttagtgacaagacaaagcaagcggtgtttttgcatcctatagaagacgcacacacctgatcgtcgcgcggtagatgatgggagcacgcaacgccggcgacgggtgcgacgcaccccaccgaagtgataacaggggcggcatgcacgactggtgagcaaacacatcggtgtgtggggacgacaacaaacgagccggcggtgttgtngactccccaccgaagagagaggggaacacaactccgccgggagggcacgccagcgagagagccaacgagacggggcgagggccgcgaggggacacattcccaa

SEQ ID NO: 651460 - DNA, 265 bp, Homo sapiens
  misc_feature (198)..(198): n is a, c, g, or t
  misc_feature (217)..(217): n is a, c, g, or t
  misc_feature (249)..(249): n is a, c, g, or t
gtgactagaggatccagctatcaagatctgactgcggggtccaccggccgcgcctaggttcaaggctcacgagcggcctctatagtcgcgcgtacgtccgggcgtatctctcggagtgtactccttatactgagtgtgacagctcagctcttgtcgcccggtgtgtggagagctgcacatcacgaggtgtgtgcccangaccggagagacggtccangcctctgatggctcggagatgatggaccgtgnaagggaagcgtctgtg

SEQ ID NO: 651461 - DNA, 239 bp, Homo sapiens
cttacatgtaccggggggagcctgggacattgtggtgcacgtctgtaatcccagcactttgggaggccgaggtgggcggatcacctgaggccaggagttggagaccagcctgagtagcgtggtgaaaccccatctctactaaaaatacaaaggtcagccaggtgtgatggtgggtgcctgtaatcccagatactcgagaggctgaggcaggagaatcacttgaacccggtacatgcaag

SEQ ID NO: 651462 - DNA, 254 bp, Homo sapiens
acgacactgtactccagacctgtgcaacagagcaagactctgtctcaaaaaaaataagaaagaaaataaggcagaatcgtatagaggaatcctgggaaattcggtgaattcagtgattgtgggcaaggaaattgtgatactaggcttgtgcaataaaaaaatggtgaatattgatcacattgggtaagttagggaagagagaagctaaattaggcaagatttagaaaagcacagatagtacagtgatcgaccaa

SEQ ID NO: 651463 - DNA, 314 bp, Homo sapiens
  misc_feature (54)..(54): n is a, c, g, or t
cgttatcttgaatatagatatgagtgttcagactcagactccatgtatatagtnaatatacaggtagcaggtacactgattggagatattatggggggagaacttacatgtgaaacttctgtacatcaattattatcgctgttgttattctacaagggtctagggagagaccctagtctgactgtagctgcagaacgtatcggtccttctcgctcttcagcgggagaaaacactagtaagttgctaaacgagtcaatcccctcattaaggacaactgaccgaggagggcgtgactcacccaagcatatataact

SEQ ID NO: 651464 - DNA, 264 bp, Homo sapiens
gtctcgcttgctcaagagcatgggtataggtatgagtcacgcacctcagttgttcatttaaatgggtgaatttatgatgtgtgaatatattcttctctcttttgagatggagtttcactcttgtcgcctaggctggagtacagtggtgcgatctcggctcactgcaacctctgcctcgtgggtcaagctgaggtggaggatcgcttcagccctgaggtgaggctgcaatggatggtgatcaagcactcactccagcgtaggtga

SEQ ID NO: 651465 - DNA, 210 bp, Homo sapiens
  misc_feature (63)..(63): n is a, c, g, or t
gggatacactgacagtaatgtgaagcgccacacttgcagatttcaggcccagcaggtcctggncaagtgccattccacccggaacttttaacccaagcggtggggaaggaaagccaaaactccaagctggcacttttttggggttctgggccatgacacttcttaggccttctgctgctgaacttttacagggacaaaaggtaccccacg

SEQ ID NO: 651466 - DNA, 260 bp, Homo sapiens
cactccaggttatcagacgcggacccatggtggccatacaaaggccttgtttatagggggacatgagtaacagtgcatacattaattctccaaactgtgtttgcgaggagaacagaataacaatacatgcgtgaattctccaaactgtgtttaccaggggaacagagtaacaatacatacatgaattctccaatactgtgtttgtcgagggggacagagtaacaatacataacttgaattctccaaactgtgtttataca

SEQ ID NO: 651467 - DNA, 803 bp, Homo sapiens
cttcggaactgacgagactcaaccataatagaaagaatggcagaactattaaccaccattcttcagctgtgctgtgattttcagaggggaatactaacgaaatggttttccattactcggtaacccaaaggtaaagacactcaaggcaagcagtatcattttctggcagagcatatgcatgaaaataggcaagattccctggtctattatccattctgctcaacttatcatgtactccctcttcttggtccagcatgctcactccttgctcagactcagatttatctgctgacttggacccatctgtggcccatacctggcacatggtgggtgaagacgctgaatctgccctgttcacctgttcccgaaccatgagtgcagagaacatggagctgaggtgggtgagttccagcctaaggcaggtggtgaacgtgtatgcagatggaaaggaagtgtaagacaggcagagtgcaccgtcatcgagggagaacttcgattctgcgggatggcatcactgcagggaaggctgctctccgaatacacaacgtcacagcctctgacagtggaaagtacttgtgtcatttccaagtatggtgactatctacgaaaaagccctggtggagctgaatcgttgccgcatcgcggttcttgatctctcacatccgatgtgacggcttatgagactggctggatcatctggactgcgctcccttgtggtatcccaacccataagtggccgaacaaggaaaaatccgttagaacctgtgttcactttagcctttttaacattgaactagacttag

SEQ ID NO: 651468 - DNA, 885 bp, Homo sapiens
ggccgggcgcggtggctcacgcctgtaatcccagctctcagggaggctaagaggcggggaggatcagccttgagcccaggagttcgagacctggcctgggcaaatatttagcgagaccccgttctcccagacaaaaggcaaacacaaaaacaacacaagaagcacaaaaaaaacacaaaaaaaaaaaaaaaaaaaaaaaacaaattggcggggcgcgcgggctctcgggcgcccctcgagaaaaaaacgtttctaaaacacacaccactttcgcggtgggggcgcgccgggggcgcccccagagaacgcggacagagctgtgagacactgtggggtgccagatcagcgatgtggtcccccaacaaggagagaacactctggggcgcaaatcgaacacgaaagggggggcgggggagttctctcctcaccccaatatttaaaaaaaagcgcgcccgggggggcgggccaccgagagaggggctgtccttaggaaaccaaaacccccccaacagaaggggagagtctcccgcggagagggcggccacacaagggggggcgatctctatactccacacaagagcgagagcgcgcccaaaaacgggaagcgcgcccgagaagcttattcaacaatttaaaggcgcccccggtccggggtggagtcccaacaggaccactagcaggcgcgtgactctacaacagacgaacctaaccgaacaataaacgcagcatgaaagcaaacacaacaacaagataaagaacacacgagcagagaaaaaaacacacaaacaacgaccaccaacacaccaaagcagacgcacaccacaacaaaacaacaacccacaaccaacaccaccaacacaacccccacacacgcaaacacacgac

SEQ ID NO: 651469 - DNA, 614 bp, Homo sapiens
gcttacatttaacttccccttgatcattcagcagccgttatcttgacagcctaccaaacagtggtatatatagtgctggaagtacagattaattatagttttagatgctatgatatgatgtattggagttttctttaacctggtttctaatatgactaacccaatcattttgtgggccattatgcaggaatatacaacttctttgggaaaatacataaatcacaattttaaaatagaaggtactgggttcttacttatgatgacttacatgattaaaatgattggcgggtggatcttgtgattcaagaaatttaagtaatgggtaaataatttcccacaaaaggggaaaccatactatactctgcttttcctctagcacaatagggtttctcctaagctttttactgggtcctaatctaaccaatctttaatattgggaatggccacagggtaagtctttgaacctcttaataaatattattaattcctttatggactcattcaggcttagggttttaaaattttttttttataaaaaaatcccccaattatatattaggttttactttacccctggtttaaattttactttaacaagccccaaaataaatttt

SEQ ID NO: 651470 - DNA, 485 bp, Homo sapiens
  misc_feature (153)..(153): n is a, c, g, or t
  misc_feature (189)..(189): n is a, c, g, or t
  misc_feature (191)..(191): n is a, c, g, or t
  misc_feature (280)..(280): n is a, c, g, or t
accttacatctcagctcgtaccctcgctgttatccttattattgtatcttatataagtgaaagatggaatattcgtaaatatccattgaatggttccatcctgccatcgcgatactgaacatctggtccagagcttcacgaaaattacaaatntttttcatctctatgcctctgttcaacttttcatcncntcaaccactgttttcacaccaagaccaccataacagccttagcattatgcatttgcaacttgcgtacctccctgatgtttcccgtcccntctctccctttacagaagcaattacttgggccaggcacagtggctcacctattaatttatttattttgagacagagtctcactccatcacccgggctggagcgcaatagtgtgatctcgacttattgcaacctctgcctcccaaagtgctgggatcacactactacagccggctgaatatctttatatctaggtccctgtaaagc

SEQ ID NO: 651471 - DNA, 743 bp, Homo sapiens
caaaaacaagaagaacccagtgtatatcggacaggtacctcactacccctgctgtggtagctcaactgccctcacaggtggacagcccacacagtacgtcagccacccggacaagtactgcttctactgccgggcgctgctgatgacctgtggctgggctgaagctgctgcgctcagccttactgctgccccccacagcagtacctgacgtatggccttcacctgtcctgctctatccacattatgactaccctgctgcctctcccagtggctttctagcttgactacttcctacatgtccctgcttatgcagcaagctgtgtggacttgctgtacaagctgcgttatctgttgcttgacctacatctgctgccctgtgcatgatcacctggggctcggctttccacgcttttgcccagcctgttttgcctgtgccacactcggccatgctgttcgtccagtgccctgctctcgttggctcttctccactgcctctcaacccactgctagtgcagtgccgtcttcatcatgtcctacgctcgttccctcgagttctgggagcgcgactactacactacactgtgttggctcacttccagcacccgcctggtcaccagctggacgtgacccctggcgctgatgaccaacaacctcaactccatcttctatgagcacttgacccgtacgctgcgcacacaactgtgtggggacctggtgctggccgctgggcacttatggcctga

SEQ ID NO: 651472 - DNA, 467 bp, Homo sapiens
ccgattgatggcggctgcaggcagcgactcctctgagctgagatttgaggccgtccccgactccttcctcccccttccctaccccactatgttgtgtaaatcgagcttgcccacttgcaccacgatcacattaaaagactacagtatagctgaactactgagagacgaaggaatgacgtgtgtacagcggtaagcagttcggaagcatatcataccggaattacacgtaagatccggacgccccatgaacaataaaaacaacaaacaaaataaaccacaacaagctaacaatggacaaaacacacaaagaacaaaataaaaaacagagaggaacaaagaaacaacaagaagcaagaaaaaaaaaacaacacaagaacacaaaacaatatagaaacatactaaaaaagagagagaaagacaaaaacacaacaacaaaacaaccaaaaaaagatcacgacaaacaccaa

SEQ ID NO: 651473 - DNA, 188 bp, Homo sapiens
tctagaggatccctgtgcaaagcacacccagttattacaactttaaaagataaatcgattggtgcaggtctgtaatcccagctactcgggaggctgtgagaaacgctgtgaggtggaggtggaggttgcagtgagccgagatcgtgccactgcactccagcctgggcaacagagtgagactctgtctc

SEQ ID NO: 651474 - DNA, 448 bp, Homo sapiens
gcaattccacgcatggggcagcatgcggcccagacagcgtgtcttagcaggatgaccggattagcgctcagaccatgcgatctggacagatgcctgcccgcctcagaggtaccatgcggcacacctgggtcactgccacagtttgcgcaccctgggtgcggggtgcggagaataggccagcatggcaccttcacttggcaagcctccactctctgcccagtgcccagctgggctcttcctacgcattcgcctccttctcttctagaagggcccggcctggctcttctctccgactcccgacccccgggtagtcctagagtccagcgggtatgccgggtactcccgcgtgggtcctcgagtgtacgagccagcttcacacctacctctgtccccgctggctctggcccctagctagtgactctcagccctgcgtgcatcgccatgcgta

SEQ ID NO: 651475 - DNA, 390 bp, Homo sapiens
aaaacagaatcactctggcaattgtctgcagctgccactggtgcaaggccttcccagccctagcctctagcacttctttaagtgccaaaaacagggtcattgtgtgtgttccttttttgatacttagtcatgggaggatattccaaaaaagaaatttaaattgggttcatagtctttcagaggagttccctttagtcctggaactttattgggggatattttgtgttcaggggaattgttttctctttgctgattatgttaccatgggactcctaaagcatatgcctccccgggttaaaaaagaaccaacatgtttttgtgaaagctcctgaagggccttgggaaatgagaaagtttttataagtaaaatgattttttaaatatcagcca

SEQ ID NO: 651476 - DNA, 352 bp, Homo sapiens
gcaaggagctgtactgggtctccagtctcctccctttatctgttgtgtatccctgtgctggtgcacactgcctcgtccactgatgtgtctaataagccggcacatatgtatgtcaattcttccggctgctcacttatccatgaaaaactcacttcaacataaacttgttccatttactctgtccatataaatctgtccatatcaactcagtcaggtcccacgagacaaagagcctgtgaagtatccttcatatggtcttacatggacttacgttggaatttgtagattcagatatatcaattgattctactcgaatccatcaatacatgatgtctccatgtcactaatgtct

SEQ ID NO: 651477 - DNA, 225 bp, Homo sapiens
ttgggggggggtgtttttttttgggggatttaatgctgaccccctgggacaaacacctgtttaagctcaaagctgggggtgggcttttggggcctttgcccttttccagcccaaaatttggggcctcccccctcttgtttggttggggacttggggcaggaaaggaatgctgttgacctttattttccctttccaaggggaagaaataaaggaaaggggttgcca

SEQ ID NO: 651478 - DNA, 184 bp, Homo sapiens
aaaccccccgtttttggggaaaggggctttttttggggggcccttggcccccgctttgaaagccccccccccgggtccccccccccagggggggaaaaggactttttttccccaaaggggaggggggggtcatgggtttcccctttttgggggccccccaaaaaatttgttccctttttgtgga

SEQ ID NO: 651479 - DNA, 436 bp, Homo sapiens
cgttgtatacctaccaatgacatctagttttctcccaagagaagttctagggccaggtacggtggctcacacgtgtaatcccaacacttatggaaggcggaggtgggcagatcacctgaagtcagaagttcaagaccagcctggccaacatggcgaaaccctgtctctatttaaaatgccaaaaattagccaggcatgatggtgcatgcctaataatcccagctactcgggaggctgaggcaggagaatggcttgaacccagaaggtggaggttgcagtgagccgagatcgtaccactgcactccagcctggcgggcgacagcagcagactctgtctaacacaaaaccatttacaaaacagagcgagaggggcgagagagagagaagttctagtaaatgcaactgtaatacaccctggtaggtatgatgaaggacg

SEQ ID NO: 651480 - DNA, 568 bp, Homo sapiens
taaataatgagtgaaggtaacagttatattattattattatttttttttggagacggtgtctcgcactttcgctcaggctgcagtgcagtggcgcaacctcggctcactgcaagctccgccttccgggttcgtgccattctcctgtctcagcctcccgactggctgggactacaggcccccgccaccacgcctggttaatttttttgtttgtattctgtctcagcctcccgactggctgggactgcaggcccctgccaccacgcccggctagttttttggtttgtatttttggtggggacggggtttcaccgtgtcggccaggatggtctcgaccacctgacctcgtgatctgcctgcctcggcctcccaaagtgctgggattacagacgtgagccaccgcggctggccaacagttatatttaaattttaaaaacaataggcagaggtgagaggggaggaacgaatagaaaagggagattccatactgatgagtgatatgtgagatattctgagtgagataactgcacagagcgagcttagtataagtatatatattaatatgattaa

SEQ ID NO: 651481 - DNA, 521 bp, Homo sapiens
acggatccttaggctgaggtcaagtccaagtaggaaattagtgagttaggagtctggatggactaggctggaagtaaacatggttaaggacatatagattctatttcgtcaattactgagaaccattaaaaaatttgagcaaaagacaatctcacaaggttgcaagtgtttgaggaaaaagaacctagcatctttgtgcagattaacagtggggagaaggtaagaagaaacagcaaatgctaagagaccattgggaagtaatttaagtggaaatgataaagacctgtactaagggtggtggctggagaacagaaaagatgggatgaaatggaggcacatgaagcagatagaattcagtgagtagctatgaaaatagaagggggaagtacagcctagtagaaagaaaatctgttcctcctcttcttcctcctgtgtaacccgtctccataaatggtaccatcatccactcagctgctcaaaccagaaacctaggtagcatacttaacaactatgaccttcag

SEQ ID NO: 651482 - DNA, 949 bp, Homo sapiens
aacctgaacctggccaaagcccacctgacggccttcaggtccctgtggttctgtggggaagcggcctcacgtcaccctggttccctccctgacttctccctccctactggacctcatccttcagccagtcctggtcagcccccggaccgcaccagctgagcagcgtcctcccgctacacccgtactgccaccagaccctatcaccgcgtcatgagcagcgccgctggtgccccaggctctctatatccctgctggaccaattcgctgcgcgctcgtaatcccacatctccaataccatggtcaagcgtaaagagatgcgagagcataccgaggccaatccccaggctagaagctttctttctcagacagtccctttggacgttggatgtctcccaaggcctcgcgtcattgcagggtggtgcctcccctagtccaccgtccccctgagctttcaacttccaagggtgcgtgctaccaactctccctttgtcctggggtgcgttctgcaggtcagtcggggctgttcgccagcagatgcaaggttcattgtcggtcgattgccattccaagcattcgtttgcgctggactcgtcgccccggaaaccaacgattgcgaggcgccacatttcccgtgcgaaatcatctaactggagtgcagccgaccgtggggacagatcagcctaggaaccccgctgaaggagagcctgactaagccctgttcagaaggacacaagagggacccctgtgccatccaacgtccatagttcatcggccttggggcaatcccggaccccagagtgttagcccaagagggcaggcgtccgatagggccatgaccgcggatcccaggacggcaactgcaagggggcacgacccaatgcgcggctgaaacctagcagcggcccgagacctaggcaatgaggaccctgtgccggccaaacggaaacag

SEQ ID NO: 651483 - DNA, 208 bp, Homo sapiens
gtaatattagggacatgaatgttagtacagtaattaccacacatggaaaatattgttcagcaggaaaagtaaaactttcaaaaaattccctaaagatcctattcaataaacaattttagatttaaggaaccacttacgcaaaactcgaacaaataaccgaaaactccacctaccgcgcaatactcaaaaacacaaaaatactactaac

SEQ ID NO: 651484 - DNA, 216 bp, Homo sapiens
tcatcttccttaccgtcctgactttgaattcctggaagcctgagcatttcctcctgtcttgtggcttctttcagtatagacataatcttgataaaaacaaactgggaaattaccctttgaaccaagcaatttgaggagtgtttttgaaactaagagactgggtttctaagagataaaatcatataactgctgttctttaaaattcaccacaggatc

SEQ ID NO: 651485 - DNA, 373 bp, Homo sapiens
cagttcctttttgggagcaaatgtaattaatttctcagttggattgaggtgatttgtgtgtgtttatgcatgcctgtgtgtgactgagcgtgtgtgtgttagtgtgcgtgcttgcatgcatgtgagtgcgtgggaagagtgtgtgtataaattgtgggtctcttcctgtagcccctgttaggatcaaatatcaagaaacctcactgatggctgggagagtctcttgcccaccttctccaccccggaaacccaggtctcggcacaagcagatcctcctcagagtctgtcagacacacacgacacagcagaccacacaagtccaactaacgtgtgggcggctgtcttctgccccagatgtgtccttggaacctac

SEQ ID NO: 651486 - DNA, 207 bp, Homo sapiens
aggtccggggctgcgccgtattcgatgttgaagcctgagactagttcggactccccttcggcaaggtcgaagggggtacggttggactctgctagtgttgagatacatcatattatggccaagggtcctgctggccggcgtactcagcggtgtacttgtgtagtgataagggtggagaggttacaggagccacttattagtaatgtt

SEQ ID NO: 651487 - DNA, 398 bp, Homo sapiens
gggggagcgaatacgggaagggttgtaatgggagtagtgctcactggggtacgtgttatagatgggagtagtttaaattgggaggtagattctatcgcgtggcatgcacgaagcctgcactatatggagtgaggtatcaagatatgtgtacttattgtggaagtatctctaaaatccactgtcttctttctgtctacactgcacctaagctaaccgttagctcaggccgctcaacaccgtagtgcctagattttagtgataaccgctacttctaccattctcctgcataaaacaccttttgtggtgtctgcctagctcacaaccttcccatcttctcagaatgtgtctccctctcccactctctgccacctcaaccacacacagagatcgggggaggg

SEQ ID NO: 651488 - DNA, 247 bp, Homo sapiens
  misc_feature (44)..(44): n is a, c, g, or t
  misc_feature (96)..(96): n is a, c, g, or t
  misc_feature (134)..(134): n is a, c, g, or t
  misc_feature (158)..(158): n is a, c, g, or t
ttgggcctgcgtccctcctcgtgacctcggccagctggacccanatgagggccacctctggaaccttcttcgagccctggccagccatctgcccancctcggagggtgggcaacctggtgcttcccgggtgganacacaggaccactcagtggggccntgtgtgggcgccgagacctgggtgtctgggaagtggggggcacggggcctccgaactatgaataaagctttgaaaggccaaaaaaaaaa

SEQ ID NO: 651489 - DNA, 731 bp, Homo sapiens
caggacttggactgcagcgatggcagcgatgaggaggagtgcaggattgagccatgtacccagaaagggcaagcccaccgccctggctccctgcctgcacggcgtcaggactgtctggggaactgacagaaactgcgcaactgcagcgtggtgctagcaggcgagctcgttgcacgctgagcgatgactgatccactcacgtgggctggaggcacccagatgtccgactccagcgagagtcggctgtgaaccatgaatctcccggagggatgccacaacatggggccctgtgacctgataggtcacctctctcagaatgcacaacatgggccctgtgacctggagagtgtcccttgtcgggaatgcaatcctcctctgccggaaccatctggaagcccaacgcctatggggttcatgagctgctgggtgctcagtgcaagcctggtcaccgcaccctcctccttttgtcctggctccgagcccaggagcgcctccgcccactggggttactggtggccactgaaggagtctctgctgctgtcagaacagaagacctcgctgccctgaggacaagcacttgccaccaccgtcactcagcctgggcgtagcccgacaggaggagagcacgcgatgcggatgggtaccgggcaccaccaggcctccatagacctgagctctccctggcaggtgaactcgacaccgagctcctgcaaagtgggcctgagattgag

SEQ ID NO: 651490 - DNA, 288 bp, Homo sapiens
  misc_feature (141)..(141): n is a, c, g, or t
ggtaaaatgccattctcatcatataaaggggacaggtcatcaatatatttaccactgttcttatccttggtaacctgactgaagtagtgtttgtcaggtttctccaaggttaagttttatttttccctttccatactgtantctttggaataaagtcactattggcagcccacacttaaggagtagggcattattacctccttgaaggcagagtattgacaaaaattatttggaatccttctgcagaggatatttgactcttattccccacttatttatatattcagt

SEQ ID NO: 651491 - DNA, 430 bp, Homo sapiens
  misc_feature (325)..(325): n is a, c, g, or t
gaattaatgaggtaattcgggcaaagagtagaatttaagacaaaacggaagctgggaagcttccttgagggcaggcaggaggtggagttgcagctgttggccggcatcacgttgctcgttgctcggcttatgggaggccgccctggaggcccggaggtcccaaggtccctgggaggactgggcccctcatgcctcgagcttggcaaccgaaaacccgagggaggagaagggacctgccttgagcttggcaaccgaaaacccgagggaggagaagggacctgccttgtgacatctctgatcaggttggggtgccccagcacaggtnaccagtttggggtttgggaagcaggattccgtccctgttccccgattgttgccacgtggtaggacacatagggacacagggatttctggggttctttgcccttga

SEQ ID NO: 651492 - DNA, 119 bp, Homo sapiens
ctcacgtgtgcgcccagcacaaactccctgcaggactgctcaggacccagaagcaccagcactaccagcgcagtgccagagcaggagcaggtgtggagttaatgcaaaaatggaacttc

SEQ ID NO: 651493 - DNA, 503 bp, Homo sapiens
  misc_feature (1)..(1): n is a, c, g, or t
  misc_feature (24)..(24): n is a, c, g, or t
  misc_feature (51)..(52): n is a, c, g, or t
  misc_feature (417)..(417): n is a, c, g, or t
  misc_feature (430)..(430): n is a, c, g, or t
  misc_feature (458)..(458): n is a, c, g, or t
  misc_feature (477)..(477): n is a, c, g, or t
  misc_feature (484)..(484): n is a, c, g, or t
ngatcaaacccaacaccaggccangggggctacaaagtccggcagagtcgnnaggaatgagacaagctaatagtacacaaagtgggtccagggggccaatgctagtatagaggctgtgaaggccctgaactctgggagcccacaccatttattggagattaaacaaagaagcaggtggtgaggacgtgctggtcaaaaggaagcagtcacatcaagtgtttagtttatagctgtgtcggtctagcattttctttgaagcatatggaacatgttctgctactcgagataatgaacatttccttctacctcaaggtacaatcagtttatgatcctgggagagcaagaagcaaggagccagcaagtctgggacacattccagaggccacgagggggttttatgtcctgaagtccctggantcccatcccaagnccatgagggggttttatggccctaagcnttaggttgtagttcggccngggcaanctttccacccctttagccc

SEQ ID NO: 651494 - DNA, 557 bp, Homo sapiens
tgtatgccggtggggatggaagtgggtactgagtttgaatatggagtgatagttcataggctttgcatgtgcgtgtgcacatggtgtgtgtgcagtgggtgtggtgtctggggtgtgtgtgccgtgtgtgcggtgtctgtgtgtggggtgtgtatgcgtgtgtgtgggtaaaagaaagagatcagactgtgactgtgtctatgtagaaagaagtagacataagagactccattttgttctgtactaagaaaaatttttctgccttgagaggctgttaatcggtgaccttacccccaaccctgtgctctctgaaacatgtgctgtgtccactcagggttaaatggattaagggcggtgcaagatgtgctttgttaaacagatgcttgaaggcagcatgctcgttaagaatcatcaccactccctaatctcaagtacccagggacacaaacactgcggaaggcggcagggtcctctgcctaggaaaaccagagactttgttcacttgtttatctgccaacctttcctccactatttgtctaatgacctggcaagtcccc

SEQ ID NO: 651495 - DNA, 241 bp, Homo sapiens
cccagtcttgaaggattagaaggagatacagggctgtatggggaggacacatgtaagtgctagaatcaaacactgaatgcgaaacaggcaactggcacaagcagcaagaaagagatagagccggagcatgagtggcaggaaggtggtggttttcttcactcggaatggctagatcattgggcagaaggatgcttgttgttccttctggaggcttcctccccagcattggaatgctgagctg

SEQ ID NO: 651496 - DNA, 147 bp, Homo sapiens
ggtaatactggacttctcatggtgtcatggcatacctggccttctggactacctggaccttctgcagcgtcccctttccctgcctctttctgctctatctccacctccttttcccagcctccagaaggtccaggtatgccagaaggt

SEQ ID NO: 651497 - DNA, 925 bp, Homo sapiens
actttatatcttcaggtattacatggcacacgtacggcaagcacaacatttggcagaggttgatccagaatgtcaaagataagaaacatgcagagtgcacatgcattcgtaactggagttaccttggtgttcccatgtgttcccacaatctgcaagcaagggcaaacccgttacagcacaaggcatcggtctgcagaagaaacttttcagctctctcggtggacaccattttatcaaagatattatggaggatgctattgataatagattagattcataaagaatggccatattgttcccagtgtccagcagtatggaatggttcaggagctgtaagtgctcgccagaaacccagagctacattatttagcaagaccgaacacatgggtcaaagctgattgtccccgtacatccggagggatcacatactctgaagctgcgtagtgcttatgaagtttctcaggcacataaatcctgtgaagttattataggtgtctacacatgtttgaagaaccaaaaagctgatggatgatataaagatgctgaataaaaccaaggataaagtctccttaattaaagatgacatagcaatttcctttacggcagggtatagagagttctgtagctaatattgtagcaactaaacatagcgaagaacacatgtcggctgtaccatgttattttaacacaatgtaaattattccatggcaactaaggggcttttacaaactaccattatctctaaagggaacctcggcccaatcgatccattcaccgggcgcattggtccacatctaggatacactccacatcattggctgggctgccccaggtcacctcgcattcgagcagcacaagggttacaaagtgccttcgtccacaaaggcgcacatcaacgtacacccttcgggagagcacacactag

SEQ ID NO: 651498 - DNA, 228 bp, Homo sapiens
  misc_feature (5)..(5): n is a, c, g, or t
taccncgtccagtgagttcaccctctaaatcaccacgatcaaaagggacaagcatcaggcacgcagcagtgcagctcataacgcttagcctagccacacccccacgggaaacagcagtgattaagcctttaccaataaacgaaagtttaagctatagctatactagaccccagggattggatcatatttcgtgccatgccaccgcggatcacacgacttaacccacag

SEQ ID NO: 651499 - DNA, 261 bp, Homo sapiens
  misc_feature (49)..(49): n is a, c, g, or t
cctgacattacgatcagcagcagtgctgtggctttcaaatggttttatngcctcttggcttaggctccttgaccgctgggcctatgcatctgacaggggtctctcctagagcaccgggtgtggccccaccccccggggttcccagcacccacttatgtctccccagcatagcttattagctcctcttggtcagagtagctgcaggagggggcgacaaaggtttcgtctagctgctcccttccactggcagcggcccactta

SEQ ID NO: 651500 - DNA, 317 bp, Homo sapiens
cccccccttttttaaccccttttttttggaaaggattaggaaaccgtccccccaattatttaaaaaatggttttaaattaaaaggctttgggctttgcaaacccctcctgttgtccttttagcaaaaaaatccccaaaagggggccccagttgtatctggaaagttagctgttcctcccctgccccgaagccttccttaaaaactgctttttttaaaaaagtttggttggggttttttttctgccccccttccccctttttttgaaagtaaattgccataaaacccccataaaacgtttgggggggttttttcttta

SEQ ID NO: 651501 - DNA, 117 bp, Homo sapiens
  misc_feature (29)..(29): n is a, c, g, or t
  misc_feature (64)..(64): n is a, c, g, or t
  misc_feature (101)..(101): n is a, c, g, or t
aagcgtgcacctgctcccgaattactcancgaaaaaaacgggctgagcaaacggccccgtgganggaaaaaaagagctcttctgaccatatccttcttaanacccgctggcatctcc

SEQ ID NO: 651502 - DNA, 195 bp, Homo sapiens
gcaggaagagaaagaaacatcgatccccgagtagcggcgagcgaaaagggaacagcccaagtacaaacgaagaaaagaacttagtcgaatcagctggagaagctgacccaaaggaggtaaaaggcccgtagacgaaaagggaaaagaatcagtacaaagagtaccacgagacacgagaaaccttgtgggaacaca

SEQ ID NO: 651503 - DNA, 231 bp, Homo sapiens
ggatttgctggtgcagtacaactaggcttaatagggacatgtccacttgcagattctacgaaaaaaatttttccaaactgctcaatcaaaagaaaggttcaactctgtgagatgaatgcacacatttcaaagaagtttctcagaattcttctgcatagcttttctgtgaagatatttcattttccaccctaggcctcaaagcactcgaaatgtccacaggcagattccaaa

SEQ ID NO: 651504 - DNA, 403 bp, Homo sapiens
  misc_feature (36)..(36): n is a, c, g, or t
  misc_feature (75)..(75): n is a, c, g, or t
  misc_feature (82)..(82): n is a, c, g, or t
  misc_feature (90)..(90): n is a, c, g, or t
  misc_feature (94)..(94): n is a, c, g, or t
  misc_feature (96)..(96): n is a, c, g, or t
  misc_feature (128)..(128): n is a, c, g, or t
  misc_feature (171)..(171): n is a, c, g, or t
  misc_feature (179)..(179): n is a, c, g, or t
  misc_feature (199)..(199): n is a, c, g, or t
  misc_feature (219)..(219): n is a, c, g, or t
  misc_feature (239)..(240): n is a, c, g, or t
  misc_feature (246)..(246): n is a, c, g, or t
  misc_feature (248)..(248): n is a, c, g, or t
  misc_feature (254)..(254): n is a, c, g, or t
  misc_feature (285)..(285): n is a, c, g, or t
  misc_feature (305)..(305): n is a, c, g, or t
  misc_feature (312)..(313): n is a, c, g, or t
  misc_feature (318)..(318): n is a, c, g, or t
  misc_feature (323)..(323): n is a, c, g, or t
  misc_feature (348)..(348): n is a, c, g, or t
  misc_feature (384)..(384): n is a, c, g, or t
gtggccctcaatcagggatcttgaggccctcgaganaaccaccaccatgggatagaggtcgatggccccgtctgnaagctgntgcagcanaaantnttcattgacaatcccccttcttgtgttttatnagcttggcctccaccacagtggcaaatttttctttttttcgtnttgccagntcgctacttcgactcaactncgggtggataagttcgctgntttttaggttgctgctcagnnttgggngnggggtnatgtgtttggttggttcttctagaaggaggncagcattcccaaagggattntttagannactgncaagnccagagagtcctttcctttgtccanacagccctgcagagccacaaaaagccgaagaatgtnatttgttccctcaaagatt

SEQ ID NO: 651505 - DNA, 1416 bp, Homo sapiens
atttttcctttcttctctgtcttcttgttcgtgctcttccttgttttttgtgtcttttttgttgctgtcgtctgtcctttgtcggttgcttttgctcgttgcttgtttctctctcttgtgtctggttctgcctggtggtcttattgtttgggcgttcgttctgacgtgcagttcatgccgagcgaggcatgagtggaagagaggattgactgaatcttttcttctttttgacgctgtgtctgcctcgtctgcccgtgtgctctacgtctatcttcttgtctgccacgcgcagtgagacctctggttgtgttgcagttctttctttgtgagtgctgtgtaggctctggcggtctggcaggtggtgcgttgggtctgtggctgaggcgggcgttcgtttgtgtcctctcgttcagtttttcgtgctttcgcgcccccgtccgctgtgtttttgttctgctcctcctctcgtcgggctctagttttttttgttcgctccgtgtggtggctgcgcgggggcggttcgtgttttgtttggtcctgtaggggtggctccgggtgccgctgttggtcagcctctcggttgcccttagggcctggtgttggtttcggcgtggagaccgttgttgcgttgtgtggtggcgcccgctcgccggggcgagtggcgcgttgtcactgtgggggccttcatggggtgtcgcgagacgaagcggggggggtttcgttctctcgccgtgtggtgttccggccgctattgggcccgggggtgcgtccccctggggggtcgcgactcgtgcgcggcccggaggtcgcgcgggtgtcgctcctgcggttgtgtcctgcgggggggtgtggtatatgtgggagcgtttggttgggccgcgcacccgcggcttttttttgcgtctctcttcttcggggattttcgccccgcccacttgcagttccgcgggtattcccctcgcgtgtcgcttcgcgccctcctctcgctgactctctcttctcttgttctctctcgcgggtggggtgctcacgtctctttttctttcgcttcacccgcgcgcggtagatattttctatagtagtgtgtctgatcggagattgttgtagaataacctcttctcctgttctgagaaggcgcgcaaagtccccgctatatatatatatgagaagaaaacaccctctcctcgatcccctcgcggtggggaactatattatgggaggtgccgccccccccctctccccaccaccatctctcctgagagagaacccctgagaaacacacttaattcttgcgagcaccaacaaaggagagagcgagtagtcggagcactcccccgacgtgagtggtgtgttctcaggacccacaccccctcgggtccccacactggactcgttttccacagacaaaaacagaga

SEQ ID NO: 651506 - DNA, 304 bp, Homo sapiens
agctctcctatagatcagtatgaaaacgtgaaaaattctacaaaaatcaaggaatggccaggcacattggctcatgcctgtaatcccagcactttgggaggccgaggtgggtggatcagtggtcaggagttcgagaccagcctggccaacatggtgaaaccctgtctctactaaaaatacaaaaaaactagctgggtatggtggcgggcacctgtaattccagctactcaggaggcagaggttgcagtgagccaagatcacgccactgcacttcagcctggtgacaagagcaaaactccatctc

SEQ ID NO: 651507 - DNA, 1316 bp, Homo sapiens
gtggacgtaacagcaatggcggaaggagaacgatgtgccgcgctgccaacgtcgaagcggcgacggctgggaaaaacgatcttgacgaacgctctggaaccaggaggttgtgactcttgaaacgttgagaaatactacattcaacggaacgaccgctgcctgctgactctgagggccacccgttcgcgacacgattgctctgaactgtcgcccgacccaggtgactagttcggcactcactgggactggtactttcaagacctctgccaccaccacgccacacctacttcacaccacgacttcgcctgcagctcctactcgaaccagcttatcacgtgaccaagaagcgagaacggccacgccacggaactcacctagttccggactactcgacactctgtacacttacccctccttattgctacaactcacgtaacacactctcccactctacgcaccactcccctctacgcctgggatcacactcttacttggaccaccccacctcgggctcgccactccttcccaccctcgcccacggcccccgcgcccttctactaccaaccctgcactacccactgccccactcccctgcacctcaacgcctacattccaccccacgggcacattggctatccctacgaacacacgcggccgcaccccatcgcacactccccctctcaaccggctggaccttcaaggccgcaaccatacccccactgaaagccgctcgcaacgccctaccagggctgccctcgacgttccttcgcacctcacgcaacacggacaaccaccttaacatcctcacacgaaacgtgcccgtactagcccacgatcacccccttgccctctcgcgacaccgcctcccagcacgctggcccacctgctatgacgctcggcaaccccccccttgcacaccaggctcgacacctccacgtggccacaatcttcctcgcgcaacctaccccacctacttctctaatccaaacccaccaatgcacccccaacttcccaactttatcaccaaatccataccacacactaccatccattctacacacaccgagcttaacacacattccacctccccactctagcccttcacacccctgcccacacacacacccacaccgactatcatatacacacacacaccacccaccattcgaagcattcccaaccaccaaccacaaagcaccacaacagaaaacacacataatacacacacacacctaccatacctcacgaacacacataccaactccgcaactcacaacaacacccccacaacacatattacaacccacatcccacct

SEQ ID NO: 651508 - DNA, 109 bp, Homo sapiens
tgcgtggagagtcatgcgtgaggctgtccatcgttgtgcaagcttcatggattgtgcaaggatccaggttgtgctgtgttcatgtgtgctgtgcatcgtgtgtgctgtg

SEQ ID NO: 651509 - DNA, 143 bp, Homo sapiens
tagaatcgagctcggtaccggccccctgggggaattggaagttattactgtacaccacgtgatacttcttcctcgcgtacttttggccagagtgacccggctggagatcatacggaacgtgtgagctgcaccattcatgtctt

SEQ ID NO: 651510 - DNA, 820 bp, Homo sapiens
agcggagtgtctaaatgtctatcttcagatgcagaggttgtggtacggaaccacaaggccggagacgctgcctggagatgtggctgtggccgtgcatccagacgactcgcgagtacacagttgcctggtccgttgatccctctcccttcccttcagcactctacacgggcgaccagtcttcgtcaccccgttgatggggcgagctcttcccctcatcgacagactatgcgtgtcagccacagtgtgggcacgtggggcaggtgaaggtgactccgagcgtcacagatcctgcacgatgctgagatggcgggcccgacatggcgttgagccccttgaagtgtcattgcggaggatgggaccattggactcccttctgcggggactgggctgcaacggtcttcgacccgctgatgtgggccccgggcaaaagtataagtgtctggtgctgtagtgaatgtggggcctgtttcccgggggcctccagaaacactcacattgggtactggcccaatctgcgagacagttcttggggatgtgactaagaatacctgctgacaaggaaaacagttgcgttctgtcctgcttgccagggaaaattggagggcccgaagcttgcccaaaggatggtggaagctctggtggggcccttggagagcttcaagtccgcttccctttccaacccaggaaaggaacactgaggccatgcacctgagtgatcacccaagtacttagcggggaacgtagggtgatggtcatccccagaggagaggctcggattggtgggtggacacatagaagaatttcacgaggcactaccctg

SEQ ID NO: 651511 - DNA, 116 bp, Homo sapiens
aaaaaaaagaatttaacccttacatgtgtaaaggtttcatgttccctgtgagtgaaaatttttacattcatcaatatcccttttgtaagtcatctacttaataaatattccagtga

SEQ ID NO: 651512 - DNA, 302 bp, Homo sapiens
caatgtcgaaagcccaaagactttactttaaagcttaggcctcttgtgccagttagccaagatgtgaatgcaaaggaaaagttcttgaggaaattaaaagggctactccaatgaacacaaataattaaaagcaaaagaagcttattgttgatgggagagggtttattggtctgtatagaggatcgacccaccacaccattccctgaccaaagtctattccagtccaaggctctatgctctcatttagtaggttaaaaggtagaacctcagagaaagttgaacctcacagttgtcataggtta

SEQ ID NO: 651513 - DNA, 86 bp, Homo sapiens
caatatgtaactacggagctgtagtgccattagaaactgtgaatttccaaataaatctgaacacttgtttttattaaaaaaaaaaa

SEQ ID NO: 651514 - DNA, 815 bp, Homo sapiens
agtttgacgttctgtgttctccccgcccgtgtccgcccgaccgcgcccgctgatgctggcgctgcgctgctggctcccgctggctcggctgctctccgtcccgctgctcctgtgcctgctgccgcctccccgcgtgccctgctgcctgcagcaatggtgctccttgtgctgcacctgtcctacttccctcctcactcctgtgtgaaccctgctctgttgtacctgggactgtggactgccaactggtgtgaagcctgctctggcctgctgtgtgtgcttggaagctgaatggccagatgtcgtcccacaagacacgctgacgaacttcacgatgccctagtagcaccttggtgacgaatgcggctctcgtgctacacaagggctccaacctttccacaaggggttgactcccttatcccttcacttgttgccacttgctgtggctgacattacaaccaaaaacaaccaaatggggccacagcggccggcggaactgtccccacttcctttaactgagaacatggcccgtgtatctccccattgaaccaggcacgaaacctttttaacccaccttggacaaccgccaaaccaggttgggtgcggccccatgacgttacttccccatagctcccccataggcgccttaaaataggccatcgggtcactacaaccaaaccaacactgtgccttcccccaagagtacataccattcccttggcacccataacacgcacccagacgctggatctgggcaaagtgaacaagcataggtatcgtgagtcccgcgggccacaggtcaacaacgacggggcaag

SEQ ID NO: 651515 - DNA, 179 bp, Homo sapiens
ctacagatctaattcggccggggcatccctgatagtccgttggagaaagttcagagattcacttaggagatgtgacttgaagccatgagactggtgttcagagcttacccagcccaacccagcaggctctgcccaggctggagtgcaatagtgcgatcatagctcactgcagcctcaaa

SEQ ID NO: 651516 - DNA, 674 bp, Homo sapiens
ggctccccgctcctcctccccagccatggcgtgcacgttctgcgggctgcgtgctacatggctggcgctgctgctcactgacgcgctcatcttcttcgccattggcacattatagcatcggatgagcggaagactgattacaagactcctatagaccagtgtactaccctgaatccccttgtactcccagagtacctcatccacgctttcttctgtgtcatgtttcttgtgcagcagagtggcttacactgggtctcaatatgcccctcttggcatatcatattgggaggtatatgagtagaccagtgatgagtggttccaggactcgtagtgacgcctatcaatcatcatgaatgcagatattctagcaatatgtcagaaggaaggatgggtgcaaattgaggtttttatcttcgtagcatttttttactacctatatggcatgatctatgtttggtgagctcttagaacaaacagcagaagaattggtccagttgaagtgcatgcaagaaagccacgaaatgaagggattctatccagcaagatccctgtccaagagtagcctgtggaatctgatcagttactttaaaagatgagtccttatttttaaatgtttccagattttggttgtggaaggactgtttgcatatgttatatcagataagatttaaatg

SEQ ID NO: 651517 - DNA, 1047 bp, Homo sapiens
gatcgttcggggacgggggctggtgaggctcacgttggagtggcttcgcgtactgcttacggagagctgtaaggatatctgatgaccagtgagatccctgctcagaacccccttcctgtgtggcctgctctgggccttatagtgccccacgcgccaggggcgtgaggagaccgtgcatgccatgcttctcccaagcaccggacagtcactgggcctgagataagaacacaggtgcagcgacacaatgagcgtatcactggaggcactcgtagaaggtgtcatcagtaaaaccagaggcggagatgtcgagccagaagaatttgctagctaccatgtacttcacaacactgcaatgaataaatgatggcaatacactttgccttgaatggcttgagaaactctccacgagaccaatcacgtcatgtccagttaactgacggacagcggctgtgacacaggcaggcagcttaatgagtgaatgagtgaacgtgacttaagcaataactaagactgggtgtgataaggagaaagagtgagtgaacacacgaagcgaatgaattggattacatttgtacatatgcttggaagattgtgaaaaaaatccagctgacaggatagaattggtatacgttagtgggagccagtctgcctgggatattctacaaaatgttgaacaccgtgtataatgttgaatatggaaacaagtgtgagataccttgacaaaaaagtagagctccaattttacccaaaagtcaactaggagttggacaacagcaatgtactgggacacaagaaaaggcagtggttaggcgaattgcgggttcacaagacgggggcttgcgcaaagacggctacggcacgaacagagggagggaagaaagaagcgaaatggggaagaagcgaaaaagcgaaccccagaacggcgtacccaacagcaccaggagcgtggggcaccagtggcagggacgaaagggaccggcagaagcctggggaacaggcaagagataaggcaagggaccgaaacacaagagaaagaaagcggagaaa

SEQ ID NO: 651518 - DNA, 990 bp, Homo sapiens
ggagtccgagtggagagagcgagctgcgtggtatgtgtggtcgcgtctcggaaatcggtagcgcttgcaagccatggctgaccaactgcactgcaagcagccagcattgccagaattcgaacagcaagctattgccactcatattgcaccaaagcatggtgcatggcaacttatttaccaaccaaaggcaatctgggcacactgtaatgcagcatcctccttgggggcacgaatcccaacagcaagcagcagttaacagggcacatgcattcacatgcaagtcagatgctagatgggtaatgggcgacaatttgactatccctgaaattttcttgacgaatgcatggcaaggaaaaatgaaagacacgagaacagtgaagaagaaattcagcagaagcattccgtgtgtttgatcaaggatggcaatggctcatattcagtgctagcagaaacttcgacatgtgatgacaagaccttggcagaggaagttaaccagatgaaagcaagtctgatgaacatgatcagggcaagcagcatcattgattgagtgcatggtcaaagtaaactcatgaagcagtctgtacaaatgcatgacagaaaagtgaaagaactgtggtccagcaatgtgttaaaatttctaggtaaaaaaaattgttgcactagatgcactatacactcttggcacgggcaacactacatcctgggtcaacaagggacgacatcccctacctggtcacaacaaccattactgcactgggtacttaaggacaaagtgacgggaacgttccaaagaacgcatgccccaagtggttagacttatcccccattgaaatctatgaacggggtaccattggtcgcctcacacaaaccattaaattagtaaggaccaaactgttgcatccccaggctacacctgtgtcggccattgtagggatttaagctgtcgggggaatctacattaaaagacccaaatattgggcagcatacaaa

SEQ ID NO: 651519 - DNA, 215 bp, Homo sapiens
tgcttatgcacgaatgtcgcgcaatacagtagttgacttggtgctctgcacgccaggggctcttgctagaaatctcggctgcaggctaaggcagcatcagcatgacctctttgtctgggaacaccgggtgagcagcccactgcccagtgcctcgtcagccaccatcttgcgggcggtgaaggccagctcgttgaccaggctctggttcccgatga

SEQ ID NO: 651520 - DNA, 415 bp, Homo sapiens
gcagcaaacaaagcagttcaccttttccaactgggaaaaatgaaggcaaggactctatttactgaaattattttcaacctttccccaaataacaatatttcagaggctttgaaaaaatttggtatttcagccaatgacccttccattttaattgttttcattgaagagggagaaaaaccaattaatccagaattcctaatatttcaagtagaaggtcatcaggtttctttgaaaaattttcctgaaataatgaatattacagaagtcaaaaagatatattaactcttttcccaagaagaaagtatcggggccttattggatgctatcctttgtagaatgtcaaccaaagatgttttatgaaatgtcagaaatattaaccaaaattttcagccttaaagaaaaccttgattttcaa

SEQ ID NO: 651521 - DNA, 224 bp, Homo sapiens
  misc_feature (1)..(1): n is a, c, g, or t
  misc_feature (28)..(28): n is a, c, g, or t
  misc_feature (39)..(40): n is a, c, g, or t
  misc_feature (68)..(68): n is a, c, g, or t
  misc_feature (75)..(75): n is a, c, g, or t
  misc_feature (109)..(109): n is a, c, g, or t
  misc_feature (118)..(118): n is a, c, g, or t
  misc_feature (123)..(123): n is a, c, g, or t
  misc_feature (135)..(135): n is a, c, g, or t
  misc_feature (137)..(137): n is a, c, g, or t
  misc_feature (163)..(163): n is a, c, g, or t
  misc_feature (178)..(178): n is a, c, g, or t
  misc_feature (191)..(191): n is a, c, g, or t
  misc_feature (207)..(207): n is a, c, g, or t
  misc_feature (215)..(215): n is a, c, g, or t
  misc_feature (218)..(218): n is a, c, g, or t
ntctgccgaatttcggcacgaggtttgntcatatttccnnctggcaaaacatctgtatctttctattnttaccgnagtatttaaccgtgaatgtgactagaaccgctcntctatatangcaanatcctttttttncncccttttttcttttcggcgttctaanattcattcttagctnttctttttcaaangtgtttgttcctttanttgtcatncangatagg

SEQ ID NO: 651522 - DNA, 154 bp, Homo sapiens
gacccatctgtgacattctttatcccttcttccccgggtatggtcggcatagagcgggtcttgtcttgctagtgattcgactactctgatagctgtgagcttgcttgctggccagaggaagcaccaggatgtgacgaggcagagggacggctcc

SEQ ID NO: 651523 - DNA, 234 bp, Homo sapiens
gaagcagaaactgtatcatagaatgtacgagataggattatatatgataagtcagttagagggaacatgaatccagccactatgagttccaacaacacaagttgccgaatttcttgaaggttgtgaaaattatttcctactactgactgagatcttgctatggaagtatagctttcatcagatttgtagtctgcataaatacaataatgtcttcactgtagtttttcttctgat

SEQ ID NO: 651524 - DNA, 240 bp, Homo sapiens
  misc_feature (137)..(137): n is a, c, g, or t
caaaagaatcttctagctctgattcatcctcatcttcatcttctgatagcgaaagcgaaaaggaagagtctaacgataagaaacgtaaatctgaggacgccgaagaagaagaagacgaagagtcttccaacaagaanccaaaaaatgaagaaaccgaagaaccagctactattttcgttggtagactatcgtggtctattgatgacgaatggttgaagaaggaattcctgcagcccgggg

SEQ ID NO: 651525 - DNA, 181 bp, Homo sapiens
  misc_feature (23)..(23): n is a, c, g, or t
  misc_feature (46)..(46): n is a, c, g, or t
  misc_feature (123)..(123): n is a, c, g, or t
  misc_feature (145)..(145): n is a, c, g, or t
  misc_feature (148)..(148): n is a, c, g, or t
aaaagatgataaatccaccctcntgctcttaaaatcccataaacgntaggctctggagaaacaagttgttctgtcgagcccttgccatcaacacactaagcaatcatagtcccccagagcacnagatactgctaatgaccattanatnttgtatcatcatgctgcctcctgcatttgaatt

SEQ ID NO: 651526 - DNA, 424 bp, Homo sapiens
gctgtaggaattctgcacgagctgtgctattatctcatgctctaatggggaaattatattttctcatattcttatatgaaccaaattaaagggtactcgtgtctattttttctcaaaaaggaaaaggtttttattataaaatacatgcgtctttgaaaaattcaacctgtgttggagtacattaaataccaaaatgaaagtcattttgacttccacttcccacagatatatcaccatgtgcacggtaattccttgtgttcgagagaaggcgacatttgatcacaactgtgtgtgcctcactctgtctggggaaggcccgtggtgaatcataggactcaaggtctctgttcacaatactcaaggtggtaagaattggcaagtagaagggggagtggtttgcattgtgctgttaccggatcatggg

SEQ ID NO: 651527 - DNA, 117 bp, Homo sapiens
ggcagcccccgcaagacggctaagggaactgagaagcctgactgtgatgggggctctgccataggcctcctcttcggcctcctcaccgaaatcctcctcctcgtcttgcgggggctg

SEQ ID NO: 651528 - DNA, 187 bp, Homo sapiens
  misc_feature (132)..(132): n is a, c, g, or t
ctagaggatctggtcttgaggcggagcaatgaggaagtcacaagcacggacttgactttggtctggcctgactttgaagtcatctccgcccacaaaaacccgggtgctgccacgcgaagctcaagagctccngggcacgcagggtgttctagcggagacccacttgcaggaaggcacacgccctcca

SEQ ID NO: 651529 - DNA, 248 bp, Homo sapiens
tactgctagtggccgggggtgtcggcgacgatgaacttgcgcttctcggtcgagaagaaacggtaggcgacgtcgatggtgatgcctagctcgcgctcggcggccaggccgtcgaccagcagggcgaagtcgatcgccccgccttgggtgccgaccttcttgctgtcggcttcgagcgccgccagcagatcctcgaagatcatcttgctgtcgtacagcaggcggccgatcagggtggacttgccgtc

SEQ ID NO: 651530 - DNA, 161 bp, Homo sapiens
tcgagctcggtacctaatatgagattaggcagaaacaagaaggttgaaactaatgcaaacaaacagataatgtaccagaatctctgggatgcagctaaagtggtggtaagagggatgtttatagcactaaatgcccacatcaaaaagctagaaagatctca

SEQ ID NO: 651531 - DNA, 200 bp, Homo sapiens
agtgatctagaggatcccggtgtcacgcggtgaaggcagtagtgggtcaggtacagctggatgcgcacgcggtcgttggtgggcgaggggatttccagtgcttcttcgtagttgtcctgctcgaagtactccttgaagcgcgggtggcgtaccaggttcgttaccggctggccgctgtcctgaggggtcttgaggcccag

SEQ ID NO: 651532 - DNA, 502 bp, Homo sapiens
tctctcttgcagataactatggccgtgtgcctgagatctggccaatggaatcgtggacagttctccatgctctttctccttctgtggcaactctgaatgtcgtgtgttcaagatgaagacagaagatagaatgaccttgggtctctgaatcattgcttggagaagagcaatttactgatcagtggtgtgaaaataagtaattcaaaatctaagctattgggccaggtgcagtggctcacgcctgtaaccccagcactttgggaaaccaaggcaggtggatcatttgaggtcaggagttcgagaccagcctggccaacagggtgaaaccccgtcgctactaaaaatacaaaaaattagccgggcatggtggcatacgcctgtggccccagctacttgggaggctagggcacgagaaacacttaagcccaggaggcggaagttgcagtgagccaagactgcaccactgcatgctagcctgggcaagagagcaagactctgcctc

SEQ ID NO: 651533 - DNA, 123 bp, Homo sapiens
aaccactagaaacgggtcggttcacatggctatacaaagcaaaatactatacttaaagaggactgtcacaacacggttccaacctgtgaaatgtacagtaaactcctgttccagtttcatggc

SEQ ID NO: 651534 - DNA, 131 bp, Homo sapiens
ggtcggaccccggacgaatcctgctgctgtaataggacggatagacgaagaggggcgtttggtattgggttatggcaggggtttccgggagcagcaggaattctcgcgggagcagcaggaattctcgcggg

SEQ ID NO: 651535 - DNA, 138 bp, Homo sapiens
cagacatctagaggatccctcgtctatcatcggcacctcgctatttatcggcacccgtattgaattcaagtataatattaagtatgcatggacctctagagctaatggatgccgattaatagcgaggtgccgatcaat

SEQ ID NO: 651536 - DNA, 122 bp, Homo sapiens
taagaaccagaacgggggcaaccctgctgtatactacgtagagagtacgctcaccgtggctgccctcggaacccaacatctacatccacaaggcacgacatcgcgcaaatgctccggctgaa

SEQ ID NO: 651537 - DNA, 443 bp, Homo sapiens
  misc_feature (81)..(81): n is a, c, g, or t
aaccatcactttaccgggtataagcacccagcagctgaaagcgtcctagaatgcgctgatggtctgactcgtcattggaantatcatccgctctcccctcccggcgctggagcggcgtgtcgcagcgccctctgcggacattcgcgaaccgtaactgcagcaaccccttggcggtgtgtagggcgtcaagccgcgctcatcagcccccttttgcaatacagctccctactgctaaggggaggtgagtagtaaataatactcgctgactgagaaagtgcaaggtcatccgattttattaataggccgggcgcggtcgcacgcccgtaatcccagcactttgggaagccgacgcgagaggatccctgtagcccaagagtttgaaaccaacaagatagtgagataccgtctcgatcttgcagataaacatttttaaaaaaagaaga

SEQ ID NO: 651538 - DNA, 450 bp, Homo sapiens
  misc_feature (8)..(8): n is a, c, g, or t
  misc_feature (15)..(16): n is a, c, g, or t
acatagtncctcacnngaaaaaattatcggtcttttagttcttcaatcatgaggatatgagtgagtaaagtattcaaaaaacattactttgtcatttttttctaaaaactctttaatttttatattagccgagctataaaaaagaccttgaaattcacctccttcagagttaatgcttccatcatcattgatgtgcataatttgatcaagctcattttcttgaccaatgataaagtcatcttcaccaaataaaggagccatatgaacaagtccagttcctgcatcaatagaaacatggtaaccagctacaacaataccaaacaaatcagtttttataggtctttgatattcaacaccaagcaagttttttcctttaaaagtatcaactactttgatttttgaacaccaaaaattccattctttttcaagcaaatcactagctcatggagt

SEQ ID NO: 651539 - DNA, 1137 bp, Homo sapiens
  misc_feature (374)..(374): n is a, c, g, or t
ttttttctagagaggaggacgcagaatgtagagaaacagtcacatagttgttaattcatctttctgttatattatttatctgtgtgtgttgaattcaccctccctgtgtggtttgtcctctccattgtgtcagtacccctgctccctcacgagttcaaccaggggtattgggtctttctcttggcccgagggaagggtgttataacgcccggaggggggcccgtggcccagcaacgtcccggagttaattcgtcgaaggcccccgaacttttgaggagccttttccgggaccattgggcttcaaagccatgaaaggtctgtacaagaagttcctcggggcaaccgtggctgggacacccacaatgccgcccccnactgggagcaactgggctttcacagctcaggtgattatcctgggaccactccaggccccaattagccccggcttatgcccccgtattggattgcccacacggctcacacttgcaagccagatttgctgagactgtaaggaaaagattgagtccccgtttctgggaaaaagctggaaagatggcccctcaaattcttgaaatcttggtgaatgctgcccattgttgaataatggttcctggcacagcccaatgtgtgttgagagcttttccagactaatccaccctttgggtcgcctttgctcgttcgtgaatattgagacccgacccgctttcgcgtgggtgtcaatccaaagcacgtggacccaagaaaggctgtctggaggctggccaaggtcaccccaagttctgcccacggaaggcttacgaaggctaaaatgaaatattattctcctaaatacctcgccacccccaccttcttaatccacctggtggaaagaaccggttctcacggactcgtttgtttccaattggccactttaagtttagtagtaaaagaactggttaatgagtaaccaatgcactcgttaaaccttcacgaaggaaaaggagaatgttttgtggagcccctcttggttttcttttttgcgtgtggcacgttttaagttatattagttttttaaatccagtactttttaatgggaaccacttgacccacaaatttgtcaccagaattttgagaccccctttaaaaagttaaatgaga

SEQ ID NO: 651540 - DNA, 925 bp, Homo sapiens
ttcttctttgcttttcccctttgtgaagtctcatcccaactgtcgtatatttctcggtgattcctatttgaaccaagtggtaacttgtcccttacgagtgtacgccctctcttggagtttcctcctcttgttacctaataaacacttttctctacgcggtaaacatccgtcacgcgctagttgtctacgtgcctttcttcgcctgggcttcctaatgcggattcgtgtcttttacagtcccaggctcttctcggatcttgtgctcttgtgccctacaccctggcattcctgccaagttgaaggcactatgattgttcttgtcttctcgtctcgtcgttggaaatattcttgcttttgcgtaatatcgcccctacccttataagtccttcccttctgttactttacggcaattcccctttccctgactatcgcgatgggtctaggagtctaggagcagaacctcgtggtaatgtatatggtgcagatcccaagggctgcctctagctctcaagtatccctgtgcctcttcagcatgatgtccgatggcccccggcacctcctgcctctgtgtctttcagacctgctacatgttctgcttgagatatttcgctcagcctgaaagtttccctcaatccatctgcacagagaactcttatggcactcccagttagaaggccctgctcagacaccattatcttttgtgaagcgcttctgccacattcttgtcttcacccaaaattgatcacgtccgccttctccactgggctcccgtagcacaactataacatctgcatggagtgtttgactgtttcgcacaatactttcttgtacatttgtgtcgtcccttcccctaactagactgtaagtgccttgcggtcagggactgaatctgcccggttataaatgcctcgatgtctagcccata

SEQ ID NO: 651541 - DNA, 232 bp, Homo sapiens
catgcacgctcgtatgttcggaacaggcgggtaagatatgcgagtcctttacttttttaactttccttatgagcatgctgtgttgggttgacagtgaaggtaataatgacttggtggtgattggagatattgggcttgtaattgtccagttccgtggtttaatcctgacgccagcttatgcggaggagaatggtttccatgttacttatactaacattagttcttctatagg

SEQ ID NO: 651542 - DNA, 429 bp, Homo sapiens
tcaccatgcttcttaccccagcagccagactttgggaggctacttttctctgagccaggtgccccgcccactccaggttctgtgtctcccctcttggaagggagatggccctcagtgacactgtaagaaagtttattgccttgagaattcgggagtatttgaggcttgagccctttgaaatctttggaaaaggacctttttggtggagtgctggacttgtggaaataatgccacacttaagacaacaaggagagtacaatgggaaagtcttctagagaaagcatgaagaagacctagtggtctttgccaatgtggatttctgggacagaccacttcttccaaatccttagtcagtttcctcctaaggccaactaaattctttttcctgttgttggtgaataacttcccccttcttttcccactcccagc

SEQ ID NO: 651543 - DNA, 1118 bp, Homo sapiens
aaggagaaatgtgaaacttgagtttagggttactgccgaaggaagaccaaattgaatgaaatctggccttggaattggctgtagattcttcctcctcgaattgttactgaaaaggagtcttaaaaattgaaaatgttagcagagcattttgtagtgttacaggctttgttaatttttcattgtagtacctgttgctggcagagtaacttttcagaattgtaagatttgatataaacctgaattcaaggtaaaatttagtcgttaaactgcacctgaggagattatgtccaaacagcctttatacgtattgcagtgtggaaacttgcaaatataactaggctaaatgtcaaatgccacacgttttaaacttggtaggatagcaaagagcccagttgtacaacaatagtagaaacaaaaaaataaaataaaaataaaaaaagagaatctgtcaaatttggaacaggcgaagttgccacactggtttaagaaatttgctattcttaaaattattcactctctcttgctaatgcaggtctcatcaggaaaaattcagtaaatgcatatggaattgaagaggtttttctacgtatctgtcttttcccctgaaaaataaatgtgtcatgctcatctgtctctctttaaacatttctttaggtgtttttcctttgaaaaatgaaagtgcaggttagataatactacatttgagccatctagtaactcaagcgacaataggaaacaggttccgataggatatttaaaaggtggatttgaatagacaactgctttctatttctggcacagattgtttgggtacgtacgtgttcccaagggcctcaagtctcctatgtaaaaaacatttccgtttggttctcccaaaggtaagtacaatagtgcgaaacatttccgggccagaacatcttctagcatcattgtggtgtccgctttccaaaaagagaggagaacaaaattgcgggggaagaatttggccaaacgagggatctcttcaaaagcggcgaggagaaacgatctcgaacaccgcagcgtcttacacacgacgtataaaaactatggctccccacaactacgcccccaggagactaccgtcatcactcatccca

SEQ ID NO: 651544 - DNA, 435 bp, Homo sapiens
cagtagcccgggtctagaactactcatttcctgtgtgccgtcgaggaatagcccagccaggacctggcaaaatgaggggtactaaacgtgcccatgagtcagatagactgaaatacctctgagtctaggtagatccttacactggataggtagaggcctcctctacagggtcggagaaggccacggcagacatatcttccatgctgtacagacataattcctcagtgtgagccgtgtcccacctcaatacagtctgagtaacagatgagcctttatgagtcagatcagccaagcagtttaacaggctctatagtattcagtgaaacctttatatcccttacggtcctccgatcttcaagaaaggtagaatggactacaggtctattacaaacacacctcaccaagttcaggcaccaaaaaggaccggacaatact

SEQ ID NO: 651545 - DNA, 410 bp, Homo sapiens
  misc_feature (42)..(42): n is a, c, g, or t
  misc_feature (402)..(402): n is a, c, g, or t
  misc_feature (407)..(407): n is a, c, g, or t
gcaggaggatcacttaaggccaagagttcaagaccagcctangcaacatagcgagaccctgtcttcaaaataaaaaataaaaataaaaaagaagaaattattttacaaactagcaccactagaaaatggagtttcatggatgttccagtgatggcagtttgggtataaggtgtttgaccaactgtcagccatatttattttcatgtttttatctgtgtagctattttagatcacttgacttagccacttttccatttaacataaccagccagggctttggacttcctgccaccctcccgcttcatccagagaagttccacttttatttgttttctacattaggcttcttctgaagcttacatttgaaggaaaggctctgctgctttaaaaattcctggccgncgttntct

SEQ ID NO: 651546 - DNA, 796 bp, Homo sapiens
gatcatgccactacactccagcctggcgacagagcgagacttggtttcaaaaaaaaaaaaaaaaaaacttcagtaagtacgtgttatttttttcaataaaattctattacagtttgtcatgttggctggtagtgctcatatttatggtggttttggttttagtactcactggttttcataattatcaatgattactaaacaattgggggaaagggacttctaatcttttttccataatatcttggacacattatttacagaagaaataaatttcttaccttttaattttaaaaaaaaaaaaaaaaaaaaaaaaaaaaaaaaaaaaaaaacaaaaaaaaaaaaaaaaaaaaaaaaaaaaaaaaaaaaaaaaaaaaaaaaaagaaggggcgggggcgcgaacaataatactacaccccgcagggggggaccaatacacagcgacacacccttttatgatataaaaagagagggggcccacaagaggagagggaataaatagatgcacgaagagcggtggagttattataacaaacacgatggtgataaagagaagaaaacacaaccagtaaaggtgagagaagatattaggagaagagaggacacaactaataatgggggtgaggagaaataaataagaggaagaacacacacacacataagaaataaaaaacaacaccgtgatgaataaaaaacactaaataatgagaaaaaaaggatgaaaaaacaagaaaaaataaatatgaaggagaaaacaaagttgaacgaaacaaatatattaggaaaaatatataacagg

SEQ ID NO: 651547 - DNA, 415 bp, Homo sapiens
  misc_feature (285)..(285): n is a, c, g, or t
  misc_feature (335)..(335): n is a, c, g, or t
  misc_feature (362)..(362): n is a, c, g, or t
  misc_feature (367)..(367): n is a, c, g, or t
  misc_feature (402)..(402): n is a, c, g, or t
catgggctcgaaacttgccctcccaagtccagtagtccccctggtctctcacctagaaggagtaaaatccgccttctctttcaagagccaactaggaagtgcagagataacttaaaaagcagttgagattttgccattggatcaaactgacaatgtgcattaagcctctgtttttcctgaaaaggatattgacaaatgaggcgggaagtagccttgactagtccagaggtcaatacagaaagagatgagaggagacatttagcttttactttcaagtggaaaaanacattgagtccccctctgcacccccactttatttgtccctcactttaggntctgaataaatagagagagctctattngtctngttttcttctctggagctagacttgagctgggggnatctaagatgtta

SEQ ID NO: 651548 - DNA, 759 bp, Homo sapiens
agcggaaaggcaatttccgcctgtctgcccgacttccaaaaactacctcctcctgcccaggcctctcccaccaccaccttccctccaaagataaccgtgtccatgccatccgtggcatcatctcgagttttcatttttggatgaagtgacatttagctttaacaagacatttccaaagcgcctagtctcctccaaaatgctaactttaaaagttgggcattgtaggcgaaaaatcccaaaaaaaaaaaaaaagacaaaaaaaaagggctggcgagagaaacgactttgggctatgcttaatgtgtgcactttcccccatgcccccgttcttaaactctttaagaatgccttggagtggctttccatgattcctttgagttacccgatatctggcttacaaaagctttagtctacgtactggtacattcctggtagggttaacgctttaatttctaccacaaaatatgctatatcgctatgtatcaagcttcctggtaatcacgaacgacagggtggccttatatcccaatgtcacggcatacattccctagtggacacttattcagaaagcacagtgtgtccggaaggcttgggacttctgcgggtgaaccaagagaccattcagcaagaacccttgaagtggcacggagcgtgcttaggttctataactctttttaccccccttttccttctcctttcaataatcactatcttgggaactctgcttaacacggaaagcccttaatcgcatgcctatgt

SEQ ID NO: 651549 - DNA, 149 bp, Homo sapiens
gtcatacctctgtttgccctgctagtatgagacccttccaatacgctgtatttccattcctgccctcccagccttagctgtccactctctgcaccagctggcctgggaacttccctccacagcacgtacccctgggcgccactcgctac

SEQ ID NO: 651550 - DNA, 440 bp, Homo sapiens
ggaactctggaagaggatatgaatttgatgtacagtatgtcctcacttaacatctttgaaagtctcttggaaacttcaacttgaagcaaaataatatatagtgaaaccgcttatttttcatcaacagtataactacacaactgtgaacaaccaatgctgttggaggacctcctgtacgttgtttccataaagtcagttttcagggaattccaaaacgaagtgacggacttcgtgtatataaaaagatggtagtgattccacctggatgacagggttattgctcaagaaactaaaagaggccgcctaggtagagaggattctgtcatgaggtttctgctaaacaaaggatcccagaatctcacccattccagttaaaggcataacgaagaaagcaatattcacaaaattagagatttccacattcttgatgatggtgaatt

SEQ ID NO: 651551 - DNA, 182 bp, Homo sapiens
ttgggggcccccccccccccccaacttcagttggaaatcaagggggggggtttccaagggggccatttttttttaaatagggaaacctttttgggggttccttcaagccccctcttttccccccatttttttttttttttaattgggggaaagggaattttttttattctttggccaaacca

SEQ ID NO: 651552 - DNA, 113 bp, Homo sapiens
taacgagcgcacttggtccagtcaggggctgttacggaggggctgtacggaggcgtcgtaggcagggtcgtaaggaggcgctgttacggacgtgtaagagagggtgttacgga

SEQ ID NO: 651553 - DNA, 125 bp, Homo sapiens
caaggaattttggaaaagcctttccaaaaattcgttcttgggaaggccttcggctgctgccccccaaattataaagtggctattaaagggtttaaataaagaggttttattttttaaaagggaaa

SEQ ID NO: 651554 - DNA, 542 bp, Homo sapiens
tctattaataaatataaataaataagccttccctgagtgaccaagagcatggaacaacaaagtatataaagccacaaggccaaaaggaggcagaatgtctttccaggaagtaaccccacaaacagaatcttctttacatatcactggacccctttcatttgaccccacctcttacctctctttgagcagtatagggatttcaactctgtgtgtgtgtgtgtgtgtgtgtgtgtgtgtgtgtgtgtgtggtgtgtgattctcccgtggtctatctgtgtgctgtgctctctcttccttcatgagttgtgttacttacatatcgtggcactcctccagcgttctctggggtgtgaagatatttaataaactaattgtgtttttgtggttcacactcttcgtgaggcccagctcccggtacgctctcttggtgtgtgtgtggctctgaaagggtctgctgcgcttcttagtggacatatttctgtcagggacagtctcatgcgcggcacaatctatgccctgcgccccagagcctataggcttaa

SEQ ID NO: 651555 - DNA, 272 bp, Homo sapiens
aggcacagcccttagagagaaacagatcagagaagggaattacggaggcaggcctcagggctgcatcctcgggcacaattatgttaacaaggtaaattagccccagataaaccggtacctaataaactggggcagctggtgcctggagccctcactaggaaggacttcaaagtccatagcccagtcttcagagttagtggtctcctgcggtggactccaggcctgtccatgggcggcaggccaaggaagggcctgaatatcgcctcccagga

SEQ ID NO: 651556 - DNA, 335 bp, Homo sapiens
  misc_feature (61)..(61): n is a, c, g, or t
  misc_feature (92)..(92): n is a, c, g, or t
  misc_feature (127)..(127): n is a, c, g, or t
  misc_feature (171)..(171): n is a, c, g, or t
  misc_feature (200)..(200): n is a, c, g, or t
  misc_feature (215)..(215): n is a, c, g, or t
  misc_feature (225)..(225): n is a, c, g, or t
  misc_feature (332)..(332): n is a, c, g, or t
caggaatcctcatcaggatttcagacagataagtctgataattcaagtagtagaactctanccacttggctaaagttcaaaggcattcccantcccagggaatggggaattgaaaggagcaggaaanacgttcatttggccgggcgcagttgctcatatctgtaatcctanctttttgggaggctgaggtgggcagatcnccagaggtcaggaantcgagaccancctggcccacatggcgaaaccttgtctctactaaaaatacacaaattagccgggtgtggtgcacacgcctgtaatatcagctactcgggaggctgaggcaggagaantcc

SEQ ID NO: 651557 - DNA, 911 bp, Homo sapiens
  misc_feature (365)..(365): n is a, c, g, or t
  misc_feature (385)..(385): n is a, c, g, or t
  misc_feature (387)..(391): n is a, c, g, or t
  misc_feature (403)..(403): n is a, c, g, or t
  misc_feature (411)..(416): n is a, c, g, or t
  misc_feature (420)..(423): n is a, c, g, or t
  misc_feature (425)..(427): n is a, c, g, or t
  misc_feature (505)..(505): n is a, c, g, or t
  misc_feature (760)..(760): n is a, c, g, or t
  misc_feature (778)..(778): n is a, c, g, or t
  misc_feature (787)..(787): n is a, c, g, or t
  misc_feature (902)..(902): n is a, c, g, or t
ccaccccagctgctgctgccacactcgcgggcgctgcccggtaatggcctgggggagtcccgagtccgacgcgccgctggcctcagcctggacgcggacccctccgcgagcgcgtctgtgacccacggaaccggcaggcgctctctgcttgtggcgcccagagggcggcgctgacacgggcgcgatccgggaggcgaggcagggcagggcactttcgtcccggggcgatcccaagagacgccggctctgggaccctcgccgggtcctcgtcccgcagcctcttctcggcctcccgcgatcctgcctgcgccctctgcccaggactcgtctctcacgtcggctccccgccagtctcgggagcctcngcttccctcggctcccgctngnnnnncccgggacctcnccccctcnnnnnnaaannnnannncggaggccgggctggacgcgacccagagcctccgccacccgcttctgccactcaatggaggacggtctgctggagatnatgaccaaggacggcggcgacatgccggcgcccctggaggtgtccaccgtgccggcagtgggggacgtgatctccggggagtacaacggcggcatgaaggaactgatggagcacctgaaagcccagctgcaagccctgtttgaggacgtgagggccatgaggggggccctggacgagcaggcctcgcacatccaggtgctctcggacgacgtgtgcgccaaccagcgagccatcgtctccatgtgccagattatnaccactgcgccccgccangcggccttnggcgtggtcggcggcaaggggagcttccagagcgacccccaagagccggagactccttcgcctgggatcggggacagcggcttgctgggtcgcgatcccgaggacgaggaggaanaggaaaaga

SEQ ID NO: 651558 - DNA, 213 bp, Homo sapiens
  misc_feature (20)..(20): n is a, c, g, or t
  misc_feature (22)..(22): n is a, c, g, or t
  misc_feature (148)..(148): n is a, c, g, or t
  misc_feature (168)..(168): n is a, c, g, or t
  misc_feature (197)..(197): n is a, c, g, or t
ctgggattccctcgccctcngnttccagaatccaatttcttggatttcagtgtttttaaggtgggaggtctcgctatgcttcccaggctggactcaaattcctgggctcaagtgattcccccgcctcagcctcctgagtagctgggangactacagatatggcaatgncagcctggggggtctaaccagaggaaganatcctggagctgggtg

SEQ ID NO: 651559 - DNA, 516 bp, Homo sapiens
gctcgaccacagggctagtgagaggcagggcttggctttgaacccagatatcctagacatgtcccccaactccttggtgctgctctctggctcattttgatctcccttgtctgtcatctggagagattcctccaagcctgccatccacactctcttctaaacatcatcccaccaactccttcccaggagcccggtgctatctgcacaaggaatgctcacaacaaagaaacctgcattggccgggcaggcgtgttggctcacgcctgtaatcccagcactttgggaggctgaggcgacagatcacctgaggtcaggagttcgagaccagcctgaccaacatggagaaaccccatctctactaaaaatacaaaattagccgtgcgggatggcccatgcctgtaatcccagctactcctacttgggaggctgaggcaggagaatcacttgaacctgggaggtggaggttgcagtgagccgagatcacatagcctgggccataagaggcaaactccatct

SEQ ID NO: 651560 - DNA, 427 bp, Homo sapiens
tactatcccttggcctaattctcttccttctctgaaatcaagccaaacaaacactctgcttgaccgtgcttatctgtgtggtctatttgtcatataaatatttgccaatgcaatatttctctcattgagacttctcaggcagactgtttagatggatgaattgagggctcatgttgtgtccattttcttgacatcttagccatttttattttgccttcagactttcaactgaaactgcactagcatcttaaatatctcttattttccctagctttttttttcactctcatccctctcctgctcaactctctgcccttctggtttctgttttcttggctgcctcctccatagtcccatcctctgatagggttattctccactctttctactttcctgcacattttccatttgaatattttatttattt

SEQ ID NO: 651561 - DNA, 1178 bp, Homo sapiens
gccggtgttttgcagtcctgggcaggctcggcagtccacgccctggccctgggtcatggtggtgggcctgagtggctgctctggcctgctgcagcctcgcctggagctgggagccgcctgctgccctgccgaggcctcgagtccagccctgctgggagttatctgccacacagatttgcggaagaacctgaccgtggacgagggcaccatgaaggtagaggtgctgctgccctgaccgacaactacatgtacctggtcattgatgatgagaccaaggaggctgcattgtggatccggtgcagcccagacggtcgtggacgcggcgagaaaagcactggggtgaaacctgaacacagtgcatcaccaccgacaacactgggaccatgctgcggcgacatgagaaacctggtcaagctggagtcgcgcactgaaggtgtaccgggcgtgacgacggtatcggggccctgacgtcagcaagatcacgtcagcttgttccacactggcaggtggcgtctcgtgaacggtcaagtgcatggagaacccgtgacaccaagttcaggacacacatatgtcactacgtggagcaagcccgggaggctcggaggacaccaataacgtagatcaacacggtgaacaaccttggtaggctggctggactcaggggaacggatatatgaaagggagcctgcggatgaagagtgtgtaaagcttcatgacgggagggtatatggggcggcatgccccgggagacgaagagtctactaggtggaccaagaagggatcgagcatccaacaaaccgatacagggtctaggaacggccaagagtggaagaccgggaaacaaggcaggacagcccggcgaagacaagccgagcagcggccgcaaaaggcagacagtaccagaatcgggccaagacccaaaagaggacaaagcaaacccgggaaagaagaaagacccgcgcacaaaaagcccaatacagtaagaagaagaaggacgaacaacacgaagaagcgaaaaaaagagacgacagacggagacaagaggaagcaaagaagcggagaggcggcgaaggaggaaaaggacaggagaaagacagccggagagaagaagcgcccaagacagaacaggaaacggcgacaagacacgcacagaacggaaagccggcagccagggaaca

SEQ ID NO: 651562 - DNA, 123 bp, Homo sapiens
ggctggtccgttttgggctgtcgtgctatgttgcccaggcggttcgaactcctggcctcatgggaacctctgtctcagcctcagcactggcaacacaggcctgcgttggcacgacagccaaaa

SEQ ID NO: 651563 - DNA, 674 bp, Homo sapiens
aataacctacgtaatgcctaatccaaggttcccaaatcagcccgcacaatccaaagggggaggggatatttacgggagttaggctaagtgtgggtgagactgccgggttatggggtgggtcggaggggttctatacctttggtcgacagtactattagaggtgtaagctccgctcttcgctgtgttcgcgacagttcgagcttagacggcggtgacgattttgaccctagtagaagggaagaggctgggatgcggagtattatgcctcgaacattattgagtcgatgtttgtctgtagctagcccttctcatacgcgagcaattagcgctagggttactggacgctatacgtgtgacctccctaatataaccttagcgctcaaggagcgaggttaacgctacctagagagagcatgtagagctctaacctcgagcgtacgataagggattcagcaggctctgacgttctccgtccgcagacttacgattgttcttaagagtcggttagcgactacgagtctaattccggtttttggtaagtttttggggagcctcagtaggatcgaagtgaatattcttgggcgcttacgtagtttttctaggacttcttcgtgttagcggggaggagaggtgtctttgtcggcttcgaagatttttaatagcgagtggtgatg

SEQ ID NO: 651564 - DNA, 134 bp, Homo sapiens
agcgagaatggcattaggactaggaagcggataggaaaatgattataaaggcgtgatcataaaggtgatagctcatctatataggggaagtagcgtcttgtagacctacttgcgctgatatgccattcttgctg

SEQ ID NO: 651565 - DNA, 630 bp, Homo sapiens
ttcgatattccgacatgactcaggatatgaaggttcatcagtcaaaaatcggtgttctatgcagaaggtgtgggttcaaacaaaggtgcaagtcatggactcatggtgggcggtgttgtcatagctatagtgagagtcatcaccttggtgacgctgaataagaaacagtacacatccattcatcatggtgtggtggaggtggacgccgctgtcaccgcagaggagcgccacctgtccaagatgcagcggaacggctacgaaaatccaacctacaagttctttgagcagatgcagaactagacccccgccacagcagcctctgaagttggacagcaaaacctttgcttcactacccatcggtgtccatttatagaataatgtgggaagaaacaaacccgttttatgatttactcattatcgccttttgacagctgtgctgtaacacaagtagatgcctgaacttgaattaatccacacatcagtaatgtattctatctctctttacattttggtctctatactacattattaatgggttttgtgtactgtaaagaatttagctgtatcaaactagtgcatgaatagattctctcctgattatttatcacataggcccttagccagttgtca

SEQ ID NO: 651566 - DNA, 445 bp, Homo sapiens
tatataactttaaaagaagtagaagatttttggagatttataattacattcaaagtatacttttttcttgaaaaaaattacagatttttcgaaaagcaattgatgtaatctaactctcaaattcatgttcttcttcattcctattatattcacatgtgaaagcaagtgatctgttgttgctgaatcagagatatgagagattctcttttctaggtgggcattacttctgcccctttctgtcgcgacgtcagaaacttaaaatacacgctgcatgaggaaaatgtacacatcctctttgcgattaactcacaacatcaagtcctacttgacgcacctgctcagctgaacattctctgccactatactgagaaaacaccatcttcaaaatctaattatcctcttcttcattgtgcttttatctcatcaaactgcactactttaacac

SEQ ID NO: 651567 - DNA, 1580 bp, Homo sapiens
gtccttggcgtctctcgtgctcttggttggtcccgctcctgtcgcgttgtgcgtatctcgctgctcgccttttcgtcgctgtggttgtcgtgtcggcgcttgctcactctggtctctttgagcgtgtgttcgtcgtcccgtgttgctcgcagttcggtggtagcctcttgctgtgtctcgtttggtggtgtggtcgactgtggtctccgtgctcctcttttgctcctcgcggtttgtttggtcgtgtttccctctttgtccgcagtgttgttgactgtatcggggcacgcccccgggactcctctatattgacttctctctgggttcctctgtttagcccctgtcttgggtctctcctcgtttgcgttggtagtcgtgtttcctctcgctggctcccgctccgtggtccactgttgcatgctttctcgtgtctttgtgtccccctgtgttctatcctttctgcgcccgtgcccttggccgcgtgccctggagagtctcttggggcgtggcttccggccgtctgcgtcttccgtcgcaaggggggttccccgtcttgttcgtggcctctccgctggtggcgtgtctaggcgcttttcctggttctctgcgtgtatgcgcttgttcgttcaccgctgtttgtcttgtggttcacggggtttccctcggcgctcatggctgtgaccccccccagggttccgagggtttgcgccttgcttggtcttgcggtgggctcctatcgtaggccctcgacgtgctcccatgcctagcttgttgtcctcgggttccgctcgtggcgggtccctgtgttttttttgccttcgtgtttttgtcgggttcggcttgcccgctttctgcggggaccgtttcctcccagttgcccagggcgctggggcgacgtgcctctgatgcgtaccgtccaccgtgactcgtcttgggcatcccgcgtgtgcgggtgtttgccatgtgggggtcgtccgcttgcccgtgggtcgtgccgcgggtctcgcaccagcgatcccttggtgtcgcgcctactaggtgcccttcctttgagattcccgcgtcaccccacgcagtcgtccaccgcgagtgaagttgctgaaatcccgagaaggcactgcagttttcgtggggggcgtgacaaccctgcgaagcagaaggcgactcattacgccccctccggccgagcggactatgagagattctgcgtgcgtggttccatataactcgtctcgtcccatgtgctgctgcggcagcgctggcgcattggtcactctataggccctctggaccatctctatagtcagcctagtcacaaggcagtagcctggcgcgcagcgcgcagggcctagcgcaatgctttggcggacaccgtagcgtagactgccgccccacccccaccatggtgctattcctggggctcggggtcagtcttttcctggcttgcctctgaccagctcctggcctctggtagagtgaaactttcagaccgttctgattgccttccgaatgtcatctctaccctgccgccaggaattggaagatgtcgagcacttctaagttaaactgctggagctcgg

SEQ ID NO: 651568 - DNA, 730 bp, Homo sapiens
ggaggagagagaactagtctcgacgttttttttattctttaggcttataaatctattaaattgctcaaactgtgctaaaaaatacttcccatgaaatacatatattacataaggtctcagttacaaaatggattgttctcaaatggcaatttcttacactaacctgattatgaaaaaaaaaagtctgtatcatctgcttccaaggtctgtttattgtccaaatattatttcaaattatgctattaatttggctaacttttataacttattagagatttcaccttaaattcatttttgtaaacctacgttcctaagaaccatttgtttcccgccatttacttactttctcctaatctaggacgacctctatctacatttagaccctagtgttatactgcactactaatcgtttcttctacaccagttagacaacctttttctataaaaacagacactacgtacaaccacaacattgcgagaacgctcgtaggtctcctcccaaaggactacaaggttacaaaacaatcaaaaaaaaaacaaaaaaggccggggggaggaaagtatgccgaagagacaaatctttttcttataagaccactctcctcgagatatataacaccactctcttggagaaagtatctctaaattcttctccccccccctttgtatcataacatgtggatccaccatggctcaaacaaacacgttgtgtttcccccaaaaggaagaa

SEQ ID NO: 651569 - DNA, 293 bp, Homo sapiens
  misc_feature (243)..(243): n is a, c, g, or t
ggagagtatatctctgaaccccaaaagtggatgaatacttttcagtccacaaatggaatcagtgaccccacgtaatacatcaaacaccttttacaaaaagaagaggcaggagaacaaaatgattttgttaacattggtgcaaagaatgatacttttcatggtgggaatactaggaatactctcttgcttcttggtctaacaaatctttaaaatgaggaacccctattagggggtggccattcnaattatttgagttaaatgaacttgagcagtttatctagagcagtgtttag

SEQ ID NO: 651570 - DNA, 236 bp, Homo sapiens
gggaggggggccccaaatttttttccccccacatttttggttttttgggtggggggggggcagggaaatttaagttgtggggtgaaaggggaggaaaaaagcggggggtgggggggttgggttttagcccccccaaattatcccagggtccccggccccccttttccccccccccatgcccccaattttgggggggatccagattgtgaaaatgtacaataaatgggtaatgggta

SEQ ID NO: 651571 - DNA, 621 bp, Homo sapiens
  misc_feature (165)..(165): n is a, c, g, or t
  misc_feature (489)..(489): n is a, c, g, or t
  misc_feature (567)..(567): n is a, c, g, or t
tgagttgagactctaatgggaatgaaagtagtagccatattccagctaaataagttaaatgcatttggggaataaagaaaaaagagtaagcaagcaataattgcttgaatatttttcaaattacaacaaaaaaaaatactttcttaggacattttgtattaaatngtgcaggataaaaaggtatccttacaatgtttccaggaggcaagaatattatcgtccctggcttgctagtcaggaattgaaacactgggaaagttaagtaactgaaaagtgactaaaattcagatatttgaattctcaaatgagtaccacattaaatagaatatattacctctttcaacaggcacattttcctttataggagagattgcaattacaagtgaaatttcagtatatttttcagtagattacacacacaaacgctaaccatatttaaatgcattctgcctttcaacttcacttcctttcagtatatattaccattangaaaaagacttttatatcctcactgttcttaatttaaagcaccagcagtaatatgggaagctatgctgaaaaccgctnttttgaataatgtgaaataaataaaatgcaatatttcattcaacacaaaaaaaa

SEQ ID NO: 651572 - DNA, 1024 bp, Homo sapiens
  misc_feature (457)..(457): n is a, c, g, or t
taacttcacagaaaacacttttttaatttaagggtagcattcacccaaaaggcaacgggggttggtaaatattcccgggtccatatatatatttgtggcacattttcctttagtgggctaagtttctctctcctcagtgggtcgtgggggaagtttctataaataatatgtgggggatattaactcttttccatctcgtgtgctcgtggtgtaccaaaataactctcgtgccatagtgggtgtgctctgtgccacacatttattgtggggtgcgtcttttatagtaaaacacaagaggtgtttatgtgtgtggtatgtgtggtagtgtggttgtgtggttaatagtgtgggtaacagacatattttatacacatcttttataaagtggagagagtgtgaatattctttctctctctcaatctcacacacgctttggtgagagaacaataacagctgngggagtgtgcgacacattcttataacaaaaaaaacacacaaagagagcgggggcgcgcgcgcgcctctagagagagaatactaccccgcgagaggggcgccccccaacgacgtcatttaccgcgcgcgctattcccgcgacgcgcaacttctcgctgtggtggtaccacagagagggtgggtctccccctaaaaaatgcagagagagcgacgctgcgcatcaaatcatataatacacgcgcgacatagaggccccaccgtggggcccccgcgcccgcgctataaatcaacccaaccgctctgcgcgaagacacgcgggcgggcaaaacaacctgcggtcgcacaagcccaggtggggggagaaaccccccttctgtgtgcgaacacaagaggcaacactcctcatcacactctcctcctggggaggtggggaggcggtgtcggcaacccactaataacctagtgggggggcgaccaccaccacacacaacccccgaccaccagaaggacaagacatactttcaacgacccggcctcctctatcgaaggaggcggacaaactcgatat

SEQ ID NO: 651573 - DNA, 427 bp, Homo sapiens
  misc_feature (60)..(60): n is a, c, g, or t
caatcccagcactttgggaggccacagcaggtggaccgcttgagcgccggagtttgaacnccgcctacacaaagtggtgaacctccatctctacaaaaaacacacacaaaaaaaattagctgggcatggtcgcatatgcctgtactcctagctactagggagcctgaggcagggtcaaagctgaagtgagccctcgactgcaccctgcagctactcgctggctgacagagcacgactccgccacaaaaggacaagacaaaaagaaacttccagcaccactcaatttgccaaataaatttgcctgactgccaaaactgaagctgccaacccaatcgacaatgttaagctcggccctaggacagcccttttaacaaaagcttccatgtacacaacccaactaaaggtcaccctagaacgtaaaaaaaaa

SEQ ID NO: 651574 - DNA, 1213 bp, Homo sapiens
gcgtgggctgagcgcgcggcgcgagcgtcacgccatgacagtggcccgctgcgccttctcctcgtgctgtcatgccgcctgtcgctgcctccacagaacctccgtcgtgcccatcggcgtgccagcgcccgtcggtcggacgaaaattccgcgtgttcacacgcattgtctcgcctcaggcccccgtggctgcgcgatgggggcagggaaccctccacccagtcccgctgtccgagacaagaacccgaaatgcccggtcccagagaggagagcgaggaggaagaggacgaggacgacgaggaggaggaggagcgaggacaaaagcaaaagagtctcaatccgtggcaaggcacagcagggcaacaaccaacacccagtcagagcacgcttcgcacaatagcaagtctcttccttacagagcagagccatttacaattgcacaaggaccggggcagaaactttgtgacaattgagcaggatacatttgttttctaagtaagacagaaaaccgatgcaactttagcaaatctacagcaaactgctttacaacaggccaggcactgtgtcctcattaacagacagactgtgggtcagttcagtggctttccatttgaaaccagggaagtgttccaatattcacaacagcacggacacgaccatgttcgcaccaactttagaaaatgccatgttcaaagagcctctggtgaaggttcttcgattcggccacatcacggtgtaaatagtgacctagtgcacgcagcaccttgaacttacataaactgggaatcccaaaagccattctttgcgcaaacaccattcgccgcaccatcttacacaagccttctttacgacacaacggcacggacaacacggacaacgtcaacacagcctctcgagcatggggcaacgaccaagagggctaaacagcaaaaccacgaagattgctctggacaaaacaccgccccgccatcaacactatgaccagtgagcagaaaccaagtacattcacaccaacccagggggacgaattccaccacaccaatgccaccataaacaacacagaaggggacccacccaacaaccagaaccgaccagcagagcacacaacaaaccacgagcaacacacgaacagcagagaagacagctcaaaaagacaacgcaccacccacacacacaagacacacacgaagatcagacgcaaatagaaaacatc

SEQ ID NO: 651575 - DNA, 310 bp, Homo sapiens
  misc_feature (291)..(291): n is a, c, g, or t
cacctaataattatgctgctgaatataatacttggaggagagagtgtgctcagaacttagacgggcattgggtaggccaagtatgctaagtgtacaatatattttttaatttttacacctgaaacaaagaaatgtgttcactaaaaataaaagtatatctttcggaattaatgtactcttgctttgtccaagctgtaggctatagtttccaaggtataatgttactctaatctctaaaaagtgcatgtatctggatagcaatgtagtatttcaaataaaggcatttacatnataaatttagggttagatg

SEQ ID NO: 651576 - DNA, 426 bp, Homo sapiens
tttgcagccagaatctagcaggatcccacatcgctatatcaaaagtgcgaggaatgaaggaaataagtctgactggctttctgtcctgtaccattgattcaatgacagactggcgggaggacaatggaagactagggttggagatcggatgggtggggcaagggatggaaaggaaaaggcagactactaatgcgttccatttataacaagtcatatatctcaaagacttaaaggagattaaagaccaatcagaataattaggcaactttaattcttaggaagatcaaagttccctccgaacctcctttgatgtctcattactaaaagcaaagaccagtatggtacagtattactccagagaaatttacggaacatccttcgggcggcttcacccacattcatttcatgcatggatacctcccctgt

SEQ ID NO: 651577 - DNA, 216 bp, Homo sapiens
ctgtgtagagcttgtgaggtgtttcattcctttctcatcttcatgagtttgtctcattttgatctttgaggctgctgacctttagatgaggttttcatggggactttggttgatgttgttgttgctttctgttttcctttgaacagtcaggcacctcttccgtagggctgctgcggtttgctggggattcacttcaagccctacttatctgggtcc

SEQ ID NO: 651578 - DNA, 1092 bp, Homo sapiens
gtatgatgtcataatttaatctgttcatatttaactttgtgtgtggtctgcaaaataaacagcaggacagaacatcgtgttgtatggttctttgaaatacaaccaaattctcttaaaatgattggtaggaaatgaggtaaagtacttcagttcctcaatgtgccatagaaagatggggtggtttcccaaagtttaacgttctagatcacaatatcttagcttttagcactatgggtaatttcagagtaggcccaaaggtgatatgactcccatggtccctttatttaggatatggaaagaacaaataaactttatgtattacgtgtcctttaaaaatagacttggctaacttactagtaccagagttatctcaacagaaaaacactagtgtccaactttcattccaaaacagatgtagaaacgacgaatcaggcatcaaattaacttcatacagcctaaagcaaagttacgatctgggggttattcagccaaacattaccgattaagaccagactgactagactacactgatacaacatgtactggataactgccacatcctatatgggtgtcatacgacaatagtgcaagggaacagtacatattgtatggctggtcttccacttcggtaccttcttcccattctggaatcctgtaccaacaagactctcctggaacattcaaaggctcactacattggtgccacgtaaactatggtcacgggcccagtccccaaaaaggggccggacgtgacgtccgtaaaataccgggtgtaaggcaagcgacactatgggggccacgggcgcaggggggacaacagctacaccgttcaagcttacgggtgaacctctataaagaaacccctgttgggtgaaagaagaaaccacacagcacgacaaacacggcgccgcgcgcccgccacccccagaaagtacatacaaaccaaacgggtcgcgcccaccagacagagcagatgagcatgcacaccaacaaaccgcctaacacacgagggggcacaccacaaaaacagggcgcgacggcataaaacaccaaccggcgtgttacatcacaccacacgacgtcacggcagag

SEQ ID NO: 651579 - DNA, 1078 bp, Homo sapiens
gtcgatggcgcgttcctacagcgagaagcacctgggtgtggcgccgcggggctgtgaacgacttctcctgcaaggtcaagcccggcgatcgaccgtgtcatccatgcattccctggtactgttcgggccaatgcgattcgccaacatggttccttcgtacgcgaccccgatctggtccctatgagcgggatacttgatgtctacacctttcacacactcaatggtctcccgatggtggtcatcctctgacgatggctgggggcgttcaaccaggctgacgcgctgccgtcgccttcctgctggcatgtgcgtcctgtgtgatgccctttgatggactcagggctcccggagaaccgcgaccgtggcgtcttgcacgacatgggtcgaccgttctgtcgtgagcatgttcgccaggggtggctgggcagtccctgcccggagacggtccttatcaattcaacgaatgtcattgtgcctgtgacgctgtttcgcaaaaggttccgatcaagatgctttgaattcggtggagctggagttgggtcccgctcatagccaacgggcaaccaacccgtcccggtcgcggctccgtcgtagcataagtcgttgggtcggaactgggcccttgtgccactgaaggggcttggttgcacaaggcggactttttcccctttaaggcagcggttgggacaggccttaccgaagcgcgatcaaaaccaattgtgtatggggccccatagcggagtcccaagtccaggtccttccacaagcgggggaacttccacaggcgcgttggcactggtcggaaaccgaggcgtgtttttaacccccgggtgggaccggcgagcgaaatcacagcccggttcctcccccgggcgctttacttccggcccccttaacaagcgccgggttccaaattcgttaccccaagccccgcggggaccttgccggaaccgaggccggaagccgaggcttccaacgggatacgcccgttaaacaatccggccaaaaggggcccctttttcctttcccaaaggcggggccgaccccaaaaggaaaatccaattgaacccggttgatc

SEQ ID NO: 651580 - DNA, 247 bp, Homo sapiens
gtctgtgattatcattctagcaaagcacaaatctcaaaatgatccgtactgacttctaccgtaatcttcatggcttcccagaaaagagtccaacagtactatgtaacaaagatctaatagctaacagctaacgaattgtacaactcttccctcttaactttttacttggaccgtaactccttccagttgaggtaaaaagtcttggacagactcagcagtgtggaggatagtgaccccaacttcacag

SEQ ID NO: 651581 - DNA, 150 bp, Homo sapiens
ctgatctagaggatcttttgcggctgctttcaaggcctgccgatgggtctgattctcaggtctggggtgggctcaaaagtatggagattttctcgtttgtttctgtttttttgagacagtttcactctgttgcccaggctacagtgcagt

SEQ ID NO: 651582 - DNA, 308 bp, Homo sapiens
actagatctattccgtctctgctggggcttgctctggagcaactccagctcgagggtggagtggaaagcttgccacaggcttgtatgtggaggcgctctgctgatagcacaagcgctctgtgtggccgaggtcattgtacccccggcttcctgctgggtggttctgtgatggggaaccagctggggccttatggcattagaatctggtggccatgagggacaatgtccaagaagatcaaattagacacaaactgtctgggaactaaactatcctacaaatagaccacaaacaggcagcaaaaggacca

SEQ ID NO: 651583 - DNA, 394 bp, Homo sapiens
  misc_feature (54)..(54): n is a, c, g, or t
  misc_feature (61)..(61): n is a, c, g, or t
  misc_feature (114)..(114): n is a, c, g, or t
  misc_feature (365)..(365): n is a, c, g, or t
  misc_feature (389)..(389): n is a, c, g, or t
gaaccctacgctgcggtaagatgtagcaggggttgctcccagcagcggccgccncaaggcntgcaactggcaataatcactattgatttaaagctttatttagtctcatctgtnccttcatagttaataaggtcttgccacattttattagtgagattgagagatgaattatttgtctgttgtcctccccgccttccctcccccaatattaaactgtgaagtttgtgattttgtttaaacgctgggtgaatcatagtgttagtttgcatgtccagctaatttgtttctatacattttgtttgattctctttctcctcagggcttttacaaatatatatatattatatatgtatatatatatggancttctgaaaaaaattgagggtgcnaattt

SEQ ID NO: 651584 - DNA, 101 bp, Homo sapiens
ggagtttgtgccgtcgaccacttaggtcaggcaatttgcgtcgaccatcaggtcaggagtttgcgtcgaccatcacgtcaggagtttgcgtcgaccaccag

SEQ ID NO: 651585 - DNA, 664 bp, Homo sapiens
  misc_feature (512)..(512): n is a, c, g, or t
taacccctctttagtttaatgcgctcaaaaaccaatttaaacccccccccccaggtaaagggggggcggggacaaaagcaaaaaggcaaaagccgcttgggaaaccaccaggttcggtgcccccggccatttaattcgccctgttagtgggatttggggttttcacattcgtgctccccgtgtggcttggggttggagttggaggggtttggacgcccctcctgtgggggcgcactgggccactgtgagcccccttgggaaaaagtctcagaggggagtgtggaagagaggccatgtgtccggccgtggatctcgcgtggaggaaccaggcggggtgtggtctcccccagagaaagattcccttgagagggcgcggaaagcgtggggcggagtttgcgagcaacgagaggactccctcacctacgaggtgtgtctacgagagagagggggtgttcctcgagaagagggcccaacgagggagaaggggcgagccctcccgtgagctgtggccntcagagagagtccgtggccgcggagaggggaaaagaggccggataaagacgcgctgtgcgtgttaacaaccggaagaggggttcccccacaaaaggatgtgggggacagggtgtgggcccgaccttctccgaaaacatgtggaagggaaacc

SEQ ID NO: 651586 - DNA, 377 bp, Homo sapiens
gcagaacagacatttctcagaagaatacgtacaactgccaacaggttcgtgagaaatactcagcgtcactaatcattagggaattgcaaattagaaggcgcaatgagatgccacccctcatctgttagaatggccattaacacgaatattaaagacaagcgttggcgaggatgtgcagaaaggggaagccttgtgcactgttgatgggaatgtaaattggcacagccatcatagaaaacagtatgggagtccctcgtaaaaactaaaacgagaactaccatatgatccaacaatctcgcttctccatatatacccagaggaactgaaataaaattgttaaagggatacctgcagtcctgtgttcggttgagcggaga

SEQ ID NO: 651587 - DNA, 330 bp, Homo sapiens
caagtatggaaaatcccggcaattctggacttgtgttaaactgatgtgatgaaattagacctaatcccagtggaagcttttaagcctatactttttaccaaaagctttaagggtttggttaaaaaatttccccaaagccctgagattctaaaaaaattgatgccccccaattggattcagaggaacctttaaacatggttttaacccttgttttggagggtatattacgtgcccattcctttaaggggagcagccggcacttttttgtaaattacttttgggggaaattttttgaaaatgattaaacggaataaaattgttaaaacctta

SEQ ID NO: 651588 - DNA, 923 bp, Homo sapiens
ggtcaggcgcatcttctttgcgtcgccggccgagccagatcgctcagacagcatggggaaggtgaaggtcggagtcaacggattatggtcgtatgggcgccgggtcacgcgagggctgcttttaacgtctggtaaagtggatatgttgccatcaatgaccccttcattgaactcaactacatggtttacatgttccaatatgattccatccatggcaaattccatgggcaccgtcaatggcttgaagaacgggaagcttgtacatcatagggaaatgcccatacaccatctatccaggagcgagatccctgccaagaatcaagtggggcgatgcatggcgctagagtacgtcgtggagtccagctgggcgtcttcaccaccatggcagaatggctggggctcatttgcaggggggagccaaaagggtcatcatctctgaccccctctgctgatgcccccatgttgccgtcatgggtgtgaagccatgagaagtatgacaacagactcgagatcatcagcaatgcctcctgcagcaccaactgcttagcgacccctggccaaggtcatccatgagcagctttggtatcgtggaaggactcatgatcacagtccagtgacatgacgtgcacccagaagactgtggatggccctcgggaaacgtgtggggtgatggacgaggggtctccagaacatcatgccgtgcttcgactgggactgcaaggccgtgggcgagtcatcctgagctgaagggaagctcaactggcatggccttccgtgaccagtggcaacgtgcagggggacctgtactggcgtagaaaactggcatatgtggctcagaagggggacacgcgtgaggcctcaggactgggtaagagaccgggtcttgacaaaggaccacccactgaaggggggtgccaaaacag

SEQ ID NO: 651589 - DNA, 141 bp, Homo sapiens
ctgtgagcgtgagactttccatctcggtggtatcaaagtccccagctacaaaaataatcaacacatagtaggtgctcattagatttcagttgacttgaacattcacttgctgtttctgaatgtcaagagaagagacgacag

SEQ ID NO: 651590 - DNA, 384 bp, Homo sapiens
gtcatagttgttgtggtcagttatatcttcaaataatcgtgtatcatgagcattcaaagctccatagtgacccatgctctcggtaggcatgtgattgtcttctgaaatgttcccttctctgatagcatcatctcatccttttagtgcctggtgaagactagtcttgccggaacaattcactgcagaagcctttacttaaaggacttgcaggctggacaactgccgtgacttggggcaggccctaggcctgctgccatcgctggcgaaggccgaggactcccagttctcagaatcagatgctgcccttcaagaggaactctccagccctgagaccgcacgccagcttttcaggcagttccgttaccaggtgatgtctgggcctca

SEQ ID NO: 651591 - DNA, 197 bp, Homo sapiens
attcgcggccgcgtcgaccactgggtggcaccggacgccaatgacacgtgccgtgggcagatgagggctggagggaagcctctgggctggatggggggttattgccatccccccactggcttggctggattgtaacctgcatcttacatttgccctgtgacgggttagcatcttagcactacaaagggggggaaagc

SEQ ID NO: 651592 - DNA, 384 bp, Homo sapiens
tctgcttctccccgcaaaccataacccaataccgtcccccaaaatataactattaacaacactactttaactaccggggattctatctcctctgtggacgatccacattcctcttctaccaatccagatgcctccgaggtcccaccctcatcaagggacgattccctcccatctgacaagttggacaaggacgaggccggaggtgatatcgtctacgctcgtcctcatcctctctccctccattctcagtcttcgaatacaacaaatacgcccctttgcggtatagcccccgtggctaataatccccttgatcagtcaacggtttcggaggctaatactacccataatgatacttcttctaataatgtttacgtacccgacact

SEQ ID NO: 651593 - DNA, 238 bp, Homo sapiens
gaaaggaggttcaggctttttggaggcggaggctttggtccagacgtagaagatgttgcagggggcggaggttgaagcagagacggaggcggaaaatcctcggaagatgtggcattaccaccgtgcccagttcatggagtggtgagagatgttaccctctcagggattgtcgggcggagatcccacccttcgccgtgtgaggtgctgccatgaggactagcagtggcgtctgcggccg

SEQ ID NO: 651594 - DNA, 101 bp, Homo sapiens
  misc_feature (10)..(10): n is a, c, g, or t
atgtctctcnctacctgtaattacatattctccttgtcccaaatgcaagggtttactctcaagagactctaggctcactgcccataaacctttgagttgga

SEQ ID NO: 651595 - DNA, 342 bp, Homo sapiens
  misc_feature (2)..(2): n is a, c, g, or t
  misc_feature (4)..(4): n is a, c, g, or t
  misc_feature (137)..(137): n is a, c, g, or t
  misc_feature (143)..(143): n is a, c, g, or t
  misc_feature (182)..(182): n is a, c, g, or t
  misc_feature (198)..(198): n is a, c, g, or t
  misc_feature (335)..(335): n is a, c, g, or t
  misc_feature (337)..(337): n is a, c, g, or t
gngnctgggaaggggcccacagaagatgggccacacccagcatcatctcctctctgtggtgcgccctcccatccccagacccctttcccattcaggggagaggccccccgccccttgattctgtcctgttacctccngagcgnggaaacccaggaggttagttgtgctctcctgcaggcctntcaacctgcaaagggnagagccacagcagaacgcgttggggccacagacactcgctcaggtgaagacactgagaagacactgccgcgctgacaggacccccgcggcggggggacggtggtggtaacaggactttttgcaggcccaggggaggntntggcc

SEQ ID NO: 651596 - DNA, 202 bp, Homo sapiens
agatcaaagcagtgccccgggttacaggagctgggccatggctgtgccgctctggtcaccaatggcaggtcgccctgtcagtgcagtccccaggtgattgcctacaccaatgaaggagctcatagaagtgtgcccggaagagtctctgagtaaggtctcccacgtcctggactgcgcttcctaggtctgggtacatcgtggt

SEQ ID NO: 651597 - DNA, 163 bp, Homo sapiens
taaatgtatggttataccttagtctaaaaaggcaccatgcaggcatttaagatctgaaccagtgaactctaagtatgtagtagtagaaaatatcactaatcaaaacttcagcatcagatggtacaaaaccccaagaggactggtgacatgggacggaagatca

SEQ ID NO: 651598 - DNA, 152 bp, Homo sapiens
taagaaatgtttcccttattcaagacagcgaaaagcgtacgcttcgatagacgatcaaataccgtcgtagttccgaccataaacgatgccaacttggagatccgtcagtgttattcccatgattccgccgggccagcttccggtgaaaccaa

SEQ ID NO: 651599 - DNA, 271 bp, Homo sapiens
tgctattcattggaaagatcgattatctgtagcgggaatagagacttctgctcctgtatctgatgtcgaggttaaagtgactcagaagtgctggaatcagagccccaaacacactgagtgtgaggcagagaacaaggcctgagaggaaaagtcacggttcccaaggctgctgcaggggtcaaaggggacccctgatcagtattctagggactgtcttcccctccatttcctcagagacgtcattccttaattgtctagagagaagaggggg

SEQ ID NO: 651600 - DNA, 145 bp, Homo sapiens
ccagtttgcagtgtggcaggtgtcaaccatgtccagtgctctcaagacatgttgatcccattggccacagtggaactctaatccacttttgttttaaaaataataatactaatactctgtggagtaaccttcagaattcaaaagg

SEQ ID NO: 651601 - DNA, 550 bp, Homo sapiens
caacgatggtccttcagcttctaggtgggtcatataaaaggttacacgttttttgttgttgttgttgagacagagtttcactcttgttgcccaagctggagtgcagtggcgcgatctcggctcactgcaacctccgcctccctggttcaagtgattccccgtgcctcagcctcccgagcagctaggattacaggtgcccaccagcacacccggctaattttttttgggtggtatctttgagtagagatggggtttaaccatgtgggccaggcgggtcttgaactcctgacttcaggtgatccagctgcctcagcctccaaaagtgcggggactacaggcgtgagccaccatgcccggccaaaggtaatggttcctacttggtgctctcagctcacgtggcaagatccaagtgagctgaggaccatcgttgagctgacggaccttcgttgagctgaggaccatcgttgagctgaggaccatcgttgagctgaggaccatcgttgagctgaggaccatcgttgagctgaggaccatcgttgagctgaggacc

SEQ ID NO: 651602 - DNA, 767 bp, Homo sapiens
gctctaccggcgggattctgagtggcgtgatgtctcacagaaagttctctcgactcccggacatgggtcccgtcggtttcctgtcctcggaagcgcagacgagctaggcgatcgtagggatacggtgaagagcttccctataggatgaatcgccgatctcggaagaccgtgatcacatcatcacagcttcgttcctggggagtacacaggactggcaatgacttcacatcgtgcgggtaaagtcgtaacaggtctcgggatccaaggtgatacaagtaaggaggtggtggtaggctgttgaccattgtatgatacacacacgcgcatggatggttgtgggcattggtgggctacggtggaaaccgccgtcgatgtccgtaccggaccattcaaagatcgggttcgttagtgcatggacgcacactcaatgtgcatgcaatgcaccgacggcgtttctatgttcgaatttgggctttaaatcttgacggagagtaaggtcctttttatgcaatagattatctgcccaagagaagataggactaggattggagagatggggaatgaaaaggctgactagggagaggggaactttccaagacttgctattgaacagaaaagtaactggcacaaatatgccaacacgatggtgcattgtgactcccagctactcacaggaattgcggccctggcgtatccttctgacgacccaggaacgaaagggcctcaacgctgaactggataatgccatggttgaggtgggatggacc

SEQ ID NO: 651603 - DNA, 393 bp, Homo sapiens
tcagaccttcatgagctgccatctcatccctggaatgttccagcggctggcccaacttaggaagaatgcctttgccagtgtcatcctttttggaacccacaatagcagctccctttttggagtttgggttttccgaggccaggagcttgcctttccccttagtcccgattggcaggtgggcttcgagtcatacccatggcggaaactggattctggcaacgaggagaccccgacgctggtttgagagtactttttctgggagggggccttccagcatgtgggcaaagccttccatcagggcaagattttcaagtgaaccttttttgccctcccctagctgcctgcccctgcccttcagggagatgggggtcctttaaggaaacttaaccttta

SEQ ID NO: 651604 - DNA, 132 bp, Homo sapiens
gtctgagaggcgagtacaggctgcaggtcgatcgacaccgaattcatggaacttgaaaaccttcccgggtccctggccgggatctgcgaaccaaagcgaccattgagctcaaggccctcaggctgctgaact

SEQ ID NO: 651605 - DNA, 158 bp, Homo sapiens
gcggggattatagtgtgagccatggtgcccagccgtatttttaatcttaatcccatttcccttacaccccctaaactatcaagggtaaggattatcaccagctggttagattctgctcttgagccacgtttagcgacaatggtattaggtctggttct

SEQ ID NO: 651606 - DNA, 392 bp, Homo sapiens
ttttcctagataaaccgtatttaatccgttcattctataaactcttgtcgtccttaccctactataaagcaacagggcttacgaagtcaaacacccatcagttaggccgagccccaagaaactagtcatccctactatctatctgtctggtcatactacctattctccatactcaactacttataaatgccctactcttgtatacacggccggataacactgtatcttcaagccatcacagctgatatctcttagtgctatccccaaactgccactcttaactccctcttacagtgcatagatgatctttgctggcaaggcaccctccaatatatccaccctgatgaagttctattctttacttttatactcactcttattctcattcccat

SEQ ID NO: 651607 - DNA, 1245 bp, Homo sapiens
gaggctcacccaaagagttaagggacatttatgtagccaaaaaacttatgaagaaaacctcatcagtggggcgcggtggctcacgccgtggtaatcccagcacttgggaaagctgaggcagatgggggtggtgggggcctgtaaatcccgagctacactccgggaaggctagcaggcaggaaaaatcggcttggaaccttgtaaaggcagacaggttgcgtagagctggagatattggtggcctattggcactcccaagccttaagcacaccaagaagccacaaaaccccgcgggtccacacagaacagaacaacacacaacacacaacacaacacgcggcacacaaccacgcgggacccacctgaacgaacgaacaagtgccaacactccacaacacccacacaaggtgaacgaaatacccacctccacacgtgcgcaaaagctctcagacacacatgtgcaccacatcttcatttcacacacacacgctcccaagacacacacaaaacatacaacacgcgtttgcgccaacaggcgcatgtgcgtgcgcaaacacacatatagagcacagtggcgtttttacacccacctgtgtgtgtgctggggggcgcaccactgtgtaacagagttcaaagtgtccacaaacccacagttgtgtgtggggccacaagaacacacagagagtgttgggcacaaaaactaccctctccacagggggagaactctgctgagagcacacccacagacacagatatctcctcgatatgtgtggcaaccccccagaacagaggtccctaatatataacaggcggaggggggtatatataatatacccccgcgaaaaaggggggcaaactctcattttcaagaactccaatgtctcgctctctaatttaagaaaagacagccattatatgttggcggtgaggggttgacatacactctattgtataataggtggcgaaaggaaataaccgctcagaaaataacgcgaaaaagccaccatgttgggacacaccccaaacgcccaagagaagagttgcgcctaatatacacagggggcacataacacatgatacgcatatataggggacgaacaattgtgttgtttacaataagcgggccgcccgagtggggacattatcactagtgcgcaggcgcatgtcgatcgaaaaggaacagtgggagccactccaaggtgagtccgttttgtggcaggggggaccaacgcggctattgaaacg

SEQ ID NO: 651608 - DNA, 320 bp, Homo sapiens
  misc_feature (221)..(221): n is a, c, g, or t
  misc_feature (275)..(275): n is a, c, g, or t
cccaacccaaggcggaaaagaaagggaataatgaagcattgttttccccattagaattaggcatcagatttcttggtgaaacacataattaagtagtataattaaaaaactgttcttcatacttagacttctaaatacatttctttaagactgtaaagtataattgtaaggcttgttaactgtttatatactaagaaaaagctttacaagataagactganattcagaataccacattaaagttttatctgtacagcgttgacaactctaactanaaggattacagcccttaaaattttagcttaaggacattttaaaat

SEQ ID NO: 651609 - DNA, 273 bp, Homo sapiens
ccagagaggcaagatgggctgagtagagagcaggactggagcttgctcaccagggatctgcctctggaccggatctgcgcatgcacacagcggagccaggacactgcaaaggacagccagtccagccccttcctggagggaggcccccagccagagcagatgtggcgactgcgtaactgttctgctccgttccctagttatcaaacggtgacctagatatggtgcgaaggggagggggcaaccacttaggaccaaaggaggccggtaagctcc

SEQ ID NO: 651610 - DNA, 1002 bp, Homo sapiens
gctgagtgccggccggaggcagcacgcggagtgagcgctggcctgccgcaaccccaagacggggttgaccctgtgagctgtgtggtgccctgaaagcagcccttacctctcgctggctgccacctgctggccagggccatggaggtgcgagcactaccacagctgcgtgcagctggcccctgacgctgaggcctggagtgagcttgtggccactgtgccccctgagcttgtgcctggtggccctcgtggtgtggctggggtggctggcctgctggccacttgaagcacctgtgcatggagtggaaatgtgacaggtgcgcagctgactggaaccccgctacgtggccaatgcggccccgtgcgaggatctggctgctgaaatgcccgtgccctgaagatccgggaggacgcgcagcggtatgactgacctgactgactgacgcggtgagcgagatgaagatgggccgctactggagcaaggcaggagcggaagcagcacctgatccgggcccgtgagcagcggaagcggcgcgagttcatgatgcagagccggctggagtgcctgcgggagcagcagaatggcgacagcaagcccgagctcaacatcatttgccctgagccaccgcaaaacatgaagaagcggaacaagaagatcctgtgacaacttggatcaccatacaggagatgctgtgcccaagggagcgcgctccgcgatgcgaagcgggtctcaacccttttctcagcacccaccgggtcagctgcctggcggtaccaggccagggccaggggaagcccccttgggggccccgggcgcctttaaatctccctatagacacatggctgcgatcgcggcagcggtagtcagacaggcacggctagcctgctcatctcgcactcagcacttctccctcgagtagagtggtgcacacgagtcacagtcatctcagaaaaagcaccaatgtagacatacagctagtacagccagcacgcgcccatgccacg

SEQ ID NO: 651611 - DNA, 590 bp, Homo sapiens
  misc_feature (59)..(59): n is a, c, g, or t
gccggtaggtcgccagctgaggcggtttgtaagtttgggtcgcagtatgctagaatttngaggctcccttctgatgaaaatagaggtgtgcatgcagccatggaacccgggttacagcagtgagggggccagggatcaagaaacttatacatgtccaaaaatgattgagatggagcaggcggaggccagtttgctgtagttaggactgctagacagtatgttccctggtgagattgagctgcataggtgaatgagcagctggcgttgtagcagaactgaagagatcgtagtgaaaatgaagacaagggaggggcgatcttcaataagtctactttactatcaatatgaacctggatgtatcgtgagcggaaatagaatggcgatgttatctctggcgtgtattgttccctggtaaatacccgggcagttctgtctggaattactgtcaggatcagtattattgagtagatccaagcaggatgtcagctgagaaggatctgactgattcctgtgaaaactatggtcatggagatgtggtatactgaatggcgaagaggggttagagagcagcctgtggtatgtcagcgagt

SEQ ID NO: 651612 - DNA, 120 bp, Homo sapiens
  misc_feature (58)..(58): n is a, c, g, or t
cacagatcccctcttcccttctcagtgaaggtgcttcaaagcatacacagtatcaggnatgtagataggcatctaggtgcagcagccatatacttgtgtgctaactactacctacacaac

SEQ ID NO: 651613 - DNA, 311 bp, Homo sapiens
ctagctgaatctaatccctctttgaagtggacggagaagaagccatcattttgtgcagctcattgataccttggtcacatcacaccagtggaacctctggacttgatttgtccagacttattggtcagcacagaaggagattatagtaagttaagcggaaaatccgagatgtactcttcccattagcacggttacttttgttcacgacttcagcaatgatgatctttacttcaatggcatctttgagtttcttatacttggggttcttgtaagatttccaggtaagccccttgaaaatggtcgccaatccg

SEQ ID NO: 651614 - DNA, 478 bp, Homo sapiens
ctgactcctgaggatccccttagggcactcagcctcagagctggcctggctgcctccttcccacccaccattcagtttctagctcagatatcacctcctgaaagaagccctctcctgactacttaattcaaggccctgtcctctctgtctagtttggcgaggcttttctgtttttcattttttagatggagtcttgctctgtcgcccaggctgaagtgcagtggcacgatttcagctcactgcaacctctgactccctggttcaagcagttcttctgcctcagcgtcccaagtagctgggattacaggcacgcaccacctcgcccagctaatttttgtatttttagtagagacagagtttcaccatgttggccaggatagtcttgatctcctgacctcatgatctgcccaccttggtctcccaaagtgctgggattacagtcatgagctattgcgcctggctgctgctgctgctgctg

SEQ ID NO: 651615 - DNA, 278 bp, Homo sapiens
ctcaacgacatgctccgttcctccgtaacaagacatttttcttcacataacggatttttttcctttctcctttacccctgatgcgaacagagaaaaagctgagatgtcaccactatcctcaagatacagaggctgctccgcgcatgcctttttatcacatttctcccggcacctgttggaaagcccggagacttttgctcgtctccattttatttccccctttctaaacgaaaaccttaattggaacttttcttacgctgtctccaccttgcgttgag

SEQ ID NO: 651616 - DNA, 248 bp, Homo sapiens
  misc_feature (40)..(40): n is a, c, g, or t
  misc_feature (70)..(70): n is a, c, g, or t
  misc_feature (182)..(182): n is a, c, g, or t
  misc_feature (204)..(204): n is a, c, g, or t
atgcctcagtcacccaagtaactgggactacagggatgtnccaccacacccggctagtttttgtattttnagtagagacaaagtttcaccatgttggccaggctggtcttgaacttctgtcctcaggcagtacgcccacctttgcctcccagcatgttggaattacaggcatgagccactgnacctggtcaagtgtccaaattnttactccaaaactgaactttgggctgggcgccatggctcacacc

SEQ ID NO: 651617 - DNA, 791 bp, Homo sapiens
cagggacagagctgcgggctgaggttcctccgttcggcgaagccccttctctctgcccccggcctgctctgggcttacttggctatgtctgctcctgacaggagggatgtgtgttgccagggtgggggcttggcgtgtgtgcgtgtgagaatatgtgtgtgtgtttaaaatacaaaaaaaaaaaaaaaaaaagcgtgcctatactcagccgcgaagacgcttggccagcctccatccgggtgccaagctccccttccgagcgggacactggggaccccggaggcacgggcgaggaggaaggtgcgggacagctgcgggtgaggattggccgcgttgccaccgacgttattgccagcggcttgcagggggccaaagcgccttatccacaaaacccaccggcaaatcgactggacaggccggtgggcggggaggcggtcagtcagtttggccagaagtgatgccagggaagggcccgtgcttgggggcaggtggaatccggggcagcacaagcaatgcgcaggggctcacggctccagggccattgtcgtccacaagagcccatcccacgggactgggacgggcatttttataacccgggccttggccttggtttgtggagcttttcgggtgtgtggcgaaccccaaacttcccctggggggccttgtgcctaccagaacgcttgggctgtgttccccctgggttggctgggacgccccttggtaaggtgtgggctctcaggaggatggccacgcccttcgggggacagattctggcctttccttccccccag

SEQ ID NO: 651618 - DNA, 965 bp, Homo sapiens
attgatacagatctacaagccaaggggaaagcaagatagtacatgggattggaagtagcacagtggctctcattagcagacttggttccagtaatactggagatttgctttggttctaaagataaaaatttccaatgggcaaatactggagcagctgtgtcggaacacagtcagtcggaacccagtcagccggtaaagtggtgaagatgaagatggtagtgatgaagaagtagtacataatgaagatatccattttgaaccaatagtgtcataccagaggtagaagtaaaatctggagaagaagatgaagaaatatgttaaagagagagccaaacttatatagatgggatcgggatgtcagacagtggacaggagcgcggagttggagaatataaagatactttggatcaaatgaagaatcagttacccggaattcctaaatgagaagagaccagagataatacagtgtgtgacaacccacgttattcactacaaaacaatggaataaacgccgtttcaaatgtttcaaataaatggaatagaatggacgtgccttcagcattactggtgatggagcaagaaagagtagaacacgtagcgaggcagatttcaaacactacagaaagtagctgagggttcacgacacacttgacgaatggcagaagaagtaactgaagacccgacaacggcccgtgtatcaaggcgaaggagagcattgaaacggacaccaatccggagagaacaaaaagagggagaggacacggacaacacacaaggagcaacaaagagaaaacatgaaaaaagccaagaaaggagagaacgaccaacacagcagcacacaacggaagacaaaacaagaaaaaaacagcacacgagacggcaagacaacgaagaaagaaaaggaacagacagacagagagaaaagaagagagacgacgagaaggaacccgcaagaaagccagtca

SEQ ID NO: 651619 - DNA, 330 bp, Homo sapiens
aggtcagctttttgggaacatatccacttatttaaaacattctccccagcacttagggaagccgaggcagacagatcacttgaggccagggattcgagaccagcctggcccacatggtgaaatcccatctctactaaaatacaaaaattagccaggcatgcttgttatcccagctactcaggaggctgagacaggataatcgcttgaacccaggtggaagaggttgctttgagccaagatagcgccactgcactccagcctgggtaaaagagcaaaactccatctcaaaaaaaaaaaatctatagaaaagaaatcaaacaaatttattag

SEQ ID NO: 651620 - DNA, 100 bp, Homo sapiens
tccaaccctctgatgcatttctattagtttgtcccagagcttcctgaaaccttaagcctccaaatccaggctcacttctcctagcccaagtagggcacgg

SEQ ID NO: 651621 - DNA, 1327 bp, Homo sapiens
gtggcggctgggaccctggtacacgtatcctgaaaactggagggccttcaaggctctcatcggctgctcagtacagcggggctcgaggtccgtcgtggctctccggaccaccccacttgccatttaggaccaagaccgaaccgacacccctgaatttctccgcaaatttcctgccggcaaggtcccagctatttgcgggtgatgatggattcatgtgtgttctagcaggagcaacgccattgccatactactgtgcagcaatgacggcagctgcggggaagatacgtcccagcaggcagccaagcgccaggtggagcgcaagaaggagtagagcactccgcgtgaaatccggatacatcacgaagccaccacagaccgagtaccgaggagtgtagccaccacgcatacgggccatccatgacagcaacgacacaaacacggccgacctgaacgcaactgccaaagagcacggacagatggagcgccgacacttctgaggcgccttgccctgtgcactgaccaccacctcgctacccaccccagcgcacctcattctaggccgggccaccacacccacacctgacacctctgggcttgacaattccacaaccgcaggtccccaggacgccccacagcgcccggccgagccctcatactacacacaagggacacgcaagacggcaccatacatgaacaccggccacaacgaacaaacccccaaaaatcacccaaacccgacaagaggtatcgcgtcccacccgtgacaactaaaacccagaacacccaaggcactaccggagggcacgggacacaaagcgggaggcaacgattgcaaacccatggagctacagaacagcacacggcacccacaacataggacatgcagctacaaccaacccttaccacgacagacgaccgacaccgctaaaacagaggcacacaccgagcaaagaggacaagaaagaaaacggaacacaagccgacaaaccccacggcacgacacaaccaacgaacaccaccgaacaaacggacaggacacacaacggccgaagccgacagccgccaaagagacaagaacgcggaaaacaagaaagaccgcaacaagcacgagggagagcccagtgcacggcaccacccacagaccacacgcaccaccacaacaacaaagcgaagaaacaaagaacgaaacacccaaggaacaccccgagcaacaggcacaccccacgacaaaagcaaacgacaccaaaggacgcaaaaacagaacacagacaccagacacgaacgcgcacacgaagaaaagagcacaacgacaaaacaaagcaaccaa

SEQ ID NO: 651622 - DNA, 579 bp, Homo sapiens
ccactttctgtgactcctgcccctgcctccatacccactcttgttttaattacaactaaaatggactttaccatgccgtgcggactggtctaaactcctgcctactgtgaccacctgcctcccctgccaaagtgctccatgcaggcctgagtattggtcccagccattagaaagattgtaatcctatgaactcccttttgaggagagaaaggccaatctgtggggtagccctgtccaggtaaagttgttttcagcctcatgtctactgttaggtgagggagtcacagccagacagagagtattgctggagggtgagagaattgtggagaccaactaccacatagcaagagcccagctcttgggagcattgagatgtaagctcagggttacacagttccaaatcttgggaaggggcttttccaacagactgtttgttttctgttgagaataaggaattccttcactcttgccagagtattgacttttttacaaattttttaaaataaaggctggcctttgggcccaaattggtaaaagtgtaaataaaagtcgttacctctcctagggggggggcccccg

SEQ ID NO: 651623 - DNA, 101 bp, Homo sapiens
tgtggggagtggtctcccagctgcactcaatggtgttcgtgctgctgcggcagtctggcggcacctgtgcactctgccgtcgatacactggtcgattggga

SEQ ID NO: 651624 - DNA, 1023 bp, Homo sapiens
ggcggcgtgcagggctgagccagctgactgccctccattcactctccgctgccctgttctccgtgctgtcctccctgttcctgctgccctgccctgccaccatgactggaacagtgccatctccttcgccaaagacttcttgtgcctggaggcatcgcacgccgccatctccaagactggcctgtggctccgatctgagcgggtcaagctgctgctgcagtgtccagcacgccatccaatgcagatcagactgaaccgacaagcagtaccaaagggcatcgtggactgcatatgtccagcatccccaaggcagccagggcagtgactgtaccttcatggagggtgcaaacatatgccaacgctacattcgctagtatacacccaatcaaagccctcacacttcgcctacaacggataagtagcaaagacagaactctacacatggaaggggacgatggaacacaaggacacacgagacaaagaaacatgagacggtcactataggcaaggagacaacaccatgagcacatcgcgagccggatgcagagcccggcggcagaccacaacacacatacatagcaataccgaggtacaccacagagatgaggaaataaacaaccccaaggaaacccagggcctgggccaacgcaggcacagggatggacaagaggtcaagggcaacaagagaacgcgcgagatacccgaagaggcactggggagcacaggccataggaggcaggagtcaacagagagtacccgaaccagagaaatccgggagaggaccaatcgaaaaccaaaggcaaattacacagagagggcagataccggcaagacaaggagacaaatcaaaccgaaagtaacaccggggcagaggaaccaacacaaaagcagcagggatggtgacagaacaacccgggaacacaagtggagaacagcacatcagacgagaaaacacaaagagaccgccaggacgaacaattcggagaatgaaggctgggatagacatgacgaccgaacacacgg

SEQ ID NO: 651625 - DNA, 110 bp, Homo sapiens
ctagaggatcccacggttcagactcagagttcgactctgagtgtgcatccacgtctttcagtcctgggaagggagaccctgttccagcttgatctcacctctactgaggc

SEQ ID NO: 651626 - DNA, 110 bp, Homo sapiens
tagagccttgttgctctgcaccctgtcgtccaccacgttgctcttggacacctccattagagcggaaccgcaatggcgccgataggttctccccatgcgtggattgccag

SEQ ID NO: 651627 - DNA, 632 bp, Homo sapiens
agcgggttgctgcgccgccagcagccgagtcatgttaccgccgatcttctcaggctactcctagcagcatccatcgcacgcaccctatcttcacatggcattcaccattctccattcatctctacgatagcatgagacagaccaagcctatcctagcagctactgacctgatcagtcatccgatcactcgcagcagaggacgccgcatcgatcccatgaggatggaccagcacattgacgacacgacatatggacatatacaagaacaatcacacaaggaagaagatatacagcaattaatagagagggacacccatccacacaggacatctgcgttccacacccaacccggagacacacatcaccgggaaccccaatcccacaatactgataaaccacccccgggagaagatcaccacgagggaaaagcgaccgccgcacacggcggagaaccaaaccagatggacccaccaccacagagaacccaaccacgagacgagtatacgacaagtccaccaaacgtctcacaagtacaaacacaaatacaagaggaggcgacagaaacagaaaaaaggcgagcacaacaggagaagggcacatacggacaggcacacacccacgcccacgaacac

SEQ ID NO: 651628 - DNA, 796 bp, Homo sapiens
ccctgtgtacctatggtctcctggccgtcttctgcgggccccccctgtagacatcggtcgtcccggcggattcccgacttgccttccgcgggctcccctggcgttcccccccgaactcgaagccggcttgtgtgcaaccccttctagacatattgggggcccgcacccctgatgctagcagcccacccgggtggtgtacgaaaacacactggctcgccaccactaaactggggatgctcctcgcctcttaggccccagcgtcttcttgagggaagtaaagcaggggtcccatccaggggaggtcccccacccggggtcaaaagccgccccgtgaacccgtggggaacccgcaatatcttcccagcccgggtgtacccctcgagatgttttacccgccttttcctccattgcccgcttcttcaacagagaggtgtttgcacggcgggtctaaaccaagagattcctgttcttagccccctgtccctttgacagcccccgcggcacaggctgttaagctttctacacacacaacgagagtcccttcccctctctctcagtctagaagcccgtgttaacacccctgtttcccccctttaacgccttaacaaggaccttttccccccggagatatcccccttcacctccacctaggccaccaggcgcttgttccttcccccgagaattttttgacaccacccttgtctctgttaggaaaccaccagcacttttccaaacacccaccccactctcgactgtcttacaccccataacactccccagcccctcacccaaaaca

SEQ ID NO: 651629 - DNA, 718 bp, Homo sapiens
  misc_feature (195)..(196): n is a, c, g, or t
cccgttgtttttttttatccaaaagaaggatcccaagaggtggttaactgttgggcgctgcccattttaccttaaccgtccaaatcttttacgcccttgtgaaagggagttaggtttcaccgtcccccctctaaattgtaccatcacccctttggtttgaacaaaaaggtttttaactccccctccccctttggnntctccctggtgtggaaatatagtattgcaccattctgtttaaaaaaaagatgtggcttccttttttagttttgttttaggctgagcccctttccatggggtttacagggaaaaagttttccattaatggagtcagcccctttttttgcccccagggggggtgggtttttccccttaaaggaatcaaaaaaacccctgtccttttccctgggttttttagggaaaagcccctccgtttttgggggcctggccaaaattaaaaaaaaaaaaagttggttttccaaaggtccggggggggttattcccaatgggaagggtttggcccttattttaaccgaaaaaaaaatttccaattggggccggtttttttctttttttaaaacccgggcccaatttttcccgtaaaaactgttgggtccggccattttttctttttaagggccaaatggcctttttttttggccaaaaccccccatttgccaacctgttaatttttttttttataaaccagctgttcccctga

SEQ ID NO: 651630 - DNA, 209 bp, Homo sapiens
agtatgctcatcatttccccctctattgacccccacctccaaatatctcatcaacaaccgacataagtcaccacccaagcaatgactaatcaaactaacctcaaaacaaataataaccactacacaaacactaaatggacgtacctagatctctatatactcagtatcctctcatcatttactattgccacacactaactctcctcggt

SEQ ID NO: 651631 - DNA, 297 bp, Homo sapiens
gttgtgctcttggattgagcgttctcaggctccctcggatgacctatcccgtaccgtgtcacatgtaggacggactacatcgaagtgataggcagacgtcgatggtcgtcgcgcacgggggcgtgcgatcggccgaggtattaagtcacaagctgcgggccgcccccggcgtggccgagagggctgccggtttggtttgatcctgataatgcacgcatccccccgcgaagggggtcagcgcccgtcggcatgtattagctctagaattaccacaggtatccaagtaggagaggagcg

SEQ ID NO: 651632 - DNA, 205 bp, Homo sapiens
  misc_feature (84)..(84): n is a, c, g, or t
acgaggagtagtgtggatctcacgtggtccgattagctttctctgccttgcttgcttgagcttcagcggaattcgaaatagctngaaataaggctggaaagggactcccggaaaggccaagacaaaggcggtttcccgctcgcagagagccgatctttcagttcccacgtggggccgctatttcatcgacacctaaaatctaggg

SEQ ID NO: 651633 - DNA, 948 bp, Homo sapiens
  misc_feature (948)..(948): n is a, c, g, or t
ggcgcctgcgccataaaggccgccggcgcccacgcgcctcgcttgctgcgcgctgccggggcctcgttcctcctcggctcggtctcactcggtgtaccttcttagtcccggctagtggccggttctcacccggggaccgccccgaggttccgaggaagcgtgcagcgaagtgggtacacgggagcacccggtctgggatggatgaacccgtgcagcacgggcgttctaccgatgggcctaccagagggacccgtttacccaaaccaactttcaaaggcttttgacgcctcaaaaatagcacaaaccgagtggggcaatagtcgcttggggggggtcatttaacctcccagaggacaaccctggggggacggcgagggaaccggtggatagacggtaaatgcccgggcgaggggaccttgggccgaaacgtccaaagggggcgcgaggaagggggcccgggccccgggcataggacggaacttgcttccaaagggggtggacgcaaggaagtcaaatttaccacgccgaagagggttcgaaacgcccgggcggcgtggaccacgcgagtgggcacctgctcggaacgagagaaaccccggggcagaaaaaaaagtgaaccccaatgtcccgtgtgggaaaaacggcgccacagcggaggtggtgaacttgggccagcggatgggctccacagacaaagagcgttcggccggggacccaagcgatggaagaggtccggtccgggcacgaagccgggggcaccggacaagccgggcggaacattgggaaacgggggtaaccacatgggccagagatcggaatcgcaagggcaggcacaattcggaaccattgggggcttcggggggatcgccgaccctgggggagccccgatcagtgggtggacctgaagccccttaaaggccaagaaccgcttgccagggaggaaccccn

SEQ ID NO: 651634 - DNA, 248 bp, Homo sapiens
  misc_feature (196)..(196): n is a, c, g, or t
  misc_feature (221)..(221): n is a, c, g, or t
aaccgcactgaccaacttcgtgcagatgctggcgatcttcttgatcccaacggcgctgtgctttgcctttggtgaagtgatgggcgatcgccgccaggggcgcatgttgctgtgggcgatgtcagtaatttttgtcatctgcgtaggcgtggtgatgtgggcagaagttcagggtaatcctcatctgctggcactnggcacggacagcagcatcaatatgnaaggtaaagagagccgtttcggcgtgc

SEQ ID NO: 651635 - DNA, 626 bp, Homo sapiens
  misc_feature (626)..(626): n is a, c, g, or t
ctaaccttgaagtgcaggcaatcaattatactaattatcgtactaaattttactgaatccagaacactgcattgaactgggtatggaataccttccatattggatgcttaccaatgtactgcagagataagtttaactgacctgagtaccatattgagtgcccagttagatcaagacgcgcacttacaaggaagtacgcaaaatggtagaaagatgcattgactgctattgtgaaacccactggacatgaacagtctttaggctgtttagataaccagctagctgccttgccggacgaactttgccatgagaaagaaactttggagaagcacggacattcagactgctgcagccatagcgaagaggcatgacataactgttctcttgcacacagaatgtctagtccagcatcgatcccagtttgccaagtcccagaacctgtcacaagctgcgaagcatatgaagaatactgggagacattcatgaacaaatgcagttatgagatagcaagatggcatgcattcctgcatgcacctgcaatacttctttggcctgctcgctatgacctattcaattttgctgacagctgaggcagtttggttaatccacatgcatgttgccactgn

SEQ ID NO: 651636 - DNA, 587 bp, Homo sapiens
tatctataaggctaagcaccagtgaaatctataaaattagttagcaatattctaggcatgcattcatgtaccacatgatggtgtggggttaaggaatgtattcgctgttgtcaggaacgcacagagctcgccagattgaattgcgtgtggaattctaatagacctttgcttgtcgcatcctatggtgatttggactgtaattttaatacagtatggcaatcattatggtctattttctcagaattctggttaagtagcataagcgagtgtggaagcatcatgaattcatgctgtcaaatcttgtaggtgcgacaggtaaagaatttgtcctcatctttgcacttatgcttactaggcccatctctcttggagctgtagtgtggaactggggactcaggtagaggtaaatggccgagtgccctgtaattgcaccctttatggtgataaaaacctgcctgagaacagattgctgtaggctctgttgtgcctaatgaggaaatggataggttggtcagcacagaccctggtgccagattccatgcagtattctgcatctacaatgcagttcgacgctgccgatgcctcta

SEQ ID NO: 651637 - DNA, 352 bp, Homo sapiens
ggtcactaagctgtgcatcaccgtaggtatggaggccaacttctaatgactttccgtaatattatacttagcgtcggagtcaccccaagaggtagctatgattagccttgtttatagacagagaaacggaggcacagagaagttgacgtgacttgcccaaagggcacacgtagaatacgtgtcgcagccagggtggccgcccagggcctcctctgcatttgacagtgacccactcaaggctacacatataggaaggcaggacttgaactctggggttctgatgtaagaaccactctgcattcagcatccctactttggctttagaatcttgggatgtttttacagtgtggag

SEQ ID NO: 651638 - DNA, 537 bp, Homo sapiens
  misc_feature (56)..(56): n is a, c, g, or t
aaaaaagtaaaaccgggggcggaatctgggtaatggaattccttaaggatttaaantttttggaaaaaaaaagggaacctttaaaaaaatgaatcccaaccttgggggtaaaacccccccccccccaaaccccccttttgtttttttgttttttttggaaatggcaaaaccttgtaaaaaaaaacaaagccttctattaaaataacttttagcaattttccccgataacccataaaccaatttttcccccacccccaatatgcgggaaccgcccgtaaataccttgtgaaaacccatgggggggatccccgcttaaatctaagtttaaaacccccccgttagtagccttaaaaaggcccgggggggaatttttccccccccgaaaccccccaatccccccaatttgggctcctccttgggcagttagcagttcaccattttccggcccccccctggtacaaaatgtgaaacaggttttgttaccaaaaaagcccccccttggaaaaaagtttcaaccaaaatcccttttttttattt

SEQ ID NO: 651639 - DNA, 101 bp, Homo sapiens
gctcgcgcgcctggagggaggccctcacttcatcctggcggactaggacccgcggtcccgcaggcgcagcccttacactttgcccggcgccatgggccttt

SEQ ID NO: 651640 - DNA, 215 bp, Homo sapiens
ggggggggggggggggtttttttctcccccccccagggacccctggggggccccccctctcccccgggggccggggggcccctcccccccttcccggttttggggccggggggtgggggggggcccccccccgcttcctttttcccctccgttccctttgtggcccctggggggaggggttttttttttttttaaaaaacccccaaggtttttta

SEQ ID NO: 651641 - DNA, 207 bp, Homo sapiens
  misc_feature (11)..(11): n is a, c, g, or t
aggtaggatgnggtgctggcgggtaaaagagtatgagggggtggtggtggtggtaaacttaatagtgtaggaagctgattaattaaggaaggagaggggtcaggatggatccggaaggatccaatgggggcgggggcttggtatagataatggggcgtggataagaagtagtaactgggttgaccatggttggtgggacaaaatggt

SEQ ID NO: 651642 - DNA, 348 bp, Homo sapiens
gtctgaaatacagtagaaaagtcaatcttaaggctccactatgatctcctgtgagtccaaacctcagatccaagtcacactgatgcagaggtgggttcccatggtcttgggcagctctgcccctatggcttttcagggtacagcctccttgctgggtgctttcatgggctggcattgagtgtctgcagcttttccaggtgcatggtgcaagctttcagtggatccaccattctgggtctggaggacagtggccctcttctcacagctccactaagtggtgcccctgtagggactctgtgtgggggcttgtaccccacatttcccttccttcctgccacagtccttggg

SEQ ID NO: 651643 - DNA, 514 bp, Homo sapiens
  misc_feature (103)..(103): n is a, c, g, or t
  misc_feature (221)..(221): n is a, c, g, or t
  misc_feature (319)..(319): n is a, c, g, or t
  misc_feature (343)..(343): n is a, c, g, or t
  misc_feature (394)..(394): n is a, c, g, or t
  misc_feature (413)..(413): n is a, c, g, or t
  misc_feature (422)..(422): n is a, c, g, or t
  misc_feature (428)..(428): n is a, c, g, or t
  misc_feature (445)..(445): n is a, c, g, or t
  misc_feature (496)..(496): n is a, c, g, or t
gaattcggcacgaggtttacagaagcaacttagtgccttgtaatctaactttgtcactgtgactacattacctcttcagcgccagagggcacccgtgggcctnccggagcctctgcccatggcggggtggagaccggaccagcagcccctccactggcgcacactgcactttcctcattcagtctcccgcacactattctctccctcttccggtggcactnttcacctgtaccgccccgcccaccacccggcccttggaagagttgttgcagaccagggtttgggggaaactgtgttgacattcaaaactttttcttcngatctgaacccctgttgactaatnttgcctgggtttgtgtaggtctgcaggaaggaaggctgaaaaagcggacgnggttttgacttaagtgggntttgtgatntaattntttcttttttttaagtngggagggaggggaagtagatggataggagagacttgatttggtgtaaagtncccagttcaatgtgacac

SEQ ID NO: 651644 - DNA, 895 bp, Homo sapiens
tgacactttgaatcgtgttgcgacgaatgagtatgtggtgcgatctcaccgtggttccgattagccttttctctgccttgtcattgatttgagcctttcgcggaaagttcgaagaatgcgcatggcggttaacggcatggaatagggacctccggcatagaggccaagtaccaccgaggcggtattcctcgctccgctagagagagccgtgtcttgcatggctccctagtctgggtcctggtattgatcgacaccttaatgatcatatggtacggaccaggttaatgtgacgtttgcgagcgcgaatggctcggttgtttgtgacaggctgccagacacacttccattggaaattaccatcaccggataaaagtacattaatatctggggcagtgcaatatgtgctactccaagacacgtagctatatgagtggtacttgcgatattaaccaacccgtgcagttccactttgacaaagtttgccttatttcccgtggagtactactgacctgatattgggaggtgtcttcttcatttcacaggtgcctaccaaattttgcctatgcgtggggttgtgctgatcaattacccagtataatacccaccaaaagtgcgtctggaatttggggaaccacaatgtggacaaacacgacaagaacttgtctataagtgattgctctgggatttacctctgttgatctccaggattctcttaaatttacttctaatcgagcctgtcccaggtgttctggtgaagttccatgctggtagcttgtatctctggtgtaacaagacataaattttggcctttgtgtaacttcctatttgagcaaagtttggaagttcatttcatttttccaacctaacaaaatttcctgcttcgagttttaacctt

SEQ ID NO: 651645 - DNA, 106 bp, Homo sapiens
attgttgcttctaatctgctggaggctgagagattagaaataaatttgtcagactggatatgtaaattggatcacatctctgattgaggccgggtctctttctctg

SEQ ID NO: 651646 - DNA, 440 bp, Homo sapiens
  misc_feature (116)..(117): n is a, c, g, or t
  misc_feature (122)..(122): n is a, c, g, or t
  misc_feature (375)..(375): n is a, c, g, or t
aagtgctcagcactccccttattttttaagaaaaacaggtggcccgccctgcttgaggccggcttccggaaggagaacaccgtttcggagggtatggcgctggttcccccgggcgnnttcgngtaataccctttccccagatgattcgccccttgtggcccaagggttagccccccccccgggccggccccacccattccctcctccgtgcctttctgggcgggagttcagggggttgccccaacccttgggtgattccaactgtgtgtccccaaaaacttttccgggttttttttgaggggttcccccaacccaggggtgattccaactgtgtgttccccacaacttttcccggttttttgtgaggggcccttntgccccccgcaggggtccttaggttaaataaacccccgccctggggttggcccgtcggccgttga

SEQ ID NO: 651647 - DNA, 280 bp, Homo sapiens
  misc_feature (9)..(9): n is a, c, g, or t
caaaagaanttagttcctgtgtaagaacctaattaaaatagatagatgagtcatgcttagtctcatgtacgaggggttgatattttcatgcagttattccttaacagattgtaccagctttgcgtgcatagaataagaaaccaatgtatgaataatttatatttctggcaagtttccctataaatatacagcttggaagacctagaaatccagagtagcagtggatacagcgtatgtcattcataatatctctctttaaaacagtctataattcctgatc

SEQ ID NO: 651648 - DNA, 900 bp, Homo sapiens
cgcccccgtgtagcgctgtgtcttgtgtccgtcgagcatgtgccttgtcgtctcttgggggcgccccccctggtgtgggggaccacttgttccgcgcgggttttttccccgccgtgtgttggtccgcccccccgtgtgcgccacgatgtatgcgttgagcctctttggtgtgttctgttttggtgtgagaactcccgttggacacccgttgcgccggccaccaagatggtcgtgtccgcggaggatcgcggcgtcccgcgaggttagcattaacagcgccccgcgggtgcatccctcggcggacgacttttctttaagggcgctcacccgactactgtccgcggcctgtttcaaaaggtcctctcatttatcaatttctcaaacaacccccgtttttttgttacaaacatactctctcttaaatattagcccctctcccttgttttattatagatattaattcttctcaagacaccttgggtgttgtattactaatagttatcctatttaatacctcgctgagctgttataccgctccctcccagagtttttctaaaagcaccccccccgctctcttgatcacactccctatggcttactagaccaagaatagcgacaaaattatctctgcgcacataattctccccccttaagagagcgcacatccacccacttttgtatagtactccacacaaagagtcttttgtcaccacactatatcgtggtgcgccatatattgtaatctctttttcataaacattgtgggacttcctctcctcgagaccccaccacgacaatatgtgggtctctcactgtgcccccaacatcatcattatcctaaatatttccccgttttctcagtattccagggcctaaaaaaccccttaaccccacataaca

SEQ ID NO: 651649 - DNA, 268 bp, Homo sapiens
  misc_feature (83)..(83): n is a, c, g, or t
  misc_feature (86)..(86): n is a, c, g, or t
  misc_feature (209)..(209): n is a, c, g, or t
  misc_feature (214)..(214): n is a, c, g, or t
  misc_feature (249)..(249): n is a, c, g, or t
cataataattaaaagacgctctgaacatcgtcatcagttcttcatccgacatatttttgggttcagttgaagcgatttctganaantttgattcatgaaaagcttgtcggaggaaactaaatttatagggaaatatttcctttccgggtttcattaaggtgaaatccaggccaaattctatccaaattatggaggcaatccctggaaantccgnaccgggttttgaatccttttcccattggtcgggancgggcaccatcccgttggg

SEQ ID NO: 651650 - DNA, 701 bp, Homo sapiens
cggctgcaggaattcggcacgaggcagatagtatatcatatgctaggggtcgctgggaggaataagggacttaattgtggtggaacacccgcacttgcagtgcgggaggctagggggccacagatgctgcttcattaacatagaggttttggatttttttctcttgcggctagttattaaagtggggaagaagaataggtgcgctcagagaggcctatctaaggatgggccagcagtgtggatccatcgttgacactaattgaaggcttttggattaaaaagcgaggcaccgggtgtaaaaagttttgggtctccggtggccgggtaacctaaagggcaggcccaacatatagagagggtacccgctgtggggcaacaatctcacttcccccagagggtcgtttgcccgcctccgacttttggtcatgtaaaacacggggcctttgcaaaaaagggcctccaatatgttcgcaaacaaactcccgggcctgtgttgcgcgccattccccaacaaaccgcgggggccgccccatttccacttatctttttttcggaggggggctttaatatccccgctacgtcaacccctctttttagttgacatctcgcatccgtactccctgcccaaagagtgtctcctcataaacctagcggcttcttctcccgtcctcactatactcctaccgcccctctctcacccc

SEQ ID NO: 651651 - DNA, 337 bp, Homo sapiens
gggctctgtgacacaggtatggaataggaattgtaatgctgagatggggttagaaagcttggccaaaaggtcccaatctaagggaagtaagtgacttcagtacgaaaagttgtaaaacatcttaaataaggagaagtaggaccatactgagtacaagcatccctaaattcttttaaaaaaggtaagattgaacagcgcatatcgatgcagaccggtttaggacccgaaacgacaggagggtgaggggctgtagtggatgggggatggcctggagaatgataggtaaagtgtagttgggtcctggagccatcagcttctgctctgtgttggtggtgtg

SEQ ID NO: 651652 - DNA, 266 bp, Homo sapiens
aaactcaaacccttccccctcgagtgatcttcctgccctgcctttccaaagctttgggattacaggcatgagccaccacccctggcctctctcttctttaacaaatactaaattaatttatttggcttagagatgggccttactgtttcccgggctggtatggaacattataaagactcctgttggccatcttatttgactgttggttttcacccttttccccattcattagctcttaattgttggtcttccctggaaccttccac

SEQ ID NO: 651653 - DNA, 965 bp, Homo sapiens
aatccttagagattagttacataatgacatatcactttgaacttccatgaaacctgtcttccatcacaacaaccctgggactacaataacatgctaaacggatgtatctaggcttaataatttccttataggccaatactcagaacacatgtgctgactcagcgacacagatggaaaggacccgaacacctcacctatgtaaccatttcagatctcgtgtcaatttgaatgtaacaataacaagacagaacttctggtactctacaatcagggatgatgtcctatacgaaggtcagtcactttgtgaacttatctggacttctcgggttactttagagtctctgcgatatattctccagtttacatctggacgtcatatcttgtggacttgtgcttcatttcagtgttaatcagttaaacagaagttagttggcgttatgatgtgtgagtgaacttatgccactggctggcctatgtttctcttaccagtagcttgttgtcattgaatcggctatatctatgacttggcaagtatgcccagtaagctttccttctactatagaatagaccagataataacgagtgtggtcttatttatcgactgtaggctagtctattatacaataatcttgtgaagaagaatgtcttgacattctactactatactcttgtctagaattttggatgtcgaaaagtttgcagtacaaacagttgacttactcttagttccatgatatttaggtacgtacacaactgtctgggatatattaccaatcaactggtcctacagtatcgagaattttacactggcattttaagaccttagtaggattctcaacatacgtgtagtaccatggagtcacggacacactttggggagggaaaggccccacctggacccggctcctgttgctcttcgcatgggttcgcgtcctccgcgttcggcaccctccaccgcaaacact

SEQ ID NO: 651654 - DNA, 164 bp, Homo sapiens
tacaccacctgagtctcctttctgaaagaagacccagtgcagagcggcctttactttcaatttctactgctaaatatagattccaggcacagctgctttaaaagaaaaaagaatatagaaagatttttcttgccctttgtatacctgcacatgtcttctgcaag

SEQ ID NO: 651655 - DNA, 690 bp, Homo sapiens
tgccgtggttggcttcgtcatgcagaatgtttaaaaggccttaggtatatggagcgagctgctgaaaagctatggcaaggtggttgatctggcccactccaattttggatgcaggatttcacctttctaacccttcaggcagcagctgggccagctgagaaagctctggaagctctggaaccaaatgtatgatccagatactttagcacaggatgccaatggtgcacacgcaggaactgacgttatgcttcatcgtgctactctgtggttttcacaaggcaaacgtgtatggtatgtggataccttaccttactatgtaaggcatgctttcaaggtagcaatgaatcgagccaagtggttgatatccagttccaagtctggagagaggcatctttatcttataaggtatggagagacaaaatttagacaagaatgaccaagaagtacgaaatggtgatggcagaagaatattgagtgatacaggtctgacaaggatgatgggggaatctgtgagcacagtatcttatggactaaccgattacgaggtggagtgaagtagacaggaatacaattataagagaaagagcaaaaaattcgaattggcgactaacaatcagaaaacaaaagaagaagacaaacatgaagcacaaacgaaaaaagaagaaagtaagaggagaaaaaacaaaaaag

SEQ ID NO: 651656 - DNA, 663 bp, Homo sapiens
ggagacacagaacgtgctggagattgccctgagactcgagatgtgggctgaactctgcccctcggccaaatggcgccatcatcctctacaaccgggttcagtggaatgtcccactggagcggccctagtggtccccagccctactcccgcctgctctgaaaataataaacgactttattcttgtgattccgttggcatctgctatttcttgtaacagagaggagcaactgtggccctgcagtgtagatggctcctgtgggctggaatgcagctccgtaagatatacctcgctgcagcagtgggagcaacatgcgtgaactggagacactggtggcctgtgtgccgaaaaacgtcacaaagcctgcagagatgctgggcatctgtaccctgacctgcatccccaaggtggaccgttggtcctttggcatccactgccaattgagaacaatgtagaggtgcagggttgccttgaacttacgaacagcaagttgaaaactagagctgaacttggaactgcaagagtcaatgtagaagcaagcagtcggtgtcgacatggaggacctaggatatagtagagccccacatccgttcataccactgatccccacaacagttccaacttggacggtggtgcaaaccgtggctccttaggcagtacccctg

SEQ ID NO: 651657 - DNA, 134 bp, Homo sapiens
ctacggtctactgttttcagtgcaggtgtggtggtcatgcttataatccagcatttgggaggcaaagcaggaggatcgcctgagaccaggagttcaagagcagcctgggtaacatggtgagaccgcatctcttc

SEQ ID NO: 651658 - DNA, 371 bp, Homo sapiens
  misc_feature (10)..(10): n is a, c, g, or t
tcttcagctncaagtctggcctctccctcccagcaagcagccattacagaaactgaggctggccaggcgtggtggctcacaccctgcaatctcagcactgggaggccaaggtgggcagatcgcttgagcccaggagtttgagaccagcccgaggaacatggcgaaaccccattctctacaaaaaatacagaaattagccaagtgtggtggcacgtgtctgtagtttcagctactcaggaggcttaggtgggaggatcacctgagcctgggaggtagaggttgcaatgagcagagattgctctccagccagggagacagagtgagaccctgtcccaaaataaataaataaataagaataaaatttaaaaaag

SEQ ID NO: 651659 - DNA, 369 bp, Homo sapiens
ataccggccaatattaggaatggatgaggtcctgggcacctgagcagtccagcgaggacttggtcttagttggaggcattatggctaggaggatagtatgcggcacggttctgagtctgtgggatagctgccatgaagttacctgaaggaggtgctgactggtaggggttgatcacagggttgaaaccagctcgtacacttgccattctctgcatatactggttagtgaagtgagcctggcgctcatctttgcgctgagctaaagctacatacaatggctttttggccacaattctaccgttcatatctgtaactgctttagtggcttcttctggccaggagaaacatacaaaaccaaaccctttgctg

SEQ ID NO: 651660 - DNA, 157 bp, Homo sapiens
cggagcaggagtggtatgtgggggcgccacaacctgtcccccgatgtccaccgtgatccacatccgagcgagacctcgtgcctgacatgtggtctggtccctgtcaacaccctcttcatgaacacctgctgcctgggcttcatagcattctgtgtac

SEQ ID NO: 651661 - DNA, 512 bp, Homo sapiens
  misc_feature (1)..(1): n is a, c, g, or t
ngatctagaggatctcctccataatggtgccaacctcccatcccatcatggccgggaactcagtttttaaggtttccctgaagtcctcttggccaggagagggtctatttagtcaaatggggggggggggtgcttaggattttatttttatttccaagttataaggtgggaccatcagagcatgaatacgggtggagtctttaatcggtaaatacttagcaatcaccttcttctcagtaactttctctggaaggtggctgataagccagggttctggatgttggcccacttacccctcaagatgaggagtgaagaaattagatggcttggccaggaatttcctaaaaagaaaaggttcggaggatgcatgacctatgagggtgctgaggacccctttccaccaaacagggactaacttcggggtggctctttcacatctatggtctggtacgacgtacacagaagtgcagagcacagccgcagccctcacagcatcatctatctaggttctg

SEQ ID NO: 651662 - DNA, 381 bp, Homo sapiens
  misc_feature (53)..(53): n is a, c, g, or t
tatcatctactggggaaattttggcagttgatgtctaatgttgattttttttnctgatcgattttaattgttcactgggcactttggggtagaattgttttaaaaatttggttactgggaaagctagacaagcctttgctatggtgaaagagacagaaggaatatagatataatttgtaagtggttatgccattgggcttaatgctttgcatacattatctagtttgcatctcctgatcgccctttaagtttgcttacggtaaagcattattccttgcttggcaatgcacagagaaaaattatttgctgaaggaccctgcaaatgagggacaggatcagagttggaactgtaaaccctgccactccatttcatgtgatctt

SEQ ID NO: 651663 - DNA, 285 bp, Homo sapiens
tctggtcgtattgatacaaaatagatgtacatatcttgcacataagtatattatgctgtaggcacaggagaaacagcagtgaacaaaatagaagaggaaagcagtccctagttacaatatcggggggtggtagggagccctcatcattctcattcttggtcagcaggaaaaccagcatgcatcacactcattcaatccatcaatcatgatacatgatcagtcacggtcagcagcacagtgcctcttgcacagcacacaatcaaagccactagtcaaggaaggcat

SEQ ID NO: 651664 - DNA, 439 bp, Homo sapiens
ctgctttcctttctgtgtgttcaattgacaaaatctaaaaatgcgctagcttggcaaagagaaatgtttatagggtctagctctagtatcaaaaaggaaagcagaggaagggtggatccgtaactgatggacatttaatcgattattggcccttaaagagtattgtaggccgggtgcggtggctcacgcctgtaatcccaacactttggaaggctgaggcgggtggatcacctgaggtctggagttcgagaccagcctggccaacatggtgaaagcccgtctctactaaaaatacaaaatttagctgggtgtggtggcgggaacctgtaatcccagctgaggcaggagaatcacttgaacccggggagtggaggttgcattgagctgggattgcaccattgcactccaacctgggctacaagagcaaaactccgtctcc

SEQ ID NO: 651665 - DNA, 261 bp, Homo sapiens
ccccccccctttgggggggcccctttttttttttccccaaccctttttgggggccccccctttgccccgggggggcccccccttttcccttcccctggccttttgggccgcccgggtggtttttttaaaaactggggtgggggcccgggatttttttttttttttttttaccgggcccccccttctgggttttttttatgggccttagattattttttggggttttaagtgtttttacgggccggcttttccaacccggga

SEQ ID NO: 651666 - DNA, 214 bp, Homo sapiens
tcccttgacgccgctggcgatagcgatgattatggtagcggaggtgaaatatgcttgtgtgtctacgtctattcctactgtaaatatatgatctgctgcagcgctctgagccctaggactcatctttcttttaccgtaggcgccctgactggcattgtattagcacactcatcactagacatcgtactacacgacacgctctacgttagcgctc

SEQ ID NO: 651667 - DNA, 413 bp, Homo sapiens
gggtatggagtctcgctctgtcgcccaggctggagtgcaatggcatgatcttggctcactgcaacctccacctcccgggttcaagcgactctccagcctcagcctcctgggcagctgcaatcacaggcatgtaccaccatgcccagccaacttccgcatttttagcagagactggaggaacggagaatcggctgtgaacccggggaggcagaggtcggcagtgagccggagatcacgccactacactccagccgtgggagactccatttcaaaaaaaaaaaaaaaagaaaacataaatagagaaagctttgtgggggccgcgtttgggcgcttctaagaagaggcgttttgttaaaaccatattcgcggattgggggagcgcgcggggggccccaaagtgttggtttcacggg

SEQ ID NO: 651668 - DNA, 684 bp, Homo sapiens
tcggatgttggtctgtggggagccggacgacgctggaagctggtgtcggatggatgtagtagtgctggaggtgtcctgcctctgattcccttggcggtgatgcctcgggctgtccgtcccctgcagtgtcttagctccgagaggggaccctcttttccacagcagtcttctccagcctctggataatggtaacgtgcatccctcctcatcccttcaggatcagtggccttcagtgggattctgggttttactagtcctggcggacttgtggtttctacataatgtgctcgcacttgtgcaaaaaatcgttctcatagaaccctcctcagataattctgagtgtcatctatttcccatgactggttacagtatctcttcgtgaaaaagcagagtgcacttcaagtctgtaggaaaacccttttcttagggaggctgattatctgcgtctctctgctgcttatttggcctactttacaactttctaacgtaactagcttattggcatttactgaccgtcaattattgcagtcaccaataaagtgagtagtacatggtgagaccagaaatattggcgtcatattagcacgataggacattctttggctctgaagtctcccttcgtgaagacttcacacacggttgcttcagccacacagttgctgctcaggttttatgtatagatga

SEQ ID NO: 651669 - DNA, 687 bp, Homo sapiens
  misc_feature (559)..(559): n is a, c, g, or t
acgataccaagctaagcgggtgtttctactggctactgcgcctgaaagaggctctataagttcattcacacagcatggcttatctggttttaacattatggacaggatgagtacctagtaacaccgcattgcttacgatagatagactgcattgccctgatattgacacaggagtgctgtccttttctcaacgtgtagatgtgatgtccttcacaacggagtaatatgagaactgagccttcaatagatgaacatttctgcacagcaagaacctaatcttaacatccaagaagagttactctgtaatgtagataacagactttcctagtttgcgattagtctaatcggaaactacggcattgttgcaatgatcttcctatacagaatctgacagttccctaacatattgatgagcctatggatcatacactgtatacgatgtgaaatggcagcaatggaatcttgagatagttctttccaatggggcaagtaccgatataaataccactgatcatgaggatacttaccacgatgcatattgtctcagtcgtgtatctancataatactctctgatagacggcgcctggagataatttctaaatctcagagttagctcatattgtccttgtggaatgtattcatattgataatttgatatcttacttgagaccacatagataggtgtc

SEQ ID NO: 651670 - DNA, 95 bp, Homo sapiens
  misc_feature (16)..(16): n is a, c, g, or t
  misc_feature (60)..(60): n is a, c, g, or t
gtgctacctccacaanctttcttcttcttcatagtgaccaaaccccatttctctataganatcctgattagtatttttgattggcatgtagcctc

SEQ ID NO: 651671 - DNA, 396 bp, Homo sapiens
tacaatcagatatatgcccgggacacaacgagatctagcccgaggactactggagtgtgccggaggatgaccacaacctactgacagaacttgacatctctgtgtgccttccgtgtcatcctagatcatccacacaaatgatgcctcctcacccatgatattctgcagtcattctatataacaaataatgggcttctccccccaaaaccttcgcatggggccatatttattttgtggcttacctttccctcccagctcatggccatgtatcctcatgtataatggggggcactgagattggctcacaacacgggcagcctctggatctgggagaagtgcaatgtcagccatggaggaagagcagcaccgagtctaatctgagggaaggaacaggac

SEQ ID NO: 651672 - DNA, 174 bp, Homo sapiens
ttggggccccattcagggtagaaactttaggattccagtctaaatcgtgatgaatatcagggacagaaatatcgacagggaaatggtcctctacccttagcaaattcaatatcatcgaaaggaatcccattgatttcactaggcttctctcgcaaaagtagggtaccgagctcg

SEQ ID NO: 651673 - DNA, 1285 bp, Homo sapiens
gaaggaagtcatccgcccgtccctcatctgcgtccggaaggaagtcatcacgcaccgtccctcatctgcgtcctgaaggaatgtcattccgcccgtcccatcattcggcgtctggaaggaagatcatccagcgcggtgccacatcaggcggtcactgacaggaaatgagtacacagccgtgacgtacatactgggctgtgataacggaagaaacacatgcaggcacgataccaatagcatgcgccacgacacggagagacacacacagcgcggagccgacaaaacgagcaaggcacgagacagggaaaaaaacagcagcgcgcgacataaccagagaagagcacaacaaagaaaagagaaacagagaaaaccgggaacccaaagacagagcaaacacagaacgggacgaagacagaagaaagaacaggaaaaacacagagactggcgcgaacagaaagaggaaagaaaaaaaagcacaagggcaacacgagaaaggccagaagaaaagggaaaaaaaaaggaaagaggaagaggcaaagacgccagagcaacagcacggagcccaccacgaagaaacggagaaacaaggaagccgggcgccggaccaagagaaacagcagccgacagaacgagcaaagaaggagaacaggtggacaaaaaaagaggaaggagcacaagagcgccaggaacacgaaaaaacagagcggaggaaaaatcagaagggagggacgggcacgaggagcgagaaaggagaagaaagaacagacacgaaggagagccgaggcggaagagaggcgcagagcggggagacaggaaaaaaggagagccggagaggagacgaacgaaggaaggaacgcgacgaaagaggacggggggagaaagaacaaagagaggcgaggaacagaagcgggagcaggggaaggcgaagcgcgacaggagaagaagaaagacgagcgcagaaggaagcggagcgagacggaaccagacgcggagaacacgggaagacgcacccgggacaggcggcccccacagagagagagcagacacggacaagggcgacgcgacgaagcgaggacacgacgagacacgaagtggaagaggagaaagaaggagagagaggggggaatagaaagagagaagggaaggagaaaaagggagatgagaggaagagagagaagaggggagagaaagagatggagagaaagaagagactgagaaaagaaggggaggaagaagggagaagataaagaagaagacgaaaggtctgatgttcgtttgaggatgg

SEQ ID NO: 651674 - DNA, 894 bp, Homo sapiens
  misc_feature (663)..(663): n is a, c, g, or t
taaacctaatagggttaagtattattatgatttccatgtttacactgaaaggaaactgagctgcgaggtcagatagttagataagggattgttctgggctgaagaacaaggatcgcaatgtggggggagaagatagtctttgcccctaaaggtactaccgattcatctagtgaagtcttagtcggtacgtcaatgaattgctcaaatgccatgagtttccattcctaatctatgcatgcggtacttgacgcctgctagaatacacgatcgatgttgacgctgggaacctctcccctcgtggtaggtatgggattttcagttttggcattggtggccatggcgaatttttaaagaattcgcgcacaggggctgcattcttttgtatcgcacaaggtcagagctgatgatagccagcgttgttttctagccacatgttacggaagtagagaactgaattcatccctcctttaggagaagtctggtcgactcatatgtagggcaatgtccctcttagtcttcccttggccccttcgctctcactacgaaaagcaccatgcatttcccataaatgccatggctcaagtcatagaatttttttcaatggagtcttcttgtattgcgtttgcacaaaagtcttagtcttccccgggggacagctctctntgggttgcaaaatcgataattgctctgagaggggcttataaaacaaggaagcctacatatatagccaaatagccacccccgaatcaagggggggttaatgccattgtacggcattggtgatttgggctgggcacgctatccttttccttattccaccgaatacgttcgcaatttaatatttccatggtagggcgggggattaacccggtttttgttccggtcattgaagtc

SEQ ID NO: 651675 - DNA, 260 bp, Homo sapiens
gggttttttccccccccccctttttttccccgggggggccccccccccccccaggggggaaaattttggccccctgggaattttttcaacccccaccgggggggggaatttttgggcccccccggttttttttttcccccaaaaaagagggatttggttttttttccaacccgggggggcccttttttccccccagggggggggggcgggggtttttttttcccccggggggggccccccccctttttttttttttttta

SEQ ID NO: 651676 - DNA, 1559 bp, Homo sapiens
cttcttatgtggttgcttctcatctagtatggggtggcatctttttttggtcttcgttgtgcgcacgaacactccttggtgttcttgttgttctatcacaaacagggagggttggccctctcctcttctccgactgtataggctcgtctgttgtgtgttgctgttgcgcctctacctcctcctctctctctcctggtttggtgtatatcactctacttgtgtccttcgctccgtcctactccgtcatgttgatcatgtacgcttccccacatttgtttggttttgtctgcgccagccgtggtgtatgttgtcgcgatcccgtctttttttttttgtagcatcgaaggacgggatggttctgtgtggtgtattgtatcccgcgctgtgcgtgcatccgttatgttttgggtgtgggtcgcctctctcgctccccgtgtactcttctactgtggtttttgtttttcccggcacagtgtattatctctctttaggtagattgcttcgggggttgagcgtttcctctttgcttccgtttgtgttgccgttgttctgctccccgcacgattgacgacttctgttctcctccctcgctttcgttgtgtgagtaagtaattagctccatatttgttgtcttcgctctcgattatgtagagggtgctctcacagctatatataatctgatttgctagtatagtattttatttagtagtatatttgtgtgtcgcgactagcgctcgcgtcttgtaagagtgaacaaagacaacactattgtgttgatatactacaagagaggatcgatataggtagagtagtagaagataagataaggttgttgtgctcttcagcgactacgatagatattttattttggctcttcctttctagttctgggttgcgcgtcgcacatcattgttgtttggcggagaatatatgagtgtgctgcgcgggtctgtgatctattattgtctatctactacaaaacaatatttatttcatatatatatagtatgcttacgctcctcgacgtctgtggtttagaagatatctcttgtgtgtagtcttagactactccacccatcgtcttcgtgtggtggtgtagcacgcatcacaatgtattctcgcgcccgcgcacccacccttcgtggtgtgtatatataaccagtaatgatagtttctatctctctctcgctccgcgcgcgtctatctctgtcgccctatctgtattgatattccttgcgcgtggatgtttgtttatatataagggtgggtattcttgttttctctggtctggcgtggtgtgtgtgcgtacacacaaacattttgtgtgtccaccgcgctgtttcctctcgtcttgtgctcctcggtgtgggtgtttctaatttctctcttggtttctctcctccttcctcctcccctctcgcggctctcctccctgttgtgtggtggggtgcgtcaccacgggggggcgccccccccgcggctcttgttcggataatgtttttttttttttttttggggaaagggaaaagaagaaaaaaaaataccaacacacccccaca

SEQ ID NO: 651677 - DNA, 102 bp, Homo sapiens
  misc_feature (2)..(2): n is a, c, g, or t
antgttcgtccccgctaccgcagccatctcatcgtgtggtgctgcagttgtcccagaggtgtctgcatcaacgctgtcttctatactcctctcgcagtctct

SEQ ID NO: 651678 - DNA, 254 bp, Homo sapiens
  misc_feature (33)..(33): n is a, c, g, or t
agtcgacacagcaactggctgagtctgtggaanaggccattgaagagaaaaaataccttgctggggcagaccttctactgtgtgaattgtgttaccctcctatcattcagagtggtggcactataatctccagttcagtgtggtgagtgacagaatcatatgcactttggtgctatcacttgtagccatgagtattcgcttccagtcttaactggtccaaccttgttcggccttttgatggttgatccttctca

SEQ ID NO: 651679 - DNA, 400 bp, Homo sapiens
  misc_feature (400)..(400): n is a, c, g, or t
aaaacatgaatctaaaatattcagcttgatgagttttttcaattgcttatactcaggtaatcaccaacccaaacaacacataagcatttcttctgccaagaaagtttctcccgccaagtaactttctccctacctctctacaatgttccataatccaaagcataaactttctaatttccagcactaggttagtttgcctatcattgggcttcatataaatataacatacaatacgcactcttttttgaagttttttatgttggtataatatgtataacatgaaacttgccattttaaccattatttatacaatttggtgtcatttattacattcacaatgttgtgcccatcaccaccgtctacctctttgtagctcatttcattttaccagcctactgcn

SEQ ID NO: 651680 - DNA, 282 bp, Homo sapiens
  misc_feature (244)..(244): n is a, c, g, or t
acgtacccaacagagtctgaatgtcgcaattctgagtgatagagcatctttgttctaactaggacatcttaatgggcttctgggtagcttcaaggtggggactattcacccaaaagacacgagctaaattgaaaaatgtggaactttcagtcccaccctttgacctctggagattggaaaggggctgaagattgagtttaatcagcaatcagtcatggcctcataatggaatctctatacaaancctaactgatggctggagtatggggagagttcagagag

SEQ ID NO: 651681 - DNA, 339 bp, Homo sapiens
gcgtacgagacgattgacgctagaggagcgccggcaagagcgccccaagagcagtaccttctaacgtagagctgcatgctggactaccagcaggcacacacgtgtaaaggggcccggagccaccatagggcttctgaacagtcagcacattcggagaatcgacctcgctggagctcaggaaccttgatttgtgaggcagcgcctgcgacggacacacacagtcctgcggtaacagtgacgtgatgcctctgaccatatgagacttgtgaaggtcatagcctcttctgtaattggccccggactgtacacgtcaagggcaaccacgctggacttcagact

SEQ ID NO: 651682 - DNA, 449 bp, Homo sapiens
  misc_feature (426)..(426): n is a, c, g, or t
  misc_feature (449)..(449): n is a, c, g, or t
tgtaatgctggaggcctggacccatggggaagtcctcgacccttgcccagttcaggagaggcagggcctcaacccttccccagtttatggggcctgcagctttgccagtgaaagaggaaagctggaaagagacccagggctgtgggtcccgcaggaggtggggagcggcccctccgttgtgggaaagcaactgccgcaggccgggctgacctcatgggttatgcaacccaggccggcccgggggctgcagggagcagctcccattgtgtaggcctgcctggggatcagcagctcaggctcctaaaccacaacccacgtggctcccgatgcctcctgacccgtttagcagaaggtggacagctttcccgctcaccctcctcctgccctgggcgtggcagggaaatggagtaattaaagccttttggngattatcaagaaactgctagatn

SEQ ID NO: 651683 - DNA, 235 bp, Homo sapiens
  misc_feature (14)..(14): n is a, c, g, or t
  misc_feature (28)..(28): n is a, c, g, or t
  misc_feature (37)..(37): n is a, c, g, or t
  misc_feature (105)..(105): n is a, c, g, or t
  misc_feature (147)..(147): n is a, c, g, or t
  misc_feature (187)..(187): n is a, c, g, or t
aagttgttcatggnaggcatttatcctntcaataatncaaacgaggcttctggaataaccagtgccccattccatcagagtctttgcgcgactaaagcctccatntttgccaatttcaattgtttgggattctagcactccttaccngcagtaatgcccttgctgcagacaacaacacctggactgngagatggaccaattctcaatggcaatccagggaaagagtgatccttct

SEQ ID NO: 651684 - DNA, 92 bp, Homo sapiens
gttttaagggggttttttggggggccccccccccccctttggggttaaaaagggccccccttttttgggggttttttggggggggttgggga

SEQ ID NO: 651685 - DNA, 285 bp, Homo sapiens
taggttctacgaagacaaaggactcggactttaagaggcattacgtgcaacatgaaagagctaggacaccaaattgggaaaattcagcataatctacagggtgaccatctcactaggctggctttataaccgtggtgtggccatctttaaagggcctaaatgcagcacagtcacacgtgtctacgactggcgaaaaacagtgagtgcacaggagaactgagtacaaataacccaattctcccagcctccaaggtgaaacctcatcttagttacaatacaacggca

SEQ ID NO: 651686 - DNA, 83 bp, Homo sapiens
atcagaagcaaatatggcaaaatagtatgtaaagggcacaagggcatttataatattatttttcagcatatctgaaatatttt

SEQ ID NO: 651687 - DNA, 875 bp, Homo sapiens
caagatccacagtgtatgctggcatcgatggctattccacgtacagcagcccattccactttagagtgttagatgatatgcacctgggacacaaggactagtgtatgacatgcccgtagggggtagcacgctgcttcgacccggatctcggaacgatcgctctgccgaccataacagaacctgaggtgccggctcgaaaaggagccgtcaccaccgactggcacacccatggtgatcaaagttagctacacacctgacactttgagctatcgttgcctaatatgtcgtagttatgagaatggatctgagactcacaggagagaacggaatgcccaacagactgctcctatagtggtaccacatacagcttatactagaccttgctgatcagacacaagttgcgtgcatgagatcaactgcacgatacctgcctccctaattctgacagggtattcgccgtggaatggtattaagctagggactacgaatatgagccgttccaggcttaaggcttgatacatcgggaacctggttttagcatccgtgctgaagatacactcctttgattggaaaggcaagcctcccagggtacatgctccagaggacctttggtcaaaaaatgtaagtgttggagaaattacccgctggatccggacttcatcgccttggcccaattgtgttgtttcacattaggcgggtccgaaactaccctgaactgtaacactgaaagtggggcatacgcgggcccttctctgtccgccccgcaacttagggcgacgcccagtgggggggaaaacgcagtgttataactacgtggaaagatgtatggacggaaaggaggccctatggctttgcaacaactgatatagaccggg

SEQ ID NO: 651688 - DNA, 503 bp, Homo sapiens
  misc_feature (103)..(103): n is a, c, g, or t
  misc_feature (115)..(115): n is a, c, g, or t
  misc_feature (138)..(139): n is a, c, g, or t
  misc_feature (266)..(267): n is a, c, g, or t
  misc_feature (269)..(269): n is a, c, g, or t
  misc_feature (287)..(287): n is a, c, g, or t
  misc_feature (396)..(396): n is a, c, g, or t
tgggactatcgcccgtgataccttctgcgtaatgaattgacctagaaataactttgtcaaggtagagcctacagcataagtatccccgaaaccagacgagctncttatgaacagntataatagcacacccgtctattnngcataatattgggaagatctataggctgaggcgagcaaacctaccgagcctggcttatacctggttgttctctatagtaatcttagttcaactttaaatttgcccacagaaccctctaaatcccctnntnaatttaactgttagtccnaagaggaacagctctttggacactaggaaaaaaccttgtagagagagtaaaaaatttaacacccatagtaggcctaaaagcagccaccaattaagaaagcgttcaagcncaacacccactacctaaaaaatcccaaacatataactgaactcctcacacccaattggaccaatctatcaccctatagaagaactaatgttagtataagtaacatga

SEQ ID NO: 651689 - DNA, 473 bp, Homo sapiens
  misc_feature (1)..(1): n is a, c, g, or t
  misc_feature (68)..(68): n is a, c, g, or t
  misc_feature (140)..(140): n is a, c, g, or t
  misc_feature (145)..(145): n is a, c, g, or t
  misc_feature (162)..(162): n is a, c, g, or t
  misc_feature (204)..(204): n is a, c, g, or t
ntctacctctgtgtggggcccacaggcccagttgagtcataaatccataggtcctgggtggggtttgncagttgaccggaatgtaaaaagtcctgaaaaaccattctccaaaaggcccaaatctccaagttcctaccaanttagnggatgttaatcctaccnggaaccaattgggggaaagtcacaaaatcttggggacctctngcccacaagaccctggagcagtaaggggttatagaaaccacatctttatttgagtagaattcaaacgcaattttcctcccataatcttaatcttgtggcttttcattagttttatatacaggttttggtccctgaacagtgttgggggatagttttagggagggattgttttcattcttgcttcaagtttaaagtgtaaactaattttctcccatggttagcttggcctatgcccaggaatgaatgaggacagccagcctgtgaggcca

SEQ ID NO: 651690 - DNA, 536 bp, Homo sapiens
  misc_feature (205)..(205): n is a, c, g, or t
  misc_feature (221)..(221): n is a, c, g, or t
  misc_feature (274)..(274): n is a, c, g, or t
  misc_feature (301)..(301): n is a, c, g, or t
  misc_feature (376)..(376): n is a, c, g, or t
  misc_feature (418)..(418): n is a, c, g, or t
  misc_feature (435)..(435): n is a, c, g, or t
ccttctgcaaatttattttccagctcagtgtttccaatggcttttgctgcttgacacatttgtcgaaacaatttttccaggcgcctcatacaacgaattatgctgccttcaaagacatctgtcattttgcagaaatgggcaaatgtagctccagttgcccaggtatatactacatccattaagtgagggttaaaggagctgcggnaggtttccgtaggggncgggggttggcttctggtgaaacttttgcaattcttttagacaattcgtgganttgccaaaaggtcctgctattgttctnttaaattgggcattttaactaaaattgttctggaaaacaaatctctctggagaaggtttttgcccgattttgcanaaaagttagtgggtaaggggcatttaaaccttgtggtggagnagacggggcttgctcancagtgtgaatgctacgggcctcttcgctcctagcaggtgtgttttacctccgaaaaaatggtcataaccccacccttcttaagacaaccgtatgtgtcaca

SEQ ID NO: 651691 - DNA, 829 bp, Homo sapiens
  misc_feature (188)..(188): n is a, c, g, or t
catggcggcttcagtgagcagagctgggcactatccatgccggcggatgtgcagctagcgcaggaagccatttcatgaccgttctcacaagtgtagtgtgcataaccaacatcagaagacagtagtagcactcgtgtatctaaacattgcagcacaccaatccatgaattgcagaaagtacatgtacncgctggatccatgtagtttcccatcatatcacgtatccaagtatttgacacacaccaagttcgcagaggtatcgtgtccagacactacgcactcacaatgcagagtcttcactcaggagtagcaccgtcacacgtcgatctagagagccagaagattttcagtggcgagttttcattcactaatacatgctgagaatggctattccacgttggaaccacacagtccaacgaaattgcatagcattggacgaaggacgccgcggtacaaacaaggcggttctttggcacatgctttggttggcaccacacatacgtttcacaaatgattcatgcgtaacgtcggcactactagtgcaaggccaatacatgcaatggcagggggcgccctgagacttgtctgaattcgagcggccacgggagttatagcaatctagctggtgtgcagctgcacacacgttggtggacgacgaacggcggcactacctagggccggatcttacaaccgacaagaggaaaggggcacagaacccctcacacatctagggtattacagcgaaaggaatgtaatccccttgacgaccctgtgttcccacgaaccgcgttgggtgttaattttacaggaccgtcattgtcacctctcg

SEQ ID NO: 651692 - DNA, 152 bp, Homo sapiens
agttcacagaacatctaacagtgcccctcaagaatagtttactcagattgtagatacattacatctccatgccagtctacagtcattaaatacctctaacttagagaaggcaaaaagaaataaaatttgcatattaaaaaaattgtgcattc

SEQ ID NO: 651693 - DNA, 1030 bp, Homo sapiens
cgggaacggggagcgcggctgcagcacccctgagccgcgcggacctccgtcgccccgggcgcacccgcccctgggtcccaggtgtgtccgtctcgggacggtcgataccctcgcagagccggggaagaggacggaggggggcccagaggaaggagggactcagggcgcgcgcgccatgagccctgcgagcacacacgacgcgcggtgcggcgaatgcgctccgtggccgtgagcgcccagctgtggggcgggggccggggtccatgcgcggatgtccccactccggaccggagcactgccggtgacaggagagcggtggagtaggagagggacagcagcagccataggatctccattagactcaggccacattggggcagggtcagacaaacccagaaggggaacaggaacaagaggaagcattagaagaccctcagagggacctggggcacctacacaccacgagacaccaagtgcttcatgaaagggaccaccaagagacgcatgcccggcgacagggcaccgtcagagaccaaactgggcacccggagaaggggataattgagtgaggcactggccatagagcttcgaccccaaggggccaatccgcagggacttgggccacccagaaaagcaaccatgggagtaaggcgttgcgcacaagaaagacgcagcgtagccacccagctaagataaccaagaggggcccgtaagtgggggcccccaataatcgagccactctaccccgaagaccaccatcgaacaacagagccctatgggacaaacgggacaacggaggcgccgtgacaggaagcggaggacggcatcgaagcttcgagggaacccatagggagaacacagcacgacaacaattcacgcgaagctacctggcgaccgccgggcggcgctggcggaagaaacagcaggcgaaacatggcgtaacgattgccacgaagcccgagttaccgctcgagccagggagaccggactgaatcgccgtacgcactcacacataccggaactgatcacg

SEQ ID NO: 651694 - DNA, 614 bp, Homo sapiens
gggcccttgcggagactcacccccttcagaggtcgctgcccccaggtcagctcttattgcgggccgctccgacggcggtccatcctgtcagggactatgcggcgcaaacatctccttcgccaaaaacaggggccgcccccgggcgcatcgtggcggtcattggcgcagtggtggacgtccagttttatgaggggctaccccccattttaaatgccctggaagtgcaaggcagggagaccagactggttttggaggtggcccagcatttgggtgaaagcccagtaaggactattgctatggatggtacaaaaggcttggttaaaggccaaaaagtactggattttggtgcccccatccaaattcctgttggtccttaaaccttgggccaaaatcatgaatgtccttggagaacccctttaaaaaactgtggcaaaaactgataagctggctgaaaagcattcatcgtgaggggtctttgtcctctggactgtctctctccctgcccctaacccaaaaagcttcatttttttgggtagggtgcccaaaagccttgattgaaaaaatattctttttgaacagtatttaaggtttccaataaaatggaccccccccca

SEQ ID NO: 651695 - DNA, 267 bp, Homo sapiens
ctttttggccccccccccaaagaacgtgggggtccggttttttttgccccttccccgcccctgccgaatggcccccgtgggtcccttgtccccccctgccctgggggcccgcttgcctttttcagctgcccccccccccctggggtggccccctccccccccgtggaaggggccggggtttgcccttccccccccttcccccccccgggcccctaacctggcccttggtttggcttttttttaaaataaaattgtggggggggtcca

SEQ ID NO: 651696 - DNA, 225 bp, Homo sapiens
ggtgctctagaggatcctctcctaccccacgtacagtaaggagcagacaacgtggcacaggccaaatagaaaacctatttgcataataataagattagggtggggtggccagcttcttccagtgctatgtaaacgtctcaccccggtcaaacaatcttcgggccctatgtaaatcagacaccgcctcctcaagccagtctataaaacccccgtggggtaggaggt

SEQ ID NO: 651697 - DNA, 1610 bp, Homo sapiens
  misc_feature (5)..(5): n is a, c, g, or t
  misc_feature (9)..(9): n is a, c, g, or t
  misc_feature (101)..(101): n is a, c, g, or t
  misc_feature (109)..(109): n is a, c, g, or t
  misc_feature (113)..(114): n is a, c, g, or t
  misc_feature (275)..(275): n is a, c, g, or t
  misc_feature (279)..(280): n is a, c, g, or t
  misc_feature (291)..(291): n is a, c, g, or t
  misc_feature (562)..(562): n is a, c, g, or t
  misc_feature (693)..(693): n is a, c, g, or t
  misc_feature (776)..(776): n is a, c, g, or t
tcatngctnagggtttaatttcctcaaaggagccacgccatgggccttcccaaatacctccgggtatccttccaatttccaccattcccaacgggtcaganttccattncagnnttcctccaacctcagaccaaccacttttcttttcaaaagctcagaccttccaaattattttaaaaatgtgaattaaatgtgttaaattaccaactttctcacttatttcacgagaaagaggggcgagcttagaaaagagtttacacctcgtggtgccacanaganncgtggggaacnaccccgcggcttcgttagacaagccgtggcgaaggaactcctctccttgtgtggtacccaatttctcgaagagtctcccacgggtgaaaagaatggaggctcgtgcaagcgggtgtgaaagtttcgaggtgtagaacgaggtttcagaggggttcaccccaccagcgtggcgcctttcttctcgctgcgagaggagtgtgtgctccgtgcttgtggcaccccgagtgccgcaaagcctgtgggcgtctccgagggggcgcacaagggggcngagtttgtgcaaacagtgggcccattggggggcacacagcgtgacacccgaggctgtgagctttgtgagtgtgcttgtgcccactggtgtggccctccctgtgtgacagagtctttcaaaaaaacccgcgnggtgacaatcttccggaaaaagtctctgaggcaccgccgcgtgtcccacacagggtgttggcggcggcgctcttcttgctttnagcaacgcggtgtgtgtgtaggacctgttctgaagcaccttctacaccaaggggacaaagaaggtcttcctcttccaccagagcgggagacccaatcgtttggtgtgtgtgggcgcctcttgggggcggcccacacaatattacatctttggcgcccttggggttggggcgcaaatggtgttgatttctgtctaacacgcggccccctcaggagtggggcctaacgcagacaattcacgaggggtcccacccccacgaggagggcacacccacgcggtcggcgtcatcatgtttcccctttttaacagcttccctcttgtggggcgcgccccaacacaagcattagccaacgttttgcccccaacgctttgaccaacaacttgctcttctgtgagcaagacgatgggttataggacatacccctccatcgctctgacaacatcgtctcccgggacaaccccccccagttggggatatcagaccgcggacctatacggcccgagccagggacccctcgttgttctagggcggagcccacgcttctcccgagggggaaaacgatcccctcttttcaccttaagctctcgctgtgtgaccaccaggtggtgggcacaaaagaaagttggagcgtacagaggatttctctcatctacgtgcgcaccccgtggtagtacacatcctcggacgagcgttcccggccaaactgtctctcgacatagacttttcggcggccccctattgcttctgtcctccagaaaacccatcatcaaacggggcttcgtgataccacaacgggtagtcggatagtctagcacatctagtgctgcgcaaagc

SEQ ID NO: 651698 - DNA, 121 bp, Homo sapiens
  misc_feature (55)..(55): n is a, c, g, or t
  misc_feature (71)..(71): n is a, c, g, or t
aatggcagttctatttctatttatttttgagacagggtctcactgtgtaatccanggctgagtgcagtggncagtcttgggcactgcaaccaccgcttgtcaggctcaagcaattctccca

SEQ ID NO: 651699 - DNA, 635 bp, Homo sapiens
  misc_feature (365)..(365): n is a, c, g, or t
  misc_feature (381)..(381): n is a, c, g, or t
  misc_feature (389)..(389): n is a, c, g, or t
  misc_feature (603)..(603): n is a, c, g, or t
aacgagtcaaccggatcggtgactgtggagggcgagctgagccctggccgccgcacaatgggccgcgagtttgggaatctgacgcggatgcgcatgtgatcagctacagcttgtcaccgttcgagcagcgcgcctatccgcacgtcttcactaaaggaatccccaatgttctgcgccgcattcgggagtctttctttcgcgtggtggccgcagtttgtagtgttttatcttatctacacatggggggactgaagagttcgagagatccaagaggaagaatccagctgcctatgaaaatgacaaatgagcaacgcacttcgggatgacggttccctggtcttctgaaagacctttctctggaaganggagtctgcattgtangtgtctcnaaagacacaataaacttcctattggcctgcatagtaaaaaaaaacaaaaaagcaaataatgtacgactcccactcataaaacaagggcgggcccaccccccaagacataacagcccaacgcccctctcataacccggtccgttctcaatgaaccgctgcgcattttttgatctccggcacacctttttaaaccgcccccaaagcggggctatcnttttaaattctcggagactgtggaaccctctc

SEQ ID NO: 651700 - DNA, 256 bp, Homo sapiens
gttcttgaaaacggccttcgaaggtaggcaacgaagtagaacggaagctgattatctgagagatgataactgtccaccaagatcgagcagagtagagtaacttgatatcatgggactaaatgaactaatgaggataatattttcataattttttatttgaaattatgctgattctttaaatgtcttgtttcccagatttcaggaaactttttttcttttaagctatccacagcttacagcaatttgataaaatata

SEQ ID NO: 651701 - DNA, 741 bp, Homo sapiens
gggcctccgtgctgcgaagtatctcgctagccctgcgcccgactagcgggcttctggcaacttggcagacgcagcttacagagactcaccagccgagcgtcattgtcgtctttctggtaactcattcccatgcagatcagaacctcttcgaagaacagaagaaggtagatcctaccagaacagaccactgaagcatcggagcgcttgaaaaggaagatccgaaaactggaaaaggctactcaaggagctaattcctactcgaacgattcttattacccctcctatagagttgcttggcatgaagagcaagagagctgggctctcaggtggagcctcaccttgtgaggagactgagaggagagctctgctgtctgaaagcaggtggtcctgtgtagcaagcgagtcaccgagctgtaaagatggagagggacaccatcagtggctatgctagatagcccagcttatggaatgcctctgggaggaactgccaacttggtatagtccccgcatagctcctatcgctgaggccatcaggtcgggatcctataccttgtttcccctttgagaaggagaggttggcacactgacagcaccaccgatccctaaactaccaagccccggtgcaagggcaggtgcaaatgactttcaccaagtggtgtacacacaagtggtagcttgtaaagaagataagacttgtcaggctgctatacttaacttgctggccctgagagtatgaatgac

SEQ ID NO: 651702 - DNA, 329 bp, Homo sapiens
atggaaagttcatacttagctgttctagccccacccaagaattttcgccatctgctgttgttacaccacaagattctggtagttgatttcgacggcggttccacacgacaactagtgctatgtcgctacaaacagtagggggtttgcatcaggtatgacgcctgttcttaaacgaactttctgtggtgaaatttataagtggcgagagccacgagaaggatagataagagaccacaaaccacctatgcggcgttgggtcacacaagcacacaactatccccaccctcttgggggaaaattccattaaaggtaattcccccaaaaaaaca

SEQ ID NO: 651703 - DNA, 625 bp, Homo sapiens
gctgatcatccagtcctggtcctgatcactgggccctgattctaatcactcagacctccttttgatcactgaaccctagtatttatcactgagccctgatcctgatcgttgggccctatttctggtaactgagctctgatcctgaccactgacctctgttcctaatcactgagccctggaccagatcactggcccctggtcctgatcactggcccctggacctgatcactgacccttgttcccgattgctgagccctggacctgatcactgagccctgttcctgatcactaacccctattcctgaccactgagccctggtcctgattactgagccctggacccagtcaatgacccctgttcctgatcactgagccctggaccaaatcactgagccctggaccagatcactgggccctggtcttgatcactgggccctggtcctgattactgagccctgatcctgatcactgggccctgttcctgaccactgagccctggaccagaccacggatccctgttcctgatcactgatctctggttcttttattatgcatattcattttgaaatctgattccttttctgagcatgtatcagtctgactagacactgagtcctgtctgaaa

SEQ ID NO: 651704 - DNA, 454 bp, Homo sapiens
  misc_feature (132)..(132): n is a, c, g, or t
  misc_feature (153)..(153): n is a, c, g, or t
ggattcacgggcgacgtgaagaggagggaatggagtgatgcgtttgaatcaggcatagtctcgtacgtgtcatccaaggagcccggcacagaacccgtgtcacccccatgtcacccgcagaccccgcgtcanccatagatacgcacaccccgngtcacccccatgtcacccgcgtgtcacccacagatacacggcccccgtgtcagccacagatacacggcccccgtgtcagccacagatacacggccccccgtgtcacccgcgtgtcacccacagatacacggcccccgtgtcacccgcgtgtcacccacagatacatggcccccgtgtcagccacagatacatcggccccgcgtgtcagccacagatacacggacccccgagtaaaccgcgtgtcacccacagataaacggcccccgtgttacccgcgtgtcacccccaatacagcgacaca

SEQ ID NO: 651705 - DNA, 659 bp, Homo sapiens
gctgatcatccagtcctggtcctgatcactgggccctgattctaatcactcagacctccttttgatcactgaaccctagtatttatcactgagccctgatcctgatcgttgggccctatttctggtaactgagctctgatcctgaccactgacctctgttcctaatcactgagccctggaccagatcactggcccctggtcctgatcactggcccctggacctgatcactgacccttgttcccgattgctgagccctggacctgatcactgagccctgttcctgatcactaacccctattcctgaccactgagccctggtcctgattactgagccctggacccagtcaatgacccctgttcctgatcactgagccctggaccaaatcactgagccctggaccagatcactgggccctggtcttgatcactgggccctggtcctgattactgagccctgatcctgatcactgggccctgttcctgaccactgagccctggaccagaccacggatccctgttcctgatcactgatctctggtcctgattattagatcctgatgctagtcactgggcactgggcactgggccctgatcctaatcactgaaccctgctcctgatcaatgaaccccggccctgatcaaagggctttgctcctga

SEQ ID NO: 651706 - DNA, 160 bp, Homo sapiens
tacaatactcacttgctagttgaaatatgatatgattcttgatacagcttctctttaagctcttgttggtataaacatagtaactgtccctcttaagcaaatgaggcacacagggcttgtatgaccactgaaaaggacgaaaagcgacacacggttaata

SEQ ID NO: 651707 - DNA, 227 bp, Homo sapiens
tacacctagctaagtttgggctttctaaatatcatttcctaacgaagaggaaccagggctcctggacaaaggggcggattacagttccctggcagagaacatacaacgtaaggcttagaatatcttgtgtaccagaaagtagactatgggagatacactatgatataggagttggtcccacaggtcaaatttaggacaatctgaacatgaagaagaataatcgtagt

SEQ ID NO: 651708 - DNA, 117 bp, Homo sapiens
cacaagaggtagaatggggaggcaagatctcaggcaccaggcaggaggtgccttgtaagctaactgggcgtcggttacatgcagttgtcaactgtggctctgtaactcttcaatagg

SEQ ID NO: 651709 - DNA, 786 bp, Homo sapiens
tggatgggcccagttgtttatttaaaaccctgatggtccaaaaacatggggggtgcttcacacctttttcactggggatggtggcgggaggtgtgaatagggcaagcatttcttaccatttctcctcatgcaacaagatggtagaagggcctccctcaacctcaaaaagcaacaaattggtaggtgggacaggggaggggcatgggaaaggtggaagaagggaaaactccctaagggcaaattctcaatataagaaagagggcgataaaaagagatctctccaaaatatctcctctataagtggagcagggtgtggtggcgcacgtgcgagtgtgccctcaaggtgccctgtgcgataaagagtgatccggtgccctctcctgtgtgctctctctctatctataacacgccacctctcacaactatctaaaagaagatctctctataagtggagagatctctctccccaggtgataagtgagacagagacatagtggagatatattatctctctaataatcttcatatatagcgcgtgaggacacaaaatattataaacgaggagtagaaaaataggcggcccacacaatgaagtagagagaagaaaagaaggaaacaggagatggagatattcgagaaggaggatgatgacgaagaagttgttctccaagtgtagaagacgtagcgcctacaagtttattcttccacactagatgcgggccccccgtgtggagatagtagagggggcatcccctcacaaaaagtggtgcgaggggtcgcagatgg

SEQ ID NO: 651710 - DNA, 374 bp, Homo sapiens
  misc_feature (19)..(19): n is a, c, g, or t
  misc_feature (32)..(32): n is a, c, g, or t
  misc_feature (36)..(36): n is a, c, g, or t
  misc_feature (95)..(95): n is a, c, g, or t
  misc_feature (97)..(97): n is a, c, g, or t
  misc_feature (126)..(126): n is a, c, g, or t
  misc_feature (148)..(148): n is a, c, g, or t
  misc_feature (166)..(166): n is a, c, g, or t
  misc_feature (176)..(176): n is a, c, g, or t
  misc_feature (204)..(204): n is a, c, g, or t
  misc_feature (210)..(210): n is a, c, g, or t
  misc_feature (213)..(213): n is a, c, g, or t
  misc_feature (215)..(215): n is a, c, g, or t
  misc_feature (218)..(218): n is a, c, g, or t
  misc_feature (231)..(231): n is a, c, g, or t
  misc_feature (241)..(241): n is a, c, g, or t
  misc_feature (265)..(265): n is a, c, g, or t
  misc_feature (282)..(282): n is a, c, g, or t
  misc_feature (295)..(295): n is a, c, g, or t
  misc_feature (302)..(302): n is a, c, g, or t
  misc_feature (325)..(325): n is a, c, g, or t
  misc_feature (337)..(337): n is a, c, g, or t
cagttaggggttttggggngtttggggtcaanaganaataggtaggttccagttactcttcccacaagttcccttaagtcttgccctagctgtgntntgccaccttccagactgactcccctctgnaaatacctgcatttcttacccnggtgagaaaaggacaagnggtgtaggcnccaatgctgctttcccaggagggtgaanatggtnctntnctnaggaaaggggatncagagccctncccagcacctccacctcctatgcncctggatccctaggctntgttccatgagcntgttgcnggttttggtactttagaaatgtnactttttgctcntataattttattttattaaattaaattactgcagtgg

SEQ ID NO: 651711 - DNA, 1538 bp, Homo sapiens
tgtgccattactgtgcctggtggtgtgcctgagcatgtggcatgcagagagtggcctcggagggaatgccactgccacctgatgacatgcccaatgcatgcaatgataaaccctgcttccagccctgaaccctgcctgaacctttcatgcatatagtgattggagaacctacttcatgtgaacaaaagagcagaaaaccacacataaccaaaagagttgttacgacacaacagtggcaacaaagtgccatctatatttcccttgggtcacattgggtcaagtggtgtcctttctacttgggttcactttcccgtctatactttgtgcgatccattttgtgttccatttgatgtgcatagcctattcgggcgtatactactggtccgcagcgtgttctgcttgttcgaatttcaccggggttcccctggcattcggatctctttccaaatttatttccccttgtgacatgggtggacaaccaattaccaaaggcggcccatcactaaataagcacatggccaccaaatcacaagacagcggagggttccagtttggaacatggcctctggtggcctacctccaatggaggtagcttcccctattaggaccacataggtatgggacccctctttagggaaaaggctgccacccaaacggtttaccaattaccagccatggaggaaaaactatgttactcgacactattttgagctgcgattaggagaaacacacaacggccacgtgttgactcatttagtgacaccccattgttggcaaacaaccagcccaaaacttttatccgctttggagtacttatggctttaactcagccacctttaagagtaggacatattgggagctaggggatggacatgcaaaagcaacgcgtttttcccccaatattcagtgatgcgagcgcagcaggtgtccgcccaacactcatttcctcggagaccggtaacacgtgactcggacgagcacacccggcatcagcgacggacgggccaggacctctatactacccagcacaaccattccctacctaacacctactccctcgtcgacgacgccgacaaaaacaactattcgcgcagcaaacaccccattacactccccgacgagcgaccaccttttcgtgtacaacacatcacaatggaaacacattactcgtagcgctctccacctctattcatgcggcgcctcccaaagcaaacactatttattgactcccacaactgcggcccgagcgaagcatttcttccccccattgcggccccaatcgggacagacgccccaacgcccccaacaacaggtcagtgagacaacaaaccaccacggacaccccaaacaccccgccttgggggcacgtaccccacccccacaaacaaaacagcacaaactcccctcaggcacgccatagcaacaccccagcactgcgtgcccctacactcacccataacacacccgcgctctctaacatcacacaacacaccacgaccgaggccgccaagtgccacccacacaacaagcacggcgcg

SEQ ID NO: 651712 - DNA, 394 bp, Homo sapiens
  misc_feature (78)..(78): n is a, c, g, or t
  misc_feature (97)..(97): n is a, c, g, or t
  misc_feature (117)..(117): n is a, c, g, or t
  misc_feature (155)..(155): n is a, c, g, or t
  misc_feature (363)..(363): n is a, c, g, or t
  misc_feature (376)..(376): n is a, c, g, or t
ccaatgctgttgtgaacatccgtggacaaggaactgaacctccctgcttttcattctccttggcataaacctacaacnaggaattgctgggtcttanccggtaattctgtgtttaanttttggacgaactgccagactgtttccacagcagttgnactattttacatccccaccagcgttacacaaggattccaatttctctacatccttgccaacatttgctattttctatttttttttaataatatccatcctaatgggtgtctttttttttttttaaaggaatggtttaaacaggttaccttcttactcctcattgcatggctttagttggactacataaggacccctctccctattggncaccattgaaatngttcagggcaaaaataat

SEQ ID NO: 651713 - DNA, 884 bp, Homo sapiens
ataaagcataaagaaaagcaccgcggtgtttactacggacgaggggaagctctgaggtccggggcttccggaggtcgcggagataggaattggagcagagagaagggaccatggcagccgtgggctttgaggagttcttcagcgccgccaggctcagagttggcgttgccttcccctatttggtggccacatcctggcagagctgagctaggagacggaagtggcagtatagtgtcaggtggtctagggcaggcttcaagggctccgggaggcagaagatgaagaggaaagaggcagcccgggggtcggccggcaggcggcccaggcgggggaattaaatcgccagcacaagtcaccaggcacatagggatcgcgcgactgaccgaggacgatcgacgccagggtgaaacgaaagcggagtccatgaacgcagggcatccattcagggtgacagaagcgcataccctcgagaagggccatgcaggcagggacccgtgaggtgattccttcatgagaaggtgctgggacatcctacgggagaacatgaattaacaccggggtgaccacagacacaatgttttcaacccaataatgttgccaggagacggattagcaggcgcaagacccaaggggccacggggaagttgacacaccaaaacccaccaaagggcaaaacacggcgggcggcggactattaggcggacacatcacaacacaggcaacaaggaagaaaacagttggtcacaagcggccccaaggaagcagcgaacttccattggacaccccccgcgaggaacacccagggccaagcaccaagaacccccccggctgcaagggaggccaacaagatgcgggcgcgcaacaaggcggagagacgatgacaa

SEQ ID NO: 651714 - DNA, 366 bp, Homo sapiens
tacccgtgataacataacttggttccctgaagtgagctgtgcatggaggcttgtccatccctcacaggaccaaacgaatccgtggttatgattatgaaagcaaggaatttaatgcggacgcacatcgtatgcacatcatgagccagaatgctgcagagcacatgcactacttaatgttagaagacgcagatgcttacaagaaacagtgtctctcagatacataaagaacagcgcaactccagacatgacgtagctgatagatacaaaagctcatgctgctatacgagagaatccagtctatgaaacgaagcccaacaaagaagttaaaaagaagaggtgatgccaagctatgttataccgagaacc

SEQ ID NO: 651715 - DNA, 401 bp, Homo sapiens
  misc_feature (53)..(53): n is a, c, g, or t
  misc_feature (66)..(66): n is a, c, g, or t
  misc_feature (320)..(320): n is a, c, g, or t
ccatggtgcacctgactcctgagaagaagtctgccgtactgcccctgtggggnaaggtgaacgtgnataagttggtggtgaggccctgggcaggctgctggtggtctacccttggacccagaggttctttaagtcctttggggatctgtccactcctgatgctgttatgggcaaccctaaggtgaaggctcatggcaagaaagtgctcggtgcctttagtgatggcctggctcacctggacaacctcaagggcacctttgccacactgagtgagctgcactgtgacaagctgcacgtggatcctgagaacttcaggctcntgggcaacgtgctgtctgtgtgctgccccatcacttggccaaagaattcaccccatcagagagagctgtaaaggatctctg

SEQ ID NO: 651716 - DNA, 837 bp, Homo sapiens
  misc_feature (104)..(104): n is a, c, g, or t
  misc_feature (147)..(147): n is a, c, g, or t
  misc_feature (321)..(321): n is a, c, g, or t
  misc_feature (541)..(541): n is a, c, g, or t
  misc_feature (644)..(644): n is a, c, g, or t
  misc_feature (661)..(661): n is a, c, g, or t
  misc_feature (737)..(737): n is a, c, g, or t
  misc_feature (797)..(797): n is a, c, g, or t
taaggtttaatgaattttattgttgatatctccctaaccctagacattgtacaggatctgtctcaactgatccccatatgagtctcgtaaacatgatccgtctnccttccgtcacaatttaaaatcgaacaaaaatgacaacgacgngatgattcgttgttattgtaccagatagacacactttgttgactaacttggagtggacttctgttgagaatttaatcgtagacaaaggtaaatctttgtagttgacgtagcaaatgattgaattccgaccgaaaagattttttattaggtatttataaaaagatcacaaacccnccaaaaataatacaatctataaagtgatcgtatgataattgtaatctgtacgtataaaccgatatccttctaagaattcgtatgtaaaattttttattacgtcgactccgtcgattggattttgattaggattttttaaactgtttttcgttcctgatgtaaacagctttttgaaatttgaaaacatgacgtattattctggtggttctcggggtaaccnattaataaaatcgagattgatttggttgtttgtaaatcttggacttaaaaagcaaagaatcgaaaaatccgaaagattttgttccaggatttttttgagtctnagaagaaaaaatctcgnacctaaatacaagtgaacttttcttttattttttctgtctttctattttaataactggctggacaataatagaccntagatacgtcttaggatgttaacccaaatcagattaactttcgaagaaatagttcgtccncaaaagagattagtacgatttgaaaaatttagaaaaatct

SEQ ID NO: 651717 - DNA, 464 bp, Homo sapiens
  misc_feature (72)..(72): n is a, c, g, or t
  misc_feature (401)..(401): n is a, c, g, or t
ttactgtgtgtttctctacctacctctcattctcaccttcttttcctaagctttttttttctctttaatttntccccctaggaatcctccctcaatttcaaagccctccttcccttctcctggctcttcccctctaattcccttctccttccaactttggtttctggctccttttcctcaactttcctttcacctccttaattccttctttctggcccaatatttggtctccaaattttcatatagttctgcctctttcttccccccgtctctgctggccccctaagcttcccctgttaaatcccctcttccctgctatatccacctgtcccctctctggcatccccagatcccagttctccccaagctgtggttctccctgtgctctccttgtcactggntgcccctcttgctctcccagcaaccatgctgctctgtctgccctggctccaaatccctccttc

SEQ ID NO: 651718 - DNA, 155 bp, Homo sapiens
gactcttacatcaggtgattggctcttttgtactctgtcccttatttctcaaaccggccaatgcttagggaaaatagaaaagaacctacgtgattatcgggggcaggttccccgataattagttttagaaattttaatttgcctgtctagaatgc

SEQ ID NO: 651719 - DNA, 1552 bp, Homo sapiens
actgatctaggattgcccaggaactgttgtcaactcacagagtaaaagtctccgctcagcctggagggcgccctcctggtcccctcctgtctgacatcccctcagcctagagggtgccctcctgatcccctcatgtctgacatcccctcagcctggagggcgccctcctgatcccctcctgtctgacatcccctcagcctggagggcgccctcctggtccccgtcctgtctgacatcccctcagcctggagggcgccctcctggtcccctcctgtctgacatcaccctcagactggagggcgccactccctgatcccctcatgtctgacatacccctcagactagagggttgcctcctgatcccctcatgtctgacatccacctcagcctggagggcgcctacttggagccccatacaagatcatgacaagtcacacatacagacaaagcagaggacgccacatcaaggagatccaaatacacagacaaagacaatacccacatcagcaactgaagggcgccacaacatgaaaacacaacctgaatgacaaaccacacagaagtaaccacaagacgcacccaaagagcagaagccaccacagaccgcgccaccagacaaaagccacagtccgcacaacgacgagacacgcaccagcactaaccccagacggccaggagccacaggcaacagccaggaagacaaacaacacgcgaggcaacaggcacaaagctccacacgcacaaccacaagagacacaaggaaagcacagacgacactgcacacgaagacaagagaagcagcacaccgggaaccgcgacgcaagcacgcaccagacgaagacaacaccagcacacagagccacgaaaaaaaggagcgaaccaacgcacaaccagaacacacactctgggaccctcagacacagaccacacacaacagacaaacacaccaacaaagccgcgcaaaaaccacaacaaaacacgacaacacagcacaaacaacagaacaaagcacccagaagggggccaggaaggaagcgcaaaaggaggaagggaacaaaagagagagaaaagagccagagcagcgacaaagcggagggcgcgggccgcgggggagaacaacaagaaggacggaggggacggagggcacgaagaggaggagacggagaagaggaaggcagcagaggcgggcaccaacggagacgaacgggggagggagaggcaggaaggaacaggagacaggggaaaggaagaggagggagagaaaggcagaagaagacacgaaaagacgcaggaaacagaaggaacagacgatgcaagaaacaggacagggcgaaaagagaaaggaaggcggcaggcaagccagacagaagaagaagcgagagcgcagacagaacgaaagagagagaggacgcgcgaaagaacaacagaaggcggacgacgagaagaaagaagacaggacacgcagaagcgaaagaaaggagaacgcggcaaaggacagagaccaagaagaaaagacagcaaacccgagacgacgaggagacgcagaagaaca

SEQ ID NO: 651720 - DNA, 473 bp, Homo sapiens
gggtgcctttcccttgcttgcatcgatattcagtgtttggtgacttcttggcaggcagacatctaccaagagatttgtattctttttatacctcctattcaccaagagaaaagggccattcaaaagtgagtttttcttttttttttttaaagtttaaaaagctatgatgtggccacccatggtggctcatgcctataatcctagcactttgggaggccagggcaggcagatcacttcaggccaggagttcaagaccagcctgaccaacatggcaaaacctttttactactaaaaatacaaaaattagctggccgtcgtgatgtgcccctgtaatcccagctacttgagaggctgaagcaggagaatcgcttgaaacctgggagatgcaggttgtggtgagctgagattgcaactctgcactccacccgggctgacagagcgagacttggtctcaaaaaaaagctgtgatgtga

SEQ ID NO: 651721 - DNA, 122 bp, Homo sapiens
  misc_feature (7)..(7): n is a, c, g, or t
  misc_feature (9)..(9): n is a, c, g, or t
  misc_feature (12)..(12): n is a, c, g, or t
  misc_feature (35)..(35): n is a, c, g, or t
  misc_feature (43)..(43): n is a, c, g, or t
  misc_feature (54)..(54): n is a, c, g, or t
  misc_feature (64)..(64): n is a, c, g, or t
  misc_feature (86)..(86): n is a, c, g, or t
  misc_feature (93)..(93): n is a, c, g, or t
  misc_feature (96)..(96): n is a, c, g, or t
  misc_feature (111)..(111): n is a, c, g, or t
ctttgtnancanaagtcctccaataaaaggaacgngaaacagntcctaggaatnggctaagganaggctaagcgaaccaaatgtcnctgaaantcngtcagatgaatctantagtgatgaag

SEQ ID NO: 651722 - DNA, 556 bp, Homo sapiens
aacgagaaaggaggagggcgctccaggcgactagctattgcagactgccattatcctctgttgctctgtctgcagccgacctcggacgtcttgcctgtgatcccacttggttcgcggcactataggcgtactgtctagcactggggctgtcatgttgttggttccgagccagaacgcttcagtactgctctgcaaggatatataataactgacttggtgtgcccgttataactaacacagaatatggtacaactgaacagtccagaagaaaccttccctaatcactggaagaccaattggtgaatttggtaaactcgccctgcagaagatatggaagaggaacaacgcatttgagaagatctaggaaaccactgatgagatgggtcgacattagcggcattgctgcttcatgacgcactgaatgctggggcagtgattggaaaaggaggcaagaatattgaaggctctccgtacgagacgtacgaatgccagtgtttcagtcccgagacatgcagtggccccgagcggcctattgagtatcagtgctgatattgaa

SEQ ID NO: 651723 - DNA, 1234 bp, Homo sapiens
  misc_feature (373)..(373): n is a, c, g, or t
  misc_feature (531)..(531): n is a, c, g, or t
  misc_feature (549)..(550): n is a, c, g, or t
  misc_feature (552)..(554): n is a, c, g, or t
  misc_feature (557)..(557): n is a, c, g, or t
  misc_feature (559)..(559): n is a, c, g, or t
  misc_feature (581)..(581): n is a, c, g, or t
  misc_feature (590)..(590): n is a, c, g, or t
  misc_feature (1099)..(1099): n is a, c, g, or t
  misc_feature (1115)..(1115): n is a, c, g, or t
  misc_feature (1131)..(1131): n is a, c, g, or t
  misc_feature (1206)..(1206): n is a, c, g, or t
tgaggtcaggagttcaagaccagcctgtgcaacatagtgaaatcccgtttctactaaaaaatagaagaactggctgggtatggtggtgcacgccggtagtcccagctacttgggaggctgaggcaggagaatcacttggacccgggaggcggagtttgcagtgagccgagattgagccactacactccagcgtggcgacagagcgagactccgtctcaaaaaagaaaaaaataaaagccatgtgttgtggcatgcagctgtagtctcagttcctagggtggctgaggcgggaggattgtttaagcctgggaggttgaagttgctgtgagctgtgattgcaccagtgtactccagcctgggcaataaagcagancttgtttcaaaaagaaagaaagaaatgagcatggtgggaatggggacagatggcagtgttaagtagagtggtcagggttggcctcataagtgaatattgagcaaaagtttgaagcaggtgatggagctggccaaggtgctgagggaagagcattgtangctgagtcaacaggatanngnnnatnanggaggaaactctctggtgtctnaggctctgnaaggaggccagtggagcaaagagatagagggagcaaagtcaatgaggaggccagggagttgctgggctgggatcggtacagattgtgtaagccctgggacgctattgctggggctttggcttttactctgactaaaatgggaaccaccgagggcttctgagcagagaggtgacatgatctgtctcctgatttaaaagcacgacctggctgccaagttgagaaagactatgggaagatttgggtagaagcatgggggccaagctgtggcaatatcctggtgggagatgatagtgatcctgaccggattcatggtggtggtgagagatggttagagcctggatacatgttgaagtcagtcagtaggatttcctgacagactggatgtgagctgtgagagaaggcagtggtcaaggttgagtttgattctgattgaattattaagtaattttaaaaaacactactgcctttcccaatcctaccaagtaaaggatgctagataaaagaaatcncaagtcaggccaggtncagtggctcacacctntggttccaacagtttgagaggcagagatgggagtatgttttaaggccatgagtttgagagcagcctgggcaacanagcaagacctcctctctacaaaaaaaaa

SEQ ID NO: 651724 - DNA, 806 bp, Homo sapiens
atcactcccttaaagttctaggtaaagagggcctgtgtgactgttcatgtagcctagtaagggatgtaggcacctccattctgcaaatctctaacccatcataattgtatgggatcggtcatggattgtacatgtgatcacataggcatcatatatgtccttggctagatgatagtagtgcgcatttttgtactgtgagagtttgcaatctacacacaatgataaatacaacagattgattacccgattcaagttataagctttatgataagcgactcccaggctcgcgttgcgccaccattcgtgctacccgtagtgtgcaatgcatccatcgtggtcactacaatatagctatcaacatccccttgtcctatgatataacaacaatttatactatagctccgcgagtcgatgaagtgtggaacattagcatgggtactacccagtctatcttcatgtccggcatcgtaggttgagccaacgtataaaggtaagggctatccatccattttgctgcaaatgacatgatttcattttgttttaatggctgagtaatcattcgttgtatatataccacattttctttattcagtcatctgctgatggacacttaggttgattccatatctttactattgtgaatagtgctgtaataaacacatagtgcaaagatttcggaaattttaacaaagaaacccaaaacaacaaacacaacaacaacgagcggcagacggcaaacaccaacagccaccataacgccaccgaaaaacaacgaacaaaaacacgcacgacaccaacacccaccc

SEQ ID NO: 651725 - DNA, 1147 bp, Homo sapiens
  misc_feature (373)..(373): n is a, c, g, or t
  misc_feature (531)..(531): n is a, c, g, or t
  misc_feature (549)..(550): n is a, c, g, or t
  misc_feature (552)..(554): n is a, c, g, or t
  misc_feature (557)..(557): n is a, c, g, or t
  misc_feature (559)..(559): n is a, c, g, or t
  misc_feature (581)..(581): n is a, c, g, or t
  misc_feature (590)..(590): n is a, c, g, or t
  misc_feature (1100)..(1102): n is a, c, g, or t
  misc_feature (1141)..(1141): n is a, c, g, or t
tgaggtcaggagttcaagaccagcctgtgcaacatagtgaaatcccgtttctactaaaaaatagaagaactggctgggtatggtggtgcacgccggtagtcccagctacttgggaggctgaggcaggagaatcacttggacccgggaggcggagtttgcagtgagccgagattgagccactacactccagcgtggcgacagagcgagactccgtctcaaaaaagaaaaaaataaaagccatgtgttgtggcatgcagctgtagtctcagttcctagggtggctgaggcgggaggattgtttaagcctgggaggttgaagttgctgtgagctgtgattgcaccagtgtactccagcctgggcaataaagcagancttgtttcaaaaagaaagaaagaaatgagcatggtgggaatggggacagatggcagtgttaagtagagtggtcagggttggcctcataagtgaatattgagcaaaagtttgaagcaggtgatggagctggccaaggtgctgagggaagagcattgtangctgagtcaacaggatanngnnnatnanggaggaaactctctggtgtctnaggctctgnaaggaggccagtggagcaaagagatagagggagcaaagtcaatgaggaggccagggagttgctgggctgggatcggtacagattgtgtaagccctgggacgctattgctggggctttggcttttactctgactaaaatgggaaccaccgagggcttctgagcagagaggtgacatgatctgtctcctgatttaaaagcacgacctggctgccaagttgagaaagactatgggaagatttgggtagaagcatgggggccaagctgtggcaatatcctggtgggagatgatagtgatcctgaccggattcatggtggtggtgagagatggttagagcctggatacatgttgaagtcagtcagtaggatttcctgacagactggatgtgagctgtgagagaaggcagtggtcaaggttgagtttgattctgattgaattattaagtaattttaaaaaacactactgcctttcccaatcctaccaagtaaaggatgctagggaagaaaccacannnaacctaatgggcaaaataaccacctaatatcataatgancgggaa

SEQ ID NO: 651726 - DNA, 106 bp, Homo sapiens
agcgaaccatttgccaaagagtgtgttccacctctgcccctgggagacagagggccaagcctggattatcatgaacagggcaatgccccatgacaccgaggaagcc

SEQ ID NO: 651727 - DNA, 425 bp, Homo sapiens
aaggggtggggtcagtgtgctgggactctgcttcaggctcccggacagtgactggcagtgtctgcagcgctccgtgcaatggagaacgtggcggtgagacaccgagactgtgtacgcccatgcggacaattgaacaacacctgcggaatggggttcctgcggctgtgagctcctgtggtatcagctccctgagtgtggggtcttgcggcagcagctgcacggaaatgttatgcaccccaaatcaagtcccaggaccccagggcatctttccagtgctctgacttcatgggcccatccagttccaggtcgcctgcagctagtgctcagctacttctcctggactttgaaagaaccctcacagtcctggcctcatatttctctgtgtgatcccccacatctgggctctatcaccccgtccagtgtag

SEQ ID NO: 651728 - DNA, 119 bp, Homo sapiens
gtaaaattgcatcagaccacatccatcagcttctggatcttctgtgctattacatggattctttaagctgttcgcttgagtgcctgggcggtccttcctgcatcttgttccatggataa

SEQ ID NO: 651729 - DNA, 229 bp, Homo sapiens
catctacgacggctcttcttgtgctgctgttggtcacctcatcgtggtcactgccagctaccgagtgggtgtcttcggcttcctgaattctgcgtccggagaggtgagtggctaacgtcggcgggctgctggaccagtgtggcggctctcgacctagggtgctcacccacgatccgaggtatttgcgcggggacccttcgtgcgctgtgtcctctggccagtcagcacc

SEQ ID NO: 651730 - DNA, 109 bp, Homo sapiens
cgatgggtcagatggaccgctgaaacaggtgtagctccaccaacaggctaactttgggagacatggatctgactgcccggacaagtataagcttataccagtctagaaa

SEQ ID NO: 651731 - DNA, 129 bp, Homo sapiens
gattaaatcaggcctgtgtggtgatggtgagaaggcaggttgtgcggcgtttgaccgatgtatcttttccttaaagttattataatacatgggtactttgtcaatacaagcattcctgttggcgggtcc

SEQ ID NO: 651732 - DNA, 111 bp, Homo sapiens
gacacgacgccagggggtttgggtgctggagaatctggtacaagcaccattgtgaagcatatgaggatcctgcgtgtcactgggtttaatggagagggcggtgaagaggag

SEQ ID NO: 651733 - DNA, 531 bp, Homo sapiens
cccatctggcgaggcagtctcagctgagcctagcccagcaagccagattttcctgaataaacaactgtggggagagaaggaaaaagtcaggattgtggtaccggaacccaacaaaggtgtgaagatgtatatggcatggcatgtttctgggaacccactgaagtggccagtgtgtaagtgacttgactttgaagctgggagggcatgctggcaccacataaaactaatgctaaagagtttggactttatgtcataaccagtagagaatcaccaaaggtttctgaaccagactaggacataattaagtaaatggtttagaaatataagtatggcagcaatatggcaaaaggactgggaaatgaggaagcctgaaggcaaggtgagcagttaagaagctcttttgttatactggggttaacaatatcctcggcacactgatttccttatcatctatgacaagatgatagcatctattaacaaatcaccccaatatggaatactcccattgggacagaatcccactgtaaaaat

SEQ ID NO: 651734 - DNA, 353 bp, Homo sapiens
acagtttgatgttgctgtgtagagagtgagtgacttgacagtgtggctgagtgggtttgtggctttattcttgccttgtgctgtggtgccttctgatggggctgaaatagtagaggtggatggttctaccctattcaggcttctgtatagggacccaggtggtgtgctatggttagcttacttcaggctctagggctgtgctatccaatacagtacgcagatgcggcggtttaacgttaagccaattcaaatcacataagattaatagatctttcctcagttgcactcaacacgttgctagaggcgtcatggtgtgtggttcctggctactgtactaaggatcgagaacatag

SEQ ID NO: 651735 - DNA, 81 bp, Homo sapiens
tgatgaaatatataaaactatagcttatagaaagcttaaaatcgtcctctgacatccatttcgaacgactctcgcctcatc

SEQ ID NO: 651736 - DNA, 133 bp, Homo sapiens
gtgcggctggtcttgaggatccgaaacctaataacgcaactcagctctgttcagccacaacttcagctccagttctagcctcagccccagccccagttctagcatcatcctcggctccagtttcagccccagc

SEQ ID NO: 651737 - DNA, 370 bp, Homo sapiens
  misc_feature (268)..(268): n is a, c, g, or t
  misc_feature (283)..(283): n is a, c, g, or t
  misc_feature (349)..(349): n is a, c, g, or t
agaaggacataacgcaggacaattctgaattaaaacacagatcctcaaagaaagatttgttagagatagacaggttcacaatttgtggaaaccgaattgactgaatctgtggcttcatgcgctgaagaagctgggtcctgggggcaacaagtgctgtgttgccagggacaaataggatgctaaacatgggcactttaaatatttattttaaaaactttaaattatttattgggcaagcaaatctttagttattctttcttcccagtanatgggcctgggcttnaggggtcagacccacagggacagggagcgaccttccggcctttgactgtcttggggggagctttgntggggttatttaaactttccc

SEQ ID NO: 651738 - DNA, 296 bp, Homo sapiens
tcgctattcattcggcacctcgctattcatcggcaccgtcgctattcatcggcacctcgcctattcatcgtgcacctcgcctattcttcgaaacctcgcctattcatcgacaccttgctattcatcggcacctcgctattcatcggcacctcgctattcatcggcacctcgctattcatcgacacctcgctattcatcggcacctcgctattcatcgacacctcgctattcatcgacaccttgctattcatcggcacctcgctattcatcggcacctacgctatacatcggaaagt

SEQ ID NO: 651739 - DNA, 337 bp, Homo sapiens
  misc_feature (297)..(298): n is a, c, g, or t
ctaggggcgtgcccccccaaggccaaccgagaggcccctcagccacttcgtgcctccagcaagcacgacgaatctccggtctatcttccgtcatgatgcgcagttctgggtctgacctgccacgcgcctcgcgcgtgcacgtcgggcgcccatggggcgtaccccgtgtggattgtcggagtcattcttctaggaggcggtgctcccctggcggcacgccactgctccccgagtaccctcgcgcgcgtcgcgcgctctccacgcctactcctactgccactgctgatggagtccganngggccatgagatggataggcctggacgacccctgggaca

SEQ ID NO: 651740 - DNA, 170 bp, Homo sapiens
cccactcatcctttccccagccctttttagccctccccagtcctccccagcctttttcagcctttttcaggtcagcccttttttattttttatggggccattttggcctccccatccccccacgtgccgatgtcaggttcatttaaatacctcaaatttgtaattgttta

SEQ ID NO: 651741 - DNA, 380 bp, Homo sapiens
gaacaccgagtcacggagatgcaggtacagacaggatctgtcctccacacagatgtgacgttgactggtgccccagctggcaagtgcaaagtggaggagaaagagaaaaaagagaagtcagcccttacactgagccttgaggtggagtggttacacatgggcactggccggtcagattgacactaaccataagaaccaggctgtccgtgcgggcacataccagcccgtgcccggagcagggagccttggcagtcacatcatttccagttttcttttctgattgctctgtgcatgcgtgttatcttcccctaccacccccaacacatccttgagcttttagagaaccttgtcataggagatgatattttaaacatttatct

SEQ ID NO: 651742 - DNA, 364 bp, Homo sapiens
tgggggccccaattatatgcacaatatatgttgtccaaagtagcccctgcaatcactagaatctttaatgtattataacatatgatgattagcagtaacactttattatggttctggttagcaagagctataacaccgaaaaaaggtaagtttacagtgatcacataatatcagagggtaaggagaggttaaaagagacgtcaaggacgtgagtgtctgtgattcagcgtggaggtgcaccataaacggccgaaaaatcggtggttcctccatcaatagtccagtcatgtctgtggcagcattagaagtcaggataaaaacccctgtatctccagaaatgcatttcttccacgacaaacttgtc

SEQ ID NO: 651743 - DNA, 220 bp, Homo sapiens
agataaaactttaaaaggtgtcaaggcacacatgactagatgcccagtcaagttgccttctatttcccaactggaagccaatgttaaacataatacaagtgccggctaagcagttgctggatcaattagagaatatcccatttaattctcacatacttggctcataaagtcaagaaaatttggtcagcattcagtgaacatgtacagatgcaggacactg

SEQ ID NO: 651744 - DNA, 299 bp, Homo sapiens
  misc_feature (251)..(252): n is a, c, g, or t
  misc_feature (299)..(299): n is a, c, g, or t
ttgcttgtgggggatttcacagtaaggataaaatacagggcgtggcacgcctgtaatcctagcactttgggaagccaaggtgggaggatcacttgagcccaggattttgagaccagtctgagcaacgtaacaagaccctgcctctactaaaaataaaaaaaaattagctgggcatggtggttcacggccgtagtcccagctattcaggaggctaaggtgggaggactgcttgagcgtgggtggtggatggnngtgattcatcactgcactccagcctggacaacagagcaagatcctan

SEQ ID NO: 651745 - DNA, 496 bp, Homo sapiens
  misc_feature (13)..(13): n is a, c, g, or t
acagaagaaaagnagttacaggaccacttgacccactgcttgagaagatggagagcgacagggtccagttgctggaagagcaagagaggaccctggctcttaaacttcaggtgtctaattgcatcaccttgaggtttctgtttttctgttttctctccattctccccgatcacaggcttactgtggcagagagaacatgaagcccaggggaagaaccctgcttgcttacttgtacttttcaattcctgtctgtccagcctgaactggctactgccaagtctggtcactaaactgcaaatattgcagttgtgtcacattcagtgctttatctatatatccttcatttcaaggcaggtattatctgctagccatcattaaagtatctgtatctcttgcttaataccatgtgaagcaagaactatattcttattacttaggagaagaaacaaagtttccaaaaataataaataaatagagtcacccagctaaaaaaaaa

SEQ ID NO: 651746 - DNA, 299 bp, Homo sapiens
ctagcaggatcccctggcagcagacacagcactattggatatttggaactgtgtgcattcttttcattgtggatacattcagtatcatccgtggcttgcattctgttatgtaccattatgcatcactcccagactgtcctctcagttgtgagagtcataaatgtttccggatcggttcacatgttctctatgatactcttgtactccacactttgattaactctgcttttaacgatactcgtcgtgcaatgacgatgtcatatactggttcttgagcttgcagctctcttttgctccaa

SEQ ID NO: 651747 - DNA, 226 bp, Homo sapiens
aatcatgaatggctggatacacagacgtggcacctacatccgcggacggatggataaacagacgtggcagctacatccacgaacggatgaataaacagacgtgggcactacatccacgaacggatggctcaaccgacgtggaacctacatccacggacggcatggataacatcgacatggcagctacatccacagatgtgacaggcggataaccagaacgtggcca

SEQ ID NO: 651748 - DNA, 417 bp, Homo sapiens
  misc_feature (37)..(37): n is a, c, g, or t
  misc_feature (96)..(96): n is a, c, g, or t
  misc_feature (106)..(106): n is a, c, g, or t
  misc_feature (118)..(118): n is a, c, g, or t
  misc_feature (176)..(176): n is a, c, g, or t
  misc_feature (198)..(198): n is a, c, g, or t
  misc_feature (205)..(205): n is a, c, g, or t
  misc_feature (208)..(210): n is a, c, g, or t
  misc_feature (216)..(216): n is a, c, g, or t
  misc_feature (417)..(417): n is a, c, g, or t
gtagaaaaaaaaaatcctggattttacgtgtcattcngttttcatctgacagcagggctgtcccgacatcaggcacagcagcggcacttctctgangcccctttgnagaggcagcccngggcacacttggcacagcccagggggcaacaggagcagcagctcttcttgcaggaggngcatttgcactttttgcacttncaggagncgnnncaggcncaggatgttaccagcctcgcaggagcagttggggtccattgcaagccgaggtgagattggagttcccaagcgagagcagcaagcagcgccagctggcaacacgtgatcccgcgcgcaattccgcgcaccgcgctaccagccctgccttttttgctacaaacttgcttctatagctgctcacctaaatagcgccctaaatgn

SEQ ID NO: 651749 - DNA, 593 bp, Homo sapiens
  misc_feature (133)..(133): n is a, c, g, or t
tcggggaataccaaggccacagtccggtctgggttttaaatgctcccaggaggtgccccccccataccctggggcccatcatcctggcccagctcttcccatctgtccccccgtgccgccagaggcgtacatngggggagcaccaagattctggccagaccccccaccactgtccccttgccacaggtgaccaggccccttcggctcctggtgctggttaccgccctcaatccctgcacccccaggggcccctggcacatctgtcttctctcgcacccctgtgcccttatgaaagctgctcactgatggctggtatcgatgactgctacaccctcacgcccgcgggctgcacctgcccaccctcgggcacaacttcgcccaggccccctcttgatgcccttttctaagacctatcacgctacctgacccccgaccttctggaaggagactgtattcccccagtctccctatcaggagttcactgaccccctcgtccagacccccccccgagtctccgtgcaacggactcaggctcccgctgtggctaccacatagggtttttataccagaaaaataaagtgaattaagcgtga

SEQ ID NO: 651750 - DNA, 267 bp, Homo sapiens
  misc_feature (41)..(41): n is a, c, g, or t
  misc_feature (48)..(48): n is a, c, g, or t
  misc_feature (117)..(117): n is a, c, g, or t
  misc_feature (261)..(261): n is a, c, g, or t
aaatattatttgtagaaaatgttaaaatgcctaatgagagntgaaatnagaccccaaacaaatgggaagatacacccacgttctttcatagaaatacgcagcatcataaagatatcncttctctcattaatgggtgcagcacaccaacatggcacacgtatacatatgtaacaaacccctgtcgttgtgcacatgtaccctaaaacttaaagtataataataataaaattaaaaaaaaaagaagtagaattactggataanttggta

SEQ ID NO: 651751 - DNA, 1716 bp, Homo sapiens
ttgtgcatgctgctgtgtgcctggtgcctggtgactgtgggacttgtctgtgctgcagtgctgtgccatgcccaccaacttcacctgtgtgtgccctgtgtgatgtgctcactgcctgactgtgtgtgctgtgttgactgatgacttgcctgatgctgtgactgtgattgtgctcctgtgtgcaccccctgtatgtgtgcccctgatgccctgatgctgccccatgccctggtgagattggaaatctcaatgatgacaagacagcccaattctctctaacgaattgtctgaagtgttgtgagacaatgaggatgcttcattttgacaggtggaacgacacattgtgccagcttttctgagggcagtgagattgtgaccatgtagacccacaagttgcgttgatccatctggctttgaatcagaccaatgcttgggccagagataagcagacacagacctttgtattgcacatgtgggctagttgtgttggatggcacatgatgaggatgcgaactgacgtgagtgatgcccagggtctgtgctcgtgggaatggtggccctaaaagaggggtacacgtgtgagagccaatatgtgggtcaagacagtatcaagtaccagaggaaggatctttatcacttttgcacaggtgtggaggcattagcaatgaagatataatttcacatttggttgactggattagaataacaaattcattatacccattagacagagcgacagtttgtaaacagtttagtgagaagttccatgggattgtgatgatagatgattaagaagacgatatagggaagattaggtaagcattggggaaaagaataagaagatatcacgatatacaaattcaaagaataaggagcaaccgagtatgggatgtgaacatatggaaaagaaaagatatggtaagacaataagataagaggatagaaaagagagagacagaaatgatattaccacctaagatagaagtagattatggcaatgacattcactcgaaaaataaaaaacataacgaatagataggaaatggattagggagatcaaccacaaaatagagagatagagggagagtagaagattcagaagttagaaggtatcagaaaaagattaggacattatatttagagtaatcgacgataacaagacaaatagtagagggaaagacaaccagagaaagtagataaataggaagaagagggaaacagcataggaaaaagggaagaaaaaagatagaaaagtttagagtagacaattaggtgtgagacacatagaaaatgagtataatagataagtaagatataaagcaaaattaaaaggctaaaatactctatatggaggagtagagacaatacagatctagagaagtaagttagtaaatgagattaagaagaaaagagaagaataagaaagaaatgaaagagggaaggatatgtggcgagatgaagaaccaattcgagtgagaacgattggagatatgtttgagagaatgaaaagaggatagaagagagatgagagagagagatataagaatgatgagattatttatagaaatgagaagaatgatgagacaaacaaatgaaatgatgacagaagatgcgcgagatatagaaagaagatgaagagaagaatgaaagagagaaaggaagaagaattatagagagaatgcggattgagcagaagaatcagataggagataggaa

SEQ ID NO: 651752 - DNA, 174 bp, Homo sapiens
taggggagtatgacggggaaaagctccccccagatatgtcacacgctcccgaggcgtctcagaccatctcatctgcgactcgcgcataccccggctctaggccttcgctcccaccagggatcgggcggcgcatccccccccattctcatccattgagtgtgctgcgcttctacg

SEQ ID NO: 651753 - DNA, 967 bp, Homo sapiens
  misc_feature (509)..(509): n is a, c, g, or t
  misc_feature (625)..(625): n is a, c, g, or t
atctgtaattaaatagtgcttgtccccggagcgtcttccctgaaacgtgttgagatacctgaaatcttgtagcccctaggacgcacatcttgcacagatccaggaggtccatgacagtcgatgtagtaggtgacgtggaatcgtggcaaaggaattcctacgactacggttcgtctcgtacctcaatacgttgtgcgtggacatttcgatcgttactcatctattgaagtcggacgttgatatcgttttcattgtacctaggtgtgactggacttctatagtcttcatcgtagttgccaatgtgccatcctggaacttagcttcatgatgtcgttgcttctctcgaagtgcgtgctttcttgacacgtcacccgggtttttgccgtacatcacgcgagttggttccgagtaccttcggaggtttcgtcttttcattgcccagttcatctttcgtacttctggtacgtggctcgaggcggtagcatcggtctggttcgctagtcgtaagngaagtccagtgatgtagttcgcgagaagtacaacaatctacgaatacgtcaacgtcgatagggttgcctctccttcttctgctaaattctaacttatgtacaatactcttgtgggngtgtctaagtcctctagcgcgtgtaatgtgtaaggtgcttgtatccctctatcccaatttatacatggttcagaaagtttgtgcctaagatctaagggctttccatttatatcgtgcagagcacgttgaattttctataaaccttcagtatgaaagttgtcgttgtcggtaccaggttgtgccctgattgggtccgaatggtccaagatcgaatatccccagatggaaacccgcggtcaaaattttttaccccttttgtggttcttattcaacctttttctttccttttttttcacccgggttccacagccctttgttaacagtccccgtccggcttgggac

SEQ ID NO: 651754 - DNA, 123 bp, Homo sapiens
gtccaaacagtgctcagagtcaaaacagtgcccagagtccaaacagtgctcatagtccaaacagtgctcagagtccaaacagtgcgcagagtttcaaacagtgcccagagtccaaacagtgct

SEQ ID NO: 651755 - DNA, 105 bp, Homo sapiens
gtactatgggtatcagtctgtgctgctgagcatctttgctggatgacacagaggccctgaagcctctcattgtcccaaactggatcatcttcctcaaccatctct

SEQ ID NO: 651756 - DNA, 253 bp, Homo sapiens
tcctcctcctgcgcgaattttccaagtaataaatacaatacataaaataaaactgctctcaaatgtaaatggagaaactcaagggtctgtgagtagctaggttacccttaaaagagctaagaggctaggtgcagtggctcctgcctgtaatcccagcatttcgtgaggccgcggtgggaggatcgcttgaagccaagagttcgataccagcgctggaaacagccagaccccatctctacaaaaaacgaaaaaa

SEQ ID NO: 651757 - DNA, 417 bp, Homo sapiens
ttggtcgtgtggttctcgtgcgggtatgtggtctgtgctggagaggatgtggagaaattacattgttggtgaaagtgtaaattagttcaaccattgtgaaagacagtgtggcaattcctccaggatctagaaccagaaggaccatttgacccagcaatcccattactggggacacactcaaaaggattataaatcattctactataaagacacatgcacacgtgtgtttattgcagcagtattcacaacagcaaagtcttggatccaacccaaactcccacaatgatagactgaataaagaaaatgttgcacatatacacatagaatactatgcagccataaaaaaggatgagttcatgtcctttgcagggacatggatgaagctggaaaccatcattcccagcaaagaaccacacg

SEQ ID NO: 651758 - DNA, 178 bp, Homo sapiens
ggccgcggttattcagcgacgtgtgtgcagggcagctcaggaagggacaggagactgggccaatatgtgaaggatggggcctgcgtgttcaaagccaatgaccgccccttccttgtgctcaaatggccaaagctgttcacgtctgtgctcaaccatcgtgcttcaaattgaagtaaaa

SEQ ID NO: 651759 - DNA, 497 bp, Homo sapiens
  misc_feature (384)..(384): n is a, c, g, or t
atattgaaagctttggagaatgccaaaaagtaaaggaaagaaggtggaaagtttggttttgcagagtctatagcaaatcaaaggatccaggcatttaaaatggaaaaggcccctattgatacctcggatgtagaagaaaaagcagaagaaatcattgctgaagcagaacctccttcagaagttgtttttacacctgtgctatggactcctggaactgcccaaattggaaagggagtagaaaactcctggggtgttcttgaagactttgaaaaggaaaatgatgaaggcggtggtgatcaagctatcatttttgatggtataaaaatggcccctggagtagaagtctttgatattggaagccaaaatgctcccataattctttcngataagtgaagaagaagaaatgatctttttggaaccagccaagaatccaaagaaaataagaacccagccccccagtgcaaaacaaaaaaaagccccaagtaaaaagccagtga

SEQ ID NO: 651760 - DNA, 752 bp, Homo sapiens
  misc_feature (452)..(452): n is a, c, g, or t
ccaaatctcatggtttctggggccaaaattccctttcctgcctcccaatagctataaaaaatggtaaagccaaaaaaaaaaaaaaaaaaaaaaaaaaaaaaaaaaaaaaaaaaaaaagggggggggggctaaaatttcccctgggggggcccggtttacgggccccaagttttttgtaacaagggtgcccctgagagggcagctgtgttatataaacgcagaggcggaggcgcgaggtaaaacaaacggtcggtgctgggggaaacatgggctacgctggggccatcttgggggagggacccttactttcgtgtgggtggtggcctatattcgggcacaacattcacctacagaaagatattaaacggctccaagggtcaaatcataacatttcacacggtggtatcaagtggtggataaccaccagccgcgtgcttatgtgtcgtgggcgngggcttggaagaaagtttgtgggctacaggggcgagtattgtgcattttgtcgggggaccaactttttttattcactcgggggagcctttggtgtgaaaataaccggggaaaataaatatagtaaaagcattcacgagccatcagtgagcaaatatatgatcgaatagaagaggataataagcagagaatgaaacatattacataatatattatagacatagggatgcagaaatagtagatgagaccagggaaaatatagtattaataacaaaaatacagcaacgagattaaaacacgaa

SEQ ID NO: 651761 - DNA, 1777 bp, Homo sapiens
gagatgaagatgcttacaagaaacagttctctacaatacatacaagcaacagcgtaactccagcacatgcatggcaggcagcatgtcatcaagcaacagctacatagctgcatcatacgcagcagacatccgagtctcatgcacacaagcacagcccgaagacacagcacagttacaaacagcaagcaggtgagaaccagtccgctaaacatagtcacctatgcctcaagcacagacaggcatcgcggtcagctaccaacacagcacagcgcacagcttcctacagcagcatcaaggacgcgggcttgcatgcagcagctacaacccaagacaatatttcatcatgatatatattcagaactactcagactacactaacacacttatagacacaagaccaacaacaaaaagaacaacagaacaagacaacaacacacaacacacacagacgagagaacacacacaaacgtcccgcgcgagagagcgagaggaccaacacgaggagacgcaagacgagacacacggagccacaaccaaagagagaaccacacatcgaccaagaacaacacacagcgaaaacgaccaaacaacaatacaaaaaagaagaaaaccaaccaaaagccgaggcacaacaaaacaaaagaaagccaacaggagaaacaacacaccacacgaatatcaacagcagacgacaccacagacaacagacataccatcaaccagcacgacaaacaaccacacaacgaatcatcaccgagaagcgggacaatgacaacaagaaagagaaaacacacgtgatgagacaaagagccacgaagaacagaagaaaaagcaagatagacagaaaacagaaccaagacatggcgcaaacaagaacaaccaaacacagaaaaagagaacaaacaacagaaaaagacacaagccagaagcgaagacgaagaagcagaacaaagacacaaacaaacgcagaacaaccaaacacacacaacgaacgcgtgataaaagaacacaaaaacagaagacagcgcaggagccctacccccgccacggcgaaacggagaagcgcgcgagcacagacaaagaagctcaccggacagaaagacaacagaggacacggagacacgcgaaggctgcgagaaaaccgacacagacacgagcagacgctgatgcggacaagacacagatgaaacagaaaagaggagacagagcaggaggaaaggatcacggaccagcagcagcacaacagcacgaaccatcacacagacgacaaggagaggagaggacacgacacaattagagaagaacacagaggcagcaggccacagagagagcaatagacacagaaaagggagcagacacaacacaaacaaccgacgagaaaagaggagacagcgcagcaagagacaaagccaaagcagaacagacaaaagagccaggcaaacaagacacaaagacagaccagcaagacagaacaagagacaaaggcagcagagcggagagaagcacggcacgccacacacacgcgaccacgtgaaggaggcgagaggaagaagcacacgagggagaacgcgacgagacacacaggcagtgcagcgaggaacacgcagagaagcagcgagagatgcataagagaaaagagagagcacataacacgacacgagagcgcagcgaacgaaagcggccgaaagggacaatcggaagagcagacgaaaggcgaagcgcaggcgaccagagagaaggggacaacgcggacagcaccgcaggccgagcgagagtg

SEQ ID NO: 651762 - DNA, 783 bp, Homo sapiens
acccctctgttgtatgttactataacgagtgggggttgtttatgaacagcaccgtcccttcattgggggttgcttatcactggacggcggtcattgatatgtcttctgcgggggaaacccgtcttgtggggcccgtttgtgtagcaaggccccgcgctgtgtctaatatatgtttgtttaatgctccgcgttagatagtgttgacggcttgggcgttgccagcccttcgtctgatctcgtacaacatttcccaggtattaccactggtagatgacccgccggcttaatccattttacattgcgagctaatggtacttactaatgtaaaagtcgacacccttttctttatcaagatttgccctgactctaatagtaagtgccttctcgccctctgttaaactaacagttatcactggcacttgttgtacgaccctttgtctttgccaactcttccactatttgcgacaaatggttgtcatctcatccataccttccctacctccacgcatttcctatttgtataataggaatttattatgtccagggagagaaattttactctaaaacgcttttgctctttttttgtgcgacaaaataatccgtttcacctacatgattagtaatctcctagagacatcactgctttattgctctgtaaattattagcatgatcaatatcctcctaaagttcaaagcacgaccgagagctacaggaaaagagaaaagaaaaataatagagataaagtaaaaaacaaatatatcacgaagaatttgctaagcaga

SEQ ID NO: 651763 - DNA, 110 bp, Homo sapiens
cagaggtagttgggatgaaacgtgggtgtcagcctccgaaggacacgggaccaggtgtggctagaactcctatgattctgcatccaacctccagtctctagggttctctg

SEQ ID NO: 651764 - DNA, 97 bp, Homo sapiens
  misc_feature (18)..(18): n is a, c, g, or t
  misc_feature (33)..(33): n is a, c, g, or t
ccgcacaatatgggaatnaccctgcataaaaangcagctgaagatagactggcaagcacaggctcagaggcaagtcatttctgccgaggcagaggca

SEQ ID NO: 651765 - DNA, 177 bp, Homo sapiens
aagctgaagcgaagagatgttccccctaatttctctctagcccattataacctgctatcttggaggcaacttctgatgtatgacatgtcacccttcccaacttggtctcctccaaggatgctgtcttcatgtggagcggggaccattatccctgactccggccattcaacgcctccg

SEQ ID NO: 651766 - DNA, 199 bp, Homo sapiens
ttttctctgtttcccttttcctagagggggactcacccaagtgagttggagacgtgaggcagaaccatgtgggggacggtcaggggctctgctacctaaatgccaggcagatgcatgggttccttgaggtgaaactgaaatgtatgttggacattcagtgttgcaactgagaaatacagggagagttgccgataaagga

SEQ ID NO: 651767 - DNA, 293 bp, Homo sapiens
gggggtgggggaaatttaaaaaacgggggttttttgtttaagggggcctttttaaggtgggaagttgaccaggggtggcattaaaaatttttggttttttatggaaattttgaaaccaaaggttttgatttttttgttttgtggaattgcaatgttcaggattttttagggggggggggcggggattttttttgtaataggcctttgtttttttttggggggggggggtataaggggtcccccctttttgtaaaaaaatatttatattaaaatgaaagaaccattccccccca

SEQ ID NO: 651768 - DNA, 131 bp, Homo sapiens
tgatctagaggatcccgctattctttttcttcagacgagttcgcactgttgcccaggctggttttgagctcctgggctcaagcgatcttcccgtgtcagcctcctaaagtgctgggattacagtgatacct

SEQ ID NO: 651769 - DNA, 434 bp, Homo sapiens
  misc_feature (319)..(319): n is a, c, g, or t
  misc_feature (322)..(322): n is a, c, g, or t
  misc_feature (346)..(346): n is a, c, g, or t
  misc_feature (348)..(349): n is a, c, g, or t
  misc_feature (369)..(369): n is a, c, g, or t
  misc_feature (378)..(378): n is a, c, g, or t
gcagaggggtgtcccacgcacatcgaggtagagtcgggtagagaaagggagacagtcaggctgaaacccctgctgagatgctccgagtagaggcaaactgaaattacaataataaataagcaacagcaccaacactaacaaaaacaaggtgatgacaatcacagaaaagcgaaggatacaatacacttaaataatctccgggaggagctcatggtacagagagaacagtgtagattatcctgggccacaaaggggctgtcctgggtagttcacttccccagcctgggctctgccgcaggagttcccatcaggaatgttngtncagtgatgccctgaggtgacgcgntnntgtaatccccagtcctgccnttcgaacanctctcccccaagcttctgcactctaagggtggcatggtcctgggagacccctcgtg

SEQ ID NO: 651770 - DNA, 240 bp, Homo sapiens
  misc_feature (9)..(9): n is a, c, g, or t
  misc_feature (31)..(31): n is a, c, g, or t
  misc_feature (37)..(37): n is a, c, g, or t
  misc_feature (48)..(48): n is a, c, g, or t
  misc_feature (52)..(52): n is a, c, g, or t
  misc_feature (69)..(69): n is a, c, g, or t
  misc_feature (94)..(94): n is a, c, g, or t
  misc_feature (98)..(98): n is a, c, g, or t
  misc_feature (126)..(126): n is a, c, g, or t
  misc_feature (130)..(131): n is a, c, g, or t
  misc_feature (155)..(155): n is a, c, g, or t
  misc_feature (159)..(161): n is a, c, g, or t
  misc_feature (171)..(171): n is a, c, g, or t
  misc_feature (175)..(175): n is a, c, g, or t
  misc_feature (184)..(184): n is a, c, g, or t
  misc_feature (200)..(200): n is a, c, g, or t
  misc_feature (209)..(209): n is a, c, g, or t
  misc_feature (235)..(235): n is a, c, g, or t
  misc_feature (239)..(239): n is a, c, g, or t
caagaatancctcgtgtggaatgggatagtnggaaangttatgcatgngctngtgacaacagggacatngggaactctgtaatgtttcttcagntttnctataaacctaaaactgctctgaaaaanatgnngtttattttaaaaataataatgcnttgnnnccagctaggntttnctttaaaantggcacaatggttcantcatttcantgtcaagaatctagtaacataatttntctnt

SEQ ID NO: 651771 - DNA, 117 bp, Homo sapiens
gcatggttagctgactgctctgattcagattcacaagactgcactgagatgtagaccaggccgcagtcatctcgtgtatgagggagcgtttgcttccaaggtcaccatgtgaccgcc

SEQ ID NO: 651772 - DNA, 148 bp, Homo sapiens
gacctccctcttttaccgctcggacctgcggtccgggtcacgttttggtgctgatcgtcctgcgacctcgacacgaccggccaaacgctagtgctagaagcgcgattaagcaacgggtgcctgcgcgcctgcgttacttgcaacggtg

SEQ ID NO: 651773 - DNA, 305 bp, Homo sapiens
  misc_feature (7)..(7): n is a, c, g, or t
  misc_feature (23)..(23): n is a, c, g, or t
  misc_feature (25)..(25): n is a, c, g, or t
  misc_feature (38)..(38): n is a, c, g, or t
  misc_feature (44)..(44): n is a, c, g, or t
  misc_feature (59)..(59): n is a, c, g, or t
  misc_feature (76)..(76): n is a, c, g, or t
  misc_feature (81)..(81): n is a, c, g, or t
  misc_feature (95)..(95): n is a, c, g, or t
  misc_feature (97)..(97): n is a, c, g, or t
  misc_feature (99)..(99): n is a, c, g, or t
  misc_feature (120)..(120): n is a, c, g, or t
  misc_feature (123)..(123): n is a, c, g, or t
  misc_feature (163)..(163): n is a, c, g, or t
  misc_feature (217)..(217): n is a, c, g, or t
  misc_feature (227)..(227): n is a, c, g, or t
  misc_feature (232)..(232): n is a, c, g, or t
  misc_feature (282)..(282): n is a, c, g, or t
gagtttntccttcaccctcgctntntaacaaccccatntcattntcattcagcagcatnattctcctctcgctcgnttctnaacccaccaacaanananaagcccacctcctcgcttcanaanactcgcttctctcacatcatggtcattcgcacacttctcnctctctccactaaaaaccctctctctccactctctccctcgctctcgcactcanacactcgcgngcaantcccccctctcaccccccacaccctctctctcgctctctctctctcacanacacgctccctcccactcacgga

SEQ ID NO: 651774 - DNA, 309 bp, Homo sapiens
caagaaggtaagctagagaaaaaaaaatgttattaaggaagtaatatattccctattcgttaggtagaagtgaatcatcctaaaggtcttcatcctcatcttcccgctgagtagtttgaggagcaaaaggagttggtctttctgtcccagtggcaaaggtggaaaaaaatccccaaatacgtggacctgcgcagttcaaacctgtgttgtttgggtcaactgtattgtaaaagcattttaatgtttttctcagacttttacgagtatgaatttgagctttttttgaataaacctgcctgctccccctta

SEQ ID NO: 651775 - DNA, 183 bp, Homo sapiens
ttttccaagcggagatgctggcaccaatagtgatcctcccgaatcaaccctgacccctctccttcataacattattgcagcttcctacactattaaacgtttgccacaaccaccacgcccatcatactcgtttcacaccacaagcatctcctgcttgtggaacagggtaccggagctctgaat

SEQ ID NO: 651776 - DNA, 407 bp, Homo sapiens
  misc_feature (72)..(72): n is a, c, g, or t
ggggtaaagtcttgctctgtcacccaggttgatctcgaattcctggcctcaagcaatcatcctgcacaaagngttaagattacaggtgtgagccactgtgctcagccttaaactttatttaggaattgttgttggccaggtgtggtggctcacgcctgtaattccagcactttgggaggccaaggtgggaggatcgcctgagtcccagagttcaagactagccttggcaacatagcgagatcctgtctccacaaaaaaatttaaaaattagccaggcatagtggttggtgtgtgcctgtagtcccagctacttggggaggttgagatgggaagattgctttagccggaggttgaggctgaagtgagccgtgatcatgccagtgcactccagcctggttaacaaagca

SEQ ID NO: 651777 - DNA, 128 bp, Homo sapiens
actctagacgatcccatgctctggaaaaggggatccccagcaagtgcagagctgagcaggcttgggcctgtcatggcttcctccaaagtcccaatactctagccccgctctcttcccctctttctgtc

SEQ ID NO: 651778 - DNA, 266 bp, Homo sapiens
gggacaccagggaagaagatcaacgcctccacttgaaacataggctgtgtttgcagcctgctctagtggggacagcccagagcctggctgcccatcatgtggcccacccaatcaagggaaggagggaggattctggacttgaggcccctcgagccagatggcaagaggtgaacagctttctttcctgtgtgtactctgtcagttctttagaaaaatggtgccaaaggctccaaccctggttggggtaagaacagcagcgaggtgag

SEQ ID NO: 651779 - DNA, 1014 bp, Homo sapiens
  misc_feature (93)..(93): n is a, c, g, or t
  misc_feature (232)..(232): n is a, c, g, or t
agcaaaccgggataggagaggatcccggagtccgcgtgatggcctacgaggcctgggggccccccactgggtgggctgtggtgactgctgacnctgggacagacccttgtggtgctctcgtggatggctcggactcgtgcgggtcagtgaccgacctgctactgacgactctgcatatgcaggacttaccactaggcgcacagtcctaccaggacactcgagcatgaagatntttccacgcagtggtccagcaggccttgccccagtggccatggccagattcacgaggagcatctggcatggacatacccacgtatcacgaccatgcgtacattcagcagtgacggatttagcaccatggaccgatagaccatggattactcccatgagaagtcctctaccgacgagaatggacatggaatcatgtaccattgaagcatggaccatggatggctatggggagtctggggctccagggcatcaagtctggagcctggagtgctgtcatctctctgggcttatgcggctgtggggccacaggtgctgatctcatgcaggctctcatttagggttcctcttccttatcccccggtggatgctctgatctctccgccggtcatctgccgtctctttacgtttccagagatcgttggcctctaggacttccgcgttcccggtgcggactccatggtcgagaatgctttctcctgtcgaccatccatttccttcgatcgctcttgtaactctccatttctcaccacgaactctggtagctaccccgggatcgtggagcactcccttcagctgtgcctagtggcccctattctgtcctgtggcgactgttgggttctcagtgccaattgttgccgtttctttgttcggtggaggataccttggtggcgactctggtgatacgcggcgaccgtggtcctcagtcttgggcatttgtctcgctcgctggtctttaccctttggattgttcctggacattggaagctcaggaatcgtcctccc

SEQ ID NO: 651780 - DNA, 172 bp, Homo sapiens
aaatcgtatttgtagtagagacagggttacaccgtgtagccaggatgatctcgatctcctgaccttgtgatccacccacctcggcctcccaaagtgctgggattacaggcgtgagccagtgcgcccggacacattcagttcttatcaaagaaataccccagacttaatcttg

SEQ ID NO: 651781 - DNA, 102 bp, Homo sapiens
ggcactgaaaggggaaggaaagaaggaagaacaggtcatcagcctcggccctcaggtggctgaggagagatgtatttgtgtctgcatatcttgcatcttatg

SEQ ID NO: 651782 - DNA, 1544 bp, Homo sapiens
ctagttctagatcgcgagcgtccgcccttttttcttttttttcttacaggaaaaatttaaaggggttacaacaacatatgttgtttccacaacagccagcaccccagcaatatggagggctatccggttcccacgaggcgcccacgtgtgtttatccgaggaactaatcctcgtggtggcacagtgtgtcaccgtgaaagccatctggtcgtgacattccacaggtggagaaagggaacctgtgctgtgtggtgtttcccaccgcgacgcgtggtctatacatttatttgtgggtgtgacaatgtgacatattttgtgtggcgcaaaaagcggaggaatagtgaaaaaatgtgggattcaaagctgtgaaaaaaaaaccttgggacatggcgacgagcatacccacagcacaaaagcaaccgaggccaacgcctgtctgcgacacgagaggcgaggagacacaccgaacaacgggccgctaacaacaacacataaaacagcgcaggccgggccaaacgagagagacccacaatgagagcacaaaacaggaggacaacaaataaaagaaaaaatcagacaaaacaacaaaaacaccatgagacaaaaaaaagaggaacacgagaagagggagaacccaaccagagcgacgaacacgacgcagaagcacagagaaaaccacagaaatcacaacaccactcaatacacacctaacgacgacacacgaacaaaaacataacccaaacaccaccaagcagaaaaaaccgcagcaatgtaccacagcaaaccacagagcgagaaaacaaaagcgacaccgtagaaaacaaaagaccaccacccgactctagacgaacacagcagcaagcacaaacataagaggacccggagagacaccccaggaggaaacgacacagaatacgagaggacgcacaaagaagccgacacgaacacaaaacacggcaacacaacacaacacaaagaaaaaaacaaacccacaagaacagccaccatagcgttaacccagatggagacccacaagacgacaacaaaaacagaagacgaaaacacagcccacacaaaagcaccacaaaatcaaaaaacaaaagaaaaaaaaacgaaaaaaaggaagacgagacagacaacaacacacacacaaacaccacaaagagagcacacacaaaagcaacaaacaccacgaacgaccagcaaacacagcatgatcagcaacacaagaaacacacacaagaaggaaggcagcgaagaccgaacaactaggagacacaggaaaagcacccagagcacagacaagtcaagacaaaggagaacagacagaaaaacaagccacacccagaggaaaccaagacgaaccgagagaagacacacacagcaacagcgagaagcaagacaaaaacacacacagccaccagacgacacgcacgccccgcagccccaaaaacaagccaaagagcacgaacgacattcgcacccacacaacaaaaagcgcacagccagaaggacgcaaggaccgaggcgacgagccgaccaaa

SEQ ID NO: 651783 - DNA, 371 bp, Homo sapiens
  misc_feature (15)..(15): n is a, c, g, or t
  misc_feature (76)..(76): n is a, c, g, or t
  misc_feature (86)..(86): n is a, c, g, or t
  misc_feature (192)..(192): n is a, c, g, or t
  misc_feature (194)..(194): n is a, c, g, or t
  misc_feature (207)..(207): n is a, c, g, or t
  misc_feature (261)..(261): n is a, c, g, or t
  misc_feature (293)..(293): n is a, c, g, or t
  misc_feature (332)..(332): n is a, c, g, or t
gggctccggtatctnagggtcaatcctacagtaggactctgggggcctgggttctgggggggggcagggctcaggnacctcaggcngttcctggggagagggctccggtatctcagggtcactcctacagcaggactctgggggcctgggttctgcgggggggtagggctctggtacttcaagctgtgcctngngggtggtgctctngtatctcaggctcgctcctacagaaggcctctgggggcccaggcttctgccggnagggcagggctgtggttccccgcactcctctngaagacagggctttggcagccctgagtgttttaacagtncaggaaggtgggaagtccagagttatgctctgtggcatt

SEQ ID NO: 651784 - DNA, 568 bp, Homo sapiens
atctaccaggacctccggagagactgcccagcccacatcatacagttgaaacgaaacttgccacaaccagccttgccgtagcatacacatatatcactgaacctgttgaaataaagttttttttctttttcatgattcgtctttggaggtaccctcccgggtggaaggaacggtcgtaccagtaaaaacttaaaggcacaaattctccttgaagaccttctccctcttatgtgaccccatattttatgttgctttatctttgaaattttgcatgaaaaggaaatgaatggattcgaatgaaattgtcctttagagcatgattacttgttcccatggacaaatatttttctccccttgctcttcctggcctgaaacacgggaaaccagagtcaaaagttatctccctctccctgtgatgccttgagatttttttctgcgttgtttaatgcctgaaatccaagtcttcctccatgggaaaatactgttataccaaataattctagatgagtaacacagatctatttaggccttcattttatgttttttcttaactgttatattatgatcg

SEQ ID NO: 651785 - DNA, 336 bp, Homo sapiens
atgtttagctttaaaccccttttttgtcatctctgctcagatttacattcccaggaggcagaaccctgttacgcgtggtgcaagggatggctgattaacaatatccaccattgcccccagaccacagagaatgtctcaggcaaaggctccctaaaggaaaagcaggggggaaagacaaacactacatgtttacatcaaatgcaatttaaatagtatgtgaggctggcagcagtggctcacacctgtaatcctaacactgggaggctgaggcaggatcacttgaggtcaggtgttcgagaccagcctggccaacatggcattaccccacctctacta

SEQ ID NO: 651786 - DNA, 275 bp, Homo sapiens
tgcaggcatgaaatactgaacatttgccttattatgtcgttagactcacaggtaaaaaaccaggctttgagtgggcacgtatatatattttgttactacaacacgtgctgttggtgacctttgtcgaacgtttcggtgctgatgtgaaaaaaaaaccttgtggactattatcatggggacactaactcctactacacttatggattcgttataaaagaaagtacattttcaaatttgtaaagaattgttgttttgaatacaaaaattaatgggtg

SEQ ID NO: 651787 - DNA, 662 bp, Homo sapiens
tataggagcagattccctatttggaggcatcagactataagatttctatatttgggttaatggatcatcagagacaagcctatcagatccggtatttcacctttcagcttccaaatataggtgaaccttgccccagtctatcttacttttactcgggagagttcatgtgaaattaagctgaaatggagcatacccttgggacctattcccagccaggtgttttgattatgaaattgagatccgagaagatgatactaccctggtgactgctaccagttgaaaatgaaacataccacccttggaaacccaccaatggaaccccgaccaattatgctttgtagtaagaacggccaagtgaatatttattgctccagatgacggaatttggagtgagtggagtgataaaccatgctgggaaggtgaagacctatcgaagaaaactttgctacgtttctggctaccctttggtttcatcttaatattagttatatttgtaaccggtctgcttttgcgtaagcccacacctacccccaaatgattcccgaatttttctgtgatacatgaagactttccatatccagagacctggtattgactccaccgtttcccgatcatggcccaatgttccatatgagtttccataaactgaatttttcttgcga

SEQ ID NO: 651788 - DNA, 333 bp, Homo sapiens
gttcaccgcttattcgctagcccgttccctttgttgtggtttcgctggcatacgtagtgcggcgggggactctcttcctccattctgcgcgtacttcttcgatatccacggcctctggctacctttcgagagtcatagctatttcctggtgtaaaccgcgcttcattgaatttcttcactttgacattcagagcactgggctgaaatcacatcgcgtcaacatccgccgcgggccttcgcgatgctttgttttaattaaacagtcggattcccctggtccgcaccagttctaagtcggctgctaggcgccggccgaggcgaggcgccgcgcgg

SEQ ID NO: 651789 - DNA, 102 bp, Homo sapiens
catgcctgaacccgggcgacaaggccagagtgaggaggaggcgtccatttacctcaacgctatctcttccccaacgctatctcttccccaacgctatctctt

SEQ ID NO: 651790 - DNA, 1250 bp, Homo sapiens
  misc_feature (56)..(56): n is a, c, g, or t
  misc_feature (115)..(115): n is a, c, g, or t
  misc_feature (118)..(118): n is a, c, g, or t
  misc_feature (124)..(124): n is a, c, g, or t
  misc_feature (126)..(126): n is a, c, g, or t
  misc_feature (132)..(133): n is a, c, g, or t
  misc_feature (136)..(137): n is a, c, g, or t
  misc_feature (144)..(144): n is a, c, g, or t
  misc_feature (150)..(151): n is a, c, g, or t
  misc_feature (156)..(157): n is a, c, g, or t
  misc_feature (185)..(186): n is a, c, g, or t
  misc_feature (196)..(197): n is a, c, g, or t
tgtcctagctgctggttttccacgctggttttagctcccggcgtctgcaaaatgangattgaggaggtgaagagcactacgaagacgcagcgcatcgcctcccacagccacgtgnaangggctngnggctgnnacnnagagcgngcttgnnccaanncaggcggcctcagggcttgtgggccagnnagaacgcgcnnagaggcatgtggcgtcatagtcagcacattcaatcaaacagccacagcacacacatggctggcacagcagctgtcttgttaggcaggcacctcctggaactgggccaagacagctctggctctaggctcattgctccaggcagctagggtagtcacaggtcccgcttctgccccacatggctggggcagtgcacagtttcactcaactagcagcatcgaaagcaagcacagcaggtgctgcatggcagcaacttccgccagggccatttggcgctgcgcaatccaaggcagcaccaaggcaagtttcatgcaaggtgcaagtcacaagcagctcaactccgatgtgcagcacagcagccatccccatggagcaggcatcatggcaaaacccattcagccaatgtgcacccatcaggcactcaaaaacaggccaatagggaaaccaaaaacagggtggcaaccgtggcacccccagcaataatatgcaccagttggcgagcaaagcagcggagtaggaaagctggcagcatggtgcaatttaccatagcaagagccaacacaggtgcggggcccgtgacaagacgcgccaggggcagcggggtagacttacctactggcgcacaagacaattacgaccctaggacaggcatgaagacggtactgtcccgcttgggcgcaccagggtggctgtggcacacaagagaacaggacactacatccaagcatgtgaacctaggcgctgacactgggcaatgtgggcaaaaatgacgccgcaccccaagggggggacacaagcgacaacagccctggtcccacgagacgtgagaggcccgaaaaaaatggacaagcccaagcgaaaccacacggcactgaccggaaccaaacaagcagcaggagcagacacaagaagggacgggacacacagaacatagaacacgggaccatgcacgactaggcccggaggatgaggcagtgaacacagccaccacgatgcacataaagacaacacaccaagagacccgaagaaagctcaccaacaagcatataaacaag

SEQ ID NO: 651791 - DNA, 436 bp, Homo sapiens
gccccccagaaaccactgggagttctttattacatcaggggtggacctatttcgcctcggtcctatttgattcatgggcacatggttattctgatcgcattgaaaccatggctcacctgggtttctttattttcggagtgtgtcatgccaaggaaccttcaaactgcgacgcagagaaacttttaaaggttttcagaaacgtgaagccagcaattgtttggtaattgggccttttgaaaacaaatttgccgtgggaactttaatttgtttttggccagtcaagaaaaccctttttgggggaaattaatttcccggcataccccccccctttaccttttgggcagggattattttttaaagttttttttcatgtaagtagcaaacaggggtttactttcttttcatttcattaattcaattaaaacccttcccttta

SEQ ID NO: 651792 - DNA, 618 bp, Homo sapiens
  misc_feature (56)..(56): n is a, c, g, or t
  misc_feature (115)..(115): n is a, c, g, or t
  misc_feature (118)..(118): n is a, c, g, or t
  misc_feature (124)..(124): n is a, c, g, or t
  misc_feature (126)..(126): n is a, c, g, or t
  misc_feature (132)..(133): n is a, c, g, or t
  misc_feature (136)..(137): n is a, c, g, or t
  misc_feature (144)..(144): n is a, c, g, or t
  misc_feature (150)..(151): n is a, c, g, or t
  misc_feature (156)..(157): n is a, c, g, or t
  misc_feature (185)..(186): n is a, c, g, or t
  misc_feature (196)..(197): n is a, c, g, or t
tgtcctagctgctggttttccacgctggttttagctcccggcgtctgcaaaatgangattgaggaggtgaagagcactacgaagacgcagcgcatcgcctcccacagccacgtgnaangggctngnggctgnnacnnagagcgngcttgnnccaanncaggcggcctcagggcttgtgggccagnnagaacgcgcnnagaggcatgtggcgtcatatgtagaattaatcaaaagcaagaaaatggcttggaagatgctgtcttgtttggcagtgacctcctgtgaacttggcaagacatgctctgtgctcttgtggctatttgctcatgtgagcttggtgtagtaatgtgtcccccttcttgcccaagttggattggaggacggtgaatgtttaactcaaactgaggcatcaatgaatgacatgcaggtgcttgatgtgagaactatcctgcaggggccatttgggcttgcagaataaatgtgagaccaaggaagtttaattgaatggtgaagtcacagagctaactccgtgatgaaacagagaatcccatgggaggatatggcaaaaccatatagccaatgtgatcataggacctcaaaacatgccaaaggaaccaa

SEQ ID NO: 651793 - DNA, 932 bp, Homo sapiens
ttaacatccctaataggagggttctggttactgtgccactgcgcttcttggcagagctgtacacaaagaatttcagcagaataattggatgcagttggctgtggtttcagaagagccagaacaaaatttgaaccaggttaattcctgttgggatttctaattggcgaggtttcaattcaaccaatcaatttccagtgatttttgcaggcccccaagttataggtaacatttgtgcagcagaggagaagacccagatgtttgtaggaaaaatcaggccagaatgctgcctcttcaaacttaaatgttggatgcttctgggaatttagcaaagggaaagcaggcttgctgttggagcatttctccatctacattagctcagattatgtattttgatggaacaagatccaccttacagagaggaagacataccagctcccctaaatttgtatggcaaaacaaaattagatggagaaaaggctgtcctggagaacaatctaggagctgctgttttgaggattcctattctgtatggggaagttgaaaagctcgaagaaagtgctgtgactgttatgttgataaagtgcagttcagcaacaagtcagcaaacatggatcactggcagcagaggttccccacacatgtcaaagatgttggcactgtgtgtccggagctagccgagaagagaatgctggatcatccattaagggaacttttcactggtccggaatggaccgattgttaagtttgaatggctgttccaattgagattgccttaactcccccagagtcttaagactattatgaaggccggctacgaggacaacggtcggaatggctcgcttgttgtgcccttgggcctcgggttgggcacgaccattttggtacaacatgtgtcctggagaaggaaaggcgcccataagggggattaaaaa

SEQ ID NO: 651794 - DNA, 778 bp, Homo sapiens
  misc_feature (169)..(170): n is a, c, g, or t
gagagtagattcgtaactgttcattccacaaaaagcactggttctcgtgttctagtgccgcggatcgtccgcctgagcgttgagtcggaagactagtcccgtagtgacatacatcgcaccagtgagaaggatacctaatcgatcgtggtagttgctcatctacactttnnctactacagcagatcgggtaacgtagtgcatgtacattgttcgatcgtatatttgaagaaaagtcctcttgcgcttcgtagacgacgataagaagatgcactaagtaggtggagagacgagaaccgcttcggcataataacgcctgagacgtggcactcaatataggatggctctccactcgaggcgctaaacaatacatggctgagagaaccacgtatacaataagaagtctagactacaaaaaggagtggacatggagggcccccatacagcttggtttctagacgaccaatcacacgagtaggctctcgcagtgcactttttgagagaagtatggtccggtcaatcgaatgtgacatcgtgaaagattatgccttcgtacacatggagcgggcagaggatgcgaggggaggcactcaggggccttgataacaagcgaagagtacaaaggtgggatgtgtgtgggctgaaattccgagctgcggttgtgcctgagaatacacccttgcgtggtaccccatctccgggacgttctcggcatctgtgcgtcagctccctcaggaaccgtggaccttgaagtttaccttgctaagttcagacctttctc

SEQ ID NO: 651795 - DNA, 340 bp, Homo sapiens
  misc_feature (159)..(160): n is a, c, g, or t
cgaggtcgggggcccctgcacccgcgcactggccacgctcaagctgctgtccatccccctcgtgagcctggacatcccgtcaggctgggacgcagagaccggcagcgattcggaggacgggctgcggcctgacgtgctggtgtctctcgcgggcccaanngctgcgtggccgcttctccgggacgctcaccttcgtggccggcaggttcgtgcccgatgacgtgcgccgcaagattcctctgcgctgccgggatacacgggcgaccgctgcgtcgcggcactgtgacggccaccggcggccacacctcagggaccctcgccaataaacagccctccgtcc

SEQ ID NO: 651796 - DNA, 167 bp, Homo sapiens
gggtttctgtattaaaccatgatggatgagtgtataagtataatgtatatggtatattatgtgatatgatgatatgtggtatgtgtatgatgagtgatgtgtatatgatatatggatatgtatatagtatggatatgtatatatatgcgaatgtatatgtatggata

SEQ ID NO: 651797 - DNA, 458 bp, Homo sapiens
tcgcctctacgacggctccccctgtagctatggacaccaatcgactccgacagggctataacctctctgaacacacaatagctacgaaccaaactcgggattagctaccccactatgcttcgacctacacctcaaaagttacatccacaaaactgctcgccagaacactacgagccacagcttaaaactcaaaggacctggcggagcttcatctaccctctagaggagcctgttctgtaatcgctaaaacccgctcaacctacaacacctctagcaacagactatataccgacaatctaacaacaaaccctgatgaaggctacaaagtaagcgcaagtccccacgtaaagccgtacggtcacggtgtagcccatgaggtggcaagaaatgggctacatattctacccccgaaaatacgatcgcccttatgcccattaagggtcgaaggtggatcaagc

SEQ ID NO: 651798 - DNA, 221 bp, Homo sapiens
agcaaaggtgatggaactgttcgacagcatggcgccatagcccaggggaggggagtccttgttccagcgtagggcaggggtgtccaggccgtgcacggagcagttcacgactgcactgctgtttagatgtaagaaaagcaccttgccctggctgagctccaggaggttcagataggccacgcgcagctccagcgtattggagagctgcacgtcatctgcct

SEQ ID NO: 651799 - DNA, 325 bp, Homo sapiens
tgtagtgctgcatgagaatacttttggctccttctttgccttccaccatgattctggaggcctctccagccttgtggaacggtgagtacattacaacctcgtttttctttataaattacccagtttccagtatatcttcatagcagtatggaaagtaactaatacattaccggagacgtcttaggagatatgtaatagctgtaaatgccaggtccacatggatgggggggcctcaaaatcatggaggacggtgagtgagtgagcaaggtctgactgtaacttggttggccggcaagagagcttgtgcaggggaactcctttatat

SEQ ID NO: 651800 - DNA, 780 bp, Homo sapiens
  misc_feature (696)..(696): n is a, c, g, or t
acagaaaggtaaattagaaaatagaaaagattatggagcatgaaatttacctttctataaggcatattccatgcacatcatttacagagaaggtaaattagaaaatagaaaagattatggagcatgaaatccggtgcatgtaatgtaagcatatgttttatatgtatttttctctctgtacagaataatacatataaaacatatgcgtgcatgtaatgtaagcatatgtttcatatgtatttttctctctgtacagaataataaatatcactatatctgatgcaagtaattcacttccaggattgtgcatattaagcgatcagactaatcccatcattaaattattatcttgcacttatcattaagactccattaccatgtatgtgatatatacaggacatgttccatgtaacatgattttccgctttacaaaatgggtctgatttctgtgtttttacagagctgaacaagtcagcaaagcatctacaaaatgcctctgatttgtataaatacactggtgtgtaaacacaagtgaagatttcgacagtgggcagtcattctcacacttcacgtgcagtactatttccttgccctcatctcccatgctctcaattgttgtctacaggacttaaaactgacaaaggtattttaccatttgaacgttcttacagcaacaaaacaaaagcatctcacgtncaactccatgtgggcacccttaccggtccgctgaagttcctggtcacaaacgccagacacgcatgcccaccttccatggatacc

SEQ ID NO: 651801 - DNA, 397 bp, Homo sapiens
aatggcacgtagtgtagctctttcctagagaactcattctgactagattatgtacggagctggctgccatcatcgatagtctctcctagccagaacgtagtttcttgtccgatgcagctcctataccagtacttggctgggatgtcatcaggttgggcccggatactggtctcgccacgtagagaaatcacagatatacttagagagcatccatagtgcatccttggttagggtcaatccagtcatacccactgctccacactgggatgagctaagtctcaagaacacggcatgctgcgagctgggatcttactagagcctacaggaataagaagggtctcaatctggtagtggagagacttcagagtagcatccacttcatagtccttgggtctgg

SEQ ID NO: 651802 - DNA, 498 bp, Homo sapiens
tctgcagctataatttaggcatggtaggagctgtggttgtaacactctacaagatgggttgtccggaagccgccagcttcttttagaactcatcacattgaacgctgttccaaccagactctgcaacgtgatggactttcaacggcaagatctctgctttttacacgcgacgacttcgacgaacgaaacctctgaacgacggacacgcgggaacccacttttgttgaacgaacaactcgtgtggctattaatttggcccttcaacggtcgacaacgactgcgccctggcgggctaaacgcacgcgtccaccacatgggctggcctgcgactgtgcacacgaactggcccacacagcgcctccaggatggcgtatcacttaatctttcaaggcacttaacgtaacagcggctgaacatggcctaccaaattccagcatactgtggctgcaccattccaggaacgtttaccgttggccttgtttaccacttgcacttgcg

SEQ ID NO: 651803 - DNA, 354 bp, Homo sapiens
aggaggctcactcgagatcagtagaacacaaccgtagagaggccattgagcctaagacgcagaggagttagagaatggacacggcgcgagagatattgtcccggacgggaaagagagttaattatataccacacataagatattgaggattaatcgatatagcttctggaaactggaatgaccatctaagaacagcttaaagagtgcactcctatatctaggagaatgttgccaagaatcacaatttgaacttaagagcctaccgcgcctcctgaaatgtggatgtccaagattgcctatgtggactttacactttcccagagcaccctagagaccgccttggtgagatctgtg

SEQ ID NO: 651804 - DNA, 536 bp, Homo sapiens
tcctgtgtgtgttgggattacaggtgtgagctactgcgcctggcccaacaatattcttgctgtagctccaggggtttccaggaagaattgggggcaatgtggtgctcccaggaaggagttggattctttctcaaagactatgcagagaatagaaagatgtgatcctttatgatttgaaatcggccctactccagcctcctgatattgttggtggatgaaaggtatattgttgccaaagtcattaggtctgtttgaggcagctggtttcagtttccgtttctggggttaagctgttttgcctctgaaatttcttccatcagaagctactctttttttgttgcttgctaataggaaatcttttgccatttctgtacatttaagagtagccttcttggtcttcttgattcttttgatagcttgaaaccaaaaaattgagcttcagtttcttcttggtttagtgctttcctccttgttcttccttccgtttttaggagttcttgtgttctcaacacaccaggaagtccggaccgagctca

SEQ ID NO: 651805 - DNA, 187 bp, Homo sapiens
  misc_feature (40)..(40): n is a, c, g, or t
aaaaaataaaaggggttttcttccccaaaaaattatggcncccgcttgggtttttgggttgggggggccctggtaatgcccccgcgggtttattttgggttcccttaaaaaaccctttttttcccttcccaaattgcgggagaaaaactttccgccttcccaaaaaaggggcccctttaccctttta

SEQ ID NO: 651806 - DNA, 535 bp, Homo sapiens
  misc_feature (54)..(54): n is a, c, g, or t
  misc_feature (122)..(122): n is a, c, g, or t
  misc_feature (159)..(159): n is a, c, g, or t
  misc_feature (277)..(278): n is a, c, g, or t
  misc_feature (470)..(470): n is a, c, g, or t
acttggctctcgccctccggccgggaagcatggggcttcccaggctggtctgcnccttcttgctcgccgcctgctgctgctgtcctcgcgtcgcgggtgtgcccggagaggctgagcagccngcgcctgagctggtggaggtggaagtgggcagcacancccttctgaagtgcggcctctcccagtcccaaggcaacctcagccatgtcgactggttttctgtccacaaggagaagcggacgctcatcttccgtgtgcgccatggccagggccaganngaacctggggagtacgagcatgcgtgctcatgcctccatggacatgatggggcgtactcttggcccatgactcaatgtcaccctcccaatgactgatgctgcattcttctttgttgccatggagcaatgctgcccgtcgtgtacaccagtgaagttacgctgcattccatgcttcctgctgtacttaacaanatggctacctgtgcagtgatgtctcaaagcattccatggtacaatcccacctggtgcattcctcg

SEQ ID NO: 651807 - DNA, 217 bp, Homo sapiens
catgtctttattccatatttatagtctacttcctgtggctgggcgcagccgctcctgacggttccgtgggggtgcggggggttggacaggccactccttcttggaaggcaccaattttcccagccccactcccattacacacacacacacacacacacacacacacacacacacacacaacagacgagtgagacgagcggcgagagcactcaccccc

SEQ ID NO: 651808 - DNA, 362 bp, Homo sapiens
catttgcgtccaggtatcagattagactgagcaacacggggagacctcatctctacaaaaaatttaaaagaaaattaagtgggcatcatggcacgagcctgtggttcccgctactcgggaggctgaggtgggaggatcacctgagcccaggaggttgagacttgcagtgagctgagttcacaccactgcactcgagccttgatgacagacatgtgacggtctcaaaagaaaaaaaaaacaaaaaattgggtctcttaatgtccaggtgggaccccttaataaggtttgggggcccaaaacaggctttccctctgagagggcacagtccacgggtgggggagactccaagtttaaaattgggc

SEQ ID NO: 651809 - DNA, 426 bp, Homo sapiens
ctccaggtttctctaaggagatgctgcagccctggccggagtgcctggcttgaggtgtcagcagctggatggagctagggcctgagccatggcgggacaggcgtgaagggatgccgggttaattgagcccgggctggcgaatcactaggcctggagagagcgagtcagttagcgggagcgtccggctcctaagtgatcgacacgctcatcatgcatacccatctttcttggcccctagacccccaaccacataactctttccctactcctatcccaccatgagaaaggatagaagactaatactgctcttgtacccccaagatactctagtgctagacaattgagatggaaggatgccaaagaatagagacacaaaagcaaaggggttagggcaaagtggaccgcctgaatgctgcgccatgggat

SEQ ID NO: 651810 - DNA, 891 bp, Homo sapiens
ccaaggtgccaacgggggtgttgattccagcgcgggcttgtaccagaactaagatacgaagtatttgtggaggtgcgataaatagttaggcaggggctggttgctgagcagtgccgtagtcaaaaccacgtgttggttggggtggtcgcgggttccacaaacaacaaacgccaagacgacttctcgtgtgtagtggtggatggaatcgatcccccgccacgcgcagggctgtctctgtataaggagatgcgacgtgaaggaggtgacgtgcgcagattctcctgtgccgacggcggcgcgacggtatatttattgccatcgtgtacgtgcatagctctaacagttagtgtgggtgataacacacatctggcgccgggtcatagttcctgtgtggtatagacaacactcacacgtggcccgtcgcgtcgtgtggttacatattattcttgggtgcacgcgcacacttagctagtgattggtcatagctatgcgcttgtttacgcacgcacgcacacaccacgtttgctgctcgcgcgcgacggggcgcgtggtgctcactacgcatacacatcgcatgaagaatgttttaggggttggtcggcatgcgaatagaccgagggtctccatgtctgtgtataatagtaagggcgtggcttttattgtcggagagcgggtgtttttctcttcctataaaaatcagttgtgcccgagttctcggagtgtcttgtcccagcgtgtaatacgtcagacacaacaccgaggtgttgttgaaagcacgccaagtcgtggccacgtcaggaggagaaaggaattattccagtaagagcaggcgtttacgcctccccaccacataatcattacatacaacaaaacaaaataaaaaaaaacata

SEQ ID NO: 651811 - DNA, 192 bp, Homo sapiens
acctatttcatgtggaaaatgcaaacgaatcctgtgaaacattgctgtaaaaaacatgaacatttccatccaagccgagagttctccaagacaatgtctggttcctggggaaaatggcatggcaactgctggacccaaaaaaatggttgccagtctttaatctgcactgatggaacactttgggggctttcc

SEQ ID NO: 651812 - DNA, 299 bp, Homo sapiens
  misc_feature (186)..(186): n is a, c, g, or t
  misc_feature (199)..(199): n is a, c, g, or t
  misc_feature (213)..(213): n is a, c, g, or t
  misc_feature (256)..(256): n is a, c, g, or t
acctggtgggaggtgattggctcatgggggccgacttcccccttgctgttctcgtgatattgagtgagcgcttgtgggatctggttgtttaaaagcgtgcagccctcccacttcactctctctgtctctcctgctccaacatggccagacgtgcctgcttccccttcgccttctgccgtgattgtnagtttcctgaggnctccccagccacgnttcctgtacagcctgcagaacttctggcatggaaaagcccctntgcaatggtaaagatatcaataagcaccaggaggtatctaaat

SEQ ID NO: 651813 - DNA, 196 bp, Homo sapiens
gatgtgcagtgtaaatccagcacaaagtcgtcacttactaaagaacgtatgagattttgtgtgtgtgtgtgtgtatgtgtgcgtgtgtgtgtgtgttttttagctcatcagttatcgtgagtgtattttatgtgtggcccaagacaattctttttctaccaatgtggcccaggaaagccaagagattggccacccc

SEQ ID NO: 651814 - DNA, 118 bp, Homo sapiens
attagaggactgccggccttgtcttcatatgagctttactgcagcaattaatatagcatggagctggaataccgggtgtggaccagatgcctccaatgatcctgttaaaggattaaag

SEQ ID NO: 651815 - DNA, 681 bp, Homo sapiens
gggcggagtttggtgggagagcgagttcgagatgctccgggggcttagatgagataggggtgaagagcggtgactggttagaagcggcttgctggaatgaggagctatcgatggagaattaagggtggtaaggagtagacccgtgtgcatgtcgcagacttcggtgtagaatggccagagaaaggtggttaaaaaccttggtgccaagtcaaatgtgggcaagcgcgtttttgacagaatgactaatgcagggagaatgggcagtcaacttctgaattgattggccagtttggaggcggtttctatgtcaccttccttgtagcagataaggttattgtcacttcaaatcacatcagcggatactcagcacatctgggagtctgacgccaatgaattttctgtaattgctgactcaagaggaagcactctaggacggggaacggcaattacccttgtcttaaaagaagaagcatctgattaccttgaattggatacaattaaaaatctcgtcaaagaatattcgcagttcataaactttccgatttatgtatggagcagcaagactgaaactgttgaggagcagcatggaggaagaaggagcagcccaagaagtgaaaggtggatctgatgattgagctgcagtagaggaaggcggtaaagggagaggactcgctcgtgccg

SEQ ID NO: 651816 - DNA, 474 bp, Homo sapiens
  misc_feature (34)..(34): n is a, c, g, or t
  misc_feature (85)..(85): n is a, c, g, or t
  misc_feature (98)..(98): n is a, c, g, or t
  misc_feature (137)..(137): n is a, c, g, or t
  misc_feature (143)..(143): n is a, c, g, or t
cgtataaagaccagcttaggctgggcatggtggntcacacctgtaatcacagtgctttggaaggctgaggcaggaggatttcttnaggccaggggttnagaccagcctgggtaacatcgtgagaccacatttctgcnaaaatnaaatacaaaacttagccaggtgtagtggcatatacctgtagtcccagctacttgggaggctgaagcaggaagatcacttaagaccaggagtttaagactgcagtgagccattattgtgccactacatgccagcctgggcaacagtgagatcccatctctaaaaataatttaaagaccagcttaggccaggtacagtggcacacacctgtaatcccagctactcgggaggccaaggcaaaggaattgcttgagcctgggaggttgcagggagccaagactgcgccactgcattccacattccagcctgggcaacagagggagactctctctc

SEQ ID NO: 651817 - DNA, 320 bp, Homo sapiens
  misc_feature (8)..(8): n is a, c, g, or t
  misc_feature (18)..(18): n is a, c, g, or t
  misc_feature (71)..(71): n is a, c, g, or t
  misc_feature (180)..(180): n is a, c, g, or t
  misc_feature (253)..(253): n is a, c, g, or t
gtttcctncaatcaggcnggtctgtgagactggggttcatatcacttgggtattaagaggaaataagaaantatatggcagtcattggttgttgagactgggacatttgggttttactaagttaagagaaaagatcactctccccttttcaataacacaatgtcttttcattagaagccngaaatagcagggtttttctctgctgttccattccttcgaaaccctactcataattagcttcccacaactcctnctaggtttcttccaccattactcatcagcccggtctatttgtttttacagattatggtttctcaact

SEQ ID NO: 651818 - DNA, 190 bp, Homo sapiens
ccctcgtagcggacaactttgaacagcacgtacagcccgtacttgtattcctggcttcccatcaatcatccgcatgtcatggattcgggtctatggcagtgtacacaggcatggaggcagcagtggtgacaagaccgctgatcatgctggcacagaagtggcacaagatgttgtcatgagaagtagcctg

SEQ ID NO: 651819 - DNA, 377 bp, Homo sapiens
  misc_feature (377)..(377): n is a, c, g, or t
ccttctacgtctcatcactgggattgccagaaaaaatgtaggatgttttggttaaactagaattttagatcagcaaaaaatagtgtttaataaaaggcaatatttgggacatacttatactgaaatactcttcactgatgctctgtctgaagtttgaatttagccagcatcctgtgttttgatttactaagtctgacagctctacttgaagtggcaaaatgctccctgaccttttatccccgagatgtcaccatactcatttgacttcatgaggtaaacagctctgtccctttggcccctgtgggacgctgtgaaggtggagattatatatcctgtaatcagatcacttgtgcctacagtgatgagacgtagaaggn

SEQ ID NO: 651820 - DNA, 778 bp, Homo sapiens
gctctttccttgcctaacgcatgccatggctcgtggtacccaatgaagcatctgaagcggtgtggtcagctccaaagctatggatgctggataaattgaccggtgtgtttgctcctcgtccaagtccaccggatccccacatagtgagagagtgtctccccctcgatcgattttacctgaggaacagacttaggtatgcccgtgacaggagatgaagtagagaagattgcatgcagcggttcattaaaatcgatggcaaggtccgagctgatataacctactcctgtctgggattcatggatgtcactcggccattgacaaggacgggagagaattgccgtctgatctatgacaccttagggttcgctttgctgtacatcgtattacacctgtaggaggccaggtacaagttcgtgcaaagtgagaaagatctttgtgggcacgataatggtaactccctcatctggtgaccgtcaattgatgcccgtatcgcattcgatagcccgagtcccctcatcaaggtgaatgatagcattcagattgatttagagactggcaagattactgatttcatcaagtacgacggtggtaacctgtgtatggtgactggaggtgataactgggaagaactggtgtgatcacaagagagagaggcaccctggatcttttgacgtggttcacgtgaaagatgccaatggacacagtttgcgactcgacttgccaagattgcggttattggcaagggcaaaacatgggttttctcttcccgaaggaaagg

SEQ ID NO: 651821 - DNA, 249 bp, Homo sapiens
  misc_feature (74)..(74): n is a, c, g, or t
tacccggtcccatgcacagttaggcatgccccgatgaacacacagtcaggcattccagcaaacacacaggcagnccccgatgaacacacatgtcaggcattcctcagcaaacacacagtcaggcagcccctcgacgaacacacatgtcaggcatctcccagcaaacgcacagtcaggcaggccccgatgaacacacagtcaggcatctcccagcgaacacacaggcaggcctcgatgaacacacagtca

SEQ ID NO: 651822 - DNA, 241 bp, Homo sapiens
cccgactagcccgacaggagacactcgaacccgggaggcagaggctgcaggagccgaaatcgcaccactgcactccagcctgagcaacagagcgagacactgtctcaaaaaaaaagaaagaacgaaaagaaaataccttggaatgaaagacgggggggccattaagatgatgctgggggtgaaggtggaaagtcacggatgatgctgtcgggctagtcggggggggactcctctagagtcg

SEQ ID NO: 651823 - DNA, 578 bp, Homo sapiens
gctgtccaaataatcccatacagcagttatggttgtatccctattttacaaatgggaaaggtgaggctcaggaagtccaggtggaaatgtactcagagggcaaatggtggaggcaggctcgacagtccagttctggctggctcccaggagctgggtctatctttggaatcgttttgtatcctggaaccgattccacagggcctcttttcaggagtccagggctctcctcgaaatgtctctgtgctgcgtcggcgacttccctaaatccctttgaggcgccgggcaccacctccaagcagatttcatgggaaatggctgtcccacctcgtggccagatggcaaatcccagacatttgccgggaggaggcgagggctgtgtgacgggaggggcttggtggagcagctggtgcaggccttgctttccgagggcggcgtgacagccacatgtgcccgactgcggtgctgctgggggaatggcagccttacaggctgaccacctgcctcctcagggtggaacggcggggcttgggtgtgagcgtgctgaatcaagaactttcctggaaagtaggcactaggtg

SEQ ID NO: 651824 - DNA, 1057 bp, Homo sapiens
ccccacgggggctccactcgtgagaacagtggaggatgcagggttggcagtgtttacctgtcctgtggctgccagtggatgcccaccagggtactgtccaactagtgtggcactcctgcccagaggacgggtgagtgacaaggagatgaagacctaccgacctgggatgctggaggaccgctgatccccagtgatggcttgtgtgacctggagcgaggagcgctgaggccgtcatccagggccaggcagtcaggaaagagcagcaccggtggcccacgctccagtggcactcctgaccacggagaccccaggacccccggcccagcctcggtccacgccccttggaggagaacgtggttgacagggagcagattgacttcctggcagcgagacagcagattcctgagctctggagcaggcgaacaaggagggcccatcatagctccccggccagggggaccctgcaggcacaagcccaggggccatgcaggaccccaaggccttcaacaagccccaactggccaacgggcacgtggttcccatcaagccccaggtgaagggggtggtcagggaagagaacaaggtgcgtgctgtgccacctgggccagtgtcaagttgtggatgaccctggttccttgggctcagtggaagtcccggggagccccagggagacgcccatcgagcggagatcgtctggtcaggagcgtcaggagacctgcgaaagcaagaggggctaaggcagagaaccgacaaccaggaactggtggaaatcccacagtgcgctgtgaccagggtgagctgatcaggcccaggggaaaaaggcgccgtcctcaacgtcatgcgaattgttacaggcaaccagatttatgaaccacgggctgacgcctgcacgatggcggagtcacaaccaaagtgtctaaggaccacaacgtgcaccgaaacccaagcctacactagataggcgagtcctgagcgcaacagctaagatcgtgacaaccacagagtcagacaccggtcgacgaatagatcagagaagtcatagaccgagatcaacact

SEQ ID NO: 651825 - DNA, 855 bp, Homo sapiens
cgcaacacgactgccaacggcagagagcatgtcccgcccctttgaatggtgttctcggagttccccgtgttgtcctgcccggagtgcccccgcctggtattctcgggcaagtgtttttcagatgttgagattgtgggcacttgggccgcaatgccccggcacgtgcctccgccgtgtttcgtgcccccccgctctatgcccccgcttcctctggtttgggttccacgcggctcaacgacaagcaagcttttgtggccgaagactagtcgtgccccgccgttggtcaacacttggatggccccccattctgagtgttggcgtgacccccctgcctatagggtcccctggccaaccaactgttgtgaccctcctcccggtccacccccgtggggcgcctttcgtccgtcggttaataaacaagaccagcccacaccggggggctctcaccaaacaccagggcacacacaaacgagtgtctgcgatgtcggccagagggccaccaagctggtgccccgaagcatcttgagagcggtcgaacgaggctatttattccccgttttgcgcccccccccctcctaaacccccggctggaaacaccctcctcaaacacccttgtttccaaacggcccctaagagtcaagtagcaaaaaacacctctttagacagaacaggctgtgttaacacccctcccacaacatacaaaaaacatttttccgacccccactggccattctttacttgccgacgggcccatcttaaagataacaagtctatttaaaaccacccagactttttcatggaaccaccgccccccagtccccacaatgacccccccaaaaaaaacacaaacaaaca

SEQ ID NO: 651826 - DNA, 807 bp, Homo sapiens
  misc_feature (161)..(161): n is a, c, g, or t
  misc_feature (236)..(236): n is a, c, g, or t
  misc_feature (239)..(239): n is a, c, g, or t
  misc_feature (247)..(247): n is a, c, g, or t
  misc_feature (251)..(251): n is a, c, g, or t
  misc_feature (271)..(272): n is a, c, g, or t
  misc_feature (275)..(275): n is a, c, g, or t
  misc_feature (277)..(277): n is a, c, g, or t
  misc_feature (291)..(291): n is a, c, g, or t
aatgttaggtatagctctatagtagtctcgaggagtagggcagtttgccgtaaaagcctagatagggattgtgcggtgtgtgatgctagggtagaatccgagtatgtggagaataaatgtgcatagtggggattttattttaagtttgttggttaggtagntgaggtctagggctgttagaagtcctaggaaagtgacagcgagggctgtgagttttaggtagagggggattgttnttnggaagggngatncgggggaaatgttgttagtnntgngnaatcctgcgaatangcttacgtttgtcatacgtattatgatgtttagttgtgttgatgctattttcgttaacgttattatggtagttgattactaggttatacttatttattattttattttattatattatttttttatattttattatattatataattattatgttgtttcctgttctattttatatttttttatgtctttttattatttgatgtactattattttttattatattataatgatattctcttatgttcctacctttatatattttatctatatcattattattatcattattctattatttaattttgtctttttttttattgttactttcatgatattttttattattttgatttctaattttattacatattcttcattttcttattattattttcttttttattattattatattaattattttccatatcatctttgacattatctttaattattatttatgattatttattgatcttctttattatgtattatattttatactttttcgttg

SEQ ID NO: 651827 - DNA, 391 bp, Homo sapiens
cgccaataggaggctctcagaggcaacagcaaataggtaacacttatatcacccatggccatattattcttattattctaatagcctattcaaaacttttcatcttgatcagctgtaagagatcataagttccatacgcttgagtgttcaaactgagagcagatggtcactcaacagtgggtaagcaaggtgccaggttgccagggatcagtgtggaatattagcttacctaccctcagctgagtaagagcttactcagcttggggccgggtacagtggctcatgcccgcaatcccagcactttagaaggccgaggagggcagatcacgaggtcaggagatcgagaccatcctggccaacctggtaaaacccccgtctctaccaaaaatac

SEQ ID NO: 651828 - DNA, 717 bp, Homo sapiens
  misc_feature (161)..(161): n is a, c, g, or t
  misc_feature (236)..(236): n is a, c, g, or t
  misc_feature (239)..(239): n is a, c, g, or t
  misc_feature (247)..(247): n is a, c, g, or t
  misc_feature (251)..(251): n is a, c, g, or t
  misc_feature (271)..(272): n is a, c, g, or t
  misc_feature (275)..(275): n is a, c, g, or t
  misc_feature (277)..(277): n is a, c, g, or t
  misc_feature (291)..(291): n is a, c, g, or t
aatgttaggtatagctctatagtagtctcgaggagtagggcagtttgccgtaaaagcctagatagggattgtgcggtgtgtgatgctagggtagaatccgagtatgtggagaataaatgtgcatagtggggattttattttaagtttgttggttaggtagntgaggtctagggctgttagaagtcctaggaaagtgacagcgagggctgtgagttttaggtagagggggattgttnttnggaagggngatncgggggaaatgttgttagtnntgngnaatcctgcgaatangcttccgcatgccaggcgtttaatggggtttaatagggtgggattattttcattaatggtagtaagggtggggaagcgaggttgacctgttagaggtgagaagaaatattcgagtgctataggcgcttcttagggaggtagcgatgagagtcatagatagggctcaggcatttgtgtatgatatgttagcggtttcgatgatgtggtctctggagtagaaacctgtgaggaaaggtattcctgctcatgctagactgccaatggtgagggaggttgaagtgagaggtatcgtctttgagtagtcctcctattgttcgtatatcttgttcattgttaaggttgtcggatgacggacccggagcacatatatagtatggcctttgacaaagcgtcggtacagatgtgcatgaatgctaggtgtcgtta

SEQ ID NO: 651829 - DNA, 696 bp, Homo sapiens
  misc_feature (268)..(268): n is a, c, g, or t
  misc_feature (544)..(544): n is a, c, g, or t
tcttttaaaaagttttttcacgaaaaaaaccccccttcaaacgagggcagtccattctaacgcccgggcatctctgttttaagggcccctcatgcccccaggttggaacagttttcctagggcccaaccctgttggggttggttcgggtacccaagggtgaagccaaacaaatttttctgtggtacccctttccctttcatgcccaggctttattcttgcccctcaccagttgaaggtttcaaacaccagtattcagaaggcatccgnctccattaagtgtgcagccctaaaaagacatttccaattaggccagggattaccccctgtgggagggtggacagccaatggttcagtggcctggctgttggcaggaactccaagtccccagcccttttgggcagtttagggccccccctttgtttcataaggcatgggtcattttttttgggggtcctatcccaaatggaaaaaaaaggggctttaagttttggcttttttttttttggggttctctgcacctaaggaaaccaggccctgggtganttttcaaattttgttccccctcggtgagcaacagtttcacccatccaaccaggacaaaatggtgattggggccccttggtgagctgtgtttttcctaggaggtaaaaaactttgggaaactgtggttaataaaaactaagtgtgggggtcca

SEQ ID NO: 651830 - DNA, 390 bp, Homo sapiens
gtattactctcctacacgtaatatcgtttggctgtgcacctaccataaatctcatcttgtaactgataactcccagaattcccacctgctgtgtggaatgagctggtcgtgaggtatctgaatcatgggggtcaggtctttcccaggctattctcataatagtgaatatgtctcacgagatctgatggtttcaaaaaggggagtttccccgcacaagctctcgtcttgtctgctgccatgtgagatgtgcctttcaccttccaccatgattgtgaggcctccccagccacgtggaactctaagtctaataaacctctttcttttgtaaattgcccagtctcggttatgtctttatcagcagcatgaaaacagactaatacaggcggctag

SEQ ID NO: 651831 - DNA, 394 bp, Homo sapiens
  misc_feature (49)..(49): n is a, c, g, or t
  misc_feature (71)..(71): n is a, c, g, or t
  misc_feature (90)..(90): n is a, c, g, or t
  misc_feature (117)..(117): n is a, c, g, or t
  misc_feature (137)..(137): n is a, c, g, or t
  misc_feature (174)..(174): n is a, c, g, or t
  misc_feature (176)..(176): n is a, c, g, or t
  misc_feature (204)..(204): n is a, c, g, or t
  misc_feature (218)..(218): n is a, c, g, or t
  misc_feature (224)..(224): n is a, c, g, or t
  misc_feature (240)..(240): n is a, c, g, or t
  misc_feature (250)..(250): n is a, c, g, or t
  misc_feature (271)..(271): n is a, c, g, or t
  misc_feature (276)..(276): n is a, c, g, or t
  misc_feature (281)..(281): n is a, c, g, or t
  misc_feature (285)..(285): n is a, c, g, or t
  misc_feature (294)..(294): n is a, c, g, or t
  misc_feature (333)..(333): n is a, c, g, or t
  misc_feature (372)..(372): n is a, c, g, or t
ctaccagaatgggcagggtggctgtagtaatcggtgaagaaaggcatcncgccagacccgccctgactccnttagtgagtggatgaggtnggcgaaggctgaaagccggggcttggnctggcaccctatgccatgcntggcacacaaggcctgcccccggggagccactctgtngnaatcctctcgaggcaccgcgggacacanacggcgcccaaccnggaagncgacgcgtcccctganccagtcattnacggcagactcgtcgccattncatgncgccnggcnccgggtggnaacccagtccatgtcccggtcatgaccaatgtccatggnaatctggttcacctgtgtcacccacacaaaccagtcgcntcccaggaacctgattataaag

SEQ ID NO: 651832 - DNA, 236 bp, Homo sapiens
agttcgacggagactctctaagagtcctgaggtggtacaggccatcgcaaggtgagggggctaagtctgctagctcatgtctctcttcctctatacctagaaaaccaccagtctcactcccatgataagccattaagttcatgaatggatcaattcatgcatgaaggcaagaaccctcaggaccccacttatcaataccaccagattagggattacatttctttcttttttttttt

SEQ ID NO: 651833 - DNA, 1693 bp, Homo sapiens
  misc_feature (320)..(320): n is a, c, g, or t
gtattagtcgcgctgatcctattactacgatgtttggtttcttttcgtctaggctccacgtgttctacaaatgcgttgttggttgctgcgcgctgattgtgttccgtgttctatgttgtactcccttggtgttcatattttctccagggggctctttctccgtgtctactttcctgttaacagctattagtttgtgtcccgtcacactatccgctgggggtgacctactagagcatatgggttttcgctggctcccctttggtcgcccttgcacacagaatttgtggaatcaggatcaacctctgctcagaatgattccngctggtggggaagatggtgaacatttatgacctcccgggggtcctctccgctttggataagagatagctctttggggcccgataaaagttgttgctggacgaccgacccaacccccccacggggttttaatgatatatttggtccccccccgcccaacggacagtctttccgttgggggaagatggtttcctttaaaatttttcaaagggggaaaaggcctgtctaagacaaccacccctgggggtgcaccttgaaccacgagatacccccggaagtggtctgtgcccccacgccaccggtaaagggatgttcccccccttcaagtccaggatggaaaatttggggcaactgaccaaatgtggtcacgtcggcggtggggatgcaaacacaactgggagaggggggccacatatgagacaaatgtaagaacaacagtggggcacacaaagtgccctctctttccgcgagatatatattgtagggggcctttctcggggcgccttaccacaaaaagggggcacacaacaggctgctctccacccgcccgcatatatttttacttttggacttggtgtttatactgagagcacagggacacacagtgccccgttctatagatcagtgtgttggagacagatgagtccccacatgccttgcactgctcacatcctgcatattctggtgagagaacaccacaccgctgtgcgcacaaaatttgctaaaaagggtgggtggcgtctcactgtccgctgtataaagaagctatatgtatagtcttctcacaagggccaccacgcgcgtggcgtgggcacacacgcgtgtttataccacgggctcgcagagtgtgggaatgaacatatattgtggcaccacacaactcgtgatacgagagcacagccttgttcctgtggagaaataaggggggtgtatagctttgtgggagacctcgaaaactcgtgtcctcggagaggcgcccacagagccaattgtttccccacaggttcaagtgtgtgcacatgtaataaatagaagttttccgtcctttcctggccccacctctggcaatgtggtgagagacacctgagaccacgtcacagagatggtaagttgagagggtgagactttttcctcgctgtcctcggcctcttattaaattttaactcacctcacctttgagatttaatgttttgtagtcacaaatttgaaacttcacttttggggggtatttttggtaactgtgaatggggtcacatccaaattaattaaatctgaaaaatagccaaccccgaatgttaaaaagaaaaaactgggggggaaaagacccggtttaccgtgatagagccaagccatccaagaatctttaaggaaggtt

SEQ ID NO: 651834 - DNA, 952 bp, Homo sapiens
  misc_feature (303)..(303): n is a, c, g, or t
  misc_feature (448)..(449): n is a, c, g, or t
  misc_feature (645)..(645): n is a, c, g, or t
  misc_feature (686)..(686): n is a, c, g, or t
  misc_feature (764)..(764): n is a, c, g, or t
gtaatcagagaaaaagtctttaacgtccaccgattagtcatccccataagctaaagaattctaattttaaacgtattctctagttctttcatgggagaagcacgatttggtgtaccaccgcaagtattgacgtacacctcatcagataaccggctatgtagtatcgtgacataatctgccatgtcatccatgaagtatttgtacggtaccataaagtaccttagtccacgcttagtaggtagcattaaaaaacccaaataccacgatcaagaatcgcgccatccatctagttgctgtacatangcgaatcgtatcaaagcgaaatcaaaacgcactcatatataatcgagcaccactcaatcgatgcgaatcgtcccaataagtcatctcgcctctgacaccgatttaagcgaataaccgaaactaaaatcataaactcgacctcatnntaacatgttgacattaggttaccaattaatatgctgccatgtgtactctgttaacaattgagtgcgactattttacgacgtcacatagtccagcttcttcgatacctccaatggaattgtaactcctctctcgtctaggaatagcggtgtccgcgtttgcgaccaatctctagtctcttcacgtggaaaattcaantaatccactgcgagcaaaagaagttgcttaccttcattccntcggcgtcgcggtgtgtcctcattgagagacatctttggtggggggtatgcttaatatgttgacaccttgtaatccgngaccattcttgggtttccttactttcagtggttccataaatgccttaaatatgccgcacaacgttcccccttaaaataatgaccatcacagattgtgatcaacagggttctatcgacccttatttaaaccaactcacagggaagctctcccattgcattttggtaatttccgtcttggggaggttgtg

SEQ ID NO: 651835 - DNA, 227 bp, Homo sapiens
  misc_feature (47)..(47): n is a, c, g, or t
cccccccgccctcacccccacccactcccaaagcacgccagaaaaangcctagcacactcaggatccgttcctgcttgtcttgccctacctccacgtgcacacagccctgttctccagcaaagactttgctggcaaaagtcaacaccggagtctacgcgggatgctcgttgaggaaatggactgcgagtgtgcgcaggacctcgccccttgctatcgcgaccctgct

SEQ ID NO: 651836 - DNA, 115 bp, Homo sapiens
cctcagactgcgcccgctcgcaacgatccaaactacgatgctttttacactagcagtcaactttacatcatacgctgattggagcttggaatttaccgtggactgttaggcacca

SEQ ID NO: 651837 - DNA, 947 bp, Homo sapiens
  misc_feature (855)..(855): n is a, c, g, or t
tcaagaaaaacacaaacacaacctcacaaataatgtgatcaagtctgccacatgcgcttgccgatctgcgtcccacactctgtttgaacctcgttatctcctcgctctttcgtttgcgttgtgacaagtatttggtccacttgccaattccatccaatctgccgctcgactctacacttgccgtgaagccatgtgtcccatacaattggtttccccacacatcacgataatctcgttgccactatgacccttttatccacggctaacatctgcttcgcacatttttccatacactaaccgcacgtgcctcgacacccaaaggaaaattggtagagctccccaggttccgtgacatctccgaaaacaatttattaaaatgggcacgccaattaatttgcttccgtataggccccacacccgtcatgttttccatcacaccccatgtgatatttcctgaacctctatcaaaacacgttgcccctactacttgtaataattttataaaaggatatactttttcacaggcccacgaattgttctcctcccctagatcctgtgaataatatttcaaactctgcctcgtatataaatatacacacgcccccctccactaaggtgatatatccccggagctctgaatgcggttattgcccagtgtaaccaccagattgtctgtgggaaatgggtcgtctgatatcaatgtgccacaccagaagaattgtcatcacacattcgcgagtaccacttcggtggagaaattctaatccccaaatgcatgacgccccctgacagggcggcagcaaataaccagtcctctatagagtgattaaaatatggggactctttttgcgaccntttaatcttcgaaagcgagaaattggccaccaataagtactttacaaaatttgggggcccaaattccaataaatgttttccccccccaaaga

SEQ ID NO: 651838 - DNA, 425 bp, Homo sapiens
gggattagcagtcgcgagaagtatagctttctcctgcactgaactctttaggggatgaaattcccagcccactgctgccatcacgcgagtcagtctggcttatgagcttgagttgactgctggaagaagacgctattgtactgcaatgtataaactttggaggatgaaggacaagaaacttataacgctgacaactctaagctctcactgctcctcgagaagacttccttgtagacccgtgccaactgtctttagatgcacatgtggatataggcttggtatcatctgctgctggtctgactggggctctgacacctgagccttctccaacagacagagatgctacagaccctgatgcatacactcttaattttttgaaagcagtctgtatactctccttctttccatccctggcttcggatttc

SEQ ID NO: 651839 - DNA, 252 bp, Homo sapiens
agtcatcaagatatgcgatcatggtgcaggcttccttgtggtcaactggagactgacttggatcaggtgcattgacgtcttgtgtgttagttgccgttgagacggtcttgcctgtcgccagcggatgcatggtcgatcttggtcatagaactccacctccaggttcagcaatctcttgcccagcctcccgagtagctgggattacaggtgcatgccaccatggctaggtaattattgtatttttagtagaga

SEQ ID NO: 651840 - DNA, 1240 bp, Homo sapiens
ttggcgcgcgcccggggcggtggcgctggaggagctcgagacggagcctagttatgtctgggaggcgaacgcggtccggaggagtccgctcagcgctccgggccaagggccccatctcctactaagcctctgcggaggtcccagacggaaatcagtgctctgaactccactgagcatccatccctgtaaatctggccgaagacacccagtgcggctgcagtcagaaagcccatcgtcttaaagaggatcgtggcccatgctgtagaggtcccagtgtgtccaatcgacctcgctaggagccctaggatttcactttcttcttgcgcagaaagaaaacggagtcccgccatggccacgtggcagcattacgtacaggagggacgcatttatgcgaagacacagcaggcgtccctgaacagcccacacagcactcctgtgccgaaccctgaggccgagtccagctccaaggaaggagagctggacgccagagacttggaaatgtctaagaccagtcaggcgttcctacagcgcggctggagaccctgggctctgcatctatcgtccacccaggccgccaggtcctgcatttggcattcgaggtggctgctgggggcagaagacttgtacggagtctcgccagtggtgtgctccaaactcaccgaggtcccccaggatacgtgcaaatgcctgcgacccagaagtgactctccctggaaatctcgccagcaaccgaggaaacagaacacgtagagaacgaagaacaatgcaagcacatcttggagaaccggagctgcgctgagtgggcctggggccatgaactggcgagttagaagctgctgagcaagttggagatgtccagggctgacctgagaggcagaaggggagagaggcaccatggacaagcatcgcaccagacaggccacggaaacataagcaacctaccacatgagggagaaggacacataccgcgaccacctcacgacgggctacgcacatagaaaaaaagagcaagcgaagacactagcagaccatgccaccccaggaagagcataccggccgacacggccacgcaaactaggtgaaaacaaaacagagacagaagggacgcaccacaaacggaggcacaagcacagacgaacacgccaacgaaagaacacagaagagaaatgcgaagatcgattgcacaaacaggcgagcaacaatggcacgcaaaaagtagcgggtgaaagcagaacgaccg

SEQ ID NO: 651841 - DNA, 471 bp, Homo sapiens
atatccttcttgagtatataaaccaaaaagcatccaagacaggtttcaatcagtttagaagtttattttgccaaggttaaggatgttcctgggagacaggtctgtgcctttctctaaagatggttttgaggtcttcagtatttaaaggggaaacgcaggctggagaggaaagatggaggggatgatcacattattgaatccatatgttacaagagaaaaggagcaagtaggggaacagtcaattatgtatttgtcttgtgctcagtaaagtggccctttatataatagaaggtgaacattacagtagctacctgtagaggtatttaaccctttatctgtagctatctgcttaggaacaaaaggagagacagcttcttgcatgactcagctttcagctaaattatttccttttggcatagtgatttggggtcttgagttttaattttcctttcacaagtaccttaccagaaa

SEQ ID NO: 651842 - DNA, 874 bp, Homo sapiens
  misc_feature (502)..(502): n is a, c, g, or t
  misc_feature (707)..(707): n is a, c, g, or t
agcggctcttgaggtgacgtggcgggcggagaacctgtagtgactctagggcaggcgcatctttcgcgtcacgatctcaccacctgtgatgttaccaaggttgacgccacttctcacacgagagttctcgaggcagagcaagccacaagttaccataggtagcaatcgggcggtgtaactcatgggaaatcctgaggcggtcaaaggcgtattgctggagttcatactgtcagagttcacacaatgatgcgtagcaaacgacaatatttagagatcaaggctggcgatactgcattacatgcatacagatgttatagagacttttgactgacaccgagagttgccgctcgagtgcatgacatcgtgataggatccttgttcgggagcagctagcacctgtacgacgtttcctagcggacagttccaagggtagccaaagggtacacttcatgattatactcagaccactggtatctctattggtctgagctgataccgtggntccaacgcattgagttctttcgaatgcggcgtagcctagtgacgtgaaatcggttggcacgcgacgtgagtcggagtgctaggacctctgtcgtagattgactacggctggctaattagacactcttatggctcctgccagactcctcccaggaacattcgtgcaaagcagcgcatgggacgtagcctactaggaccgatgcatngagagactctgatagcaatagtttgtcgatgaactaacagaacatgacccattgatttaggtcgtcacacgacatagttcaaggcttaccaggaatccaagtacgagacaggatgcctttgtcattttggtccaagggtaagcagtcaggcaggagggagactccca

SEQ ID NO: 651843 - DNA, 374 bp, Homo sapiens
ggaaaaccgattttatcttgtgatgggggaaacccctgtgagctcttatcactgaagagacatgctatgggcgacgagagcgaggaagacgagcgcgacggttcacgtggatcacgccttccgggaagagctgatgaccgtgctgcaggctgggaaggcgctgggtggagaggacagtgagaacgaggaggagcccttgttgtggtgggatgaggccatgatggccctggaccagagcctcgccagcctctttgccgagcggaagctgcgtatccaggcccggcgagacgagaagaacaagctgcagaaggagaaggctctgcggcgcgacttccagatccgggtgctggacctggtggaggtgctagtgaccc

SEQ ID NO: 651844 - DNA, 901 bp, Homo sapiens
gtgcagtggcagccctgggggccctattcccttctggagtgaagcacaagcctcagtgaagggggaagcagttgatgctgtgagtgtgccaaagcccgggacctctacttgaacagttctactgtggtgagtgctggagaactaagtgaaacacctgtacaatatggttgtacctgctgccctgactccctgcttagcacacccttatgtgcagtgctgccccttccacccttttcccctgatgacctgtctgctcctgcattgtgatgtgtgtgtgcatggtgtccaagcccctgacttgtgaatctggttgtgttgttgcaccccttgaattgtggattttggtgagaattgtgtgctactcctgtaagatggctttttattctttgctttgtgcttaggctttgtcgatgaactggtggttcctctttccctcttgttgtcccgttcttgtgtgtgacctcgttgttttcccgcatttctttggcttgcttgttgttccgcctcagcacagtggttgccttttggccagtgtcgactatccttactgttttgtttacagagttgcccctattgtaagttctacgcgctttttgcctattagtggatgagcacccacggttgtgcggtttgctttgacttccccatttgcccttggatatttatctctttacacatttgcacaaaatgtcccttggaagtacaaagtttgttctttcaactacttccccagatccccattacttttgcccagtagtttatttgggagcccgcgttcaattaattgcatatatgtggttggtgcgttcaaatgtgacctgtcggttaagccccgtttggccatggaagccactgtgggtgtatgaacttggggatcgaactcgtatctttgggaagggag

SEQ ID NO: 651845 - DNA, 194 bp, Homo sapiens
ctgacttctctgtccattgatctatatgtctatgcggtacatactgtattgattaccattggtttgtagtaaatattgaaatcaggaagcataagagtcctctccttcttcttcttttaattaatataattttttggaaaacaacccttggcctggaccccagggaaaaggaaagggaattaaatgaaggccaa

SEQ ID NO: 651846 - DNA, 490 bp, Homo sapiens
gcacgtttaaagtaatacattgacctacaatatttacataacttttatgttagaaaaagatcttgtaaccaaatgagaagccttaaagaagctgaatgcacgggcttagcaataacaaccacaatcactggaggagcatggctggccggcgggaacagaacctggatgacaccctccatcatgctcactatctagttgacgactgcaatgactttatgtgtgcgctcagtagggctgatgtcaggtctgtactggtgggacaatacataccggcatgccatatataatacatatgtaggggacaacttagagtggactgtaagagctattagtataatctatactggcagacaaaaatgaatcttcagaactttccctgaattccatgctgtgcaggtagtatcacgatccggcccagaagcatcctgtgtacaaaaacaacgaagctgaccatcacttaaaatacggtcacatggctaccaatatcact

SEQ ID NO: 651847 - DNA, 158 bp, Homo sapiens
cgagttcataggggtatcttgagtgatagctggtagagtgattcctacgaattataggtgatgctgcctgacttaaaatgtcgtatctctatggaccttagaagaatacattctggaatctggcatatgcacaaagaaatgtccatatcagtacatag

SEQ ID NO: 651848 - DNA, 427 bp, Homo sapiens
  misc_feature (93)..(93): n is a, c, g, or t
ggggggggggtggtctccccccggggggggaaaggcccccctcttttgggaagggcggcccccccagggggtttgggggtctttccaatgttntgggcggtgtgggggggggggcccctctttctttttcccgggggggggggtccaaatgtggttttccccgcgccgggaccaccataatttttgtgggggggggggccccccccccccgggtccccccccccgggggggggggggtttttttaggggggtttaagggggggggcccccccccccccctctcttggggggggggggggggggggggggttttttttttttcccccccccgggtgggggggggggcccccggggggggccctttttttttttccccccccccccctggggggggcccccccccctttgggttttttttttgggggga

SEQ ID NO: 651849 - DNA, 481 bp, Homo sapiens
cagtatgtacctgggtgttaaacggactccagtgatgaacggagtagcaggactaaatctgagtgccgtctcctgaacaggaagccgtgtaaaaacgtgtgccgagcatatcataagcagatgggcactgacaagttgagtcatcttaatagtgattctgttactttgactgagttctatttaattgctgctctacgtattacttggctcagggcaatattaacgttgaggttatgggtcactgcttttaatctccagcccacagaactaccattaaccagaaataagacaagcagcggctattgggtccgttttagtcttgaatatataataacgtgccttgggctttacaaactgctatgtagagttagcagttattaagatgaaaatcactagacagctcattggaataagggcttctccaaagaactctgtagggttatatctattgttactatttcatttaattaagatatactgt

SEQ ID NO: 651850 - DNA, 301 bp, Homo sapiens
gctcgacccagatatacggctatacatcctacaatgcacaggacaacattatccagccagaatgtcaatcgtgttgtgtttaaaatcctgctttttggtgctagggattaggggaaagtacatattagatgaggtctagaagttaggaggtattgtggagtccagagttggcctgcctaatcattcttgaattctcccgttccccaaaaggagacaaaatcccagaatgaagatcaccagctcagtcatttcatcttgctgcttcaaacacacttttttttttttttttttttctgagacg

SEQ ID NO: 651851 - DNA, 222 bp, Homo sapiens
ctaatctggcattttgctattaacaaaaacttgatggaaacattttggatttaaatttgctttggtaaatcaaatcctatttttatattaaattgtatcatggtatttttaaaacgcttcatcttaatttctgcgtgatcttttgttggttctgtgttactattttaattttcactgctgtaaatatgtgttcgcagattattaaatatgtgttaaacatga

SEQ ID NO: 651852 - DNA, 271 bp, Homo sapiens
  misc_feature (140)..(140): n is a, c, g, or t
  misc_feature (178)..(178): n is a, c, g, or t
attgagctcaggagtttgaaaccagtctggacaacatagggagaccccatctctaccggaggaaaaaaaaaagagtcaggcctggtggtgtgcgcctgtggtcccggctactcgggaggctgaggcaggacgattgcttnagcttgggaaatcaaggttgcagtgagctatgattgtntggccacactccatcctgggtcacagagtgagaccttgtctcaaaaaagtaacataaggtaaaaagaagccttgctttagcacaggtatgaag

SEQ ID NO: 651853 - DNA, 508 bp, Homo sapiens
gtataagtcattaatttaaaaaggggggagtaaaggcttttatgcggccattcctataaactaggacttgaacatcaagggaaaaatagacaaagactaaataataaagtcattcaaaagcacagaagcacatcacatacaccagcaaggtttccaactacggcacggattaactaaaatactctcaaatagctttcaatagctcgtcctaaaaaaaaaattaaatttcctttttcttacaagtcccaggcttaaccaagggcaaaaattcctgtgcaacaacggatacactcataagtggcacatagtgctccagggctctttattagataccaataatggctagcacttggtcacggccatcaaattttctaatagtctaagagtcaggtaaataaaagttcataaggaatttaaagaaaattatttttcccattcttagatcagttccatagaaaactattaattttttaaaagtaggcagtaaaagggggtggggggggggtgg

SEQ ID NO: 651854 - DNA, 290 bp, Homo sapiens
tcctaggcctgtaccagtggcgtgtgagtttgagagtcttttagagaggggctgcaaagaagaaggtcgtccacatattgaatgatgactgggagacaggtttaaggaagtgaggtttcgggctagagcttgtccaaagaaatgagggctatccctgaagccctgagggaggacggtccatgtgagttgttgtgactggagggtgtcagggtcagtccaggtgaaagcaaataggtttggggaatcagggtgtagggaaatagtaaagaaggcatccttcaggtcaattg

SEQ ID NO: 651855 - DNA, 113 bp, Homo sapiens
tgtgacggaagcgtctccgttgggtccggccgctctgcgtacctctgaggaaaagcttgcaccagtgtgacgcggatctgtcaacatgggtaccggagaccccaacaatgccg

SEQ ID NO: 651856 - DNA, 801 bp, Homo sapiens
ggccgggctgacaggagcgtggctgtctcctactctccgaccatggacgtgtgctcgcccactgatatcggtgtactccgaaagagggggagtcgatctaggcaacaaatgtcactattagcctgctgtattcaaggctcctattcgaccagatcattgtgaacatttgttcacaccaacttgctgctaaaaacaacagacagccctatgctgtcagtgaattacgcaggtcatcagactagtgctgagtctatgggcgtactggcagcagcgtagtggctcgaattcccagagttcgaggtggtgcgactcaccgtgtctggccagggtgctttacggaaacatgtgtcgtggaggccgcatgtttgcaccaatccaaaacctggccgccgtctcgcgcatcgtagcacgtgaacacaagccaaaaacgatacgccatctgtactggcctgactagcctcaggccctatccagcactaggtcatgtctacaaggtcatcggtattgcaggaagtccctgaactatcctttggtatgttgaatgatcacaggttgcacacggctacaagcaacgaccaaggcaagctagtctatgcctccttacacaaacttacaagcctggaactgatatcacaaaacggtctactgcccttctcatgcgaactgacacaccctgggcaaacgcgccaacaccatcgagaaaaccggaacgccgtaatccaagcgccaggggccccgtggcattaattctcataatgacggataaatggtactcactccaaggactataaaaaacatacc

SEQ ID NO: 651857 - DNA, 355 bp, Homo sapiens
gtgttaccgtctgagcagctgggaacaagagccccccagctggaccaccctatatccttctcacctccagatacccacctcctggagagaagtgttccagtgccccaggcaatgcgatggtaggtcccctacaaaggtgcagcatgagggaggctagggaaagtttggggcatggagaagagaagggtgaatggaatggagacccattgctctacagtcccactcctggcacaggtccaagccccctatagtgtcacagtctcaccactgcccaatctcaattccgcacccacctacacctgcatgctcagatgagaacccagacccacccttaccccttcccagcttgctcaga

SEQ ID NO: 651858 - DNA, 109 bp, Homo sapiens
gggctgggtcggagtggtaaaaggctcagaaaaatctggaaaatcgggatatggatcgtgagcttggacaggtggtgtgtggtggcctagccatgtgatttcacttcca

SEQ ID NO: 651859 - DNA, 385 bp, Homo sapiens
ttgtcccctataggttccgcgaaaagtcgcccgtgtgcataatttgtctccaaaaagggtataatgtgatttgtcacattttccatctctctcttcagcaccccatgttttcgcaaatccggtcctctcatcccctattttcacgtgctctccaattgcaccctgctgaagattctgaccaaggccactccacccagagcctttgaaatttccttctcccaatcctttaaccctatgacgcaccctcactctgtgtgtcgcatctcgccgaacacacccctgtggatatgaccgagtctagagagaaagagcagggatatagaggtccccctcctctgtgtgaaaaacgcgctcgtgccgtctcgcacagcccgggggacccact

SEQ ID NO: 651860 - DNA, 389 bp, Homo sapiens
attggcggccgcgtcgacccaggatctgtgatacgtgttaaaggctttttaatatcatacactgcaacaggatctggaatatgtggtaaaggctttttaatatcatacactgtaccaggatctgtgatatgtgttaaaggctttttaatatcatacactgtaccaggatctgtgatacgtgttaaaggctttttaatatcatacactgtaccaggatctgtgatatgtgttaaacgctttttaatatcatatactgtaccaggatctgtgatacgtgttaaacgctttttaatatcatacactgcacaattcttaaaatgcaaaaggaaaacaagagttctgaaaaaggagtcgacgcggccgcgaatttagtagtagtaggcggccgc

SEQ ID NO: 651861 - DNA, 329 bp, Homo sapiens
gatccctgaatgcagcctgctgaggaagacagtggtgaatcttcacacaatatccagttttagtccaaacccgagcctctctcctgtggtctgccttcccggcccatccaggtgggtgttttcatctgtaccgtacccaaatctctacttcttatgtacggagacaggacacacctgattttatatgtttgctcagagctcaagagggcagggctctgttgccagtccctgccttccacccacaacccacgcctctaattgtcttaggatttaacactgagccacacactgactatctccaggatgcagtgggccttcgcctcagcagg

SEQ ID NO: 651862 - DNA, 283 bp, Homo sapiens
aaagttgagaactagtaagtgtacacattgttgtactgaagcacttgttcgatactcgttgatcatcaaacaacctgtgtgtaatatgtttttccaaaaaacgtagcacccttcagcaggaccctataaaactttcctccagcccttgcctctttgcaggtagccccttctctgctgagctgcccactgcaacatattttcacaatttctctaataaatctgcccttctttacctacaactatcttggtaaatggctttaccacctgcaaaactgaccctagg

SEQ ID NO: 651863 - DNA, 1057 bp, Homo sapiens
aaaaaactacgagctaaggtacgaggcctgcgtgttaatagatatctcccagcgaagttcacttctccggaactctgccttttcccagaaggaggaggggaaaaatgaccaagttccagcgaggcagtgacattcaacggattggatgtgaacctacactgaggaggacactgagctgctggatctaaccagagagtaagctgtacacgagagtgtgatgctggagaactttagagaaccatggcatcagtgggacactcaagatcacatgtaaagacacagcactatgcatatcccacgattgagagacgggaagaacaggcattaagagaatgaaacgacgctctcacaacacaccaaaggaggatacagcactacagaagaacgtgcaatagagataagcgttgtcaatagactggacgaaaccactaacacagtgcagagaaacccaatgagcagaaaaacaccacatgaatgacacatgacactgcacatgatctctgcccaagcacaggaaccagcatcatcgtgcaaatgatcgaccacggcgatctgaagcaaaacatgcaaacaacataacaatataagagagaacagtggagacaactagccaacacaactatagaaaacacaggcaaaaatgaaaacaatacaagaccaactacgcaatacaatacagaaataatcaacgacaacacaaattacaccatgacacataatacatgccacagacaagagcctagacacaatataaacacccaacaaccacaacacaacaatgacaaaacaaatgaaagccagaatctaaaagaaccaaaataactattaactgcgaggagacaacatataacacacaatgataacaccaaacaaacaagacattacaaatatgaccaccaattgtcacacctgaaccatcacgaaccagcatacacacaatcatacggaataacagcaaaaaaaatacacaaaccttagactccacaccatcacacacacacacataacaaagaccataaccgacagaccttacaaaacagacaacacagaaacataa

SEQ ID NO: 651864 - DNA, 417 bp, Homo sapiens
gacctcgtaatcagaagttcaatagcagagtaaaagtattcacatctttatgtccagaaagtcagtgagtctataaatcgagagtgattagagtaatactttttcacatttccaaagttggcatgttaactttaaatgcgtacaatcttagagtggtaggcaaggttttacactatggaccttatatagggaagggagggggtgcctgtgtggtattgtagactgttcacttggcagaggcatttcatccttcatgaagccattcaggattttgaatggcatatgagtgcttggctcttccttctgttctaacttcacagagaatgcagttgtcttgacttcaggtctgtctgtactgtgggcaagtaaatgcagtactgttctgatcccgctgctattgaaacttctaaaactagg

SEQ ID NO: 651865 - DNA, 342 bp, Homo sapiens
gtttcttggagctttcacacacttaaaaccatgaaacatctattattgctactattgtgtgtgtttctagataagtcccaaggtgtcaacgacacatgaggagggtttcttcagagcccgtggtcattgaccccttgacaagaagagagaagaggcttccagactgagggctggcccaccgcccataagaggaggtggctattgggctctttcagccaaagcaggtgtcactcgaaagtggaaaggtgtgctacacgatgtcagatgcaagaagctttgctacaacaggaaaggccaatcacaaatagtgttgatgagtttaacaatgtgggctgttttccg

SEQ ID NO: 651866 - DNA, 428 bp, Homo sapiens
cccgggttcacgccattctcctgcctcagcctcccaggtggctgggactgcgggtcctgccaccatgcccagctaatttttttgtatttttttggtggagatggggtttcgccgtgttggccaggatggtctcgatctcctgacctcgtgatccacccgccttggcctcccaaagtgctgggattacaggcgtgaaccaccgcgcctggctgagttcaaaaccattatgagcagcagaggaggacctcatctctatcaagaacttaaaaaaaaaaaaaattagctgggtgtggggtcttggccctgtaagtcccagctactgaggaggtcaagcaggagaatcacctgagtccaggagttcaaggttgcagtgagctgtaatcccaccactgcactccatcctggcaacaaagcaagaccctgtctcg

SEQ ID NO: 651867 - DNA, 700 bp, Homo sapiens
  misc_feature (205)..(205): n is a, c, g, or t
  misc_feature (356)..(356): n is a, c, g, or t
  misc_feature (442)..(442): n is a, c, g, or t
gtcggcacgaggtcgtctcgaaggaaaaaaaaaaaaaagaaaagaaaaaatgatgtcgatgatgatagcaaatatgtagtgttcctgtgtcaagtttgggggtgtataactcttaatcttcacaataatcttataagatactattattatccccttttacaaacgaggacactgattgcacaaagaattgtgagaaattttaccncaaggtttactttagccagttaaggtgaggggagttcaagaatttaggattcaaattctagaatgttttgggtttcagagcacttggcccaatccgtgcctttcttaaagttaagaacaaatgtgggtgtctcagaaccaagtgtggcccnacaattttctctctagaaatcttattaatctcgaagaggggcccacaaagaagaaaaaagacacgagacagtgtgtgtagaactcnctgtagcctgtgaagaggggtctttaaggggggcaaagggttcccctgggaaagccacaccctgtgctctcttctcaggagggccaccacattcacctgtggccctcccatcccttttcgtgggaactcttgggaagccccatttcttccgcaacaacaggtgggccgaggccatcttcccgtgaacggttcattcgagaaaggctccagaatgtggccgtggcccaatataagcgttactccggtggggggactctt

SEQ ID NO: 651868 - DNA, 194 bp, Homo sapiens
cgatctagaggaccccacgccgacgcgatcaaagtggtcagtccaagaatgtacacttgatgaatcgtacgttacccgcgactggtatatgcgtcaaagtggctcgtatcaaagcaactactccccgcactgtggtatcagttccagatatcatcgcaggttttggtcctgagacagcaggaagatcaccaagc

SEQ ID NO: 651869 - DNA, 106 bp, Homo sapiens
agattggaggagttacgcgcgagagcctttgcccatgtgcgaattcgtctgatgaactgtgtgggtgacgccttttacgatggggttacaatttgtgtgtgtgtga

SEQ ID NO: 651870 - DNA, 110 bp, Homo sapiens
ggagctcggtaccacgagttcggagttccagacacacaactcgagctttggccccactctccatgatgaaccgcagcacaccatagcaggccctcctcccaaacaccccc

SEQ ID NO: 651871 - DNA, 738 bp, Homo sapiens
gagcctgcgcatgctcgagcccggtattgtgccctccagaatagatgtgccccaaccccgaggaccctgctggaatgcgctgtgagcagcggatatgagcgggtatccatgttggctgcagaccattgtcaatgagccacgtgggacccagctgtgaaagctcgtaatgcacgagctgcatctgtcgagcaatacccaagatgtccattctgagtcccacaaggcgttgggctgaacctgtggcatgtacgctgaatatggcctgtgcccccatggcttccccgccaattccatgggccttggatgggcaccaatggccacccatgcagacgtcttggatgggctgtccatggacgacttgccattgaaagcttggtcaaaccatggactgtgcccacaatggactgaatgcgtacttgaactatcacgatgccccttgttgtggacccgcatatggctcatggccactatagagcttccataataccttcatactacacttgccccaggtctgtcgacatcatggtgcataccctcgtccaccattgtgcctctcaatgccaaccattcacccaatatcccgacgcatgtaggctttgcagttaccttaacacgccctcacgataacatgttctttgcaggactgaacctagcgcgccaatcacagaggacatgaaccattgattcgttgctcaggatactccgttgcgacaagcccgctactggtggccctcctgg

SEQ ID NO: 651872 - DNA, 420 bp, Homo sapiens
agtggcatacattaggtctttttcttttctttttttctgtgactcatacggagctgttagaagtgacttcatataatattatacagtgtaataaaatgggttttcgatgtgtgaggataccctcatgttatttagattatggacacaattaacaattccagacagaattattttctcatgtttgaagtagtataggcacatggccctttatgggaggggggaagctcttctctgtgtgcccacttttcacatccctctccagcatgactctcccctttctgtcagtcttaccccaggagtccctggcctccttcctctccttgacactgtttgctttgcaagcatatgaaatactggcaccctatgaccagggtagactacaaccagggttggggtgcaggagccatggagtaaatggca

SEQ ID NO: 651873 - DNA, 267 bp, Homo sapiens
cactaatcattagagaaatgcaaatcaaaactaaaatgagataccatctcacaccagtcagaatgaatattattaagaagtcaaaaaaataacagatgctggcaaggttgtgaagaaaagggaacacttatactgctgatgggagcaagatgcgcatcttcgtcccatcagcggatttctatacattgacctctggtgggttataaaaacagcagtaacgacgtgtcagacaatgacgctggtttgatgggactgatgggagcaaga

SEQ ID NO: 651874 - DNA, 160 bp, Homo sapiens
atctcgccaagtgtcaatcactgttgtgtggattatttatttgttttaaattagtcaccatggaaaacactccttgcattcttagtgttcaccctgttgactcatccaactgggctcatgtggcccattgactgaaacggatacactgggtacctgagct

SEQ ID NO: 651875 - DNA, 100 bp, Homo sapiens
tccaatgctctcacagaggggcgggagccaaggtggtgaggtaaggagtgaagatacaggagagtggtggaataggaggcagcgaggaactgctgggagg

SEQ ID NO: 651876 - DNA, 199 bp, Homo sapiens
  misc_feature (45)..(45): n is a, c, g, or t
  misc_feature (128)..(128): n is a, c, g, or t
  misc_feature (157)..(157): n is a, c, g, or t
  misc_feature (185)..(185): n is a, c, g, or t
gggtgtgcaccagtctgctcagccctctggaggaaccagagagcnccttcttgacgtgtccttactagcagggcgccgtgctgtccccaccagtagagcaggcagcctctttcttccctggcattganacccagccagttgggccggcatcagctgngtggggtgtggagtgtgtgtgtatgaangcgtgtggtggccc

SEQ ID NO: 651877 - DNA, 213 bp, Homo sapiens
cccccccttttttttaaagaaaaagggtaatgggttttaaaacgggggtttttttccctaaagcaattttttttttttcggtttaaagaaggattggcagccgaagcccgtttgccaaaaaaaaagggccgatttttttgaaagggggggggcccgtttttaaacccacccccggccccctttaaaaaacaataaaacatttttttcccccca

SEQ ID NO: 651878 - DNA, 387 bp, Homo sapiens
  misc_feature (53)..(53): n is a, c, g, or t
  misc_feature (152)..(152): n is a, c, g, or t
  misc_feature (197)..(197): n is a, c, g, or t
  misc_feature (215)..(216): n is a, c, g, or t
  misc_feature (222)..(223): n is a, c, g, or t
  misc_feature (227)..(228): n is a, c, g, or t
  misc_feature (241)..(241): n is a, c, g, or t
  misc_feature (248)..(249): n is a, c, g, or t
  misc_feature (251)..(251): n is a, c, g, or t
  misc_feature (257)..(257): n is a, c, g, or t
  misc_feature (260)..(262): n is a, c, g, or t
  misc_feature (282)..(282): n is a, c, g, or t
  misc_feature (353)..(353): n is a, c, g, or t
ccgagctcgggtcacggggcgcccccgccgccctcctcgtcgtcctccacgtngaggcccgggatgccgcggatctggcgctgcagcgccctcccagcaagggcacggcgccctcctcctcctcctctgggggcggcggcggtggcggcganacggccccgggggctggctctgggggcacgggaggctgcgccggncacgccctctgcgccctnngagatnnctgnngcttcgcaatgcnaaaaatnntnaagggnaannnaataagaataataatgctcnttctcctcctcggggctgttggtgaaagggttctagaaaattaaggtagagataaagatttttgatgtttngtttgttgttgagaataatgtttgaaaaaatgag

SEQ ID NO: 651879 - DNA, 861 bp, Homo sapiens
  misc_feature (661)..(661): n is a, c, g, or t
tcttgggtgcgtccccgggtttcacaaacaagtgtttggccaaccattttttgatgtaattaagcaagagggattctgggggaatttgcccgctgtcctgtttggcttgtggcgaccatataatcctggggggctaccaatgggtctattttagagcttctgtccgcttccctcccaattgcaaatgtgcaccccacgatggaggacacgcctgtgagtactaggtctcttgttcgacctcctcattgcaccgtccccggcttcgagactggttgtcttgtgcttgggacatgggccttcctatactgtggtttctcccaagtcaggagctgacccggggagccaccactaaaggtgctggtcaatagcatcaataaacccaaccatatcacatcatctgggacaattcttaagaaaaccattgtatgaaatccatttccagccagtagtactttgtattgtgttgagcagatttcaccagagctctttgacaataacagcgatcttagtctttaccaataaggaaaacagctccagtttgggaagtatccagagatgggatatcaaacacccagatcctctggtcaccagattgtatgtgcaactgcaactaatcaggccaggaaaaaagccccagcccactgtgctcaccagattgttnttttgtatattgggagccgaaatccctgaaaccaattggggtcccttcccagtctccatcattaccaaatggccattttggctgggtcggtggttcaagcctataatccccgtgctttacaaggctgaggcaggaggcttttttgagaaataggagttcaagaccaacctgggcaacatagccagatcctgtttttccca

SEQ ID NO: 651880 - DNA, 201 bp, Homo sapiens
acgcacagagtaagagaatgcttgggaacgcacaggagagagaacgcagctgaacacacggtggtggctgaggaagaacgtcgggagatcacacagggaggagaacgccaggtgaacgcacaagagaaaacgcctggtgaacggcgcaagaaagtagatagccaggttaacgcacagggagaacgccgcgggaacacacag

SEQ ID NO: 651881 - DNA, 94 bp, Homo sapiens
atcgccagacgcccacgagtgtcgtagttcggcaagtcatcactagcaagctcttctccataagcacacaatgtagaagagcttggggtatgtt

SEQ ID NO: 651882 - DNA, 883 bp, Homo sapiens
  misc_feature (27)..(27): n is a, c, g, or t
  misc_feature (74)..(74): n is a, c, g, or t
  misc_feature (88)..(88): n is a, c, g, or t
  misc_feature (120)..(120): n is a, c, g, or t
  misc_feature (184)..(184): n is a, c, g, or t
  misc_feature (186)..(186): n is a, c, g, or t
  misc_feature (189)..(189): n is a, c, g, or t
  misc_feature (192)..(192): n is a, c, g, or t
  misc_feature (219)..(219): n is a, c, g, or t
  misc_feature (233)..(233): n is a, c, g, or t
  misc_feature (235)..(236): n is a, c, g, or t
  misc_feature (352)..(352): n is a, c, g, or t
  misc_feature (357)..(357): n is a, c, g, or t
  misc_feature (359)..(359): n is a, c, g, or t
  misc_feature (411)..(412): n is a, c, g, or t
  misc_feature (438)..(438): n is a, c, g, or t
  misc_feature (782)..(782): n is a, c, g, or t
  misc_feature (820)..(820): n is a, c, g, or t
ccccgcacccccaatgctcttttgctncctaagccccctatgccctggaggtgagggcagctctcttgtctctnccctgcctcctccnttttccctccccacattttgtataaaaccttnaatttcttttttttaaaaatggtgggggtgggtgggtgccgagggataggggatattccgtgtntntgnggntttctaagctctgggaaaagtggtggnagggggagggaggngnnagttaagggggtcacctccattctggggaatttatatttgaattgaggctttggccttaacacccaggaacttttctattacaatcgcttaggaagtaaagccttgtctccctccntgttntntgcctcttgtacccctctgacccacccgctctgccccactcccagccctccnnagccccagccctgcctgccctgcccntccagggggccatgagtgcctaggtttctcataccccacaaggtcacagcaggggagggagggacaattttataatgaaccaaaaattccatgtgttggggggtggggggaggaggagggtgaggggtgccgcccatgggccacaaatctctacaagtgcctgctatccctctcccactccccaccccagcaccggtccaaccccttcatccccagctgctcctaggactggcccatgggcaggcgggtggggggatgggaagggggtgccctgaaaccaaactggaagccccctctgcctcccagctggggcctctggggtggggtggggggctgtggtcaanccttattctgtattggggactgagggtggggggagtanaggggcccctggagaatgtattcaaaacaataaaactttggacctttggatgcagtgaaaaaa

SEQ ID NO: 651883 - DNA, 419 bp, Homo sapiens
atcttagaccgtgaagtaggcaaccataagctacacaaacaagtggctattgtagcagcaggtaacttggaaactgacaatgccattgtaaataccatgtcatcagctttaattagccgttttgcacactttgaagttaaactcaaaaacgatgaatggttagactgggcagcatctgttggtattgacttccgtatcacttcatttcttggcttcaaaccagacctactctacaccttcaatcctgatgcaactggcccgtatgcagcaccccgtacttgggatatgcttagtcgtgttgtcaatggcaaccctattgacagtgatgatattccattattggcttcaatggttggtgaaggtgttgctcgtgagttcatcacttacaccaaactctataaagagttacctgtcgacgc

SEQ ID NO: 651884 - DNA, 770 bp, Homo sapiens
  misc_feature (2)..(2): n is a, c, g, or t
  misc_feature (8)..(8): n is a, c, g, or t
  misc_feature (30)..(30): n is a, c, g, or t
  misc_feature (62)..(62): n is a, c, g, or t
  misc_feature (65)..(65): n is a, c, g, or t
  misc_feature (73)..(73): n is a, c, g, or t
  misc_feature (76)..(76): n is a, c, g, or t
  misc_feature (79)..(79): n is a, c, g, or t
  misc_feature (106)..(106): n is a, c, g, or t
  misc_feature (120)..(120): n is a, c, g, or t
  misc_feature (122)..(123): n is a, c, g, or t
  misc_feature (239)..(239): n is a, c, g, or t
  misc_feature (244)..(244): n is a, c, g, or t
  misc_feature (246)..(246): n is a, c, g, or t
  misc_feature (298)..(299): n is a, c, g, or t
  misc_feature (325)..(325): n is a, c, g, or t
  misc_feature (669)..(669): n is a, c, g, or t
  misc_feature (707)..(707): n is a, c, g, or t
anaaaaantgggtgggggggtggggtgggntgcccccaggggcttatgggggcctatttccnctntcctcttntgnggntttctaagctctgggaaaagtggtggnagggggagggaggngnnagttaagggggtcacctccattctggggaatttatatttgaattgaggctttggccttaacacccaggaacttttctattacaatcgcttaggaagtaaagccttgtctccctccntgttntntgcctcttgtacccctctgacccacccgctctgccccactcccagccctccnnagccccagccctgcctgccctgcccntccagggggccatgagtgcctaggtttctcataccccacaaggtcacagcaggggagggagggacaattttataatgaaccaaaaattccatgtgttggggggtggggggaggaggagggtgaggggtgccgcccatgggccacaaatctctacaagtgcctgctatccctctcccactccccaccccagcaccggtccaaccccttcatccccagctgctcctaggactggcccatgggcaggcgggtggggggatgggaagggggtgccctgaaaccaaactggaagccccctctgcctcccagctggggcctctggggtggggtggggggctgtggtcaanccttattctgtattggggactgagggtggggggagtanaggggcccctggagaatgtattcaaaacaataaaactttggacctttggatgcagtgaaaaaa

SEQ ID NO: 651885 - DNA, 380 bp, Homo sapiens
  misc_feature (102)..(102): n is a, c, g, or t
  misc_feature (114)..(115): n is a, c, g, or t
  misc_feature (118)..(118): n is a, c, g, or t
  misc_feature (146)..(146): n is a, c, g, or t
  misc_feature (168)..(169): n is a, c, g, or t
  misc_feature (171)..(171): n is a, c, g, or t
gggcccgcctaacgacccggaaacgggaacccaagcgtttaatgaagacaatctcaaattcatccctcatggactgcatggagggcccgtgtagccaatcanccccgatttggnntgncctttctgctgtgttatgtattccaagnagaccgtgtggctttggaatgnngnttagccaaggcccaggctttggtgcagtacctggaggagcccctcacccaagtggcggcatcttaacggcattggtggaagctggggtcagaaaagagaaatgaccatttggagggcggggcctcctagaagaaccttcttagacaatggggggaggatgggactttgttttttccaagaataaacttcaactcctgtcaaaaaaaaaa

SEQ ID NO: 651886 - DNA, 371 bp, Homo sapiens
cgaagccatggcttttgaaatttccaatgggagccatgagttactgtctcagggacagaagcagatttttattcagacttccgatgggcttatcttgtcccctccaggtacaatagtgtctcaggaggaggatattgtcacagtgactgatgcagaggggcgtgctgccggatggccccgctaaagggattcctcttaaaagttttgaagccgcccccccccgtgggccaaggcccctcacattgaagtggagccgaaccctagatccgcctgtttttacccagagaaggtctatggcaagcaatgtatatttttctaatgtcaatattgcacagatgaaccttttatttataaagaataatgtctttctg

SEQ ID NO: 651887 - DNA, 269 bp, Homo sapiens
  misc_feature (260)..(260): n is a, c, g, or t
  misc_feature (262)..(262): n is a, c, g, or t
ggcaggtggatcatttgaggtcaggagttcgagaccagcctggctaacatggtgaaagcttgtctctactaatacaattagccaggtggtagtgagaggtgacaacgggctagcagccctcgctcgctctcagcacctccttggcctcagcgtctgctcttgccatgcttgaggggcccttcagccagccgctgcactgtgggcccctctctgggctggccgagggggagctggctccctctgcttgcggggagctgtgnanagagggc

SEQ ID NO: 651888 - DNA, 155 bp, Homo sapiens
tagcgcggtgcgcctttgccttcggcggtggccggcacagccggagccccttggcaatacgggcacagagcacgcttccgaagcttgggagtagagccaggtacgcacgtcgatcgagcttgcggctgacaccctttgcgaaccgggctgtgtag

SEQ ID NO: 651889 - DNA, 484 bp, Homo sapiens
aggtgttctgatagaaatgtttggaagttagtgtagattttgacaatgtataggcaggggtaccgtcactctgaagaagaatattcaaggaccatttaacagcaactgtatgaagggtcctctttcccatactcttaacttactggtttaggtctggaaatttccatcaagggctgaaggattaccagtgaaggataataatggaaacttcaacatatttcctttgatgaatccatgtactatggagtatctattaggggctgagatttggcagattaacaggataccaagggtcccctataggcgactttgctttgaaaagggtgagtgtggcacattgctaacccacgggcaggcagggaaaagctcatattgcacattgcactgatctggcatagagggtcatcatcccctgggaacagtgacccaagagcttttaggagctcacacactgaacacaccggtattctcccctttcttcttc

SEQ ID NO: 651890 - DNA, 179 bp, Homo sapiens
cctcatctttatggactgtagccaaatgatggaattttctttggtgcgcaggggcccatacaagtagcttcatctgtcaaacctggtctcaatcctggttcctggtgacacccacctggaaaagcatttttcaccatgtcatgtgaacttcagattcacagaaatacttttcttgtgga

SEQ ID NO: 651891 - DNA, 922 bp, Homo sapiens
  misc_feature (253)..(253): n is a, c, g, or t
  misc_feature (321)..(321): n is a, c, g, or t
  misc_feature (341)..(341): n is a, c, g, or t
  misc_feature (360)..(360): n is a, c, g, or t
  misc_feature (365)..(365): n is a, c, g, or t
  misc_feature (385)..(385): n is a, c, g, or t
  misc_feature (435)..(435): n is a, c, g, or t
  misc_feature (454)..(454): n is a, c, g, or t
  misc_feature (507)..(507): n is a, c, g, or t
  misc_feature (543)..(543): n is a, c, g, or t
  misc_feature (618)..(618): n is a, c, g, or t
  misc_feature (620)..(620): n is a, c, g, or t
  misc_feature (651)..(651): n is a, c, g, or t
  misc_feature (659)..(659): n is a, c, g, or t
  misc_feature (662)..(662): n is a, c, g, or t
  misc_feature (667)..(667): n is a, c, g, or t
  misc_feature (677)..(677): n is a, c, g, or t
  misc_feature (681)..(681): n is a, c, g, or t
  misc_feature (685)..(685): n is a, c, g, or t
  misc_feature (691)..(691): n is a, c, g, or t
  misc_feature (695)..(695): n is a, c, g, or t
  misc_feature (706)..(706): n is a, c, g, or t
  misc_feature (712)..(713): n is a, c, g, or t
aatcaaagtactgctgaactgtgagtgcagtattctaaacatttcagctaggaacaccactgatttagaaacaaaactgttgtctctggtttctgaatttaaaatgttgggattacctgtttaaatctgtcttgggggatgtagagattaagtctgtacatgtgcgtgcacatatattcatgcaccctctgatttggttttcttgtttctgagttcttagaaagtacccacatactctttttttttttggtanaagtagctgtcatagagtgaagaaaggataagactttaaacagtggatccttttggtgtttcctacanactattttttgaaatttaanatcacaaactcatttccgngtttnagaaagtagatgatgattcncgaggagtaaggcttgccaagcagcatgctcagggggtttaaggctgtcncatgcagctgagaaaggtntgtccaagtcataagtaggtaatggatagggtatgaactagtcaaaatttganccattatgatccaggtagatttcctctggagagacngatctgatgtcagttctagccaggtagattttaacttccaccttttaatcagtatcacttctgtgcttaactatngntgtcacctggtctgtctccatgtctaaaatnctgcgagntgnctaancttcggcctntggngtcnatggtngtcnggaccttcagncgaagnntaagcaagatgcccatttccccatgactgtggttgtggtaacatttccctttcagtagttcacaccgtttggttcactcatattggcacacaacacacaaaaaaatgtggccgccgcgcaaaatttacacatttgggcgccagtagcagaacagccaaagcgcaaaggggtcaaaaaccgccccctaacaggggggcgcacaggcacca

SEQ ID NO: 651892 - DNA, 174 bp, Homo sapiens
tttcttgcccacgatcgggctccttgtttcctcagacacaagaatattgaagttggccaggcacgggggctcacgcctgtaatcccagcacttggggaggccaaggtgggcagatcacgagttcaggagatcaagaccatcctggctaacatggtgaaactcaatctctactaa

SEQ ID NO: 651893 - DNA, 510 bp, Homo sapiens
  misc_feature (293)..(293): n is a, c, g, or t
atggaaacagacatactgtactaacactaatcatataaagctagagtgcttttgttaatatttgacaaagactccagattaaggaatattatcagagattaagaaggatggcttataataaagtggccaattcatcaagacatacaattcttaaatgtatattcctctaataatagagcttcttagaaatcagtaaaaaaaattttcacaaaaattactaaatatttgaatattaaacaatacatttctaaataacccatgctgtaaaaaaggacatcacaaggtaattaganaatgttttgaagtcaatgaaaatgaaattataacatatcaagaacgtcaggggacagctaaagcaatacttaacagcaaacttatactttaaaataagtatattagaaaattttgaaaggtttaaaatcaattacctaagcttacaattatgaagctaaaaaatgaagagcaagtaaaacccaaagtcattagaaggaaagatataatggtagtagg

SEQ ID NO: 651894 - DNA, 157 bp, Homo sapiens
cgacgcgtgcgacgcgatgatggacaaggtcggccggccgcgcggcttgatccgcttcgatacgctggcgaaccaggcctgccgcgccaagggcgaaccggcgacgcataaattcatccgaaagcgcacgatgatctatgcgggcgttctcgccctc

SEQ ID NO: 651895 - DNA, 582 bp, Homo sapiens
cgtagtatattagcagtgcaatagggaaacgtagttaatactttgttgtattccaaacactacgaaatgaagaaaactaattttttatgtttttttgagtcagtctcgctctgtcacccaggctggagtacggtggcacgatctcagctcaccgcgacctctgcctcctgggttcaagcgattctcccgcctcagcctcctgagtagctgggattacaggtgcatgccaccgtgcccagctaactttttgtatttttagtagaaatggggtttcaccatgttggccaggctggtcttgacctgctgacctcaagtgatccacccaccttgccctcctcaagtgctgggattactggcatgagccaccagacctggcccacacccagctaatttttaaaacttttttgtagagatagagtctccctatgttgcccaggctgacctccaactcctggactcaagcaatcctcctgcctcagtctcccaaaatgctgggattacaggtgtgaaccagcatgcccagccctttaatggtcttattcttacaacccttatttcacattatttctcaaaccaaagtct

SEQ ID NO: 651896 - DNA, 1053 bp, Homo sapiens
gggcgcggtggctcacgcttgtaatcccagcactttgggaggccgaggcgggcggatcacgaggtcatgagatcgagaccatcctggctaacacggtgaaaccccgtctctactaaaaaaaatacaaaaaaaaaattagccgggcgtgatggcgggcgcctgtagtcccagctactcaggaggctgaggcaggagaatggcgtgaacccgggaggcggaggttgcagtgagccgagatcgcaccattgcactccagtctgggcaacagagtgagattccgtctcaaaaaaaaaagagaaaccggaaaaaaaatagcattatacctcttccttgtctcaaccgccatgaaacctcctgaacactccaaattcagttgaataatccaaaacaacaatttaactacggtttaacacatacttctcacttctatatagtaatagtatactttaaaaagcctcagggatatataatcttctaaccagctaccaattcagtgcagctacatttaaccaacctatgtctctagttgaaaaacaactaggccatattatcactgctgtgtaacgcctcagtgcctaacatgggtgccaaataaatatcgtagaaattacccccttgtcaaaaaccattcgtattgggttaccacttgccagaatttcaaagggcccctgtattcactgtaactcccttagagcactcactaacttgcagatgggaagtcctcaggttattgacctgggccggggatggtgacctctgttcacattaaggtacgctccaatatcttataaaacgccgtgcaagtacattgacctgacattgtaaccgaaagcattcgctgcccgtttgtctaagaggttaatttttgtcaacaaagccaactgagggtatcgcctagaatagcgttaacttgtatgggattcgaggcagaccaggtgttcgacaattatgtgggcattgtccgggacaattgcgagaaagacatgccccgagaagagtcaacatcttcagagtaagtgtgggctgagacttcgcgtgagagaggttgagtta

SEQ ID NO: 651897 - DNA, 377 bp, Homo sapiens
ccatcgcacgacatgagcctcaccatgtgctagcctgcaccaagtgctagcctcagccagtcagagcatgcaccagtctagcctgcttcatagtcactccagacagcccagagagacagcagaagtatgtggtcacagcatgcccttaggaccggcacagatgctgatccctatccattctgtgttagtccatttgcttgaattagcattctgtctcccccaaaaaagaatgtgctatgaagctttctttcctacacactctgagtctctgaatgaagctgaaggtcttagtaccagagctagttttcagctgctcagaattcatctgaagagagacttaagatgaaagcaaatgattcagctccttggtcgtggcg

SEQ ID NO: 651898 - DNA, 222 bp, Homo sapiens
ttagcaggagcttatctccacttggttgcagcgcttgtagtaaatgctagcctcctcgctgaaggctccactacctccggggccatgtactccgccgagccgcagggagtgagcagctccggggtggagataggggagcagtcccctgttgagtttggatgccgctgcccagtgtcagaacgtcacagatcttcactgggggagaccctggttgagggtgct

SEQ ID NO: 651899 - DNA, 414 bp, Homo sapiens
acaaacatcttctcaagcagtcaacgtagaatgcttgggaaatagtcataattacccacatatagtaattaatagatggtaattaattgatccttgatgtgatgttcttttgcatatttccttcattctaaagttgtcccctggccgggagcgtctgtttcgcctgtaatcccaacactttgggaggccaggacagatcacttgaggtcaggagttcgagaccagcccagccaacatggcgaaaccatgtctctactaaaaatacaaaaattatggtgacgcctgcctgtagtcccagctactcgggaggctgaggcaggaggatcgcttgaacccaggaagtggagactgcagtgagccgatatcgcaccacagcgctccagcctggtcgacagagtgagactccatctcaag

SEQ ID NO: 651900 - DNA, 288 bp, Homo sapiens
cgtagcgttagtgtgtctctgagctataactcatgtcaactatgtatgctcatatacacggagtatgttcgtatagtggttcatggcctatctagtctggtgtatgtactcttacattgggctcccctaggcagtagcgtcatagtttgcacaacttcataaggtatcaggtttgtccaggcattatgatccatagagttactgagggtcacctctcccatgcagcaggtgattcagggagccaggcttgattcactattcccatatggtaatgcgggtaggtgccag

SEQ ID NO: 651901 - DNA, 204 bp, Homo sapiens
  misc_feature (5)..(5): n is a, c, g, or t
cacangacattgaagttagagtataatcttcgtacgtgtgctcacatatcttatgttaaacaataggtgatacgagcaggtttttaacattgatcaacacagaaacagatgctttgttggtagagctctttactctgcatttttaatacctgtatattaagtgccacttgttaatattactctcccactttatcttgttgggag

SEQ ID NO: 651902 - DNA, 1108 bp, Homo sapiens
tgtatgtctagggtatcgcttattacatctatgtctatggtgttccttcgtggttttctttctgtgctcgctttttttgccggatttgccctatgggtgatgcaaggacgctctcccggctcgttttctatggattgtcgtctccaggtcatgcttgtgtttatccctctttggccccttcgactctctttgatttgccgttttactccattatagtatattttgggaattcggtcgatctgggcagtccctctatgtctcgtatcttttgtctgttctactactgtaagggggcccctcctatctatcgtccatgggtttctcctagttggattccgtcctactattggtgaaaatgttctgatattgtgtggtccttggctctttagacccacttgttattgcgttccgttttgcgtggaacccttatttggtactcttctgcccgagaaccacgcttccgtatctggtgccacttctctggtgggtctcaggcgtcactgtcgcagtgacctgcgttgctttgggcttcttggacacaactgaggcgtacttgccctattggctctcatcaaaggcccacgtcacctctgggcctcgtcactcatgagtcaaggcgacgaaatgaggcgacgacgtgtagcctccttctgatgtactggtcaagagacactgttggaactttggcgctccgcgcaagctgcccgagcgtcatcgttgacagctagcaaggccccttggggcacagcacgcgcacactagccgatgcctctcgtgatcgtcaacagctgaaacgctgatgcctagccccggatgcacagcacctgaccaggtgccgccccggggcaagggcacccagcagccgcatatggtagaccgccacagctgtgccttaatgtctgccgggggcccaggctgtgctgtaccctgcagcacgcctccttgcagggatctgagccaccctccccagcacagccctgcaccccgcccctagggttggcagcctcagatggcacactggcagaggaacaaggacacagacattcccatcagtgtggggggcagggacacagggagaggcggccagagcatcgggcctcagcctgga

SEQ ID NO: 651903 - DNA, 153 bp, Homo sapiens
ctctgaggatccccacatcctcacgttaattgacaggtcaggagatcaagactatgctggccaacacggtacaaccccgtctccaataaaaatacaaaaaaaattagccgggcgtggtggcgggcgtcgcagtcccagctactctggaaagtg

SEQ ID NO: 651904 - DNA, 87 bp, Homo sapiens
aattcaagcttctaacgatgtacggggacatgctatttgacaaaaaccctcaaaagttatccaaatcaatgcatgctcccccaaaaa

SEQ ID NO: 651905 - DNA, 847 bp, Homo sapiens
  misc_feature (27)..(27): n is a, c, g, or t
  misc_feature (61)..(61): n is a, c, g, or t
  misc_feature (64)..(65): n is a, c, g, or t
  misc_feature (67)..(67): n is a, c, g, or t
  misc_feature (69)..(69): n is a, c, g, or t
  misc_feature (81)..(81): n is a, c, g, or t
  misc_feature (88)..(88): n is a, c, g, or t
  misc_feature (95)..(96): n is a, c, g, or t
  misc_feature (98)..(98): n is a, c, g, or t
  misc_feature (102)..(102): n is a, c, g, or t
  misc_feature (112)..(112): n is a, c, g, or t
  misc_feature (118)..(118): n is a, c, g, or t
  misc_feature (123)..(123): n is a, c, g, or t
  misc_feature (128)..(128): n is a, c, g, or t
  misc_feature (134)..(134): n is a, c, g, or t
  misc_feature (140)..(140): n is a, c, g, or t
  misc_feature (148)..(148): n is a, c, g, or t
  misc_feature (166)..(166): n is a, c, g, or t
  misc_feature (168)..(169): n is a, c, g, or t
  misc_feature (190)..(190): n is a, c, g, or t
  misc_feature (193)..(193): n is a, c, g, or t
  misc_feature (203)..(203): n is a, c, g, or t
  misc_feature (212)..(212): n is a, c, g, or t
  misc_feature (222)..(222): n is a, c, g, or t
  misc_feature (253)..(253): n is a, c, g, or t
  misc_feature (257)..(257): n is a, c, g, or t
  misc_feature (282)..(282): n is a, c, g, or t
  misc_feature (284)..(284): n is a, c, g, or t
  misc_feature (295)..(295): n is a, c, g, or t
  misc_feature (310)..(310): n is a, c, g, or t
  misc_feature (323)..(323): n is a, c, g, or t
  misc_feature (327)..(327): n is a, c, g, or t
  misc_feature (339)..(339): n is a, c, g, or t
  misc_feature (341)..(341): n is a, c, g, or t
  misc_feature (343)..(344): n is a, c, g, or t
  misc_feature (348)..(348): n is a, c, g, or t
  misc_feature (374)..(374): n is a, c, g, or t
  misc_feature (378)..(378): n is a, c, g, or t
  misc_feature (383)..(383): n is a, c, g, or t
  misc_feature (396)..(396): n is a, c, g, or t
  misc_feature (400)..(400): n is a, c, g, or t
  misc_feature (451)..(451): n is a, c, g, or t
  misc_feature (539)..(539): n is a, c, g, or t
  misc_feature (836)..(836): n is a, c, g, or t
aaccaagtactctccatcctgcaatgnagtcttggcttgtgaaggacatggggcgcctggnagnngntngggaggttgggnagctttnggccagnngngtcntggtcactgntccacntggtnattgntccacntcatgntgagaggngcttgtgtgttaaacccntnnggaaaaagggacaggcagatnganttttgttttntaccaagcnagcaggagcntcctagagcaatttggagggcattgattttnaganaggaggggtcagggcatagtccctntntgaggtaaggnaagagagaggttgtnccagcacaaggcnttcntccctgcacctntntnntganagctgggcatgggctgaggagaggtnttgnttgcnccctttaattttncatnttagaactataaactgctaggctgcaaggagagaagggctaagtgggggtnagacaggagagaagggcaggaggcagtgagccccgatgacccaccaactccaccaggccctgacaaggaagcccctttggttagtatnattttggccacaaatatgtccccttctcccataactcagtccccactgggggaaggggagcaggtatagaaggagggctcgtgccctggctggaagagccaggtcagggagaaggggtctggtcaagagagcgaacgttgccaaactctctgcacatgctccaggagaaagctcaggacgtggacatttctggcccaacaagcccagtgcccccaccacacagtggtttcctgcttaatacccgcaacataccctagaatagttccctgatctgactccttgagaacgggagaatantctcttgttat

SEQ ID NO: 651906 - DNA, 202 bp, Homo sapiens
tgcagtggcttatacctgtttttccatcactttggaaggttgaggcgggtggggacccaaggtcaggagcgggagaccagcctggcaaacgtggcacaaccccatctctacaaaatacaaaaattagctgagcatggtggcaggtgcctgtagtcccagctactccggaggctgaggcaggagaattgcttgaacccaggag

SEQ ID NO: 651907 - DNA, 184 bp, Homo sapiens
ggctagtaagtgtcagaaatctgactcattatcgcagcttgttccaaagtgcgatacagtgagcatgccctctgtactctttacagtaagcacaacatacatagatgaagctagaactccctcagtcattcctcctttaaatataaaatatggagaacttctagactcaatatagaagcaaagc

SEQ ID NO: 651908 - DNA, 531 bp, Homo sapiens
ggagaggtaaaagaaggggggtctgccccggagccgggaccaagagcaagcgatgggagccactgagcactaaatagagggagcctaaataaggagaactaaagtaagaaacaaggtgaccaaggtcacacgggggaacacgcgaatggggaaaacggagtatcggcagcacgtgggtgcacgacgtttagagggataacgtggagaacgcggaattcaagaaggcgagaatgggctagcaccgaggcggaatggcgggtcccacatacgcggagtcgaaacctggatatccagtagacagcgaagaggttctgacgatggaagggccaagaacgcgttgggaatggcctttaccagcggccatacgtgcgtaataagggggctcaaggggaattttggaacggaccttaagcgggtcatttgaaacaggctttacctattgcaaacaaaaacgtttaaccagactggaaaatgtaaggtcatgcaacccgataagatccgggaatggggtttaacagggcgttttgggtg

SEQ ID NO: 651909 - DNA, 394 bp, Homo sapiens
cagctggattatcccattaccttcactatggtgcccaggcagctggattatcccataaccctcactgtggtgcccaggcagccggattatcccattaccttcagtgtggtgcccaggcagccggattatcccattaccttcagtgtggtgcccaggcagctggattatcccataaccctcactgtggtgcccaggcagctggattatcccattaccttcactatggtgcccaggcagctggattatcccattaccttcactatggtgcccaggcagctggcgttcaggcctgctcaggcgtctcatgaccttcactgtacttcttagataaaacagaatacttgaagtcactagttacagagaacaggaatctataaactcattccttaaacca

SEQ ID NO: 651910 - DNA, 378 bp, Homo sapiens
  misc_feature (4)..(4): n is a, c, g, or t
  misc_feature (10)..(10): n is a, c, g, or t
  misc_feature (29)..(29): n is a, c, g, or t
  misc_feature (78)..(78): n is a, c, g, or t
  misc_feature (153)..(153): n is a, c, g, or t
  misc_feature (207)..(207): n is a, c, g, or t
  misc_feature (277)..(277): n is a, c, g, or t
  misc_feature (294)..(294): n is a, c, g, or t
  misc_feature (375)..(375): n is a, c, g, or t
cttnagaatntatagtcaatcgctaatcnatgttatttctgtaaatgaatgagaattcctggaaaacaactttgtatnagccccactctttttgtatctgtcccccttttaaaaatccacttgtggccaggcgcaatggcttaggcctgtaancccggcaccttgggaggccaaggcaggtggatcacaaggccaggggttcaagancagcctggccaagatggcgaaatcccatccccactaaaaatacaaaaattagctgggcgtgatggtggangcctgcaatcgcagccncctgggaggccgaggcagagaattgcccgaaggcaggaggcagaggttgcagtgagccgagaccgcgccactgcccccaancct

SEQ ID NO: 651911 - DNA, 301 bp, Homo sapiens
tgaacggaaaaatggtgactttataatattggaaaggagggatttcatggccgagtggaacacaacagagaacccagaaataaatccatgcatttacagccagctcattttgcaccgaggcaccaaaaacataccatggggaaacagatggtgtcttcaataagtggtgctgggaaaatgagatatatctatgtgtgaagaataaaactagacccctgtgcttcaccatatataaaaatcaaattgaaattaattaaaaacttatatgtgagaaactacaggctgggcacacattatggag

SEQ ID NO: 651912 - DNA, 562 bp, Homo sapiens
tgtgatcccaggagaggagcagccgaagtcagaggggagttgtggaaagtatccaagaacagtggagatgggaataggctcgcgggatgaaaaatggctgtgcatatgtgtatgagtgctgggaggcctctagctagaaggtttttattagcaggttaatagctggtaagatggtccagtcagatattcatgcagggcatggtatgatgtacgtgagtcttgtggactggggccttacggggggaaacagtcggaaggtatagtggactcttgctgccctgggactatgtcttgcctccccagttatcaggaaatgccataaccttcctggccctcggtttgctcaccctttccaagaggggattcttttacaagttatagggggaattaaatggggtggatgatgataaaggatcttgaagggcctggtgcttggtaagcactaattcctccagcccacaatttctttagcatttcctatgccaggagttctccaggggggttgccagaactcagaatcagtatcacctgggagctcattagcagatattacacaccacag

SEQ ID NO: 651913 - DNA, 250 bp, Homo sapiens
ccaggaaaagctcgcggaatgactgagtgttctgcggagagagaggctccaagcagtctgggaagtgtagtgccagttggcttagcagtagtttcgttggtgggggagccgaggttccgggaagtgtgctagtgcggcttgaaaagagattatgactgtaccttttaacttgtagctggaacacaagaagtgttgttaatgaatgacgtacacattaagatctgtttggacgtcggagatatcctgtgaa

SEQ ID NO: 651914 - DNA, 236 bp, Homo sapiens
taggagtcaggcaggtccctaaaatgagccaaatgggcagatgtgtgataggaactgcagagcgccaacgagtacatctgctcaaagggtcagctctacgtaggcatacagaactagcgctaccagatcacttccctaaagtccaggtttcaattcaggttttatcatgtatagaattcaatatttttttcatcaccatgcagaccaaataaagtacacctacaggttcttggggc

SEQ ID NO: 651915 - DNA, 905 bp, Homo sapiens
  misc_feature (83)..(83): n is a, c, g, or t
  misc_feature (379)..(379): n is a, c, g, or t
  misc_feature (423)..(423): n is a, c, g, or t
  misc_feature (433)..(433): n is a, c, g, or t
  misc_feature (438)..(438): n is a, c, g, or t
  misc_feature (443)..(443): n is a, c, g, or t
  misc_feature (452)..(452): n is a, c, g, or t
  misc_feature (459)..(459): n is a, c, g, or t
  misc_feature (461)..(461): n is a, c, g, or t
  misc_feature (466)..(466): n is a, c, g, or t
  misc_feature (468)..(468): n is a, c, g, or t
  misc_feature (478)..(479): n is a, c, g, or t
  misc_feature (491)..(491): n is a, c, g, or t
  misc_feature (496)..(496): n is a, c, g, or t
  misc_feature (511)..(511): n is a, c, g, or t
  misc_feature (515)..(515): n is a, c, g, or t
  misc_feature (518)..(518): n is a, c, g, or t
  misc_feature (520)..(520): n is a, c, g, or t
  misc_feature (524)..(524): n is a, c, g, or t
  misc_feature (531)..(531): n is a, c, g, or t
  misc_feature (534)..(534): n is a, c, g, or t
  misc_feature (546)..(546): n is a, c, g, or t
  misc_feature (551)..(551): n is a, c, g, or t
  misc_feature (556)..(556): n is a, c, g, or t
  misc_feature (581)..(581): n is a, c, g, or t
  misc_feature (591)..(591): n is a, c, g, or t
  misc_feature (847)..(847): n is a, c, g, or t
  misc_feature (887)..(887): n is a, c, g, or t
gagggagcctctgagcctactctagttcaagaggctacctgaaaaagaataaataagataaagggtcagcaacaacaaagaanaagacaattacagaaaataagcaagatttggaaaggaagtataatggcacttttttcctcaaaggaagttcttgttttcacataaaatatgaaaagcagatcctgcaggagtaacccccttctttaagagccaagtatttgccagtgcttaaattacaccataccgttctaattatatataatcttttgttcttcagttttttgttttgtttcctttttgttattgttgccgaagggagtagttttgcatttctgatgacagccttggaaagtatatttgtaactccatgtctggnaatgccaacccaagtcgacatgggtcttaggacactgaccaccncacatgccanacccncagtnaagcatgtnaacattnanaggangnaaaaaatcannttgggagaaaanaaaantcaactcaagcatanagcntcngntacncaggccntcnaaaaagcaggtnaaaangctcnaaaatgagaaagcctgtggttcacntatttatatnactcactgggacattgcaaatgagtaacactaattcgctgctctgaactctctgcaaacagcccactgtatatagcagacgagatgcaggtctctcctccctgcgttagaagtatgagagtcgctaaatgctttgagctttctttgctataagtatgcatttatatctattcatatactattgcatggtttatttaaaaagttgtgctacctttctccaaaaacttaagtagatgactggaaatgcaaaaaaaaanaatttaccgccgcgcctgttcggcgttcgttagtctagtntacttcgtacataaataa

SEQ ID NO: 651916 - DNA, 885 bp, Homo sapiens
gctttcctttcagtagtgactgactgaccagagctcagcgtgtggcgctgagcatgctggaacaaatcgacccatcagatacatccctcaggatgaagacaccactgttactgatgtatgggccaggaggaccggcgtgtgccctgtcaagaccagggcatggagtattaccgatgccctcaatgacccggatactgtgcctgttctggctcctgcatctatcccaaaagcacccacgcattatcagaggtgtgatggtggagtcagacagcttcatgaatgctgtgctctggctacgcacacacttgggcacgctgaagccctgccattctgcatgagctgatcacgtactgtgccacacttcgctcttgacgggagctcaacggatctggcagaggttagacaggtacggcatttcttggtgactctgggactccacgttgtactgcgtgctgccacgaacgtggaactgtcggcgctatgtagtcatacattaaaattacggacacaggaaaatatgactaagacttcacaacaaattagacttaaataataggggatgcccgctttaaaagattcccccttaatgaggtccctattgcccatgtccaagtctccttcgccagagtgggtcacctaattggcgcacgtgactcttagaaactaggcgggcgacggtataataacagccttcgagctcgtgcaacaaccccctgacgggaactctcttggcaaggcccttcctttgttgtatgccttacgaaggttggggataacacacgctccaaatgtctacgctccaagggaacttaaaaacgttctgggttctttgcgtcagcaactgccatgtgtgcggcgaaattggcaccggaagttcgagttcac

SEQ ID NO: 651917 - DNA, 315 bp, Homo sapiens
tgggattgcaggcacgcgccaccatgcctggctagtttttgtattttgagtggggatggagttttcgccgcgttggccaggctgttcttgaactgacctcgagcgatccacctgccttggccttccggagtgctgggattgcaggtgtgggccaccgcgcccagccttgcatttaatatttttataatgtgtctaggctgggtgcggtgactcacgcctgggatcccagcactttgggtggctgaggcaggtggattacttgaggccaggagattgagaccagtgtggccaacgtggcgaaggcccgtctcggcg

SEQ ID NO: 651918 - DNA, 403 bp, Homo sapiens
aagaacctgacatgcagcaagcacggtgttcgtgtggtaacctcgaaacactactccctactgcccaaacccatacatgatttccttgctatcattgtcaggagacgggtagtgccttctttcccttttacaggtctgacctcagtcttcatgggccacaggatgtggggtacctggtgggccttgaccacaaggtgaaagtcaaccatttacagatgacaataagaggagtggggagaagcaggaaggaaatttgatgtttattaatctgtgttaaatgcagctaaaagatgtaactaagaatctgtccaagatcttgctatagggtgagtgaccaagtctaggatagacttcaaagtcccagcttcctatgtggggtcagctgaggacacacagtgtgggc

SEQ ID NO: 651919 - DNA, 173 bp, Homo sapiens
ggtgactctacggatccttactgctgctcttctgtagtccacgtgcattacatttctgaatgacctctggaagtcgatatggttctattccaccatcaagtatttctttgagagcactgtttgtctagtttaatatatctaggatactgtcgttatgactagaaacccaattc

SEQ ID NO: 651920 - DNA, 1071 bp, Homo sapiens
  misc_feature (976)..(976): n is a, c, g, or t
  misc_feature (1032)..(1032): n is a, c, g, or t
  misc_feature (1050)..(1050): n is a, c, g, or t
agtcctttttgggcgccctccgcggtgttccgtcgtgggggtctccgttttgcgcggcgtgggcccgtggctgtgcctgcctccgctttccccgcgggtggcctcttgtgttggggacctgggcagttccggtgggtccctggcacatgtcttccccggaggaactcttcacggcgtcaagtacgcgtggtgccccttccccccacacgtgcctgtgcagtggggaaccggctgtcacagatgaattcccagatgaatcgcggagtgcgctgatacaaagttggctctgctctgagtgtgcctgcacagccaggggacttccaaatgctccttctctgttcagctccctttgtgttcacggtataatgacacacactttctcattggattcttttcactcaccagctttttgtcgataaagatacgattgttaatgctgtcggggcatcgcacgacatccacctcctgaagattgacaatcgagaagatgagctggtgaccagaatcaactcttggtgtacacgtttaatagacagggtgagtcaatcccaagccatcctagcaggctggatgaacttttctagctgacatggaaatcctccctaggtagtggatagaattttcattaaggaatgaaatgaaggaagaaataaaattaaggattatagaattccacactgaagacaacattgcccagagactttaaaacccatgggcttcatcattttcctaattcctacctcaaatatacagagatcagcagaacctggggaggcgctgaagcaaatgaggtttgcagatctaaaggaactattttccccttccctcaaactggattcagtgaaagatattaaccaatgatctgatgtaaggaatcgggctttggtttcactcctcagattcacaaggatgagatcatgaggaaccgcaagcgcgtgaaaggagatcaatcagtacatcgaccacatgccagagngaactgggacaacctggaatgtggcgacatcctagactaggttgaatgtcaggccncaggagcttccttcaaanccttggcaccaggccccagcc

SEQ ID NO: 651921 - DNA, 322 bp, Homo sapiens
cgattagaggatccccggtcccatgcacagttgaagaaaatgttggcaatatatatgacaaaggattgaattcagaatcatggagaactttcaaaaaataggcaaagtaggccgggcatggtggctcacccctgaaatcccagtactttgggaggccgaggcgggcggataatctgaggtcaggagttcaagaccagtctggccaacatggtgaagccccatctctactaaaaataccaaattagtcaggcatggtggaaggcgcctgtaatcccagctactcgggaggctgaggcaggagaatggcgtgaacccgggaggt

SEQ ID NO: 651922 - DNA, 586 bp, Homo sapiens
  misc_feature (162)..(162): n is a, c, g, or t
  misc_feature (282)..(282): n is a, c, g, or t
cgtcggagtccgggcggccaagacccgtccgccggctcggccacgtgcatgggtccgcatctgactccgctccgcgggagagagccgctgctctgggataggtgagttcgcctgctggtactccgatggaaccagctgcgtcgccgacagatgcgctcgagntgagtgaccgcagacattttcaagagcgcgggttagctgcgcggcgacgatcgtacaataggtacatgacgtggcgggtaggcgactcattaagttaagcccttgctggctccccttggnagtcgatgactcgggtgaagggatgggcgcgaggccggcggacagaccgagtcccatgacgaggtagcggtggcgtcgtcgttgaggagtagaatcgtttccgccgttggtccatagagggcattccagggtgcgcggtggcagccggggggttgttcacacactcggacattttgactctaaagaaggaccacttggtattatcggcctggggcccccacagtaagaataggcgttttgttggggccagaccggcccaaggttccccccaaaacaatctttaaaaagccccttaccaaacagg

SEQ ID NO: 651923 - DNA, 647 bp, Homo sapiens
gaaagatgatggttgccggagagtggaaatggcagtgctgtgtactctgtgtgtgaaagtggagcaaggaaggagctacagtgtgcctgacgctggagtgtctgtgctgcagaaaaactagaaaaatgcctggaccattggaacccccaaatgccacgggatccgtgccctgtgcttggtgtcgcaggcttggaccttggtgtgcaacttgtgtatgtgtgctgttgccttgtgtgttgaacaatgagcactgcactgctgcgttccttgcatccccttgttgaatgcactgggcctacggtgcagggattgcacatggcagggatgggatatatctgggagatcttaccatgtgcccttgtgtgcctggatgtgccaacgttgtgtttgcataattgttaccctggtgatggtgggataatggcccaatggaaccttgaccgcaacctttggaaatgatgtgaaattttacacgggctacttggcgcctacagaacgctgctaaaatggcagacgggggtttggctgattataaggccaacgcatggggacgcgtgtggatggccgaatgtgtgtagcccgcttcgaactagaacacgcaagcgattaagaaaagttcttaactaaggttttattggttggaagca

SEQ ID NO: 651924 - DNA, 407 bp, Homo sapiens
ccaggaactgagatctttaatctgccagcagttactacgtcaggctcagttagctctagaggccattcttttgctgatcctgccagtaatcttgggctggaagacattatcaggaaggctctcatgggaagctttgatgacaaagttgaggatcatggagttgtcatgtcccagcctatgggagtagtgcctggtactgccaacacctcagtttgtgaccagtggtgagacacgaagagaggaaggggacccatcacctcattcaggaggagtttgcaaaccaaagctgatcagcaagtcaaacagcaggaatctaagtctcctatacctggggcaaggctactaggacgcgctctcagtctcctctgtacattcagaagatagcggaacagcctcctcagcagcgc

SEQ ID NO: 651925 - DNA, 834 bp, Homo sapiens
agcggactgctgcccgccggaagaaccgagcttggttgtgtttatctcgttggggactactggcgtcggttggcagcgacaacgggattctaggtcttgcaagagcgatgcatcgaggacccgcgtgccccgctcccggtctctggcctggcaagatagctagaggctagcaggccgttgccgggggggcatgttgcttgtaaccagtgtgaccaggggatgttactcgtggacatgtgcaccctggagggctgggcccctgcatggtgtgaaccattgctgtcagtgtgctgtcgggcatcggggtatactcctttcggtgggttactgctctggtgaagactcatgagacactgcgtcatatatgatgtgcacattttcaatgcagtgtccttgtcgttggacaaagctgtcccccggtgaacgtctgccatccgtgtggcaagctcctgtgtgtaccctacagtgcagctatggacgactcaaccagtcctcactcgatcgatcagcagtcctcctttggtggcgggcggacatgacatccgaacggggcctgcaattgttgctctatgcctttgacgtcatagtacgcacaagtggttcatgatcaccgagtgtcagggtacagttcctggggcccgggatggacattcaggctgtgtcctaggcaagatcatgtacatttttgggggctacgatgcagcaggcggacgtgttgagccaatgacattcacgagctagataccaggaccatgaccatggactcttatctgttaccaaggggcaggcctggacgctggcagggacttccactcagaccacaatgctgggcaa

SEQ ID NO: 651926 - DNA, 763 bp, Homo sapiens
  misc_feature (262)..(262): n is a, c, g, or t
gtcgagagcaggttcagcgggatggagcgagctgctagcctcgacccgagggggtctgctccctgaaaatgccctcacagcaccatgtacaggctctgcggagtggatgccacgcgacaaccaggtccgggacagcgtgtgaggaaggacagttgactacgatgcctgagtgctgtcataatatgcatccaccgagatgagcctgcatgccctctatatgcaccgattgatcctacaatgctgaagggccatggctgaaccntgagcggcatgtatgtgaaccgcctgggagagtgatgagagtggcagaacagcgcctccattactggaagggggtgacagggcgcacagtggaacgccgcacgatctttgtcactgtcgacgtcatggatagacctatccccctggattgcaggaccccgcgctgggagctcctggaacagcgctcctgcagtggggcgcttccagaacgtcgctacggtaggcatcacagatcctggccacagtgcccagggttccctctcatttctctcgcgctgcctcttgcgagggtgggcatgaagatgggcagtcggcatcaaaggcaaccctgagaccgtggcccgaacagggctccgaggatgagctacccctcaagtgcaacaaggtatagacaaggctcgagcagggttcctgtgagccccaggatggaagtccatccgggtgccctgccatcccgtctgccttgcaatgggagggctcctctgagtgttccctggcccac

SEQ ID NO: 651927 - DNA, 391 bp, Homo sapiens
cacttcctcaaggctgtggattatcagtggcagagcagggatttgaacccaggtctgtgggcagcagagctgggtgtcttaaccactaaaccagagagcttagtattgtttgtgggattgagtgaatgaatgcctgaatgaacttggtagctgaaaaatctagtaatagttgtcttaaatccagacctacactagtattgtaaattatgtactcagtttcagttttcctcctgtaactcagtgtacaagtgtcctcttcataccagtaagttttctgagaatttcctcaaaggacgtgctttcttatatcctcgctgaggcacttcttagtaatggaagacctgtgtatttcactttctctttggatttgccttagaactacagtgatgga

SEQ ID NO: 651928 - DNA, 792 bp, Homo sapiens
tctggcttttggacgtgggttttgattgtttgtttgtgttgtgcctccgcccgcgctccccccccattccacatcctcaccatgaaagggtgtattttgatttatttttttttcaattatcactaccttctctattgtccgtcaatgtggggtcgagcgccgcgcgactgtatttatatgtggtggtcagagggcgcccccctgtattatatttaggtaaatttcaaacgccccctgccttcccccaccccctcgcgcccactagcccccaccaaccaccccaccgacacataacaggggagtcgaagtaagggatgaggatgaagtgtatatgggattagaaacacgaggatgtgttgttgtcgggtgtggaggataatgtaagattaaacggcacgcacccgcctttccctctcctgctgtcttatctagcttaaataattattttatatattaaatattaattatatattttaattatttttttattgtattatatattaatttagatagttaagtcacacatatattgcgtcaacggaacaacatgactatatcgatggtacgttgttgataggtacgtgtttcaggattttggctcgacatacttgttactaatcctgaatcccttgttttgcgaagaattaacatttattctttgtataccgtacacgtagtagatcggtgtaagggagacgatcgtcgagttatgcttcactcaggttaattgtgttgggttgccatcttggttgtaggtatgactctcgtttcgttagtgtaccaatactgatt

SEQ ID NO: 651929 - DNA, 190 bp, Homo sapiens
ggcccagcctttagatggcagaagtggaagatgagcataattgtgagcgatgtgaccttaaggaattgacgactggggaagagtacttagtgtttttaagacatttatgggcccctttttcatttactgattcactgctgatttccccttttcattttttggaaaattttaagtccaacgtaatcattta

SEQ ID NO: 651930 - DNA, 773 bp, Homo sapiens
tgcgctggcctctgaaactagtctctgggaccggggtctgcgtgccggcccctagcatggccccgctctcccatccccagaagggtattcgctgggtgattctgagactttggctactccagtttcccacgacacgatgttccctttctacaggcctgctggtaggactaggactgctactactactcctggctgctgggcaggtgagagcaatcctggcgaggacgagcatagaagaaaactggcgacttggtaggaggacaaagggtaataggagtcagagaaggagttggctctagtgaggaaggctgaacaccactgtgttcaatcaaccagctttcgagagcacgtgttgggccagggtttcagacgacatacatctacatcttcagggtgtgccgggtaagctggcagaccgacacttctggggcaggccgtggtgcatgagtcaacaatagagtccatggcgcaaggagaccagctggtagggagactcaacgagagtcacatcttcaacggaagtaattggatcatgctgatctatagagggggtgatgaatatgacaaccactgtggcaaggagcagcgtcgtgcggttggtgatgatctcctgtcaatcgagcgtcagcctagcggtcaattttgccctgtgtctgagagagcgtggcaaagtccagattgtgtctactcttgggatgggttgcgcctggctggtcccgatttccccccgggggggttccctccggcggtgggccaggggggcggggggggcc

SEQ ID NO: 651931 - DNA, 687 bp, Homo sapiens
aacaagaattcaagagtcttaatccttgtgcccaaggtttctttcctacctccatgtatcgctctgaagggatagtctgcccatgccggtagttgtaggcaatgtcaacaaactgcttccggtcttgcgcggcacttcaggatctgttacaaccagggtggtaagcatccagtgacgcaccatagctgagtatctgattggcaaatctgtccagctcttgaatggttcttgggatccagagcactgtgtctttcttcttatctcgtgaaagctcatggacagtggcaccaatgtcatgcccaagactcttgataatgtttgtcagagcagccaggatacgtttatacgtatgggtgaaatattcaagctcatctttctttgagcgagaaggtctagattcaatgtgggtcaggtttacatcattctcctcaaataagcgcaatactttggccaatgcaccagcttcttctttgagtgacaagatcagtgatatggcaccattttgattgcagttgtcttcaatatagcttgtttcctgtccaaagtcagagagtgtcctgcgcaagcctgggttttccagtaccgcagtgaacatctggctccccgagagtgaggtctctggccttttagggcctcaggtacaggcaggtttgcaaacagcctggtggcctattcctgcagcccggg

SEQ ID NO: 651932 - DNA, 194 bp, Homo sapiens
gtgtctgcacaaaggatgcgagttccgcgactctcaaacaacttgcgctgtgaccggtccggaattcatggcagaccctgcgatggtggccgcactagcggcctcagttagcgcttcaatagggcactggacactcgacactgtcgaattgagcatctacggcgaagttcgaggcgattggcagctctacgatt

SEQ ID NO: 651933 - DNA, 1069 bp, Homo sapiens
gattcttttttcagtcagtttgctcctgggttcaagtagtattaccaccctttcacaagcaacagactctcacagggcaaaaaaaaaaaaaaaatctaattgattcaacagacagatctgggagcctctcttcaattctcaagtaatggctagtcccaagaaactagaatttggcaattggggccacaacctaataatccttcctggtggaagaaggaggccactctcttggagcctgaagtttccagaaacgagccagttacgtgtccaggagaaattggaacctcaacttcagcaatcaagggactctatttggaagagcaacattattcacaaagctaacagtgtgactggtgccaaacactttaggtgcttcattagggggtcatgctaggcctttatcacgtcactgggaaacctttcctgggcagccacaatctcaatgtcgtaagtaaggaagatcacgaggggtcgaaaaagctgtagacacaaatgtcgggggttacgcattgaaaatctaaatgtaccgcaataatgttgtctcctcacaccctgggaaaagtgtccccagtttcatttccaagctcctgatgtgtgagcacaagtttctgcaagggtccatttactggtcgaaaatacgtataggacagcggaaggccacattgtgggggctctcaaactggcatcgctcctccttgcaccccgtataatggctacagagttccttgtggcggcgtttatttcagcctgacattccagttgtttacccttgactgtggggaacaaacaggtcgattgctccaaaagagctaacacacatgaacagtggcgccactaatgtaaccctttcagattgtgattttaggccgccgaaagcttaaatcaagtcccggcggggctattaatggtataaaggggcaacatatggtgtgcaccaatagttttggccacataattttctataatccagatattcctatacttagtgtcgtgtatttaaccccgcatcttgtgacagcaatctatcgttaaacttgtgcaaagactccttaacttgtgatacactggg

SEQ ID NO: 651934 - DNA, 1421 bp, Homo sapiens
  misc_feature (485)..(485): n is a, c, g, or t
  misc_feature (870)..(870): n is a, c, g, or t
accacaagccggtgggggtggtgcgtgctttgtttcgtgtggtgggacacccgttggtgttgtgcccccctttctaaggggggggtcccaacacccggtgtttctatgtttgctctggtgggtctgccttcccccgcctttaatattggggggagcacccacccttgtcatccaactgcgcgggggttttgcccccccctgtgtggttggtagaacggcagcaggtttttgtcgtagccctgcggagaaagcatttttcgtggggggagaaaatgtgccagatcagaacccacccccccactggggaacgtgtgtggaacaccacagaaattggtacacacaggcgaggcacaaccaccaacatgtgggcttctcttttgtttaatagcggggaagcattttggtggagagacgataaaatattggccttttagaaattttcttcggaagagggaatatggtagcagaacccacacgcggggttnttttttcttctccaacatcatcttttttttacttgggggggggccctttataggagagaatacagcccacttcttaaaattgtgaaggggcacacagcgtttattaattatagagatatatatatgaggtttataaatagacaaagggtgtggggtcgcatatcaccacggagcaagaatagaagatctctcgcggtgtgttttcttttgggctaaagactttgtgcccgcactgtgcaccgtgtgtttgtgctatataaaatttgtgtggagaacacacgcgcccaccacaaagcgcatatatattatgtgtatatatggggggctctatatctgtgtgtgttgtacaacggggtatatcacttatagaacacattgtggtggntctctccacatgagcacttctcacggagagtgacacacatcccgacatgcgcgcgagagctcccacatatatatgtgtgaggagttttagacacacatgtgtagaatatacaactttgtgtgcgtgggagagaaatttgcgtggtagagaaatagagagagaacacacacacggtgtttgtgcatatggtgagtctataaggccccgcgcacatatatggtgaggtgtagaaagtatacttctacggcacacgcctggcctctcgtggtgataacacagcatatatgtacacgggagagggagggagacccacacacacgtggatatacacactttgtgagtccccctttggttttactaccccaaacttaaaataagaaaccttttgaataaataagaataactgcttctttttactaaagacaataagtcttcttaaccctatatatagaaaatgtatatgtttgaaaaccccttattttacaccagccattttgtatcccatttaaactaaccttttatccaataaagccactattgtttagatatta

SEQ ID NO: 651935 - DNA, 297 bp, Homo sapiens
cctcggcttctggagctgattggactcgccagtccagtcgcttcatagagcccgtcgccgctggtggcgcaagttgccgtgaatgctaccacttcctgtggcgtagtgagctgctgccccagcttgtctgtgatctcggccgctcttcatagcgttggggaggtcctgcttgttggtgaacaccatgaggacagcatcccggagctcgtcctccgccagtatcctcatgagctcctcacgggcctcgttcacacgctctctgtctttgctgtccccctgtaaaaatagggcttgtgt

SEQ ID NO: 651936 - DNA, 179 bp, Homo sapiens
ggacacagcaatgtcgatcacccatgacgcttacttgaagctgtatcagctaagcaagcccgacctgagcgaacgatttaacgccattctgctcgacgaaggtcaagacgtaaacccagttattgccgacatagtaaaaatacaacgggtccgcaaggtggcagtcggcgatccccacc

SEQ ID NO: 651937 - DNA, 412 bp, Homo sapiens
  misc_feature (31)..(31): n is a, c, g, or t
  misc_feature (55)..(55): n is a, c, g, or t
  misc_feature (86)..(86): n is a, c, g, or t
  misc_feature (103)..(103): n is a, c, g, or t
  misc_feature (109)..(109): n is a, c, g, or t
actaaaatggaatccctgacccccaaatggnaattttgccaaatttgccattttnagggaccttaccaatttcaaaaaggaaagtnggaaaaccagggtaggnagaatnagaagttgttgatcaagaaacaggccgtgtatatttaaagaatttagataaaactatactagattggctgggtgccctggtcgcacgcctgtaatccccagcactttgggaggccgaggcgggcggatcacgaggtcaggagtttgagaccagccctggccaacgtagtgaaactcctctctctactaaaaataccaaaaattagctgggcatggtggcgggcacctgtaatcccagctacttggtaggctgaggcaggagaatcgtttgaacctgggaggtgggggttgcagtgagccaaga

SEQ ID NO: 651938 - DNA, 1044 bp, Homo sapiens
cagcgctaagctcgcactgatgtgttacctgaggtaggccgtagaagataaacatgctggcgtgttattccagttctatggcaagaacagagtaaaccctcgttaccagcagaaggccgtgccagtcaaggtatttccctcacgcaagacaagcgcagtccataactcctgtctaagtaggctatcctcttcaagaatatactctccggacaagtgaaccataaccaatattaccaatcagtactcatcattaatagtcataatggccatgagcaataagaacgtaggaatagcccccatttcactgtctgagtcacagagggttacccaaggaactccctctgacgatccgggctgctttcttctcacatgacgaaaagactaggcctccatctcaatcatagtaccaaatctcgtcccatcacttgaatacgtcagtccttctccgtcacatcgtcggtcaatcttatccatcgatagcaggcaggtgtgcaggctggcattcaaagccaagaccccagatcacgcatagaatccttgagcatagtacctcgaattagcacaaatagggcatgacattcctagcagtatctaacagtaacaaagcctagacatcaagccatgcttagataccagactaatcgtataatagaatggcgtaaagtataacatatcgggtatgtgccttaagttaggtaaaagtgttaagaagtccaaggagaaagaagggaaaccatacatagtaatgtgtggaaagtgtgagaaaataggttaaagattggaggtcacaacaccgtttaagtgaccagtcagcaaccgagtacgggggacccccgttagggaaggggccgtgccccaacggagtaaagaaacaagggacgaacgcgaaacacagcgacaaagtgggggaaacagaagaggagggcaagcagacaagaccggacaaacgaacataacgagcaccacaaagagagaggaggggagacgcgggcgacggacggcgcagaggacaacagaggggaacgaggggaggacgaggaagaa

SEQ ID NO: 651939 - DNA, 105 bp, Homo sapiens
gggcgctctagacttcttggatctgcgtgctccggcgcttcaggtcactcaggtcgatgggcttgaaggtcttcaggctggggttagggaccttctccacatact

SEQ ID NO: 651940 - DNA, 530 bp, Homo sapiens
caagcaggaagtcaatttttattcttttcataaaacctttttgtaaacatgggccttttctttccatcaaaaatgcattaacaagatcatgcttatagttaggcagaacaagaaaaaaacgacagtttatactgaactatttaagtgttgccacaaagtgcttacaactccgagctgaatgtgttaaccttttcaatagcattcattatgtgacattgtcaccaattacagtaaaagaacttcactaattttagaaagctagaattactcaaaaaattctgcattgtcaataataccaggaatattgcatttaagcctaggatggcgaaattacttaaatcttttctatacttttttgagtaacataggccggaaaatgaatactatataagagagtggaaggtatcagggtcttatgtttgtacctaagagggtttttattttaaggaaagttgactaatacttaaatgattcaaaaaaaaatcaccgttaggtttaaatgccccaaaatttaagaaaagggccccttt

SEQ ID NO: 651941 - DNA, 128 bp, Homo sapiens
gaaacgcagctgagggtccacctgtcaccagaagtctgactttcatgacaccccgggctctcattacccataccacccaccttctcatttagtctttttattttttttaaggtttggaggggaaaaac

SEQ ID NO: 651942 - DNA, 469 bp, Homo sapiens
ggcaagagagaaatcagtcccttgggaagccgtaaaacatcagaacattggatacatgctccgcacattcatctccatccaccccgcagttcccatgggaaaggctaccaagttgtatcagcctccactgtactgcaggtcttctggaatgacaggaagcagccaagccctcttctgtcctcagcggcctctaggcatctagggtattccaagtcctgtccataatcccagacagaaaacagtcacttgggcagccccctgtaaagacagaacgctgaagtcatgctccaactcctttccctgggagaaaccaggagttgggagttttctgctggttccatgctgagctttggaggtggactgtggtgaatgaatgccacaaatgttcttattggagatgcagctggtttcgtgttctcttaagttacagatgcattttaactagtctctggattactcacaaaagaaa

SEQ ID NO: 651943 - DNA, 807 bp, Homo sapiens
taaaagccaggctaataattaccccgtgcacaaggtaacagtcacaaaacagccagccagggcctggtctgggaacccagggggacaattcttcatacacgggtcttgcgggggagatgtatgcaacacagagcaattgggagtaaccctgcagtcccagggaccacagggatggggcatggacaaggcactggacgcagggcctcccagaagggtgttcttcctccgtcgggaaaaggggcttgccagagtgtgcagccatgtggcgggagcgcacaggtgcgtggactgttgcgggacagggccagtgttccccaagagccccttagagaggggtggttcctcgtgagaagaaaccccgaggggccaagatccttctcgaaaagtgtctttgagcgtggttctccctttttgccgtggccccattctgaggctcccggggggtccagggggggcccgtcgtcaagggctccgtgacagggggggcacagaggccaccttaaccttgccaaggaccaccctgtggaaaagtctggggccacaggttccttgaccactttgtgtcacccctttcctcagatggcaggggtggaggcatgggactcaagctaccaagggaagcgaacctggatccttcccagttctctcgggtcaggatctgggaacttccatgcagtcagactccatgccgtgagtagggaggaaggttgtgctggccgaaggaccctttaaacctggtcataaccatggggtaagagccttggctagaggggccctccattctgcccactgagtcagactggttcg

SEQ ID NO: 651944 - DNA, 387 bp, Homo sapiens
cggagtggagagagaacggaacaatatatggcagcagtagaagcttcccagcaatacaggaacagtctacaaagatcatacagcaaataacatcccgtaagaaaagaagcacatttgatggcacaggccattcccgttgtcttgatggatctcttggaaccagactccattctgcttacacttgctagatccaagttcaggtgatcacagtctcagaaacactccttactttgctttttcctacttagtcttacggtgtgccgttctcaagccatgcatattcagggccagactgtcctgcggcagcaattgttcctcttccttcacgtctgctattcgtagaaccatctttagacaaggctgcctattgctgagactttgatttgg

SEQ ID NO: 651945 - DNA, 167 bp, Homo sapiens
  misc_feature (15)..(15): n is a, c, g, or t
ttagcaggagcttantgagttccgagtggacacacttcctatgtgtagtcaatcacgctgaagaactgagccatcctgtgtgggtccatgaaaagagactgttgttttttttttttttggagacacagtttcgctttgtggctaggttggagtacaggggtgcaatc

SEQ ID NO: 651946 - DNA, 681 bp, Homo sapiens
cgggcttttggcccctcaaccaatgtgggaggagtggaattattctcgccacaaggggaagcccttcttttaatcccttagggaaccaacctgtgaatgcccacggtctaagcccaagccatgcctcctaggaatcctggggccccctttcccttctgctccaatgtcacccgccgaggcacgtaatggcggccctcttaccctaccagggccttggtacaccttcggtatacccaactttaaggcataggcctcccagtctgtggcccatattccgcgtgtagttgttgccatccgtacataagcatgagatcgggtcagtctcaggcaccgctgtcaaggtgcatatcatttccggtcaggtttgcagcactgacaggggaatctgtctagagagcttctcggctaatagatacctttcgtcgtgtagcggtctaccttgttcacgagttaggtggcgccttgcgcatggtttcagccatgttcggttctgtgcgtcctcagacagtctgccgacaagccagtgtaccgatgactactaccttagtgcgtgcctatggggcttaagcatgtctattgccggttcacaggttcttcgcagttccttggcatttttaggttcttgaccgccccttcactgctttgctcatgtttcctggaagttggagttaaatccacctc

SEQ ID NO: 651947 - DNA, 429 bp, Homo sapiens
ctatctagctataatcctctgttgttaaacaaacctttctctatccccttccccctacccttcccagcctctagtattatctgtcctactttttacttctatgaatcaactttctttcagcttccacgtataagtgagaacacatagcatttaactttctgtgcctggttcatttcacttagcataatgccctccagttccatccatgttgctgcgaatggcaagacttcattcttcagggccgaatagattcccgttgtgtatatatgccacattttctttatccattcatctgttgttggatatctaagttgattccactatcttggctattgtgaatagtgctgcaataaacatgggggtgcagatgtctctttgatgcacttatttccttgtgttttggagaagtgccagtagtgagagttgctg

SEQ ID NO: 651948 - DNA, 241 bp, Homo sapiens
gcgctcttatgagactcctcccgctctgctcctggcctcctgacagtcagtgcactgaggcaagcatgtggtgaaagggagattgcacaaggcccagcctgctgcccctcctataagaatgcatctggagcacaggttaacacagtaagggcaggttcagacaggaggagtgcgtgaggcagcggcgtccacacagcagccccgagatggggagggctggtgacgagaacttccagctcca

SEQ ID NO: 651949 - DNA, 366 bp, Homo sapiens
gccatcgaggccccgttcaatcgctgggattgggcgctgctgccgctggccttcgccgtcctcatcctgctggcgctggcggcctcgcagatggccaagcccttccacctcggcgagcagctgccgctgagcctggacgtcgcctacctgccctactacctgctgcgcacgacgctgcggatgttcatcgcgctggcagcctccgtcgtgttcgcctgcgtgttcgccgtgctggcggccaaggtgcgcgcggccgagaaggtgctggtgccgctgctggacatcctgcagtccatccccatcctcggcttccaggccatcgcggtcgcgcccttcatcgcgctgttcccgggcaatctgttcggc

SEQ ID NO: 651950 - DNA, 376 bp, Homo sapiens
  misc_feature (2)..(2): n is a, c, g, or t
  misc_feature (365)..(367): n is a, c, g, or t
  misc_feature (371)..(371): n is a, c, g, or t
tnattttttttttgggggacgaagtgtcccctccttgttgcccccaggctggaagtgcaaatggccgtgatcttggctcactgcaagccttcgcctcccgggttcaaagtgattctccctgcctcagccctccccgagtagctgggattacaggcatgctcccacccatgcccagctaattttgtatttttagtagaaacggggtttcaccatattggtcaggctggtctcgaactccagacctcaggtgatccgcccacctcggcctcccaaactgctgggattacaggcgtgagccaccgcgcctggccagggactatactctttttaaaatagacatttgtggggctcacacaatatataannnaatnccctc

SEQ ID NO: 651951 - DNA, 1128 bp, Homo sapiens
  misc_feature (625)..(625): n is a, c, g, or t
  misc_feature (842)..(842): n is a, c, g, or t
ggaccaagtggtcctccataccatgcttcgaatgccacggatgggtgacatgctcccacgaggacctgcagcacccccctgtgccaggcggtgtctctgttcgcacatgtgtcctggagaagctgcagctagcaccagtgccacccgtgcatgagatggagccgtgggaacgtggtgagcagtgcctcctcgtcgtgagagtgacccctgatgggacccattttgcgtgcacgaaatttgctagtcccttcgtcatggatgaccccgtactttgagcagcgagggatcagacacacagcgcagggcggatgactttcccgtgcgagatgacccctccgatgtgactgacgaggatgagggccctgccgagccgccccagcccccaagctccctctccccgccttcagactgaagaatgactcggacctcttcgggctggggctggaggaggccggaccaaggagagcaggaggaaggtaaggagggcaaaacccctctaaggagaagaagaagaagaagaaaaaaggcaaagaggaagaagaaaaagctgccaagaagaagagcaaacacaagaagagcaaggacaaggaggagggcaatggagtgagcggcgacgtgcgtgcangcagcggcccccgcgcagcagggagaggacggcttgcctgatgatgctggagtgctttcctggtgtgtgtgctggggcccctgggcgtgcctgccaccctggggtgtggcgactacgatggagctctaggccggcgtgggcagtgtgccgccctgtgggcggggtgtgcgtgcctgtcactgcctggggaggcatttgcctctgtaccatcgccttntgccgctgccccgtggcttgccgtgtgctgcttctgagcttggaagaggccgggcatttggtggtccccagggctgggccctgcagggtgctgggccttcagggcccagtgtgagcctgctctgcaagaagggaggggacagctggcttcagccaggctcggtggacactctggccctctcggggcagagccgccagtgtttctcagggatgtgactgaggcccaggagggactgtgagggtctgtttacagaggctgggcatggggccgcttggctgtgggggtg

SEQ ID NO: 651952 - DNA, 216 bp, Homo sapiens
ctgcgttctcgtgcctcattcaggaggggctcggcaggtggggggtgcgtctttcccttgccggagccccaatgactctgccggctccctcgctttggtagcagcactgcccacccttgtctcgtggtcgttcccccgcgctcaatccactccagctaccccgaaaggcatccatcagtaggcctttctcgtcctttgagggtttgtatttccgga

SEQ ID NO: 651953 - DNA, 230 bp, Homo sapiens
tgcttactgggcgtatgtcgaagttgaacgattagtcctgccgtagtcggtgtactcgtcagttcagtaccatatggtggccaattgatttgatggtcacgggagggatcgttgacctcgtctgtcatgtcaaggatgcgtcaggatgggagggcgatgaggactaacatctcagacgctcaggaaatagaaaacgtctgaactatcctgaccgacatcatcctagtcct

SEQ ID NO: 651954 - DNA, 350 bp, Homo sapiens
gggcagccgcgcagacgtctggcgggctgtggcagccgcgcggaacggcggctttccgcacatcccgggtggtggtggtggccaaaccaccggtacgagttcgagccagcagcggtacgtacgcgagtctctcgagagactgaagcagctgcttgcattgaaggcctagttacagtggacttcttgaacgacatcatatccacaccaaatgtagaccatataatggatggtttacggaatgagggaattgaggtccgtctagtaaagaggagagaattatgatgaagagactgtccgatgggcagatgctgtcatagctgcaggaggtgatggcacattgctgctggcag

SEQ ID NO: 651955 - DNA, 524 bp, Homo sapiens
  misc_feature (403)..(403): n is a, c, g, or t
  misc_feature (461)..(461): n is a, c, g, or t
  misc_feature (482)..(482): n is a, c, g, or t
aattcgggccgcgtcgatacggctgcagacgacagaaggggctgtctcttggatataagccattttaactggggcgagatgatatctcattgtagttttgatttgcatttctctaatgatcaatgatgctgagcaccttttaatatgcctgcttgtcatttgtttgtcttcttttgagaaacgtctattcaaatcctgtgcctatttttgattggattattagactttttcctatagagttgttttagctcctcatacatattatggttcttaatctctgtcagatggatagttgtaaatttttctcctattctgtgggtgcctcttcacttttttgatggcttccttgctgtatagaagctttaaactaatgtgatcccattgtccattttggcttgatgcngtgctaatgggggaatactcacgtcttgcccagactgatgtcaggggagtttcccaanggtttcctgtagtagtttcanagttggaggcctagattggcctttccatttgattgcctttcc

SEQ ID NO: 651956 - DNA, 119 bp, Homo sapiens
  misc_feature (7)..(7): n is a, c, g, or t
  misc_feature (18)..(18): n is a, c, g, or t
  misc_feature (48)..(48): n is a, c, g, or t
tttggtnattaaaatggncgttgtttagaaatattgtcacaaaatganaatttaaaatgaattgtaaaatttaatctttaaacaagcatttattcaaactggtgcatatctttgagatc

SEQ ID NO: 651957 - DNA, 380 bp, Homo sapiens
gtggcggagttgttattaaaacgtagacccctgcgaaaatttccatggggaagattactatttctgaggccgaatttctggacatgacagaaaacgcaaaggttaagacttaggacaaggaaggaaccttcttcgactagtagagatcgactcccgtcggtaagtagtcggaagacggatgcatcccgctcgatcataacacctaaaaggagctcatctcctactccgcgccgagatcctgcggaggcgtcaagaaaaggaagaagaagctccatattatctttaagaagaacaagtataagagaaagaaggccaagtcggtcgcttcgcaccacaaggcggacgagcggtccagctgttcctgctgaggcgtttcctcg

SEQ ID NO: 651958 - DNA, 152 bp, Homo sapiens
gggctcccctacactgtctcatgctactgaataagctcatgagatctgagtttaataaggggttccccatggacttgtttctcattctctcttgcctgctgctatgtaagacgtgcctttcaccttctgccatgagtgtgaggcctcccccg

SEQ ID NO: 651959 - DNA, 339 bp, Homo sapiens
agacacttacgaatggatcatcatctatttcatccttgatccttagaagaatctaacttactatcttatctcttatttgtcgagttgcagggcgttgatggtgaattattcttcttatctagaatgttacaccttattcattttaaataaggaaaaacaaggtttcagtcctggcttttttctgatttctgtcccagttttcctatgctttgaaacaaagatcataatatctctactttaaccatttcacaggattactataaggcctcaaaggaatctactgacttttcatctttccaaatcttgtgagattgaaacttttaattgtatttttactat

SEQ ID NO: 651960 - DNA, 184 bp, Homo sapiens
cccgtaacacttccgtactagttaattttgagtaattgtattgtcagaaaagtgattagtactatttttttttgttgtttcaaaaaaaaaaatttggtgtgtgtgttttttttttggtggttataaaaccaaggcatgcttgtggataactctgtaacaaaccattgggaatggttgaacctgc

SEQ ID NO: 651961 - DNA, 858 bp, Homo sapiens
ggctgtgagactacctatgtagatatggcaccctatgacattggtggtcctgcaatcaagaatttggtgtggacttggacctgtttgctttggataaaccaaactctatctgaaatcccacaccaatcataaaatgtaaactccagttatgtgttcctcgtgtgtctaaatctgatcgaccggcaggtgcaagtgaccgagaaatagttccacgttatttacttgtccagaagatgtctgggagacagtataaattgacataacgacaatctgatacgttctctttctttgctggtaccgaccaaatacgaattcagaatgcttcttgtgtgatcctttataccaaattccaattccaacacaatgtctcagctggtgctatatataaaatacaaactgcatcactctgttatgataacaacactgtgtgtatattctttgaatccgtagtcccatctgcaagggcaatgactgtgctcacgcagtgaaagataacctttctttctgagatagtgaaataggaaattagagttagccctcgctattttggactacctcaactggtcaggaacacaggttgtttctatgagtctagaagatgaagaagattttatacgtgataaagttatagttcctgattatgtcgggagacgggtagcggaaggtcggggcaatgtccaatatttgaggcgcatatttatgtggatacggggtaggggccctttcggggaggggcgcaacaatgggggggtagaggggaggggaggatacggtcaaacaaggggggttcaaaaggcaagtggttcccagaaggggaggaagctagtaggaaacaggtgcggagagaaatagtggtca

SEQ ID NO: 651962 - DNA, 323 bp, Homo sapiens
ccggccgccatcccatctaggaagtgaggagcgcctcttcccagccgccatcccatctaggaagtgaggagcgtctctgcccggccgcccatcgtctgagatgtggggagcgcctctgccccgccgccccgtctgggatgtgaggagctcctctgcccggccgcgaccccgtctgggaggtgaggagcgtctctgtattgccaccccgtctgagaaatgaggagacctccgcccggcagccgccctggtctgagaagtgaggagcccctccgcccggcagccaccccatctgggaagtgaggagcgtctaccccgggcagctg

SEQ ID NO: 651963 - DNA, 129 bp, Homo sapiens
gcctccgaatttgctgggattataggcatgcttcaccgcgctgggtctttagacagtcttcattttatatttctagaatgcacatttcacagtgattataaaaattattaatatattcaaatctgggta

SEQ ID NO: 651964 - DNA, 850 bp, Homo sapiens
  misc_feature (850)..(850): n is a, c, g, or t
cgtcagagtgtggtattatctatgagaactgtgagcgacagagtatttctgtgatgaatttatagatcatttgagatgtgagttacttaagtttagtttggtttggttttttcaaataagtagagactattgtaaaaaacgagaaaggacactgaaatgtgcgtgttgatagcaataattggtttcttttaaagattctaaaaggtctgagacctgtagcattatttattggagtgccctcccttctcccctcccctcccttttctcttctcttttttcctctccgtctccttctcctttattcattgtttgctttggagtgggtgtggtccaagtatctgtggttgggtatctggcatttgtgttcccaccatccccgttcccccattaacttcccccctgttgtgcatcctgcagtagtatacctcatgaatacagaccataatttggctgtgtagtataccttggagaaactggcggtttatttccattattttattccactatatctatgataagatgcaattattaggagagacagtgacttgtttctaatgggataaggcgcaagattcttcaggaacacagtgagtacacaactacttcagtggaaccattttttagaggcacttaagggtctcgtggttccaatataattctttgagttcattttctcgtggaatataatggcgtcttacaggctttaccgactttagacacgcgtattctgggagaaaactgaggcccctggggtccacattttccatccctgttaccagtgcgtggtctgtacaaaactgctccctgacttgaaaccccatggaaggggttcctcttagaggagacccan

SEQ ID NO: 651965 - DNA, 280 bp, Homo sapiens
agtattcagcgttcctacactattaaagtttacacgagcagcagcccatcatactctttcagccgacgagcaccaatcctacctccatcgctaaccgccactaaaacactcaccaagacctcaacccctgacccccatgcctcaggatactcctcaatagccacctcaagcccctgacccccatgcctcaggatactcctcaatagccatcgctgtagtatatccaaagacaaccatcattccccctaaataaattaaaaaaactattaaacccatataa

SEQ ID NO: 651966 - DNA, 295 bp, Homo sapiens
gtcctcgtggaagtgacatcgtctttaaacctgcgtggcatccttgacgcaccgccgtgatgcccagggaggacaggccgacctggaggtccacctacttccttaaggatcatccacctattggatgattatccgaaatgtttcattgtgggagcagacattgtgggctccaggcagatgcagcagatccgcatgtcctttcgcgggaggctgtggtcgctgatgggcaggaccaccatgatgcgcaggccatccgggggcaactggagaccacccagctctggagaactgctgc

SEQ ID NO: 651967 - DNA, 306 bp, Homo sapiens
taaatagacatgaggtctcaaactcctggcctcaagtgatcagtctgcctctgcctcccaaagtgttgaaattatgggcgtgagccaccacacccagccataacttcttagcatgatttttcccattggttatgatttcaatggtgcctccccacaaaagatatgctgaaggcctaaccctcggagcctcctaacgtgaccttattgggaaatagggctgtggcggatataactggtgaagatgaggtcatacgggagtaggagggggatagaatccaataggaccggtgtccttataagagagga

SEQ ID NO: 651968 - DNA, 1010 bp, Homo sapiens
  misc_feature (1009)..(1009): n is a, c, g, or t
atttcggtgcacatctcgccaccgtttgtcaccccccgacggatggtcaaggtaaggccttaaagggctgcgtccacgacgagaagtaaagtaagcacgaacggaaagggcgccgttcgacatatcagtctctgcctctatgataactgtcggcgatacgccctacgatacccactttttctacgcgctccgctgggcccccccactacacttgggggccaacaacggcttattcacttattggtggtgtgtcttttgggctatatcatgtgacgataacgcgcgcagtgcccactgtgccacataccgtgccgaccccgaattaactgcttcacgtgatgacgacgataaacgtaacgtgatcggcccacttaaaaacggcgctggactgaacgtcggtaatgtcaacaacgggttatttacgaattttctgtacaataggtcaaatggcggtaaccggaaaaacttgcggctcaatcctacggacattggcggtgtaaacggccgtacgaacttcataaaacgtggcctggctaaccatagcaccaccggcactaaccctctgggtgggaacctgacgcgcctgcataataaccgcggcctggtgaaattcggcaacacgccatctggcggtgacctgcgcaaaaacatgcctgatttcggtggaaatggcctgaatggcctgccactgggtaacggtggtggtcgcaattggaacccaaaccaccctgaaccttacctcaactcataatacgactataatgggccttctgtcggtaataacggcggtggcgggaacaacggccacaaactactgaatcgtaacgacgcttaccaaccatatggtgctccactgtctcatttcctgcctgacgtcaataatggcaatccacgcaatccttttaacctgggtaatgggtacgctggtaaactgggtggcttcggcggcctggcgtacactacactgcctggatatttcggatacggcgctctggcacgtctttaaccnc

SEQ ID NO: 651969 - DNA, 848 bp, Homo sapiens
gggggctgactgatacgcgtctgtttgatgcgtgactgttctagcattggctatagaacacagctcagggtactcccactgtacttctacctttacctgcacgtaactggacttctgaatttacactgcactagtatacgtagcgaacgcgtatcaataatatcctgccagcaatagtacgctgtttgctgcgcctcatttcacgccagcaattgaatgcagtgcttcagatacttgtccattcctgacacaaacttatgaagcttaccatcattcctaatgataacttcattacacccgaaagtaggccaagccgtctgtattattaagccttaatacaactcgttcagcgtaacaagaacttcactcgctttataagccttggcatgcagaacatctaatacttgacagaactagacgcttgaatcgattgcttctcgcaagaggaagtcgagcacacgtacttaacgcaaggaccttggacgaatgaagacaacactgagggaaatcgtggcgatcatccatggaagcttgactaaacgcagacagatagagacgagtactgacagtactactagtctaagactcatgcccaagtctacgttgtacatcttctaggagatagcaactcagaatatacatagagagacatgcgttctcaaccctggtagaagcgagactgagcaccagtgactcctagaactcatctaggtcccacgtcgttgctgcatgggcacgacaagagacacacgatcatgatgaagcttgtctgcgaagactttgaataagctatgatgtcttagagaaaacgagttgtttgcagactttggcatgacaactctggaaca

SEQ ID NO: 651970 - DNA, 1931 bp, Homo sapiens
gcccggctgttattcagccggatgagagagcgagcgcccgtcgacgcgtgtcgcagctccggttgccatcgtgccatgtacccgttcccgtcccgtccttttctcgttcatcatcatcgcagggtcccgcggctcgaacacctgctggtctgtcgcgctgccactgagagcacgcctgacggcgctcattgcgatgatctcattcgataattgcggacccttcgccacggcgtggtactatcgtgcggcagcacacgggctactgcgcgccccgtcaccatgcgtaacactgcagtgcgccattcgtagggtctatgtccgaattgtgcgcttgcgcactatacatgctaacgacatgcgagaggaccgacttcccccgagtggtaggaacctacggacccatgtatatggacggagacttgcgccccctcttggtgagccattacttctcgatggatccaacgaaagaccggccgcacaccatgttcctcctcaagtgagatcgaaagggcatgcgatcactctgggaaaacgctaaactgcatgggaatcttcgtagtagcctgcacacggtgcaaggaaataggcgacgaaaggtagccctctcgcccttttgtcgccaccctttgggatacgccaatgggaacaaaccagtgcaaccgagagtggccaaacgcccataagacccgttaacagggggacagccagcaactttggttctcgaggaggagagcgccattgccgttgttttggacgccccccaagtgaagaacgcccaaagggtggaggggaccagcgccggggtttgccaaacagctaatagaccgaaaggccacattttgggacacaacggcggatgatgggcaagtgaaggacgataccttatcagcagaagaaaaccacgaaggcgaaaaaaagctatgggcccaaatttggtccagacccacttagggataagggcaagcgctggcatataaggatgatggcccaatgaaggataccgatgtacacagcgatttcgcaacgggcgcaaaatgtacgacacctccggaacaactgagggtgggccggttgccccttatagcgagacgccaggagaagcagggcaatttgcgcattggagacttcgcactttccccctgtgcggaatgtgctacgccccctcgcgcagaggagggaggacattgccgcgcgaaggaacgagcgcggcaacacacagccacagcggggcgccacgacacgggggagagttagaaaagttacacagcgttcggaaggccaagccaaggaacatcgccatgggttttggagtcccagggaaaacatccgtgactctccggcaacaggaagcgtgagacatcagcattgagggtctttgtaccagggaggcacaggcgcccacagcggaacatggcgccaggggagaacacccacctatgctctggacacagagagcgccccggaagaggtagagtatatatagtagggcccagatggcctgtgaataagccgaaacatacatccagcgggggacctcaggaggcgcaatatccgatagcgacaattgggcctagaacccgtgtcggaaaggtggcgatccctctaagcaaagggaatgttgcccagcaagaacggccccggggcccaaagcgaggccaaagtgcccatttcctgggtgaaggggcccaccctaaaccgaggttggaacagcccccaacgccgttagtagagcattcgaagacgtctcaattagcgtaggaggcgccccaccgagagatgcaccatagtcatcaagagtgtggctccgcaggcaagtgtgagtcccccgcaggaaccgagagcgcagttcattcagtgaaaacgccgtgccaccatcttgtacgagagaacccatcttgtctgttgaagacttagacagtgcgcatcgtcgt

SEQ ID NO: 651971 - DNA, 1003 bp, Homo sapiens
  misc_feature (246)..(246): n is a, c, g, or t
  misc_feature (256)..(256): n is a, c, g, or t
  misc_feature (407)..(407): n is a, c, g, or t
  misc_feature (409)..(409): n is a, c, g, or t
  misc_feature (943)..(943): n is a, c, g, or t
  misc_feature (1003)..(1003): n is a, c, g, or t
atttcggtgcacatctcgccaccgtttgtcaccccccgacggatggtcaaggtaaggccttaaagggctgttacagttttggaagtgcccgtagggattgggacgagtggagtagggggagcgtgtggtgtaaaagttggagaagaacgatatgagaatgggattaaaataggatacatacggctaagaggaataagtgtaattacggtgacgaggggcgaaggaaatacgggagaaggaaatacnggagactganaagaaagatatgagaacaaggaatcgttcgggtaggcgctacatgggccggtggggccgagtgatgggttgggtaaatggccatgacgtacgtgctaacccggcgtgggaatgttcgggggttacacggtagtgggctgcgatattctgcnanaaggatccgtgaagggatatggggtgaaattggactctcagggataaaatccttaaaccgcaaccaagaaaaaccaaacattactcggtgcgccgcaggcggtacggtacactactatgaaaccggtacagaggacggatgggggcacgttaacggcgggaattgccgatggggcccggcctgtggtcaagcggcatgttacggaattgccgcgtttaacgacgggacgggatgggttaagctaataggaaacaataattctagtgtgcattaagcaccgtacattttttctattttttttgcgcaccggtatacatatgtagaaacggttggcgggacgtggtgacgtatgggatacatgaccattatgaataatgggttaccgagcttataatcaataccaataaagcgtcgatgggcttctccgtgaaacaacaacacaatggatcctttatgtcttttttggtcgggcaggggttaacactgttcgaacggatggtataccataatgcatacggtgctacaatgaatacnataacccgtgatgggctcacgggggcacaacacaacgaatcgagcgtcataccaccatgn

SEQ ID NO: 651972 - DNA, 690 bp, Homo sapiens
tcctcaggggtcactgaggctttttatttggagcacaaaaccacgggggatctacccgggggccaccccggaaataacacgaggctcacttgatctctaaacactggggggaaaggggagggcgaagaaaaacaatggactggggccaattacacgactggcaaagctagagctggccaacggggccccggggagctagggctcctggtaggaagtcctaagggaagcggtacagaactccagggggggggggcgctaactagcggggccccctgcaagtgtggttgggtcggggggcctcgagctgcctgagctggacaccgagggggaggggtgtctggtgtacgccaacgggtgaccagaggggtcttgcctggcccacaggtcttactggggccaggggggttcctgaatgttcctggccggcaaacttagccttgcgtgcggaggtgcaggctccggggtgctatgagggctcgaggccatctccgtgggccgccttgggggccactcgtggctaaacgggtcacggcggggccgaaaggtgggggctcgatacgctgtagaaggcatcaccatttcgggcaatttctacagaaacacgttgaagtaccgggcttacctccgaaaggggatgaacacaacccttccgaggccctaccatttccgggcccccagccgatttcgggg

SEQ ID NO: 651973 - DNA, 966 bp, Homo sapiens
  misc_feature (190)..(190): n is a, c, g, or t
  misc_feature (320)..(320): n is a, c, g, or t
  misc_feature (383)..(383): n is a, c, g, or t
  misc_feature (510)..(510): n is a, c, g, or t
  misc_feature (526)..(526): n is a, c, g, or t
  misc_feature (542)..(542): n is a, c, g, or t
  misc_feature (959)..(959): n is a, c, g, or t
atttcggtgcacatctcgccaccgtttgtcaccccccgacggatggtcaaggtaaggccttaaagggctgtttttggttccgtttatggccgcctcacctgattttctcttggccgtctccgttttgcgtggacttgttgaattatccaccgatatatgggcattttcccgttttcttcatcttcttgancctgtctgcttctggtacgcgcatttaccaaacaaaattaatgaatcaaaatggattttaatacacccgcctgtatcgcacccacgacgattcgtataatgcacaatattgtggggtgactgttaatganaacggtctgatgttactgtggcttacttaacttacgtggaaaattggggtttgactgaacgtnccgagttcaactcgccgcgaacgaagtttgtgttagattggtcggtgtccgtcctcgacgaaattcgaacaggcgtatttctgtggtttcttaatgaccggttgttttcccatgccctcgccatgancgtgtgcttggttgcnacgaccccacgatganatacttttgttttggcggccaaaaggtggtttgcacgaacggcgcccggaactctgtgcccaacgtatattgtggcgcttggccctaaaaaaagctctttgggacgcgaaacccagtgactgactgtacatacccacaacgccgtttgcctacgcggtatgcgtgcaatattttgtggatgttattgctggtttaacggaatagttctgactggtttgattgctgaaacttttttgtgaattgtgatgttggctggtccagcaacatacaactgtcccacacgtcaatacgttttatgtaacacgatgacgtagatatgtaaatagtgattacatgtgggacgaacgggcaccgattatgcccgacttgtgctcaaaccgtactcggtgattatagtctgtgccacggtgtacttancacgcta

SEQ ID NO: 651974 - DNA, 125 bp, Homo sapiens
ggaccacgtattcggcgcatttcaggcagcatcttttccagatccggacatgccggtcataaaggctcagctgtttcgcggtcatgtcgctgatccagaccatacgctttgtggtgtgccccctg

SEQ ID NO: 651975 - DNA, 957 bp, Homo sapiens
  misc_feature (273)..(273): n is a, c, g, or t
  misc_feature (948)..(948): n is a, c, g, or t
atttcggtgcacatctcgccaccgtttgtcaccccccgacggatggtcaaggtaaggccttaaagggctggaaggatgggagtgagatagataaaagccgaaggggatgggaaggcgaagggagcgggatgggcgatgggaagggtaaggggcacgagggagcggggacgatgaaggcgaagggacgaacggaagatacgggacggggcacgatggagaaggttatgaggtataaggggaaacgctgtgcggaggaggagaaaaaggaaagcncgagacagctgggggaaaagatagaagtcgagatgggagaaataacatcaatggacattttaatgaccataggaggagaacagaggaaagaaggaacagagaaatgggcaccaacagtataaggaacagaaatgttacacgcgcacaaaactgcactgcacgacaggcagggagcggcagtggcgctggaatgataattaagaggacggattaaaaataatcatagatggcgctaacgtggtggtctgtcaggcgaacaagggcatggcaagcaccgacggagtgggaatagccaacgatccccgactatacgacggccgcagacgggccggcggaccaacccctccgtgtggtaccggtggtgggacgaccactataaacaccgatgagaatgtaaagggtgccgaaacaggcagccggacaatcagcgtgaagagtactagcattacgagcaggaccggaaaggacaacaccggtaccggaatcaatgagggtgacgaacggggcgccataagtaatgactatgaaagccgaaaataaagaagagaaagaaaagaagaaaaaaccgaacggaccggcgatgcggccgagataggtggcaacggcggaatgacgaatatcgcatgctgaaaatgaaaaagaaactaaggaaaaacagatgtcacgcgtgactgncggcgaaga

SEQ ID NO: 651976 - DNA, 492 bp, Homo sapiens
  misc_feature (19)..(19): n is a, c, g, or t
  misc_feature (22)..(22): n is a, c, g, or t
  misc_feature (40)..(40): n is a, c, g, or t
  misc_feature (58)..(58): n is a, c, g, or t
  misc_feature (153)..(153): n is a, c, g, or t
  misc_feature (185)..(185): n is a, c, g, or t
  misc_feature (300)..(301): n is a, c, g, or t
  misc_feature (310)..(310): n is a, c, g, or t
  misc_feature (417)..(417): n is a, c, g, or t
  misc_feature (422)..(422): n is a, c, g, or t
  misc_feature (473)..(473): n is a, c, g, or t
  misc_feature (479)..(479): n is a, c, g, or t
ttctgttggtgccaaccgngtnggcacgtcatgtgatcgntaacgattgacgaatganactcataaaaaccacgccgactcttaaaatcaaggataacgtccgccgcgatacattcagtcgccggatttgttgccccaaacttataggtcgtntcattaacaacgagatcagcaccaggtgcggntattgacaggccatcttcaataaacgcaaaaacagggaaagcagcgccatcaacatagaacacagagcgcaaatcatcgcccttattactcatcattattgagtgaatggctcgnncattgtttngatattgccagaacatgccataagcataacgccccctgtcagtccagccaccaggcataacaaatccgttaaactcgcagttattcatcggatcgcctgcggttcgngttgncgtggtgataatgactcttgatgccagttcgctttacttgagccagcagancgcatnacacaaacagggt

SEQ ID NO: 651977 - DNA, 943 bp, Homo sapiens
  misc_feature (500)..(500): n is a, c, g, or t
  misc_feature (623)..(623): n is a, c, g, or t
  misc_feature (935)..(935): n is a, c, g, or t
atttcggtgcacatctcgccaccgtttgtcaccccccgacggatggtcaaggtaaggccttaaagggctggggtttgcggcggggctaggcctgtggataccgttagggcggagttcaatgaggcgggtttgcggacggaaacggcgagcgaaactggtattaagcagaggggaacggggagggaaaacggctaaggcgattagtgaggggaagcgtaacggtttggggaaagggcggaggggaacgttcgggagcgggtaaatgggctagtagggtacggaattgggatccagtcggacatatagacgttaataagaattacggccggtattttacgacggggaattcagggtgactgattaggtaatggcggaattctaatcgaataatataactacgagaacaaagtatggggaaagcccggcgggcgatttaaatatgtaaaaacgaatttggcatgtacgacccaccgaacttagttactaccctcatttttccnagaatcaactgtgaatgcaccgggcgctgtccaggtgcccccccatcggtgtggtaacggaaattacggggatacggtgatagtggccgccgtggcacttgccgtcattctacacaccctccngctccccctcagctcgagctctatcaacagccgatgttgttaaaacaacgccaaccctgcgagaccgctatgcacccgcccccccccggttactattttcttaataacccacatttactttccctaccgcggctgggctgtggttcttgatgtgtttttcgcacgcctaccaggtttatgggtatgcgctgttgactcacaattatacgtaaatgtctaatgcgctggcgtacaatgcgcctaacacgaccgtaatccaacgggctgggtatgggtgcttccggccggttggattacgccatgggaacgggncatgattt

SEQ ID NO: 651978 - DNA, 892 bp, Homo sapiens
  misc_feature (218)..(218): n is a, c, g, or t
  misc_feature (235)..(235): n is a, c, g, or t
  misc_feature (238)..(238): n is a, c, g, or t
  misc_feature (252)..(252): n is a, c, g, or t
  misc_feature (257)..(257): n is a, c, g, or t
  misc_feature (268)..(268): n is a, c, g, or t
  misc_feature (273)..(273): n is a, c, g, or t
  misc_feature (276)..(276): n is a, c, g, or t
  misc_feature (285)..(285): n is a, c, g, or t
  misc_feature (293)..(294): n is a, c, g, or t
  misc_feature (305)..(305): n is a, c, g, or t
  misc_feature (325)..(325): n is a, c, g, or t
  misc_feature (332)..(332): n is a, c, g, or t
  misc_feature (337)..(337): n is a, c, g, or t
  misc_feature (349)..(349): n is a, c, g, or t
  misc_feature (359)..(359): n is a, c, g, or t
  misc_feature (382)..(382): n is a, c, g, or t
  misc_feature (395)..(395): n is a, c, g, or t
  misc_feature (402)..(402): n is a, c, g, or t
  misc_feature (404)..(404): n is a, c, g, or t
  misc_feature (468)..(468): n is a, c, g, or t
  misc_feature (488)..(488): n is a, c, g, or t
  misc_feature (494)..(494): n is a, c, g, or t
  misc_feature (507)..(507): n is a, c, g, or t
  misc_feature (513)..(513): n is a, c, g, or t
  misc_feature (523)..(523): n is a, c, g, or t
  misc_feature (527)..(527): n is a, c, g, or t
  misc_feature (540)..(540): n is a, c, g, or t
  misc_feature (550)..(550): n is a, c, g, or t
  misc_feature (576)..(576): n is a, c, g, or t
  misc_feature (880)..(880): n is a, c, g, or t
atttcggtgcacatctcgccaccgtttgtcaccccccgacggatggtcaaggtaaggccttaaagggctggcggacggagatagatgcggaccccggcggagataggaaagaggaatgcacgggcattcgaaagacgcgctagcaaaagagagagtgcaaaacacaaacaaacatactaactatctaacataaatgagaagaataataaacaaatgcnacgcgaagaagcggctnctnccacaaacggcacntcatnttttaaatttncgtcnatntaaaacaanaacgtaannacggaacttgntaacgggaatatgtggtganaatactnaaaanacaaacatgtanccgctaaaanagatagggagcgagagggaggangggctaattaaanatacaanancctctctccggcagcgaccgatacatgtacaaacggcaataaatgatgacctactggccccaanacactagtaacattaacgtntaaagnacaagcggtgccngtatantattgggctnaaanaataaaacaaacncgaatgtttntcaccctaaacactggcttcttcaangctgggcgacccgccggcttgttcgacatgatcgcgtttgatgccgcgccgctgcccgtgccatctgtattactatgattacggccgggaagcgccgcacgcgataacataatgccgcaattacgattattgggatttgcgcttgtcagtaacggaactaaatgtgtaaaatataggaacgctgtgctgttactggtttctaaaatggcaacgccattgtaagctgcggcatcctcgtactcgcggctgatttcaaaccgcgaacacgtgggggccgcggggccgttcggacgaaatgggcacncagcgcgggaaa

SEQ ID NO: 651979 - DNA, 167 bp, Homo sapiens
  misc_feature (78)..(78): n is a, c, g, or t
tcagggcggagcctggtaccctcgaggtcagtcatcgttacccgcagcggcgccattttgcccaaaccggtgaaaatnacttcggccttctccgtggtgttctccattgtgatcccctttctctattgtcgggacactcattagcaaggactttgctgctctacttg

SEQ ID NO: 651980 - DNA, 904 bp, Homo sapiens
ctcctacactctggccagagataccacagtcaaacctggagccaaagaggacacaaaggactctcgtaccaaactgccccaagagcctctccagaggttgggggtgaccaaatcatctggagtctaaacatatgaataagctctatatgaatccaagacaagcaacaaacccttgaatgattattcatcacttggatgagtgctcacacacgtcaagctttggagaaagtgtttgactgaataataaagaaatccatatacattgtgcatgagctagatggtcctgcctcaatctggtttatgaatcaatcgtgacgaacacctttctcctgatggtccagtatgtccccaggattatgtaggtagacccatctctgacagtttgagccgatttcacttggatgatattcaaatacgtctctgtgcttacgagagcatgcagtatacacgtcatctagaagattgacaacaatcttctgtgtgtcaggccgttgagacttggaatcaagaatgaagtgtggcgaagactggttagtgtggaagatatagtgtagcacactgattaggttatggtaaaatgtgtacaataactattattaagaaaaagagtggatgacatttgggagcaagtgtactatgttgtgatagaccaattagttgttattacgtgccataagtgaagccgatgattattcgaaaaaatacaattatattgttctggggggtggaactacactaaagaacggcgcgctgctcaaaaatttccagacaagggcccaatctttggacaaccaacctaatgacaaaccgggccccgaatgagcacataatacaataagaaggccgcgttaactagtacctggaaaacgcgacagcgttgggcaagcccaccgggtgcgagggc

SEQ ID NO: 651981 - DNA, 805 bp, Homo sapiens
tctctctcctcccgccggcccaaaatgccgaagggaaaaaaggccaagggaaaaaaggtggctccggccccagctgtcgtgaaaaagcaggaggctaaaaaaggtggtagaattccccgtgttttgaaaaaaggcctaaaaattttgggcatttggacaggacattccagcccaaaagaagacctcacccgcttgtgtgaaattggccccgcatatattcaggtttgcagccggcagaagaagccatcctcttattaagcgggtgtgaaaagtgtgccttccgtgcgaatttaaccgagtttcacccgaggccccgtggaaccgccaaaaaagcttactctcgagctgtgtctttaagctgtggcccccacaaagttcacgagaaccaagaagacacaaagagcagagaagaagagaaaagcgagaagacacgtggtgtggccccgggccccgaaaaagaaaaaggcttgtgtgggcccaaaagggggaaacgttcccaaaagcgaaaagaaagaacccaccgtgttccttctcggaacccagggagattttaaacaaaccggtcacacccacctttggttgcggagaacaccaagaaaagagcctccaggctgtggtgtgcggtgatttgtgcaagccaaccgacccgtgtggatcttccgcaatttcagaacgccgggggtggcaccttatcgtggtcctgtggccccgtggagtgtgtcgggctaaaacacgtgggggggctccccttataccggtggcatttaatacagaggggaacacgggacaaaaaaccgtggtggac

SEQ ID NO: 651982 - DNA, 103 bp, Homo sapiens
cgtgctctgaactaaggaggtacaggaggtggaggttgcatgtgatgccaatgatccatgccatatgcactcctgtgcctggtgcaacagagacaagactcct

SEQ ID NO: 651983 - DNA, 93 bp, Homo sapiens
tctgaggacacggccgtatattactgtgcgagaccgcaggcatattgtggtgctgaatgctttatgcgccctcttgaatactggggccaggga

SEQ ID NO: 651984 - DNA, 1068 bp, Homo sapiens
  misc_feature (188)..(188): n is a, c, g, or t
  misc_feature (237)..(237): n is a, c, g, or t
  misc_feature (247)..(247): n is a, c, g, or t
  misc_feature (286)..(287): n is a, c, g, or t
  misc_feature (515)..(515): n is a, c, g, or t
  misc_feature (554)..(554): n is a, c, g, or t
  misc_feature (708)..(708): n is a, c, g, or t
  misc_feature (782)..(782): n is a, c, g, or t
  misc_feature (1068)..(1068): n is a, c, g, or t
gcatcgagcaggtgagtcagctctcggccctgtgtggatgcacagcgtggactaccaccggctggccgtgcagatcctggacgagctggcggagaagctcaagcgcaggatgcgggaagcttcctcacgccctaagcgggagtataagctctgaagccccgggtagcccttttgaccttggtagagcnctgtagcagtcctaactgggtggcttcccctgtcgatccacagaccccnagatcgcagncttcatcgtctttccgatcttccgacaagcccatccggnncccctagccggagcatgccgcccctggaccagccgagctgcaaggcgctgtacgacttcgagcccgagaacgacggggagctgggcttccatgagggcgacgtcatcacgctgaccaaccagatcgatgagaactggtacgagggcatgctggacggccagtcgggcttcttcccgctcagctacgtggaggtgcttgtgcccctgccgcagtgactcaccccgtgtncccgccccgcgccctccgtccacactggccggcgtaccncctgctgggtctcctgcattccacggagcccctgctgccagggcggtgtctgagcctgccggcgccacctgggccccggcccttgaggtactccctgagcaggaccccacacttgggtgggggggcttatctgggtgggtggggatgcctgttntacacatagcgctgactcccaacaggtgacaggctaccattccccactccatggcgccagcctcctcccccgtncccaacttctcgcccagctggcgaggcgggcaacactaaggtgctcttagaaacactaatgttcctctggggcagccccaactccgtcctgacccgacgggggcccgagcccactgcctaccctcgagtcccgcagcttaacaggatgggatcgagggtcccatgggagtggctcagagataggaccctggttttaaatccctcaccagctggtgctggtgatagggcctggccctactccaggccaatgagccacgactcaaaacgcactccttctctcaagcan

SEQ ID NO: 651985 - DNA, 610 bp, Homo sapiens
gacacccaagggcacgctcactgtggtcgtctgcagtgcgcagacgaagaatttcagggtattcgcctttcaggggagataggcgggcctaacttctgacgcgggacttgatagacccctccccccaactccgccagctgcgctactactgcgcaaatatgaacggaacctaggcgcagctggaagcagacttctcagtagcctgggcgagaggagttcctccgcttggatagccagcaactgcactttggggaatgtacggggggtatctcctttctcctgcttgtgtgaggtggtacacagtccccccttcacctggcgggaagcctgtcccggacagaagctcatgtcagctatccctggggcagcatcgggggcagcagctccagcagaaacagcaggatctggagcaggaaggcgctcgaggccacacagggactgctggccggtgtagatgggccccacccctctgcgagctgcacagcctcttccaggccatacgtgaagagggagagcaggctaatgcgcaagattcatagcgtctgatggcctggggaggacccagacaccaggggcaaggtgacatgagggtggtaaagtgagcatcata

SEQ ID NO: 651986 - DNA, 469 bp, Homo sapiens
ttcacaccagcaaagagtagtggagaatgtgtcactgcagacatttctggcacggaggggaccaagtggaaagtgcttaaatgtgttgcagggatatcaaagggactgagctttggaacaaagaggaacagagcccaaaggacaatgggtacaaattacacaattttcagtgggttctaataaagttctaggaaaaggggcttatgcacaaaggctgagctcttgcctctgtggttcttcaaatccaaaaggtcattaaaatactagtagtggttgtcatattttaataacatttgggatttgaagtgtgtagctgaaacttactcttggttaatggatgtatcactgggtgagcttctagactgcctcaccaatggatctagcattaccttggttaatgaaataaggtaaaacacagtccctgtgtaccagaaagcaggttcatgtgtcagctgcatcatgtcatttg

SEQ ID NO: 651987 - DNA, 162 bp, Homo sapiens
aatcatcggcacttcgctatcatcggcactcgctatcatcggcactcgctatcatcggcactcgctaattcatcggcacatcgctattcatcggcaccatcatagccaccatcaccctccttaacctctacttctacctacgcctaggtgtcgatgaatagc

SEQ ID NO: 651988 - DNA, 219 bp, Homo sapiens
  misc_feature (9)..(9): n is a, c, g, or t
tcctcctcntcagtgtgaatagctgagccaggacttagttagagtgaccgagtgtgacaccctgtcctcctcctctcagtgtgaatagctgagccaggacttacttagagtgaccgagtgtgacaccctgtccttctcctctcggtgtgaatagctgagccaggacttacttagagtgaccgagtgtgacaccctgtcctcctcctctcgggtggtgga

SEQ ID NO: 651989 - DNA, 833 bp, Homo sapiens
gcagcaactacattccgctgataatgtatccatcacctatataatgcagaagcccgtctagtcaggatcccttcttctgcttaaggtccaactgtagtgcagtgtcttaatcatagtctatcatcatatattttaggagaatcttaactgtaagatagtgatatatgacgcaggaatgcattatttagcattcattaagtttctacaggcaagaggtagttctatttgctatggatactttcttcgcgtcatgccaagtcctcataggtgtgtattcagtgagaaagactgtaatagctatactgaaatatctgtaggaaaatggcactttgatcagtaatacgtgtgaagtcagtcgccggatgtgtggctaatcccatagggtgggttagcaagagacaaagttcttaattgtaaattgaaggagtccgtagccggaactagtactatcggacctggtcttgactaaccctctagtaaatggaggcttcatgggctagatataatattcttgatgcctggcatgtgcacagagttttcaagatagagagattgataaatttggcatgaaaaggttcagatatagcgagatttggtgaatggatccttcgaagtgagtgactggggggtatcgaaacccattgggggaaagttggaatgcgaccgcctaattaacggattggcataagtcttcctaaaataccaagtgaggtacggcccggagaaaattactgtatcttgtcagaaactctcgttttcaaaaaaaagacaaaaaaacaagatggggccatcctagaatcacacaaaggggggcgcgtgtaaatactttctaa

SEQ ID NO: 651990 - DNA, 558 bp, Homo sapiens
cctggacctttctgtaccgccgcatgacacagaaccccaattactacaacctgcttgttctcaatggtcttggtgaggtagaccacatgtgcagctggtggagcatgcctgggtgacctagacgctaagtgatcacatgatgagaatggacgtgggcctgaactagcatgatcgccgcctactattacatcaactacaccgaaccattgagctcttcagcatgtccctcaatgccaagaccaaggtgcgagggcttatcgagatcatctccaatgcagcagagtatgagaacattcccatccggcaccatgaagacaatctcctgaggcaagttgtgctcagaaggtcccccacaagctgaataaccctaagttgcaatgatccgcacgtcaagaccaaacctgctcctgcaggctcacttgtctcgcatgcagctgagtgctgagttgcagtcagatacggaggaaatcctatagtaaggcaatccggctcatccaggcctgcgtggatgtcctttccagcaatgggtggctcagccctgatctggccaggctatga

SEQ ID NO: 651991 - DNA, 786 bp, Homo sapiens
  misc_feature (786)..(786): n is a, c, g, or t
cgtactgtctttcacctttccattgttgcatcttgaattttttaaaatgtctagaattcaggatgttaggggctacttctttaaaaaaaaaaaaaaaaaaaaagaattcgtctgaaaatgcccaggttggtaagaatctaatctcccttacttaactaagcactccataattaagtttattgacggtacaaagggagccagaaagaattgactatttattgttcttcgtagatctagaaacatattgtaaattgaagccctggccttgctgggtttagaaattatgtggggcatggttataatttatccaataacatttatgtcccttggccttcctggtgggaaacagttttatcccactaaagctagggaattagggggataaatcacaaacaaaaaaaaacggttggcagcactggaaaaaacagtaactttatgggtttttggcaacctggcgtattgtgaattcggtggtggataaaaacttactttatcccttatttaccaaacatttttgtccaaatttttcctattattttaaaattggtttgcggctggtggctccatatttttaaaattatattggctacagggtcggcggtattaacaggtacaccttttttaccccctttgggagagcgtttaccattaattattacaggccactggggtaggcattagggtaatatctttttaccagagaaaggctatatctggtggaagaacgcaggggtggtatactggtaataatattccccccatggtaatcctaaatcctggatacan

SEQ ID NO: 651992 - DNA, 135 bp, Homo sapiens
caactggagcagcagctgggtgcagcaagcaaggcaacatggtgtttagctcattcatccaccaggccgtagtgtgtgcctggcacactcacacagggcacagctcacatcacacccaggccacatcatcaggca

SEQ ID NO: 651993 - DNA, 269 bp, Homo sapiens
aggatctcggaatgtgtggtgttatggagtatacctagagatgtcagtgtagatatccccaatttatacccttctaaacccgggattaatcccgtaattttctaaggccccgtacatctagagactaaattttggttaacgaaccaacgaccttcgatcaggtccgtgacctctggaaatgaaaatcataaaaaataatgagtaaccccgaaaacctcgtatccatacgacttacggatagccgggaaaacgcataacaccacacaatt

SEQ ID NO: 651994 - DNA, 342 bp, Homo sapiens
catcctcaacaggtgagcaagagtggctgccaatcaggcttgaacaatgcccatgaactgagtgacagaaagagaggctggcttcaggcgaggttcagaaggctagcttcttcatcaggagataaactctggagtccaactcgaatccaatgcaggtagtaggaatccccctgcagcctcatgagcaaggcccccatagaacacgtacgcagaagaggcgtgtagctgctttcagtagacgtttcatctccctcaatcctgtacaacttttccataaattacatactcaaactggtcagccctggaaagcctatcatcagtggggttgtattcaccatcatc

SEQ ID NO: 651995 - DNA, 291 bp, Homo sapiens
  misc_feature (227)..(227): n is a, c, g, or t
atggatcttagggtccttatgggaaattcactttaggattgctgtcagtctcctctttggggaagagcttcatgaaaatgtggatatccagacgagaacctgtctaggttaatgctattgatggtatcaggcaacagtcgaaccattctccagagacacttcataacaagctctgagacatcgggagaactggctgtcgctagcaggctgtcgttggagcaacacanttttggcactcaggatgtcggcctggtctgacttctccagaacctacaccaccacgcaggtaca

SEQ ID NO: 651996 - DNA, 566 bp, Homo sapiens
gccttttccttcaaaagtggaattagaaagctggagtgcttcttcagatggactaaatttatgtcgtgtgtgtgtgtgtgtgtgtgtgtggttacccattttttagaaggagccgtacagaagaaaaattattctacattatgtaggattgctgtttgcattgccattttgcataaaaaagtaatttttgattttgaaaatctcaaaacttttagatctgaaatacagccatgtgatcgatcataattctaaaagctttttaaaacatgtaaaaggatttggggaacggcagaaaacatgcagttttgggcatttgactgacttggaaagtctaagcttattttagttttaactattaaaatcatttttaaaaaattagttaatttttgctgacaagaaaaaaaacctttagttgttaaaattttgcacaccaacattaaatggtcccaccacaccacggaaatatgcttaagaaaactaatatcattagcgttgataacaattagtcaattggctcaataactgaaccctgttagttgctattaaaataattatttttaaatttt

SEQ ID NO: 651997 - DNA, 433 bp, Homo sapiens
tgcatattcgggacgtgcatatccggacgggcagacccaacagagaacacctgccagatgggggtgctcctatttggagagcccctggctagatggggctgtgctcgagcgtgaccccagatcggactctgggctcatacagatgccactatcattatctgaaggggtgtcttcctcctttatgcactgagggcatcatggccaacgtaagctgtgtagtctggcttcctatctccctcagtgatatccacttcactgcccagctctcaactatcggaatgatctggcagtgtggacacggacccctggggacaggggaagaggttgtaagaaggtgaagggggcaacctgctcgggtttagttcaactttctgggagatggccaattgggttcaccgtctgggggggctgcttattagtctcctggactagg

SEQ ID NO: 651998 - DNA, 602 bp, Homo sapiens
gtgacacggctcgctagatactctgtctgtatattagtagacttacagattggaaatgtaatatgtcttgttatcacgtccatcttctgtggaaactgtgatgtctttggaacttcattccgaggagataagctttaactttccaaaagggaattgccatggtagttgctattctgtggtgagtgaaacaatctgaggtctggtacttgctgaccttgttgccctgcaaacttcctttccacgtgcacgcgcacaccaacacgaaatgccatcactcctactgcggctgctaatgaagcttactggttgtgatgtgttataattaagtctgtatatgtggattgaatgcagtttaatgtttcccgaaagccaaagtaattttcttttccttttcctctctcgaaaagttaaaatatctatgtgtaattcccaaaccctcttacctatgtatctgcctgtctgtccatcatcttccttcctccctatctctgtgtatctggatggcagccgctgcccaggggagtggctgtggggagggcaggtactgtctttgcctgtgggtccagctgagccatccctgctgagtgatgctggcaagaccc

SEQ ID NO: 651999 - DNA, 672 bp, Homo sapiens
caaacggtttgcccttgtggtacagtctcaccttggttccaaaaccgcctcacttgcttaagcccggttggcaaaaaaaacccaagggggacagcgggcaccctcgctcagaacccatcaacattgtgcactgggcaaccccgtataaggcaaccccctccaataccgccaggtacccattgccacccctccttcacaaagaaattatcctggaacagagggggctggcctccaagcttcaaccaggaacttagccataaacccagattggctgcctcttaagccaagctttttctaccttcaccagcctggccccctcgtttttccgggaacaactaagcctgggaagggaaacccacacccgtaagttcgttgggtaatgccaaacctttaaatacagtcatgtatcttttactgtaaacacaaagttgatttcaaaagcggtaacctcagttcctaaagagtgttagtgtaaggggccctccccaatggaagttttaagccgtcttgtgaaccgccttgtgtacagttaaacatccggaaatgacgccccagtgccctttttccagccaccttttgaagccaggctcgcccccttgtacctaaaacatacccattctggatcttgtagcccttttttaatatggtgcccttttaaaataagccaacaca

SEQ ID NO: 652000 - DNA, 332 bp, Homo sapiens
ggctccattttagcgccgcccgccgtcgccatcatgtgtcccttccctcccccataccatagtcccccccggaggatctgagccccctcaggaggaaggcgtggggccctaagggcgcggcagtggggagagtgactgggagcttgggggaaagaagggagaagagggggagaaagggggagtggcttttacagcaaaggggccgggggtggccggggaacaaggccggcggttttccgggcagacgacgacggacgggcccgtggccgtctgccgggctgggccagggaccagcagccggggccgggcgagtcgcgtctgggggcggcggg

SEQ ID NO: 652001 - DNA, 331 bp, Homo sapiens
ggaaaaaagtgatgaaccaaagttttttgggggctttttcaaaaatttgtttttatttggttttgttcccgaaaaacaaaggaactgcccttcatttttaggttcttcaagaatggggtttgcaagggccaaatggaccaataaaaaacgttgcctataacagtgatttgattgccaaggaatgtaaattcccttaaacttgcagtttttcccataaacaaatgtaatgggcatattgggatttgtatgtaggaatcaaaaatccccccaaacaggggatttttttttttggcaaaaagggtttaatgtttaaccaagaatttttttttta

SEQ ID NO: 652002 - DNA, 272 bp, Homo sapiens
gtcacgtgcacaccgcgtttgtggaagtgcagctgtttcatgttgccggcaccgcacgcggaggataccgacgagaacggcggtgccagaacgcgtttgatcccggcgtgccgggccaccccgcaggcgtgcagcggtccgttgccgccgtaggccagcattgtgaaatcctctggaaggtagccgcgcacacgcagttccttaccgataccgatggccatctgctcgtcgacgccgtccttgatcacccgggcgacgtcgatggggtccat

SEQ ID NO: 652003 - DNA, 426 bp, Homo sapiens
gatggcgacccaaccatcggctttattaccgaaccacaggttgatgtgatcaccatgcgccgtctcgggacagcgtgactcaccgtcactggcggtcccacaaacgaaccccggcacaaagtcgtgatccagatctggggcgtggaaatgccccttcatggacaaggttgtaacgctcagcgttctctcccgtgttcgggccgctttctgccaaacagaaaacggtgcgatggaggtctatgtgcatagcccaccgcggattccgtcgcacatcatcgtgggggcccgtgggttattcgggtatggctacgcatagcgattttttcttataacccgcagtagaccatagcagcttaattcatgtttttaccaagcgatctctcatcccgacccccctaaaattacacctgatccacccccatgcac

SEQ ID NO: 652004 - DNA, 213 bp, Homo sapiens
gccgctgctggggactgaatactctatatataacagcaagccatgctccctctaacctcacttctcccatcatgagtgggcagagaagacgtgagcaaaggggcgaccccgtagtcaccagcttcagcaggcagcggcagggagggctgacttcctgagccataccagatgcttgctcattctccagccagaaaaatgccccccattccttcc

SEQ ID NO: 652005 - DNA, 408 bp, Homo sapiens
cagagtgtatagtgcaaaaattgaaggaagactacctagaaaagtaatgtcgagatcagatgaatgagtagcaacgaactaggtgaggataggccgaggtaaaggttcaaagttctgagttggaacaaagcatggcatgttggataatggttaggctgtatccccatccaaagaacatctggaattatagctcccataattcccttgatgagctagtggaggggtcctggtgggaggtaactgagtctttctcctgctgtcctaatgatagtgaataggtctcatgagatctgatggtgtcataaagaggcagtacccttgcacatgatctcacatgtctctcttctctgccaccatgtaaaatgtgccttttggcttctgccaatgagttgttgaacgggctcccca

SEQ ID NO: 652006 - DNA, 216 bp, Homo sapiens
aacccgggggttaacaaaaaaaccgggtgcccccctgccttaattaactttaatttggggggttgttcccctttagggccccgcgttgaatagttcccccaactttcaaaaaaggtcagcagggccccgcctggttttcccagcctcataagtaacgggtttggtcagacttttctggcccccaaggttttttaaccaaaaaaaggttttggggga

SEQ ID NO: 652007 - DNA, 1116 bp, Homo sapiens
  misc_feature (1116)..(1116): n is a, c, g, or t
tgggcggtggtctacgtttctgcgactttgtgtcggcgactgcatgactaggacagatgtcttcagcgcaacatgctaacaatggggcacccatgacccccaacttcaacagccacagctgttatgccagatggtcagtctcaacagatcatcagcctgctctgactacaaaggaaacatatgtcggtgcttctctgttttaccctcttgcacttcacccttggtgtgccccaccggccgcatccattgcttatccacgtgcatcaggcgcccgcagagcacattctaccgcaaaacgtcaaactgccagaaggtagcatcttggctgctttcatcggtggcatttctcaactttccttgtcagatccttagccgatgcgcgctccacaattacgagccctgagagcaaaaccaaaggggcagggcacctgggtgcaaccacaatggccacgccactttgccatgtgggggctaaatcaaggaacccccgccaagtccgacagcgcaatgtgggcgtaccacggcgacatcaacagtcgggcgagcttcccttcaagccaggccgcctggcacctgtgaacaaggggccaaatcactcccgctcctccaggcagggccgacccccttatgcgtacactcccactttggcaactcgcattaaacaggaggggataacatccccttctaccgcgcctcaaggaaacttcccaaccgctgggcgtaaacaagcttggtgacgcgcgtatccccgcgatgagacactggggggcccccgggcacttcagttagctcggcgcactttgaaggaaaccctttatgtggcgacgagagcatgacaggccgaccccacggagggccacgctatccccagaggactgacgcgaccccagtggacaccccacacgcaccccacctatgacgccggcggaccaccagggttggcgtgggccccccccaccagggcccacttggggcgcccgcagtggacgaaacgacacccgccctggcggccacccaggctgcgacaaatctacccgccacgcttccgaaaccgccccccctctggcagctgtgacaccccagcccaaaaggaaaggcagacagccggccaagctn

SEQ ID NO: 652008 - DNA, 623 bp, Homo sapiens
atcactaactgacgccacgtggcgtggtggcgacactgtctgaccagccatccacatagccgatgctcagggtctcgctcgtcggcgctggccagtgtggagctcatcgcaactaccagagtggcagctgcgccgcaagtttttgtcgcatcttcatagtgcttccccgaaagtgctgcgcccggcggatgccgagcgacgtcaacctgttgttatgtggtgcaccgagcccccctcacgcgcatcaatcacgtgggtgcctcgtcagtggagggctgacacttcgatcatcaacctgctgccacaagcgacctgctctgactgcgacctcaggtaagcaagaaacgacatcacatcgccagcaggacgatttgtaggatattcaccgacgatcccgcccgaactttgcatgtcaaaactatgcggctccactgggacggcacaaatccgggtaagatgcgcgcctttgccccagacgggctgatcatgcccgcgactgcacgtttcccgctcctgccctatttatttgccctgatactcggtgtgctggccctcggcggctattggtacggcttggccaccggtggtgctgcggacgtggcagcgccagcacaagctgcatg

SEQ ID NO: 652009 - DNA, 793 bp, Homo sapiens
  misc_feature (1)..(1): n is a, c, g, or t
  misc_feature (9)..(9): n is a, c, g, or t
  misc_feature (81)..(81): n is a, c, g, or t
  misc_feature (83)..(83): n is a, c, g, or t
  misc_feature (88)..(88): n is a, c, g, or t
  misc_feature (90)..(90): n is a, c, g, or t
  misc_feature (92)..(92): n is a, c, g, or t
  misc_feature (94)..(94): n is a, c, g, or t
  misc_feature (114)..(114): n is a, c, g, or t
  misc_feature (121)..(121): n is a, c, g, or t
  misc_feature (146)..(146): n is a, c, g, or t
  misc_feature (149)..(149): n is a, c, g, or t
  misc_feature (160)..(160): n is a, c, g, or t
  misc_feature (179)..(179): n is a, c, g, or t
  misc_feature (181)..(183): n is a, c, g, or t
  misc_feature (187)..(187): n is a, c, g, or t
  misc_feature (197)..(197): n is a, c, g, or t
  misc_feature (214)..(215): n is a, c, g, or t
  misc_feature (241)..(241): n is a, c, g, or t
  misc_feature (255)..(255): n is a, c, g, or t
  misc_feature (278)..(278): n is a, c, g, or t
  misc_feature (337)..(337): n is a, c, g, or t
  misc_feature (345)..(345): n is a, c, g, or t
  misc_feature (378)..(378): n is a, c, g, or t
  misc_feature (409)..(409): n is a, c, g, or t
  misc_feature (435)..(435): n is a, c, g, or t
  misc_feature (448)..(449): n is a, c, g, or t
  misc_feature (473)..(473): n is a, c, g, or t
  misc_feature (480)..(480): n is a, c, g, or t
  misc_feature (512)..(512): n is a, c, g, or t
  misc_feature (534)..(534): n is a, c, g, or t
  misc_feature (544)..(544): n is a, c, g, or t
  misc_feature (597)..(597): n is a, c, g, or t
  misc_feature (602)..(602): n is a, c, g, or t
  misc_feature (616)..(616): n is a, c, g, or t
  misc_feature (623)..(623): n is a, c, g, or t
  misc_feature (628)..(628): n is a, c, g, or t
  misc_feature (644)..(644): n is a, c, g, or t
  misc_feature (646)..(646): n is a, c, g, or t
  misc_feature (648)..(649): n is a, c, g, or t
  misc_feature (658)..(658): n is a, c, g, or t
  misc_feature (682)..(682): n is a, c, g, or t
  misc_feature (685)..(685): n is a, c, g, or t
  misc_feature (687)..(687): n is a, c, g, or t
  misc_feature (690)..(690): n is a, c, g, or t
  misc_feature (703)..(703): n is a, c, g, or t
  misc_feature (717)..(717): n is a, c, g, or t
nctggtaangcccttccttcatgcaggagggagactgagaaagcagatgttggctccagaatggggtgtaaaaattttgtnanggggntntnanacaataaaaacatataatgngatctgncaaattaaaaaaacagaagctctgngcncgggtatcagnaaggagataaaatcaatgngnnnctgngcaaatcagnaaaacattttcaaaagnnatcaatattttggatctggggggggnaatggtttatatgngacttggaagaaatagcaaaggncttcatacattccaagggaataaccatccagggtaactggtggcttttcttccaagggnaaacaagnatacttattaataaaaaccttaataaaaggtgngcatacaatctattataggaaagaatttggntaaatatgggacaaggacgctatggntaggggtggagannaaattggtaatttggtaatttggnaattggnctgggtatctttgacaaggctatattcttggntattagattattttacaaaagnttaacatggnacaggggctgggacaagggatatatatatatatatatattttctaggactttnctaanttttctttttgggnactgggntctgnagaccttccttggttnangnnttaaaaganctggggaattgtaaggggcaggtnaananatnaaaggggctcttnaggggagaaaaaanaaaaatggggctcgttggggctcaagggggggggctctgcgggcggttccctttagggaggggggaattctggggc

SEQ ID NO: 652010 - DNA, 167 bp, Homo sapiens
tgctagccatctatctctatattctatgaagttcaacttttttttttccttagattccacttattagtgatatcatgtcagtattggtcttatccatttagtatttttctcttagaataataccctccaggttcatctatgtggctatcgctggcctacagcacatg

SEQ ID NO: 652011 - DNA, 124 bp, Homo sapiens
aacagaatgtatggaagtacgttttcttcccgaagggtggctttgcttccactgggttagagaagagtgtgtatgtgtgtgtgtgtgcagtgtgtgagtgtgcacataaatgtgtgtgtgagtg

SEQ ID NO: 652012 - DNA, 173 bp, Homo sapiens
ccgggagcacttaacctttcgagagaccttaccagtccggcagatcataaccatgcgccagccatttacgctatgacagcagatacatttacatcggtcgcgacacgctccaagcacagtaccaggtgctgagtgagactgaggcggagcacctgtcaaacgaccacgcagga

SEQ ID NO: 652013 - DNA, 745 bp, Homo sapiens
tggacgtgaatgacatcttaagtgtgatttggattttcatttccctaatgtcagtgactatgagcaactttccaatgtgctttggctgttgtatgtcttcttaagataaatgcctatacaagtcaattgcccattttaaaatcaagttttttttgtagtgttgttgaattttaggtgatccttatatattctgacgtgaatctcttattcgatatgatagactggataacactttttaattatctctttttttaatatggatcctcagtagtcatgtgtttagagcagaggaaagtatattgaaggagaagttcactgcactcattgtggccagagtccttactaccttcttaatttttaaaaagtggattacgttcttaaaaagtcaaaatatatgaatatgcttgttctaactgattacaatatattttaatgagtaacagcaacagaacacacaactgtacatgacatgtagggacaagtattaactgctgtatctcctgtggtaaatttacctatgggtgatgtattgacctaattacagctttcatacttttccactctcacattaacttaattgcataactcacatttccctcagttatcgaatggatatctagattacggcctctatttaaaaaaccaagatagcgtctcggtatggaagaaccaaaattgagagcagaccgtgcacgcaagcgagcacttatacaccggggtaaagcacagcattcaattggcggtg

SEQ ID NO: 652014 - DNA, 97 bp, Homo sapiens
gccagcaccaaccagacatctatgtacctctgtgccagcagttttacggtcggaactcggggagctgttttttggagaaggctctaggctgaccgta

SEQ ID NO: 652015 - DNA, 342 bp, Homo sapiens
  misc_feature (12)..(12): n is a, c, g, or t
  misc_feature (52)..(52): n is a, c, g, or t
  misc_feature (306)..(308): n is a, c, g, or t
gaaaacccgagncaggaggattcaccttgagccccccagagtttgagagcancccctggcaacatggtaaagaccctccccgtctctaaaaaaataaaataaatagccggtatttcccagttacttggtggggcccaaggcaggaggatcgcttgagccccaggagtttgagaccagccctgggcaacgtaataagaccgtttctctaaaaaaattaaaaaattagccagtgctcccaggtgcttggggggctgaggtgggacggttgattgagctcagtaggtcgaggctacagggagccgtgannntgccactgcactctagcctgggcaacagagcgag

SEQ ID NO: 652016 - DNA, 178 bp, Homo sapiens
gaaatgtttcatatttacaagatatggccagagactgattctaattcattctctcccacaaagaagaggtaaattatattgattgtttatatcttttcactctacaataatctgtttactataaaaatacagaccagcaaaaggaggaaatggaaatcatatataggcttactactca

SEQ ID NO: 652017 - DNA, 105 bp, Homo sapiens
cgttcagggtatgcaagttcaattcaggcctcaggtttgggcacgagaagagggacattgttcaccactcgagcacaaatgacaatttgactcacaaaagcactg

SEQ ID NO: 652018 - DNA, 808 bp, Homo sapiens
ggccgccccttcgcacataaaagcaacctgggcgcccaaatgaggccccgctacaagatggggccccgcgggaggatatacgcgcggagccgtgaggacaaagcggggcaaccctcggcaaccgcgtcgaaacgaaaaatgaagagcagtgttcggcaccacggcggttcaagacaggcgccgcgcgagggtcgtcacccaagacggcgatgtctctccatcagggcacaattctgtgaaggaaccgaccgtcgtcggttaacatcccccaaaagggccgccgtctaagtaaactcgtgcgagggtaatctctccccgccctcctctggtagagagagagccaatacgcacgcaagagactctctcgccgccacgcccgctcgcaccagagagagaggacgtcacccaccctaagaatgagggccaccacaacatagcagaagtgagagaaagagagaaatacaagcagatcaaacaacagacacagggagagggaaaacagtgagatgcagatacaaaccggggctgacaagagagagagagaaaaaaacggggcctcttcgcgccacatgcgctcccctcggtgggcacatactcaccaccgaataactctctcgtgctaaaagatgctaaaaggggagaaaacaagaaatgaaaccaaaagagagagagaaagaaggggatgacaaccatcatcacgccggctgaggaacaatttaacacgcccccgggtgtaacaagagcatagggaaccgatttgggaacaccagagaataaaagacgaaaaggagaacaacccacatagaca

SEQ ID NO: 652019 - DNA, 162 bp, Homo sapiens
ttcgccgcgtcccccaatgcaggacgtctggctggctcactggggccgccgagtagccggggtctgagagtctgtgaagatagcccagttcttctatacccccagcctaaaccagatcaacgcacgtgactgcagagcatgggagactcctctagactgtcg

SEQ ID NO: 652020 - DNA, 1882 bp, Homo sapiens
  misc_feature (1877)..(1877): n is a, c, g, or t
  misc_feature (1879)..(1879): n is a, c, g, or t
gcagccccgggcggaagcctaccgtgccaactgggccctcctcccgacctgccccgggctcgtgccccgcccacccaaaagtgggtgaaaggtcggcggcgccggcactgcagctggggctgagaagccaggacggcccgagaactgacagacggagtgacagacggactgaccatggccgaccagccaaaacccatcagcccgctcaagaacctgctggccggcggctttggcggcgtgtgcctggtgttcgtcggtcaccctctggacacggtcaaggtccgactgcagacacagccaccgagtttgcctggacaacctcccatgtactctgggacctttgactgtttccggaagactctttttagagagggcatcacggggctatatcggggaatggctgcccctatcatcggggtcactcccatgtttgccgtgtgcttctttgggtttggtttggggaagaaactacaacagaaacacccagaagatgtgctcagctatccccagctttttgcagctgggatgttatctggcgtattcaccacaggaatcatgactcctggagaacggatcaagtgcttattacagattcaggcttcttcaggagaaagcaagtacactggtaccttggactgtgcaaagaagctgtaccaggagtttgggatccgaggcatctacaaagggactgtgcttacccttatgcgagatgtcccagctagtggaatgtatttcatgacatatgaatggctgaaaaatatcttcactccggagggaaagagggtcagtgagctcagtgcccctcggatcttggtggctgggggcattgcagggatcttcaactgggctgtggcaatccccccagatgtgctcaagtctcgattccagactgcacctcctgggaaatatcctaatggtttcagagatgtgctgagggagctgatccgggatgaaggagtcacatccttgtacaaagggttcaatgcagtgatgatccgagccttcccagccaatgcggcctgtttccttggctttgaagttgccatgaagttccttaattgggccacccccaacttgtgaggctgaaggctgctcaagttcacttctggatgctggaagctgtcgttgaggagaaggagtagtaagcagaactaagcagtcttggagggcaaggggaggggaatggtgagatccgagccctgtgcatggacttggtgagactgttgccttaatgacatcctgcaccgtgtataacttagtgtgtcattttgaaacttgaattcattcttatcaatttaagggatcttaaaaggatttggaaatggaacaagtagcttccagaccagatactacctgtggcaagaatgctgcctaccagttaactgctggtcctaccacagtcaaagtattcctcattaaagagagaatctcaggttctcactggaggcactgtgcatattttcaaccagatcaccaggagctgagatcttcttcagtccctagccaggaatacccatttgatttccagggtgccatctaatcctgggctgtacatgtggatatggacttgaggcccacctctgtgtccaagtggattgagcatatatgcctaggaggagatagactgttaatcgttggattttgattttttttttttatgcctgcaaataatcaaaagtaaaactggagtagcctaattttctgggagcaggtggagaactttccctcctacacagtgaggacagtcccagtctgctgggataagtgagaaagcccagggtgtaggaaggccctttttacatactcttttctcatgagagctcactattttaacaataaacaataaacgttgtttctaatttttaaaaaaaaaaaananacg

SEQ ID NO: 652021 - DNA, 230 bp, Homo sapiens
ttcacaaagagtaacagcatcattcagcttatttagaaagactgaagtacatcataggtgtgatatattttaatatggaggtgggagtgtagatatggagatagaaaggctcctccccaccatgtaatgacttcctactcagaattttataccaggctagcttgctgcaggtctgggcagtaggatcatggctccactgggatcggggtgaaaagctatgaggggggaga

SEQ ID NO: 652022 - DNA, 753 bp, Homo sapiens
  misc_feature (147)..(147): n is a, c, g, or t
  misc_feature (175)..(177): n is a, c, g, or t
taaacacaaggtaagtgtgataagaagtcaagtccactcttcctcccccacatgaacagaagggctgtttcattcttcttccctcgtttctattcccttggcacaagtaattcaggcatttgtgcatttgtcccaaggtgaactgtngtctatggactggtcccacatgacctgnnnggtgtctttccctgtgctagtcctgacccttcaggaagacttaactgctagtttctccttcctgaagccttaaaaattgggttctgccccacagcacctcctgggaaatatcctaatggtttcagagatgtgctgagggagctgatccgggatgaaggagtcacatccttgtacaaagggttcaatgcagtgatgatccgagccttcccagccaatgcggtgagtagctggcagggctgtgctttccctctggggctcagggcagggtgcatgtggtttgactttgcttgttcctgggataggactggggtctcagttttcccaaagccctatcttcagccagagcattccttatttgctcccttccttgaagctgtcaggaggatttgcctttggggatctctgaggtgaggggctttgatttcctgacctggcattagaagtgggcagttgtgaggccaggcatggtggctagtgcctgtaatcccagcactttgggaggctaaggcaggtggatcatctgaggtcaggagtttgagaccagcttggccaacatggggaaacaccgctctacta

SEQ ID NO: 652023 - DNA, 1828 bp, Homo sapiens
  misc_feature (1823)..(1823): n is a, c, g, or t
  misc_feature (1825)..(1825): n is a, c, g, or t
gcagccccgggcggaagcctaccgtgccaactgggccctcctcccgacctgccccgggctcgtgccccgcccacccaaaagtgggtgaaaggtcggcggcgccggcactgcagctggggctgagaagccaggacggcccgagaactgacagacggagtgacagacggactgaccatggccgaccagccaaaacccatcagcccgctcaagaacctgctggccggcggctttggcggcgtgtgcctggtgttcgtcggtcaccctctggacacggtcaaggtccgactgcagacacagccaccgagtttgcctggacaacctcccatgtactctgggacctttgactgtttccggaagactctttttagagagggcatcacggggctatatcggggaatggctgcccctatcatcggggtcactcccatgtttgccgtgtgcttctttgggtttggtttggggaagaaactacaacagaaacacccagaagatgtgctcagctatccccagctttttgcagctgggatgttatctggcgtattcaccacaggaatcatgactcctggagaacggatcaagtgcttattacagattcaggcttcttcaggagaaagcaagtacactggtaccttggactgtgcaaagaagctgtaccaggagtttgggatccgaggcatctacaaagggactgtgcttacccttatgcgagatgtcccagctagtggaatgtatttcatgacatatgaatggctgaaaaatatcttcactccggagggaaagagggtcagtgagctcagtgcccctcggatcttggtggctgggggcattgcagggatcttcaactgggctgtggcaatccccccagatgtgctcaagtctcgattccagactgcacctcctgggaaatatcctaatggtttcagagatgtgctgagggagctgatccgggatgaaggagtcacatccttgtacaaagggttcaatgcagtgatgatccgagccttcccagccaatgcggcctgtttccttggctttgaagttgccatgaagttccttaattgggccacccccaacttgtgaggctgaaggctgctcaagttcacttctggatgctggaagctgtcgttgaggagaaggagtagtaagcagaactaagcagtcttggagggcaaggggaggggaatggtgagatccgagccctgtgcatggacttggtgagactgttgccttaatgacatcctgcaccgtgtataacttagtgtgtcattttgaaacttgaattcattcttatcaatttaagggatcttagaatgctgcctaccagttaactgctggtcctaccacagtcaaagtattcctcattaaagagagaatctcaggttctcactggaggcactgtgcatattttcaaccagatcaccaggagctgagatcttcttcagtccctagccaggaatacccatttgatttccagggtgccatctaatcctgggctgtacatgtggatatggacttgaggcccacctctgtgtccaagtggattgagcatatatgcctaggaggagatagactgttaatcgttggattttgattttttttttttatgcctgcaaataatcaaaagtaaaactggagtagcctaattttctgggagcaggtggagaactttccctcctacacagtgaggacagtcccagtctgctgggataagtgagaaagcccagggtgtaggaaggccctttttacatactcttttctcatgagagctcactattttaacaataaacaataaacgttgtttctaatttttaaaaaaaaaaaananacg

SEQ ID NO: 652024 - DNA, 104 bp, Homo sapiens
acggccgtgtattactgtgcgaaagggacctattactatgatagtagtggttattactttgcccctaggcggtcctactactttgactactggggccagggaac

SEQ ID NO: 652025 - DNA, 1552 bp, Homo sapiens
gcagccccgggcggaagcctaccgtgccaactgggccctcctcccgacctgccccgggctcgtgccccgcccacccaaaagtgggtgaaaggtcggcggcgccggcactgcagctggggctgagaagccaggacggcccgagaactgacagacggagtgacagacggactgaccatggccgaccagccaaaacccatcagcccgctcaagaacctgctggccggcggctttggcggcgtgtgcctggtgttcgtcggtcaccctctggacacggtcaaggtccgactgcagacacagccaccgagtttgcctggacaacctcccatgtactctgggacctttgactgtttccggaagactctttttagagagggcatcacggggctatatcggggaatggctgcccctatcatcggggtcactcccatgtttgccgtgtgcttctttgggtttggtttggggaagaaactacaacagaaacacccagaagatgtgctcagctatccccagctttttgcagctgggatgttatctggcgtattcaccacaggaatcatgactcctggagaacggatcaagtgcttattacagattcaggcttcttcaggagaaagcaagtacactggtaccttggactgtgcaaagaagctgtaccaggagtttgggatccgaggcatctacaaagggactgtgcttacccttatgcgagatgtcccagctagtggaatgtatttcatgacatatgaatggctgaaaaatatcttcactccggagggaaagagggtcagtgagctcagtgcccctcggatcttggtggctgggggcattgcagggatcttcaactgggctgtggcaatccccccagatgtgctcaagtctcgattccagactgcacctcctgggaaatatcctaatggtttcagagatgtgctgagggagctgatccgggatgaaggagtcacatccttgtacaaagggttcaatgcagtgatgatccgagccttcccagccaatgcggcctgtttccttggctttgaagttgccatgaagttccttaattgggccacccccaacttgtgaggctgaaggctgctcaagttcacttctggatgctggaagctgtcgttgaggagaaggagtagtaagcagaactaagcagtcttggagggcaaggggaggggaatggtgagatccgagccctgtgcatggacttggtgagactgttgccttaatgacatcctgcaccgtgtataacttagtgtgtcattttgaaacttgaattcattcttatcaatttaagggatcttaaaaggatttggaaatggaacaagtagcttccagaccagatactacctgtggcaacgatccttgctaccattaactgctatcctacccaatcaaatgatgcttatgtaagagagaattgaattctgactagaacactggcttatttgaacctataccgagatctagaatttttatgcctagccagaatccattgattgcagatcctgtaatctggtctccattattttactttaagccccttgtg

SEQ ID NO: 652026 - DNA, 1261 bp, Homo sapiens
  misc_feature (147)..(147): n is a, c, g, or t
  misc_feature (175)..(177): n is a, c, g, or t
  misc_feature (1256)..(1256): n is a, c, g, or t
  misc_feature (1258)..(1258): n is a, c, g, or t
taaacacaaggtaagtgtgataagaagtcaagtccactcttcctcccccacatgaacagaagggctgtttcattcttcttccctcgtttctattcccttggcacaagtaattcaggcatttgtgcatttgtcccaaggtgaactgtngtctatggactggtcccacatgacctgnnnggtgtctttccctgtgctagtcctgacccttcaggaagacttaactgctagtttctccttcctgaagccttaaaaattgggttctgccccacagcacctcctgggaaatatcctaatggtttcagagatgtgctgagggagctgatccgggatgaaggagtcacatccttgtacaaagggttcaatgcagtgatgatccgagccttcccagccaatgcggcctgtttccttggctttgaagttgccatgaagttccttaattgggccacccccaacttgtgaggctgaaggctgctcaagttcacttctggatgctggaagctgtcgttgaggagaaggagtagtaagcagaactaagcagtcttggagggcaaggggaggggaatggtgagatccgagccctgtgcatggacttggtgagactgttgccttaatgacatcctgcaccgtgtataacttagtgtgtcattttgaaacttgaattcattcttatcaatttaagggatcttaaaaggatttggaaatggaacaagtagcttccagaccagatactacctgtggcaagaatgctgcctaccagttaactgctggtcctaccacagtcaaagtattcctcattaaagagagaatctcaggttctcactggaggcactgtgcatattttcaaccagatcaccaggagctgagatcttcttcagtccctagccaggaatacccatttgatttccagggtgccatctaatcctgggctgtacatgtggatatggacttgaggcccacctctgtgtccaagtggattgagcatatatgcctaggaggagatagactgttaatcgttggattttgattttttttttttatgcctgcaaataatcaaaagtaaaactggagtagcctaattttctgggagcaggtggagaactttccctcctacacagtgaggacagtcccagtctgctgggataagtgagaaagcccagggtgtaggaaggccctttttacatactcttttctcatgagagctcactattttaacaataaacaataaacgttgtttctaatttttaaaaaaaaaaaananacg

SEQ ID NO: 652027 - DNA, 688 bp, Homo sapiens
  misc_feature (683)..(683): n is a, c, g, or t
  misc_feature (685)..(685): n is a, c, g, or t
ttcggcaaaagggaccttgggtaaactgttgccttaaagcctcctggccccggggaaaagctaaggtgccatttccaccccggatttcattttaacaatttaaagggtactaaaaggttttggaaaaaggaaaaagtagctttccagaccaaatctacctgggggcaagaatgctgcctaccagttaactgctggtcctaccacagtcaaagtattcctcattaaagagagaatctcaggttctcactggaggcactgtgcatattttcaaccagatcaccaggagctgagatcttcttcagtccctagccaggaatacccatttgatttccagggtgccatctaatcctgggctgtacatgtggatatggacttgaggcccacctctgtgtccaagtggattgagcatatatgcctaggaggagatagactgttaatcgttggattttgattttttttttttatgcctgcaaataatcaaaagtaaaactggagtagcctaattttctgggagcaggtggagaactttccctcctacacagtgaggacagtcccagtctgctgggataagtgagaaagcccagggtgtaggaaggccctttttacatactcttttctcatgagagctcactattttaacaataaacaataaacgttgtttctaatttttaaaaaaaaaaaananacg

SEQ ID NO: 652028 - DNA, 321 bp, Homo sapiens
tgagtgctcacagcgctgcggctctgctgtactcgcttgacccattgcgaggctgctgatctggtccccttccaggcggtcaggagggtgacacacaccaggcgcttgaggccgcagcgctgcacatgcggcaaacaccgaggactccatctcgatattgcggacgccggctgcataggctgcctccagatacgcctgcttgtccttctccgtgtaggagcagagagccccatccagacggccttgcccttcatagaagtccaaggttgccatttgttgttccccaccgctgtggtgaactcgctcagcaggcttgcaaaa

SEQ ID NO: 652029 - DNA, 150 bp, Homo sapiens
acagaatgggggagggttctgttctctcctgcgtgctttggagagcttgggggctataaaagaggcggcacttggcagcttggagacagggacagacgtaggccaagagagggcgaccagataggaccatagggagagacagaccagcaa

SEQ ID NO: 652030 - DNA, 740 bp, Homo sapiens
  misc_feature (33)..(33): n is a, c, g, or t
  misc_feature (37)..(37): n is a, c, g, or t
  misc_feature (45)..(45): n is a, c, g, or t
  misc_feature (49)..(49): n is a, c, g, or t
  misc_feature (52)..(52): n is a, c, g, or t
  misc_feature (84)..(84): n is a, c, g, or t
cgaaagcagcaaggcaggaacacgaacttgacncccnttggaagnaccnaanagacgagaaaaaaccccacccccatgacacantcgaaggcaggcgcaagagatgtacccgagaagacggccaatacggccgggaggtcaggagacgaaacgtgtggatgaagcaccagaaaggagcctgcggagaggaggaagaggcagaccaggagaggccagacccgagctcacggacccaacaaacaatggctctggagacggaaagggagatgagacagatcccactgcagacagacgacttagaaaacggaagcggataccaaccccgggaccagcctacccagcccaacccagaggacgcttaccgggcccagaactacctgcactagaccccaagccactatgcaaagcagcagaaccaagatggaaagcagaggaagaggaagcagccatggacagacggaatgaagcgcagaaaaggagcagatcagaagatggagcaaaggggagcttaacggagaagcctacgacaaagggacactaggctacgcaaaaatcagaactacagcaagaacctatacactggaggagacaggaaggagggtggaggaaaaccacgaaaacaacaagcccagaaaaagagcgagaatcggacggagcggaagagaaaccaggggttcatagaagaaggaagacccaagagagcgggccaaggagcagcaaagaggacccgccaatatacc

SEQ ID NO: 652031 - DNA, 834 bp, Homo sapiens
  misc_feature (829)..(829): n is a, c, g, or t
  misc_feature (831)..(831): n is a, c, g, or t
gcagccccgggcggaagcctaccgtgccaactgggccctcctcccgacctgccccgggctcgtgccccgcccacccaaaagtgggtgaaaggtcggcggcgccggcactgcagctggggctgagaagccaggacggcccgagaactgacagacggagtgacagacggactgaccatggccgaccagccaaaacccatcagcccgctcaagaacctgctggccggcggctttggcggcgtgtgcctggtgttcgtcggtcaccctctggacacggtcaaggtccgactgcagacacagccaccgagtttgcctggacaacctcccatgtactctgggacctttgactgtttccggaagactctttttagagagggcatcacggggctatatcggggaatggctgcccctatcatcggggtcactcccatgtttgccgtgtgcttctttgggtttggtttggggaagaaactacaacagaaacacccagaagatgtgctcagctatccccagctttttgcagctgggatgttatctggcgtattcaccacaggaatcatgactcctggagaacggatcaagtgcttattacagattcaggcttcttcaggagaaagcaagtacactggtaccttggactgtgcaaagaagctgtaccaggagtttgggatccgaggcatctacaaagggactgtgcttacccttatgcgagatgataagtgagaaagcccagggtgtaggaaggccctttttacatactcttttctcatgagagctcactattttaacaataaacaataaacgttgtttctaatttttaaaaaaaaaaaananacg

SEQ ID NO: 652032 - DNA, 1432 bp, Homo sapiens
  misc_feature (404)..(404): n is a, c, g, or t
  misc_feature (466)..(466): n is a, c, g, or t
  misc_feature (864)..(864): n is a, c, g, or t
  misc_feature (1405)..(1405): n is a, c, g, or t
tattgcattcttaaaaaagcaaatttatgggttataaacccccttttaaaaaatttttaaaccctgaaaatgttcaacccttcggaaatattattctggaaatataaattattattttaaaacagcttatattatttgtaatcatctctgcgcagggctcgcaccaggggtaaatgcgcaaagcgagaaagaccgagtatatggcctgtaacacgtgttgtgactccactaatggcgcatattactcccgagttgaaaaaccctatgaggaattgtgcgcatatatagattctctctgcgtggttacatataaccacatgtgttcacctgtgtgccaaagtgtggacaagagcataattgtgtggatatatagagtgtgccatatatctttctgtgggggatancctctcatttctcccgctgcgtgtgtgcacaaatttttgtgtagacacacactatatgtctntactcacctattgtataggcacaagagacgaggacatctctctctatataaccgctgtgtggtatatatttcactaaaagaaagacgtataacacacgtttgtgggcaccacgctgttgttgtttatctgctgtggcgccccacaagacgagtgtctaattttctcctctacaaaagggggcgggatgccgagcagaaataacaacatctcacctctccaatgtgcgtggtgaacagagtgttggctttttatatactcacccacaaaaggggggggcctactaaaaaacacactacaacaagatcatgtttgtggctgtgtagcataactattacaaagaaagatctaccgagtgtgcacgatggtcctcctgtagtgcttgtgcgagagaacaatnttcctgctctcgtgtggacgtaacaccacgacgagaaccataatctcgctgtggcggcagaacaacaactaatcttctagcgcggcgcagcaaaaccacagtcgtgtggttttaaacaacatcttgtagtaagcaactcacatgctctcaaccgagagatatcatacacgtcgtgacgccaccgaacgccaaataagctggtgcatgctttgttttactacaccgaaccgtattcccccgtaggcacacgccgtgtggcctacaatcatccaacaaagacaagaccacctggagagaacgtatgtgccggaaacagtcggctttatttacaacgcgaccggctctataataatattcttgggcgctcatgtgacacaaccgcaccagcgagcgtgaaaaataaatctcacgcgcaatatataacaaccacaaccattctcttgtgggagggaagggccttccacacgcacgtttctccccgcgctccacagttcaaacacggcgcggcaaatatacatactaatcccgttttccaccaatntcgctctgtctcgccatcaagacaaag

SEQ ID NO: 652033 - DNA, 162 bp, Homo sapiens
ttattgatgtgctacatgatacagatggcagtaatgatgtgtaaatattctagatgctcacatgaatttcatttttgcaggcaatttgcagctcctctgagtagacatttatattcaattacagagtctgataaataggattcccgccaccccacccgttcg

SEQ ID NO: 652034 - DNA, 399 bp, Homo sapiens
ctcccggcgtgccgtgggtagctctttcgccccccggcgatgcatgttgcccagtgccctgtggttcttcagttttgttgggtcgttatgcgaaggtggcgcctggggtggttcgggggcatatggtggcttcccgcactgcgtcgaggaaccgttcttctccgctagatgtggtgacctgtcgcttgttgcggccgagagctcttcaaatggtaggtgggagtgggcgccacccacctgttatggtatgctgggctgtggccgtgccaagtcctgtggcgtgggctcgcgtcttgttctcactgagggcgaattccggctcatgcattcttcttgcttgtggtttccacaaaagatgaaaggaagattatttctcgccccaacaattagacacagaaa

SEQ ID NO: 652035 - DNA, 244 bp, Homo sapiens
aggctctctacctatcacaggcttggtgaattggaaagactcgattcccatctccccttgcagctcacacagcagtgaagtcaccatcctgcgcactccctaccttggtggctccccgcacccccagcgatcccacctgaaccaagggcagctctctcttccttctctctagtgggtgcctcagcaacccagctggcgccctttatctggttccgccagcccctggcttcttgatcacttggag

SEQ ID NO: 652036 - DNA, 160 bp, Homo sapiens
ctggtgagtgaagccgtcagcaccgataatgggcgacatcatcgctcgctttgtagctcagggggcataacatggccaagaccttataccagaagctgtacgacgcccacgtggtgcacgaagcgccgaacgaaacgccgttgctgtatatcgaccgtca

SEQ ID NO: 652037 - DNA, 310 bp, Homo sapiens
ctgtctttcagccaacacctcagccctgtatgcgtatccatgtctgcatggaacgagacaccccttcacggcttacactgccatggtatgtacatatgcatccacgtgtgtgtatgtgtagcatgtagcgcattctgctcagcctcgggtgccgttccacattgctaccagacccattgctgtcactgtcgtcccagatgtccttgccatggccacagacaatctgccgtctcctggaaacgctggggctgcccttcagagagctggcagccccagcagtcagggcctgctttgcagaatagaacttgaa

SEQ ID NO: 652038 - DNA, 357 bp, Homo sapiens
aacaaggggggcaacctgggtaaaaaaggaacggctgggccggaaggggggggcctaacccggtaaaggaataaaaatttcgggaatttccaaaaaaacaaatttgaattactgggtttcccccccaaaggggtgaaaaacaaaccctccccaaggccccaacaatttcggggccccaagccgaacctccggggggaccttggaaggaatgtggcccaaaaaaacaaaccaaggcaaggccccctgggaccttccaaaggggttggagggaatccaaccgcccaacaaaaaaaaaaaggggtggggggttccggcggccccaaaggtcgtgcttcggaacccaaaaaaaaattttgc

SEQ ID NO: 652039 - DNA, 1048 bp, Homo sapiens
  misc_feature (29)..(29): n is a, c, g, or t
  misc_feature (45)..(45): n is a, c, g, or t
  misc_feature (54)..(54): n is a, c, g, or t
  misc_feature (56)..(56): n is a, c, g, or t
  misc_feature (891)..(891): n is a, c, g, or t
  misc_feature (919)..(919): n is a, c, g, or t
  misc_feature (939)..(939): n is a, c, g, or t
  misc_feature (984)..(984): n is a, c, g, or t
aaggactccccgagattgaggcgcgtggnttgtgggcgcgacagntcagttagnancctggaagatgaaaagaaaaagacagacacattgctgtattctgtccttcctccgtctgtgtgtgcgtgcgcctcgggacacatgtgccctgtgcgccggagggtgggtttcttgcacgtcggcctttcttctggtcagcctctccccgcgtctctgcctgggtcgtgtggccggttggcagtcgtcgtcccggcggttccagtttgggggtctgtgaaggcctgggcaacgtgggcatcggcgtcggacccgcaggggttttcatcccctccccatccggagcagcctctttgctaggctggatccagacgagcgctccccaaccaaggacaacggcctcccaggcgctcatcgtccacccgcaggagggtgcccgcagagcttcaagaaggtggttgtcacgcctgtcgccctctgccctcatcgagaaatgtagccacagctcgacgcagggacggagaaggaagccggcaaggggatggggcaagcatgtctgtctctcaaaggctggccttcctggccgagtcacccgtttgacactcctccccggatgccggtggtggtggcatggcccccccgtatcctgcctgggctctggcctctgctctgacctccctcttgctgtgtctgccccgtctctgagaagcctggcggcttcttagtgtggctcagtgtcttccacaaagaagacttccccgtccatcagggagaaacctcgtggcggtccgcgtcatgattgtttccctctccacacctctttctggatgattgggcagctgtggtgatcctggagctctgggcttccatacctgtgtgggacagggaagctctctnggtctccatggcccaagtgatggctgcncgctcggtccaggaagaggnggaggcaagcccaccgttccccacattggccttctaggaaaggcngtgttgcatcccacctgcacttcctctctgattcttgagggccaaccgcttcctcccgctcctg

SEQ ID NO: 652040 - DNA, 1214 bp, Homo sapiens
ccatgcttcttgctatctatgtcaggaactccttccgtcaaatggccaaaggggaacacaggagtggacataccttaccttaaacagatggctatgtctagcttttatatgcttcggcaaagcatctacttatagggtccaagcatatagcagggccccaataaatgctaggtgggatatgtatcagtcccctatctcagctgacatgtggctattcagccaggcatggtggctcatgcctttaacctcattactttggcaggctgacgttggcagatcgcttaagctgaggagttcgagaccagcctgagcaacatggtaaaaacccatctctatcagcacaaacaaaacaaataccaaacattaagccgccatcatgggggtgtgcactctcgccactctcaagttcccttgcaacggccctgagcggccaatgcatgaaagccattgaaaccccagaacgcactcggctccccctgtcaattccaggtcctgggatgaccaacaccttgaaacccctgtaccacaccaatctaatgacatcacatcgccactaattcatcagccgctcccactctatcgcgcgccgtacacctcccctagctaatagggcgactaacctcctctccttctctcattcgacgctacgcacatatagcgcgcaagaatacacacacgttcaaccgggaacgcacaccctcataacggtagtactcacaccatgagctggctgactacagcatgcaacaattactttctaaccaacatccaaaaaacctgctctaccccacactacacccaattatcattattcaaccacaaatcacatctccataccacatccatatcttacaaaactcaatattaaccaataaactacacgattttacacaacatctatccacctctcacaaccacaccttacatctttacatcccaaacaacaatttataactccataaaaaccatatgggaacagcgggggcacggagccgctctgaatcactcgtctgtctacgttaggtgctacaaaaacacgcgtgtgtgcaacacccacgtaggtccgacgattagacactatcccccctatcaggcatgcagctcactaacgggcagggcaacacagacccgcgactgtagactattctgttgcccgtccgcgggtgtgcacgagcacgatggctcggtatcgaggtcggtttcgcagcccaatc

SEQ ID NO: 652041 - DNA, 157 bp, Homo sapiens
cgtgcggggggggtcccatctgctccagcagtttgaagcttctcattgcttgtccgttatccatggccaggaatacttgcagcaccctgtgtgatagacttcatggagtgaaccccatgacgcactttccagtaggacgactgactgccgtgggcca

SEQ ID NO: 652042 - DNA, 519 bp, Homo sapiens
tatccgtgtcgggttggtgggttcttggtctcactgacctcaagaatgaagccgcggaccctcgcggtgagtgttacagctgttaaggtggcgcgtctggagttgttccttctgatgttcagatgatgtgttcagagtttcttccttgtggcgggttcgtggtctcactggctcaggagtgaagctgcagaccttcgcagtgagtgttacagctcttaaggcagcatgtctggagttgttccttcctcccggtgggctcatggtctcgctgggctcaggagtgaagctgcagatcttcgcagtgagtgttacagctcataaaagcagcgtggacctaaagagtgagcagtagcaagatttattgcaaagaccaaaagaacaaaccttccacagtgtggaaggggacccgagcgggttgccactgctggctggggcagcctgcttttattctcttatctggccccagccacatcctgctgattggtagagccaagtggcctgttttaacagggcgctgat

SEQ ID NO: 652043 - DNA, 1180 bp, Homo sapiens
  misc_feature (758)..(758): n is a, c, g, or t
caccgtgggggcgctcccaaagagccccttttggggaacatgaagtgtcggaaattccaagcagttagctgcggtctaggtaacaaaggcgtctctttttctcacgtccagaccggggattcccggcgttggccactggggtgaaaactcataatgtcgaggctccccctttctgggccatggctatgatatccctgagcacaagtaagagttgggcccgattggactgacattcttgggcccttctgtgaataccacattaccctcactttgtctgttgctctctaggaacacctttctagttcacccaggaaacaatactagaccctctgtgtttgcggctaaaccggggcccaacaggatatggctttcctcccggggctccatgtttccaacccattattggaacagtctcgcctcactcgtcgcgtgcatacatccttgcaagcttttctagtgcccggggcacgggcacttgggacacggtttctccttatactccaaggatgcgtctcgcatagccgcttggtctctttgaactcggcgccccatgctgaatgcctgctttctcccaggataccccttggatctatatagaatcgtgcccgagtgcgttctcccgaaagagagttgtgccaactgtgcttttcagggggcgtatcgggggccctaagagactctgccctggcgacacacaagagaacacctccggtcacagcgcacagagatctctctcggttgtctttcattatctggcngtggtcaaaaggcccacaaagatgcgttctgtcacaggttctgtcacaccacacatgagcacatgtgaatgtgtccggcgacatgatagtatatcatggcgaatatgaaagaagcttgcgagtcacgccttgagaaggaacctcaagactcacaatgagcctcgtgaggaatatgtttgccttcactcctatgctgactggggaaacggggaagaagtggttcacagggaagggctatatggcttgctttgctgaacagtgttctcggggtacccatacgagttcccactaggggctgctccctccaaaagggaggggacagatggggagcttttcttacctaatgaacggataatacgtgcctttgtttcttaaatgctgttcacagttacttgaaaaaaaaaaacaatgccgccaaagca

SEQ ID NO: 652044 - DNA, 538 bp, Homo sapiens
cggtattccgccattatggccccggccaaattttgaccaattcccttttcccacattttccccacccaacaacacacaaagagcgggacctctgtaaaacttttaaaacccccccctaccccccaaaaactagccaaataatttctcaaaaaaaaaattttattttgaccaaactccctaaacccccaaaaaaacccccccaattcctttccatccttctgaacagaactatccggagaccaaaaccccaccaccccttcatcactaccaagcccaaaaccaacttaaaaaattcccctattcaccccccacaaaaaattcaattccagattaacacactttgaaccctactatacccgaaattttgccctcttcccaaaaaaacagaaaaccccccttttttttttataaaaaaaaacccaacccttccatttcaaatttacccacatctctatttctaaaataaaactgccccctctctaaaaaaaaacaaaacacctccccataaacaaaacactctcccccgcctctaccccaa

SEQ ID NO: 652045 - DNA, 723 bp, Homo sapiens
tcgaaaagaagatcgatttgatgtgcaccagctggcaaatgacccataccttctcccacacatgagaagatcaaattcttcaggaaacctacacatggctgggctgacagcatcccctacacccccttcttcaagcataattacttactgactttcctccaagattggcatgatatctttgaatttgcttccagatgcacacttaagtttgagagcatttgagtgtttgttttctttttctttttttttttttttttttacacaagacggtggttaagaaacgtgttgggtgaactgaagttcctcataggtgtcattggtattgagagaggactagtggacaagtgaatctaaagtgcccacttcgtgactataatttgtgagcagtgaaggacggcatgacgtgccgtgtttacccagaaacgggaataccagtgcttacgattagaggacaaaaaatttgggttaatctggggggaacacgtggtaaataacgcttataatacttaaatacatttggggtggttcctagaagagttctacatatgaacgcggctagttttccattatttaaaaccacttggacaacaatttgagcacatatttctaacaatacgaactataggtgccgggatccattcttcagcattgggcagttaatctgcgtgaaaccaaagtaagaacctgaatgacagtgcacagtggggtttcactagaaataca

SEQ ID NO: 652046 - DNA, 113 bp, Homo sapiens
agcgggaacaatcacttcgagaacatgtgaggggatctcttgagcccaggatttttgaaactagcctgggcagcatagctgagagccctgtctgtctactaacaattttttta

SEQ ID NO: 652047 - DNA, 900 bp, Homo sapiens
ggatttatgcaataacattttatgtcaaactgttgccaagtctgtggtccatggtgctttcatttctgtcacatttcatttcttggaaaaggcctccttcctccaggtgcctgctgaaccatcttagggtcactcacaccctactgtaattttaatgatgtatgttggtgtgcctggctgggaagaccagccccgacatgcacctcctgagaaagtcatgccaatgggcctaccctgatgccatgagtccttgagctgtcagtacccacagattgctcctatctgtatttgctctatctcagccctcgtgccagatttacatgtccatggcatgcaacaatctcaatgtgcctgtgtgtgcatcaagagtaactaatgtgtggcttgtgtgaatgtgtgtgttgtgcagttgcagaaacatgaaccatcagtggctgtggttgtgttgaccactgtgccacgctgacactgcataacacgacgtggaccctgatgtgaatgtggaactcggggaacacatggacttgtggccactactataccatcttggacgaacgaccggtggttgcttgcggaccgtgacagcctttggacgttcttgacatgccacgtggcacgccgaagcgcaacacggccttgcaagctgcaactttgcacctctctggccctcccccacgaactccaccctttgcgctccatcacaccccacaaccacccccccacttacacaccttacacatgctgacacacggccactctggcctctcgcaactcatgcaatcgatgctccggccttgcactccctcacctctggcaagcgcactcaccgattgccaattgtgcacacgctcgctgcgcctgcctccggctaccacctcgcgggttgcactcggtgctgtg

SEQ ID NO: 652048 - DNA, 354 bp, Homo sapiens
tagtactcagtgcagcatgtcgagaatcagagacatatcctagtagtgcatggagaaacaccgatgagtccacttgataggtatgtcttatacgcaccaagcacttttctttactcatttaatattcattattctgcaagatagttactagctcatttacagatgaggacacagagaacttacgtaatttgtccaaggacacaaggctacccagtactaccgtatacggacaagccaacactgtcttcatactgtcacactgggcagggggaacagctaggggacagactttgtgagggagtctccctgatgggaccggctggacgtgggtcagactcacaaacaccgtggcct

SEQ ID NO: 652049 - DNA, 298 bp, Homo sapiens
tctctctctctctctctctgtctgtgtctgtgtgtgtgtgtgtgtgtctctctgtctgttttttctacgtgcgcttaaggctaagacacaggtttggattagttttatttgcttcctttttgcgcttttcttcgcgcagagcctgatgggagagtgtccagggcagggaaaccacattttttgtaggtgatagctcagtgaaaattggtgcttatgttttacacttctctgttgtggctctcttgtggtgctatctatctgttttagggtctccgtgaaggcgcactggggaccctgg

SEQ ID NO: 652050 - DNA, 440 bp, Homo sapiens
atgaattaatgaatgggggatctttaagattttatcttctgaaattcgtttaaacaggaccctttaagatgtggagctaatatatattctccagaagtggttgccattgcataggtatagtgtgtatataggaaaagatattttttcttttcctttcctttcctcttttcttttctttttatctcttttcttttcctttcccttttaccttcctctcttcgcctgcctgcttgccttccttcctcctttccttttttctgctgcttttttctcttttttctttcttcctttccctttattatttttaaaaatataaaaagagacgaagtctcgctatgttgcccaggctagtcttaaactcctggactcaagcaatcctcttgcctcagcttcccaaaatgttgggattaggcatgaactaccacacctgaccaggaaaa

SEQ ID NO: 652051 - DNA, 261 bp, Homo sapiens
ccagaagggggctggtcctgatggggctgactggggaggtctggcttctgcccaccaggaggcctgaggagtcaccaggggaaggttgtctgggctgcgcgcgaggggctttttcagccggaaaggaaggggcgcccaccaggctcgacgcccccgaggagggcgctcttgtcccctctggcatccaggcgccactcaggctgtctagaggtctgccgccgcccacgcccccggacggtggtgaagcgggtgtatgaggcc

SEQ ID NO: 652052 - DNA, 758 bp, Homo sapiens
ccgaggacttttggaattgcccccttaaattgggccttttcttgcaataaaattacaccccagaaatgttgttttttaagccaaaaaaaggaatttaacaaagaaaaaaaactcattgtgattatccctggattccaccctttactaaagtacagtgctcaaattgataagatgcagccaaatttctaccctctttgtgttgtgtagaccctgctagtttcctgtgcctattctaaaagctgtggtaaaaatatggccattaaaaaggaaagggccgggtttcccttctggaaccatcatcttcccccagatgggcatatggcatgttagttgcccccaaatctcccctgcttcaagagtcctccccctccacctccaacaaagagtaccttctttgagcatctctggagcttcttcttcaatctgattccatctgtttttccctgctaggattcctcccagtttatgggccatgggaaaattcctagtctagtctctgaaaacatacatgtgtatatatatgtatgaacatgtgtgggcatatatggatatgtatgtatgcccacgtatgtgtgtgtttctatcatttctaatgacctggaacaggggaacactgtgtgtgcttagtcccccctcttgtaactctcaaagcttagtttcaaataatgacataaaggagctgcgccaatggaaagcaaattaaaggcctattattacagccagtgtattttttccacttaataaaaaatggaaagaat

SEQ ID NO: 652053 - DNA, 245 bp, Homo sapiens
ctccatctgccacataatccaatcagcccctttcagaggctgggcagctatggtctacactgagcggggcttctctaaagcagcccaagttgtttttgtctggtccggacaaaacgggttggcttaaaacgggacgaaagaaattccgggtcaagtgaggaccccaattaggttccaagagagggtttacattatcttggtatcagatacctagccgggtgcactgggcagattgtcggtgcccc

SEQ ID NO: 652054 - DNA, 402 bp, Homo sapiens
acaatttttaatacatatctcctagatatgtctttattgatgtttgaaagtagccatccagtttaggctcttaatattttaaaatcagcatcttgcaaatatgacacgtcatagaaatttaaaggaaatccttacatttttcagtgagtcctcttactatttatttcatggtgtcacaggtggggacctatattccttgtgttttataacggcgttatataactagaaagaaatcacaaaatattaatgaaaaatgttttcattatacaaatatattttgataatttttagtatattgaagtaacaatcatgaaagactactgttataacccagaaaagttaataaaatatctaaatctgagaaattgagacagtagaatgtactatctcattattaaaagt

SEQ ID NO: 652055 - DNA, 571 bp, Homo sapiens
acatctccgccttaccgcacccccaaattaccacaaaaccaccagatatcaagagatcttaacatagagcatttaacatattatccagtgcattcatgaggaaagacaaaataatacaaaacacaatgtcatcctatctgagaggaaaatgtctgcagaaataaacgtgatttacacatcatcgcaaagtggaagacaaaaacatcatcaacacaccctcaaatctgggatggggtatacatccaacacaagggctgtatactattatggcatcccatctctggcttttccagttttcacacttgcgaatccaattctttacttcagggtcaggaaattccaaaaacgaagtagaccatatcaaacaacttcacttgggatacccgcctccttatgctgctcttacggtagaacctgcacatattccattgctttgcctataaatttatatatacaaagctaaataagcgaacagtgatacactgacatatactattaaccccagcatgaggatccctcttctgcaaagatgtggcaaatcatatataaacgcaaggtaaacttaagcctc

SEQ ID NO: 652056 - DNA, 468 bp, Homo sapiens
  misc_feature (232)..(232): n is a, c, g, or t
  misc_feature (326)..(326): n is a, c, g, or t
  misc_feature (468)..(468): n is a, c, g, or t
ggacgagttaggtccgtggtctgcgtggaggtcgaggactccgtcgcagacctagcggatcgcgtggtactgggtcgttcaggcctgccaaagaccgccgtccggaagtactagccggacatcatgagtggcgtgtctgggtattcgatcggcgtagagtcaaattgagcgggcctagggtagacaggcacagtcggagaagattggcttcattagggtggatactggactnggtatgaaggaggatcaattgggatcgttggaacaagcagggcctctccgtgcttatgggtcgtgcacatttgttgtgcagggggggactgccngagatgtgggcacttggggagtatgcatagcctgtcgtatctggagcatgtgcattcgtgggagaaaagagaccatgcgttgactagatggatagatgcggtgcacccgatgaggatatctatgcttggaggtgcgtcgggn

SEQ ID NO: 652057 - DNA, 253 bp, Homo sapiens
  misc_feature (112)..(112): n is a, c, g, or t
  misc_feature (120)..(120): n is a, c, g, or t
gttttttgggggatccggggcccccttcttcacttggggtgttttggaagccccagcgggctcggccggtttggggggttgggatatttattgacctggtcctccgattggntgacaggntacaggacccccaacaaccccaatccaggttttggatgcattgagaccccgacattcctcggtatttattgtttgtccccacctaggacccccacccccgaccctcgggaataaaaggccctccatttgccca

SEQ ID NO: 652058 - DNA, 232 bp, Homo sapiens
  misc_feature (75)..(75): n is a, c, g, or t
gtcgctgcgtcgtctaacgtttcgtgtgtgcggcatgatatgtcttagtgtgtgtcagcaaatgtcggcatgttngccttgcttatccctgctggcatggagggggaagcacgcatcggtgcatatttgtgtgtgtgtgtgtgtgtgtgtctgaaaaggtattcgtggccgggtgcagtggctcatgcctgtgatcccagcacttagggaggccgaggtcggtggatcacga

SEQ ID NO: 652059 - DNA, 852 bp, Homo sapiens
ggaagatgccccgggaggagaagggtgcgccgggccgcgcccgcgatgtcaatggcagtgcgcgcattctggaagaagtattgttgcagatctggagtgagtactgaggatgacggacagggatggacattccctgggacctttcttcatccgttggctcaggcaagagaaggagaaggggcaacctacccaaggagtctgtgcagattcttcggtggatggcttgtatgagcaccgttactaggcctatgccttcaggagcaaagaaaaagcgttgctgtcccagctaacatcacgctgtctacgcgtgacgaggtctgtaactggttacctcataaactccgctcgaaggctcctccgcttgacatgctgagaaaggatggcaatagatccaaatcagtgtcatgattacccggcgtggggccgaagatttctgaaacgagctctgtggagtccgtgatgggcatcaaaaacttcatgccagactctggaggagaccccatttcattcctgtacatgtgggccaaatgccaagctagggagtgccagatggcgtccataagccgtcatcgcccgggaatcaagtttgggcctcgtcaaatcggtggattctggccataaacaattgtgatctggcacttggcaaagatgttgcctgacttctctctgccagttcggccgggggtgggacgaaacaccggatatacgcggattgcgggcaaagactttcagaactttcctatgtccaggggccttgaattggggcatgtggaatcaaccgggggtttaaactgctcccctaacagggcgacaggatcgataggcacagatggcgccgggggcagtgattga

SEQ ID NO: 652060 - DNA, 1484 bp, Homo sapiens
cgggacacgacgccgtctctgacagcccgcgggtaactgggccgtagccgccgtccgagctcggcccccgcggagagatcgagctgaaggactgcgcggctggctctcctctagatatggccaatgaagaggatgacccagttgtacaggagatcgatgtgtacttggaccaagagatctggcggaagaagcatgacatcgtacgtatcagatacccgtgatgcggtccagccgtcgaagtgaccatacagagagaccattcacgcaccatcgtcagaccacagactcaaagcccaagacagacagcaaaggctcagcagcattagcagcataggcccaatcaggcaccacacctgcaaccaccaacacatcattagccagcccggccaagcagggggcagaccagcataagcaagcgtagcaacagatgggacaagggggcccatggacggccgcggaaacagggcggaaagacaaggacgaacagaataaataacaccatcagaaagacgacctggacagtgcgacaacaaaggaccgaagaacacacaatatccatgacgctccatataccagccaagaaacccaacacaagggtacaagcacagcagaattcaacaccggagagatgacaatggacccaggacagtggacaaacctccagtaaaacaaagcagacacagacgggggaatggacaaggaccaatccccaaagccaccttaggaaaacactaagcacagtacgtaacacagcacgaagtggggacacgaagattccccaatgggcgacaggacacatgggacaccgtaggaaaaccaccaaacagtagaccagtattaatcaattaccgcagattgaaaaccacccgttggatgcagacaatttactacgcggggaccgatgggaaccacgttaactgacaaaagaagggacaacaccagcaggagggcggaaaacggacacaacgcgcgagcaacagcaggaacgaggtatcacaccaacaaagacagcggcaccatgtgacaccaaaccagcagggggtgacattggcaaacagaccacataccccagatatgactacagaacgacccatcagaggcagggcacacagtatgagacaacacgggagggacacgggacgagacaaaacaaggaaacacagacggtgaaacaattggggtcttgacatacaacaagtcgagcccacaacgggaaacaagtctagcacaagaccgcgcagcgaaaactgggcaccaaggagagcagtctaacatcaacaaaccacaccaccacaggagaggacaacccagggcaggacaacggagaacacaaacagcgacaaaacgaccaaagcgagggagcaacacccagaggacaaccacgagagaaacgagcaccacacgggaagatgataggtgcacgaacggcaatcaccaccacgatcaaaattgacacaacagaagattacaccccgaacagggac

SEQ ID NO: 652061 - DNA, 314 bp, Homo sapiens
  misc_feature (124)..(124): n is a, c, g, or t
  misc_feature (227)..(227): n is a, c, g, or t
  misc_feature (237)..(237): n is a, c, g, or t
ccatgtaaccacgcgcggtcatctgtttttccagcacttcttgcagcaggaaacgcagatcgcgggaggcggtcagggtaacgatttgattatcgcgggtgacttttgccagcgcctgatcggnacgctgatcggcaccattaatgcttacggtgacgcccatcaggcttggatcctgctgtggcagtgtaaatcgtcgggggaaactttcaatagttgtttgggcngttttgcggnatccttgcaagcattaaacaggggcaacttaacggggaaggaggatttttttttgaacatgtttcggggcttttcaa

SEQ ID NO: 652062 - DNA, 310 bp, Homo sapiens
tcgaagagatgcgcctgacaccatgcccatggatgtggtaggtcgcatggagtctgaaaaacagaccctttcacaagtatcccagatcactctgaggcactgctacatgggatgggcatgggaaagcgatggcaagtgtgctgcctttcagggtaacaatgctctgggttattgggccatagcagacattagccagaatacttattttgtcaaaggggcacagcaacttgtcagagcagcacttatgtttcctggctcatggatcaatctaaacaaataaaactggatcacttactgatgccaaaagtcc

SEQ ID NO: 652063 - DNA, 334 bp, Homo sapiens
cagcattcgggcccagatgtctcgctgcgtgtgccttagcgtgtgctcagcgcttacatctgatacaaaaaaagaccgagaggagaaaatacaagccgtacctccaaagaataaaaaggtttacataacggcaatcccgcaagagaaatggggaaagatcaaaattttccccaaattgcgtattgttgttcttgggggttcaataccaccctccccccacacaaagggtgagctctctcgagagtgtgagagagagattaaaaaaggtgagagatcagagattctgttttgtaaggaacaagggcttgggtttctatattcttcgtcgtcacca

SEQ ID NO: 652064 - DNA, 357 bp, Homo sapiens
gagagagagagagagagagagagagagagagagagagagagagagagagagagagagagagagacagagagagagatagacatctccatagagtcttaataacgtttattcgaacattctctcgctcacctctcgcgatcccaatgacctgaggcccattcaatccatatttctttccctttctcctccttctgtacgtttacgacctgtttctttattactctcccctctattctcatatccttcacgatgccccccacccacacccatatacctttaatgtgctctcactattctcttctcttatcctcctccacaatacttactccactccttctacctcccagactatttctt

SEQ ID NO: 652065 - DNA, 580 bp, Homo sapiens
  misc_feature (336)..(336): n is a, c, g, or t
  misc_feature (354)..(354): n is a, c, g, or t
  misc_feature (358)..(359): n is a, c, g, or t
  misc_feature (361)..(361): n is a, c, g, or t
  misc_feature (377)..(377): n is a, c, g, or t
  misc_feature (379)..(380): n is a, c, g, or t
  misc_feature (384)..(384): n is a, c, g, or t
  misc_feature (403)..(403): n is a, c, g, or t
  misc_feature (441)..(441): n is a, c, g, or t
  misc_feature (459)..(459): n is a, c, g, or t
  misc_feature (466)..(466): n is a, c, g, or t
  misc_feature (468)..(468): n is a, c, g, or t
  misc_feature (470)..(470): n is a, c, g, or t
  misc_feature (491)..(491): n is a, c, g, or t
  misc_feature (495)..(495): n is a, c, g, or t
  misc_feature (524)..(524): n is a, c, g, or t
  misc_feature (571)..(571): n is a, c, g, or t
  misc_feature (573)..(573): n is a, c, g, or t
ggcagcccaaaactccaggtgccaggggccccccccagctttgcctgtcaccccacttcccgcccaggggcaggggccaggcctccccccctgcccgtgcatgagacattgccccagaaagccctctttggggcactgctccctaccccagggccctggccaaccgggaggttggctctcctctggttaaagtgggaaaagggggttggccatggggcccccccagaacctcagcatttccttccagcccctccaaaccctgaggcagccttggggaacccccagctggggggttggcagccccctgcccccccccagggttttggggtcctgggntggggcccccctccctgntggnngnactcccccccccccangnntttnttcctttgtcctaaaccgncccccccttcccccccccccagcccaggggggttttgngccgggcctcttgtttgnggggcanancngggcccccgccgttgcccttngacncccgttgggttagccccttggggtttggntttttcagggtcctttttgggccgaaaaaaaaaaagtaaaactttgntnattttta

SEQ ID NO: 652066 - DNA, 115 bp, Homo sapiens
gtttctgggcagcccccggtcccctcaggcccgccggccttccgggccaagcttcgcttcttcaggcagcttccggcgctcctaggccttccagccgttctttagtaggcgggtt

SEQ ID NO: 652067 - DNA, 882 bp, Homo sapiens
  misc_feature (882)..(882): n is a, c, g, or t
cgcagtggctcacgcctgtaatcccaacactctgagaggccgaggcaggcagatcatgaggtcaggagatcaagaccatcctggccaacacagtgaaaccccatctctactaaaaatacaaaaaaattagccggcgtggtggcaggcacctgtagtcccaaccactcaggaagctgaggcagaagaatggcgtgaacccgggggcgtaggttgcagtgagccgagatcccgccactgcactccagcctgggcgacagagcgagactccgtctcaaaaaaaaaaaaaaaaaaatttttttaaaaattattcggggtttgtgtcctaccccctttttgggcctaataggctgggtttaaatttcccccaggttggtctggcttcagaaccttttccatttcctcagagaacctgggatgggcttatatgaggttcccagactttcatggtggggttggggttggtcgggggcactggtgggtacccttcgctattttgtttacaccttattatggtgcgccattcgggtggtgtattggaccctgtttgctttttggaattgggtgccacggtgagtgctcctgtgtgcggtagaaaattaacccggggactacttatgttaccaatctgggggaaattaatctagttaacaggtaggggtggggggtcgggaatatcttgggttcaataggcccggtaaaatacttccctggtcccggccaaggggggcggatagtatgttggtgacaagcttgtgaagatcctgaaagcgttgatgtatgggcttgataagaaaaatccgggtaggaatacataggacaccggttttgggaatcaagacaccggggggatattgaagagagtggtccctgggtcggagtggn

SEQ ID NO: 652068 - DNA, 600 bp, Homo sapiens
cacgaactattgaccacgcttctctaatatttgctcccttgggatctgtgacaccacttctctgtgtatctcctatttcttccctggttagtctttcacacttcccatataacctaggcagcattccttggtactctgtccctcgctagtctctctctctccctccctctctctctctctcctgacaacctcatactctctcaaaacttcagttacattcaacatgataattagcatcttttatgcttatatgctgctttaaaatttacaaagcattttttcatatattgtctcacttaattgtcataacaaccctgcaagtgagtagagcaggcattcactaatatgacccttgtcttacagatgaggaatcaagatcagagagttcagaagttcaaggtctcataactagaaagtgccagaaccagaataagggccgggcatggtggctcatcctagcactttagagaggccgaggcgggcagactgcctgatctcaagagttcgagaccaatctgagcaacataggaagaccttgtctctacagaatattaaaaaattagccgagactgtgtgactgcacggagtgagactctgtca

SEQ ID NO: 652069 - DNA, 147 bp, Homo sapiens
  misc_feature (15)..(15): n is a, c, g, or t
tcctgctcgctctgntctagctgttgatcgatgcgctgttgctgctgatgcctgaatctgcttatgctgctgcggctgatgctcctcctgctgcttaagcggcttctgctcttcggccgcgtgcctgatcggggctgctccggcttc

SEQ ID NO: 652070 - DNA, 466 bp, Homo sapiens
  misc_feature (6)..(6): n is a, c, g, or t
  misc_feature (27)..(27): n is a, c, g, or t
  misc_feature (32)..(32): n is a, c, g, or t
  misc_feature (166)..(166): n is a, c, g, or t
ataganccagggtttcaatatgtcaancgggntgatcttgacctcctgaggcaggagaatggcgtgaacccaggaggcaaagcttgcagtgagccgagatcgcgccactgcactccagcctgggcaacagagtgagactccgtctcaaaaaataaaaataaaaaancaataataaagaagattttgggtcgggcgcggtggctcacacctataatcctagcagtttgggaggccgaggtggtggatcacaaggtcaggagattgagaccatcctggctaacatggtgaaaccccgtctccactaaaaatacaaaaaattagccaggcgttgtggcgggcgcctatagtcccagctgctcgggtggctgaggcaagagaatgtcatgaacccgggaggcggagcttgcagtgagtcgagatcacgccactgcactccagactgggtgacagagcgagactccgtctc

SEQ ID NO: 652071 - DNA, 400 bp, Homo sapiens
  misc_feature (209)..(209): n is a, c, g, or t
gcataaacgataaagttattaaggctccttttataatacagttgactcgaacaatgcaggggttaggtgtgctgatcccctgcgcagtcaaaaatccacgtgtaacttttgactccccaaaacctccctactagtaaatagcctactattgcccagaagccttgccaataacataaacagttaacacatattctgtatatatattgtancctgtattctttaataaagtaagctaaagaaaatgttattgaaatcataaggaagaggaaatgtatttataaccctgtattgtatttgtactgtacgtgtacatggtctgtttacaaaatgaatcgtctgactgaaatgactgctgctgcccactccaaactatggtatatatcaaagcaattcccctttt

SEQ ID NO: 652072 - DNA, 218 bp, Homo sapiens
tttcgctaataataataataataataataatacccccttattgaatgtggccagctccctaaatgaggaaaaaggaaggcattttttgcatttttgcctagttttccttataagcccccctaagttaaaagctctgtctttttggggtttgccctatgtaaagcttttaaaactttttaattgggcttttttatgtattaaatgtttttccttttgca

SEQ ID NO: 652073 - DNA, 457 bp, Homo sapiens
caccatcccacaattagtttaatctgaaaaaaaagggtttttaaagttaaaagctccagcaccttttttttgggctcataaaaggcataatctgtttttttttgtttcaacaaaagtaaaatgttcaagtttggattttggtgtaaaaccaacaataaatttgtccctttgactccaatgcaggggctcgggggatggctcacaggggaataataaaacggccttctttttaataaatgggagggatcattcccactggggaactgaccatgtgcccagtgtttttgccaaacatttggaccttataggggatgagctgttccaaaaaccctttgttggttcggttgagggcccggcataatttgttccacgtgtgggcgtccaccagggacatgggggggtctttaatgaggtaggcgaggccacggggcatttatcggttaaccaccaatacaca

SEQ ID NO: 652074 - DNA, 310 bp, Homo sapiens
  misc_feature (42)..(42): n is a, c, g, or t
gcgcgtgtggtacacgcccacgccgagcgattgtagcacggncttggctgacccgacgccgtactacatgaacctgctgggcatgatcttcagcatgtgcgagctcatgcttcagcttacgtggtgtgcttgggtcgctgtctactgctccttggtcagctttgccgactctcggagctcggaggacacgaagcaacttatgcgtagcttcctgctgtccatctctgccgtggtgactgtcctatctgcagaatcctcagcccatgacgcccacatggtgctacgagactagaagggtcacataatggac

SEQ ID NO: 652075 - DNA, 187 bp, Homo sapiens
tggcatttaaatagaatcttctactgtataaatcaagtcttaaaaatctgctgagaggccaggcacggtggctcacgcctgtaatcccagcactttgggaggccaaggcgggcggatcacgaggtcaagagatcgagaccatcctggctaacacgatgaaaccctctctctactaaaaatacaaaaa

SEQ ID NO: 652076 - DNA, 766 bp, Homo sapiens
gcaaagtcaccggctgagtgccaagtccccagatgaaggaatgaagcaaaatctccatgctgaggtcaagtccccgtgagaaaggccaagtctccaagctgaacggaggaagcaaatgtcccctgagaaggccaagtcccctgagaaggccaagtccccagagaaggcagaggccaagtcccctgagaaggccaagtccccagtgaaggcagaagcaaagtcccctgagaaggccaagtccccagtgaaggcagaagcaaagtcccctgagaaggccaagtccccagtgaaggacagaagcaaagtcccctgagaaggccaagtccccagtgaaggaagaagcaaagtcccctgcagaacggccaagtcccacagctgacaggaccgaagcaaagacccccgagaaggccaagtccccagtgacaggacgaaggccaaggcccctgacaaggagatcccaaaaaaggacagaggtgaaggtccccagtgaaggcaggacggaccacagcccacaggaggtgcacagtcacaagcagcccccgaaagaagggcacagcgacgagaaagccactgacacaaccaaacacagcaacacaagacagaccaacaagcacgcacgcaggcccccaagcaacggacaccagacccaaaggcccaaggaggaaggccacacgacagcaacctggcggacagcaacacgcccaaagaaatccagagtacaaaacaacgaagcgaacaagactaaagaataacgacaaaagatcca

SEQ ID NO: 652077 - DNA, 187 bp, Homo sapiens
gaaggacgaacaggtcatctagcctcggacctcatgtggcgtgaaggagagaaggtattggggtctggccatatctttgcatcctgcaatgacactttagtccatgtcactgatcatttctgggcaagtgcaaccatctgccgttgcgactggctagggcatgaagattgagggatgcctctgagag

SEQ ID NO: 652078 - DNA, 145 bp, Homo sapiens
ctagaggatcttacacgtacgccttctaagaccccatccttatcccaagtctccacaagagctaccttcctcaaaacagtaacagaaacacatctaagcttggcgtcactgacaattgaagttctgaattccgccctcaccaaag

SEQ ID NO: 652079 - DNA, 135 bp, Homo sapiens
ctgggaccaatcttcaaggtcgccagcatgcgtgcggtgatttctttggacacccgctccacccaatcaaacggcgtatcgagcggcaaatcatccaaaatctctcgttggcaattggtatacatattagtctgt

SEQ ID NO: 652080 - DNA, 225 bp, Homo sapiens
ccattcccatccagatggttttggagacactgtgaccactacaggaaatgggactcggccccacccaagctacctcaatgcagagtgcacctcccacctggtacctgggcaggcctacatcacgtggctccgatattactaacaatgtacgacgtcctcagactgagaggggctcccccgacccgatccagcatcccccgcacagccaccagaacacaccgacgg

SEQ ID NO: 652081 - DNA, 100 bp, Homo sapiens
tgagatagacccaaaacgacaggatattctcggaattcaaagactgaacttacagaaccccacagggcttcatctgtagtctttcactaggagaccctga

SEQ ID NO: 652082 - DNA, 228 bp, Homo sapiens
gtcattcctcctgtgtgagtcccagtaatttcgcactcagtaggtacttcacttgggtcagttaagacggaccatctatttttcatcgtcatcagtaacactggatagcattctcttcttagcagagtaatctaagacaaaataatttcacatatctaggaagcatggcactccagtggcatggcaatttagtgtatttatgcatcccaatcacatgttcagcagcat

SEQ ID NO: 652083 - DNA, 334 bp, Homo sapiens
  misc_feature (182)..(183): n is a, c, g, or t
gctactggagccggtctcagagagtgtgttggacgggcattcctcacacgcgccttatgcgacaacgaaataagtcggcatggatgggttcactgcctggcgcctcaaggttcgtggcggtctgtaagacctatcatagaacagctttgccctaactctcggggcggcacttggcgtacacnngaggtcattgcatggggaagatacccagcgctacgtgacgagcgcgacctctgtgaggcagagagtaggactaagagataagctcatagatccaactactcggagagaaggaaacatgctcgatgtaggctactggaaatcaggcacgaga

SEQ ID NO: 652084 - DNA, 110 bp, Homo sapiens
  misc_feature (110)..(110): n is a, c, g, or t
ggttacaagacctataaccaatgtgcaactcacaattggctacaatgcgttacacccagtcaaactacttttacaggtattacacaaagccacccaatgcgatatttggn

SEQ ID NO: 652085 - DNA, 209 bp, Homo sapiens
caaggaggcgtcctggtcctccatggggtccttgatactatcctcgtcacagagccactcctcgcagcatgcccggtagctttgactagccgagggttgggacagcccaagttaggagagagatagttcttagggatcgacagagtaatgcagcccactggcgtcatcatgtacatgtgcactgactgttttacggaatgggttgtaaa

SEQ ID NO: 652086 - DNA, 594 bp, Homo sapiens
gaattgctgtgctgtctgtgtaacactcagtaaagagattgtaagctgacttactagaattactggagcgagcaattgacacggtggagacatacagactatgtctttcagcgaatgactggtctttctatctcttgtactaaactgaattcaccccactgaaaaagatgagtatgcctgccgtgtgaaccatgtgactttgtcacagcccaagatagttcagctgggatcgagacatgtaagcagcatcatgtacgtcagaagatgccgcatttggattggatgaattccaaattctgctcttgctttttacatattgatatgcttatacacttacactttatgcacacaatgtagggttataataatgttaacatggacatgatcttctttataattctactttgagtgctgtctccatgtttgatgtatctgagcaggttgctccacaggtagctctaggagggctggcgacttagaggtggggagcagagaattctcttatccaacatcaacatctaggtcagatttgaactcttcaatctcttgcactcaaagcttgttaagatagtgcgcgcgccacacccaggtaat

SEQ ID NO: 652087 - DNA, 1151 bp, Homo sapiens
gcctgctgatgtggattcgcttgcagggtgttgtggaccatgtgggggtgtaacaggtgggatgtgtttgcacatgccgtgaatgtttgtcatcgagaggatatgtgggaagttataaagcccttctgtgaggaggtcattggatagtattttcgcgcagatgttttcttgaaaaaacgttggatttagtatgaggcaattcgggtggagagtgtagccacgcgtgtgtgtttggggcctccacttggcggctgctatgttgccatgttgactagccaaggggtcccattgggtcggggtctgttgtatgcctccgtttgagtgtcacggtaatggggttcctctcggagttttttggatgaggcgtttttgggggcgaaggggtaagcgctggtcgccggtcggccaggagggttgtgagtgttcaaggcgctgtgcacgagggtagccagtgggaacagtgagtttctgtggccactgtgttaggaacattccctgtgtgagcccagaggtgggagttcccgtgccctgccacgttgtgggtgcttgtgtcgccgtgtagcttcaggagatttccaggaaactgctaacaggcactttttttaagcttggtcgctgagaggcacaggaagcactgtcagctgccgttcgagtgccacagtgtccacgccttcgcccagggctggaggaaactggaggacccgttgagccgttcacgctgagacaccttccccagctgctgttttcaaggctgaagctggcccctttgtccccacgctgaggattggaccacgagtcgttgtcacggtaccttgaatgtctcttgcccactgccaccacgcttgggctcacggggcacagtgcactggtcctgtctgcccttctctggccacgaagggcaccacggacactgtttgttttaaatgaaacctgcctgcctcacgattgctgttccccgcgggacgttaaatgcactcgagcacccacctgctggggaatttgagcttaataagaaattggaaatttctgagaatcccactggacggttacgattgggagggaaagcttaaaagaatgtcccttttgtgagaagggaatggaattgttttctttcattcgtaaagttagtgagtaaagattttataaatcca

SEQ ID NO: 652088 - DNA, 1103 bp, Homo sapiens
gaaacaacccatttttagttttaaccagttgtagtcaaaatgctacaataaacacaaaaaagagacagcaaaatgaagagcatttgactcccgcacttaaaatgaagtacacataaagtttaaactggttatgacaaaagcctatagttgtgtttcttgaactataaagaaaacaaattttgggcagtctttaagtatatatagcttaaaatataatttttagcattgggcaccatatgtatgccattatattggatttggcattactgtttcacaatgaacgctttctttaaggcttggattcttatgatctatgacacgaactaaggcacaaccacagtttatctttcttaaatttcatcactgttgatgtggtcctttggtgttacaaaacacagtgcaactatcaaaactaaaaaattatagagtactatggccgttctgctgaatcaaaatatacaatacatcatacatacttttacaagcaacgctcaactgggcagatacaagttgacatcatagaagatgcaaatgacctttcaaaatcaacacaatgtggttctgaaactttcgtgacctaatacccatgcatctgtggctccaatgaacctactgtggctctcgaactcgggtgtcgacccataagtactactacattgagcgtcacactttctgccttggtcataaattcttaacagcggtgacgtcatatctgcttgtactacgcccttcacttccaattcttaacacggctttgttgcccatttgaaaacaacaagttgctactcaatcacggaacaagtctcttaaaggagttcaccctgttagaccatgacggacgtgggctaaccctataaacttgtgggatagtagccccgttgtcgactatttctaaacgcccccagaatattattacctgggatataaaaacacacgggggtaaatcagcacgcacaaacatagtgcgggacagcccgacttgaactagtgctgagaccacacaacaaatagcgcgctcgaagtaatcaatctgctggaggagcaacagacgatcttcataatcgagtattacctgctgttgtcttgtctattagcaaagatga

SEQ ID NO: 652089 - DNA, 188 bp, Homo sapiens
tctggcaccgatggaggatgccactagattggttgctggcggaagggatcagacatggttccatcaatgcttgactgtctattgccagctatggatactgtactacaatgtcatgatcttcatcaatgccacgaacagtgccagtagtagttaaagtctcaaactattccatgagtccatcctccatg

SEQ ID NO: 652090 - DNA, 1418 bp, Homo sapiens
agttgaaagaatatgggagtattgggggaaggatgttatattgtgtttaagtgtataggtagaaaaggtgagtgatggtaatggatgaaagaatagtatgaggtggaaggtagaacgaagagtagaaggtaaggaagatgaagaatatactagaagagagaaagtggtagggagatgatggtagtgtattattataaggaggtgaagtagaatagagaagaacgaggatgagagagaggtagagtatagaaaagatatgggagtagagtaaggaggagttaatgtatataaacagttagtgtgtataggagtagaaaattcgtgttgagcgtgtgtgggtgtggtagttggtagttagttgagctgtcgtggagttgtgtggtgcggcgggggggcggggggcgcttgggtgttggttagtgtgcaccagccgcccgctcgtagtgtttgtttccgcgcctctctctcgtgtgtagataatttaaaaccctcccttcttttggttggttgttactttatactcttcttcgttgcgtttttttggggcgacgctctccctttattggggactctcgtctagtgtgggttcgctctccccacacgtggggtggcggccacacatatcgacactccgcgcgcgtgttggtagtatatacaccacgcgcgcgccccccctgcgcgctgtttttaaacgacgcggctcgctctcttctaagaggggagggcgagagggcagcgcgcgcgcgaggggagagaattatatttcctgcgcaccgcgcgagtgagacatactctctctctcgcgcgagagagagatatttctctctttagagatgaaattatctcacacagagagacacacacacacacactctctcgtgtggagaggatatacacacacattgataagacacacacatcacacaccacactcttcgcgcgcggggtgttatatatatatgtgttctcggatagactcttctctctcgcgcgggttgtgttgtggccaccacacacacgcgcgcgggtgttctcactcccgcgcctcctcgcgaagaaagatgatcaaggaggcccctctctctctcaggagagagaaaaagagggacgccaacacacctccgcggggtgtgttgttttgggtgtgttgtgtatataaacacacacccttttgtttatgggccccactctgttttttaaacccacgagaaaaaaaggtgtttgttggaagacacactctcttagtcgcggggggggggggggaccccgaggggttgttgaaaaatatataatgggaaatataggtgggttttttgagagagaaaaaaaaaaatatattgggtttcccccctggggggggagcgcacccccccccacccccacacacaaaagagagagagagaaaaagaagtgtgaga

SEQ ID NO: 652091 - DNA, 256 bp, Homo sapiens
ctatcaagctgtgggacgtgcggaatccatgtgccgacagaccttcatcgtgcgtgaatccgacatcaatgcaggtggtttcttccccaatggctacgccttcaccaccgggtctgacgacgccacgtgccgcctcttcgacctgcgggccgatcaggagctcctcatgtactcccatgacaacatcatctgtggcatcacctctgttgccttctcgcgcagcggacggctgctgttcgttggcctacagcacatg

SEQ ID NO: 652092 - DNA, 916 bp, Homo sapiens
gcatgacataatatggcggctctctgatgtctgagtgtctgcgggtgtgccttatgcactcctccctgtgttgaggctaactgcgcagtgcgattggagctttgtacgtgtctcagtgactttgttcaggacctgggcctttttgcgagagagtgggtgtggcgagtagcagggctattgcacgtgtgtcaacccgagccacgacgcaattcatggcctctcgagaggcttgctactctcgtcactactaggacgtagcggagaggggtttagtccaggatggtttgagcgtccttgggttctgcgtctcccgtcctgtctgtattctcgagatcctgtgccctgacgaatggacctattcgcatggtctgtgggacccatccaactgctgtcagggggtcactgggggcctgtgccaccacatgttcgattcacgtggagcgtatgtggccagtggtgggatgaccatgtgcctaaggatacgctgtacaattgattggccttgtatggtggacttaagcaggactttaaaacctttgatgggggtcttcgactatacacagaagatattcgacggatgttgccgcggccctctggtggcagtgcttgttgtgcatttgcgttgggcggaaagctccctgacccatttttatgacttcggttactttggcatgactctgggagggtagtagccgtcttgtgcgctctggccttgtgtcttttgccatttagttcctcacttagtatgggcctgattgtggtcagatatgtccttgtgggtgcggtaggcctttctgtcttttttgttccccgtggttatttcccggtagtgtactctttggggcccccaggttcgggaggcatttaattcttgccccgcgaggactggggcccatttggcggcccccaagggggg

SEQ ID NO: 652093 - DNA, 351 bp, Homo sapiens
aggacgacggacatctgaagccgagcgtaggcaacgggacagagcgtgccaaatgaccgcgtggacacagaacgcatgtcggagctgtgaccgtggcggtccctttctgtgtgaagttccggctgagagggcaggacatggtggtgtgacatccagcggcggcaccgtccgggtggggctcaagtggagcagccagcgatcattgatggggagctctacaatgacagtgcaggtggcagcagcagctcgtggatcaattgaggcagcgcaggtggtgactgtgcatctggagcacagcatcaataagcatggagtggtggcaccgcttggtgtccagtgcacctgaaagct

SEQ ID NO: 652094 - DNA, 416 bp, Homo sapiens
tttccccctacccccaaccatgccctttagggtagcagggcagcagcataccaaaaaaatgtgctgcaggactccggaggcggcctgggtgggttaaccatggggcagtttacctgggtttttaaaaagtcgggagtgaccagctcaaaaagcatgaactgatgctggcatgaaggattcccggaagatcatggagacctgggtgggagctgtaacaaaaatggtggagtccaaggaaacagcccgtttttggggaatggggctttttttgggggacccttggccccagcttttagagcccttcccctgtgtcctgcccccatgtggggcaaatggactttttgtcccatgaggagaggggtagttcatgtgttttccctttttgtgagcatcctaataaatttggtcccttttta

SEQ ID NO: 652095 - DNA, 717 bp, Homo sapiens
  misc_feature (327)..(327): n is a, c, g, or t
caagggcgggtcccttattcgtttcctcccgcagttccccgggtttttaccgagtaattgggtgtagtctccggcgctgcaaaacacctgttgggtcaatcgcgcgccacccccttcctggccccaaaaataattggggcaccaccactgccatccacccaagctgggcaccaaaagttaaacagaactcccctctggtagcatccacgtcctttttttgcgcccccccggtttttgtataaaaaacgttacttccaatgcatcagcaaaatctaccccctagtattttttctccctcggactccacatttatacactaataggtgncagaaaatacccatacttataattcttcggggaaaagtgagtttcctccctatcgccacaatccacgccgttttatatgccttctacaacccccatccccgcaccttttttgttattgcggatctgcacatttgcctccaaaactaattctacaccacacgggtggtccataccgcaccccgggagtggagcaacaaccacagcgatgtgggttcttttatttataatgtcccaccacgccttaatatctttgaccgagtatagtttattcacccaacgcacaaactataaataatattttttctgttgtaaaagacgagacaccattttttaaaaaaaaaggaccttttttaaccaagggaaaaaaaaaggccttttcccccaaaaaaa

SEQ ID NO: 652096 - DNA, 1245 bp, Homo sapiens
  misc_feature (334)..(334): n is a, c, g, or t
  misc_feature (472)..(472): n is a, c, g, or t
tgggaaagggggtctcccttctgtgttcgcccgaggcttggaagtgcaagtgggggggaatctgggcctcacgtgcaacctcgtgcctccgtggttcggagcagttttccgtgcctcggcctcccgagtgtggcacggggattgcaggtgcgtgccaccacgccttggctaagtttggggtattaaggtggaagaacggggttcccaccttggttgggctcaggcgtggctctggaagcctcctgtgaacctcgtgtgaatctgtgcccgccttgcggaattccccagagggtgctgtggggaattgcaggcattgagccaacgcgggcctggnggcaacaatagagaataactttctcgaaagaataatttgggggttctcattattaaactggggagttaggataatttaaaatatttttaaaagcttcattacaaacttaggagtgttattcctcctctcgagtttagnccattagtataagcggggggtacatctcccgagaaaaattcgtggagaatcgcggagttatactgtggaataccagagattttcatacttttattattccataaccatttaggtatattttaaaggaggaggggtaaacacactctgggtctctataattttcgcgcgtatataaaaatttctttattgggggtgtaacatctacgaaatctaagagaaaacaagggttattaacataaaagggttctcctatacaatcccttcaatggtgaaacccttatatttactggtgaaatttcaaatgtgtgttctgtacggcaaccacaaaggtctggagcaattaggcgggagtttacaggagaaactattttaacagtgtcaccagagaagaatatattttctaattgtgaggggggggaccctctcaaaagttgggagaccaaaaaagagattaggacttagaggagttgacacagattttctctaattcttttaaaaaaaaaaggtctgggcgaaagtctcttatgcgatgcgtagttggggcgatgtcccccacagcacagccaaatgtaaaccatcttaaggggagggagacaagaggaaaacggcggggttgttttttccccgttagaaaactagtgggttttttgcagcagaactatagttggggatacccagtcgggatgtttttaatcaaaaactgttctttggagtttggcgagaaagaaggaagagaaaggcaagagatggtaagagagaaggacaagcctgtg

SEQ ID NO: 652097 - DNA, 316 bp, Homo sapiens
cgagctcgtttccctgtcggtgtctctaatgcctgtaatcccagcactttggtaggccaaagaggattgtctgagcccaggagttcaagaccagcctgggtaacatattgggaccccatctctataaaaaaaaaaaaaaaacctggggctggggggaccacacctgtaatctcagctcccgggggggctggggggggaggatctacctgtcagctatcggggaggctggggggggaggattacttgagcccaggaaatcagggctgcagggaactgggattgtgccactggcctccagccggggcaacagagggaa

SEQ ID NO: 652098 - DNA, 160 bp, Homo sapiens
tcgccatcttcagcaaatcctgatgaaggctacaacagtaagcgcagtacccacgttaagacgttagttcagcgtgtaacccagtgaggtggcgagaaatgtgctacattttctaccccagaaaactacgatagcccttatgaaacttaagggtcgaagg

SEQ ID NO: 652099 - DNA, 472 bp, Homo sapiens
gctgagctttgtgcccgttactatagtacacttgagactcatgcccaggattgccatctcttctcatcgaggctataatttgtgagaacctgccttctttgttttatcttgtacggatcagatttggagctgttctgacctctcttttgttttccgtcaatccctgaatgtcagcggtgagttagttgatctcacttgtccccatcactacctctctcctagttgcgctgtgtcacccctcaattcctctaatgtgacttatgatgctcctttcagcagcacccaatgaactggggattcattatgagaaaactgtgcctcttaaggaaccacaagatccatagtagccccctgctgttaacatacatgccactgcctggtgttcaagggcccctttggttacccttgtttcctagtactcaccactcccaaatattttactctagtcaaacaattctttctttttccccct

SEQ ID NO: 652100 - DNA, 372 bp, Homo sapiens
gttatccattctgtttaatcagttccctgggttcaaggaagtacgtttgggtccagggaggcattacattgcttttgtttaattttaaaatgatgggcaggctggagctgccagggatgctttacagggaattaagatcacaccgttccctgctattgagatcccctttgccagagaataacctttggggaagtgggtctttaaaagactgggggttttttccagggtttgtttttataacctttgggtggggcctttttatagttaaagattggggggggttaaagttaaatttttgtgaagggctttaattatccagtgtttttttagccttggtggacttttaaattcgaaggccttaattttggacca

SEQ ID NO: 652101 - DNA, 890 bp, Homo sapiens
tctcatggtgttatatttttattttcaaaaaaacagagttcatttgaatacaattctcactagttaagtcacaattcacccggccgggcgaccgtgtccggcggccattgggaaaatttccccacggttactgggtccacgtggcgggctgtgctgtggtggacctccctgaagagtcagtagcgtcgagggtcgcccgaaagtctggaagtggagtcttcccgggttaatccatgccgggttgcaggctgttgactctgttcggtgcccaggtgctgggtcgacatcgagggacgggcctgggtgctgccctggtgcccgggtgaacagaaacacacatctggcttgtggttagaggtcttcatggaaagagtggtccttggggggatgagcatctttctgaagaaattgtcccatgtcattaagcagttggtctctgatgaagataaagcccaattagcaagtacagtgtgtcctctgaaagatgaaccgatggcctatacatccttgtgaaaccaggtcccttatagaagttggtctatattgcctgaacgctgggcatgatagcctttattggaccaaggatggtcacaagcatgtgggtcacaattacttccaggtacaagaccagtcagtggcttaagaataatcgcgtccaggggaaaaactggtatgggaaaaagtgggcaccctgttctgtggagaacaacactgtcttcaacgtctgcggaaaggctctctccattatgggatgttgccggaatggattggcgcccaaacaggcgtgactcttggtattacagcaatgcgtgcaaagcaggggccccttaaggggcacactttgtccgaagtttgttgtccgccccacaatggaggtcggggttcaaatg

SEQ ID NO: 652102 - DNA, 135 bp, Homo sapiens
ggtaccgtggcggacacgtactacgttgtagctcacttccactattctatcaataggagctgtatttgccatcataggaggcttcattcactgatttctgctacatctcaggtactcctattacgtgtccggcca

SEQ ID NO: 652103 - DNA, 1186 bp, Homo sapiens
  misc_feature (351)..(351): n is a, c, g, or t
  misc_feature (360)..(360): n is a, c, g, or t
  misc_feature (366)..(366): n is a, c, g, or t
  misc_feature (368)..(368): n is a, c, g, or t
  misc_feature (371)..(371): n is a, c, g, or t
  misc_feature (374)..(374): n is a, c, g, or t
  misc_feature (382)..(382): n is a, c, g, or t
  misc_feature (394)..(394): n is a, c, g, or t
  misc_feature (751)..(751): n is a, c, g, or t
  misc_feature (787)..(787): n is a, c, g, or t
  misc_feature (800)..(800): n is a, c, g, or t
  misc_feature (802)..(802): n is a, c, g, or t
  misc_feature (812)..(812): n is a, c, g, or t
  misc_feature (818)..(818): n is a, c, g, or t
  misc_feature (823)..(823): n is a, c, g, or t
  misc_feature (830)..(830): n is a, c, g, or t
  misc_feature (836)..(836): n is a, c, g, or t
  misc_feature (840)..(840): n is a, c, g, or t
  misc_feature (855)..(855): n is a, c, g, or t
acgagagagatcgagccacacctagtgtggacacgcgcttgtgacacagcggcgacgccagagtggggaacaagtcgtgaaaggcaccctgcataagagacaaagggcccggggataccccggggcacacccggggcaggggactacttcagactccaaaatagagccgcgaccagtacgcggggtgtccacactggggacatcaaggcaccacatcaacggggctctgagaaaccaggcatgattaagcaaattcgggctgcggatgcttactgaagaacgaggatttctggtggggcgaacgagtgacatggcggacatcacaggtgtgtgccactctgttgtggctcnataagcagntcagancntcnttncgcaggcnttccaatacaancgctggttcctcacctgcattaaccagccccagttccgggctgtcttgggcgaagtgaaactgtgtgagaagatggcccagtttgatgctaaaaagtttgcagagacccaacctaaaaaggacacaccacggaaagagaagggttcacgggaagagaagcagaagccccaggctgagcggaaggaggagaaaaaggcggctgcccctgctcctgaggaggagatggatgaatgtgagcaggcgctggctgctgagcccaaggccaaggaccccttcgctcacctgcccaagagtaccttatgtgttggatgaatttaagcgcaagtactccaatgaggacacactctctgtggcacntgccatatttctgggagcacatttgataaggacggnctggtcccctgtngnatactcagangtatcngcttnccctganagaacntcancatcagaccttcatngagctgcaatctcatcactggaatgttccagcgactggacaagctgaggaagacatgccttcgccagtgtcatccttttaggaaccaacaatagcagctccatttctggagtactgggtcttccgaggccaggagcttgcctttccgctgagatccagattggcaaggtggactacgagtcatacacatggcggaaactggatcctggcagcgaggagacccagacgctggttaagagagtacttctccgctgggagggggccttccagcatgtgggcaaagccttcaatacagggcaagatcttcaagtgaacaataatctgccgatacc

SEQ ID NO: 652104 - DNA, 276 bp, Homo sapiens
tatgtcacttcgcctgggcctgtttccctggcagcggcagaggtgctggcctacgcgtaagcaccaccacatgctcctgtcacactcgctaattttatccttccatcttaatgttttgtttgtttgttttgcgctggcgtctcgctctgtcctccaggctggagtgcagtggcgcgatttctgctcactgcaagccccgcctcccgggttcacgccattctcctgcctcagcctcccaagtaagctgggactacaggcacccaccaccacgcctgg

SEQ ID NO: 652105 - DNA, 552 bp, Homo sapiens
tactaaagtcgcgtactactactaaattagctgctggggaggatgaggcaggagaatggcgtgaacccaggagatggagcttgtggtgagctgagatcacaccactgcactccagcctgggcgacagaatgagactctgtctttaaaaaaaaaaaaaaaaaacaggctgggcgccgtggctcacgcctgtaatcccagcactttgggagggcaaggcgggcagatcacaaggtcaggagattgagaccatcctggtctaacttggtgaaaccccgtctctactaaaaatacaaaaaattagccgggcgtggtggcaggcgcctgtggtcccagctacttgggaggctgaggcagaagaatgccgtgaacccggaaggcggagcttgcagtgagcccagattgcgccactgcactccagcctgggtgacagggcaagaatctgtttcaaaaaaaacaatcgggaattgaaaagtaaaaggcgggtgggggggcttacacctgtaatcctaaccctgggggaagggccagggggtggattccatgggcatgaga

SEQ ID NO: 652106 - DNA, 455 bp, Homo sapiens
gatatacagccggtccggtgttatcgatgcacagtgactccatcttgagtagggcgggtaaaataaggcagagacctactaggaggctgcattcccggaaggttagttgtgtttagtcatagggcgagatagggagatcagcaggatacatgtcacaaagaccttgctgataaaacagcatgcggtaaagatgccagccaaatcccaccaaaaccaagatggcaacaaaggtgacctctagtcatcctcactgctcaattatatgctaattgtattgcattagcatgctaaaagacacttccaccaatgccatgacagtttacagatgccatggcaatgccaagacgttatcttatatggcctaaaaaggggaagaatcctcagttccaggaattgcccacccatttcctggaaaactcatgaataatccaggaaatgggtggcatcgataaaca

SEQ ID NO: 652107 - DNA, 661 bp, Homo sapiens
tagcgggatgcaggagcagtgtcagaggctgtgcaggcagtggagccctgggcctgtcccacaaaaccattcttcccttctaggactctgggcctataataggaggggctgctgtgaaggtctctgaaatgccttcaagggcttctcccattgtcttgtctattagcacttggctcctttttacttatgcacacttcttcagcctgcttgaatttttccctggtaaaaatgggccttcttttctaccacatgagcaggctgcaaatggttccaaacatttacgctttgcttcccttttaaatacaagttccaactataggccatttctttgttcatgtatatgtgataggttgttagaagcagccaggccacatcttgaacattttgctgcttagaaatttcttctgccagataccctaaatcatcactctcatgttcaaagttccacagatccctagggcaggagcacaaggcagccaagttctttgctaaggcatagcaaaagtgatctttgctccaattcccaataagttcctcatttccatctgagatctcctcagcctggacttcactgtccatatcactatcagtattttggtcacaaccatttaaccagtctgtaggaagttcacactttctctcatcttcctatcttcttctg

SEQ ID NO: 652108 - DNA, 1205 bp, Homo sapiens
ccttttccccgcagttttgtcatcccggtggtctgttcctctacatatgtgaggtctcgctattggataatgggtgcgttgggaagggactactcggggtgttaacgggtgtctggctccttcgcgcctaaatagtggttgacaacaccccgtgggatgtgtgtctatatggtggattattgcgtcggtaagtgcgatactacgtgtcgcgctttggcccccccgggtttgcggatgcgctagggtgtgacttaacggcgaatccttccgtgtctccataggtgacagcgtatacgtctccaggggtaatagggccatctcaatccgttggcacgaccacggttgcgcgcttgcgtcagcgagcacagtggtcgtcatgtagcagtgggggactgctcattctatggtggtcgtcgactggtatgccctaatggtgctatcgcccgttgggaatacgtgcggatctgtggctggagtgctcaggacccttgcgggttccgcgtgccaacgcgggcgagttaaccctttggtgtctctggggacacgggtactcccaacgtgttgccactgattgtagagttgcggcgcacttggctgcgtaacaccaatgtggggggaaggagagtgcaaaggcatgccacgctgtgcatcgctttggtgaggagtgtaccgtcggtgtcaggtttcacgtgtgtaatctcgtgggaacgcaatgggactctcccggtgatgccattcatgggatctctttggggacaggtcgtgtgcgacactgcgttcgatgccatttggagcttgcactaagtagcctttatcccatgcgtgagggcctgtgaaagcagcgagtggacaacgggtgtaggactctgagagcgagagcctagctatgcacagaagaaagtaccacagcgagaactagacacgtctatcgtgcatatggagcatgcatcctgggcgctagcaaggctgcccttcctgcaatagggaacgttatgaaggtaggcacacgactggtgaaggccccgtgctacgtgcatccaagttccctcttcacctaggtactgcccaatcagatcaaagatacctgcgacatttaaaatctgatagtggatggagtaatatgggaatgagggtgggggtgggggatgaagggaagtaatgcatctgtgctttgttcggcctggagtgtcaaggatggttggtgg

SEQ ID NO: 652109 - DNA, 837 bp, Homo sapiens
  misc_feature (31)..(31): n is a, c, g, or t
agcggagatctccccagacgccgaggatggncgtcatggcgccccgaaccctcgtctgctactctcgggggccctggccctgacccagacctgggcgggctcccactccatgaggtatttctacacctccgtgtcccggcccggcgcggggagccccgcttcatcgccgtgggctacgtggacgacacgcagttcgtgcggttcgacagcgacgccgcgagccagaggatggagccgcgggcgccgtggatagagcaggaggggccggagtattgggaccggaacacacggaatgtgaaggcccactcacagactgaccgagagagcctgcggatcgcgctccgctactacaaccagagcgaggacggttctcacaccatccagaggatgtatggctgcgacgttggggcctggacgggcgcttcctccgcgggtaccagcaggacgcttacgacggcaaggattacatcgccctgaacgaggacctgcgctcttggaccgcggcggacatggcggcccagatcacccagcgcaagtgggagacggcccatgaggcggagcagtggagagcctacctggagggcgggtgcgtggagtggctccgcagatacatggagaacgggaaggagacgcttgcagcgcacggacgcccccaagacgcatatgactcaccacgctgtctctgaccatgaggccacccttgagagtgcttgggcccttgagcttctaccactgcggaagaatcacacttgaccctggcagcgggatggggaggaccaagacccaggaccccggagctcgttggagaccaggcctgcaggagattgggaccttcca

SEQ ID NO: 652110 - DNA, 993 bp, Homo sapiens
cgtctttgcgaaagaaagacaaggaaagagagagaaagtagtaaatccagcactccgttgatcagctctttcacaattctctctctgcatgtagcttctctgtgaggtgacttgttgtggccacagcgtttattcgcctagaagtctgtatgccggtgttctgacgttcgttcccctgcgcgctgtcatcgtgctctcgcccttcggctccctaaatttctgcgcagcttgttccgttgttgatatctatgccgaatgattcctccggtgcaacaatcttcatgttacctcccggcgtgaacttcgtcccccttcttgggacccccgctactttcttgcgggcaacattctgcgcccccactatttgcttcgggaatcacccccggtgtggtgaaaacgtcttcggtggtccgtcaaaacttggagaggtctttacctggggcgcaagtgtgtggcgccctcctcccccggctggtgagttgctcggttgctccgcccgctccaagatacattgctgggccactcccccacggggtcgcacatttgttcggcacaagaccagacggccttattgcttaagaggactaggaaaggtgctttcataaaactacatcgcgcgccccgccattttgtgagagcacatataagtggtgtagaagatgtttcacgccccggtgtcgaggactcaccaacagggggcacaaaccaacgtagacaatccacccgcttcgtttcttgtccttcactgcagcaagatgacattgtctgacgcttgcgtgtgcgaggtttgtcccccccccgaattaagccgcccaccgtcgtctcctcggcgagtgctgattactcacgtaatgtgtcactcacacagcggttgcgccaaggggttgatgagcgccttaaaacgcactcatgtagcttgttgttcacatacggtgaaaagccgtaatttttattgccgccctaaacttctttgccttaacaccaaacatgaca

SEQ ID NO: 652111 - DNA, 151 bp, Homo sapiens
tgagagaccgtgtggcaatgatggtgttacaatactccagcctgggtatggtacttttaaattaaaaacatttaaaaataagtgttctggccaggcaccgaatagctcatgccctgtaatttccagcacctttgacgaggacaagggcaga

SEQ ID NO: 652112 - DNA, 449 bp, Homo sapiens
taatcaggcctgtgtctgcctccttcttgaatagcccagtgaattcatctaaacagccttcctacagcaacttcccactacaggtggtcagacggtagagccagaacagtgttgtcctattgggacattcacacagcagacaaggttattggctgatggggcaggcgcagttggtgtgtctggttcaaggctggtcataggcaatagtgcccgatcgtctgtatatcggatcagccaggcataagttttcgaccagtaagccaatctctttatcatttccgagccgcagccgtcttcgttcaagcgtgaattgggggtcatgcagtcagtcttccctttttccatcattggaggagtagcgtcgggtctatggttcgcagcaatcgtaatcctaaccactctgtgctgccggggtgggaaacgaaataccctaatgggcctagaataaa

SEQ ID NO: 652113 - DNA, 1235 bp, Homo sapiens
ggtggcgaccgtgatatagtccagacccggacgtgcctcccaattcgttggattggctgtatcctctcccttctcctacatggtacggatttctcctagtcactcgatcggactaactacaaactcatggattcttccaagcgaccatttctcgctatgcctactcttctgctccaaccgcattcattaggagctaggaagcactggtcaattacccatctcgtatcactcacgtgtttccccatagtgagtagtagcccacctacttgtgttcctgccgtcaacgttagtgggggtaacgcgcaaagagcgaacgcacaacgtcagcgtcattatcgagcctataacagattgtgtcagagtgcaataccgtattcgccatgcattgtataccaaagaatacagtgtagtctccttctgttggtaagcatgtgaagcgtggcgagagatgagggcatagagcaagctcccagtaggttcgcttagttgatctagaaggacccccaacagagtccatacggtaggtcgacaccgggtagtgctgagagcgatgctggaaggattcctaacaactactattccacatatcattctatttatggatgtgctcatgaaggcaatgcacatagtgtagcctacgagtggttgcacaaagtgcctaactgttccctgtcgcttgtacgcagatgttcccgcaatcatggcctattcgtggactaacttacgtggggggtttgtgaatagcgggtcactcgttgttgcctttgggtgcctgaaacttttattcgtcaccctgtatgtaattccttatcttggtcctgaacgcatgggtcttggaattggcggtatgtcttaatggcccggagacctggcgaaggaaggggttttgaccataagactgatcttctcacgtactcacactccttctgcttctccgagctctaggttctgcgaattccaggaatatgctaaaggacgaaatttatctttgggtccatggcctcataacttactgatgataacttaacttgcgaggctcttccaaacttcactccgttgctccactaatggactggggctactatgtggggaacaaaagtccccacaggggggtgccttcaaggagacaggcctctgataacccgtctgttaaatgttaggaacttgtaggaccctctctggggaaccttgagcggctccggcactctcgtatcagattgtgtctcttgtgtccc

SEQ ID NO: 652114 - DNA, 598 bp, Homo sapiens
  misc_feature (536)..(536): n is a, c, g, or t
  misc_feature (567)..(567): n is a, c, g, or t
  misc_feature (569)..(570): n is a, c, g, or t
cagtacggatgtggctgggagtgcggcggacacacatgctgtgtggccatgtccgggcgcatccaggcacggagggctgggttagcaggggcaggaggcacagcgacgggacagagacagagcctgtggcaggagaaggcctggagggttggcacacgtagcccactaggcgtgcattgcatcagggaaggagagaactggggagtcgtcggtagaggggaacagtacttgggaagggctggggagagctctgctctggctctcattcaggcggcgacatctacagagtgtgttagacagacacacgcactcgcaaatacacctgcagacccagtgcatggatgtaccgtcacccaaatgtggcaacacaggtgctggtccacaggcacacacatacatgtgcacacggtacacactacccacacacgcacagacacacagctccaatctccaatacaccatgcaaatgcagatacagacacagccaaccacatacgcatcctcacttgcccgcccagcctgtgtacaggtgcatncaaagaatacacactctgcatcccacctatntnngaagagggagcaagcagggggatcctct

SEQ ID NO: 652115 - DNA, 265 bp, Homo sapiens
ttaccggcttatgtatacaccttcacatttcagaggtaagaaagcactactccatgagaattcacgtgtggctggtatagcctgatacacccttacagcacaggcctttgacgtgcgctctcatctgagacactcttctttggcctctttacccctgcaacttctactcttcttagagactctcagctcgagatcttttcctcaaggaacgtacgcttacgacttgtgcagacttctgctttctccacactcttcacacgcttcg

SEQ ID NO: 652116 - DNA, 164 bp, Homo sapiens
cgtgacgtctcgctctccctctccctcctctccctctccctcctctcggtctccctctccctcgccccacagtctccctctccccagggtctccctctccctctctttccagggtctcccccggatgcggagccaaagcgggacggtacggcggccatctcggc

SEQ ID NO: 652117 - DNA, 403 bp, Homo sapiens
ttaataaaggggataacgagaatcaggttcagagtgggagaatccctgttctgtgatacaggatagaggaatatcaactgccttgttcgtctggtccatcttgcttagctgtctgtcttactactgaaatagattcatttaagtctatctcattatttacttctgtgaccaagatattgggctggcttatggcaagaggcagagagtcaactgaattgctgttggtcacagtgacttctgtatggctactcattggatgagaggcaggcttattaggaaaaattttctgcaaagtgactgtgggattctgccagttgggactctgaggattccttctatcatcagaaatctgggaaaaggcagttttgaatgaggatgctagagtctgagcaattccaaatga

SEQ ID NO: 652118 - DNA, 309 bp, Homo sapiens
taccactatgatgggaacatttcattctcaaaaaaaaaaaaaaaaaaaatttctcttctccctgtttatgggtattcctgaccttgaaatatttttttcccatggggttcaaagggtccctaattttataatggcaattggaaaaatagggaacaaaattcaggtatgggcatttttcccatttccatttggtgttaatttttaagtgataaattgcggagacttaaagctatattgcagtgtaaatttgtccagtgaccagtttccagcgttccacttttatattatttataattaaccctttgaatt

SEQ ID NO: 652119 - DNA, 101 bp, Homo sapiens
aggctccagcttaacgatatagggaggtcagcacggagctcacgtgtcgacggaactcgtacagggaggcatgccccgcagtggtgaatacacgtcgacca

SEQ ID NO: 652120 - DNA, 474 bp, Homo sapiens
tggcgctttcacacgagagaaacagctcataacgcatctcctgcgttgagaaaaccacttggaggtgtcttctataaactacataaaataatttgttcatctgaagatggaatcccttattagaatatggatataaaaacactgatcattacattgaagagtcaatgactgaggttttcttacctactgctcatctcttagacaataacttctagaataatttctacatcagtgtctgtacaagcttttaaaaaacagaataaattacaaagccccatacaccaaacaaaccacctcccaatctattatgttatgtacaccttattcacagtatagacagtaagaagagatttaagcgtgtagctaggcaactagctcctgaagcataacgtatatccttcaacatcccagcccattcttttatatcatctacatacttccatatatcattgacttcagtgggtgcaaattcta

SEQ ID NO: 652121 - DNA, 217 bp, Homo sapiens
tttttttttttaaataagatgtttgcgtacgtgttaatggccagaagctccctggacttaggggtacaatatctccacaaacctgtaaaccattagcagcagaccaatgtgctctgctaggtctgagtacaggaaaagcctgatcttcttgttcaagtttatttctagaacacattgttggttgaaaggacatgaggcagatactttaattttagtc

SEQ ID NO: 652122 - DNA, 160 bp, Homo sapiens
tgccatgaagtggccaaggagccgggctggtcatctgttgcaccccagtcgcctctgcgatgttggcacaggtcggccgggccccagcagctctcttcggcccccatctggatccagaggaaatcgtttaggaggcagtagggcatcttccaaggacacg

SEQ ID NO: 652123 - DNA, 140 bp, Homo sapiens
  misc_feature (51)..(51): n is a, c, g, or t
  misc_feature (81)..(81): n is a, c, g, or t
  misc_feature (83)..(83): n is a, c, g, or t
ccgcgcggcatctgtatttatttaatcatttcagtaacttcgaaaaatgtnttgagggggggagattcttcacacgctgcncngttcccaaaaaggagctgggttcacttgatggatttaacagggaattctctccaact

SEQ ID NO: 652124 - DNA, 125 bp, Homo sapiens
agatcaaggaacgaagatctgagagataaactgttcaagtcttagcaagatactgcacttctctttgacaggttctgggcttagttagaggccctactggttccaaaccatattccactgacttt

SEQ ID NO: 652125 - DNA, 614 bp, Homo sapiens
gcgtgagacggccgcccgcagggctgctctggccgggagccgctggccgggatgacgcgaatcctgccggatccaccgcgacggggactacggcggccatgagctcgcggaagctgagcgggccgaaaggcaggagggctcagcatacacgtcgtgacttggaacgtgggttcggcagtgccccctctagatctcacgtgaccatgcttcagcgtgaagcaacacggaaccgtcaagtcttgacatagtatgttatatgggtctccctatgtccgtatgcaggggatccttcgttactggtctttgccaagtatcaggcatttgccctatatccagattcgtgtctactaaatccagcgccgcactggaccttgtagtgggtactggagggaacaaaggtggagtcaatcatctgcctgaagctttatggctactatgtcatgtatcatcgatctgccaccatgccttccccacatttccaacaggttaccagcggctggagcactttgaccggatcctggagatgcagaattgtgaggggcgagacatcccaaacatcctggacacgacctcattatctggtttggagacatgaactttcggatcgaggactt

SEQ ID NO: 652126 - DNA, 452 bp, Homo sapiens
  misc_feature (337)..(337): n is a, c, g, or t
gtggaagctttgttcttttgttctttgcaataaatcttgctattgctcactctttgggtccacactgcttttatgagctgtcacactcacagggaaggtctgcagcttcactcctgaagccagcgagaccacgagcccaccaggaggaacgaacaactccagacgcgccgccttaagagctgtaacactcaccgtgaaggtctgcagcttcactcctgagccagcgagaccaccaaacccaccagaatgaagaaactccgaacacatccgaacatcagaagggacagactccagatgcgccaccttaagagctgtaacactcactgcgagggtccgnggcttcattcttgaagtcagaccaagaacccaccaattccggacacggaagggactttaatattaaagagtgctatggttaaaatcagttcaattaaaagtggatattcaagctc

SEQ ID NO: 652127 - DNA, 587 bp, Homo sapiens
gctctcttgaacccttcttctggggccgggacaccctcatatggtgtattcagagcaggggggtcacccagggccagagggtcccctgccccgccctctgtcatcggcggccaccccagcggggagatcccccctccccgcggcctttattgcccaagggcggctcacttcatgggcgcacgcaaacataaggggcaagcgagtccgtgtcacaaggccgagcaacaagattgcgcccaataggagaccacaccgtggggggccccgtagccgacgcacccgcacaggtggcgcctcccccgcaactagggcatacagggtaccacaaacggccattattttgcagcctgcacccacacgctgtccagacatgaaccgcggcagatgaaacgagcgagtactcggccaaacatccgcggaagggagtctcccccgggcgtaaatgagacatcaagacggggggccccgacgcactatggcgcccggacgagggcgaccctcccaacaaacacccaccgggggtagcccccccccccgtcgcggctccatgacggaaccctcccctttgggggcaccccccccacaag

SEQ ID NO: 652128 - DNA, 233 bp, Homo sapiens
cattactaaaaacacaaaaattagccaggtgtggcggcgagcacctgtggtcccggctactcgggaggctgagacgggagaatctcttgaatccgggagcggagggtgtggtgagccaagatgacacaactgcactccagcttgggcaacagggcgagaccttgtttaaaaaaaaagttcaatattggggtcggaacatttcagttgccattgacagaacacccaattcaaat

SEQ ID NO: 652129 - DNA, 151 bp, Homo sapiens
cttaacaggtaatggcattttgaattaccacctgttcaatcgacaccaactaaggacacaccgtcatttaacagaagacagacgaatgaggtttattattttcgacgatccttcaaatctaaaactttatccgtcaaattacgaaactccc

SEQ ID NO: 652130 - DNA, 307 bp, Homo sapiens
gcgttgattggccgacgaggaaggatagggagcacggcaagggggaccgagtacctgcctcatgcatacattgtcagctgcaatcacttaaccaagtcaaaggtcacgaatccatccagatctgtgtcccgagttttgaaaaatcggaacatggtctctagccgcaccaggcagcaaacgaaactttgtcaaagtcgaccgccatgttgggctccgagtagcgggtgatgattagctcgtacagcttcttgttgagcttgtagcctggcgagtccatgggtcatccgcatctcgtaagcactcatgc

SEQ ID NO: 652131 - DNA, 229 bp, Homo sapiens
gtgcttacaaggggcttctagtagctcaggcagctaagttggggaggggaagaagctgttgtctgatataggcaacagccctccacacccctaaccctgcaggctgcactagtccctatcgaaacccctaactgtgagcatagtgaaggggccagagaacatctagtggcccataaaccatggcaggatcagaggagacatacctagtgtcaggggtaacacctaggga

SEQ ID NO: 652132 - DNA, 444 bp, Homo sapiens
atgatgattctgaatcatcataagaaggcttactcttgttttaaatcttgatttaagcgatcaggattgagtgtggtatatttttagatagatgtccatctaagtttcaccaaagttttgacatttaagatgcacgttctaattaatgggtaaatcaatttacatatacattttatttcttgatgctgaatgaatattattgagttatatgtacatatggattaaatatagcacacttctctgcctagcttgagaaaataaagccaaggcaaatacaaaattgatttctattaagtataaacacaagtgatgcttttccttatttaggcaccagtgacagagaaaaaaaaagtgatgcctttgaattttttgaagacagctttagaaattttcataaactctagaaatgactattgtaggaaatccagaaatacagagaagtac

SEQ ID NO: 652133 - DNA, 395 bp, Homo sapiens
  misc_feature (12)..(13): n is a, c, g, or t
  misc_feature (375)..(375): n is a, c, g, or t
tgagatggagtnntagctttgccacccaggctggagtgcagtggcacgatctcagctcactgcaacctctgcctcctgggttcaagtgattctcctgcctcagcctcctgagtaaatgggattacaggtgtggaccaccacgcctggataatttttgtatttttagtagagacagggtttcaccatgttggccaggttggtctcgaactcctgacatcaagtgacccacctgccttggcctcccaaagtgctgggattataggcatgagccaccatgcctggccccaagactgaagtaatttaatgtcttttctcacgtgagatttgccatgtcacttggcccccttctctgtatccctcattctcattttgtgnacttaggataacacaggcct

SEQ ID NO: 652134 - DNA, 1436 bp, Homo sapiens
ttgaatacaacccacagacgttgttgtgtgtttacatcccacccataaacagatagtaatcagcccgcaggcgcggtgtgtggttgtctatctacccgccggtggtctttccccccgcgcgcggaagattttttctttcccctccccccggggggagattaattattcgttgcttgctgtgtaaggaacacaccatcaaacagcgtgggggggttgtagtgcctcgctccacacaaacagtgttcctgccctcccccctcgtcgtttgtggtttgctcctccacgggggccgccacgccccctggttgtggccccctctcttacccccctgtgtgtttttcccccccccctaagttttaacacattttttaaaggccccgcaaatttaaggagagaatgtgggagaacaccccctggggcgccccacacatttaaaggaaggattaatgttgtccccccccccaaagagggggaaaaaagaaagtggtgtgaaagaaagttttgagtttagtccgctcatagtccccatttaatttaattagctgccacaagggggccttttttaacccccccccgttgtatgtgacccctgttctgtgccgaaataaaaatggggggagtgtgagaacctttaaggggaaattaaaacactgttgtggccaaaaaggggagagagcgccccctaaggcggttttaggacctccccccggtggtattaccccaaggacccgaggctttacaccttatagggacactaggcttttaataggagcccaccccccccgggtctgtataggttgtagacccagaaaatatagatggggaagaaatatttaatatagagttagaagagcggcacacaacacactcttccgcgagaccctcgggttgaataaacactcgcgtttgtcccccaagaatatagaaattcttagtgtcacaactctgtaaaattttggcccacccacgagaaccctctctaaaaattcccgctctgtgaaaattttaacactcgtgtaagtgtccacaaagagagggacacacggcttctcttgggagcacactaagggagaaaaaccctctcgtaagaagagagaggtataaaaaatttaacaccccactaagtaaggcctataaaagcacgccaccccacttataagaaaagcgttcaaagctctacaacacacccacctatccttataaaattccccacaacactataactgaactcctcaacacaccccattggagccacatctatcacccctatagagagaactaaatgttagtaataagtaaacactggaaacacattttcctccgcaataaagcctgcgtcaagagattaaaaacacctggactgaccatttacagccccatatttaccatcaacccacaagtcattattaccctcactgtcaaccccacacaggcca

SEQ ID NO: 652135 - DNA, 469 bp, Homo sapiens
ccccaaaaaaggggggggggttgttttccggcccccgtttaagggggggggaattagccctgttttttttttaagcaaatgattgggagccctttgaagccattttttttaatggggaaaaaacaagttttcatgggggggggtaaaaaaagaccggttccattttggaagggggggctttttgggcccccttccggattagggttttggaaaaacccttgtttttgggtaaaaaggtaaaaagccctttaaaaaggaaaagggggccctttctttttttttgggggggggcctgggttttttggcccgggcccccccaaagattttaaaaaaaaggtttaaggggccccccaaaggggggggggttttccttttggccaattgaaaaaaaatttgcaaaggattgaaaggtgcccccccggtttttgggttttccaaaaaaatttttaaggggttttttgccccccta

SEQ ID NO: 652136 - DNA, 260 bp, Homo sapiens
  misc_feature (57)..(57): n is a, c, g, or t
  misc_feature (94)..(94): n is a, c, g, or t
  misc_feature (161)..(161): n is a, c, g, or t
  misc_feature (203)..(203): n is a, c, g, or t
  misc_feature (223)..(223): n is a, c, g, or t
ctccgaccaggcccgcccaggagccagatccaggctcctggaagaaccatgtccggnagctactggtcatgccaggcacacactgctgcccaanaggagctgctgtttgatttatctgtaaatgttgggaagaggaatgccagagctgccggctgaaaatnacccaaccaagagaaatctgcaggatggactttttggtcctnttcttgttctacctggcttnggtgctgatgggtcttgttcttatctgcgtctgttcg

SEQ ID NO: 652137 - DNA, 245 bp, Homo sapiens
aaatcgagctcggtacctcttcaactctttccataagtcctgcttctcatcctaaattatatactaaagaaattgtaatcctcttactataactgtccatgaccttaattcaacacaacagtatcatggcatgtcatgaagattaagattttatatcccagagatttaagtgttaatgtctactgtttaccactccaacaaaaaaactagatctcataagagcccacccaaagccgaatcaggga

SEQ ID NO: 652138 - DNA, 356 bp, Homo sapiens
tgagccccctgtataagaggacttatgagtgctactgctagctgcgcttcgtctttggagttcgctaggcagactagtaatgaggatgtacgtccgtgggcgattatgagaatgactattctgcctagccaaactcaaactacgcaacgcggctctcaatgctgtgagtcctccattgtccttagctcatgcattgctctgtcctggaatgccatttccacccttctatctcatagtcagtcttatacttcatctgtgccccaatctcataattctactttttccatgaagcatttcttgatcatctcagaccagagtgaatctctccctcttcccatactgatggtcctttatta

SEQ ID NO: 652139 - DNA, 586 bp, Homo sapiens
ttgccttaaccctactaaagcatgatgcttttcaaggtcctggtgatcactgtcttctgtggtctgactgtggctttccccctgtcagaattagtttcaatcaataaagaactacagaattcaatcattgacctactaaactcagtctttgaccaactgggatcatacagagggacaaaagctcctctagaggattatacagatgatgatttaagcactgactctgagcagatcatggacttcacgccagccgcaaacaaacagaattctgagttctctactgatgttgagacagtctcctccggctttctggaagaattcactgagaacacagacatcacagtgaaaattccattagctgggaatccagtctcccctacttcctgagaagactccaactttgaaataaacctgcgactgccattcaggatattgtctttgtagaaaatgatataaatctaagatgctcccagcaaagaagaaagaacgaggaagtgatcctggatgagaaatgctgtgccaggcatctctaagctctgcccttactctgtgtgggtttaagaaataaacgttcatttgaattgca

SEQ ID NO: 652140 - DNA, 406 bp, Homo sapiens
ggcgagatacacttagacttctatcccattggctggctcacgctgactggcaaccacgggatgtcggtcgcgaagctgagagtggactctgtgtggagccatgcatcttgtctcgtcgtagcctctgctttacatatggtgtactttcgggcgtggtggcagtcacacaatgcacacacgtgattgcagcttgtccgcagcagctgcaaagagcacaagtagcacaggcatgtgcattgtttcttgtcagatcatcttgcatgtatctgtgtcattccaaattcaaacagcagcatggtttgtccatttgtccactgagcaattagcaaatagggacaagggggaggcaacgtctgaaataagtttatgcagcagtgtgtctcggctgtgcttgtccaggagccca

SEQ ID NO: 652141 - DNA, 300 bp, Homo sapiens
aaaacctcctgaaggcaaaattacccctccctcccctgattgtaaggccccccaaaagggttccccccgtgacctcctttttcccccctctttggtccttccctgcccgaattcacccccaaggaagccaaaggccacaggaaccgtgtggcagagaagagtcacctaaagcgacagcaacaccttcatggctacaaggttgaaaaggggaagctgagggaagcagaaagtgctggggagattgcagggagggaggaagtgcttgggaaagtaaacccatgaagctgtgtatgagcttct

SEQ ID NO: 652142 - DNA, 628 bp, Homo sapiens
  misc_feature (596)..(596): n is a, c, g, or t
ttgccttaaccctactaaagcatgatgcttttcaaggtcctggtgatcactgtcttctgtggtctgactgtggctttccccctgtcagaattagtttcaatcaataaagaactacagaattcaatcattgacctactaaactcagtctttgaccaactgggatcatacagagggacaaaagctcctctagaggattatacagatgatgatttaagcactgactctgagcagatcatggacttcacgccagccgcaaacaaacagaattctgagttctctactgatgttgagacagtctcctccggctttctggaagaattcactgagaacacagacatcacagtgaaaattccattagctgggaatccagtctcccctacttcctgagaagactccaactttgaaataaacctgcgactgccattcaggatattgtctttgtagaaaatgatataaatctaagatgctcccagcaaagaagaaagaacgaggaagtgatcctggatgagaaatgctgtgccaggcatctctaagctctgcccttactctgtgtgggtttaagaaataaacgttcatttgaattgcaaaaaaaaacngcacgaggggggcccgtaccattgcctatgtg

SEQ ID NO: 652143 - DNA, 111 bp, Homo sapiens
aaaagaaaaaaagaaagtagataaatataagggccacattaatttttcacaggcccttctccctcagttaacctttttttttgggtatcgggaacacggtgacacttttta

SEQ ID NO: 652144 - DNA, 141 bp, Homo sapiens
tgctcgaccagaggatcccttcttgaaaggagtatgctgttctctatcagcctctatttataagcgatttgaaattattaatgcaattatgaacctcggaagaagaggatgcaggaactggtttcaagaagcaggaactgg

SEQ ID NO: 652145 - DNA, 1970 bp, Homo sapiens
  misc_feature (289)..(289): n is a, c, g, or t
  misc_feature (748)..(748): n is a, c, g, or t
tcctgagcatggtgtaagtgttgggtgtgttgtggtggtctgtggttgttacacactagtggtgtgattgtgtgtgtagggttgcgtcgctttgttgcttgtctgtgaggggactcagtaacacacgagctcagtctggttgggcgttgctcgtgggctggtggtggtgctgcttacttattgtcgtcactccatctagagtatgagctttggagtgagtgttcctctcttcgctccccctcctccgcagttactttgtggttggtgtggttaataaccgctgcggggnctgttagctgccccactgacgtcctattagcaattggtgatatggtcctactctttttgtacgctgccgtccgctcggttaattaatgtgtgttggcatcggtggtgcaatcgagtagccacctaccatccaacgttctcattcggtggggtagcgtcgcttgttttaaattagggggggtcgacgcccccaccccgctgtagtgtgttatgaggaagaagcccccctccccggctaatggtgatgaatatgattcgttcgccatactttcattgaatcgcttcgtgtttttcgtggctgccccccacttcgtatgaacgaacatcgtcctggcagagacgaggccgtcccttcttgggttggtagttaatatgataccgcgtgtatacttatcggcgcgctccctcaccaacagtagtgatgtgaacgcattagtaaatagatgtgatgaccctcctnggggggggtgtcttccttccatcaaccagggtggttcattatgccgcgcaactaagaggcaccacctatcctgtcagcgggtgttagtagctcgcaggcatatgtttgctctccttcgcggtctccaacaaacagtatattatgctggtgttgaataatccgtctagcatgttgctgttgtaatcatacatctttattaactctcctgccgcacgacagtgcttccacctagctggtatattttgattgtatttagcgtcctgacctcacaccctgggtgcgcccgccatcctttgtccgcgccccccacccatggggggttagcggctccccgctgcctgctggtgtgattgagtcctcgcttcatccgtgtctgccgtcagtccgaaggaagccttctttgtttcttcccaacccccgcctgccttcattccagaaggaagagggaacaacattatatttgtgagcaacaatagtattatgcccccagtctgatgtatgattcatgaagtatgcattgcgtgcggccgcattctgtaatcaacagcgggtggaattataccagctgctgcctgcgccgcagagtagttatgatcacctgcagaggacttctctgtctactcggactcaccaccgcggcatctgcgcggccgcatccacatgccccacaagaagagctgggaggatctccatcgccgtagagaacatcatcaacacgctcatctgcgcacggcacacagcccacagcagcacatcatcacagtagtacacagcatcacagcagggagtagagaaagagagagagtgacacacgcgtcacaagtcacagccgtctctctctcgcgcactttttcgtttgtaccacaacaccactctcttgagacacctctttcgtcctccatggtgacctctctgtgagagtccactactgtctctcacccacacactctgtcaccgcttttctcttcctcaataagagcctgcacacacagtgacccacccacccgcacttcgcacttaccctcttcacccctcgaatatctacacaccggttccctctttccccctttcctttcccctctcacaggtgaacctctcttctctccaccctcagggccactacccgcggggtgaagcggggttatcccccatccccacgttttttaactcctatggggccacacccaccaaagtaattcacaagtagctttgtaaattccat

SEQ ID NO: 652146 - DNA, 1948 bp, Homo sapiens
  misc_feature (1633)..(1633): n is a, c, g, or t
gggtaagctagcgaccgaccaccgaacccgagtacatagtatccagcgatactatactacagcgctactacctaaagcgagcatacccatactgccgtccactcctaatactatacatctaggtctatacatccgtatactatcctatactactactatactgtatatgctatgagtctgatcgaagactattacctaagtcgcctaatagcactagtttcgtacctacctgtactccgctctagccggagtgcagccctgctaacgtatcctagagagtagcgctccgtctctatagccttacccgcttatagggctatatatactctatcaccgaatgtgctataactatatagcgagagactctcttatctccctttattgtgttctagaatctcctaaccggagatcttcaccctggccctcttaactcatataataatatcctccacggttgcaatttacccactgggttctaatcctctccgccgcttcgacgcatccttcatcatgtccttctcctatcccgctgcgtctaactcctgcatcctattccatataagtatcctcgagttttcctcccgctcctataacactacgttctatcagtctgctcttatatagttccgatgcactctttgtgccagattaggattctttagagtagtttttcgttaggttgctatggtgtgctatcttctttgctgtcttcgttcttgcctcgttcgtcctgcaagctgcgtgcctcctatctcttcgagttctctatcgctcattagctctgtcgatagacggtcctcctctcgattttccgctgcttctcctatttagcagtctgctctctctctgattattactgctctcactcggtttctcctttagtgctccgcttcttcttgttcttctcgttgccgctcgctcggagctctttcgctctcgtcgtagcttcgtgctcgttgctactttttgctgcgatctcttacttgcctattgatccgctcggcttgttccgcgcgttctaggtcttttctttatattatctattcaatcgatgcgatctctcgtattgtccgttatcgctatgatcacatatttagtctctagagttgagtgctctagcgtgcttagtctctctacttatcgtctatctcgtttcgtttatcatccagttgctgtgcgatcgtatttctcgctctatttgagtctgttatttgtgctcgtcttctatctcttgttagcttgtatctctttgctgttctctgatatcgtgctcgttgtgctatctgtctgcagtttatccttgcatcgctctgtctgtttctatcggcttctcctgcttgagcttcttgctcttctctctttgtgttctgtcttgtcttctctgcgtctctcgcgtcttctggtctctctagtcgtagttagtggtagctaattcgctgtttcttattttcgttgtattttgcctcttctacttgtatctattctctgttgtgcgtttactcttcctgcgactgactctatgttcgttctgtttgttgcttactatttcgattgtggtgttctttttttagttttttctgtctcttggtttgtgttcttgaagttctctatctcgacgtgtcgagttattgtntgtctcgatcctttctctcttggttgtggggtgttcttcttgactgtttttagtcgttattactgtcttttctgtttcgtttcatcttctcgttcgtcgctggtcagtcgcgttggtctagttgatctggttccgtctgctcgtttttctgtttcgttctttgctttggtgttgtgttggtcttgtttgttgctttttcttggtgttcgtagctgtctgttctctttgtgcatgtcgctctttttggctgttgtgctctttctcggtcgttctatcttctttcttcttctgtttgttgttcgtgtttctcttgcg

SEQ ID NO: 652147 - DNA, 1108 bp, Homo sapiens
gaggtctctgacttcgggctatgtatcgctggtggctgtctggatcgccgagccggactggtcaggatgatacacggacgtgcagctcgccatcttcgccaacatgctgagacgtgtacgactcttctatgctatgttaagtactacaatacacatacgttggcaccgtacacacaaatactcaccacagaaggcacgcgcaacacttgaaaacaagcttgtgcgccttcttcattccagtaccacacaagcggatctaccatggtaccattaaaatcctgtacggccacaatgaatgcgacgggataaatgcaagtggtgaacatactcaataaacctcacagaaggatcgaccgagtccgccgaaggtatctcgataatccacccaattccgaacggagcactcgaaattaacacaaataaaggccaagccccacagcatcaccggtgggggacagtctggtatctccccaagaagagaaacgccctgtacgaacattgacgacgaaccaaatgagggtatcacatcgccgacgtcaagttacacatacgtggggaaaccgaacggataggagcgtgcgacagccagtgaaacagtaacgggagtatccaaggtaaagaaagggagggacattaaggccatcatgagtctaaacatcacgcaatccatacgacagcaaagactacgtcaatgcccatctaacatcgaaaacgatgcaactaagcactacgagcacaaagcccgacgaggcacgaagaacacagaaaagaaagaacagaccaagaagagaacggcagaacagaacgaacagaagcagcgccggacacgcgctagaggggaacaaaacggaagaaaaaagaagcgaagctgatcacccgaaagaaaaaaaaggagaacgaggtaagaggcgacagcaagaggggccgcaggcatgcaagctaatggctgaaaatcactaagacacaggagaccacgataccaaactcaggatgggagaaaggaagtacgtggtcggaaggaggcagcgaaggaccttagaaacacatcgaacagaagagagggaagcgagacgaaaaaggaagagaaaacagagcacacaggcagagg

SEQ ID NO: 652148 - DNA, 251 bp, Homo sapiens
  misc_feature (154)..(154): n is a, c, g, or t
gcacgaggcaaactgtatatatcatgcaatggaatattattcatcaaaagaaatgaagtgatacatgctataacatgaatgaaccttgaaaacatgtagagtgaaagaagccagtcacaaagaaccatatattctatgattccatttatagganaatgcctagcataggtagacctatagagacagaaagtagattagtggttgccttgggctggatgcagacagtgcctactaaggggtatgtccctact

SEQ ID NO: 652149 - DNA, 510 bp, Homo sapiens
  misc_feature (113)..(113): n is a, c, g, or t
  misc_feature (270)..(270): n is a, c, g, or t
gcctatctagaacctagtggatctccccgggcttgcagcgtacaagtgtaaatactcggggtatagaaaatgcgtatttggaaagtatataattggtacttaagagcccatanctgattatcttttgtactttgttttttaaaggcattaggtattatattttgcgcactcaaaatccttccaaatttgaaaacctcaatataaaataacacttttattaaattctagttagtgggtagcactcaatgctgaagtaaacatgaatcgtanggcagaagcaaaattttattataaaatctaaaacaaaactttatagagttgaatctattccatctgacttcaatatttgccaaacgtttattttacctcctagattgatgttggtatagtatccttaatacagtgtagtatattaatgtccttaatacaatcaggaagtttttacctttaagcaaatttatgtcattattgagacttaagggatgattagacttggcaatctgtgcaggt

SEQ ID NO: 652150 - DNA, 380 bp, Homo sapiens
ccctagcaccttccttactttagattgaacctgaatgcgttagtatgaattttttggatgtcagtggctctctacgaattgtcattttatttctgctacaaaatttaccagaataaggtactgcaacaatcttgtataaagcatatctttaacgaaagaacatggtatagactttctaaaatttttcatactttatcacaataactacaaagaaaaattcaatttctatcatcataaccaatctgcagtttctgaggttagttagagaccgatgacagaatagtttgaaacaaaaccccttaaggaaatattccacttgttctaaatatgttccaattaatcgaattatctatcacatgcggttcaggacggttgttggg

SEQ ID NO: 652151 - DNA, 289 bp, Homo sapiens
ctgtaacattcttccaatggaatgtaatggaatggaatggaatgtaatggtaatggtaaaggaactggatattaacccgcaagagaatggaatggaatggaatggaaaggaatggaagggagacaaccagaatggattggaatataatgaagtgtaacggaattgaatcgaatcaatctgaatgttatgaaatgaaatggatacggaatggaatggaatgtaatggaatggaatggaatgcaatggaatggaatcaacccgagtacaatcgaatggacaccaatgttca

SEQ ID NO: 652152 - DNA, 115 bp, Homo sapiens
gtcttatattgtgatagctatgtctttcattgcagatttattggatgttatgacagattttactgcagctagtgatttttatgaacatatatattagatgcatgatttacctatg

SEQ ID NO: 652153 - DNA, 762 bp, Homo sapiens
cggttatataaagcaagcttttttgaaccacacgtactctgggaggacaaccccacccggtggtgcccgccacaaaaaaaacgagcgggggatacaccaccgccgtcgttaattcattaccgcgccgggggagaaacgatttcttccccggcacaacgctgttctacagtgtgctccttctttggggcgcaccagatataacaacgcttgtgtttgccaacaaaaaacacgcgcggggggttgtgcgtccgccgcaaacattcgggcgcggtgataatatgtgaagacgccgcgttgtcgatttgtgtccccaaacacacgaggtgtgggtcggaggtcttctttgtttggtagtaaaaaaaaaaaaaaaactcctgtaaataacggggggtggtatgatctcaacccaacaagcagggtggtggcaaatatcttgtcggggggtgtgatagggggctctttctccgaaaacaacgtgttgttctctcctgtgcaacgacttttttgtttgaagttttccacgaccacgcgctccccctgtgtggaaggacaacgcttctctaaaagaatctttccctacagtggtgatggtgctggcccccccccccctcatgggggggtactcccaaaccctcgtgggttttttttttggtcggacatttctctttttgcgcctttttttttttttttttttttcgaaaaaaaaaattcccctttttcgaaggaagttgtgggtacaaaaaaaaaaaggggggccccaca

SEQ ID NO: 652154 - DNA, 255 bp, Homo sapiens
ttacgtatcatactacccttatcgtactcatctcccttaccgtctcatctacctataccgtctcatactcccttaccgtctcatactcccttacacgtcctacatctcccttaccgtcctcatctcccttaccgtcctacatctcccttaccgtacctcatactacccttaccgtcctgaacatgagcactatatctagccaccattcacctatacctctacacaggtaccattcctatacccctactgtccggc

SEQ ID NO: 652155 - DNA, 793 bp, Homo sapiens
  misc_feature (595)..(595): n is a, c, g, or t
  misc_feature (649)..(649): n is a, c, g, or t
agcggtaagtcaaatatcttctttaagagtaagggcattcttccattgtaggtatttctaattgactttataataatttgaacaaatcttgaacaagatttaaagaatttataatctcccaaacttaaaattgtattctttctggttttttatttttatgtattaagattatattcaaaccacttaattatcttcatgacataagtttgtgttaatagaaaattatacagaaaaaaacatgatttgttcctctgtggaaagatatgcttcaatgagttaaatacccttgaattttggttctcatttcttatttggacttttctgttatgtacctcaggggtcttaaattctaacagatgaagtagtcaaaggggtataaaatacttgaaaaaaattaaaacttcaaaagggacgaatttctctgttaacttttgtttatcctatactgacttattttgaaattgtgaaaaaacaggcagctaccatataaattggtatctatgaaaatactgattactttcttcctgtgattttcactgttaagaaaacctttgtcttgaaatgatggacaatcttaatacttgttcagataaangaaatgtgactttcaatacctttaccatttgtatttctttaggggaacatcatnttaactaatgacttgtcacaaataacacgaaatatgcgttgcagaccacatagaaagaacattcaagcatgcacactttgaacacgttgtaagtccacagtcgcaatttcccctctaataactagccttctactaggttactgc

SEQ ID NO: 652156 - DNA, 331 bp, Homo sapiens
gtagtgaacgcattgcggtgccttgactcttctatcatgagctaggagacaggggtgtgtcatacattcctaaacctcctcgagaagcaagctgttccaagatcatagtgactagaacttgtttggtggcatatcttcaggtggcccaaaccggaatctagggacaccagcaacctgcggtgacatagactttgcttccgcaaatccatcagtacgatgtggcaccacaagagttggaagtacttggaacagtgctgtctccatcatcaaaaaaatgctagtagcatgccacctattcctggagtcaacttaaggccacgtcctaccagac

SEQ ID NO: 652157 - DNA, 400 bp, Homo sapiens
gcggggggctcacgcctgtaatcccagcactttgggaggcagaggcaggcggatcacgaggtcaggagatcgagaccatcctggctaacacggtgaaaccctgtctctactaaaaatacaaaaaattagccaggcgtgctggcaggcgcctgtagtcccagctacttgggagggtgaggcaggagaatggtgtcaacctgggaggcggaggttgcggtgagccaagatagcaccactgcactacaggctgggtgacggaacgagactccatctcaaaaaaaaaaaaaaattttacatttcaggggttttaagattaaatatgtggggcaaccattcaccaatagtctcataattttaagaacattttcaatcaatccccttcaaaaaacccttttatcca

SEQ ID NO: 652158 - DNA, 222 bp, Homo sapiens
  misc_feature (10)..(10): n is a, c, g, or t
  misc_feature (37)..(37): n is a, c, g, or t
  misc_feature (46)..(46): n is a, c, g, or t
  misc_feature (58)..(58): n is a, c, g, or t
  misc_feature (138)..(138): n is a, c, g, or t
  misc_feature (204)..(204): n is a, c, g, or t
atcttcccgnctgagagtggtggggaggagccttgtncttcttagnctgttcacctgnccgaggctttctgggccactcaggccagtgcacccctgggcagagccctttaaagctgctgtcactagatgcccatggtncagggcctggttgggcgtgagaaggatagggtggcaggggcagaaaactgggcagcccttaatttnataagcagcaagggggga

SEQ ID NO: 652159 - DNA, 174 bp, Homo sapiens
agcagagcacgagtgctggcattacaggcgtgatcgaatgcgcctggcacattttatagccaacctggcttcttgtgtaacatgagttggggcttcttgggccccagagtccagcactcagtgtagaaatatgaccgccatggccagacagcagccctcgctgggcccctcttc

SEQ ID NO: 652160 - DNA, 168 bp, Homo sapiens
gcggaaccctaagtagctttgtggcttcgtgtccaaccctcttgcctttcgcctgtgtgccttgagccagtcccaccaagctcgcgtatcctcctgtagtgctcacaggtcccagcaccgatagaattccacttgcccatagatctgagcggaatcacgttatgagac

SEQ ID NO: 652161 - DNA, 265 bp, Homo sapiens
tagagaatcactccggtgacatcgccctatgtatgtgattactggtgtggaaggccttcggcctgtgtgctgagcttgtccgccagcagagaattcagactgcagaaaagccttctgttagtcaggaatgcgggacatccttcacccagagctcatgctgaacaaggtagtctctctgggtgaagagtctgtctcacttactacatttgaagggattctctccagcgtgaattaactgatgtgtctgagaagtgcgcctgggttg

SEQ ID NO: 652162 - DNA, 203 bp, Homo sapiens
tagactgtggaagacgcgattggctaaactcccatagtatttatggtggccgccggcgtgggccgcagcccagcttgcaggccagctctagctctcttcctaccccattcccggcttccatacgcctgacctgcagactagctaggagcatacctgccctgacgagagaggcaagctaaggccgtgcgggacagatgggagac

SEQ ID NO: 652163 - DNA, 623 bp, Homo sapiens
  misc_feature (409)..(409): n is a, c, g, or t
  misc_feature (416)..(416): n is a, c, g, or t
  misc_feature (419)..(419): n is a, c, g, or t
  misc_feature (569)..(569): n is a, c, g, or t
  misc_feature (600)..(600): n is a, c, g, or t
ctgattctcgttggatggaagtcttgtggaccctatagagatttggccataggagtaacacttaaccatctgctgtggtggaaagaacactcactgtagggtcactctagcctggattctaatctcagttctttatttatcaggtgagtgcctatagataagttactttgactctcagagcctgagattctgtatctatacaatgggggaagtaatgcctgccataatggcttacataagataatcaggaagttcctggtttaaggacgaagctgaatgtatgtcattccccctaaatttgcgcccatttgctctggttcaagcttactatccaagagtgaatatgttctctcgcttttccaaatgatagccgctctattaagtacaaccatactgtcacccattatgnattactncanacacaatggaccaggttccttcaaatgtcaagtatacggcgtaattcatgatcctttggtgatgacatcattgaaggcgaatatggactcacaaggcaatagtgaagtgagcctgacaggcttcatctggatttctttaaggagaaacanggctttaaggaatggattggctctctcatgncacattcatgggggggtgccctt

SEQ ID NO: 652164 - DNA, 201 bp, Homo sapiens
ggggggggtttttttgggaacccttttttttttgattttgtgggccccgggggttgggggccccccctcgccccctccctccggggcgggggggggccccccccccctgcctccccccaggggccccccccccccccggcggggggtccggggggggcctttttttttttcctttttgttttttttaacggccccgcccca

SEQ ID NO: 652165 - DNA, 412 bp, Homo sapiens
cagcaggcccccatggcctggtgtttggtctgatcaccccaacatttctggcacccaacgtggggctatgaagaccccagtgaaggaacactagagcatgcggaactggaggacgcattgtcagaggacacccgaggatgactgaaagaagctcggtgggaaagctgagcactcggaagaaacagggtaacaacaggacagaatgaaagttccactggcagacagcagagaagaggagaagcatctggacatcagagagtacagttggatgttggagagaagcagcttgacttcacagagacggcttgatggcattgctccaggggaagatcaccttcctgctccatcccctttccagctccccttcccactgagtgccactttcatcaacaataaaatcccctgcattcac

SEQ ID NO: 652166 - DNA, 341 bp, Homo sapiens
tggacttactgcatcagctagaatgaatggatacataatcatccatataccgaaaataccaaggttatggcacacagcgtggtgccagcgagtgaacggaggaagtaatagcttgaagcgtcggatgtgccgaacgaatcttgcttgtccatcacagagctgcacacaggtaatgaaatactagtattatgaggttcaaccagaaatctcttgtacgggtaagcttagacgcagtcatgtgcttgaatgaaatgttagcctactcatggaactgccttccagaaatacttacttcacagtgtgaatcagaggtatggtagtaaacaacacttcgtgggcag

SEQ ID NO: 652167 - DNA, 441 bp, Homo sapiens
ggtggagaatgcacgccgtctgtgcgtctcacagtgctttctgatgcccatttacagaaggcttgtgctgtttctgattcccttgaaagtatgtggtaagtgatgttatgaacgctctagtgcgccttcagaagttcttctcgaactgcacgaggtgaattttcggaccagcacacaatgttcttacactagccattaagcaatttgtcggataatacaatatagaactttcccagtgtatttaaccttccaaagtcgccgtgtaaatcacatctagtgtttccctagctgttctcgaaaatcacagagctgagcatagctcaagacccagatggtcccgaccatttccttctgatccttggtcttagttttttcctttttttaaaagagtaaagtttccaaaaaatcgaaggctatagaagccgacaacagaggacacca

SEQ ID NO: 652168 - DNA, 477 bp, Homo sapiens
  misc_feature (10)..(10): n is a, c, g, or t
  misc_feature (18)..(18): n is a, c, g, or t
  misc_feature (29)..(29): n is a, c, g, or t
  misc_feature (33)..(33): n is a, c, g, or t
  misc_feature (39)..(39): n is a, c, g, or t
  misc_feature (41)..(41): n is a, c, g, or t
  misc_feature (64)..(64): n is a, c, g, or t
  misc_feature (68)..(68): n is a, c, g, or t
  misc_feature (102)..(102): n is a, c, g, or t
  misc_feature (114)..(114): n is a, c, g, or t
  misc_feature (117)..(118): n is a, c, g, or t
  misc_feature (122)..(123): n is a, c, g, or t
  misc_feature (126)..(127): n is a, c, g, or t
  misc_feature (135)..(135): n is a, c, g, or t
  misc_feature (142)..(143): n is a, c, g, or t
  misc_feature (153)..(153): n is a, c, g, or t
  misc_feature (177)..(177): n is a, c, g, or t
  misc_feature (180)..(180): n is a, c, g, or t
  misc_feature (197)..(197): n is a, c, g, or t
  misc_feature (199)..(199): n is a, c, g, or t
  misc_feature (206)..(206): n is a, c, g, or t
  misc_feature (218)..(218): n is a, c, g, or t
  misc_feature (232)..(232): n is a, c, g, or t
  misc_feature (240)..(240): n is a, c, g, or t
  misc_feature (242)..(242): n is a, c, g, or t
  misc_feature (247)..(247): n is a, c, g, or t
  misc_feature (277)..(277): n is a, c, g, or t
  misc_feature (295)..(295): n is a, c, g, or t
  misc_feature (297)..(298): n is a, c, g, or t
  misc_feature (303)..(303): n is a, c, g, or t
  misc_feature (306)..(306): n is a, c, g, or t
  misc_feature (346)..(346): n is a, c, g, or t
  misc_feature (357)..(357): n is a, c, g, or t
  misc_feature (366)..(366): n is a, c, g, or t
  misc_feature (398)..(398): n is a, c, g, or t
  misc_feature (409)..(409): n is a, c, g, or t
  misc_feature (471)..(471): n is a, c, g, or t
tctggaaggntctcaggnctttatttgcncccncaactncnaggaattgacttatttaattaanccancaacgcttcaaagcaaaaatttgagaacacaaanttaaattcaggntcnnaacnncannagggaagnaagaagnngcagcccagngcaccaagaatttgagaaagaganggngaaaaccagccccaccncnctggaanaggaaagaggancggggggggaacanagggcagngnggggncagggggcacgggggacacgggggggggcngtctctccacccccccanannatgcnaanaggaacgcagaaacattcaggggcctttgcagaaagagangccagaggcgncttgaagtnacaaaggagaggggtgaagaaatcctgcatcncagtcccacanaggcagcggtttcaggctttacaagtgatgagagaatcaacagagccctgggcactgttgcngcccgc

SEQ ID NO: 652169 - DNA, 419 bp, Homo sapiens
  misc_feature (32)..(32): n is a, c, g, or t
  misc_feature (127)..(127): n is a, c, g, or t
ctggaaaaaatcccctaagccttagcccatancgttagcccatgatattgttagcacaatgcattacctcatgcggtgatgcctagtgtaaatgcctgcccttacccagtcatataaatgtatagcncaaggggcccaggtggggtgccttatgccctgtaatctcagcactttgggaagctgaggggggaagattgcttgagcacaggaatacaagtctagccctggttaatgtagggagggcacgtttctacaaaaactaaataaaattagcctggcatggtggcatgcacctgtagtcccagctactctggaggctgagacggaaggattgcttgagccctggaggttgagctgcagtgagccatgatcatgccactgcactccagtctgggcgacagagcaatccccatctcaaa

SEQ ID NO: 652170 - DNA, 586 bp, Homo sapiens
  misc_feature (15)..(16): n is a, c, g, or t
  misc_feature (22)..(22): n is a, c, g, or t
  misc_feature (36)..(36): n is a, c, g, or t
  misc_feature (38)..(38): n is a, c, g, or t
  misc_feature (42)..(42): n is a, c, g, or t
  misc_feature (52)..(52): n is a, c, g, or t
  misc_feature (63)..(64): n is a, c, g, or t
  misc_feature (78)..(78): n is a, c, g, or t
  misc_feature (83)..(83): n is a, c, g, or t
  misc_feature (92)..(92): n is a, c, g, or t
  misc_feature (158)..(158): n is a, c, g, or t
  misc_feature (349)..(349): n is a, c, g, or t
  misc_feature (453)..(453): n is a, c, g, or t
  misc_feature (484)..(484): n is a, c, g, or t
  misc_feature (488)..(488): n is a, c, g, or t
  misc_feature (507)..(507): n is a, c, g, or t
  misc_feature (510)..(510): n is a, c, g, or t
  misc_feature (512)..(513): n is a, c, g, or t
cggtggttcaaaagnngacttnaccctttttgactncntganctggtacaanctacatgaaannccgttgcgcctttnctagnctgtaaaancatcatgaaatgtgcactaataacgtggagactatgcagatgaaatgaaaccagctgcatagagcncagagctcagagcctggcctttagaagccctcagtaagggttcatgatgccatggtgtctgtcgtcatcctctttatcctcatcatcaccttcataatctttttgttgttcttagggaatagtttagagggactgattccctgctatcatgggtgagatgtctatgaaaaggacaaccagtgggggagganagcaaaattttgaataagatttctgagacccccagcacaaccaagaacagaaactgcacagtctgctgagcggacagtttgcacattggtctcctcccatctgnccaccacactctcctgtttgtcctgaggagnaggnaaccaaacaaggctcccgnccntnnctcagcactcacttgaaggggtggcctgcccctccacagctgtgggtatgtctagtcgggtgggatgagagac

SEQ ID NO: 652171 - DNA, 442 bp, Homo sapiens
aaaaaaaaagaaaaaagccaaaatttctggagtcaactgggtgatactagggttgcccagtgatatctctatagctctttcacatagtctgtggtaagctggtgggtgacctggcatctgatctacaatggcctcatagcacatgtctggcattcacaggctgttggccgagtgcttcatttctacatgtagccttctatcctccagcagactatctcactgtcatgcacatagtagtccatggttccaagtgctgcaagagagattaagcctcaatacacacatgtttttctaggtctctgcttggatcccctttgctgctataacaagcctatattcaaggatagagacatagactgagttctaatgggaggagccacaaaattgcatcacaaagagacaggcagaatttgtggcccttgttggagtgcatcacattgtc

SEQ ID NO: 652172 - DNA, 428 bp, Homo sapiens
  misc_feature (309)..(309): n is a, c, g, or t
  misc_feature (318)..(318): n is a, c, g, or t
  misc_feature (358)..(358): n is a, c, g, or t
  misc_feature (361)..(361): n is a, c, g, or t
  misc_feature (374)..(374): n is a, c, g, or t
  misc_feature (414)..(415): n is a, c, g, or t
ttcgtatcctcctgggaatacaaagacatttttttccccattagtgacaccgggacacggcaccttcaatacaactcccccacccaccaagggctggaagtttacatcggaaaggcccaggcaagtctttgtttccagagccaaacaaagccaatgacaagttccagagataaatgtacttccagcccacgcgctgcaggtggggcgatcccccgggagccgagagccaggggtaccgggcaaaacctcaggggtgtcggccgccccgagcttccccgagggcgtacctttgaggaagaagaccttgcngccgcctcnggcagaccgccgccgccagggccagggtgcctgttcgctnttnccgtccagggctnctgcgctcgtccagctaactacacggcgtggtaggctgcnncagcaggcggtcc

SEQ ID NO: 652173 - DNA, 195 bp, Homo sapiens
tcgagctggtacctgttgctaggaggagtgagtggcacaatctcggtcatgcaacctacctccaaatccctggttcaggcgattctcctgcctcagcctcccaagtagctgggattacaggtgtgcaccaccatgcccagctaattttgtatttttagtcaagacagggtttcaccatgttggccaggatggtct

SEQ ID NO: 652174 - DNA, 326 bp, Homo sapiens
ttacaccatcccctggtatccagcctcccaaagccttttagcttacacctggacagatcctgatactcacacatccgcacagctaacatggactatattcccacaggggggctggaatagcccctgacttatttggacaggccctcaccagggacctggctaaacttccccttgctcctagcaccctcctccaatacatcaataacacccttctctgtagcccctcccttaacctatctatccatccaacacatcatacagcttctaaactttctccattctaggggatattaggtctcactcacaaaggctcaagtaacccaaac

SEQ ID NO: 652175 - DNA, 328 bp, Homo sapiens
tcttgagaggacagttttaaaggacaagactaggaaactgagtaagagtgaggcaaattgtcctttcccaccctacttgggatagtggtaagagcttgagccctagagccataacacatggttcaaactccatttctgccacttaacatgtgtgtcacctgttggacaggttacttagtcttttgagacctcagtttctttatctatataatttggttattagtagcacctaattgataagtttgttgaaggggatcaaatgtgatgaccttctaaaatggttagcataataattagcttggcaatgtgccaaataatattatttatc

SEQ ID NO: 652176 - DNA, 286 bp, Homo sapiens
agaatttgcgaaggcaggaacagagccttggcccaggttaagtataggtttattccttagtccaagttgacccaacccaacccaatttcttagccaacacggaattagttaaggaaaatgcccaaagtgggaattgttaacctcatcaaaggagatgggacctgcaacacaagcacctttgggtcagtgtgttaattagggctgagagctgggtgaaaggcaagaagaggggcaaaagaggctgaggtggtaattcctcttgtcagtgtcatgggagaaaagaacc

SEQ ID NO: 652177 - DNA, 450 bp, Homo sapiens
tcccccggtaatgtaataactgtattgctgaggctggctcaaactcctggcctcaggtgatcctcctaccatgacctccaaaagtgcaggcattgtaggtgtgagcactgcacccagccttatgtatttatctacataaaagacagcacaggattatcttccagagttaaaagtggtcaataaagacagaaacacagttcgctccaccgagataatttggatctccgggacgacatttgttctgccaggtcataggatcacccgacgaggagtcggataattttagagcaaaagaccaaccgtcaggagtcatggacgcaacagtgtgataagcgcaggtccacaggcttcaggaacttgaggccatggtggacacacatcaccaaaggattcagcagtgtatcacctttctctttatctaatggtggaaggatgatgttgtcacggcag

SEQ ID NO: 652178 - DNA, 293 bp, Homo sapiens
tagagcgacgttacctggtatccccacccctggtctctctctctctcctctcctattccctgagacacagtattgaaattaggccaatgaataaccctgtggtaacctctgagtattcaagtgaaagacagagttggacattctcactttaagatcaaagctagaaatgattaagcttagtgaggaaggtcaagatagaagccaagatagactgaaagctaggcctcttagaccaaacagccaagttgtgaatacagaggaaactttgtttttaaagagacagagtctcactt

SEQ ID NO: 652179 - DNA, 192 bp, Homo sapiens
tcgacctctaagaggatccccttaagggggtgctttttctctattgatttgtatgagctccttgtagattctggatatagtcctttgttggatgcagaatttgcagatattttctcccattctataggttgtctgtttactctgttgatagtttcttttgctatgctgaagctctttagtttaagtcggtcc

SEQ ID NO: 652180 - DNA, 174 bp, Homo sapiens
  misc_feature (27)..(27): n is a, c, g, or t
  misc_feature (101)..(101): n is a, c, g, or t
  misc_feature (103)..(103): n is a, c, g, or t
taccaagccatcataccattgtggctnagggggcatgaggatgaggagaaagcaccaatgtgagggcatcctcggtgtccacaggagagcatattgcttgngngggaagctttctacacatctggatggcgacaccctgtagcagttccagggaagggtgctcccgggcagctc

SEQ ID NO: 652181 - DNA, 991 bp, Homo sapiens
gagtggaaccagtgccgcgaacccaggccgggagtggggttcggcctgaggcgggaaggtgactgacatgttctcgaagaccccttttatgtactccgaggcgatatgcgagaaggcggttgaacacgagccgccgggttgtacctagcgtctaggtgcagtaacgctcatgcaggaaagcgcggggtcggacgcgaggagctggactgacgaccaatgagctgcggaatgggcctgcgcagcatcgagtgggacctcgaggacctggaagagaccatcggtatagtggaagccaacccaggcaagttcaagctcccagccgggacctgcaggagagaaaggtgtcgtggagcggatgcgagaggcagtccaggaaatgaaggaccatatggtcagcccaacagccgtagcatttttggagaggaataacagagagatactcgcaggcagccagctgcccagaagtccacccagcgacctgctggatgccagcgcagtctcggccacatctcgctacatcgaggagcaagcaggccacacagcagctgatcatggattaaacaggatcaaccagctggaggatggtgtctgggaagcatccaggttctgaagcatatgttcgggcgcgttggagaagagctggacgagcaggcatcatgctggatgccttcgccagaagattggacacacccagtcccgcatggaccggggtcctcagggaagttggccaaagtattccacatgacggagttgttgagtccctcaggggaggggtcagtccttggtgggggcaggttgtaggtggtacctcttcccgtgaccctgaccttttgttccagacgcgacgtgtgtccactcgcgtggtgagtgggaggtcttcctcgtctcaatctatatttctttgaccggcctctggggtggtcctaactggggcccacactttggtggctcccaaggaaggggccccgttggaaagaggcccgggggccgc

SEQ ID NO: 652182 - DNA, 133 bp, Homo sapiens
taaactaggagtgataaggctcttaaatataaaaagacatatggaagttgcagtttacactttatctcaaccatccactttcctgatggtccgtcagctttccaaggaaattgctggatgttatatttgagta

SEQ ID NO: 652183 - DNA, 441 bp, Homo sapiens
tgacgtcgggagcgaagcgctccaggacgggcccccacacggcgtcgaagaggagccgatactccccgtcatgggtgcgaggggggagcggcacgttgatagtggtatgaccccctagggcggtgcccgcgtcctccagccgcccgccccggtggggataggcgtaggccgtgtccatgtgcagggacagggtgagcacgtcaggatcgtcggcgaaggcctcctccaccccgtcgccatggtgggcgtccaggtccaaatacagcacccgccatccttccgccttaagccgcaggatcgccagcaccggatcgttgaagtagcagaagccccgggcatggtcgggccgagcgtggtgcatgcctcctgcgggattgaaggcgacccgtccggcgagcaccgcctccgccgcctggaggctcccgccggcggcggcggccg

SEQ ID NO: 652184 - DNA, 207 bp, Homo sapiens
cagtggcagctgttggagaacaacgaacgggttttgaccacaagcaggtcactacgggggctacttccgagaccagaaggacggctacggcaaaaacgagggctacatcgccgcggtggctaccgccagcagcagtctccagacggcctactgagctctccactctgtttcccgcctggggcatccaagcattaaagtcctaaacca

SEQ ID NO: 652185 - DNA, 343 bp, Homo sapiens
cgtactggttaaaagctggaagatggccctaaattcttgaagactggctatgctggcaatgatgatatggttcctggcaagcccatgtatgttgacagcttcttagactatccaactttgggtcgctttgctgattgtgatatgacacaaacagatggggagggtttcatcaaaacattggacaataaggctggtggatctggcaaggtcaccaactctgcccagaaagctcagaaggctaaatgaatattatgcctaatacctgccaccccactcttaatcaatggtggaagaacggtcttagaactgtttgttctaactggccatttaagtttactaacta

SEQ ID NO: 652186 - DNA, 225 bp, Homo sapiens
  misc_feature (225)..(225): n is a, c, g, or t
gagatcctggtgtcgccatgggccgccgccccgcccgttgttacggtattgtaagacaagccgtacccaaagtctcgcttctgccgaggggttccctgatgccaagattcgcatttttagaccttgggcggaaaaaggcaaaagtggataagtttccgctttgtggccacatagtgtcagatgagtattagcagctgtactctcgaggcgctcgaggctgtccgn

SEQ ID NO: 652187 - DNA, 229 bp, Homo sapiens
agaccgggctcgtagcagagaaggacaataccatatgatatcacttctatgtggaatctaaaatatgatgcaaatgaacttatctgcgaaacagagacagagagaacagacttatggttgccaaggaagagtggggagatgggaggaatggagtgaaaggttgggtttaactaatgcgactgttatatataggatgtgtaattataccaacgacagggtcagaccgctc

SEQ ID NO: 652188 - DNA, 194 bp, Homo sapiens
tttcactaaacttccacatataactccaactttattattagacacacttttgtggtaaatctaagcgtgacattatagggcaggaataattagcttgcaggactgtcagattgttaccaaaaaacacatctttttttttttgggacggagtcctacttcgtcgcccaggctgtagtgcagtggctcaatctcag

SEQ ID NO: 652189 - DNA, 131 bp, Homo sapiens
ggatcccttacttgatggccaagggagatctatgatattgtggtacagattatagatgttttacgaaggtcataagtgaagcctgccaggaaagacatagatttacaaccttacattgcctagttccacat

SEQ ID NO: 652190 - DNA, 191 bp, Homo sapiens
  misc_feature (127)..(127): n is a, c, g, or t
  misc_feature (137)..(137): n is a, c, g, or t
  misc_feature (155)..(155): n is a, c, g, or t
  misc_feature (179)..(179): n is a, c, g, or t
cacacattcctaaacagaaggaatgtgccaagctagaccaaataccaagattcaaaaagatcactctctctggttcctttggttctcactataatgtgtatttttttactaccagccatagccacangagctgacanggtaatagcgcggtatanatggggagacggggctgggaaacntgctatgcatgg

SEQ ID NO: 652191 - DNA, 295 bp, Homo sapiens
acacggaattgagagtgcaccgttatgctttcagcaaacaggagggcatcactccagacacagcaacatgcaccaatgccccacaggcctcctgtcaattcagctccagtgtggtcatgtgtgcagcacaaagtgaaatgcaggctggggcaagcttggccacagggcaaacagtcaatgcaacacaggcatcattcaaggcacatttcatcattttcaccattgccacagcccaatgcaacaggcccattgccaaacagtttctcacacagcaaacacatccagcaccaacatc

SEQ ID NO: 652192 - DNA, 964 bp, Homo sapiens
ggcgctcaccagctttttacctgcgcctactcagctatctcaggaccaaggacttggaggactgaagaaagaggcacctgatcccagagatcatggtagagcctcaagctggtctcctcccgtaagtagacacctccccccgttatcggcaataccgggtaaagcgctgagtatactctcggttattagaagtgatttttaggagatggtggtgctttgtccagcaggatccttgtgagccccagaatcccacgtgggatcatggcgacgaaacgagcataaaatgtacgcacaatcgccgctgtccattcaggtgtgattctgaaggtataatattgatatatgaattgcaattggctcgacgccggacagtcagatggacaaggtcatttatagctaaaattacactgacctggttccgcaaaggcaggttatgaatgcagatgatccagacctgcaaaggcccgatgaagaagctattaatcgagataacagaaaagacaagagtagtcctttaggaagtaatctgtatcacagacagggtcgccggcacgtccatgccagttcgagcagctgacagattggctcctgctcagtatatccgtatacacatccatctcagtctaggagtggtacttcaactctggagctaaccagagggttatccggatggtagaacatgccgagagatcctatggagcctccaggtccacgattaattacgaagaattcgcctggggaccaccttctcctcctgagcctgtcatgcctttctcctagccgaaagatgattgttgaggcacatggagagtgggaaattcctccttgatttgtaagtggaaaatgcgagggttatcactccattaaccacgttgctgctgtggacaggctacgccgtctaatgcatttcgccatggtgaaccctcatggtgtggaagcgcgactggagggtccggaggaaggc

SEQ ID NO: 652193 - DNA, 871 bp, Homo sapiens
gccacccgccagttcgtcggggtacagttggcggccggcgatgttggcgagctcttctcaccgggaagctgacgggatgtgctaagagacggagtccccggttgtcatgcatcaccatggccggtcatttcattcacatcaccatcacagcgggctctattctggtgggtcacgacttcagaaaacgtttctcccttcagcctcctagaactgctctccaggttggccacccttctgggtcgacttactgtggactccctgggacgaggggaccatctcccgacaactgtggctctggtatacgaactcctggatgaagtgctggactatggctatgtacagagcacatccacggagatgctgaggaattgtcatccagtacggaagctgtggtcagcaagcccttcagcctctttgacctcaggcaggcgttggcttgtaggggctgagacagcgaacagagcaaagtggcccccagtcagatgcaggccagccgacccgtcctgtccagtcgctactgaccagagccaaaagacatgacagtgctccggatgctggtctgagagattgtctgtacggatagcatctaatggatccctgctgacacgtggatgtgctgggagagattcggctcaagagcttccttcctagcggctctgaagatgcgcgttggcttgacggaatagtttgtagtggggaaggtcagacgcttgagacggttactggggcctaggaatcctgggtcgatgaagtctcgttgcaacagcttctgtgaatcttggacgactttggcgtctcatcgaatcctcccggttgcaacacctcagggcgaagtgactgtgatgcggcaccaaatctaccgtgagctccc

SEQ ID NO: 652194 - DNA, 160 bp, Homo sapiens
aacgacccctttgccctgtgaggcccactgctgtcctcaaaggcctgcacggggatgtcttggcctttcgtgtggatgctgcggagctgggggtgctgtggagcttatgtcctgtagggccttcagcggcctgtcacgtgcgtaacaatggcacgtgcgg

SEQ ID NO: 652195 - DNA, 339 bp, Homo sapiens
  misc_feature (7)..(7): n is a, c, g, or t
acccgtnaaggagttattcgtaggcgttatttaaaggcgttgttttggattctgccgcataaatatccgtcagaaaccgtttggaccggcattgcttgcctccttttaagcaggccagccttttccggattttagataaattcggtatcgttttacggaattaacccccgtgggtagtagcggcacgcagtgctcccgaacatctcgcgctgttcgcgggccgcctcacaaattcctcagctaattaaaaacctccagcccaacaactccgcttgcttcctcaacctcgcagcctacgaataactcctccgggatccgtgcacgttaacgattactagg

SEQ ID NO: 652196 - DNA, 199 bp, Homo sapiens
cacatgcttccagaacgcgcgagccgcatgcagatccaagcccggcctcaacgcagcgggtaccagctgccgaggaaagggcaaaagatcatctgggaatgaccagggaccacagtgtggacagaggccatgcaagacgactgcgacaggaagaggcccccaacggcagaaaccccgtggcaccactcgccacaccact

SEQ ID NO: 652197 - DNA, 809 bp, Homo sapiens
tggaaagagggattcccttaggtgttaggtcttctacttagaaaaagctattgctaagttagatttatcttgtagatagtgtcatctttgtatttctgaatataaggttggacttagattgattcacactgaggggaaccgattcttttataatccgaactgtgaattcatcatatgactataatccacagttattcagttgtggagttgcttgagacatatgtaagagactctatttgtctcttgtcttacagtctcttaaatagtgtaacttatattccccaccttctgcttgctattctttactccctccgcctccacatgataataggaaatatcgatagagtttttctgctagtgcattcaagttctaattctagaataagactaagtataggcgttgtacctgatattgctactttttctaccgagatgttttcagattctaagagtcgctagtgttgtaaaactcattttcaatcggattaggccttctgttacttagcgttattatgagagtaactcagtggataggcagtcagatgaatgctcaattctatgggagtgcagttatctagaataccagatttctgaaatcatatataacgtgtcattcagagttctaagacctttgctgtagcacaagcagagcagaggatgtcatctgttcacctaaaatgagaaaaaagctatttatgctgatggagcatgctttttaacgttcctttataagagcgctcgccttatacagctttgtggaccaaataaaagcccaaaatagacccttggtagtccattgaatcctcgaa

SEQ ID NO: 652198 - DNA, 216 bp, Homo sapiens
tcagcctccatagttgcatgggattacaggcatagccactgagcccggctgtttttttgtgttttttttgttgttagtttgtttgtttgtttggtgagacagagtcttgctctgtcgcccaggctggagtgccagtggcgcgatttcagctcactcaggagtgagccaccacacctggcctgtgattggctctattttgagtgattacgtgtaaat

SEQ ID NO: 652199 - DNA, 150 bp, Homo sapiens
agacagtgcggcggtgaacagatatggactcgaacccagaatctagtggcacagcaatgcaatgccttagaccactgcaccactcaggaggcctcaggcagatatatatatttttttcaaatccttatatctacatatatttatatgcct

SEQ ID NO: 652200 - DNA, 203 bp, Homo sapiens
tcgagacaaagtttcgttcttttatgcccaggctggagtgcagcaaaggtagtgatgtcggctcactgcgacctccacctcctgggttcaagcaattctcctgcctcagcctcccaagtagctaggattataggtacatgccaccatgccggctaattttttctatttttagtagagacgagatctgactatactgcccaggt

SEQ ID NO: 652201 - DNA, 387 bp, Homo sapiens
  misc_feature (328)..(328): n is a, c, g, or t
ttcttttaaattttttctctcggctttcattcttagcaaaatcctcgcccagtctgtttggggaatctgaagaggtcaaatgcccaggttattccctccagggaggaaagttttctctccctgttcataatatttctgaaataaatcagggagggtgagtttctctcccaaatgatctgttcttcaaccactgtctcatggtcaatatcttttttttcatctgaggaccacatggtgaccgagaactcgccctccagggtcttgatctgcacctgcttctgctcccacttcttgttgtcccgggtgcgcacggccgcccgccgcccgncccgccgctgaggtaactcttcttgccgctcttcttccccgcccttcttgacgcggtcc

SEQ ID NO: 652202 - DNA, 137 bp, Homo sapiens
cctgggacgtcaaggctgcagagagccatgatcatgccactgcactgcagcctgggtaagaaagcaagacctgtactgaaaaaaaacaacgtatttggaaggatgattgcggagactaagcagataataggtaacaa

SEQ ID NO: 652203 - DNA, 139 bp, Homo sapiens
  misc_feature (111)..(111): n is a, c, g, or t
cgtcgatttggccgcctcctaccgctccaagccagcctcagcatggatgcccctggatcaggcattgctcctcgtggcatcttcacaagtactcggcaggagggtgacaanacacctgagcaagaaggagctgaaggag

SEQ ID NO: 652204 - DNA, 102 bp, Homo sapiens
aaatgccgggtcatcggctgcttctcgggctctaactcattcagctccacctccttcatatccacctcggtgtcctggctcatggtggatatgaaggaggag

SEQ ID NO: 652205 - DNA, 100 bp, Homo sapiens
tacgactcgagctagtaccgttcactgatttcccctattctcattctacaccctagaccaaacctacgccaaaatccatttcactatcatattcatctgg

SEQ ID NO: 652206 - DNA, 135 bp, Homo sapiens
tgtattaaacgatcagcactaaaccttcaaaaaatgcccagtgttcctagttaaatcttaagaggggagaaagagatatcttttaaataatgttttgctaatgaaaagagtaatatattcttgtgtaaatcggca

SEQ ID NO: 652207 - DNA, 526 bp, Homo sapiens
  misc_feature (58)..(59): n is a, c, g, or t
  misc_feature (515)..(515): n is a, c, g, or t
ggacagcagtgtaagtgtgtagcatcttgctggaaagtatggtgttggaatgcgtganncactgtgcccggccaagactgtcttatgatagtacaagccaaattagaattgctctgctctcctgacctcttctccctcttcctgcttcactcctgacagggtctgaaaccagaattactatcccagataagaggaggaagtgtggacctcaaggttggcagtgagattctaaggacctattccctctcttagaccacaaggttctcacccacagctggtcccagtgggggaaaaaatggagacaccttgcctttgaatgaacttaggactttgcttattatctgaggctggatatttgtaattagagaattgacatggagtttacaacctgaagtgaccacagaaccgatgactcgtagatctctatttccagcacagacttctcctttgaaatttcattcttacgcattccaaagcctgctggccatttccaactagctgtacaagctcctcanactcgccatgt

SEQ ID NO: 652208 - DNA, 130 bp, Homo sapiens
atacaccttctcactgtgtgctttgtgtctgcgttgtatacctttgccagacctcaatttcttcatctgtactagtgagaattatagtatctattcatgtgggttgctttgaggggtggtatacgggtac

SEQ ID NO: 652209 - DNA, 645 bp, Homo sapiens
ctctagaggaccccggtcaattgctacaccttatgcgactgacacatgcggcctggtagctggagcccgggaagtggttcaacgcaataaagaggcttctggctcccagcaaatggctcggtaagcatagtatcctctgcctgcaagtctctcctgatgatgtcagtatgcatactggggtggttgagatcatctaggtggggatgatgcaccccaaactaaagcccctctctctcgcggctcgctttgcagggtgagtgcagacatctgtagcaatggaaggtaagtgccttgtgttgcatatggacgaattactaaatgctactatgattctgtgccaggtttcgtgccttctaggatatagtaatgactgaaatcatagtgaatgggagcatccagtcaattacttagaacagatttgtagtttgtacttaaagtgtgtgtgtgtatgtgcataggtgtgtgtgggcaggcacatgtggggtaggcttataaagaaaactgaatgcacagtgtaacgcctgctactctccctggtaaacagcaatagctttttatttcaaactattcgaaatatgtaacttccttaaaatattttgacaagtgtcacagggcaagtagggctattttaaaaaagtgtgtgaa

SEQ ID NO: 652210 - DNA, 762 bp, Homo sapiens
  misc_feature (114)..(114): n is a, c, g, or t
  misc_feature (263)..(263): n is a, c, g, or t
gcagccatcttgcctggagcctgagaaagggaggagagacagaaggaaccggcgacagtggtctcagtggccgctccggggggcctcaagaaccggaggcagccccggagctgncgcgtggcggacacgccagaggaggaggccggggaatggccgcggtgttggcagcaagtcttagcagtggacgcgaggtacaacgcgtaccggacaccaacgtttccacagtttcggacgcagtatatccgccggcgcaagcagcttgntgcgggagaatgccaaggttgggcaccccccagcgctgcgttggcagtacctgaggcttcgggggcagctgctgggccagcgctacgggcccctcttccgagccaggcagtgcttcgtgcctatagcaacagcatcgtccgcagtaaccgcactaactcttgaacggattgaggactttgaggatgaattcctccgggcccttggggggccgtgggcaccgtcgttctgtcaaggagaaggtcctaacaggtgcaggcgcagattaaaccgtggcgtctatgaggacagggcccccttgcagcgtggtggccacgtcagcagcagaaggcaagtcgggccatgggcgggggacacgtctactgagcgagaactatggctttgcgggcatgtatcatgtttttgagcagcacgtggatgaggcagtcccaaggggtgcgcttcgcaatgatgaccgacacggctgggctgtggtcactcgacgggagatcttcctgtgca

SEQ ID NO: 652211 - DNA, 604 bp, Homo sapiens
atttgattcatctaacaagctgtaaagtagcaggaaaaatctgggtgatttggttgtttaataaaatatttttagaagatagtattttttgagtatttttaatcattagtataggtttaggcttagtgtattctgtatttgcacaatatgaagtgtatccagaatacagactttttttttttttttggccaatttagatattagagaaaaatgaatgaccaaaggtttgtgaaattttagattatgtggaatgtgaaaagaactaataattttatttaaattaccaaatgtttggtgtcataaaatgtggcttcttactattttttactgtttcacatggaaacttccatatttccagaccagcagataaccttcatgtacttaaatgaagaatattttttccataggtaataaatggtcttgattgatagcaaagttaacaggtactctgcctattttaaaatagaacaaattgctgataggattgatggagtctttttacattttgttatagcaaaagtaaatataaaatcttgaaaaaaaaaaaattaatgccctatttgtctgttatgtttttgtttgtactactatgaaagtggtccgg

SEQ ID NO: 652212 - DNA, 498 bp, Homo sapiens
  misc_feature (136)..(136): n is a, c, g, or t
  misc_feature (331)..(331): n is a, c, g, or t
  misc_feature (362)..(362): n is a, c, g, or t
  misc_feature (369)..(369): n is a, c, g, or t
  misc_feature (374)..(374): n is a, c, g, or t
  misc_feature (397)..(397): n is a, c, g, or t
  misc_feature (400)..(400): n is a, c, g, or t
  misc_feature (475)..(475): n is a, c, g, or t
ctgtggggagcttccccttgtcactgaggtaatgtagccaaacaaggttaaaaagcccccagtaagccgggtgcggtggctcatgcccgtaatctcagcactttgggaggccgaggcgggcagatcacctgaagtngagagtttaagaccagcctgaccaacatggagaaaccccgtctctactaaaaatacaaaattagctggatgtggtggcacatacctgtaatcccagctactcatgaggctgaggcaggagaatctcttgaacccgggaggcggaggttgctgtgagctgagatcgcaccactgcactccagcctgggcaacaagngtgaaactctgtctcaaaaaaaaaaaaaagntccctantaaanccatatcgtggggtaatgtcttnatncaataaattacctactgtagagtgtgatttaatttcccactaaaacttgtgcaaaaatcagaatagtagggtttnaccccttgacttctacttggccc

SEQ ID NO: 652213 - DNA, 715 bp, Homo sapiens
tgtccttgcaggcgcgggtcagtttcccaggcatgccggggtgggcatctcctatggctggaagctgaggctggctgcagctgtgggctggggtggggtgggtggggtcgggtggtggagacggcttaagcctgtcctggctggttgccctcccaagggtccttttcacccgtgtcccctggtggctgaagtgcccctgtgtccaaagctccccgcgtgggcgtcttcaggtctctaagcccttgggctttagcttggggtttccttgacttgtatgaccacatcctctcccggcgtcccgtaaaggggtaacgcgttagccacatgggaacgctggcccttttggggcgtacgggttgcttgtgggcgtcaccttggggggacgagggcgcccaaggacttgtactatggagcggttggcgcgcgcactgctcgttttcccgcagaagaaatccctctttctgcgcccgttggtggcccaccgggggggcaatggctggcggggaaacttcgtggcggacgtgcacacagacgatcctatatgtggggagaggcgctgggggccctccttcctggagctggcacgcccaccggtcttggcggtagagttcatttggggggacaggaaagagcccctggtggagagttttcgaccgtcccgttcttggtggcgaaaggagtccgtttaaatgaggggcgccccggggggccccac

SEQ ID NO: 652214 - DNA, 139 bp, Homo sapiens
accccccccccattttgtttcctttaggggcctcctttcctttgcccaagggagggagtgtgggcaggatttggaagttttgggattcagggtgttattaaaataataataataatttaaaactttgaagaaacctgga

SEQ ID NO: 652215 - DNA, 657 bp, Homo sapiens
  misc_feature (387)..(387): n is a, c, g, or t
cgtgatggccgattcctagaggtatccccccatgggagcgatgaaagacttagagcaaggggcttgccaatcacggaatcgagtaggaattccctgtagtcaggcaggcatgctgctcaatagggcgtcggatgatttccgcgcgtgtatcaatttggtgcgtgccgaggtttatagcaccggggaagggcactctgcgttgatggcgccgctcagtttgatgaagtttctttcatctttttctttgtaggtgttttttaggatttttcctacgggtcatcaggatttggagctcatgagattacctgcgggttctttaggctatgcggcctgtttaattccaccgcgacgttcatcatgcttcgatcaattttttgtgtatgcctngtcagcctgacctgctttatttcatcggcaaaggccaatttccaaccccgcgccaccttcagctcttcgctgcaaagcatcaagccggcctctatcgacgatgtcattgaccgcgcccatgagttgctgggtacgccctataagtggggcggcacatcggcagagcagggcttcgattgcagtagcttcctggtgtacttgttcaagacccaagccaatatccagctaccccgcaccactgccgccatgcaccgttcatcgcttccatgg

SEQ ID NO: 652216 - DNA, 257 bp, Homo sapiens
ttgtagttggttttctgtgtggccagtgtctttgtccagcaaaggagatcattcttaccagcaggtgccacatgcagtcttggttggacgttggctcttggagcatgttatgtgcttgtgcctgttgtgagatggccttgctgctgtgtgaatgtttacatttcccctggcaggtgacagtctggactccctgtgaaatgactgggaggaagtgtctggtcgacgcggccgcgaatttagtagtagtaggcggccgc

SEQ ID NO: 652217 - DNA, 788 bp, Homo sapiens
aatagctagtaagccgtgtaatcggcgaggtcttctcctcctgagctgaagaacggctcatttactacgtggatgtgcaaaagttccccttgcgctgacagacgaacgacctccttggtcaagcgagctctatcgggacccagcggaggatggggtcaccgccctcagtgtctacctcacccccaagaccagtgacagtgggaactggatcgagatcgacctatggcaccagactcaggggtgcgtgctgggtcatcgtgcagcgacccggagactgtgggctcggggcctcagcttcttccagaccttcactgtgcaccgtcagcctctgtcaccaagatcatgctgtcggagaagcacctcatctcagtctgtggcgacaacaatcacgtgcggacatggtctgtgagtcgcttccgcggcgatgatttccacccagcccgagtcgcgaccccactcgcttcctttagagatccgggtctctggagtcggcagatggtgcatggtggctgccagccgctgatcactgagcatgtggcccctacgagtgatgcgggacgaccagcaagtgttcatccagaaggtgggtgcccagtgccagccagctcttcgtgcgtctctcatctactgggcagcgggtgtgctccgtgcgctccgtggacggtcaccacgagagcttctagagtgcgtggacgtgcgagggcgtcccggcggctcggcgctcggcccgggcgagagctgctcactgtccaaggccaagcggcaggctttgtccatgtgtgcactaa

SEQ ID NO: 652218 - DNA, 116 bp, Homo sapiens
tacgtgtgtactcatgacttctgatggaatttgggttagtaccccgtttgtagactaatgtgtaggttgctgtagtgcgaagactcgtgtaacgtcagacagacatgtatttcttg

SEQ ID NO: 652219 - DNA, 122 bp, Homo sapiens
aagccctcatcagtgtctcagtagctgggactgcaggcatatcgccactgtgatcagctaatatttttattttttgtagagatgagggtctcgctatgttgcccatgctgctctcgaactct

SEQ ID NO: 652220 - DNA, 181 bp, Homo sapiens
ggcagaggttcagaataagagaagtgagagggattctaatcttagcctcttcataccccaacttaaggagtatgggccagaaggattggggcagatggtgccatcaatagctgtaaagtaagtgaagagtaaggctctttttaagatattggtgatggcagtgaaggttgaagttgagcgg

SEQ ID NO: 652221 - DNA, 572 bp, Homo sapiens
  misc_feature (72)..(72): n is a, c, g, or t
  misc_feature (285)..(285): n is a, c, g, or t
  misc_feature (433)..(433): n is a, c, g, or t
tttcccggaggggggccgggcggggaggggattagcaactcttccctagacatcggcttccgcgaacggggntagggtggaggtcactttacctaggtcctacccaagggggcgggtttggccatcaagggggggttcattcctggatttcccctattttcggggtacaccctagaccaaacctcgggcaaaatccatttcactatcaaatttatgggggggaatttaactttttttccccaacactttttggggctatccgggagggcccgggggtattggggntaccccgagggataccccccatgaaacatccttttattgggggggtcattcatttttttaacagcgggaatattaataattttcatggtttggggggccttgggtttgaaggggaaagtcctaataggagaaggaccctccataaacntgggggggttataggggggcccccccccctcccccccatttggaggaccggggtacataaaattttggcaaaaaagggggggatgggccccccccaaggggggttcaagcccccccccggggccccatggcttttttca

SEQ ID NO: 652222 - DNA, 740 bp, Homo sapiens
ggtctagctggtgtttttctaacacaatggttttcttcatagaagattaatgtattatttcagttatcacatatgaaaatcatttagtacctaaaggcgtaaacttccaggaatattatacttcttgagtgcagagtattatacttctattgtactagtattctctctcgatgccagtattttataagtggtactgtgttgataatctgattgatctgctcatacggattgtgaagcaaggtaataccttttgaaagttgcctgtttgatttatatatggctatgagattgggaagccaacatccgtttgacacaatatatgtcaaaatgtgtatcctacagacgcatacaatggaacgtgtcaagccttgttttacatttgttcagaaacgatataaacacagtctgacgtgtctcttatatgaaacatgaaaactgtggcaacatagcccccaaaaaggttcctagagtaaagtaagcagaaaatgcttcagtgacctgggcgagcaattcctattatagatgtaccaacaaaaacagtttccgttatatctactaagaaatattgtcagtgtctggagtatgggttgatttaaattgcataagcttttgaagtcctaacacagaataatgcatattatattaattctaaccaaataattttgtgcgaagactttaggggttgtaaagaatattggatatagtataacggggcattattacattggtgaaattgagtg

SEQ ID NO: 652223 - DNA, 782 bp, Homo sapiens
agcgaggcaatttaatttcaagggtatgtgccaccacacccagcaaattttttttggtattttttgcagagatggggtttgccatgtttcccaggctggtctcaaactcctgggctcaagcgatccacctgcctgggcctcccaaactgctagtattacagatgtgagccactgcacctggccgtgtctcattttaatgtctctctggacctgataattaaaaagacttgcatttctcagataaaagtgattttctttttctcaaaaggatatgaacagagagaaaagaaaatgcatatggatcttcaaagatgaaatgatgttcagtctcactcataataagtaatttcacacaaactacaatgggatataatttttcacccactagaccaacaaatacttcaaaatttgataacacattgtattactgaggatacagggaaacaaggacaatcacaaattacttgtgggagtctaaatcgtttgtaacccttacagggcacaatttgacaacatctaggaaaattttgcatgcaaataccctttgaaccaacaattctcttttaggaattcatttatatttatagatatgtgacatgatgtgtgcacaagtctcttcatggtgacactgtaacagcaagacgagataagctaaacagtagtcaacagggggattgcttaataaataacagtacagccacacaaagacatattctgtagctcctaaacatgactacagaagctctttatgaacagacatggattcatctccactgctatgg

SEQ ID NO: 652224 - DNA, 354 bp, Homo sapiens
tgcggaccacctgaggattatgtaagaaaagggtaagcggtataataggaatgtcgtcagacggtttgaaaacagttacctgagaatttgtattccgttgacccagcaatcccactttgaaaatctgtcccaaggaaaaaaattagaaatacagttaaagccgccggggcacagtggctcacgcctataatcccagcacttggggaggccgaagcgggcagtgcgggttgagtgcgggagtttgagaccagccagagcaacatagcgagaccctgtctctacacaaaatacaaatggtttgctgggcatggtggtgtgcaccagtagtcccagctatctgggaggccaaggcgg

SEQ ID NO: 652225 - DNA, 210 bp, Homo sapiens
gatattcggtagtgtcagcacggtgctcacgatgctcgacggaatcttgtacaggaaggcatgcaccgcagtggtgagagtacacgtcgaccaggctccatcttaacgatatttggaggtcagcacggtgctcacgtgtcgacggaactatgtccagggaggcatgcaccgcagtggtgaatacacgtcgacctgcagggatagcatgca

SEQ ID NO: 652226 - DNA, 1966 bp, Homo sapiens
atcaaacgtctctcttcgtctgatacgtttttaatctacagcatagtcccacatactacctatctttaggcccgctacaaaggcagaatggcaatcaataagtacatacataatcacgatctcgtctatatcctatcaaccatccatcatacaatctgatctctcttgacgcgcaggtagtgagtactcttcattgcctatacctaagaacatatagtgcgtgcattaagatctgggcgaggcgcgtgtagacggacagacatacatagcctatgagtcccctaatctatgggcatgtccggcgaaagtagagtctgaccccagttcatcggttacacactttagaggctgtaagatcccggttgaacacaacgagaggtggaccgccaagtatccggcgacttacgtgggtcacccgcacacagtggggacaccctagagaggacgccgaaaccgcaaatcatgttacacaacgtgggagcctgtgagcccgaaagagcggcgcgcgcaagagcgagagtgtgcgagagacgaggcgagcccagctgagtgcagtcaaacaccacaaggaggagccgcccaaaataagaaaaacgattcggcaacgcaacgaggcgggaacggacgaagcacaacaacaacaaccagagcgccattaacacccgagcgacgaggacgccgcgggtgacatcaccacgaagtacgcggacccactacaattacacccagcacgcgacagcgcggcgccgcccgcaccacagaagcacaccccacacacacaccacaggcaccgtcgagaacagcgcacccggcgagacaaaacacaaacgtatgagccgcagccgcagagcagccggaggccagcacgatcaacccttcgacacagcactattagggaccgtcccgcaaaggccgattcgcaccaaacgacatcggggcgatcgcagtaggacaacgacaccacccactacaccgagcgcaactatagggcagaccgaccaaactcaaggacgcccatactctccgctacacaagaccgcccgaggggacagacgggacacacgagcgccccacagtatgagaaagtcatagcgggcaccaaaccgatgcgagagcagaaagacaaacaaggaacacacacgaccagcatatccaagagcctccaaaccacgtacagagaggaagaccgcaacgagtagacggagcataacacgcggacagaaacgtacacaccggcacgcacaacacgatgacatatacaccatctataaacgcgccccgcacgcgaaaatacacagagcacacgtacccagacgagaacgtagcgcgaccaaaccacatcaagcgacgggtacgcgccagaagaatggtggaccgaaccccatacagagacgaggaacgagtacccatgagacaacgagagtcaacataggcgcggcccactgccccaaaactacaacagcgtatcgagcagcgcccaaactaccaccacgctaggaaagcaaagacgacgggagctagatgtagacaatccacacccggacaaataaagcaaaaatacgttgcaccacagacgagatccgacaaacgcaaggcgagcgcccctccatccggcaaggcgctcagacacgaaccgccccgtcagacgacgccccccagacgcaagcagaaagtaactagccagctagaacatcacagcacaacaacaatagatgagctagaacgatataccacacaatccaggagacgtaacgcgcagaccaaacaacacgagtatggaacaaaagtatagcagagacgaagcacgccgaacggcaaggacatgtgcacatcgacgagcactagacgacagacacacaaaacgaacacgggcgagaacagacatgagcagcagcgtgcggagaacgcacacatacagaggcgccaggaggatagcaacgtcgaccggcgccaacgacacatgcgg

SEQ ID NO: 652227 - DNA, 219 bp, Homo sapiens
cacgaggacgactgccatgactaattctctaataattagaagttctgacattacccactcaaactcatgaaacaaccaaacagtgccgtgtctatatatagccacaggaaggatgtttattctatgcaacacaacaaatgacctgagataagttgggattcttgtatcaccacataatcacatttacattgcaggatggtacatgccaaccaccagtta

SEQ ID NO: 652228 - DNA, 194 bp, Homo sapiens
tttatttccaatctattgctttattgcatatcaatgctcgatctattgataatctgcctgatctcatactgaattgatcattataaatttgcacttttccgtttttctcatttctgtaatatgatttaatagatgttataccgctaacattttcattcaattatcttttataacttatcatctgcgtcatatca

SEQ ID NO: 652229 - DNA, 826 bp, Homo sapiens
  misc_feature (195)..(195): n is a, c, g, or t
  misc_feature (229)..(229): n is a, c, g, or t
  misc_feature (612)..(613): n is a, c, g, or t
ctcctgctaattaaaaaaaattttttttgtttttttagagacggggttctcactatgttgcccaggctggtctcaaactcctggacttaacctatcctcccgccctggacttcaaagtgctgagagtacagagtgtgagctgccacacctgacctcttgttggttagtctttccaaagttttttccatgtgattnacaggggcaaggtccatgcttaagagtgagctgncccagatttcccatggctgtcacagttttaacactcaaagtcccatgttcagggaaactcctcagtcctgggcaaaactaagactggttatcctacttcagggaagcaccatcctacctcaggggagtggctccatgaggagagtcctggcagaattcagtgatcaacagtaaacaccataatgagttcttgagtcttaacatcaatatgaggaacatcaggggtacagcccaggatgatcttcacttctgctggccttgtttcttttttacagtttttcctctagtgtgaggagattcccgcaaggttgatggtttcaactcctgatctcttgtgatccactcttcagtctaaataaacatttccataagaacatgcagttnnaaaacaaaaaaacaaaataaacaaaaaacttattcccccaaacaacaaaatgggcgttctccctcacaaggtccttgatgtcattttgacccgggggggccgctttgccccaggcgtttttatcctcgcaaaggtttttctgccgcccgatttgggggccctctggccaattcgcctcatggggggtggtttcacattaactggcgcggggtt

SEQ ID NO: 652230 - DNA, 849 bp, Homo sapiens
  misc_feature (195)..(195): n is a, c, g, or t
  misc_feature (229)..(229): n is a, c, g, or t
  misc_feature (797)..(797): n is a, c, g, or t
ctcctgctaattaaaaaaaattttttttgtttttttagagacggggttctcactatgttgcccaggctggtctcaaactcctggacttaacctatcctcccgccctggacttcaaagtgctgagagtacagagtgtgagctgccacacctgacctcttgttggttagtctttccaaagttttttccatgtgattnacaggggcaaggtccatgcttaagagtgagctgncccagatttcccatggctgtcacagttttaacactcaaagtcccatgttcagggaaactcctcagtcctgggcaaaactaagactggttatcctacttcagggaagcaccatcctacctcaggggagtggctccatgaggagagtcctggcagaattcagtgatcaacagtaaacaccataatgagttcttgagtcttaacatcaatatgaggaacatcaggggtacagcccaggatgatcttcacttctgctggccttgtttcttttttacagtttttcctctagtgtgaggagattcccgcaaggttgatggtttcaactcctgatctcttgtgatccactcttcagtctaaataaacatttccataagaacatgcagtagtttgctgtcaaactgaagcttaaatccatatatatacatacatatttgaaaagaacagttctctaaaggaaatttatctgtaaaggtgcaactctgcccatagaataagccaccctttccatggtctcacaaagcagtctagactcagcgttgcaaatattttcattttcagatgatggattttngataaatctttgccgaacttttcaggtgttttactcaaaagtctccaggctt

SEQ ID NO: 652231 - DNA, 273 bp, Homo sapiens
ctaccagtatcccttattgtatagtctaacaaggatttactgctaactgaacactctgccacatcaattacatgtgtaagatttctttccggcatgaaatcactgatgacgtacaagatatgacttgtcgcgaaagagtttagacacatacattacatatgaaatgtcactctccagtgtggatcgcatgatgattagtgaggcttgaacgcatactaccagctttgccccattcattacatttgaaagatttactactctattcttacttcc

SEQ ID NO: 652232 - DNA, 417 bp, Homo sapiens
ccactgcactccagcctgggcgacagagcgagactctgtctcaaaaaaaaacattccacataatttccttttaacaattttaacaactagttgcgcttttcaacgatctatggtattttatagttggtggtggtggttggtttggttttggccaagagtgggggtgcttgccatgtggcccaggctgttcttgaactcctgacctctcttggtatatgtctatttatttttaagtaactttggggaatccttggctttggtcggggaaatttaagttagtatgaactacggttattattggcaaaatagataacaaagtaagccgaatattaaaaggagaggtcacctttagtgatgtgaccgtattggaggtagctgcaatagaatggaaccctcaatagagagcacatttcagaa

SEQ ID NO: 652233 - DNA, 351 bp, Homo sapiens
tccccgttgggttttataacaccttaatcttaaggggtagaaaagccccttttacaagaacactaatcccatttatgaggaccttgcccatacgacctaatcacctcctaaaggccccgcctcctcatgccttggggtgttagggtttcaatacgggagctttcgcgggtcgcaaacattcagaccacagcggtctatcgtggggatactgctgaggaggtaactgctttgagcgtcttgctcggcgagagctgcaggtagttctggatgtggtgggtctgcctagaaggagctttttgtgtggtttgttggtaactttctaatgaatggaattaacattattggtttatt

SEQ ID NO: 652234 - DNA, 161 bp, Homo sapiens
  misc_feature (66)..(67): n is a, c, g, or t
gagattttcacatgggaaaatcatggagagattgtttacataaatccacagttcaaggcagaaagnngattggaaagaggagttagaattgaattcttgcttacgttttataagtgtttcaattaattggcctcactttgccctttagatggactcctgct

SEQ ID NO: 652235 - DNA, 126 bp, Homo sapiens
gaatcatcagactgacggggctgtaacagggctctcagggtgggagagacctcagcagcttcccacctagtgctggggtcacgccttagcccacccaggaactccaccctgacccacacagcaggc

SEQ ID NO: 652236 - DNA, 447 bp, Homo sapiens
gtaagttacataagaaagtagctcaagttcccataggccccacccctgtcactctgctttccttctcccagcccacacccatggcctcgtggggagttccctatgagcagttgacagaggaagagacctggtttacaggtggttctgcattcggtatggaggtgtgatgattaatactgagtgtcaacttgattggattgaagggggcaaaatattgttcctgggtgtgtctgtgagggtgttgtcaaaggagattaacatttgagtgattggattgggagaggtagattcaccctcaatctgggtgggtaccatcctagctagcacagctaggaaaaaagcaggtagaggaacgtggaaagactagactggcctgagtcttctggcctccatctttctcccatgctgggtgtttcctgcccataaacatcagactccaagttgttc

SEQ ID NO: 652237 - DNA, 409 bp, Homo sapiens
tcgggaggatcccgagagcatcgcctaaccagagctccccgttagagaacagcagtccggccacattgatggtgggagtataaatgggttacgttataccccagggtcacctgtagtgggcctcgggtactggacaagggttactggctgtgactggcccggaggcaggcgggccatcctttagctaccaaattcagctcctggcttaggtaacctacaggttgctggggctggacctggggcctgagtgggaactcccggggccattcctttcctttctgatacataaagatggaatgtcttccctatgggaagactaagggctggtgcctcaagcaaggctggtttcagtgggtcaaaggtccttttagcctcgggttcccaaattagggagtgagtcttagtggcc

SEQ ID NO: 652238 - DNA, 559 bp, Homo sapiens
  misc_feature (11)..(11): n is a, c, g, or t
ggaaggccccntaatttcaaaacccacttaggaattattggaagaacagtagagacgggtgacatattttgtggaatcggaaacccaccttcccacgggtttactttgcttgggaaagttgtggctgaagacaggcaaacagctttttttttcctggttcaaacaagagggagtacccgaaattttcccctatggactgcgtacgtgcctgaagcactggaaataggtgctatcgtgcggtcattatcagggaggggaagtggtttaataaagtagagaaaaaggacatttgagcttgaggtgggttcagagagtagtcaatcccgggacgcgatttttgttggtgggaaactggtagtgcttagagagcgaaatgggcctgctagcaaaaagccttatttgtcattgggagagcctgaaggttgcaaccaagagcgtctggcaagccaagggcccgggaaaaggccgcttttccggaaaaacaagaccccgggataaagcccattttgctacgggccttgacccgtagatataaatgtgtctaacaccaaagacagcg

SEQ ID NO: 652239 - DNA, 688 bp, Homo sapiens
ttactgcacgagctgagttttccctttctgttatcaaaacaggagcataccagagatgcctatgagaagattaagcaatgggtggaaattggtaggtaatatcggtcggattcgtgtgtcgggatttagaggtgttactaaagacccgtggtaacagggcaagtttgtctacgatcccttgtaagagcccgttagaacgatgggtatctaatgttctttgagatgacagtctaatgcacctacagatggcccccaacagttcgtcattccatttgcttctagtcaacattaatgggccgggtacagaaactagttcgtgtcttagtatactatttccttgtgatgtcctataagtcggaaaagaaaggggcacagagaacctattatttgccagtttttaagcagagctcaatctatgccacctctctggcatctgcggttcctgactgataccagcagcttgaacgaagagagtgcatggccaccctggtgtgtaacgacacaatcagcacaaactagtgagaggcagtaaagaacctagggaaggtagtttgatttttcattgaattctacaagctaagctgttccacgtatgtagtccctagaccgatagctgtaactatcagctgcaatacgcatgggaccagctgtacaaaagatttgttttaccccatggacatactgaact

SEQ ID NO: 652240 - DNA, 116 bp, Homo sapiens
tctgcaggatccccttatcttccgtccccttggctcctcagccccgccattctcactctgtcctgatcctgcggttcctctcgttcactcgagccgtgattaccagttcgcccacc

SEQ ID NO: 652241 - DNA, 486 bp, Homo sapiens
  misc_feature (241)..(241): n is a, c, g, or t
tgtaggcacagcagtcagaagaacagactgtctcagtgtactctatctgtggcgctcttgttgcattaatcggccagtcttgcatgctctcgggtcgatactgctcagtgaggttctgtgtgctgtcttggatgcggtgacggtggagaaggtggtgatacaaactctcgcgtccatcggcagttggtctgagcgcgcaacggcaaagcacatggagaactcccaagttgcttctaacatntatttgtttgtgtattttttttacctcctggatttcctccacaaaggattgaaggtggagttttcaaataaacccgtgtcagtctaagcccatctagagaggcatcagccgctagccaggctgttcagcacgtgaacggagccccccttgtatgaagagacccctgctaggagttacgggaagtgacacaagaaggcagcggggcttggaggaactgtcacgctaattgagggcaagggaaaagc

SEQ ID NO: 652242 - DNA, 135 bp, Homo sapiens
tcgatgttcacagaaagttatctgttctcagacataggtcccttgggttcctgcgttgcaaggcagagcaaggcattagtgggaaggtcgaagaggtttctctaaggattgaccagtccaaagaaggtccacatt

SEQ ID NO: 652243 - DNA, 190 bp, Homo sapiens
  misc_feature (40)..(40): n is a, c, g, or t
  misc_feature (60)..(60): n is a, c, g, or t
  misc_feature (82)..(82): n is a, c, g, or t
  misc_feature (150)..(150): n is a, c, g, or t
  misc_feature (156)..(156): n is a, c, g, or t
attctgtggctgtgctgcttcgtgtctcactcgagagttncttctggtttcacacttttnaacccctctgtgctttagcagncgtgaccttgccttcattgcttcatccagtgcaggacctgggttattgaagacaccaaagtgtttctnttccanattgaaaaccaggcaggtttacacgtgggtttca

SEQ ID NO: 652244 - DNA, 916 bp, Homo sapiens
gtggaaagctccctcgtgtgtgcacgtagtcagagtatggtgggtgcagctcagggtgggccacactaggcgttgtcgcaccacaaaggaaccgggggcggagagcgacaggtgggtgccgtacaccaatttgcctgcgtgccagttgcccgccgggcccgctccatggcttttttttgcgggggtgtttcaccacccgggcctctatggggtgaaacgcgcccgcaccgcctgcaaagggggtcagaaggggtttgacccactctaactgcggggaaccatgtaatgaattgcttcggacaaaccctccccgttttatacccggcgccaattgctgtcaagactcactgcttaaaaacagatccaagctggaataattgtgcaaaaccccagccccaatgggcgactgtggtccccccccccgcactctgttagcctcgaacccccctctctccccctgtgttgcaattgcccccccaccaacagagacgttgtggcccccccctctttcaggatacatctctgctgtgaacgcatcttcgcctttatgtgcacaggccgtccatcctcaagagctatcttcatctccccaacaagctcaatttgggcggaaaagacacagccacatcttacgaacagatctttttgattgataattcccctgcaacaattattaaaaaagtaaggatgcttctacttaagatcactgtcgcacctgccaggcaactcttgggagacaagcccagcagccccaccaccactgtcctgctctcatatacccccctcgcttcatgtgggaagcccccctcctgtaatgggcggagaatgcaaaagcacgcagctattgaaactatttcttcaacgccctctcttgaaaaaaaaaattgaaaaaccccccaaaaacaaaacacaaaac

SEQ ID NO: 652245 - DNA, 248 bp, Homo sapiens
tgagagacgtgtagcatggagagatacaaaggcatctaggcccccttccccttagcttacaagtcaccatgaccaaagtacaaagaggttacaaaacaggaaaagcaaatataaccagacaggatagacgtggctctcctttgtacatgcggctttacagaggcatctggaagctctcattcacacagcgctcagagcatcctctttcacaagcgcaatttcatcttactataacaatcagttttaca

SEQ ID NO: 652246 - DNA, 926 bp, Homo sapiens
  misc_feature (4)..(4): n is a, c, g, or t
  misc_feature (101)..(101): n is a, c, g, or t
  misc_feature (298)..(298): n is a, c, g, or t
  misc_feature (353)..(353): n is a, c, g, or t
  misc_feature (493)..(493): n is a, c, g, or t
  misc_feature (862)..(862): n is a, c, g, or t
  misc_feature (926)..(926): n is a, c, g, or t
tatnaaatgtgcattttaattatacggctaacacaacttaaaaacctaattttatttttgctcttccttattcctcctcttcttcctcctcacctaaatcntcctcctcttcttctgtttcatccttttacttcttatactcatatacgatgtctttcatttttctctcagcctcggtgaactccatctcgtccattccctcgcctttttaccattttatgaagtccttcctgcggaacattgcatttaacttctcctatattctctttaagatctcctttatttcttttctatttcnaattaattttacttccatctttatgccactattttggatttcacatactgctttntttacatttttttgtatccattccacaaattatcttcttttctttttcttcactttaatcatcttctcatctacctccttcattgacatcctaccacggaagacatcagccacggtgaggtatcggccgttgcggggttnacaggcatccatcattttcttttcatctaagaccttctggtttatttccgtcacttttatatctcgatacttcttgcttccactgctgtttatatgggcaaagccagtcataaataaattgagacgtgggaaggggaccatgttgactgccaacttgcggaggtcagcattgagctggccagggaaacggaggcaggtggtgacaccactcatggtggctgagacaaggtggttcagatccccgtagtttggtgtggtcagcttcagagtgcggaacagatatcatagagggcctcgttgtcaatgcaataggtctcatcagtattctctaccaactgatggacggagagggtggcattgtagggctcnaccacggtgtcagacactttgggtgaaggcacacactgaaggtattatgatgcgatcaggtatn

SEQ ID NO: 652247 - DNA, 502 bp, Homo sapiens
  misc_feature (152)..(152): n is a, c, g, or t
  misc_feature (306)..(306): n is a, c, g, or t
  misc_feature (352)..(352): n is a, c, g, or t
  misc_feature (364)..(364): n is a, c, g, or t
  misc_feature (401)..(401): n is a, c, g, or t
  misc_feature (455)..(455): n is a, c, g, or t
  misc_feature (466)..(466): n is a, c, g, or t
  misc_feature (487)..(487): n is a, c, g, or t
  misc_feature (501)..(501): n is a, c, g, or t
aagcttaccaggaacacatagaagagcaaaatctggagcggcaggtgttacagacacaatgtagacgactggaggcccggcactacagcctcagcctgacggcagagcagctctcccacagcgtggcggagttgaggagccagaaacagaanatggtctcagaacgggagcggctccaggcagaactggaccacttacgaaagtgccttgcttgcctgcaatgcactgcctaggggctacctgaagggatatcccaggtgacggtttccttgcctaggccgacctatagtatagaaatattatctnatttaataccttggatattaatattttcacttgggaggtttgaacntaccaaaatganaatgtgccatgcatgaagcaaaggatttcaggctcanaatgaatgacttaccttgccgtcaatgcaattgaataaccgttggcaattcagngagcaacctgnagggattggccccggttttcnttttggggggtttng

SEQ ID NO: 652248 - DNA, 1089 bp, Homo sapiens
cgtgctctgcgttcttcattttcttggtgtgggaggccgcgttttcctcgtttgatattgtgcctgagatgtctgccttctctaggttgtcctcctttctggtcatctaagcagtctcgcgtgttttcgactcttttttctcccctcctctcctctcaggcccaatggggcccagaacccccgggtttatattttagggccccctcctcgtctctctccttctcccccgcccgtgtttgccatggggggccgctcatgtccttggggcgccccgattgtttcccccccccccttcccaaatgccagaattttctggaggatcctgatgctttgggaatatgttaatttcagggcacctgatgcgtatcatactgctattatatggtttccgaccaaatcctaaagaaaggaaggggctcaccattcccttaattaaggagaaattctggcatagacccgcccttaatgcccccccttaagaacgatccagcaccagatctggaatgtgaagccttatagaagataactggcctcactttcttccaaatatcccagtgttgggaaagaaaaaaggaaatggaatgggtaactctctttcttgatttaaagcttatgtaataaccccaatgcccatgtgaaatattttacctggacctttatttttgaaaacacccatctctgtaaaagacctggggtgggggtgggaggcccacgccccggtggtgaggcgccacgttgagaaaaatttgaaatttggaattatgaattttgaatgaaatttggataaattattggtaattttatgagcctgtgagaagggtgtttgttaggtttattataaagacctgttctttaaattgtgccaataccttatacgccaatttatggaaatgaaagtgttttaggagttgtctctttaaaattagttctccaaatggtgttacaccaaatagtatagtgaggcgtatagtggccaaaatagttcaccagaatctaactggtggacctaggctgttccattgtgactgttttttttcttatcttctatatgtttaaaagtatataattaaaatatttaattttttttta

SEQ ID NO: 652249 - DNA, 139 bp, Homo sapiens
tgtgttgggtagaagtgagggtataatgacttgtaggttgattgtagatatgggctgtatagtcagtcagtgtttaatctgagcaggttatgcggaggagactgtttcatgtaacttatactaagattagttctactat

SEQ ID NO: 652250 - DNA, 459 bp, Homo sapiens
ctgtggtttaggtatcagaataataatggcttcataaaatgagttgggtagagtaccttctacttctatcttgtgaaaaggtttgtgcagaactggaattaggtcttctttgaaggtctgatagaactctgcactaaacctgtctggtcctgggctttttttggctgggagactattaataactgctactatttctttaggggatatgggactgtttagaaggtcaacttgatcctgattcaactttggtacctggtatctgtccagaaatttgtccattcgtccatgttttcaagttttgttgagtatagccttttgtagaaggatctgatggtgctttggatttcttcaggatctgttgttatgtctcccttttcatttctgattttgttaattaggattttgtccctgtgccctctagtgagtctagctaagggtttatctatctcgtgtcgacgc

SEQ ID NO: 652251 - DNA, 318 bp, Homo sapiens
gtgcctagcggtcccggcgctgcgtgtcctatgcgtgcctttggcggcggctctggccgtctcgttggcggtcagcgcgcggcatcacagtgcttgttttctgggccagtcatcaggcgccggggcccgtggtgtcattgcgcattgcggcagcacagtggcacagtgcgctcacatcgggtggccgtgctcggctcgggcactggcccgtccattgccccctgcaggtcgggcatgtctcgtggcacaccagcaggccatccatcaggccacgcgtgcgtccgagggtcaccgcagcctcgacacattcgtcacatc

SEQ ID NO: 652252 - DNA, 149 bp, Homo sapiens
  misc_feature (29)..(29): n is a, c, g, or t
  misc_feature (64)..(64): n is a, c, g, or t
  misc_feature (123)..(123): n is a, c, g, or t
  misc_feature (139)..(139): n is a, c, g, or t
gggaagagaggatttagaggtggtcttcntgggcgactcctcggaagggttttatggaaagagntctaggagtgccgggcagctccggggtttgtttgcttaaagacagaggaatgatggtanttgtgtgatgatgggnaagagcccca

SEQ ID NO: 652253 - DNA, 731 bp, Homo sapiens
  misc_feature (507)..(507): n is a, c, g, or t
tacgcttaacagtgcatctctaccccaacagattaatggggattggagtgatataaggctgattgattgtacccttttgaccatcaggaccagtgcaagtcaagataaatgtgctctcataaacttcctcagctttttcaacacctagtagttccgtgttagtgggatttttaagccaggaggaaggccataagctggaggaaataaaaaaaacatcagccccagtatctactaggccttcaaacttttttccttgaatgtgtatggtgcaggtgggccatggtttagaaattatattaatctaataagcagccttttcaccactggagccaatcccagggtcacgtgtctcatctgctttgtttaaaatgatattaggtagtaaaagcaattaagcaactgcctcactggcccgaatggaaacaggaaccttggcacaggtgattaatttaatctcattactggaatcagaattaatgagaccagtatgaattgtgattcctttancagaggtagatgccctacctaaaaccaggcccaccaaaccttgaggtaaagggcgagtgacccctgtggggacaattaacggcaaagagttaggtagtaaacttagaagaatactactacagatatcaagcggccagcctctagcatggaggtgggcagcatgtactgggcaaagaagagtggaccatttggttggtgaagtgattgttggctgggttgctgca

SEQ ID NO: 652254 - DNA, 263 bp, Homo sapiens
  misc_feature (17)..(17): n is a, c, g, or t
  misc_feature (46)..(46): n is a, c, g, or t
  misc_feature (49)..(49): n is a, c, g, or t
  misc_feature (69)..(69): n is a, c, g, or t
  misc_feature (95)..(95): n is a, c, g, or t
  misc_feature (97)..(99): n is a, c, g, or t
  misc_feature (105)..(105): n is a, c, g, or t
  misc_feature (121)..(121): n is a, c, g, or t
  misc_feature (123)..(123): n is a, c, g, or t
  misc_feature (145)..(146): n is a, c, g, or t
  misc_feature (153)..(153): n is a, c, g, or t
  misc_feature (161)..(161): n is a, c, g, or t
  misc_feature (222)..(222): n is a, c, g, or t
  misc_feature (224)..(225): n is a, c, g, or t
  misc_feature (227)..(227): n is a, c, g, or t
  misc_feature (235)..(235): n is a, c, g, or t
  misc_feature (246)..(246): n is a, c, g, or t
aaacgcttaaagctggnccttgacattctgctttcagatgctgtcnttntattagtgagtgatgatggnttgctaataatcaataggtaataccntnnngtaatnccatcaagtggctccntntccttctgctctctcgtgactnngttaatntttaactnttgtaccttaaagccgaaatcagtaactatgcatactgtaaccaaggttttgggtttaaananntntttttttntataaagaacntttaactcttgttgaaa

SEQ ID NO: 652255 - DNA, 1511 bp, Homo sapiens
  misc_feature (403)..(403): n is a, c, g, or t
  misc_feature (427)..(427): n is a, c, g, or t
  misc_feature (746)..(746): n is a, c, g, or t
ggacaacgcaggatctgtcgggaagatcagaacgccagtcatggatgagccatgccgcgaccttatcgtccatagcaatagagcaagcatgcccatgactggtgccggcgccctggggccccgagagagccaagtgcagccggggatccctgatagcacatgcttttccatcctggtgacatctgctcctcggcatgagtcgcaggccactcatctgcacgtatcttcctggtaccaagcagcagtggctcgtgattgggacggaatcgtgacatggtcatcctcccaaatacactgcgatgtctggcagaaagccctgtgggcaattgaacgacattcacgcataagctctaccctagagtctcatagggtgtagggcaacgaattgactgtcacttggacnccaaccaccgacatgacgtcgaanttgacgaagaggcagacgtgaccacaatgtggtaagcccctgggcgccagaggagacgcacagtgccaggatagttgccacgcgagggatgatgggcaaacgatagaacaagaagcgaacctgatgctgtattggcagaccatggcatctctagacagactggctggaacccaacccctgtgagagtggtgagtacaccaggccaaacattgaacagagcggggggaggctgtgtctccagtgtgacgaacaaccgtgagagtacgacactttctcaaaatcagacgacctgagtgtgtgagtacacctattatgccancgtgggcaccagttgctcctcttggtgtacaggagctgtgcggaatttcccaccctatatttgtggcatctccaatggcctatattgggagagattgcaggcccaagggcccactgtcccattggggtcagtacgaattcacaaggcccgacacattggaaaccggctgtccacaccccggatgaatcggaagctcatccttgggaaaacgtgggaaaggaaacgcccgatactattccttgggggggcttcgtgtggttgttgtaaacccgacatggccatgggggatcctgcggtgggtcccccagggtatccccccactaattggttgaatggaagcccaaggggctaagacaagaggcgaagtccctatccagaccaatttcactttgggggccgaagttctcgcgcaaactagcgtatgccttagcaagtcttttttacagttagggctgtgcgccgttcttcaaagggaacctcccgccaaaggacgcctttcgaacacaccacagggtcataccacctagccctactatgagtgtaaaccttttagggtctcccccataaatgaaagagatgcgcgggtttgagaaaaagatcgccgttggagccttctgtttttgcaggggtataacgccccttgtgtggacactataaagcaaccaaataacgccttagggagtctgtgtgagatatcacacgagagcttaattatcccccatattgtggacacgccaaaaagcgggcccatgagtatgaggcgca

SEQ ID NO: 652256 - DNA, 148 bp, Homo sapiens
gaggtgctctagaggatctccgcctataatcctagcatttgggaggcaaggcgggccatcacctgagatggggagttcctgaccaacatggagaaactccatctccactgaaaatacaaaattagcagggcatggtggtgcatgcctg

SEQ ID NO: 652257 - DNA, 295 bp, Homo sapiens
  misc_feature (124)..(125): n is a, c, g, or t
cctccgtaacgaccataacgagccctccgtaacagcgcctccataacaccctccgtaacacgcctccgtaacacgcctccgtacaccctccgtaacacccaccaccaccaccactgacgggcgnnctcgttacccgtaacgagccccagtggtggtggtggtggtcatgctagctgataggggctcgttacggaggcgctcgttacggaggcgctgttacggaggcgctcgttacggaggcgctcgttacggagggtcttacaggaggcgctcgattacaggaggcgctcagtta

SEQ ID NO: 652258 - DNA, 154 bp, Homo sapiens
cacaaggtctactatcaaaactatttaaaattactgttagcaggactctattaccacctcagatgatctagtcatcttttaggttcttgaactcaattgtgatttatgttgtcaaagaaaattattgggcaggtctggatcagcggcgtgtgca

SEQ ID NO: 652259 - DNA, 1367 bp, Homo sapiens
ggagagaactagtctcgaggtatatctaggttattttttaaaaacgggtttcctgaaattaatattattttttaaaccataccacgaggaaggtgtaaaaaacctggtgtaataccccaataaaataagtttcccagaattccgggagggatgaagagggagatattcagaacccttacaccagattccccccaacttgatcatagtggataagggtgtgctattgtggcatgctggttagtcaatgacaccagtcttgacggatcttcctttctgcaccaaaccccatttgagtaatcgggctccccttgtgtgctgacagaaaaaccattaggcgatggagccacttggcatcaatccaagagtgaaattctatacacagcgattgaccacccgactcaggctcgaggcagctgccaacggcctttggtggcccctcaacaagatctcagcacaaaccatatcacaggtcgccgctatgacctttgccacagtgagcctgctagatataagaaaaatccactggaagacatctcaccacctacatactacctgtagcccttgtaagcctctcaatgcgccatacctgagaacctttctttagcactatgtggacacaataccgacgctccgtatgccatatcactccctatactgtccaacatcacgtatacattagaaacgccaacatcgtgagtccattatccaacacacatttcccagtgtgttgggccccatgcgcccagtgggtttgtgtaattgtgatataacggccactaacggttgcgggcgcaatatctgtgcgccccagagaacaacacacactcggcgcacttttgaacatggctgccttcccgccctttttgttgtgtcagcggggcgacaatatcccccacttctttgttgtggcgccaatctccctcagattcggatgcgctccccaagatgtgggcactgacgacccctcgaccggtgtatctattatgtggggcgcctttctcttgtcccagcaagactcttcaaatacagatcccctttttgaggtagctatcagattcttgatgttttggtgaatacacaccacagctcctctatccagggggcggtgaaaaaatcatcactactgtggcccgagaacattcaccaacttgttggtggtacatctaaggataatcctcatcatagtagaagtgcacccacttccccccgtcgccttgtttgtgtatatggtacacaaactattatgatgtaccctatgacacttaatgtatatggccatatagccccatctgctgaacaagacatatagacttccggacagatggttccccccacgtgtccgacggggcgatcaacacaataaacca

SEQ ID NO: 652260 - DNA, 521 bp, Homo sapiens
tatccctatgttatcccaacaccaacagcataggaggagatagttatgccctccagtgctaattataaatggtagtttccacttccttcttacaaggactagccaccgcaccatgtctcgatttaaggcagcaaagggcagggctggctcaggactaagttgtctcctaaaccctttttgagagtatatcaatgacatatgtcctagtttgttccccatcaggaattctaattgctggtatccaacagcattagcaatatcagtgtgtaaaggaaaaacaactggtgatgagggatgggagggagtacagcatctgggcaggaggagcattagaggagctggagccacggatgaaagaaacaagatttgcagaattgacagctccatagtagtaaatgtggagctcagtcttgagggagttaactctcatgaaggagaagtgcaggctgtagtcccagtgacagtgactagcatccactgccatcccactcaggatgagggtaatgtgttgggcgataaca

SEQ ID NO: 652261 - DNA, 1149 bp, Homo sapiens
ggatcgcaatggacagctggaccagagtggcggtgtcgaaaggagatgtagccccgaggtaaagtattaggcaagggtggtgtgagccgcgcgaactccgcagtgcataagccagcgatacccgcgcagtcgtgcagtgtcacgtcgactcatcagcagccgtgtacaacgtacgcacaaactggcaggccgggtttggactcgccactagtgcacaacataccatgatagcgtggtctggtgcaatagcatacaggaagtcattgatcatcgcgaacgggtctcatcccggtgtgtactccctgtcttgagttctcgagtctctcgttgaaacgacagagacaggggtcgtgagcaatagcagtcagtcgcataatgaagatcaaacaactactgcgattggctgcagtgtgaatccgcaatcagttgatgtcaatcgactgaggtcctcggactcaatgatccgcgatcgtcgcagccgtggcttatataaaaggatgcttccactcgaataacatgtcaccttccggaggcaactccgcacagtgaaagataccacttccaccaattgctgagcgaatcaaagcgaagactccttgagttgcgtggtgagttgaacgccggtgagggtgcgtggactcatttcgtaccgcaggatcgaaaatgtcagtcagcagtacttttaatacacgcgaaatggtcggtgtcttgcataacgtggttgccaaggcacgcgcacacagaatgatcttccgcatggattgcatcgccgtcgggcacacccgagggacaaagtgcggcccaatgtacacataaaaccgaatgctcgcccgtgtaaatttactgtagtccacatcccgaagtcctgtcaaacggaagtgcgacccgggctacccaagaacatacagcacatatggcactgcaatgccatgaatgaagggatcattgtaggacgctcgaagcaagacgagaaattctaataaaacatttttatgggcaaaagtcaaacccaaaaaaagaaggctatgacgggtaactcgaactttccgcaatgggaccaggtggaacccgctacttcagacccaagggacgggccccccgggataggtcacattgaacagggttttggggtccaccttacaagggaag

SEQ ID NO: 652262 - DNA, 138 bp, Homo sapiens
ctaaggatccgaatgacgacatgaggttttcgtgtgatgaggtatatgttgtcatgtggtggtgagtgagcccattgtgttgtggtaatatgtaagggagtataggctgtgactagtatgttgagtctgtaagtagga

SEQ ID NO: 652263 - DNA, 1035 bp, Homo sapiens
agctcttgcccttatatgactttaatgtctgtgagtcattcccagcttaaattaacaatgttagtattagtctcacacataagtgccatacattttatcctcatggatgtgatgcactgaaaagttagttgctctctttttttttttttttggtcgggcttatttaattcctgtgagttccgggtaagctaccctaaagtgatttaaaacatttagaatgcttggtgttccctattgggtaatctctcatggacttttctttaagttaaatgagtataaatagtgcatattctgtagactatagggttaacatggtgtggcttcttatacactggtatagatggagctgatgtgaaataagatttggtcccaagtattatctgatagaatacaagatgatccaaaattatatagatatttaaacgctttcactggcttgtcttttttttttaaatggcaacgggctatacggcgggggcctcttttccctacccaaaagtgattggtgttctggaccaagacaggctttgtcatttctgtacagcgttgggttttgtgattccataagatccgggtgggttacgccatcctaagttcttaccaatattgctagaagtaactctaaattcaacgcttcttaaagtgctattattcgttctggcgtgggagaaaccacaaacaacttccgatttgaacggccgttaataatttgaaaatgccccgcgattaccaacggggtggacacgttttttcaccgcgtttaaaatttatacggggggtgtgaacaccggcaccccgtaatatttaacagaggatagagagatagcttgggacattatcacggtggggtttggtaccgacaaatgtctcagcgatagacagttccttatataaaataaagttgacacctattatattgatgaccattgctaatttagatgcgacaggggcactatctggtcaagatcaaaaaagagtaaattggagaatgatcagttgcaccatatccagaataggtctgatacacgattcaga

SEQ ID NO: 652264 - DNA, 604 bp, Homo sapiens
tctgctctccagtcccacaggggctgctgtcagtcaccctacggcctctctgcctaggctttgaaactgattcattgttcttttgctgtatttttctttgtaggtttcagaattctctgtttatttatgataatttgggaaggatcctgggagagtgaaaataaatgaagtgcgcaatctgccaagtttcactggaggctccactgatccttccaccatgctcaaatgcctgcaggaaatctggggaatcatctttcctaccctaagaccctgggacttagcactggccctgaggcccctgacaggcataaactaatcagcaaatgtgcaggaaaaatgcggagctgcaagatcaaagtcagattcccactctccctaaaggcctggattcccctggaaacccacatcctcactgcctggaaggagcgatgaggacccaggggagtggctctgggcatcaacaggtccaggcaggaggcggttccccatgtcccatctttccagcaccgaagggagcctctcaggggagtcttatcaccccccgccccaccatcacagagcagcctgctcctggcctgtatccaaacacccctgggggcggccg

SEQ ID NO: 652265 - DNA, 950 bp, Homo sapiens
gtttctgcttcaagagtgcttggacggaacccggcgtctcgttccccaccccggccggacgcccatagaccagccggctccgtgcacctcttcaccgaaccctcggactgtcccaaggcccccgccggcgggtccagcgaccgacgcatccaccgcgcgccgcacgacgctcgtctccttagtctgccagcctatgacggacctgcgatccaccctctgccagtgtgcagcctagaaacataaccgacccacgtgactcaagagagctctgcctatcaagcccgcacagaatcaaagccgtaggagcctcttcaccgccctccttcacgttgactctagtccatgtcttcactgacctttgaccggcgcatgatgtgggtctatggaaaggaacttttgaccaaatgagttttcttctaacaatctcatcgagcgagagggacacatgctgagaaagctgatgaagctgcagagaccaaacgaggtggtccgaaatcttccttcagtgatatcagatgaaaccctaggaacgtgtgatgactggcgagagcgggctgaattgcgctggactgtgcacttacatttggaatgctgcattgtgactcagtcactactggaggctgctcaaaactggccactgatccaggatgacccccatttgtgtgacttcattgagaacacattacctgaatagacgcaggttgaaaagccatcagagaatttgtgtgaccatggtgacccatgtttgcgcaaagatgggagcgccccgaaatctggcttgggggaaatatccttcttttgatcgaagcccaccctggggacaggtccataattgaaggctaaacctctggggtaatttcccataagccggggggtgacttccctggtcccccaaggccgtgcatgcctttgcgggttcctttaacctttctttagttgtcccaattccc

SEQ ID NO: 652266 - DNA, 1354 bp, Homo sapiens
  misc_feature (95)..(95): n is a, c, g, or t
tgggccttcataaaaactttttttaattttttaaaaaaggcggttttttacattagaaaaatttaaaatttaaatttaaacttgtgtggtacaanattattataaaatatacttattctttaaccacccagtgtggagatgtgttaacgggattcaccaaaaaaaacaaaaaaagaaaaaaaaacaaaaaaaaaagaggagaggaggcggcgccgcacacaatagagatctctctccgcgcggagggggcgccacacacagaacatgcgcgcgcgcgcacaccacacggtgttcagtgtgtgagaacacacacgaggggcgcgcaccccatatatataggaggcgagcgcgcaatatatatataacagcacagggagcgcgagcgtggcgagcgcgcggcgataaaaaaacacagagaaggagagagaagaagagggagacaaacacacagagccttactacgagcggcgagagaaacattctcgtgtgtgaggaagagagaagacacaccctctatactctaggggggggggggggggggagacacacacaaaagggtgggggacacacacacaccacactctctccacagcgcacatatatatataaagagaagaccctctcacagaggaggggcacaaactatatatagaagaacatattcgacgcacgcagcagagtgtatatagaagagggtgtgtggcgacacacaacacagcagagacgcagcaacactactcatagtcggagacgggaggcgccgagcacgacgaagacaaaagactactggggacccaaacaacagagagcgaagcagtatcatctgcgcagactattcgacgaagacgcaaacaccatactcattatcatcatcactacccaacccggacgagggaggaggactacatatcatttgtattatcatccaataacatacaaccacctcgacgaaccagcaccagacgaacaacacagaacacacgacacgacaccacagcaacacacagaactaagcacacgagtcacacggagacgacagaagaaagaccgacggaagaaaacgaaaaacaaagacgtagaaacacaccaagcgccagcaagaagacagacccagtgacgaaaacaaacacaaccggccgagacgacaggcacaaccaaagagaaagaagagaccacgcaagtgaaaaaagaaagaaaggcaaggagagagagacggacgacgagaaaagggagaagagccagcagaggcgacgacgacaccacagcaaacccagaagcaaggcaagaaatagacatcaagaaagaaagaaacaaatacgcacaccgaagacaacgaagacgagacgaccacaca

SEQ ID NO: 652267 - DNA, 656 bp, Homo sapiens
gcctggactctactagataactggagtgtgtgtgttaatccagaaatgcatatgtgaacattaaagatgtgccagaggacgatctactcattttaatggaagccagatagtcagcctctatacacttggagagtgactatgagatccttgacaagatttcctgtgtgcctatcttaaagtgcaacgaacgtacaggccccatgtatgactatttcctgaagtgtaaacgagaatggcgctttcactgtgcttgttagacaactatgtgaaggaagacagaaggcacaggggtgtccaccaagctccttacttcggtgctgaggactatcgggtctgtatggactttacacattattcggacaagactcactcccatggtatctgccctgtggaatgcttcaggctgcttcactaacggaggtgacagatttcgcaggacagtcctgtgaccggatgcttgagcacacagtatcatcaaggcactttgacaggacaccacaggccagacgttctgagtatgccacacgcattcactcacacgctacccgtttttgcctgcgagatcaagaaacaccctctaaatttaccaaaagcgcacgttggcccaagacctggattacgtcgcgaacgtggcagacacaattgcgtgggaacca

SEQ ID NO: 652268 - DNA, 531 bp, Homo sapiens
  misc_feature (456)..(456): n is a, c, g, or t
  misc_feature (493)..(493): n is a, c, g, or t
  misc_feature (524)..(524): n is a, c, g, or t
tagtagagatgagatttcaccatgttggccaggctggtcttcaacttctgatcttagctgatccacctgcctcagcctcccaaagtgctgggattatacgcctgagccaccgcacccagcctcaaatcataaacttttttttgttttttgagacgaagtctcactctgttgcccaggctggagtgaagtgacacaatcttggctcactgcaagctccgcctcccaggttcaagcgattctcctgcctcagcctccccagtagctgggattacaggtgtgcgccactgcgcctggctaattttttgtatttccagtagagatggggtttcaccatgttggccaggctggtcttgaattcctgacctcaggtcatccacccacctcggcctcccaaagtgctgggattacagacatgagccactgtgctcagcctcaaatcataaactttttaaaggnttatccctgaccctctaaattaggttatgtgccttgntatatgctcttttagcacttatcctaattgngattggg

SEQ ID NO: 652269 - DNA, 272 bp, Homo sapiens
agttacaacagctgaattttatttttgttattcttattttttttttttagaaacagagttttgctctgggcacccaggatggattacaatggcatgatctgggctcactgcaacctccgcttcccgggttcaagcgattctcccgcctgggcctcccgagtagctgagaccacaggttgccgacaccacccctggttaacctttagtatctccagcagagacaggttttctccatgtggagcaggctgggctaaaactcctgacctaaggag

SEQ ID NO: 652270 - DNA, 405 bp, Homo sapiens
  misc_feature (405)..(405): n is a, c, g, or t
ggagtttcgatgcttgcgaggtttgcaatgatcgccagagctcgagatcactacacatggatgcacagaatcaacataggaagtggcagatcgttagttgtgatccatcagcattattagggtagacgccatagattagactatgagatagagattgagcctactgtgattctgtgcttagagcagatcaagtgcctaccaggcgacattgaatacacagatcggccttcgagtggaatagacctgctcattggacagcactaagacgggagacctttgatgggactcatgacagcatacctgttaatgtgaataataactatgagcgcagactcatcaatgcacctgcgacatgcaggactgccaagtaatgccagtggcctcatttggagcagatgaaccgtn

SEQ ID NO: 652271 - DNA, 786 bp, Homo sapiens
agacatgagaaggacgacatgcggagcctgaacgaccagctggatctcttacctggacacgtgtgaggagcctggatgaccgaaaatcggagggtggagagcagaatccgggagtcacttggagaagaagggaccccaggtcagagactggagccattactttcacacaatcatcgatgcgaccgtgagggtttcagaattcgttcgtcgagagaatatcgtagtgggatcaactgtcccgtccgtcgcttactgcagcacttgacgaactgtcaccgtcgttgtcgtggctgcatgtacattctcagcagatcaagtactgaggaacagaggcatggaccattggcgacctaggtctgtgagagaacgagcgatccatggggctcccgtccataggatccattcgcactgactaccaaactagtccatcacgcaccttgccacgcgtgggagaactagtagaatccgtaggctcgtcgaaggagcgagctgctcttcgatgaagcaagaaccacgcaagaggaagtaaacaggcctacgaagcaccaagattgctcgagctcttgggtgtttgatctgtggcaggtatgattgcgccccgaaatactcgaggtacctgcgccagagatcatgggagacatccgggtcccaatatgacgagctggttcggaagaaccgagaggagctagactaagtactggtctcatgcagattgatggatgagcaccatagtggtcaccacacagtctgctgaggttggagctgtgaaagaagctcacagagtga

SEQ ID NO: 652272 - DNA, 390 bp, Homo sapiens
  misc_feature (11)..(11): n is a, c, g, or t
  misc_feature (14)..(14): n is a, c, g, or t
  misc_feature (314)..(314): n is a, c, g, or t
  misc_feature (385)..(385): n is a, c, g, or t
gagacggagcngcntctgtcgcccaggttggagtgtagtggcacagtcttggttcactgcaaactccgcctcctgggctcaaacgattcttctgccttagcctcccaaattgctgggattacagttgtgcaccatcacacctggctaatttttgtatttttagtagagatgggttttactatgttggccaggctgatctcgaactcctgacctcaagtgatccgtctgccttggcctcccaacattttggaacttttaaattctaacatttatctggaagaattaaatgagaatgacttttaaatttttgaagnaggaatacatccagggagaaacttgttctacttgaatatttttttttactaaaaaattatttaattttttnctttt

SEQ ID NO: 652273 - DNA, 380 bp, Homo sapiens
taaagaacggttaagggctacaaaaatacaattagatagaaggaataagatctagtgtttggtagcacaataggacaaccacagttaaaaataatttattgtgtatttcaaaatcactaaagagtagaactggaatgttcccaacacaaagaaatgataaatgcttgaagtgatggatatcccaataactctatttgatcattatacattgcatgtctgcatcaaaatatcacatgtaccccatatatatgtgcaactattatatatccacaataatgaagttttatttgtgctttttaagttttagtttttgagaaggagtttcactcttgtcgcccaggcttgagtgcaatggtgtcatctcagctcactgcaatctc

SEQ ID NO: 652274 - DNA, 528 bp, Homo sapiens
  misc_feature (251)..(251): n is a, c, g, or t
cgactctaggatcccaagctctggaaaggggggtctctccacatacctcagtctcacgtttccttccagcagggagtgccactccataagatctccacatttggacagtcaaggtgcgtaattgttaagtgaaacacaaacatggacccttagacatggatttgcataactacacacagctcaacctatttgaataaaatcctactctcagaccccttttggagtacagcaggggtgctgatcaccaaggncctttttcctggcctggtatgcgtgtgattatgtttgtcccggttcctgtgtattagacatggaagcctcccctgccacactccacccccaatcttcctttcccttccggcagggagtgccctctccataagacgcttacgtttggacaatcaaggtgcacagttgtaagtgaccacaggcatacaccttggacattaatgtgcataaccactttgcccattccatctgaataaggtcctactctcagagcccttttgcagtacagcaggggtgctg

SEQ ID NO: 652275 - DNA, 509 bp, Homo sapiens
  misc_feature (111)..(111): n is a, c, g, or t
ggtccatacatgtctgatgacacagctgtctccacaaaagagctttcaagtgtaagggtaggaaatttgggtttagattatttttttaagcaaatcaaattctttgatctntgctgcagaaaatatgatatttccaatcactggcacttagtagttcatgctccttcataggggaaagagttaacaaatgttaggtttctaacttttttttttcaggggttttctcaagctttataagagtcctgagatgtagattttttatccggcccttacaggtgaggaaaattaagtatctggtccaaagttcacagctggtataaagcacggatggatggatagatggatttggaggcagggtctcacttggtggccaggctggagtgcaggggtgcgatcacagctcactgcagcctggatctcctgggcttaagcaattttcccacctcaggcccctgagtagctgggactacaggtgcacaccaccatgccgggctacttttctccttttt

SEQ ID NO: 652276 - DNA, 206 bp, Homo sapiens
tccggtcccgttggctctcatggggttggaaccaggccgtcgcgtgcgatccttcttggatttctgtgatcctgtcgcggggttgcgggagtgagcgatactaaatgacttatctggctttctccgaattaatccgtgtatatctgctccgctaactccgtttttttttttttttttttttttttttttttttttttttttttttt

SEQ ID NO: 652277 - DNA, 447 bp, Homo sapiens
ccaggctctctacctccagaaggtttaactcaaacagcacatgcacataccttccggcctatgatccaccaactggagaagcttacgagggcaacacaaaacactatctggctaccaaatatgacccttactacacttcagaattggttggcccacagtgacatagaagggggagtagggacagtgctgggaagggggcgggtcccgtggtgagggctccaccccgcagccggtgcccacgggatctaggtgaggacaggcattttggtttgccggcccaaattgttgcatttcccccagaccagcctggcctgctacgcccggatcctgggccggtaaaaacctccgagaccctagcagacaggcacacaattgggcgggacgtcaagaggcacgcatgggcaaaagacacacgcagtgggccggcgagcggacagcaagggaagc

SEQ ID NO: 652278 - DNA, 335 bp, Homo sapiens
  misc_feature (27)..(27): n is a, c, g, or t
  misc_feature (29)..(29): n is a, c, g, or t
  misc_feature (118)..(118): n is a, c, g, or t
  misc_feature (260)..(260): n is a, c, g, or t
cacagagccaagggagtgttgactttntncttttttcattgtaagtgtcttttattttggctggatgtggtggctcacacctgtaaccccagcactttaggaggccaaggcgagtggntcacctgaggccagtagttcgagaccagcctggccaacgtggtgaaaccccatctctactaaaaatacaaaaattagccagatgtggtggcgggtgcctatagtcccagctactcaggaggctgaggcaggagaatggcatnaacccaggaggtggagcttgtagtgagctgagatcgcgccactgcactccagccctggggcgacagagcgagact

SEQ ID NO: 652279 - DNA, 379 bp, Homo sapiens
tatacaagaaccatatcaggaacgacatgaagtagctatcacagagcagctactacaacacgaagctaaagaggattcagcgtgaagaccacaaggagatagacatcactaaaatcccagtcaagcagatgtgagaccatgagagagacgcacatgcagaaacagccggagagggacaaatcagtcttgacacctcttcggggagatgtagcctcttgcaataaccaagtggcagagaaaccagcgcacacagctgtgccaggaatcacacggcacctgaccaagcggcttcccacaaagtcatcccagaaggtggaggtagaaacctcagggattggagactcattattgaatgtgaaatgtgcagcacagaccttga

SEQ ID NO: 652280 - DNA, 1289 bp, Homo sapiens
caagatcttatataaaacacagaaagtttgatgaagtggtctcccatttgctaaggcagctaagtacatcttgcattgaacaggattcgtacctaatatcacacagtatgacagagttctatctttgggcgctcaagtgcttgattattaggttatctgtggcgactggatagtcttcatgctctctttatgttgatcatcaagatctcatttccaagccttcataacaaggtgttacgtcaaagaagtgacagaaaccacagccatcgtcctgaccttgtagctctatctgtcagctattggcacttttagatagcatttatatctgcgtgattcaagacctgatcccatggacatagttactgtactactggtctctgtctgccaactgcacaaatactggctaatgcaggtctctaacgacgacactttcacacgattactatcacggaccctatgctacgctactcagctgcattgacccctatccgtactgacgccagtcacacgtcatgggtaccctgtataagcctatataccactggcgaaaatttgcaagtatatacgtcactacagatctcgacaaatactaaccggctaatactgctataccgcctgcgcaccattacttgccatttggacaagaattggagccatatatcctacaaacatcgagcctagatgcgaccatcagaacgacaacaagcactgcacacatccactgaacgattcgagacctataccctaccgtacgtctactgcacttcccatgagacaaagataggtacccacacacatcggcacttgccccgaggatcggctacagcggatcagaacaccaggcccacgcaacaactcctcctacctcaggatcgacatagggagatgcagcgagaatcagactctcagacaacccaacactggtaaacaccccggcgaagcgataggacaaaccacatcataccatacatggcaacacagagacacaacgaaaacaccaaacaacataaaaagaggacaaggaaccaactacaagggcaaaaaacaacaaagaaataaaaaagagaatgctgtaggcacaaccaaagggcaccatcaataaacgcaaaaacaacaagaggaacaaaaggaaacacgaaaaaaaaaaaaaaaaacacacaaaagaaaagagcaagcgacaaagacaacccagaagcaaaacaacaacaaacaaaacaaaccacaaacacacactacagacaaaacaaccgacgaaagagaacaacagcaacagaccacacaagaagaat

SEQ ID NO: 652281 - DNA, 233 bp, Homo sapiens
  misc_feature (125)..(125): n is a, c, g, or t
tgaatgtcgggcggagacgcgtatgatgggcagtgaggcggcgcaatgatctaggctatatattcggagtatacgtagcggtaagtaaaaacggtactctagaactatagtagcatgcgcaattnaagagcgctgatatcgatcgcgcgcagatctgtcatgatgatcattgcaattggatccatatatagggcctggtttataataacctcaggtcgacgtcccatggccat

SEQ ID NO: 652282 - DNA, 568 bp, Homo sapiens
  misc_feature (41)..(41): n is a, c, g, or t
  misc_feature (174)..(174): n is a, c, g, or t
  misc_feature (291)..(291): n is a, c, g, or t
  misc_feature (293)..(293): n is a, c, g, or t
  misc_feature (299)..(299): n is a, c, g, or t
  misc_feature (323)..(323): n is a, c, g, or t
  misc_feature (333)..(333): n is a, c, g, or t
  misc_feature (354)..(354): n is a, c, g, or t
  misc_feature (432)..(432): n is a, c, g, or t
  misc_feature (443)..(443): n is a, c, g, or t
  misc_feature (448)..(448): n is a, c, g, or t
aatgaattaattccctgagagtgatagctactcctagaaanccagatgaatcctggagtagtcccgaacgtcaatgcacctccgttcctagtcttgcaaagaagatctctagcttgtcctagcagctacctcctctactcagcctgaggctggcaggtaaatccagtgaccaanacctccggccactcaactggctggacacctagggggagacagcaagggtggtcccaggacacagctccacttccccagtggcgcgcgaggctgcgatcgcatgcttctgcatcggcncngagganatctcgtcatcactcatcacctgnactggtggtnaccactgagtgccagctccanagggtactggacctgcacccgcagccggcactcctcctccatgttgatcgtgtgctccttttgttgcagcacctgctnacgcactggtngtggntataacagggtgagtactgggccaaccctccccatcctcctcctgaggctccccatgagcttacctttgggttcatcaaaggctgatgcagagcagagcccgcaagcagagggcagtgat

SEQ ID NO: 652283 - DNA, 892 bp, Homo sapiens
gggcaccggtgccgccccgtgttctcccacggggccctggtttcgagtctctgtcacagcctcttccggcggcagcgtgcaccgggcgggcctccgtgcacactcagcacacgccatgcctactacagcagtgcgcttgcagtgtcactctggctacagaaacctgtctgcctctgtggatcctacagcctgtgcagcagccgagccgtcacctgatttttcacgtgtttctacctgtgtgctggagctcatgagtattgttataaactccatttaggtagcttcacgtgaagacattgcacggcattgtttgtaagacaactatgaacaacttgtttcttctagctatcattgtcttcctgtttacgacgtcacacaggactactttacgttctactacggacctgttccattttgttaactcttatgacatctgcaggctgtattggcgcgcttatgacgttaaattgtccatcaggcctctctcgcagcaggtaataccctctccttccgttgggtcccctgggcgagtgtgtagaactcaatgggcctagcctccaaaacactttttactgcatatacttaatccttttaccagtcccctcttatttgttataaacgtctggcagtttgatgttctggtttcggcataactgtaatccattttcacttgtagcctaaattcccagtccgaggttcggatattgttcaaagtgagccagggcccgagcttggaagcgcaaggcatccgtcgcctgtgccagtcctccctttgccctcaggccaggtccttggtggaaagcggtgcatcttcctgtcaggcctggttcccctgggtgaactggcgtcacgcaaggcacccgaagttttggcgtgactcctggcgaacgag

SEQ ID NO: 652284 - DNA, 424 bp, Homo sapiens
  misc_feature (57)..(57): n is a, c, g, or t
  misc_feature (65)..(65): n is a, c, g, or t
  misc_feature (70)..(70): n is a, c, g, or t
  misc_feature (96)..(96): n is a, c, g, or t
  misc_feature (161)..(161): n is a, c, g, or t
  misc_feature (207)..(207): n is a, c, g, or t
  misc_feature (212)..(212): n is a, c, g, or t
gagctaatgaaactttcaagaatggtgaagcagatgcttgggatacggtcacagtcngtaatatngccanattcttgaccgatttagggtcagaanaagtctttgtcaatgattatggggatattattgagaatccagaccgtgagcaacaggtcaaaaanaagtctaaaatcacggtttactttgacaacttacggaaaattaacnaggancaattttctaaatttagagatatggctgatctcaacttcagatcatctgattttgcctctgaagaaacaaaagggaatgtcttctcaagcatgatgtcaggcattaacctcttcttgcaagataatattgccaagctcacctctaaaaattccattgacttagagtcagtcgacgcggccgcgaatttagtagtagtagtaggcggccgctc

SEQ ID NO: 652285 - DNA, 179 bp, Homo sapiens
tgctcattgtgggacagatctcatgcagtctgggacccacggtgacggtcgactgttcagctcgttggcttggtgttgggcaccagctgacgggccagcagctagcagcggtgctgaggttagtcgaggtcccctgaactcgacggccatcaatcccgggcctgtcgggctagtcgggg

SEQ ID NO: 652286 - DNA, 114 bp, Homo sapiens
gcgacgtcagagagaagcaacttcgccccggtgagagagctcgcccatcaccggctggagccagctttcagtaaggatggcaggcagaactgttgcttgattccaccatctgcc

SEQ ID NO: 652287 - DNA, 241 bp, Homo sapiens
tgcctggctgaacacttccacaccttgttcacaccgagccctgcatcgacgccctcaaacaaaccctggtgcaacttgctgttatgggaaaattggtgccgcaagatcccaacgatgaaccggctagtgaactgctcaagcgcattgccgaggaaaagtcacggttggtggcgaaaggcaagctcacgactgcagaactcattgccagacgtcgttttttgaggaaaaaccgtatgctttg

SEQ ID NO: 652288 - DNA, 163 bp, Homo sapiens
acctagaggatcccctcacggtagattgtgagtactatcttttttgagggaaagtatgtagctgtcatcatattctccaagaaggtctacgggttgggcaggtgcggtggctcacgcctgtatcccaggcactttgggaggccgaggcgggcggatcacgatg

SEQ ID NO: 652289 - DNA, 952 bp, Homo sapiens
  misc_feature (442)..(443): n is a, c, g, or t
acccccgtctgctctaggagtgcacctccccccacccccatcactgcaggtaccagggtgcccagtggaaagggacctgctgtggaaagggacctgctgtggaaagggacctgcggcttcacacctgtgcgcagcaactgctttccatgcccaccaagcataagatagcagcccccccaggcccggtccacccttgaagggccacatggcctatcagggtccagatcatcacaccacggaagaggcagggcagtgctgggatctcttgagttatagatgcggacatggggaactcaggacctgccgtgacctgctcagggtctcagagcccctggtggctgctagaccgaaggggagaggccacctctggtcagcaggcagctggttccagcctaggctggggcagagatctgccacctggcaggatgcccagcctcctgtnnccagcgggctgtcctaagactgggatcgtacgatggtgagtatgggacccacgtgtacttttcaaaacccgtagaaaatacagcacaagagtgaatcctgatggaggcttgagacatttgtaataataacggatcaatattggttctttgactgtcacacgcctacaccctaatgagagaaggtaatcataagagaaactgggtcagggagaggggtgtgcgggacctctaccatctgctggtgttctgtaagctaaaacattaagtctgctatttaaaccaaacaaactagaaaatcaaaaacaaggggggcgacaaagattcctgagggccaattaaaggacgcagtgttgggacaagggcccaaaaggggcgcataaacgcagacgggcgcggtaacacgccggacggacacggcacgggcctggaggcgccacagggggacacatggaaaacacagagaagcaggaaaaacacggcgggaacacgacaggaaaacacactagagc

SEQ ID NO: 652290 - DNA, 862 bp, Homo sapiens
  misc_feature (850)..(850): n is a, c, g, or t
gataagttcaaatccaggggggcctttatggggcttcgacgcagatgggaattcgggattcgggagcgaatgtcactgccaatcctattgggacattcaatgtcgggaaccactcgcgcaaagccgttttgttttggtggttggaacggcgtacagtcgtccagcatcgagttctctgattcgacacccgtatcggtcctatgcatgctggctgtcatcgagtcaccacgcttttgtgccacgccatgctgctggctcggagccctggagtctgttcggatcctgaagagcgcctgtagggacggctgcttcagccgccagcaaccagcgcaacggtcaccactcatgagacagagtgcctatactggatttccggcctcccttggttgtccacatgcccgcagccacatcatccctgtgcgggttgcagatgctgctaaaaacaacagaagtctgtgatcgaactaatgacgcagacaggagacatctagcggtgcaagcaatcaatgtgagcccttaccggctcgcccccggggagaagaggcctcctacggagtgtgcccccacccctgcaccacacacaccccagatgatgaactactgtgccgggttgaggaatctgctagtcacatggaagcatagtggggctggaactgagagccgctcattcctcagctgagtgcaacgttctgcaggaggccactgcattttgaagtgatgagtgaaagagagaagtcctatgctctcaggcttgagcaagttggtatctgctcacgcctgagcatgacctcaattatgtcacttaaccccaggccattatcatatccagatggtcttatacgttctcggnatattagataga

SEQ ID NO: 652291 - DNA, 165 bp, Homo sapiens
cacaatagattctataataccaaagaggagggaacacttctgtgctaggggtcccccaaaccattcccaggcttgatgattcactatgaggactcagaatgcagcagacagtcacattcatggtgagagcacacagaacaaaatcttcaaaggcaaaaggcacat

SEQ ID NO: 652292 - DNA, 1167 bp, Homo sapiens
  misc_feature (1)..(1): n is a, c, g, or t
  misc_feature (51)..(51): n is a, c, g, or t
  misc_feature (60)..(60): n is a, c, g, or t
nacatggagtctcgctctgttgcccaggctgagtggaatggcgccaactcngctcactgnaaccttcacctcccaggctcaagcgactctcctgcctcagcctcctgagcagctgggattacaggtgcccaccaccacgcccagctaatttttgtatttttagtagagacggggtttcaccatgttggccaggctggtctcgaacacctgaccttgtgatccacccgcctcggcctcccaataatttgtaagttatgttagcgggatcctcaaggccttgctttgccccgtggagacgcttgctcggatgagctcaggaaacagtaccggctgcgtggcaggtctgggtgttgtgtgcgaggacgtggcctttgaacaccgctgtgttctcagaggtccttaggagatatttttttttgtcttagggggactgtgttaagttcagacaaatcatgctgggtgtgtagagagtgtgaaatacgtcagtgaagtaagtagcagtgagcgattgtgaatgtgtaatgtaaatggaaaaccgggttttaccgtgttaagttattcactagggagccagtcgtagttctttgtaatcctctttcttccaaacctgctttgctgaaagttgcagaaaaggaagtgtgtggagagaaacagaacccttcagggtgggtcagaggacgccatccacagtggattcgtgttcgtttgcaggtggaagcagtgatttttaggacccactgattaaaaacaaacattcccaagtgtctctgagagatgctgtttatttgttaattaaaaagcttttttctctgtcttttaaattatggctttcatgtaataaggatatttttagtgaaaaattgttttcctttcaaattacagaccttttaaaaaaacttaatttgagcgagtaccttttcatttgacacttttcctgtttctaaccttaggaaaccagaatagcgtttggcagacacgacgttttcagtttacctttgacacctgccccactccattttgctttgtgatgtcttcatttaacaataaattatctgaaaaaacaaaaaaagggggggctaaataccgggggccagttcgtccgtttgtaagggcccaagggggtaaaagaggggggtaaaggggagaagggcttggacccccggggag

SEQ ID NO: 652293 - DNA, 1060 bp, Homo sapiens
  misc_feature (1)..(1): n is a, c, g, or t
  misc_feature (51)..(51): n is a, c, g, or t
  misc_feature (60)..(60): n is a, c, g, or t
nacatggagtctcgctctgttgcccaggctgagtggaatggcgccaactcngctcactgnaaccttcacctcccaggctcaagcgactctcctgcctcagcctcctgagcagctgggattacaggtgcccaccaccacgcccagctaatttttgtatttttagtagagacggggtttcaccatgttggccaggctggtctcgaacacctgaccttgtgatccacccgcctcggcctcccaataatttgtaagttatgttagcgggatcctcaaggccttgctttgccccgtggagacgcttgctcggatgagctcaggaaacagtaccggctgcgtggcaggtctgggtgttgtgtgcgaggacgtggcctttgaacaccgctgtgttctcagaggtccttaggagatatttttttttgtcttagggggactgtgttaagttcagacaaatcatgctgggtgtgtagagagtgtgaaatacgtcagtgaagtaagtagcagtgagcgattgtgaatgtgtaatgtaaatggaaaaccgggttttaccgtgttaagttattcactagggagccagtcgtagttctttgtaatcctctttcttccaaacctgctttgctgaaagttgcagaaaaggaagtgtgtggagagaaacagaacccttcagggtgggtcagaggacgccatccacagtggattcgtgttcgtttgcaggtggaagcagtgatttttaggacccactgattaaaaacaaacattcccaagtgtctctgagagatgctgtttatttgttaattaaaaagcttttttctctgtcttttaaattatggctttcatgtaataaggatatttttagtgaaaaattgttttcctttcaaattacagaccttttaaaaaaacttaatttgagcgagtaccttttcatttgacacttttcctgtttctaaccttaggaaaccagaatagcgtttggcagacacgacgttttcagtttacctttgacacctgccccactccattttgctttgtgatgtcttcatttaacaataaattatctgaaaaa

SEQ ID NO: 652294 - DNA, 1377 bp, Homo sapiens
  misc_feature (380)..(380): n is a, c, g, or t
  misc_feature (724)..(724): n is a, c, g, or t
ggtgacgcgtagcgcgtggggttatctcgaggttgcgggcaggtgcccgtcgcggcccatcccgatgtgctggaggcgtctgaggggcggacggaggcggcggcggggcggggtagcgggagtcgggtcggcgtagtgggagaggcgggtgccgggatgtggatgccaggcttgcacgtaggcggtggacatggatgcgagtcctctgcgctggtcgtcgcgactctggccgtggcgtccgtggagcgcgcgagcgcggtcccgatgacgcggacgcacactgccggagtcggtgggtcgaggacggcgtgtgttgtggtcgcatcgtgtgcctgcggacggaggtgtgctgccttgaggacataaattatactagatantatcttgggaagaccaagagccaagagaagccacttcatgcaattctacagaatcatctatcatgttcttagaatcggtaggctagtatgagatcatagcacgtatatgagtcggtcatacgactgatcatgtaggcttagaaccacgtttttagctaggtgaggcgtaggtgaccttgacgttaagcattagggtgaaatctccacgtaggtatccgatgagaaggcccttggagagacgtgggtgatgaccgcggatgtgacgagagctccttcgtccttcggtaattcaccatatacatatgcatccggaggcaccatgttggggagagaaactccaaatntgtcgccaaccggaaggggaagggtacgagctgtagtggggtggcaacccatggtgtccccaaagaatttcttaccgggactaattgcaaacctggggggggctagcaaggcaacgttctcgatgagggctttccttcctgttggcaagcggtgggcccatacaggcagagagcgaagtagggggtaaaaaaccgtttatgttcaattctttgggggaacctagggattaacaagccaacctcaaaaataaaggggtgtccccatccggtcgcacttccactttttttggcagacgttccctttcccgtcgggggttccattgagcccattggttgtcacttattgccccccgtctctttggggggaacaccgtaattgttggggagcctgcggggtgggccccttgtgaatttaaacccatatttggcgttccaagttttaccaaacgtcttgaaaaaaccgtctgttgaacgggggggaaccacggtgccggccgtttgagagtccggtgaagcgctgggcgcacgggacaaccaccaggggtttaccttgggtccgtggctaggccggaactccctgcgaatgaccaagtcaagaattaggtcaccccaggctctttgggaagaacacccacggtgtttgcccctgttga

SEQ ID NO: 652295 - DNA, 673 bp, Homo sapiens
cacagttgatggggcagagctgtgtggaggccaggtttctccagtctttcctgctgccccagagtggctgagcagggaatccgctcaggcgccatctgggtctgccctaccctctccagcgtgtcctctcttcccaggatcgagcggtccacggaccaggtcatcaagcctgttaacctggaagcgctctccaagtggactggccacatccctggggatgtggtgcgggacatggcccagatcgcccccatgctggctcagctcggctatgacccttatgcaaacccccccaactatggcaaccctgaccccttcgtcatcaacaacacacagcgggtgagtgtgcacctgtacttgtggaagtgtactcttggggatatggggcttctgcagatgtggaaactccagccacctgaggaaatggtcagactctcaattcctgggcatctgagttggttctgtctgatgacacagtgaaccacatgaatgcgtggattttcaatttgcttgggctgcgggaagctcaaagacaactggtaggctgtctttcataccctaacatctaacaagaaggcacggtgggcaacctaattcaacctatatttctaatttaattacaattttaccctatttccccggctaatgggtatatgttgggggccctggttttgtg

SEQ ID NO: 652296 - DNA, 1079 bp, Homo sapiens
  misc_feature (166)..(166): n is a, c, g, or t
  misc_feature (1079)..(1079): n is a, c, g, or t
gatgcccagcaccttggtgtgatggcacgcatccattcgcctatcgtagaagcagcttatcaggcgagccatgatcacactggtccagtaatctcaatttttctatatatacatggattgcgctttgatgtgaatgccccctgctcctgattcaacatcataaganaatataggcataagtacgtcatcgatcatcagaagcagcctcaagggaaatagaaatcggatcgggacttagtcctcggccgggctcagtcgtgctcttaagaacgctgcaagtcttcgctcgcactattcgccatacagtcgatccattgtacgctatacagaccgatgctcaagcgagactctcatctcgcattactcgttccaagggtctaaataagggtcgacctagatgtgtactttgccatcgtacatagggttcttcagactgatcggagaggaattgatagtcttctaatggtcctaacatatcgtgtcaccaccaatgattgcctagcatcaaccagtgggaaatgcttggcggacctcacctggaatggttgactatatctgacgtagtgacttcttgcggattgggatatgtccacctcaaattacagatagtaaataaatcacgattcaaccgagaagaaagacctttgtcatgtctactggagacctggacccacgcgatcactgtagggcattcccggaaaacgagaagttgtcgaattggcccccgttgcaatgtactcacggagcaggttgcaacgattacaagtgacttgacagagacggtgggttatatctactggtatatctgcgatctgaattggtgttggaaccaatagcacagggtcttcagtgcactatacgttacttacgacatcaaatgatgtttaagaatctaatgaaagatagaggtggccggaatgaaaggcccctaatatttaggccctcggttgaagaggttaatggaaagcatttcatgggtggaaccgggaggacagttttgggaacagagggcgagtggagaaaagagggtactagggggagttggaatttggtcatgtttagtgtgttttaggaccagn

SEQ ID NO: 652297 - DNA, 491 bp, Homo sapiens
  misc_feature (51)..(51): n is a, c, g, or t
  misc_feature (106)..(106): n is a, c, g, or t
  misc_feature (110)..(110): n is a, c, g, or t
  misc_feature (115)..(115): n is a, c, g, or t
  misc_feature (120)..(123): n is a, c, g, or t
  misc_feature (125)..(128): n is a, c, g, or t
  misc_feature (137)..(137): n is a, c, g, or t
  misc_feature (142)..(144): n is a, c, g, or t
  misc_feature (171)..(171): n is a, c, g, or t
  misc_feature (220)..(220): n is a, c, g, or t
  misc_feature (279)..(282): n is a, c, g, or t
  misc_feature (290)..(290): n is a, c, g, or t
  misc_feature (330)..(330): n is a, c, g, or t
  misc_feature (355)..(355): n is a, c, g, or t
  misc_feature (361)..(361): n is a, c, g, or t
  misc_feature (367)..(367): n is a, c, g, or t
  misc_feature (405)..(405): n is a, c, g, or t
  misc_feature (408)..(408): n is a, c, g, or t
  misc_feature (416)..(416): n is a, c, g, or t
  misc_feature (425)..(425): n is a, c, g, or t
  misc_feature (462)..(462): n is a, c, g, or t
agcatgggctacagatcagtcctaggatcccgctcatcactcgctattggnctcggcctcactgcctgtgcctgcccagccatatgggtgcaatggcctccctganaggngaggncactnnnnannnngagggggcntggcnnngtactggggaagatggaagcagcaaanaaggctgtgaacaaagccaggatgcaagccagtggagccagtgcagagnacacatgctcagatgatgttgttctcctggatcttctctcccaagtaaaagcgggtaannnngaaggggntcaggtcgatggtctggaacctgcccttcagtaccatctntgctacagctcgcccaatgccaggngcctgntggagnccgtgaccactgaagccagtagcaaagtacatgttganaantagcgggngggggggancaagggattctggtcaaaggtgttgtagtcgtaatanccggcccaggcgctctgaaccttcagagt

SEQ ID NO: 652298 - DNA, 443 bp, Homo sapiens
agctcggtacctgattaggattctgaagatgatattactaggaagtaccgtaacagtctgattataaagatacatatcccaagatggttgataataaatacaaaagagaaatgcaaaagctgtaaagataagggcatgcaaccagataatctcagaatatccaaattggcaacaaggaacgtttggttggaatttgaagttttttcaacgtcatctttgtctttggctccatgttttaggattcgtgtgacctcaatgtaattgaaattccccttttatatcaatctggtgcttctctgtacagctcatccacttcctcatctgtcgaccgatcccccatggttgtcaggagctctctcaagtaatcttcctgtatggtgccagttgcttcttcatcaaagcaagcaaaggcatttctgatgacatcttcagaatccaaatca

SEQ ID NO: 652299 - DNA, 283 bp, Homo sapiens
gcgtgagccaccacgcccagccaatttactgcattataaaggtggaataagactttatttttattttttatttttttagacagactctgtcacccaggctggagtgtagtggcacgatctcagctcagtgcaaactccgcaccctgggttcaagtgattctcttgcctcagctacttgggaggctcaggcaggagaatcgcttgaacccgggaggcggaggttgcaatgagcggagattgcgccactgcactctagcctgtccacagagtgagactctgtctc

SEQ ID NO: 652300 - DNA, 168 bp, Homo sapiens
aggcgccgccacaattggtgcgcatgatgtgcgcagtgctctcaggtatcacatgcgaaagagagcaacgcacgtgctattagccgtctcaaagtcatcgtccgttctcacttgatgatgaggcatggttacatttgcgaatttgaatcattgatgaccacagagctg

SEQ ID NO: 652301 - DNA, 172 bp, Homo sapiens
ggactacagggaccaaacaattcacaagagaaataccggccaggcggggggacttacggcgaacccagcactttgggagggcaaggaagagcttgagcttagcctagacgataaagaccagcctggcaacaaagcagaccatctttacagaaattaaaaacgtgccaggcgg

SEQ ID NO: 652302 - DNA, 182 bp, Homo sapiens
aatgcaacagaaatccaatctagagctgctccgatctaactgctgctcctcgagtcgtggctggagccctgtgctggatcctcaggagtatgttcgccaacaaactggtgtatgacaactctggacagcgatgactcatcacctacctaaaaggaaactaaaggcaaggccatccaacaaag

SEQ ID NO: 652303 - DNA, 154 bp, Homo sapiens
cacacatccccccacacacacacacacaaatacaatgagcagatgtaaccccaagactctagatcactggttctcagccttcctaacactgagacccttaatacagttcccccacgttatagtgaccctcagccataacattgtttgtcgacgc

SEQ ID NO: 652304 - DNA, 916 bp, Homo sapiens
tatagtgaatccatggcacttattctttctagtctgatctaggatataactttgatagttacagtgcatgtatataaagtatgatgtaatgaaataaagtatgattgttactggcgtaacaaagccatacataggctgggcatgtggctcatgcctgcaatcccagcacttggagtggttgaggcaggaggatctcttgaggcctggattttattttatttatattttttttgatgaaggagtcttgctctgtcccccaggctggagtgcggtggtgtaatctcggctcactgcaacctctgcctcccgggttcaagtgattctcctgcctcagcctcctgagaagctgggattgcatgtgtgtaccaccacgcctggctaatttttgattttttagtagagaagatgtttttccctgtggccagctggtctcgaactcctgacctcaagtgatctgcccgccgtggcctcccaaagtgctgggattacagatgtgagcccccgcaccggaggctggaatttgagaccagctgggcaacatagcaagaccatgcctgtactacaattttaaaatattagccaggcatagtggcgcgtgcctggcgtcccagctactgggaggccgaggcaggaggatggcgaaggcagggacgtcgagggctaccggagcggggaccactggcgcatccagctggggcaacaaccagaggaaaaccgtattcaacaaaaaaacaaaccttttttccagacaactcgcatacaaactcggggctgaccttagatggggacaacaaaaccagcctagacccccaggagcacggaccctcgagaacatcgcccaacacaagaacagaggactcgcaaaaaaagcggaaccgccaccacaccaacacaaaaccgacaaacgcaaaacaac

SEQ ID NO: 652305 - DNA, 350 bp, Homo sapiens
acagtaagaaatacaaacaggataacaacatattagaccaggctgacctcaaactccagacttcaaatgagctacctaccttggcctcccagagtgctgagattacaggcatgagccaccatgcccagccaactcatttataaatataccacttatctggtgctgatgacatattacctcatattgctaattctcaatttgctgttatatcttagccaccttcacaactctattgagttttcctgagggcaggggtggtggttgttctatgttattatcacactaagtatagttcatggctaaggcaatatgttgtaatgggtgcaggagagagacagattagttctgaa

SEQ ID NO: 652306 - DNA, 144 bp, Homo sapiens
tgcaacacaaatccaggaggaagtgcatgacgatacatgcaaatattacccccttcagggcatacccaaaaccagccatacttggtggtttcaatagcttccaggaaatgcttgcacactattttagtttttggttttttcttt

SEQ ID NO: 652307 - DNA, 229 bp, Homo sapiens
gacttagagttccgatagtcaacacactacatttaccagcctcaccacagtctgtggcagcagcctccctctcatcatcaagcagcaaaataaaggaatattcacactaaatgggatacaaagattcaaggtcagttcagattagattgaagcacatgaattttgtcaccaaagcttatggaaaccttgtttaccagagctcttttggcatattggaattacacattac

SEQ ID NO: 652308 - DNA, 469 bp, Homo sapiens
  misc_feature (29)..(30): n is a, c, g, or t
  misc_feature (34)..(34): n is a, c, g, or t
aactgtatccctaaaattagtgctgaaannatgnggttaacatcgagccaccaaaagaatgcggttaacacatttgcaaagcacccctcgcgtatccacattttcaagaattgactgcaggctggtcattacaagctgcattacagatgaaaaggctttcttttctcctacagtctctagtgctttgtaggtggcacataagtagaggagtttaacttcatcttttgcagatgagctaaatttgctaaaaatccacttgaagatcttctcagcctcatagctcagagaagcacaaagaaggccaagacagcaagctccctcctgtctcaactcctgaagcaatttgctactttcattaagcacatcatgtgcagcagccaagatattatccaattgtttaactagtaccagcttatttttctggtgctgaatatattctttcaactgctttacagtgaccaatcttcag

SEQ ID NO: 652309 - DNA, 731 bp, Homo sapiens
tgagccccccccccccccccccgaagaaaaccaaatcaacgccccagagaagaaaaataggtctctaacgacccaaaaaatctctagagattagccccccaaaaaccgaaggaaccgaatttaaattcaacccgcccctaaatatatcgcccctgcacttccgtctatctaatcgagaaacaagatagaaaatagtttagtcctaccctacctcccccgtaatactcgaacacgtgcgcctaactctccgactagtcggatatgcacccgcgaatctactctcagtacaagtaccacctaagcactcttagacgttagctaccctagaaggaaacctaaaactctcgcatcctccggttataactccaacaacacggagtccgggcaagaggccgtagctagttagtgctagtctgcttttacttagaaatccttccttagaaatagcgatacttctggcgtcgcaggtactcaccctactaggtagagggtcacccaagcaaccacttagtccttctagggttcctagtaggcctcccctacgaactctacccgtacttcctcctgcgccccccacaaatgtcgagaacccggtaaatatgctacccttcgtggaaccagacctgggacggcgggcttttagtccgggacatttcgggggagttccgcgttgaaccttccgtattttggggggattatcagcctcagagtggttgctattgtggcggaat

SEQ ID NO: 652310 - DNA, 916 bp, Homo sapiens
aagagggtcaaagcgcgcccgtacaagaggtgttacccagacttcaaaggtacgcgcgctgtcacaacagatgggactctcgcaaagccgctaaggggtcaacgcgcggcctgaggtgtcctcggcacaaatgcgcgcaactgatgtgtcgcagaggtgtgcacaccccgctctgtcagcacatagtccgtggcgaaattccccaagatgcgagagccggctgtgggagtggaaaatccacgccgccaccacactcaaataaatcccgcgaaaacaccgggggctcaccgcaataaagatagaaagggcgctgtcaaaataggagacgtgtgactgtccagaaaggcccaactgccaaaaaaggcgccccaagtgggacaagaggaaacgaagatacccccggagatgcactctatccgggggcgaggtaaacaacaacgtccactgattaacaacgcctacaaggcgccccccttggaccttggcaagccgcgccgggggcaaaacatgctccgggtgggagtaagcaacagcccacaaattccgcccgctcgaacaaagcgagtagttaatatcaatattgtggatgcacccgaaataataccgggcgtaggcccccattaaacaagcgataaaaaaactcatgcgggcaatcgtatttggaagccccactagagtttcagacggtatgtatcggtcacataacaccaattaacaagggtgtccccgcccctcttggaccattcaaagcaacgatactctcggcgggtctgttccatacaaggtggttacagatctttctgacaagccttgaagaatgtatgggtgggtcacttaacacacaccctggggattccccaccatgtgattccctttgagagggaatattaaaaaaactaaactccccacaaaaaca

SEQ ID NO: 652311 - DNA, 145 bp, Homo sapiens
tgttcccctcgacgtggtgcgcgcagcatgttgtcgtcgtcaggttcggggatgggctgcgaccatccgcaccgcccggtcgatcatctcgacgaggttggggaagtgcatcacggtaacagagcctggacgattctgcggggca

SEQ ID NO: 652312 - DNA, 693 bp, Homo sapiens
tgagactcaaaaaaaaaaaaaaaatgctttttcccttgacctgcccccaaaaatcagggggcgtaggaacggggaatgaaagtagggtctcctcactccccaccaaccggggaaataagggactggaactggtcgggcttacaacagaatccagtctcatgtcagtacctccttgaaggctcttaggtggctcggtctaaacgattggctctccgggaacttcaacagcagtcgtgggccagagaagagcacaggctcttggcgctaaatctagtttcttcaatggaataccaaatttagaaactaccagggataaggggagggatttcatttgtcagcgaaaagtgggcttaaggacttctagtggggaaaagggatcagaaggccaaggccaaaattaagggagaagggccagctggcctccacccatgggcttcccctttccggcataaactaagggatgggtggcaaatcagggtcccaagagaagcagcagcaggggattatggcacgcattatccctggcagacagaacacaaatttcccacgcagtttggggagcctggatggttggtggggctcccagagtcgggtcaggagaccaacagcttccaatcccagcatttacatggaagggggtttctaacaagctttggaacttttctatagcatgggtatctcatttctcaccaa

SEQ ID NO: 652313 - DNA, 229 bp, Homo sapiens
agcctgataaaatgatggatggaacatgaaataggatgacagctctagtcgacaggcttggcaggtaaaatactgacttcctctgatatagacatgtggcgccactcctataaggagagttcaagcctgtgggaagtagaaaaatctcactcccagagtcagaggagaagagacgttaccttgaccatcgtcctcctctcagctagcagagggggcagctaggaaggtg

SEQ ID NO: 652314 - DNA, 353 bp, Homo sapiens
ctcttgggctatagtaatcatgattaattacttaacagatcacagtatcgaccactgacatatagaacactcaagcctaagaaccatcacagaatttagtaactctagatctgtgaacatgaaaagatttctattgtggattccaaaggagatcatttatctatccacaaggcaagacatcttgcagagactctgaattccaaatctgagtgagacagggaagccactctgattcatggcggattcctaagcaacatatatacatgtgactaagacaaccttatgttggcagctggactcctgaacaccatatgcaccctatgcatgctgttccttttcttgatcacatatcg

SEQ ID NO: 652315 - DNA, 507 bp, Homo sapiens
cggcacgaggggcatttggctttggagcctcagtgtctgcttcgatgagatgagccattgagaattaagaggtgaagtaggtggaagtgtttcgctacctgaacagggccgggcagattgtccagacgattccgctcccctggtgtctgagggcaggggcgtctcagggcaggggccccatcgtgttcatccctgtgtctttaaattcctagcatagcatctagcatggggcggatgattgtacagggcatgaactgcaatcccaatgaggtcagagcagcctcactgtaggccgaggtcgttccagtgggcttcatggaggaggtggcacctgggcgagcggggtgttaggtttggaggtcaggggcctctccaggtgcaggggagagtgctgtgggtggtaggaagagaatgctaaaaattaatgtctatgaaatcttcatctcatccatcacacatttaccgagttgttgccccggcctaaacaggcggtactctctgttatta

SEQ ID NO: 652316 - DNA, 1040 bp, Homo sapiens
  misc_feature (21)..(24): n is a, c, g, or t
  misc_feature (27)..(27): n is a, c, g, or t
  misc_feature (29)..(29): n is a, c, g, or t
cctccaacaaccccttgatannnnttngnactacaatcagacctatgctagtcctgtcatctattcgctactaaatgcagactggagggaccaaaaaggggcatcaactccagctggattattttggagcctgcaaatctattcctacttgtacggactttgaagtgattcagtttcctctacggatgagagactggctcaagaatatcctcatgcagctttatgaagccaactctgaacacgctggttatctaaatgagaagcagagaaataaagtcaagaaaatttacctggatgaaaagaggcttttggctggggaccatcccattgaccttctcttaagggactttaagaaaaactaccacatgtatgtgtatcctgtgcactggcagtttagtgaacttgaccaacaccctatggatagagtcttgacacattctgaacttgctcctctgcgagcatctctggtgcccatggaacactgcataacccgtttctttgaggagtgtgaccccaacaaggataagcacatcaccctgaaggagtggggccactgctttggaattaaagaagaggacatagatgaaaatctcttgttttgaacgaagattttaaagaactcaactttccagcatcctcctctgttctaaccacttcagaaatatatgcagctgtgatacttgtagatttatatttagcaaaatgttagcatgtatgacaagacaatgagagtaattgcttgacaacaacctatgcaccaggtatttaacattaactttggaaacaaaaatgtacaattaagtaaagtcaacatatgcaaaatactgtacattgtgaacagaagtttaattcatagtaatttcactctctgcattgacttatgagataattaatgattaaactattaatgataaaaataatgcatttgtattgttcataatatcatgtgcacttcaagaaaatggaatgctactcttttgtggtttacgtgtattattttcaatatcttaataccctaataaagagtccataaaaatcca

SEQ ID NO: 652317 - DNA, 127 bp, Homo sapiens
ctaggtaagtcatcatggagatcaagttggtccttgtggtgggtgacgaccttatagccctttgtatagcgagcaaagtttaatgagagcaggggccggtgtgacttttgagtagtcttgaatgagg

SEQ ID NO: 652318 - DNA, 797 bp, Homo sapiens
  misc_feature (29)..(29): n is a, c, g, or t
  misc_feature (65)..(65): n is a, c, g, or t
  misc_feature (71)..(71): n is a, c, g, or t
  misc_feature (73)..(73): n is a, c, g, or t
  misc_feature (85)..(85): n is a, c, g, or t
  misc_feature (89)..(89): n is a, c, g, or t
  misc_feature (92)..(92): n is a, c, g, or t
  misc_feature (100)..(100): n is a, c, g, or t
  misc_feature (104)..(104): n is a, c, g, or t
  misc_feature (106)..(106): n is a, c, g, or t
  misc_feature (120)..(121): n is a, c, g, or t
  misc_feature (131)..(131): n is a, c, g, or t
  misc_feature (140)..(140): n is a, c, g, or t
  misc_feature (156)..(156): n is a, c, g, or t
  misc_feature (207)..(207): n is a, c, g, or t
  misc_feature (210)..(210): n is a, c, g, or t
  misc_feature (219)..(219): n is a, c, g, or t
  misc_feature (239)..(239): n is a, c, g, or t
  misc_feature (254)..(254): n is a, c, g, or t
  misc_feature (264)..(264): n is a, c, g, or t
  misc_feature (267)..(267): n is a, c, g, or t
  misc_feature (278)..(279): n is a, c, g, or t
  misc_feature (284)..(284): n is a, c, g, or t
  misc_feature (293)..(293): n is a, c, g, or t
  misc_feature (302)..(302): n is a, c, g, or t
  misc_feature (313)..(313): n is a, c, g, or t
  misc_feature (329)..(329): n is a, c, g, or t
  misc_feature (331)..(331): n is a, c, g, or t
  misc_feature (333)..(333): n is a, c, g, or t
  misc_feature (343)..(343): n is a, c, g, or t
  misc_feature (403)..(403): n is a, c, g, or t
  misc_feature (439)..(439): n is a, c, g, or t
  misc_feature (590)..(590): n is a, c, g, or t
  misc_feature (609)..(609): n is a, c, g, or t
  misc_feature (621)..(621): n is a, c, g, or t
  misc_feature (645)..(645): n is a, c, g, or t
  misc_feature (680)..(680): n is a, c, g, or t
  misc_feature (694)..(694): n is a, c, g, or t
  misc_feature (702)..(702): n is a, c, g, or t
  misc_feature (731)..(731): n is a, c, g, or t
  misc_feature (790)..(790): n is a, c, g, or t
tgaccaaaaaaggcaactatatttaaagnaaatgtatgtgattcttgtcacaacaaatatttgcnttttcncngcggccgcgcgngggnccnggggggcnccgncncgccaggcccgggnngggcccggcnccccccccngaacttcctggctacncatttccagcgaagtttaatctatttttaataatcgttcagttttcaaggnaangggggggcngttttttcccccggggcggnggccctggggggggncgggcccagnggntccggccgcgnngccgncagcgcctncggcagagngactgaggcgngatttcgttctcagangngngaggcaacgntttcgggggaccagggggggggcggcgcgcgcggggccacagcccagccccgcgccccgnccgcgtcacagccaaagccccgccggggggcgcgcngcagaggggacacgccgctcatcaactggggcagcgcgcggtcggtcggcgcggtggcgggcggcagggaaaaggtggggtccgggacagccacggagcccggagtcacccgcgaggccgccccggtggtgcgtggggggcggcgcggggngcggccgggcgctcaaaantcctcgtgcacnctgcgcgcgttgtccaccagcttnctgcccgtgaagaactcgctgttcttgagcccctnctcgggctccaggnggtggttntggttctcgtcggcgacggcgatcatctncttggcctcgttcagcgcgttgtactcgttcatggggtccatgttgctctccagccccncggcggt

SEQ ID NO: 652319 - DNA, 516 bp, Homo sapiens
  misc_feature (36)..(36): n is a, c, g, or t
  misc_feature (38)..(38): n is a, c, g, or t
ctatgatttacagaccccaaacaacacacacgccgngngccgcgctgtgaggacaaccatgaaaatctcttgttttgaacgaagattttaaagaactcaactttccagcatcctcctctgttctaaccacttcagaaatatatgcagctgtgatacttgtagatttatatttagcaaaatgttagcatgtatgacaagacaatgagagtaattgcttgacaacaacctatgcaccaggtatttaacattaactttggaaacaaaaatgtacaattaagtaaagtcaacatatgcaaaatactgtacattgtgaacagaagtttaattcatagtaatttcactctctgcattgacttatgagataattaatgattaaactattaatgataaaaataatgcatttgtattgttcataatatcatgtgcacttcaagaaaatggaatgctactcttttgtggtttacgtgtattattttcaatatcttaataccctaataaagagtccataaaaatcca

SEQ ID NO: 652320 - DNA, 170 bp, Homo sapiens
aaggaggtgtgcgtgggtcctgcggtgtccatttcccgtgttgtctgtttcgccaagggtatccttaatgtggctcagtgctacataaacatctacagactttgcgtgatagtgcgagagatttaaacagcgcgcgtaaaattctcctacaacgcggggtcccctctagc

SEQ ID NO: 652321 - DNA, 124 bp, Homo sapiens
catatcagcagcgggccaagaaaacttcttcaaggagcgtcgcttgatgtcgggacagtatccaggtgtcgtctgagaattctaggacgtggtgctgggggtgctgcaagtccccggggcggca

SEQ ID NO: 652322 - DNA, 1069 bp, Homo sapiens
  misc_feature (141)..(141): n is a, c, g, or t
atcacttgtgccctccacctacaaatttcaactctgattctacagcagtgattctggggcctagctgcacatccaaatagatcttggagctttaaaaacatcctgatgcccagacttcacgccagaccaatcacatcagantttacttgattggaagctggcatttgctattcctacttgtacggactttgaagtgattcagtttcctctacggatgagagactggctcaagaatatcctcatgcagctttatgaagccaactctgaacacgctggttatctaaatgagaagcagagaaataaagtcaagaaaatttacctggatgaaaagaggcttttggctggggaccatcccattgaccttctcttaagggactttaagaaaaactaccacatgtatgtgtatcctgtgcactggcagtttagtgaacttgaccaacaccctatggatagagtcttgacacattctgaacttgctcctctgcgagcatctctggtgcccatggaacactgcataacccgtttctttgaggagtgtgaccccaacaaggataagcacatcaccctgaaggagtggggccactgctttggaattaaagaagaggacatagatgaaaatctcttgttttgaacgaagattttaaagaactcaactttccagcatcctcctctgttctaaccacttcagaaatatatgcagctgtgatacttgtagatttatatttagcaaaatgttagcatgtatgacaagacaatgagagtaattgcttgacaacaacctatgcaccaggtatttaacattaactttggaaacaaaaatgtacaattaagtaaagtcaacatatgcaaaatactgtacattgtgaacagaagtttaattcatagtaatttcactctctgcattgacttatgagataattaatgattaaactattaatgataaaaataatgcatttgtattgttcataatatcatgtgcacttcaagaaaatggaatgctactcttttgtggtttacgtgtattattttcaatatcttaataccctaataaagagtccataaaaatcca

SEQ ID NO: 652323 - DNA, 1274 bp, Homo sapiens
  misc_feature (21)..(24): n is a, c, g, or t
  misc_feature (27)..(27): n is a, c, g, or t
  misc_feature (29)..(29): n is a, c, g, or t
cctccaacaaccccttgatannnnttngnactacaatcagacctatgctagtcctgtcatctattcgctactaaatgcagactggagggaccaaaaaggggcatcaactccagctggattattttggagcctgcaaatctattcctacttgtacggactttgaagtgattcagtttcctctacggatgagagactggctcaagaatatcctcatgcagctttatgaagccaactctgaacacgctggttatctaaatgagaagcagagaaataaagtcaagaaaatttacctggatgaaaagaggcttttggctggggaccatcccattgaccttctcttaagggactttaagaaaaactaccacatgtatgtgtatcctgtgcactggcagtttagtgaacttgaccaacaccctatggatagagtcttgacacattctgaacttgctcctctgcgagcatctctggtgcccatggaacactgcataacccgtttctttgaggagtgtgaccccaacaaggataagcacatcaccctgaaggagtggggccactgctttggaattaaagaagaggacatagatgaaaatctcttgttttgaacgaagattttaaagaactcaactttccagcatcctcctctgttctaaccacttcagaaatatatgcagctgtgatacttgtagatttatatttagcaaaatgttagcatgtatgacaagacaatgagagtaattgcttgacaacaacctatgcaccaggtatttaacattaactttggaaacaaaaatgtacaattaagtaaagtcaacatatgcaaaatactgtacattgtgaacagaagtttaattcatagtaatttcactctctgcattgacttatgagataattaatgattaaactattaatgataaaaataatgcatttgtattgttcataatatcatgtgcacttcaagaaaatggaatgctactcttttgtggtttacgtgtattattttcaatatcttaataccctaataaagagtccataaaaatccaaaaaaaaaaaaaaaaaaaaaaaaagtacaatgctatacctatcaaactaccaatgacattcttcacagaactagaaaaaaatattttaaaatcaatatggaaccaaaatccccaaataaggaaggcaatcttaagcaaaaagaattaagccgaagacatctcgtcacccaacttcaaactacactacagggctacagaattcaaaacagcatggtacctcggccgcgaccacgc

SEQ ID NO: 652324 - DNA, 470 bp, Homo sapiens
tgatgtctcctgttgtacaaaagtggctgtaccaccaagacctggatgtccagtaccgcagtgggggtgctcctcaacctgggcctgcccatttaagcctcaccatcaccctggtaaagactgccaaactgtggggaggcactttcctttggacctaaacctgaaatccccctctttgccctgggtggatccggggaaaccctttgccctttcctcgggtcccaaccctacaaacctgctgtgtgacctcaggccaatgtgccgaccctttttgggccccagtttttccagctatgaaaacagctatctcccaaagttgtgtgaaacaaaaaaaaaaaactggaggaaggccgtgggccaaagggaaagctcttgttattattaaaaatgttgcccctggtggggtggtggtattaaataaaattcaaaatatttattttaaacctacaaaaaaattttgggcccgtgga

SEQ ID NO: 652325 - DNA, 158 bp, Homo sapiens
ggtcttggcctttttatttttatatggaaaagttttaaggacttgggccaactaagtctccccccccgaaaaaagaaatttgccttgtccctttgggtacacccatgcaaaactgtttgttggctcccaaaagttttgccaataaaagattctagcta

SEQ ID NO: 652326 - DNA, 798 bp, Homo sapiens
  misc_feature (21)..(24): n is a, c, g, or t
  misc_feature (27)..(27): n is a, c, g, or t
  misc_feature (29)..(29): n is a, c, g, or t
cctccaacaaccccttgatannnnttngnactacaatcagacctatgctagtcctgtcatctattcgctactaaatgcagactggagggaccaaaaaggggcatcaactccagctggattattttggagcctgcaaatctattcctacttgtacggactttgaagtgattcagtttcctctacggatgagagactggctcaagaatatcctcatgcagctttatgaagccaactctgaacacgctggttatctaaatgagaagcagagaaataaagtcaagaaaatttacctggatgaaaagaggcttttggctggggaccatcccattgaccttctcttaagggactttaagaaaaactaccacatgtatgtgtatcctgtgcactggcagtttagtgaacttgaccaacaccctatggatagagtcttgacacattctgaacttgctcctctgcgagcatctctggtgcccatggaacactgcataacccgtttctttgaggagtgtgaccccaacaaggataagcacatcaccctgaaggagtggggccactgctttggaattaaagaagaggacatagatgaaaatctcttgttttgaacgaagattttaaagaactcaactttccagcatcctcctctgttctaaccacttcagaaatatatgcagctgtgatacttgtagatttatatttagcaaagaccccaaaagagctaagaccccaaaagagcaaagtccccaaaagagcaaagtcctcaaaagagcagagaccccaaaagagcaaagaccccaaaag

SEQ ID NO: 652327 - DNA, 781 bp, Homo sapiens
  misc_feature (21)..(24): n is a, c, g, or t
  misc_feature (27)..(27): n is a, c, g, or t
  misc_feature (29)..(29): n is a, c, g, or t
cctccaacaaccccttgatannnnttngnactacaatcagacctatgctagtcctgtcatctattcgctactaaatgcagactggagggaccaaaaaggggcatcaactccagctggattattttggagcctgcaaatctattcctacttgtacggactttgaagtgattcagtttcctctacggatgagagactggctcaagaatatcctcatgcagctttatgaagccaactctgaacacgctggttatctaaatgagaagcagagaaataaagtcaagaaaatttacctggatgaaaagaggcttttggctggggaccatcccattgaccttctcttaagggactttaagaaaaactaccacatgtatgtgtatcctgtgcactggcagtttagtgaacttgaccaacaccctatggatagagtcttgacacattctgaacttgctcctctgcgagcatctctggtgcccatggaacactgcataacccgtttctttgaggagtgtgaccccaacaaggataagcacatcaccctgaaggagtggggccaaccttaacgtggggcccatcccattccactttgtaataatctgttcctctatctccccgcctctacccccactaggttatcagccctttcaagacagggaccacacagtattcattttttatattccccaaagcctaacacagaccacaaaactgctacagttcaattctatgccataatcaacttttaagtcaagtgaggatgggccgacattgtaacctctagatc

SEQ ID NO: 652328 - DNA, 258 bp, Homo sapiens
  misc_feature (236)..(236): n is a, c, g, or t
ccaggctggagtgcagtgatgctcacagctcactgctacctcaaactcctgggcccaagtgatcttctcacctcagcctcctgagtagctgtgattaaaggtacaagccatcatgcccaggtaatactgtatgtttttaaaagaatcattcaaagatccagaaagagctcctgtaaattaaaaataggacataaaaattcagtggaaaaagatgacatctaagatatttctcaganaatgaggggggaagacaataag

SEQ ID NO: 652329 - DNA, 153 bp, Homo sapiens
gctccgggacggctgggaagcagtagatggcggtgggtaccgactcaggcgcatgccatccctagctcaacacattcctccctggtcccgatgctggttaaacttcatctctcggcggtgaatgagcccacagcatcgtgtggactggcactg

SEQ ID NO: 652330 - DNA, 146 bp, Homo sapiens
ttgtccgtgtgataatgtaacctgtctcttagagagctatggatgggcaaaggctctgcaagggccagaggtctcttcatgctgtgagctggcagggactcatattctgaccaagtggcagctgaccaggcatcacacagctcatc

SEQ ID NO: 652331 - DNA, 347 bp, Homo sapiens
tttttttaggccaattttaaaaaaagggagaggcgggagaaaaacccccttccccccaaaaaaaccttttggcgggaaaaggggggggaaattttttaaaattttgggggtttttccccccccctcctttttagacccccctttttatgtgggggaaaacccccctcaaaaatggaccagagccccaagttgccttttttatttgggccctcccggccaatccccccggcctttgggttttttaagggcccccccccccattgggttgccaattttttcggttttccccgggattttttaaaaaatttttttttttaataattaaaataaaaccccccttttggcca

SEQ ID NO: 652332 - DNA, 1489 bp, Homo sapiens
cgctcgtccgtgtctggttagtgttgtagtgtggctgtgttttgtcgcggtctcgtggatttctcgttcgttctcttattgtcgtgatgttagcacgaaagtaaaacgtggtggtgaaccaaacactgcttgtgtggggcgcacgttggatgctcgggtggatactccccttgtgtgtttacataaataccaggggttgtgttgttatttctgccccccgctcttattattttgtcggtggttttaattgtgtgtgatgtgtctgttggtggtgcgattttgtgtctacacaagtaggttttttttttttttgtggttgtgcccctgttcttgtctgtttgttgggtcgacacactttgctgtagtagcttgttttttgttgttactcccaccatgttggggtgtttctttggttgtgctgctgccgccccccctgtggtgttgtatccccttgtgtgtgttttcttgggctgggtttgttttcacactcgtgtttgtgaagggtgtgtgtctttcccctcttttttgtggggtgattatctccctgagtggtttttcttgttgttgttgtgcggcttcgtgggtcgtccttttttgtccactttttgaacaaccccccttgtgggtgttgtcccccccctcgtggtgttatattaggttgcaaccaacaactactcgtggtggggggccacccctcacgatatttgttgttctccccctctctgttttttttggggcccttgttgtgttttgtgtggtgattatgtgtgtgcccctctgcgtgttctacaacacaggtggttttctccccccgggggctcacagtggtggtttctttttgttgtttattggtagactctctttttttcttcccccccatagtggtgttgtccctttcggctcctccatctttccatgaaggttggggggggcacaacacgggtgtgccccaccccccgctcctcctcttgtgcccatcgtgttgtggggcccacctggtgggtcacgccctccctctggtgctcctgtggaaggtggctctcttcctctcggtggggaaatatttgtgtgtgttgggagggtgttgttccttcccccgcggggtggggccctgtttcccctctttcctggggcaccagggtggggaaaatgagaaggccacaagggttctccccactttatacttattaataagtgttgtgtgttacacacaccacaaaaaaaggtgtgcgcaccaccaccccctcgtatagttgtgttgcccggggccacggcgccccggaataaattatgtgtgttgtgtgcacacaagtgggtgggtgaccacacccacaatcgttgtggagagagcaccaagggagacaccctgaggtgtgagcgctgggggaacacaccccccgagaaacacaccccgcgccccccccccccccggcccggagagaggaactttgtccgcccccctaaaggggggggtcgcccccccccgcga

SEQ ID NO: 652333 - DNA, 183 bp, Homo sapiens
  misc_feature (35)..(35): n is a, c, g, or t
  misc_feature (44)..(44): n is a, c, g, or t
  misc_feature (55)..(55): n is a, c, g, or t
  misc_feature (68)..(69): n is a, c, g, or t
  misc_feature (115)..(115): n is a, c, g, or t
ttgttgctatggacactgggatgttagtacatttncagaactangtgagaggatnagtcatttctgtnngaagtggttacatatttaacctgtttcacagagcccagtgaatttntcctttaactatattctttcttttttttttttttttttgggaaaaaaatttccgttttgggggcccgg

SEQ ID NO: 652334 - DNA, 480 bp, Homo sapiens
cgaagacggtggctgcgctttgttgtgtttgtgctgcagatactgagcgtatatgcttccaaatcagttggtcttttgctggtaatggcttccacacctcagccagtttgtttactaagttccccacaatctataccgggatggtcagccacaattggtcaggcgatactctttacagaagacctggtaggccgacatgttcttcttttttgggttttctcctctctctctctcttagtccttctcttctttttgcttttgtttttcactatgcccatctgtgtggaggccaggaagtggcaggggaggtgctgtggctccagcgtatgggatgctgggaggagggccagatgtcacggtgacctctcccacgggcacggcagaatgtcctaagagtctcggggccttggagtgtcgcttctctttatgcagctcctagtctaactacttagggcactacttgccacagatctcgcgggg

SEQ ID NO: 652335 - DNA, 171 bp, Homo sapiens
ctcaaagtgcacaggaggtggcagcagggtcaggcgagttcctgttccagggacataatgagagagtgcacaaacctagagactgcacgaatctcatgttgctggtgcagcacattgagcaagtgcagccgggacagctggtcattacccagagccacattgatcatttgc

SEQ ID NO: 652336 - DNA, 117 bp, Homo sapiens
gttcaagaccagcctgttcaacaaagcaaaacctcgttttcacaaaaaatttaaaaaattaaccagatgtggtggtgcatgcctgtaatctcagctatttaggaggataaggcagga

SEQ ID NO: 652337 - DNA, 110 bp, Homo sapiens
cattagtgtggacccataacccaacctgactggtagtcttgtaaagaaaaggggatgtggagcactcaagtgatgaccccatggtgcacatgcaggacacccaagtgagt

SEQ ID NO: 652338 - DNA, 662 bp, Homo sapiens
ggcctctccaggtgcgaaacttcctcgagtcagcctctccagtgcccaaggctcctcctgcctcccaggtggcctctttcggccagcccagctcatggtcttctcggctggccttcccaggccccgcgtttggattttggcagcctcttcaggcgcagaacttgtatctccagtcggcctttgcaggccgggctcctgcctctcgaaggcctgcactgggcccggcctcggcctcggcctcacagggatctccagcccagctagctctcgcctcgatgcggctcccgcagtccaagagctccgtgccgtttcggtcacttcggcagggtccagcatcctgtcctgccagtgtgctcgtttaggcccagctcattcctcacgtcggcattccaggccccgttttttcccttccggcagcctctggggcctctaagttaggtatctttttgtgtataaatcccaaaatattgaatttgggaatatttccagcattatgtaaatatttggtaggtaattatttggcagtgagtttctgcgccaagcccgaattttgtattgatttcttattattcgggttaaacaggtttaatgacggtcatggcaagtttttggcacaatgaaaaatatcgccacgatcaacgtgttctgtctggggaaggggg

SEQ ID NO: 652339 - DNA, 315 bp, Homo sapiens
  misc_feature (237)..(237): n is a, c, g, or t
catggcagtagcatgaagccactagggttctgtcttcttcttataatacaccatacaagttcatgtcagacacaaaaaggatcgtagtgtgtctcctctagcgcgtcttcgctaagcactggggctgtggtgcagcttaatgtgccaggacttgacatcaggcttactacggagccagactggggaaggatgactccacaatctgaagtcattccttccagctttagacgcacgggntcagccggcatattaatgagccagcactgcgctgcgagttaacatctcacactggctggggaggaatgaccctcgaat

SEQ ID NO: 652340 - DNA, 330 bp, Homo sapiens
  misc_feature (69)..(69): n is a, c, g, or t
gtattctgtatcttgataggggtttgggttacaaaggtgtgtttgttaatactcgatgaatgtacactntagatttgtgcaattgcgttgaactttatttcatcttataagaaaaaaaaaccgcaaacgaatattgaactctggttgataatttacattctgcatgttttggactgaagtatactactgtctgcgatttactctactatgcatactaattatatatgtttattatttctggataatggatggttagagggatggaaagatggatagactatgtgataaaacaagcgttgcacaatgtcatccaccagtggaaatcgggta

SEQ ID NO: 652341 - DNA, 323 bp, Homo sapiens
ttgctccagatcctaaatcatctctctgaagtcgagttcacaccatctctagggcaggggcaaaataccaccagcctctttgctacaacatagcaggagtgatctttactctaggtcccaactaagttcctcatctccatctgagaccacctcagcctggacttcattgtttacatcactatcagcattttggtcaaaatcattcaacaagtctctaggaagctccaaactgtcccacatcttcctgtcttcttctgagctctccaaattcctacaacctctgcccactacccagttccatagtcatctcaacattttcaagt

SEQ ID NO: 652342 - DNA, 416 bp, Homo sapiens
aacaggtagtgtggcatacacaatatagctgtccgtttacagtagcctctggcatagccatagggcatgtaaaataacattctgtagcagcaggtaaggaaactatggagcactcaccagtggtacagagcaccttaacgaaaagacatgagattggattcggctactttagatgcaaaatgtctaggacagaactgtaagttcagtacagttactaagaagcaaacactagaacttgatataacttccaaaagcgctcattcaagtagtagtacatattattctaagtgacaaaaaggtgctaagttatttacagatataatggttgtacagtaccttttagatctgcaatttaggtttcagattgtccattaagaatgaactgcactgaaattctataaatgatacttaagcaa

SEQ ID NO: 652343 - DNA, 1547 bp, Homo sapiens
  misc_feature (183)..(183): n is a, c, g, or t
  misc_feature (268)..(268): n is a, c, g, or t
  misc_feature (277)..(277): n is a, c, g, or t
  misc_feature (296)..(296): n is a, c, g, or t
cgaagggcctagatgcggtcaagcaggtgatttcggtgtcacatcctgtcgatagaagaagtcagagtcaggcctcaagaacaagtggatgtcaataccctcgtgtgttgtaccaaggggtccttaatacgtatcggcatttggtagcaggtattagttccagaccccaaacatagcagctcnacccgacataggatgagacacatgtgatcgcctgttagtatccagtgttggctaggctggataggtcctgagccgggtccatacntgattatancgcaggcatagatacacgntgcacatctcttgcctgtattgtgataagctatggtatacgaatcccaaagggtctcgcataggggacctcagcacaagaaaagaaggcttcacgtgcaaaggctttggcttttaaaggcttccggtctcacaagcaaaaagttacaagaagcccatagaggacactagaaatgactaacagacagcaacggatacgtcatggacgcatcttgctatgcggccctggaggccgctggagacgaaaggtgtagctagtggaaaaaggcgcggaccggtccgcacatggcacagcagcaccgaggctgctgctgtctccgtcagacccatcgatagatatgaacgcgacctgaatatgacgactattctatgcgatgggaccacgtaaccaaagacaacacagatctcccagtggtggggattggattggccttggtcttaccaagtggacgatgggacatcctcgaatacgaaattcttgggcataggctctgaactccgtgccatggggccctagtttgtttcccggacacagaacatagcgggggcgatttccccggtgtaaccgtggcaccattgttagtccgataagggccggcgcacacagggtccaacagacaatctgtagagagaacgcgggatcagtaaggattctctagcagggaaaaagaacgccttgaatattccacctaggtaacgagcactttacaaataaacacaagtgtaaaacctccgtgacacacgaaccagaacagcggagcggcctactaaggcgcgtaaacggctaggggcagggagaagttaatacaaagaggaccccaaacttgactactggaagcagaactaccctaatgggaggactcccggcccaaacaactggtggccgtgggcacaggagtgccttgggagtcccacaaaagatcccagggggcgtacaggacttggggccaaatgctgtcggacagacaggggcgaacaggcgctaaaaggcaacctgggacccattaacacgggggcgttcaccctgtcccaccgggcgagaactatgacagggccaacatacccgtagtggcaatacacacccaagctgtccctcagagaacaacaacgacgcacacccatcgagcaaccacgccgggacggcgacaaaccgctatgacaggcaccgggcacaaagagagtacgcgcacccaaaaccggcaacactgaaacgagacacacacaggggcacacgagacagacacacaccacat

SEQ ID NO: 652344 - DNA, 519 bp, Homo sapiens
aattgttgtagccttgggtgagacccagtgttaggctggcttcatttctgacccaatatagtcccagtggcggtggccacaggagtgcttgtgtcacccctcccacagcttcaggcagctctggagagagagagagagagagagaaagaaagagagaggagaggggagaggggagagagacagagagacagagacagatttcatctgtttggagggaagtaagggatgagaacaagagtctctgcctggtaatccagggaattcttctggaagttacccaagaccaccacggtggtatctgtacaagcctgcaatagccacagcgttattgggcttggggcacccctaaagtagaaacgggtaaagtgaccaaaaacttagatgactacacccatgtgcctttaaatacctggaaagcctttccaaggataggcagaaacaagcccagactggaaagacttccgtgaatacctaactctttaaaaccccactgtcgccccaagcatcgacctttcaggg

SEQ ID NO: 652345 - DNA, 144 bp, Homo sapiens
gatgtatgcccagctctaacaccatccccagcatccagtcagacctagtaagaaactggattcttacccaagatggctgtaatcactagcttttttttcctcatggaaaaaatagagttcaaaaatttttcctctcttttccat

SEQ ID NO: 652346 - DNA, 104 bp, Homo sapiens
tctctattcacatgggattttatggacttttgagcctcctggtgctattcgttctcttagcgaatgttcagggacctggtctgactgattagtctgactgatta

SEQ ID NO: 652347 - DNA, 760 bp, Homo sapiens
taaaattaaacaataatgataataattagctgggcatagtggggcatgcctgtggtcctagctacttgggcaggcctgaggtgggcaggcatgggttgagcccaggagatcgcaggctgccagtgcagcttgcatcatgcctcatgaactcaagcccggcgcaacagagcgaggacctgcccccaacaacataaaagaataagagattcctagtcaagccactccagtcaaatatctaactagtctggtcgaaatacctgcatcagcgcattggcatagttctggcgctccaactggcagcctcatcgcatctcctcttccagttccagatctccgcactagcatccgacagggctacgctacagccaggatttagcaaccaataacggctccactgcgctgacctctcacacaaccctgaccacactgcatctggtgcgccataccgttcaacaccccacgcacccacggactacacatccactacgacactaaccttcagatgcctaagggcaccagcaacttctctcaacggctacacaagtttcacccaccactttacacacggctcctcacactcggggggacctgggttacaccacacaaccattaacaagctttccgggctaagccactttcatcaccgccaaaggccgggccttgtgtacacgaccaatcttaaaacctatcgaaacgtgtaagttcccaaatagtttacggctttcatagcacaaagcttggcacgccgcaactaccccac

SEQ ID NO: 652348 - DNA, 456 bp, Homo sapiens
atcctcatttggttaaaaataaatccttgtatatgtgaacccacacagttgaaacccatcttgttcaagggtcagctctatataaaatatatatacaaaaaagaaagaaaaaaataacaaagaaaaagacaaaacaaaaaagaaaacaaaaaaagacaaaaacaaaaagaaaaagaaaagaaaaaacaaaacaaacaaacaaaaaggaaaaaaaaaaaatcaaaaaaaaagaaaaataaaaacaatacaaagactaaaaaaaaaaaccaataaaagaataaaaaataaaaaaagaaaaaataatatgaatatataatataatatatccaatatgataaaaacaaaataataacataaataagaaaagaaaataaataataatgaaatataaataaaaaaaatatgaaaaaaaagaaatgtataaaaaagaaaaatataaaaaataaaatgtcagat

SEQ ID NO: 652349 - DNA, 180 bp, Homo sapiens
  misc_feature (162)..(162): n is a, c, g, or t
tgatgtcgattgttgacaaagaagaataaggcgtcctcaggtctcaggtggattctcttccggattaagaagtagaactggccaacagtaaggtcagagggcactacggtacttccgtcttgtccatgatcagtgcaccctgtgctttgtggagccttctcnatacaatcacggtggacc

SEQ ID NO: 652350 - DNA, 538 bp, Homo sapiens
  misc_feature (6)..(6): n is a, c, g, or t
  misc_feature (31)..(31): n is a, c, g, or t
  misc_feature (66)..(66): n is a, c, g, or t
  misc_feature (97)..(97): n is a, c, g, or t
  misc_feature (104)..(104): n is a, c, g, or t
  misc_feature (158)..(158): n is a, c, g, or t
  misc_feature (165)..(165): n is a, c, g, or t
ccccanaaaaaaaagccccctaaaaccttcnacaaaaaaaaactccccccaaaaaaaaacccctgnaaacgggaaaaacaccccccaaagccccccngtttggnccgggaataaagccacaattaggggtaatatttccacacgaagggaaatccccnagactgncaaatggggaaatgaagcctgcaaactcccaccccccaaccttggaagtgtattcacccaacccctagtgttgaacgagataaggcaaaaatgcacccataggattcccatttatataaagtttaaaaccccagccaaaattccatcccatgcggttgccaagtagagatcagtccctaagaagacagtaaccagaagggggcatgaggtggtgcttcctggggtgttctgtttcttgatctggttgcccggttacctgggtgctttccgtttgtgaacattcttggagctgtacacttttgatctgggcacttttctgtgtgtatgttatacttcaataaaaagttgggctttgtgactagcaaaaaaaaaa

SEQ ID NO: 652351 - DNA, 142 bp, Homo sapiens
ctttgtccatatgtttgcagacaaccctcctcgagcctgtctttcccactcaccttcttcagcagcacaatactcattctcagcagctgtgcggcggttaatttcatctccgtacctacagcaaaggaggtcgccgggttgt

SEQ ID NO: 652352 - DNA, 699 bp, Homo sapiens
  misc_feature (556)..(556): n is a, c, g, or t
  misc_feature (699)..(699): n is a, c, g, or t
cttttgggcaggtgtcagcgcccgtgtcaccgtcacgttacggacatggtgatttcagaagcgtgtggatatactctgcatactaagaggaggccttgatttgattgttgagctagctactcctaacgaaatttttctcaagatggcactcaaacatgtgttgagtgacctgccaactaagctggcttcaaacgcccttgtgttcaaaatttgccacagttcagaggatatatggcctagcagggacataaacaccattcctggagaactgactgaccgcttgtgcttgtgagaacatactgcgctttattcaatgtgcgccagacgaagatatgagcagaaatttcctgagaaagagggacaagacgttatcagacatgcatcacatagtcaatatagatcttatgctggaaatgtcaacctacctggcagctgtaacgcccatcattgaaagggacagcgtaggacaccattatgttaatatgactatacctgccaatgcagctatatctgttgctacagaagaaacatggcgaaaagttcgtaaactcctgtntgatgcaattcataatgaactaactgacatggttgactttttattccagggctataaggctggacaattcatatccttcaggaatacaaatgccggctgcagcctatggaaggagtacatgatcttttatctgctacgaagan

SEQ ID NO: 652353 - DNA, 363 bp, Homo sapiens
acgcatatttaagatgtgataatggctggtgaagataggtgggattattagtgaccgatattagcagatgaggcggtattctagctgttatgctacttcctgttgtttatgctgttcttctcccttgtatcgaggcctgcatagaggcattcatcaggatattctcctgagtcttcttagtagcttgaaagtttgaacgtgattcagaagagggtctgtgggaaaatctggacttagtttcatatatagtataagatcggcatctagtccatatttggccccatatatggaacgacatttatttcaacagtcaaatctataggtcctttctattcttgctgcgactacagcagctatgagatc

SEQ ID NO: 652354 - DNA, 983 bp, Homo sapiens
gtcgatcagatcgatctaagatggctgactgttgaaccggaaatcacccttactcgtaatcccccgactacagacagagcgagaaaatggaatctaatcaggagttggctagcccagaacactattagtgtaatagcatctcccgtacagaaccatgagtgtggcatcatcgtggttgccttagaagaatgatcaaatgcatagaagtttggcgatggctagacacctgcgggctgtatcgtcctaagttcccgaatactgttgaccgactttcggtgctctgtacatgccattatccagttgtctagtcatgtatatgcctggctgttgactactcactgtctcaagtgatggtattgaagcctatctgtgggagaggactgtggagatacatcgaacatcggggcacggacgaatggcatatacttacattgacccaaacagcagagacgaaggttgagctcgatcggtttatgggtaggagaaaaggtcctgggccttttgggaggacctctttggatgcctacgggtgactcgatcgtttgggggccgcgtgttgttaactgtgagagctagaggtgatcaagattggcaactttgtactactggactgtggacccgacgacagctgtcccccattatagggagggtattcgggggacaggttaggaccttcctccaaagatagtgcttggttatcagccccacggcgaccaagttactaagagcggtccccccacttaacatggttgtggtgcagaaacaacgttttgggtttccacaaagagaccgggtcgcaggcaccggatttgtgagcgacccaggcttttaaaggcgaggtgctgcttcaatggctcccctacagtctcatacgcgcgaggcttggtgtgtgtgtcgggtcgtatttgggcgaacgccaccaaaagacggcccacaataggtccgccatgagagctcaacctcaccgcagccgttctacggtg

SEQ ID NO: 652355 - DNA, 986 bp, Homo sapiens
  misc_feature (402)..(402): n is a, c, g, or t
  misc_feature (701)..(701): n is a, c, g, or t
actctgggtcctgagtcaaaggaagacaagcagggcatactctgggctgagactgttgaaggaaaaatagctgaaggcaagctagataaaaagcattgtcaaacaagcagaaaacagcaccaaaaagcagcagggaggaaactggggcagtgaacaaagctcaagtccaaacaagacgcacagaagaagtaagagccaacaaactgcctttagggttccagcagccacaggagagtggcagtagctggcttcatccgtacactcaaagctcaaagcctaatgcagcaggtagtttcctaccaacccccagttcacaagtaaaaagcagaggtctcagtaattacatgactagcgcaacgtcatgggctagtaagtatccgttctagaacttgaacccaggtntggctgagagcaaagcccatgttctcagtctccatatgataaccagattctgactgagtcaatgaagaaaaaaaggagttatcaaaggaaatccaaaaggaatgaccaagattgagggtgatgacaggaaggcactacccaggaccgaagtagtccaggaagggcatcacagcaaagacctgagaaagggtcagagcagagttccacaggcttagagatggtgggatcatgaggagagagaagtcaagtcttcaaagtggagcagtcaacaggatgatgagtgacagtcaaattcttgnagagctcctaaaggtctgactgtccacagtagcccagagagaggacactgggcatcagtcagttcattcagcaacaaatgtagctaataatgggacaaacctagtcatgccccaaggaacctgacgtctagcagagaaaacagatactgacagactctacacagtgccaaacctgagagagactggtgtgagcagcaacagtgggcagaagcacaggtcagctccctggctcacacccaataggtgtcctatctgtgagctctgacagtgtagctaactgccagg

SEQ ID NO: 652356 - DNA, 156 bp, Homo sapiens
agccagctctccatgctcagtatgagcagtaaccacgaaactaggcaattggcacatcagcctgatcagagatgcatgggaggtctatgtcgtaagtgtaaattctaaagagctaaaggatgaatcaggacagtgatggaatggatgacatcatca

SEQ ID NO: 652357 - DNA, 315 bp, Homo sapiens
gtttcagatgcaggagtaccgggcgtccttcaacacttcgaaaggatcatggcgggcgctggggccgagagttcaagggctgcctcatcagcctggctacgacgtggaagaacgaccggccaggtgaggccgagttcaaaccgcatcatgagccttgtcgaccccaaccatagcgggcttgtgaaccttccaaggccttcatcgacttcatgtggcgggagaacacccgacacggacacggctagaccaggtcatcgcttccttcaaggtctaagcaggggacaggaacttcatcacagctgagggagctgcgga

SEQ ID NO: 652358 - DNA, 441 bp, Homo sapiens
  misc_feature (8)..(8): n is a, c, g, or t
  misc_feature (20)..(20): n is a, c, g, or t
  misc_feature (66)..(66): n is a, c, g, or t
  misc_feature (114)..(114): n is a, c, g, or t
  misc_feature (123)..(123): n is a, c, g, or t
  misc_feature (128)..(128): n is a, c, g, or t
  misc_feature (141)..(141): n is a, c, g, or t
  misc_feature (182)..(182): n is a, c, g, or t
gaattttntgcctgaagggntccaacttttcccgctgcttttcctgctgaagaccagtgggaaacnaattgcccagttcctgttgacccgccccccggagtgcccaactgcctntgggctgcntggcnttaaaaggacacntctgtcccattggtcagcttagggccctttagcacccacancgcgtgactgagaggagagaggtggaggaggagggattgtcctgctcagctagagggagataaagagcagcctgggagcttggagctcgagcctgggaacagatacagcttttgatgtatgaggaagatcaaaaaaaattgtattaagtttctgttctgtttttcatttctaggaaaatacacctttaatgtcatattttctaatctaaattcttgtaccatcttctttggaaacgattaaagtactactcattttaaa

SEQ ID NO: 652359 - DNA, 213 bp, Homo sapiens
gctctcagcccttccctgaggtgcctccttggaccggggaagtaagccaagccaagagagatggaggtgcccttggggggggcccttggacctcctctaatcgatcttccctcctaaaaagaaagttaagggcgctgctaactcccctcgaagcctcgagaccagcttgcttgggggaagatgaaaaggttgagccagagcgactggctataa

SEQ ID NO: 652360 - DNA, 162 bp, Homo sapiens
tgtccatggctatagtcattataacttaatggccatggaaattcttgaaatccccttcgatacttacacatacactggaactacttatctgataccacagagcagaatgtggattatgagcctgtacgtatcagacattatcatatatcaaaaatttaactg

SEQ ID NO: 652361 - DNA, 257 bp, Homo sapiens
  misc_feature (5)..(5): n is a, c, g, or t
acatntatcccacccagaaatacacacctgcccacctgccaccaactcctcaaacccaaccaaatgagagaaccttgctcaccagaatcctactccctcactcctcaccccaccccctatcccagaatcccacctagagactctctccacccttctcagaattccagtttcaaccagaattccaaccaatagactccatcctctaaattctaaccaatgaaatatctccctagcaagatcctcttcttttcccagag

SEQ ID NO: 652362 - DNA, 477 bp, Homo sapiens
ctgtatacgtagggctttcatctagcatggcataatacgacaaagtcagattagggtcagttcagctgatttatgtccttctcaaaaaagttattacagaaggtatatatcacatctgacaggcatgaacttgacatgattagctggcatgatttttcttttttttcccccaaacattgttttagtggccttgaattttaagacaaatattctacacggcatattgcacaggatggatggcaaaaaaaagtttaaaaacaaaaacccttaacggaactgccttaaaaaggcagacgtcctagtgcctgtcatgttatattaaacatacatacacacaatctttttgcttattataatacagacttaaatgtacaaagatgttttccacttttttcaatttttaaacacaacagctataaacctgaacacatatgctatcatcatgccataagactaaaacaattatatttagcgaca

SEQ ID NO: 652363 - DNA, 102 bp, Homo sapiens
aaagccaaggccccccttttttgcctagggtgaagcccagtgggggggtcccagctcgctccacccttgcccccctagggtcaacccctcccccccccttta

SEQ ID NO: 652364 - DNA, 1136 bp, Homo sapiens
  misc_feature (336)..(336): n is a, c, g, or t
agcggagctcactctgctgaagggctgagaggcgcacccggtcggcagttgggctcggagcggcaacggggtcaggatggacgaagacgtgctaaccaccctgaagatcctcagtctactcggcgagagtggggtgggcaagtccatgctctgagcttgaggtgacacacgatgactacgtattgagcgcacagacttgcagcgaacacatcgtgtgtcgacgtttcagcgtgatggactatttccacgtggggtgttggcacttatgggtaaagctttgccctactggggagtacgttggcgggggcgataagaggagggttgtataagcgattntagatccccagacgtaattatatgaagggtgctacacggggtggttgatagtatagtttattgatggtcttcacagaaagtagatagtatttttgttgcaagacctcgtgataatttgtgggcacacttggttttggggggaccaatatcgtggtgaccaaggagagagtggacgcattatgtagtgaggagtgtgttattgggggggaacttaaaagtcggcagtaagggggaaactctggtggagaaggtcgcagtgggaaaaatgaaaaggggcgtgtagaattttttgcgaccgcaaaaggacgagtttccactggtttgatgtttataagcaggggcgaagggtggccgaaaagaacccctggttgaatggtggtgtgtacacccactgtggccccttttggaaagaaaacttttggtttgaaaccaaggagttcactttcaagaacccccctgggagctgctggggacaagttggggtaaccccgaaaataaaagggggggtcaaaacctggttcgacaccactggacataaaaggtccaccgggagggagagggaagccttgtgggggggggaataggcgtcctgcgggtggataaaacctcctgggggagaagttcccatactcgttggcggtcttttggaaccacaattcagttgagcagtacttttctgtcgttttaaaaggcctttaaacctgctattataagagggaccctgcagagttggcacgtaattggttaaaataccattgccggacacaaatatttggcaggaaatcccccccaattgaccc

SEQ ID NO: 652365 - DNA, 172 bp, Homo sapiens
attctgcctctgcttctgcttcctgcttctgctccttgggatgtgcttcttccactccgttgtacctcactgaccctcttgctctatgtctgcctatgtctgatgattaatcattagctctggtattactacccaaccacaagatgagcaattgatgtctgtaagctggatg

SEQ ID NO: 652366 - DNA, 878 bp, Homo sapiens
gcaacaatcccttctcttccctggccgggaactccgacatgctcatcctcccagcctctgcggactgagaatcgatgagcccctccctaacccctggagccctacggccgcactgccaggcacccgcgtccttgttggtagagcaccgcgatgagcgcacagagtgagctgatgcactacccccgttgtccgatcaactgcagacttcgctacgtagtcggtccgactcctgttgaacgtacgccccctagaccaaactgcgaaaaccctcccagtcccagtgatgtaaattcattcccccccctggccacaaaccgcccgaaccgtccgcccccgcaggcgctcagcgggatcgccgtacggccacacttcgcgccccacggcgcagacacagcgtatgggccgtggggacacacctcagccgtgcccacagcgtcatacaagaccccggtttcaccaaacatggcccgagcgcacgccgcacattgcgcaactggtccgaccgcaacccgtcttaatgctcccgccaaggaacccctcgcctctggaacactactattgcctgcgagtcacccatcccaagtatagttggcactgtggggctccaaacaatggcgtggccccccggacagtacatatatacagccactcggacgtgacacacatcgccgcggcgaaactccttgggcgcaagctgccaacgcagaaggacgactcaccaggcgactcgtgcccaaagacaagtttcgacacccaaggaatgcgtaataccactgacctagacgcccaccagcagagattgaccagagcgtcactcccacccatacgcgacgggattcacgcaatgccatccacaactgacacctatatgtccccaa

SEQ ID NO: 652367 - DNA, 225 bp, Homo sapiens
aagccccccccccaggggggggatttggttttgccccctttccccccggggaaattcccccaaagggggggggggggttttttaaccccctaaaccccatttcctttttttaagggaggctttttccccccctttttgggggggttttgttttccccaaattggggcctgttatttgtataaatgccccccccctttcccttaaaaaaagggtttttggggccca

SEQ ID NO: 652368 - DNA, 278 bp, Homo sapiens
ttcatcatgcaggtcggtgttttaatctgacgcaggcttatgcggaggagaatgtttcatgttacttatactaacattagttcttctatggggtgatagattggtccaattgggtgtgaggacgtcagttatatgttggggattttttaggtagtgggtgttgagcttgaacgcttagcttaacttggtggctgcttttaggcctactatgggtgtacgatttttacctctctctaacaaggttttttcctatgtgtccaaaagagctgttcctcttg

SEQ ID NO: 652369 - DNA, 213 bp, Homo sapiens
cacactgcaatgcgtgagtatccatattcatgcaccaagcaggcattcttcttcattggcagcatcacagcagtctccatttgtcacctgcctggactgcagtgcacataaacacggcttgctatagccttgacctgctaggctcaagtgatcctcctgccttaaccccttcaagtagctacaggtgctcaccaccatgcccagctacttttt

SEQ ID NO: 652370 - DNA, 258 bp, Homo sapiens
  misc_feature (49)..(49): n is a, c, g, or t
ctccatctaaaaaccaaacacagcacaactaacaaatcaaagcgaagcnttggtgattgtatgctgcagcgccagcaccttcccttgatgctatgaatagagctatgagtgaaattatgaggtatctttaaagaaagggcaaaagtggtcgaaaatttaattggtttaatattgtactagggtatcatctgtgcgagcaataacaaggggtatatttacctttagaatagcttctagaatatagactaatctttgaaa

SEQ ID NO: 652371 - DNA, 141 bp, Homo sapiens
gacgcgttctcctggactatctatattagagtcacctagggcctggtcagggctggcttaaagggcatgtggtctgtgcattcacatggagccacctgccaacagggccccatatttagtttaaccccctgctgttaccat

SEQ ID NO: 652372 - DNA, 321 bp, Homo sapiens
acaggccttgctacagcatccgtccactgctgtgttcatccgacgtatgatggcctgccaacccgaaggtctcgcgctcgcttctggtaggatgtccttctggtgctgccgtggggccgggtcagtctggcccgggcgattgttgtctagaatgggcacgaggttgtgcagcttatagatgctggcgaaggccatggcctcccatacagagccctctgagagctccccgttctcccagcaagcaatagactcggtagctggtcttgtcgaagtatttggcggtgtaggccatcccacaagcggcccctaggccctggccca

SEQ ID NO: 652373 - DNA, 203 bp, Homo sapiens
acttacaggcaataacattaggagcacactcagtacagctaacagatcaagtgcaggttcctaaaggtgggcttgtgaacatcccgggcctttcagttttaaacgctggacatatgaatatttactgtgtatctggttttttcatggcaggctttggatactcggccatgatatttcatgttttttccttttttttatttgag

SEQ ID NO: 652374 - DNA, 313 bp, Homo sapiens
tgaagtcaattgagtaaggacacctccagccatccagaaaccaacactgtctgggggccaaggtctgacccccatgttaatacaaggacgattgttcacttcatcacggaacacagcatcattatgcaatatgaaaccagccaactgccttttgtgcggtctcctataggaagtatcgcaattgttttgtcctcatttctcgtagtctaacccttttaatgcctttccctcaacttgttcgcaccacaactatctttgcaaaaaaaagtaaagacaaagtaaatgatggtttacaaaatccaccaaaaaaaaa

SEQ ID NO: 652375 - DNA, 207 bp, Homo sapiens
gaacgcaacccgtgaggcgttgctaggcgtagagattagacgggctctgggactacgcttcggagcccggggagatcggctcctgtatccttcacggtggtccgccagggcttccttccttgctgttgggagctgacggctgagggacgcgactgccccagccgcgccacgttcgagacttgtgtcagtcaccaggccattcaacgg

SEQ ID NO: 652376 - DNA, 259 bp, Homo sapiens
  misc_feature (88)..(88): n is a, c, g, or t
ggcagctagaggatccgtatatggttgctagatctctagcaaggctggagatctagacaaccaatacaagaagtacaaagagcactgngaaattcatcacaaaaagattatcgtctaagcacatagtcatcaactcatctaatgccaagacaaaggaaagaatcttaagagctgtgaggcaaaagcatcaggtaacctgtaaaaggaaaacttatcagattaacagccgatttctcagcagaataccctacaagctaca

SEQ ID NO: 652377 - DNA, 314 bp, Homo sapiens
tttggtttttttgcagttccccagccctttgtttgcccccttaaactttgtcatggagaaagtggagagcatcctcccctccagtttttggccccagctaacccgggttttagagaagccctgttctcccctcacctcccccgccgctgcccccatttcctttgtgcccactccttgtgggccccaaaaaagcattgcttttaaaaagggaagcccttccgagatttttaaatgttcatgggcttttccatttttaaaactgttttttttgtccaaaattcccttatgttccgttttttttttttttgccttca

SEQ ID NO: 652378 - DNA, 268 bp, Homo sapiens
ttttttcctgtttaacccccccaaataaagggggctaaatagggaatgattttcctagggcctttgcaaactgtgataatcctgggccctgccatagttttaccgggctcttgggccttgaattattaggatgtaattggacctccttgtagggttccccctatttaagccccctttgatgttaattagcttcgggtttttatgcttgttttaagatcccccgttttggatgggaggggaccaagctaaataaatgtttgtttggtga

SEQ ID NO: 652379 - DNA, 129 bp, Homo sapiens
ggtttggtgggaactggaggatccagttgagtagggccccggtttaaggagaccaatagaaactgggcttgtcgagacagagaagactcttgcgtttctgataggcacctattggtcttacgcggccgc

SEQ ID NO: 652380 - DNA, 1035 bp, Homo sapiens
gctctttggataggaaggatctagcgcatccatatcctggagctcctgtgtgagactgtctcagccaatgctgatgacttctccccggatgtctggatcaagtcccatgtcctggctccaccgcaatttagacacagactagactggactgtgggcctgaggcgtgaagagcttcttcgaggggcacttcaatgtgtgaagtgccaggacactagcatttattgagatctgtaagcttctcagaagacgagtggacctcccaggccacacccgagggtacggggctggcacggtggcatcctggcgctggactggagtgctgctgcgtctccagacggcatctacgagagaggatgctgtctctcttggtggtggacgtgggcaatcctgaggaggtcagacgtgacagcaaaggctatgctggtggcacctggtgcaagtcatgccttggtagcagccctcaggagtggcagcgccttcaccagctgaccaggagactgctggagaagcagctccgtccagtgtaccttatagcctggaagtatcttcagtccgaaccccataatcaagctgaagcaccttgaccaggagttgcaactctccgtactctacctgaggactatacaggtacaatctgcagcatagctgtcgtacataggattcctctggcaaagctggaacccacgtggtcaaatcctctgtggcagtctgacccgactcctggactccaatcagggcgatacaggcagataggccacaggcgctaaaacggacccagagctaggatcatgacacacagcacagccactgaggcaaacgagcccagggggatcctgcgcaggctccgtgaaccaaccaagggaccaggcaccaacccgggaggactgagaacgcaccaatccagcgtgacagccaaggagaacaccacgtacggtgcacagacagacactcgagcacagacacagcccgctcagtaacacacaaggagaccaaagggacacagagacgcgttaccacacgccacggcgcagcgcc

SEQ ID NO: 652381 - DNA, 333 bp, Homo sapiens
gcctgattcccgcgtgacccggatcgaaggttactggaagtccgacttcgcccactgatccgtccctgagacccgcgccctcaagcaacctgatgccaggggcgctggtgagcacatctgatatgaacgaaaccgtgcaaccgatggtgatgactactcacgcgggcgatgtgagcggtgacaaccgtgctgctcgcgatcagcgcaatgacctgtggttcaaacgctccatgttcggcgctgccatgctggtcttgctgttattggccagcgttgctgcctcaacgctttggggcggcggctggccttcaagacttttggtttcggtgtcga

SEQ ID NO: 652382 - DNA, 129 bp, Homo sapiens
  misc_feature (20)..(20): n is a, c, g, or t
  misc_feature (32)..(32): n is a, c, g, or t
gtcctttagttaatcgcggntccagcttgagnggggcaccggtttaaggagaccaatagaaactgggcttgtcgagacagagaagactcttgcgtttctgataggcacctattggtcttacgcggccgc

SEQ ID NO: 652383 - DNA, 136 bp, Homo sapiens
  misc_feature (19)..(19): n is a, c, g, or t
  misc_feature (67)..(67): n is a, c, g, or t
ctgctgcagtgccgccttncgccccgctgccgtgcccaggctcgccccctcctcctcgtcctcggtntgtcgctcaggacgcgccgtcctgcatcaactccttcccctccagcgcgtccagctccagatccacagt

SEQ ID NO: 652384 - DNA, 430 bp, Homo sapiens
aagagatgggatcttgctctgtcatccaggctggagtgtagtggtgcaatctcggctcactgcagcctcgaactcctgggctcaagcagtcctcccacctcagcctcttgagtagctgggactacaggcgcgtgccaccatgcttggctaacttttcgtagcttttgtagagacaaggtctcacttttttgcccaaggctggttttgaattcctggcctcccaaagttctgggactataggtgtgagccactgtgcttggtgctgttgagctcttgataacttgaggcatcccctttccagtcaccttggagatagttctgtctcccagaaatgggctccttatgaaacccaccccattccaaaatggaaatctggaatccaaatactgtttgaaaaaaaatggtaatctttttcccaaagggaatttaa

SEQ ID NO: 652385 - DNA, 487 bp, Homo sapiens
tagattgctgtgtaaattcttatacagcaatagaaagcattctaaatagctgctagtctgcctggtctcagtattcatttattagagactgagttctgtgattatttgaccctattaactttggggggtggggaggaaggaattattcatgaattttggactacatcagaaatctgagatatccaaagccttggtactgtagctcagggtcaggggccagtttctatctgtagtgtacctgacttatggttatcatataaacaagccaggagatattctaaggagaagattgggtcctttttattgaacccaggacctcacatgtgttatgcaagcactacaccaagctgtactccaggcccgtgaaaggttgagactgggttagcactatttccaaagtcacaagacctatgattgcttcattaagattgtaaggttaaccatggcttaaaaataaatggttttggtgaactactaaaaaaaaaaa

SEQ ID NO: 652386 - DNA, 1508 bp, Homo sapiens
tgctggtgtgtggtgtgggctggtgtcgtggtctgcatgtgatcgttcggatggttcgctttctcgcgtcatttcgtgtggctgttgcgcgggctttatttgtcttccggggggggtacgcgtcctgtccgttgtgtgcacagctgtacgcttggtggttgtgtgtgtgcccccttgttgcctcccactgtgtctcttgggtttctagtctctcctcgggttgggtggcgccgcttgttcctcggggtgacgtgttccaccaatagtgggtttgagtcagcccctgtggtcgagggccagtgtctcgcctagggccggtttccgccgtgtgtgtccccacgtagaggcgtgtcgcccacagtctgtttcggtcccccgggggtcccccggtaggcgtctcttccgggttatatcctcttgtccccgggcctctgggatgccccatcgcccttggttgggcccgctatcccagcgttctcggttggtgagtatctggggaccctttggattagggccggcgtttcttatccggtgcctgccatttgccccaaagttcatgtccttggagccacggggctcattcatgggcctagtctagtttttgtggacgcccctttggggcgcagcacacacgtttgcccagggcatctgggcccttggaggtgccccccgcccccctgggtggctgttcttgccccaccaggggtttccgcttgccttgcatggctctttgtctggcccacccccccccagggcccccttatactcttgtctgtggttccccgttccccgaacctttgcctctctgagcccctcttgtctgttactcgggggtcccccccttggtgaactgtttctccacgcttctatagaagggtatgccctcgcacctcaccctcggggggggtttctgccacggcgctgtctctcgggaggttttccccacagggccccctcttgagaggccccccctctctcgtgtgaagagtttgtctccactgctgctgtgtctctgggggagcccctctacagagagtgtgtttgtttgtcaccctcgtgtgcacgtgtctgcactgttgtacgcctctttcccactatggtgctcgattgggtcctcgcccaaatttcctcgcctcgagtttctcgggtgccctctctgagcctccccacaaggttcacggcttggtggcttgagggttcttccctcgcttctttggtggcacgctggtgtgcacgccaccacgcacgcacgcacgcagctagccagcagccacccagagacacttctccccatttccctctagaccccttctgctcgggttagaagaggccactttcacggggacttccctccccagctgccttcttcatactgggaatagagcttaaaccaggctgagcctcctcctgttgcttgtaaataatgatgatattaaggctggatttggagatttgtatccccggtccctctgggatgctccatttaaacccttccccctcccttggga

SEQ ID NO: 652387 - DNA, 374 bp, Homo sapiens
ccgttgtcagtgagccaagatcacgccattgcactctggcctgggcaacaagagtgaaactctgtaaaaaaaaaaaaaccaaaaaaaaaaccaaaaatttccccgatttaccccctctttttataaaaccaaaactttttacccaaattttgggggaaaggaaaagggttttttttatttaaaaaagggggccttaaaagaaggaggggtttatttttaggaggcaaatttgctccttttggaaacataaaaggttggaattttggaaactaaggggggagagggggacccggggcctcttggattaaaaggccttcttgttttaatgcagggcctaagattttttaaggggacccgggctcgaattcgaaata

SEQ ID NO: 652388 - DNA, 104 bp, Homo sapiens
tctgacgataattcaatagctttagctatgtcttcatcctctttgtttttgttcgatgacgtaccattcttggcagcagctgagacagtctgagaacctgctgg

SEQ ID NO: 652389 - DNA, 389 bp, Homo sapiens
tgaggtatgagctgagagtcaaacttaaaactgtaaactccggggtctgcatccttctctggtactgtcagagaacactcctccgccttgtattttaaaacttcttttcggccggtcgcggtggctcacgcctgtaatcccagcactttgggaggccgaggagggcggatcacgaggtcaggagatcgagaccatcctggctaacacggtgaaaccccgtctctactaaaaatacaaaaaattagccaggcgtggtggcggcgcctgcagtcccagctactcgggaggctgaggcaggacaatggcgtgaacctggagggcagcgcttggtgtgagccgagaccgcgccactgaactccagcctgggcgacagagcgagactccatctc

SEQ ID NO: 652390 - DNA, 144 bp, Homo sapiens
gccttcatttgaataggaatcagcccctccctgtaattaccacatcatcttactgttgcctgtgccttcaccagactgtaagccctggagggcagtacctggtctgtctcattcatggatatagctctagctgaataatctcaa

SEQ ID NO: 652391 - DNA, 246 bp, Homo sapiens
ccctcatattgtcttatgcccaatttctgcctccaaagaaaaaaaggtaaaaactaaaaggcagaaatgaaatccacaagcagacagcccggccccacaccaagttcttggagattactctttggcagtgatcttccccctgcacttttctgatctaattactgtttaataccttatacccaaaacacttactaccaacacagctgttgtaactgaacagctgttgtaactgaacagggggatcct

SEQ ID NO: 652392 - DNA, 156 bp, Homo sapiens
  misc_feature (29)..(30): n is a, c, g, or t
  misc_feature (82)..(82): n is a, c, g, or t
  misc_feature (108)..(108): n is a, c, g, or t
  misc_feature (126)..(126): n is a, c, g, or t
cagtgatctgtgctaacagctgtattcanncttgaggaaaagtcacttcctgaagagaatggaaattcaacttgaacattcngaactttgcctacgaacataatcctngtatagtagggtgatgtnactatagtgaatatagaactaggacacagg

SEQ ID NO: 652393 - DNA, 507 bp, Homo sapiens
ctactacacagagctaccaaaatgaggcaggtcatatcgggtagctaacttagtgggagcaagcagaaggggatttgcaaatagtctgccccagagggcctgattcctggaactaagaaaatatgcattgtctttgcacccttaaaatggaaggtgctggattctaacgagacaagaaaggcactgctcactgctcctactaacataccgaagtaaggggttaagtctgcctgggcccaagttccctccggaatgcaggacaggtctggggttctggcctgctgctgttctggcttatcaagggtgcctctgctctaggtagtctccacagcctgtctacaaccagcccagacttcgtgggtaacagcagttctgattttccttacagattactattcaaggtcgacttccaaacaaagggtgtgaatgatggaagtgaaccgtgagactgggaaaagggtgcagggctgaggggtgaggaggaatcagcggggaaagaagacccgt

SEQ ID NO: 652394 - DNA, 183 bp, Homo sapiens
ggacggatgaggcagatcagaaactgggggaggcctcaagaagggttacaacgaatggagagcagatggccacgtggcctgctctgtcttatagcgtcacaagccaggagcaagccgcagagagagatgctgttccatgctggcctgtataggttactttgctctgttctattatctgtcccc

SEQ ID NO: 652395 - DNA, 121 bp, Homo sapiens
ataacttttattcttttggcagagcacctgtttaagcatgtacccctagtgttaaagatttgtgtcctctcattccctctcttcctctgtaagtgcccttctaataaacttttcatggaag

SEQ ID NO: 652396 - DNA, 694 bp, Homo sapiens
taagataacagggggaagataaaggaacctatttggtggtgagagttttacattctacttgaactagtaaaatattgattgtatgtagactatgaaaagttatatatgtagactgtaatctttaaaagggccactaaaaaattattcactgagataattaaaaacacattaaataaattaaatttaagcattaaaaatatttaaattatccaaaaaagtcaaggaatagaaaacaaaggaatgaaaaatagagaaaacaaataaaatgggagagctaaattcataataattatattaaaagcaaatgatctaaatataccaactaaaacatagagattgttaggatagatggattaaaaaaataaaccaactacatgctatgtacaagaaactcacttcaaaggaaataatataggtaggttaaaggtaaaaggttagaaaatgatacgtcatgaaaacactaatcaaaagtaaatggacatgtttatattaatatctgacaacattccatcgaataacagcacatgaaatattcctttttaagtgcaaatgggaaattcactaagatagattatattctggggaaaaacaaatttaacaagttgaaaagctgaaataataaaagatgatctctgaccacagtagaattaaactagaaataaatctagttgaaagatatcacgtgtatagaaat

SEQ ID NO: 652397 - DNA, 136 bp, Homo sapiens
  misc_feature (2)..(2): n is a, c, g, or t
cnccgaagaaagtcacaaatacatatcaaatcatttaatacatatacatttgcgaatcattgagggttgctacggctttgaaatttgagactacttctttatctgtgtatgtgctttacacttgtgtcattgcaat

SEQ ID NO: 652398 - DNA, 394 bp, Homo sapiens
ggtcggtacgcaggtgctgcaataattaaatcattggaactaataaaaaaaagggcactcgtgattaaatggcattacagcctgcgaggacacctggggccagctgggttttacgtctagaatttgactggtcgccccaccccacttcttccaccccacttcttccttcaccaacatgcaagttctttccttccctgccagccagatggatcgcacagatgggaaaggcaggcgcggccttcgtggtcagtagttcttcgatgtgaaaggggcagcacgagtcattgtaaacttgatccatcctcttggcttcttacaaagttagaacagctaaaagacgtacgataagaaggcaaggctggtggaatgtacagtgcatatgggctgcaccctg

SEQ ID NO: 652399 - DNA, 133 bp, Homo sapiens
ctcattctggtggttgagtgtacggagggtgctattggctggctggcctggggttggaactgagctgcctgtgttcctgtccaagcactgttgaagcagtgaaacccctgacgactctcaaccacctgtggac

SEQ ID NO: 652400 - DNA, 894 bp, Homo sapiens
tagcatcaacataaaattaatagattatattcgacacaaataagcgggccttgttagatcacttctatcgataacttttgataattagtgagtgtggaaagcaaagaagtcacaggtagggacatctagacaagagtgactcacacacaaggaatgtgttccttcttttattgtgcgtcgttttaacctgactgaatacaagatcatcacgagcactgcactcctggcaatgattacatacgttagaacatggatattgctctgtaaacaacatttaacaccattctattggggactgcattgctttttatcaaatctaaaatatagattcatttgacaaacaaaagaacaaacaaaaataatattactacagaaactaacacactctacttctcaatccaacaaaacagcataaagacgaaaaacttcgtctactacatcagttttccatctcttctcacagcgaattcgcatagatatgatttaattacatgctctaaattcacgccaaaacgtgatacccccacgatacccaaacacattagacaaggatcacatcccgtttcaataacccacaaattcctattattctatctgaccttcgtcttaatacctaacagccacggtaaaaaactctatgcttgaccagtcaaccactgggcctaattagtacccttaagacatactccttaaccatcatttagtatatatcttacatccatcttcaatatccccaccaatatcgtgttaactcgcattatcgtctacaatcaggtaatttatattaagacaatcagactctcattaggcttcggtactgagtcagacatacaatatacttccaactcacgcagacagagctacatgtcgcgcgatattcactatgaatgacct

SEQ ID NO: 652401 - DNA, 252 bp, Homo sapiens
gtgcagacctatgccacagacttaaaaactgacaggtttactcagtaataagggaggtctatgcgaaactcagctggaggggaccagcaagccttacaggttcgctatggtcagaagatgatctttacatcagttgttggagctgacaggttagcagtttccctgttccctgagggacagcaataggacctttattctagctaatactcatggaggtttgaaaaggggaaatttgggatctcttggctacta

SEQ ID NO: 652402 - DNA, 119 bp, Homo sapiens
ttctactactattaggacttaatcgctgcaaagcgagggctctcaaatcatgaacaattattattattactgctgtgcgagaaatgaatgagcctacagatgataggctatttcatgtg

SEQ ID NO: 652403 - DNA, 586 bp, Homo sapiens
  misc_feature (128)..(128): n is a, c, g, or t
ggcttcctttttctttctttttaaattttgtgtgttaagcaatcaagaggtgactctgttgatttgcaatttgatctaatccattgttccacagggctgtctccccttggatcacaccctttctgggnttgctggggtcacgggatcatgcaggccaagagtgggggcctttgtcctatcctcagtgttatcacatcagggtcacctgctcctagtagctgaatctggtcatgagcatggtttctggaacacagcaggctgggtggccagtggcaaggcactgatttctctgtgcttgggtttcctcttagataggaaggttgaattaatggggcctggcctcctagggtaagtataaggattaaggagttgatgtgtatgaagtgcttaggacagtgccttgggcagagtctgtgctacctaagtattttctgctgtaattactattaaaaaccactccaggccaggtgtggtggcatatgcttataatcccagcacttttgagcccgaggtggaaggatagcttgaacccaggaaattgagaccagcctgggcaatatagggagactccatctctacaaaaaat

SEQ ID NO: 652404 - DNA, 546 bp, Homo sapiens
  misc_feature (54)..(54): n is a, c, g, or t
tacaggactcacttaacgccaaactcgcgaattgagttatacaaaaagtatatnttggttcatctgaccatatgactgacattctcccaatattcttctggatcatccaaatgctctctagcaaacttcagaagggcctggacatgtactggcttaagcagtgggacacgtctggcaatgcaggatttgagtccctggcggcgtagtgttactgatggtaggcttttttttactttggtccagctctctgcaggtcattccataaggtccccccgtgtggttctgggacttttgctcactgttcttgtgatcattttgaccccacggggtgagatcttgcgtggagccccagatcgagggagattatcagtggtcttttatgtcttccatttcctaataattgctcccacagttgatttcttcaaaccaagctgcttacctattgcagattcagtcttcccagcctggtgcaggtctacaattttgtttctggtgtcctttgacagctctttggtcttggccatagtggagtttggggcgtcaaga

SEQ ID NO: 652405 - DNA, 468 bp, Homo sapiens
  misc_feature (214)..(214): n is a, c, g, or t
  misc_feature (400)..(400): n is a, c, g, or t
  misc_feature (432)..(432): n is a, c, g, or t
  misc_feature (463)..(463): n is a, c, g, or t
ggtatttgaaccagagcgactccattttgagtgagggctgggaaaatgaggctgagacttactggcctgcattctcagaaagttaggcattcctaccctctaggattgaattgggacccctttcctgtaacatatttctggtgaccacagaagggactatagtgcagaaacgttgacccaacggctacctttgcgtaagtgttggggtcctgtnacatatttctggcaaaccacagaaaggatgatactgaagaaatccccccaaccccaaagaaatagactgcagcactgattggaccgactttgggtaagtgatggggtacccgaagtaacaaaatgggatttgggttaagaggcccaacttaaggggaatttggaatttccccctaaagaccagaantgagttaagaggcccctccttaattaaaaggncaaggacaccttgacctgaccttaaggggtngaagg

SEQ ID NO: 652406 - DNA, 450 bp, Homo sapiens
  misc_feature (165)..(165): n is a, c, g, or t
  misc_feature (386)..(386): n is a, c, g, or t
  misc_feature (427)..(427): n is a, c, g, or t
ggtttggcctcgctcccacgggtcggtcaggccctccccgccccctctcacctgcgggaggcggggcgggcacggctccaccggagccgcagccgccgccgccgcgccggggagggggagtgggggagggggagggggagaaggggaaagggcagaggggaggangaggcgggaggaggaggagtaggggagccagtgaactaggcggtcaggcctgccgggcggcgtacaatagcgcggctgtgggcgggggaggctgccctcccgcggctgcagccggagccgaaggtggtggctgcacagtagacgccccctcacggcttcccccacacgctcccgccccctcgctcgcccatcgcgcttccctcacaggctctgcagtcctnccccacagacgccttcccccttggactctcattcccttttncacggagccccgcgctttcgtga

SEQ ID NO: 652407 - DNA, 163 bp, Homo sapiens
gaggggtacatgagaaggttgctatacaggtaaagctcatctcacagggggttgttggtacagattgttacattatccacgtattaagcgctagtacccagtagtttgcttatttctgctcctctccctccctccaccctctagcctcaagtagaccccagtg

SEQ ID NO: 652408 - DNA, 200 bp, Homo sapiens
ggcgggggctaccactcacccttggactcagtgtactgaatcacatggggttccactctccgtccatctcttcactcccagtcctcgggattcttagcatcaggctcggggatatgctcgcggcttgtcccgagtcctcagtgcattgagagtcgtgtagggatcaatcgatcttgtggcccgctcacccctagtgctgc

SEQ ID NO: 652409 - DNA, 291 bp, Homo sapiens
tgccgactgcacaattaaaacagatccagtcactgtgagatcaagaggaattggatttgtgctttttaaagatgctgctagtgttgataagggtgtggaactgaaagaacacaaactggttggcaaattgatagatcccaaaagggccaaagttttaaaagggaaagaacctcccaaaaagttttttgtgggtggattgagcccggatacttttgaagaacaaattaaagaatattttggcgcctttggagagattgaaaatattgaacttcccatggatacaaaaacaaa

SEQ ID NO: 652410 - DNA, 351 bp, Homo sapiens
gatcctgtctttacaaattaaaaaaaaaaaattagctgggcatcgtggtgcacaattgttgccccagctagttgggaggttgaggcaggaggatcacttgagcttctgacctcaggtctctgcccaccttggcctcccaatcactatctttctataacccaattttagtatttatccttctcgtacgcctatatatatgtatacacactgtttatatttataaaaatagggtcacattataactttggaaacatgcttttgttgcttcatgtgttctctacatctttttttttttcttttttggagagggagtttttctcttgttgcccaggctagagtgagtccgtctca

SEQ ID NO: 652411 - DNA, 390 bp, Homo sapiens
ggcgactgtggagttagcgtcctcaatgtggaccgcctgagctcccattaggagcgctggtgccagcaggggactagcgtgagagttggctaaaaaaaagaaaagaacatggaggcagatataatcacaaatcgttgagcctgcatcgaagatttgtgattatatctgcacagtatggtttacaactagtagagagtcaaaatgaattacagaatcaattggataaatgtcgtaatgaaatgatgaccatgactgagagttatgaacaagaaaaatatacccttcaaagagaagttgaactcaagagtcgaatgtgagaaagtttgggctgcgaatgtgaggctgttatacgtacaacaaaaaatgcacctggagaaattggaagaacaa

SEQ ID NO: 652412 - DNA, 178 bp, Homo sapiens
atctcagtgcggtgatggtagcctttctgcccaggtgtgcaacagagaaggctacacgagcaggatgtcatgcccaatacaggcaccttgcgcaggcctcgggggtcttgcggagcgcttctgttgtgcaccaactggtgaccccttttagccttgcccttgtcaccccgatgacgtg

SEQ ID NO: 652413 - DNA, 255 bp, Homo sapiens
tggaccattctctaagaaagatcagtatgatgtgaaggcacctgctatgttcaatataagaaatactggaaaggacttggtcgccaggacccaaggaacccaaatggcatctgatggtctcaagggtcttctgtttgaagtgagtcttgctgatttgcagaatgatgaagttgcatttagaaaattcaagctgattactgaagatgttcaggacaaaaactgcctgactaatttctatggcatgggcccaacgtt

SEQ ID NO: 652414 - DNA, 514 bp, Homo sapiens
  misc_feature (6)..(6): n is a, c, g, or t
  misc_feature (22)..(22): n is a, c, g, or t
  misc_feature (47)..(47): n is a, c, g, or t
  misc_feature (72)..(72): n is a, c, g, or t
  misc_feature (170)..(170): n is a, c, g, or t
  misc_feature (198)..(198): n is a, c, g, or t
  misc_feature (475)..(475): n is a, c, g, or t
aaaganaaataactctcctctnaccaaaccaaatccccctcctaaanaactgaatcaccccacccaacccgnccccctccccctgaatcacctccttatttcaatgcccgcaagggtaaggaaaaaaattgtactcctcccccgggcccctacatggggcagggcggggnaagtggggttccccccggaagaagggantccttaagaagtcctaggcagggggcagtggctcatgccctgtaatcccactttgggaggcctaaagtgggaggatcacttgaagcccaggagtttaagactagcccgggcaacacagcaagatgcccatctctacaaaaaaatttaaaaattagctgggcatggtgtcatgcacccgtagtcccagctacttgggaggcttagctgggaggagttggagctcgagagttcaaggctgagtccaggagctggaggctgtagtgagctatgattgtgncgctgcactctagtctgggtgacatttttaagactctgt

SEQ ID NO: 652415 - DNA, 729 bp, Homo sapiens
ccgggacgtttctccccaacttccccagagaggtttccagagaagtaacacgccaggtccagtttagccttgaccatggacgcaagttctttggacccgggagtttgaaagaggggaccactggagaaatgccctccccgcgttatcctggagtgcggccaaccacgcgcaaacccagctttttttgccagaaggagacttctatccaagacccatgtaaagagtgtttgggactccccctaaggccttgatcaggattatggtttcccgctttctgggaattgacactggatgatatccgagcccttttatcacgaaagaaagtatggtatctccccttggccagacactccatcgggtggaaccccagggagattatgagaaaatcgtcgggggctctttgtggaggagaactaaacacttccccctgatggtttaccaggctatgatgacgggagactctttattaaatattttcatccttcataaggctttaattagggaagatttttttcacacacgggttaacaacgctgtaggctacctcacactgctggaaaatatagctctttaatcactttttatattataactctcgtataatagagataagatccctttttttaaaaaggtttcccccaaccattgaaccccatacacaggttgttttagtaaccaaacatgagaaagaagtttatgtagctggaaattaaaggcgtccccaggcca

SEQ ID NO: 652416 - DNA, 332 bp, Homo sapiens
atatgattctgaacccagtaggtgctggtcacctgtctagatgcgtacaacatcatagtgaacagaatcgaaaaagcaccccttagaggctgcactctgatcaaggagagacagtacacaacacaggtgttgtgggcagaagtgtatcccccagaatgcacacagcaaaagctaatgcctgtgagcagaaatgtatctcccagaatgcacacaccaaaatccaatttctgtaagcaaaagtgtatcccccagaatgcccacagcaaaatctactgcgtgtgagcaaaagtgtctcccccagaatgcacacagcaaaatctaatgcgtgtgag

SEQ ID NO: 652417 - DNA, 331 bp, Homo sapiens
  misc_feature (51)..(51): n is a, c, g, or t
  misc_feature (71)..(71): n is a, c, g, or t
  misc_feature (86)..(86): n is a, c, g, or t
ttttgaaagagatcagaggatttgtgttcctagaaaggaacttgaataaangaaagaaagaaagaaagaangaaagaaagaaaganagaaagaaagaaagaaagaaagaaaaaaagcatgtcattggcactcaatggggtcacattgtattcaaaagattctatacttaaatccatgagtacaggaatcaaggggtcatgggttcttcctccatcattacaatagcattaaaaccaagcatttttaatccctcaagcaagaaaaacaccagtaacccaaagtttgagccaaatttgaagtgagttttattaaatactagccaggaaaatct

SEQ ID NO: 652418 - DNA, 201 bp, Homo sapiens
cctttttggaacttggtggggctcaggaaacaggttctctccagcggggggctttcctttttgttgggggttttttgagggccccccttcatgaaggcccatgagtgactcctcctttgtgaattaattgctatatgtgaagggcctttgagaacaaatttttttcatagccttttccttataattttttttgttctgata

SEQ ID NO: 652419 - DNA, 335 bp, Homo sapiens
caccctcctcccacgtgcccatccgtcttcatggccttcactaatctgttttccatgtctacattttggcttttcaaaaatgttctatacatggaatcatgctgttgaaggacatctgggttgtttccagttctggctattatgaataaagctttgtgtacaggtttttatgtaaaaatctatgttttcctttctctgggacaaatacctgagtgtcattactgggttgtatggtatttgcatgcttaatcttgaaagaaactgccaaattggtttctagagtgtgaatcataattttaaacacattgtattataactatttctccttttaatta

SEQ ID NO: 652420 - DNA, 315 bp, Homo sapiens
tcctgcccatgtgctctcaggtgctacgatgataggctatttcttctgtattgcctaattagcattatagtagagctctctttactacctgattggtcgggtgtgaactaagctccgtgtttacacggtgggtgcagtcacccttccccagctaggcttaggaattcttagtcggcctaggaaatccagctagtcctgtctttcattatctcctgtggagaaaaagctgaaattgtggaaaaacagacacaagctcttatcatgtgagtggctgacatgaaatgaaaggtgcatgcacagtcttgccaggtgtct

SEQ ID NO: 652421 - DNA, 261 bp, Homo sapiens
tgatacaatcgagctcgtgtaccaggaaacagctatacgcagggccgtggtttttccttgaaggcttttacagattcagctttcactggcctccatgcactacctcccactaccacccaatctgcctgccacagcatagtgcaggcaccctgggtcccctggtggttgcgggaaggggctacagggcatccaggatgtggtcgatcttggtgaccagctcctggcgctttcctgagatgagcttctcattctcaatgtacg

SEQ ID NO: 652422 - DNA, 260 bp, Homo sapiens
ccgactggtctaaagagacccgggcaccaactggcaacgacttggacatctgagctgtcactgccgaacacacgccccaggaaagataatcaatatgcatttccaagcctttagggtatatgtgggtcttccgctcatctaacttaatgcaaaagctatggatgatgatgttggcacggaagactgtcaataaactacagactatattgaagttaatgaaagagaactttcctcacagatgagatataagacacctcagc

SEQ ID NO: 652423 - DNA, 468 bp, Homo sapiens
gaaaaaagatggaagtgcttcagcagcagcaaagaaaaagcttaaaaaggtggacaagatcgaggaactggaatcaaggaaaacgaagcagcgttaaaaaaaaaaaaaaaaaaaacaaaaaaaaaaagtttgtggtgggcgcgcgcccgggggccccctcaaaaaagcttttcataaacccattcgcgtgtgggggcggcgcgggggcgcccagttaggtgtatcgatgcaccctggtcggccattcagccgctgtgttcccaaagagaggagatcccggggggcctagcgacttatggtggtcgggggtttcctaccccatattaaaaacagcgccccgggggggcaccccggaggcgtgttttggaacaaacttcccagagagtggaggctccggggtggtccatcacggggttctttctataccaggggttccaaggcggacgtccgttttcaattatcgccccg

SEQ ID NO: 652424 - DNA, 257 bp, Homo sapiens
tttatatattctcgttttgctcttgttgcccaggctggagtgcaatgctgtgaccttggctcactgcaacctccgcctcccgggttcaagcgattctcctgcctcagcctcccaagtagctgggaatacaggtatgcaccaccacatctggctaatttttgtatttttagtagagacaggatttctccatgttggtcaggctggaggctggtctcaaactctgtcgaaaagcccccgaatttagtagtagtaggcgg

SEQ ID NO: 652425 - DNA, 133 bp, Homo sapiens
tactaggacctgatgaagtcctagttagagccaccaagaagttcacgacgcctcctcagatctcatagtgaaccacccgctctggtacttatagagggatcaccgcctcgttccaggtacagattattgtaag

SEQ ID NO: 652426 - DNA, 1642 bp, Homo sapiens
  misc_feature (1363)..(1363): n is a, c, g, or t
ccgccccctcggcgtccgctccgcccccggcttcgcctcccgctgccgccgccgccgccgccgcagccgctaccgccgctgcagccgctttccgcggcctgggcctctcgccgtcagcatgccacacgccttcaagcccggggacttggtgttcgctaagatgaagggctaccctcactggcctgccaggatcgacgacatcgcggatggcgccgtgaagcccccacccaacaagtaccccatctttttctttggcacacacgaaacagccttcctgggacccaaggacctgttcccctacgacaaatgtaaagacaagtacgggaagcccaacaagaggaaaggcttcaatgaagggctgtgggagatccagaacaacccccacgccagctacagcgcccctccgccagtgagctcctccgacagcgaggcccccgaggccaaccccgccgacggcagtgacgctgacgaggacgatgaggaccggggggtcatggccgtcacagcggtaaccgccacagctgccagcgacaggatggagagcgactcagactcagacaagagtagcgacaacagtggcctgaagaggaagacgcctgcgctaaagatgtcggtctcgaaacgagcccgaaaggcctccagcgacctggatcaggccagcgtgtccccatccgaagaggagaactcggaaagctcatctgagtcggagaagaccagcgaccaggacttcacacctgagaagaaagcagcggtccgggcgccacggaggggccctctggggggacggaaaaaaaagaaggcgccgtcagcctccgactccgactccaaggccgattcggacggggccaagcctgagccggtggccatggcgcggtcggcgtcctcctcctcctcttcctcctcctcctccgactccgatgtgtctgtgaagaagcctccgaggggcaggaagccagcggagaagcctctcccgaagccgcgagggcggaaaccgaagcctgaacggcctccgtccagctccagcagtgacagtgacagcgacgaggtggaccgcatcagtgagtggaagcggcgggacgaggcgcggaggcgcgagctggaggcccggcggcggcgagagcaggaggaggagctgcggcgcctgcgggagcaggagaaggaggagaaggagcggaggcgcggagctcaggctgcccctctccttccccggctcgcaggagagcagagcagagaactgtggggaacgctgtgctgtttgtatttgttcccttgggtttttttttcctgcctaatttctgtgatttccaaccaacatgaaatgactataaatggttttttaatgaaaaaagaaacacaccaaaanacgtcgggtctccgcggccccgggttattgtaggaaccatcccggcccgcgttatcgtaggaactattcgggcccgcgttactcgtagggtctggcgccgggccgggccccaccagacgggaatccccggcccaaatgggggccgaggaggtccttggccagagttttttgggagccaggccgggtggattggctcgccggggcccgtgttgttcctccgggccggggtttggtcccgaccggtcccgagggccggcccattgttgaccgcgggggttg

SEQ ID NO: 652427 - DNA, 983 bp, Homo sapiens
gcatagaactttatcctgcacctatcaaaggcttccttcttccttccatctgggcaacagggttctgactacttagaacaccagcactcagatgctgactagagtcattgtgttgcaagacccaaacctgggtcaacatcaggctcctgagatttgaggaagggcacctctcccctgccataactgctattttttttacatgtatgttaattgaaagagtttattatttcgttatgagccagaggggggaagcacattttaaatatgggaaataagttagcttggtttgtactgtattgggaaggtaatagatttttcacaagtgatttgtgccttgttataaatgtcaattgtcattgagtctacttgtcaaagtcacagaatacatttttctttcaaaatggcaacctgatttagcttgtttgaatattacaataggaatgcttactgatactacttgataatcatgtatatccttttgacttacacacacaaacacacatgagacaacaggattgataattgcagttgtatgtctttaaacactaaacgtaggaagctttttaatgttgccttgtgtgtgtgtgttgctttactgagtgagggagaaaatcctttgcaccaagcttagtggtgataagtggtagcagggggtaaaattcctgtaaaatacgggggggtgttataacgttaggtgctacttgggattctacctcctttctacgagaaattgggttctttaccattgcatttgttctgttgtggggaaagaggaaccgaggatagtagaattcttctctttggaatttacacaaatacggaaagtgtgtgccacaatagtggccagtaaggttgcgcgtataatcttcacgaaggctgaacgcgattcattataaagagtttaaaagggtagttaaacgaagcttgtaggacagagggctgatgttagtttactatgtattatcacgaactagtacagtctt

SEQ ID NO: 652428 - DNA, 1091 bp, Homo sapiens
  misc_feature (812)..(812): n is a, c, g, or t
gacccactgctgttactgcgcctgtacccgcagtgcccccctgcttgctgctagtgacacttctacctgtgctgtgcctccggtatcatgcacgagtgcacgcctccccagggctttgagctgcctgcccctggcctcctgggaaggtggcttcttgccgagcctccagggtggcccaggtaggtaggccccgagcacaggcacccggctatctgacggtgcctgtgcccatcactgtgggctgctgtctggtacaaggctcagtggagtcactcacttacccagcagctgccttgtgctatgcctggctggcgccagcgtggggaccctggagatggttgtggtctctagtggcagaagacaggcagataggagggcggcactcgagcctcaggtgccacaacgggggtacactcctcggtgcccatcccacccaaccgccctacaggcagggcaggggcgggagggcatcctcacaccgcctttgctgttcccaccagcagcgtacgggagggtcccgacctggacaggcctgggagcgaccggcaggagcgcgagagggcacggggggactcggaggccctggacgaggagagctgagccgcgggcagccaggcccagcccccgcccgagctcaggctgcccctctccttccccggctcgcaggagagcagagcagagaactgtggggaacgctgtgctgtttgtatttgttcccttgggtttttttttcctgcctaatttctgtgatttccaaccaacatgaaatgactataaatggttttttaatgaaaaaagaaacacaccaaaanacgtcgggtctccgcggccccgggttattgtaggaaccatcccggcccgcgttatcgtaggaactattcgggcccgcgttactcgtagggtctggcgccgggccgggccccaccagacgggaatccccggcccaaatgggggccgaggaggtccttggccagagttttttgggagccaggccgggtggattggctcgccggggcccgtgttgttcctccgggccggggtttggtcccgaccggtcccgagggccggcccattgttgaccgcgggggttg

SEQ ID NO: 652429 - DNA, 355 bp, Homo sapiens
ccccatcggcacctgagttggcgtgcgcggctcgcgcgtcaatgccgtgacgaccgagttggccggtgagcgcgtggacatcgtgctgtggagcgaggacccggcccagttcgtcatcggcgccctggccccggccaatgtgcagtccatcgtcgtggatgaagagcgccacgccatggacgtcgtcgtcgacgaggaaaacctcgccatcgccatcggccgtggcggccagaacgtgcgcctggcgtccgagctgaccggctggcgcatcaacatcatgtcggccgaggaatccgccgccaagcatgagctggaagccgagagcgtccgcaagctcttcgtcgacaagctcgac

SEQ ID NO: 652430 - DNA, 360 bp, Homo sapiens
  misc_feature (245)..(245): n is a, c, g, or t
ggaatttctgcccattgtgccagggagcaattgaaaaatcagttagttcagctgggtgcagtggctcatgtctgtaatcccagcactttgggaggctgaggcgggcagatcacctgaggccaggagttggagaccggcctggccagcacggtgaaaccccgtctctactaaaaatacaaaaaattggccgggcgtggtgatgggcacctgtagtcccagctactctggaggctgaggcaggagantggcgtgaacctgggaggtggagcttgcagtgagccgagactgcagcattgcactccagcctgcgcaacaagagtgagactgtctcaaaaaacaaaacaaaacaaaacgacaaaa

SEQ ID NO: 652431 - DNA, 306 bp, Homo sapiens
cgacctggataacaccggtctgaactcatatcacgtaagacttgaatcgttgaacaaacgaacctttaatagcgcgctgcaccatcgaggatgtcctgttccaacatcgatgtcgtccaccctattgtggatatggactctcagaatatgattgcgctgttatccctacggtaatctcgtgcctgttggtccagttatagtatcaattaaatactagtatattcgctgtgcactggtgaactcttagcatgtactgctcggacgttgggttctgctcctaggtcgtaccgagctaaatttcttatg

SEQ ID NO: 652432 - DNA, 105 bp, Homo sapiens
ccggtccatgtcttatttagaacttctcaattcttttcatcatatatatttcttactacctttcgttatcagtatttcataattgatggtgtaatgttagagata

SEQ ID NO: 652433 - DNA, 499 bp, Homo sapiens
gagcagcggcggcttgagtgacccgtggagaccctcaagaatcgacccatacatggacgccatgagctgcttcagctggtgaccaccttctccctctaacacattcttcccttcttcacaaactgtgcccatgtcatgactgaatgtgctcaatgtggggatgcctgcctgcccctggacgcttgaccccgtgttctcccagggtttgctcttcagggtggcggctggctggctgtgctccatcgtgcattggtggtgctctgggtgcgagattccctgtgtccccaactgctacacctctccaatgggctttgcatggcatgattgtgccattcatcctgcctgtggcctcctgaaatggatgctcatgaaacacctacacttccatggacaccggaagtgaagtttgatgggagatgggctgatcatgttaggacttgcatgggacgtgcccatggttctggcatttgcctttcctgaggggcccacgctgtggaag

SEQ ID NO: 652434 - DNA, 155 bp, Homo sapiens
gggtttttttttttccctaaacccctttgggcgttttccccttttttttttattttcccggggttggggggcccttgggttggcccctttttttttaaaatttttttggggaaatttttttttgggggataaggtttttttttttttttccccca

SEQ ID NO: 652435 - DNA, 252 bp, Homo sapiens
actgtacttggtgctggatcagggcatcccatttcctggggctccccgtgatgaagtgccacaaactggatggctttaaacaacagaagtttactttttcacagttttgaaggttagaagtttgccatgaaaatgtgagcacagccagtttttttccaaaggctccaaaggagaatccttccttgttttttcccagagctccttggcaaacagctgcattactccaagatttgcctttcttgtcacccagca

SEQ ID NO: 652436 - DNA, 282 bp, Homo sapiens
aaataagattgctggaagagcaactacaacatgacatttcaaacacaatggaggaatttaagattctaaatgaccacacaaagcattaaatcagaggttcagaggctacagactcttgttctgtaccagcctaataaggatgttgtggacacatggaaaatgcattcagaaaagatgagagttaaggctgtggaggattacttgaactggcttattcaggtgcactaagaggaggactgattcatagacagaattcatctttacaagggagtcagcttaaag

SEQ ID NO: 652437 - DNA, 169 bp, Homo sapiens
ctgacctagaggatccccccattagctgtaccatactccaggcacacaaaaatactgtagcagtcggcgtgtgaatcattaagcttgcgacccttcggcagcaagaaaccatacgagcaaatatcacgaaaattagtcacgcacaagccattgggattatccataaaac

SEQ ID NO: 652438 - DNA, 489 bp, Homo sapiens
caaacggaaaaggtaggtggaggcctagtggacacggcaatgggcatgggaaaatatgaagaaaatccaggggggtgggcggggtgaagatcccaattcaacttatccagaataattctctccattctcaaaatttcagatgaggaacatccacagaaacggtctctggccaatacctttagtgaggggaattctctcatcttcctcaacagtctgggcagctaggaaaaaccagcggatggcaatacaactcaagtatttgggatgagcctttagggtagctaaaaacccatccaaaagacggctagccagagcaaatgtgtcggggtaagggtggaatgggtactggagttgggccagccatggaattacttcatctctcggggagggagaaccattcggatgggaaggcattttccgcacattcactttccagatcggtgcttccctagggattggcttttccaacaggaaagacaatctcgggtt

SEQ ID NO: 652439 - DNA, 473 bp, Homo sapiens
  misc_feature (458)..(458): n is a, c, g, or t
atcatccacgtcttccccaaagtttgatataaacatggtgaattccgtggtttggctccaagctcagcttcccgcgtcttggcgagactagagtctgcccacaaatactctgcggtcatggaggagcatggcattcatcttctcaatggccttgtcggcagcctctcgggtctcgaagtggacaaaggcataacccttagagccgttctcatcacacaccaccctgcaggacagtatgtttccaaaagcagaaaaagtatcataaagtgccttgttatctatagatttgtccaggttcttgatgaagacgtttcccacaccagattttctcaaagagggatccctctgagaccacatgatgcggattggctttcccttaatcacatcaaagttcatggtgtccaaagcccgctcagcgtcggccggctgctggaagttgacgtaggcatagcccaggnagcggcgggtgatca

SEQ ID NO: 652440 - DNA, 605 bp, Homo sapiens
  misc_feature (77)..(77): n is a, c, g, or t
atgctgagtgcttcttaattaaccaccgtcagggctgaaaaccctgcccccacatgagagcggactctggggggagngggtgttttgttataactcccctgccaccatctggctggctggcctgcggcccgggaccacctgctttatagcggtgaaccgcggctgatgactcactgcgactcttcactattacctttttggaggcgtagtgcatttagaccactgcgattgacaacgagggcgcggaccaatcagagggtgatctctcattcaaagctgcaatgaccttctaccagccgccttgtggcctcattcgcagagactcaagagacagtgttgatgtgatggtggtggtgttgattcattgtggggtggaaggttgctgggatgccgacgacccagccttctagctgggttaaacatcaactataccacctcacacactcgcaaaaacaagtgttactaagaggtctgatattaattgtactgcactgtatacaatctgtggtttgacctttacagagagtgtcgtcgagcatatctctttataatcacccccttttttttactaagttcaacaagacgaacggttggtgggggtatat

SEQ ID NO: 652441 - DNA, 131 bp, Homo sapiens
tgatatgggccagaaattacagtgaaaaagaaaagataagaaatggaacagactgaagaaagaaaagagactcagagaattcctatttctaaaaatgttcaaaatattgcagagtacattcgccgtctctc

SEQ ID NO: 652442 - DNA, 172 bp, Homo sapiens
tctagaggatcccggacatctaggtccattgtggcgggcactgcagtcccagctactcaggaggctgaggcacggaggactgctttgagtccaggaggtcaaagctgtagtgaaccctgttcacacagtagctcatgagtagtaaccccagcaccttgggaggccaagtcag

SEQ ID NO: 652443 - DNA, 651 bp, Homo sapiens
aattaaggttattacatccatgtatctttctgtatctactcctaaagtacttgtgacattaagttacagggttttgactcctgggtctaaaaggacaagtcctgctaaatcttaacactgacagcaattaaagccttatctccaggccccatagaagatgctaatcaaaataaacggcatccctgagacacagggccaataattaaagccattcaactcttcaaggtcccgtgactgttgtgaaagaggttggaatgtgggattttaagggctgcttttaagagataaaataagttcagtttctctataatcattactgtcaaaggcacactgatgcaagaccagtatatgggcccctgtgtcagattaacagggttttcttgaagcattaaccaactccttaataaaggttataaaaggcatttggaagctgtattgctttatgttatggtcaaaattaaaattttatagtttataaaattttgaaaaataaatttaattggcttcatgctgttttaattagggcttgttcagaaaattatgtctcctttttcaaagaatgaaaatttttgcctttttcttgttgcattgtataaaaataattaggccaagtattataaaagcaaacccaggcggacccaggatttgcct

SEQ ID NO: 652444 - DNA, 157 bp, Homo sapiens
ggtttcacatgtagggcaggctacggtaggagaattgaatcagggaggcggaggctgcagtaagctgagactgcgccactgcactccagcctggacaacagagcaagactccatctcaaaaaaaaacaaaaacggacaaaaaaacccccgaaaattc

SEQ ID NO: 652445 - DNA, 208 bp, Homo sapiens
agtttcggcaaaaggattttctcccaagatgcttttggttgtccaacactggagactgtggctttcccatgtggaaatcattttcctgaagtctggaaccatgtgtgagaagtcatgttcttaacacttgtgtgtttttaacactttatctgggatgtgtaagtgccaccaagactgtaagtaaatgcagttgtagatgcgttgtgga

SEQ ID NO: 652446 - DNA, 103 bp, Homo sapiens
aaaacttgttcaccaaagaaagtttcaactctggggcatgaatgcaagcatcacaaagaagtttctgagaatgccctattctcgtttttttttgtggaagata

SEQ ID NO: 652447 - DNA, 180 bp, Homo sapiens
  misc_feature (54)..(54): n is a, c, g, or t
  misc_feature (115)..(115): n is a, c, g, or t
  misc_feature (152)..(152): n is a, c, g, or t
gcttcttcgaggtgaagcaaactacggagccaaacttccctgagatcctcctanttgccatcaacaagtatggggtcagcctcatcaatcccaaaacgaaggatatcctcaccantcatcccttcaccaagatctccaactggagcagcggnaacacctacttccacatcaccattggga

SEQ ID NO: 652448 - DNA, 1142 bp, Homo sapiens
acgtcgaagtacgttctacaatgacgcataacttgcagcgtattcccagtaagagtgttctgaagccttctacaatgatacgaacggctggtcggaataatcatcactggtatagtacgtgactcacttacatccaagggattcccatgtctctccgtaggcactgcactgaattggggactagatatacactagcataccgatcatcgaagagcgtgatcaaaggaacactaggagaagcacgtcatgcaaacctaattacatgacctcgccacagtcgatccttcacttgcgtcgattcggaccgtcgcaatggcatacgcaatacttttctagatgtaacaggaggaggtcatcctagaataccggctgcgccttagcattcatacatttccaattatggccagcgcgatacgtggcctactttgaataacccgtagctggtaggataagctacctctgaccctatcgtgatgtcatcttacactgcctatgcaaaagcatacacgtaaaccattgacctctatcgcccctacttaaaatgaacgcttagggacatccccgacggggatcgaaccacattggtctggaaccgtatcccatttggaccggcttttgcacccacaatttgctggaaagactgaaggttagcgtacacaccgatgagtcatgaaatacgttccccgccacgattacgcggtcctgtgacattacattgtacgcggttgacgcaaggagggcagttggctcatatggcaatggatacagctgagaaaccgtaggatagcctcaagagggagactccacacgtgggccttatagtagacacacaatgtccaggaaatcttgccacaatttacacaccagaggaagaggcgctacgtaaaagaagggccacgaaacacacccatccatttgtgcaaacacaaggtgttaacgtcagcagggaaccccgtgtgagtgcgacataatttcaccgtctaacgggagcgttacgataattgggagttcttgggaagacgattccaagaacattgcacacggctcacacatgatccacagcgatcgagttacacgtagcaggcacccctaatatcagcaacacaagaggaaggatttagaaatagtactggcgttaaaaa

SEQ ID NO: 652449 - DNA, 99 bp, Homo sapiens
ttccaacctcagcaaagttgggacaacagggtcatgccactgaacctagctggcatagaaattttttttttttgggaagactggtccaatctcggtggc

SEQ ID NO: 652450 - DNA, 369 bp, Homo sapiens
tgtctagagatccatggcgcgggacactcaaagatccagttcactttttgtatcactctgagactgtaacagatccagttcattttgatgacacacgagaccctaagcagtatccagtcattcttcgattacaccacgagacacatcccaagactcccagttatttcttcaatcagcacactgagaccacatccacagtactccagttcaattctttgatcaccatcacgagaccactcacagagtactccccagcttcacttctttgataaccacctctgagaacccgtaacaacagtactcccagcttcacttcttcgattaccaccaccgagacccccttaagcagtactccgtgggggtcgccat

SEQ ID NO: 652451 - DNA, 412 bp, Homo sapiens
gacatgtgacattagttactgaaacattgaacattatttggatgataaagattaaagcagttcatatgtaaatttttgaaataatttttatttttaacactttagttgtactaagggtatttgctatgataaatattactcggctgggcatggtggctcgcgcctgtattcccagcactttgggaggccgaggcaggtggatcagctggggtcaggagcaataccagcctggccagcatggtgaaatcccttttctactaaaaatacaaaaattagccgtgcttagtggtgagcacctgtggtcccacctactcaggaggctgaggcagtagaaccgcttgaatccgggagtcagaggttgcggtaagccaagattgggctactgcactccagcctgggcaacaggagcaga

SEQ ID NO: 652452 - DNA, 931 bp, Homo sapiens
  misc_feature (52)..(52): n is a, c, g, or t
  misc_feature (686)..(686): n is a, c, g, or t
gcccgacccgatggcccatgtccccagtgcatccggttgatgcccccttcantggaggtaaaatggagtgagtgtttttcttttcacatactcctggtgttcttccacaaatacaattttcacctcttgaatattttcaaggattctccatgctacacacagagaaatccaaactccccatcaggaccccagtcttcccaaaccctctttgcacttttctgcctccatgcttttccttgggtcatcctcttctctaatataaccttgtgtattattctaggttctccagagaaagagcagagagatagaggtagagatatacacatagagagagacagattgatttgttgtaagggatggctcacctggttatggaagctaaggagtcctggagtctgcagccagcaagctggagacccaggacagccaatgatatagttccaactcgagtccacatgtaaagtcaggagaagattgatgtcccagctcaaatataatcaggtaaaaagagcaaattctctgtgattctacctttttgttttgttcaggccttcaatggattggatgaggctcacccacactggggaggacaatctgctttattcagtctaccaattaaatgttatcctcatccagaatacctcagagacacacccagaataatgtgtagccaaatatctggggcnaccccaaaccagtcaaattgatacataacactaaccatcatgtcttgcttctactctctcgccattctggcatggcaaatctttccctttatttcaaggttagttcaaatgttacctcttaactaagcctttcctggtaaccccaaatattatagaaatggggtgtcctcccttctctgatgtctcaaaatatatggtggttcctctttcatggccttctgtaacaaactcccttacaatcaggc

SEQ ID NO: 652453 - DNA, 135 bp, Homo sapiens
gaggagtaaatcttggccgataagtaaatcttggccgatgagtaaactcttggcgacggagtacacatcttggccgatgagtacatctgggctcggccgccgggacttcctcatcgccaagatttactcatcgga

SEQ ID NO: 652454 - DNA, 425 bp, Homo sapiens
  misc_feature (425)..(425): n is a, c, g, or t
cggtgtctttggaggcgctgtacttcgaggccgtcatggctaatgggctggacaagtggatcacggggatagatgaaaccgcggttctccaccgggaggccagcaagctgaacactctgcagctagagcctcagctggccctgctggcacgacagctggcccagactgagcattaactgaacaacctgatggcccatctggacctcctttttgtgcgtgtgactactctggctggagcccagcaagagcttctgaacatgaagctatggaccatacacgagctgctgcaagatagcaagccggacaaggatatggaggcttcagaaccagctgaaggctcgataggcgagtctgctggaggtggagacatagtctctgctggcattccttgtctctgccgacacagaggccagcagacctttccn

SEQ ID NO: 652455 - DNA, 365 bp, Homo sapiens
  misc_feature (52)..(52): n is a, c, g, or t
gcccgacccgatggcccatgtccccagtgcatccggttgatgcccccttcantggaggtaaaatggagtgagtgtttttcttttcacatactcctggtgttcttccacaaatacaattttcacctcttgaatattttcaaggattctccatgctacacacagagaaatccaaactccccatcaggaccccagtcttcccaaaccctctttgcctcaggctccaaactagcaagtgcgtctgaaaaaggcacagtcatccgggtgttctctgtccctgatgggcaaaagctctatgagttccggagagggatgaaaaggtatgtgacactcagctctctagtgttcagtatggattcgcaattact

SEQ ID NO: 652456 - DNA, 98 bp, Homo sapiens
aataacaacagtagcagcagtagcaactcaggatgggatcagctcagcaaaacgaacctctatatccaggactgctcccacacacgacagactgtgag

SEQ ID NO: 652457 - DNA, 136 bp, Homo sapiens
cgcggaatctcctgctgctgtccctcccccttgtctttcccttctagtaccctctcagctccaggttgctctgagtgtgcctgtacctacccctacccctagctacaatggactggataggtgaagggggtacctg

SEQ ID NO: 652458 - DNA, 122 bp, Homo sapiens
  misc_feature (19)..(19): n is a, c, g, or t
ttgggcgctcacgtcaggnccctcgatcaggcccagccgccgggggagcgggcggggcctgggattcgagggcccgggaggggagcccatccgagaaatggagcccaaggggtaccggagct

SEQ ID NO: 652459 - DNA, 373 bp, Homo sapiens
tacatttctagaggatccctcagcacatggagtatgggcagcgtatcggatcgtaacaaattcccagtgtcgaagagaacacaaattggatgtctcctgctatgagggaagcaccaacatcgttaagtcaacttcttgacaactctggagctccccatgtgacaattaaaccccctgggcttacagatctggaagtaacacctccagtagtttctggggaggacctcaaaaaagcatctgtcattcccacactgcaggatctgtcttcttctaaagaaccttctaattccctaaacttacctcacagtaatgcgctgtgttcatcccttgtgcatcccgaattgagtgaggtcagttctaacgttgcaccaag

SEQ ID NO: 652460 - DNA, 153 bp, Homo sapiens
acacaaccactggcattagccgagacacacagacgttgaagaggctgcagaagagtctggcgtccatatcatatctggagccgggtactatgtggatgcaactcactcctcagagaccagagccatgtcaagaacagcttaccttaccgagta

SEQ ID NO: 652461 - DNA, 172 bp, Homo sapiens
aaactatagggcagctgaactcagtgcagctgacgtcgcatgtgggaagcgggacagagccgcggtcttcggctatcaagaggacgcataactccggattgtaatttgaactgtcctgactaatggaacgactctgtgacggctgacagtgacaggaggccgactacatcgt

SEQ ID NO: 652462 - DNA, 233 bp, Homo sapiens
  misc_feature (128)..(128): n is a, c, g, or t
  misc_feature (163)..(163): n is a, c, g, or t
  misc_feature (231)..(231): n is a, c, g, or t
tgacgaatattcatcatgtgtaaaatgggagaaatgaaatgttattaaaacaaacatgtgagacttcgatgagaagagacggtacccggtctaagcgcccaccgggtcgcgaggatccttttcctggntaaggcctgggtcacagcgaaagccctaggcccangggggggggggggggcccgagatttcagatccggggcccggctgtcagggtggacccgccggggggcnct

SEQ ID NO: 652463 - DNA, 836 bp, Homo sapiens
  misc_feature (4)..(4): n is a, c, g, or t
  misc_feature (70)..(70): n is a, c, g, or t
  misc_feature (79)..(79): n is a, c, g, or t
  misc_feature (88)..(88): n is a, c, g, or t
  misc_feature (112)..(113): n is a, c, g, or t
  misc_feature (118)..(118): n is a, c, g, or t
  misc_feature (120)..(120): n is a, c, g, or t
  misc_feature (127)..(127): n is a, c, g, or t
  misc_feature (143)..(143): n is a, c, g, or t
  misc_feature (145)..(145): n is a, c, g, or t
  misc_feature (150)..(150): n is a, c, g, or t
  misc_feature (159)..(159): n is a, c, g, or t
  misc_feature (174)..(174): n is a, c, g, or t
  misc_feature (182)..(182): n is a, c, g, or t
  misc_feature (185)..(186): n is a, c, g, or t
  misc_feature (192)..(192): n is a, c, g, or t
  misc_feature (196)..(196): n is a, c, g, or t
  misc_feature (200)..(200): n is a, c, g, or t
  misc_feature (203)..(203): n is a, c, g, or t
  misc_feature (208)..(208): n is a, c, g, or t
  misc_feature (210)..(210): n is a, c, g, or t
  misc_feature (231)..(231): n is a, c, g, or t
  misc_feature (245)..(245): n is a, c, g, or t
  misc_feature (256)..(256): n is a, c, g, or t
  misc_feature (262)..(263): n is a, c, g, or t
  misc_feature (287)..(287): n is a, c, g, or t
  misc_feature (404)..(404): n is a, c, g, or t
  misc_feature (715)..(715): n is a, c, g, or t
  misc_feature (766)..(766): n is a, c, g, or t
  misc_feature (821)..(821): n is a, c, g, or t
agcnagggaccacggcaatcctggccatccatccatggatctgtttctatacaacttcatcatgtgacanattccagcngtgaaagangaacagtacagaaatgtgggactnntcttngntgctccnttcagatggtccaggngntttgngtgtcaggngccaagggggggggngggggggnggnntggggngggnatanttnaagangnagccaaatgtggaactaaggngggttcagtggggnccagggaaggnctcatnnccccagtccacaattgtgccccanccccggcaatgaaactcacgcatatgcacaaacgcacatcaacaaacacacaaaaacacacagagcaaataacattactgaaagaacctggaggctattaaatacaaaatggcagtnttctttcaaagtgaaaatatttgcttctttgatactcctcagtgccttgcagtctcccaatcacagaagagtagatatgggaagggccaagaggagtatgttgccagtggccctacaagtccatgtgtgctgaagtccctatagcaaccaccttactcttcagcccagtagctgcctcccatgtgaccattcacccgattggcaccattgctggagctactgtcacagggactttttgtgcaggtggtcacatcttcttcctctgagctgctctccacatcactgcgatcatccttcgatacatgcaaganatgaaactgtccagctcccgccaggcatagaaaaaaggaaggaggtgaggnagagtggaaagtacagggtctaatccttcctggacaggtcacctagtcaggaaanaaaagcaggagagaa

SEQ ID NO: 652464 - DNA, 944 bp, Homo sapiens
ctgttgaccggggttatttgtccctcttaagagtcttgtgtgtggttcccgtggcacctggtgacggtttcatggcttgtttctttcaagggtagtctggcttggcatgctcgactgtcgtggccccgctgtttatgttggctcgctgtcgcctctgtgtgtggagggaatctcccttctgttttgtgggcgagggggttcaggtgcctccttttattttgccgtccctttggttgagggggggtgtcacggcagaaaaggcttgcgcgtcggggtgcctcttctttcctggccctaagtgcgtgggccacagtgtttgttcgtgccgaggggccattttctactatttggttcctcgtcttccagggggggttctcctattttctcccgcccggcggaccaccctcgcggctgcgctggcctgccactatcgtctgtgaagcccgcctggtgggcaccactcaccatttcttgagattgccggctatttttgcatgcagcatcccgcgttttggtggctcgcctctggtgcagctggctcgagctcgctggcaggggtggtgtttcttctcccaggaccgcggggcccttcggtgtatcgccgccgtggtcgctccacagggtgtctcactcacactacgtcccaatttcggggagacacaaagctaattttcctttttttgaaccacaccccctctttacgatcacgaggaaaattcaatgattcttttttcacatacccagtagggagataacaattcttgccgcagttcataaccgcagaaacagactgacatttgtttttcttatcagtagtaaaatacatccagcgatagtcgttaaacacacaaattatcgctcccgctgtgtattcattcatttttacggcccccccgggggtccccccccccgggaaagggaaaaaacccaagcacaaccaaaac

SEQ ID NO: 652465 - DNA, 335 bp, Homo sapiens
  misc_feature (189)..(189): n is a, c, g, or t
gcctcatatgctgtcttactctttctaatagaactttccctctaatgttactttctataatttgtcttacctgctaaaatataagctccatgagggcaaagggccttgtctttcatgtttgaggcctagttcttaacagtgtctgacacatattacagtaagttttgtaatgaatgaattcattttgcntgacaaaatgagtttcaagtggttcttatcaggggtctgtagctattaagtgactgattctgattctgtttccacgcctccatttttatatttcactaccatgtgtggcggctgataccttggttaccggagtagcatgttgcatt

SEQ ID NO: 652466 - DNA, 835 bp, Homo sapiens
  misc_feature (289)..(289): n is a, c, g, or t
gtcgatcagatggagtggatgtagcgaagtggactttaagaactggagagaggtggctacaaacacgtaataaatcttccagattcatctctcattttatctgtccagaaatgtgctgagagatttataagcacaagaatcgatgtttaatatcaaggtgtcgtcgccgcattcactcgtacagttcatgtattaatagttgcaccagtaaagggagcctatctgatttctgaagtgagcttgcaggccttcattccatagaatatcgtgttcgcaaaggaatgtagcncagtgtgaagccaatgtggaggcaattctttatttcctccacatataccttgcattacacgtctgatcaaatcaatacatttatcaatcttcttacatcatagcatttattggcatcttattatgtctgagggaggtccctattcgttctgcatgccggtgctatacaacgaggaaatgctgtcttagaaaaagtttcttaaatggagtaagcagatcctcactaggcatgagttataacgctggggcttccactactctttgcacacgaagttctcaagaaccagactgcccgttggccaagtttagttcacagtataccgaggtcctcacgcttgcagtgacttggtgatggcggcatagcaagtggggttctagtaaaagctataagatgtttgaacacacctgtccttctttacttagttgtacgcaaagcccctttattgttccaacaaaggggggaattttgttcaccatacacatgggtcacttgagtgtaccttcgggtacaaatggattcggtcaaacagaaaacttcttttcgccc

SEQ ID NO: 652467 - DNA, 258 bp, Homo sapiens
agcttatttctcatcgtaggagaacaggcatttgtggggagggagggacaggctctcattctgccacccaggcctgagcgcagtggcgaaatcttggctcactgcagcctcagatttcccaggctcaagaggtcctcctacctcagcctccctggtatcagggaccacaggcacacgccaccacacccagttaactctttgcacttgttttgtacaaatggggttttgccatgttgccaaggccggtcccaaactccc

SEQ ID NO: 652468 - DNA, 486 bp, Homo sapiens
tttctccactttttggaccattatccacatgcaataaacccagaggacccaagcaaagaaattcttctagccatcttgatggcggacaaggagaagaaaggttacgtcatggcgtcacgactgcggtcaaaactcacgagtctgggggagaagctcacccaccaggaagtggatgatctcctcagggaagcagatatcgaacccaatggcaaactgaagtatgatgaatttatccacaagatcacccttcctggacggcactattgaaggaggagaatgggagagcctccggtgggcctgaaaacttggagcaattaattttttttaaacagcgttcttttcacttgggagagctggcaaacacagtggcaagacacacattacccaactatagaacagaggctaactagcaacaataatagatgattccagccatggtatgagtacatctttaataaaagatttgtactgattttattaaaaaaa

SEQ ID NO: 652469 - DNA, 198 bp, Homo sapiens
agaggaccctgtgatgttatcccaacacctgaaaacaggatgaagccctgtttactggcaattccttttacccagtgtatcatgtctacctatcaacagaaaattacaaagcatacttaaaaggcagaaaatgcagtttgaagagactgaacaagcattagaaccagagtcagtcgtggcaggagtgttgggcgataa

SEQ ID NO: 652470 - DNA, 132 bp, Homo sapiens
  misc_feature (55)..(55): n is a, c, g, or t
tatcagggcaacagaatttcaatggcagctggcgcgccaacattaagtgatcgtncttctctaaactaaccatgactaactccttttttatcatctctggaacacacacaatccgtgtgcaggtccctgcca

SEQ ID NO: 652471 - DNA, 772 bp, Homo sapiens
gatttggaaacatgggctgaaaatgaaggcccatagtgcataggaacagtaaagccaggtgctgacgtgtgtgtgtgtgtgtgtgtgtgtgtgtgtgtgtgtgtgtgtggtgttgtgtgtgtgtgtgcgtgcaccatacacatgtgtggtcactcacgtgtgtgtaagggaactgagggacgcgtcaagggggtgggtgatatcactgacgagctgttggtctcaaatatatagcaggcaccaggtcttgtgtagataagtcagtgtgtgtttataaatatgtcatataagtggtatctcttttattacactctaccaagatgaaatgagggagtctccttgtagacccctgttgtcgcgaagagatgtgcggtcgggactagtgtttatccatgagtttctttattcctaagtgcagatgagaaagacctttctccgttgagctctgtgactcccagaaggtaccccagtcccccagtgtacttagaaaggatctcgaacattgctggacgtcctcatagtactcacaagggggctacgccttgagtgtcactcgcacagtcttcagtctcctgacagagagatacactcacgtcacaggtctctgggtctcaatctgaaaagtgctgccggcgcgccgaagagactcgcatggcggcaccatctctagtgggagggcgcagagcccaccgttcgcccccatagacctgacaggtgcaggtgccttggcttgcccgcgcctccctgggggccctgtccaatgaaaaacaga

SEQ ID NO: 652472 - DNA, 234 bp, Homo sapiens
ctgcacgaagtgggtggattgcctaaggtcaggagttggagaccagcctgaccagcatggtgaaaccctgtctctactaaaaatagaaaattagccaggcatggcagcgcatgcctgtaatcccagctactcgggaggctgaggcaggagaatcccttgaacctgggaagtgaggccaggcatgatggttcacgcctgtagtcccagcacttgtgggagccacttcgtgggcag

SEQ ID NO: 652473 - DNA, 139 bp, Homo sapiens
tcacatatactgctacatcacccatcagtctccaggtgagtctctgcatcactaaatacttcttaataaccatggcatgggtctggacggagaaggtgaccctagatgatggatggatgtggccaggttgcggcttgga

SEQ ID NO: 652474 - DNA, 733 bp, Homo sapiens
cccacccaacctacggctaggacgaggccccgggttaatcggccgagggttgagcctgtccatggaagcatcctcctgtgtcctgccaacccctgccattatagtcaccggagactcctttacctatccctatctgttagggttttcagatgtcctctcgctgggtttatatttgaaggtatagaatctgggaaagggtggggtgcaagctaaccaaatagggatgctagggttgggtggggaattgaggactcttctgtgcttttattgtagggctggggatcgaggcactctggcgcaaacaaaaatatgacatttccaaccagggcacaaacatggaggccttgcggcttacgtgatgcggctaaactggcaacgactggcttgcacgctggcgactgactaatgggcagaacttactgatgctcttttggcgcacacacagcgtgctttaacagactcgcatttggcgagcctactggggcaaggcgactggcggaggtgtacgtgttagtcaacgtggaggtcaggtgggttatcttctgcctccttcactggcttcatgtgaacttgcctgtgacagaatatcttgccctagatgtcctcttccctcttgccatcgtgcacaaagcatgcgatcttatgaccgtgagttcttattcgtggatgctaactaactggggtaatctcaggcagtactggggccatggctctttcccttgtcttctcttgc

SEQ ID NO: 652475 - DNA, 161 bp, Homo sapiens
gcacagacttgagacaagaagacccgtgtgaagctgccctccgtgctcagaaggttatctcctcagccaacagagctgtggttggtgtgtgtggcgtggaggtggccgaattgacaaacccatcttgaaggctgggcgggctgtaccacaaagtataatgg

SEQ ID NO: 652476 - DNA, 182 bp, Homo sapiens
  misc_feature (165)..(165): n is a, c, g, or t
agatcctaacagggatcaccacgtggctcccaaagtgatgggactacaggtgtgagccaccaggcccagccagaatgtagatcttctagttgatatataggagggttcataaggagcccctcatatattatgatgctgttgtgatatgacgtaggacgtaatgtntcgcccatcgtggtcag

SEQ ID NO: 652477 - DNA, 234 bp, Homo sapiens
tcaggccggaccgctctcgtgaactctctccgtgagaccctccttcacatgcctcgaatcctcctcatccaaatttatctgtgctggtccaggttggcatatctcagccaggagagcagtcaaattctttaaccaagattttccatcagtggtccaaactcctatcaaatatgaaagcatttttcctgaaataagtattttgtttttatggtgatataataccagtctcacgga

SEQ ID NO: 652478 - DNA, 185 bp, Homo sapiens
ccccccccccccgcttttccaaaaggaaaaatggtcggggggggcggtttttttggcccctttggacccccaaaaaaaaaaatttttttttgcgcgccctttttgcccccccccccccccaaaaatttgggggggtttgggggccccctttttttttttttttttaaaaaccctcccccccccca

SEQ ID NO: 652479 - DNA, 342 bp, Homo sapiens
caagggggtttagagggttctgtgggcaaatttaaagttgatctaagattctatcttgcacacacagctgctacatagacgggtgtgctctttaagctgttcttaggtagctcgtctggtttcgggggtcttagctttggctctccttgcaaagttatttctagttaatccattatccagaaggtataggggttagccccttgcatatattatgcttggttaaattttgcattttccctgcggtctatttattgcgacaggtttcaatttctatcgcatatcctttatttgggtaaatggtttggctaaggttgtctgatagtaaggtagagtgggtttgcg

SEQ ID NO: 652480 - DNA, 1503 bp, Homo sapiens
  misc_feature (576)..(576): n is a, c, g, or t
  misc_feature (598)..(598): n is a, c, g, or t
  misc_feature (820)..(820): n is a, c, g, or t
  misc_feature (860)..(860): n is a, c, g, or t
  misc_feature (872)..(872): n is a, c, g, or t
  misc_feature (876)..(876): n is a, c, g, or t
  misc_feature (882)..(882): n is a, c, g, or t
  misc_feature (891)..(891): n is a, c, g, or t
  misc_feature (933)..(933): n is a, c, g, or t
  misc_feature (1008)..(1008): n is a, c, g, or t
  misc_feature (1019)..(1019): n is a, c, g, or t
  misc_feature (1050)..(1050): n is a, c, g, or t
  misc_feature (1063)..(1063): n is a, c, g, or t
  misc_feature (1067)..(1067): n is a, c, g, or t
  misc_feature (1072)..(1072): n is a, c, g, or t
  misc_feature (1078)..(1079): n is a, c, g, or t
  misc_feature (1081)..(1081): n is a, c, g, or t
  misc_feature (1084)..(1084): n is a, c, g, or t
  misc_feature (1236)..(1236): n is a, c, g, or t
  misc_feature (1294)..(1295): n is a, c, g, or t
  misc_feature (1391)..(1391): n is a, c, g, or t
  misc_feature (1394)..(1394): n is a, c, g, or t
  misc_feature (1479)..(1479): n is a, c, g, or t
gctagtaactcacggacgacaacttcgagagtcgcatctccgacacgggctctgtgggcctcatgctcgtcgaggttcttcgcgtccctggtgtggacactgcaagagacttgcacctgagtatgaagctgcagtaccagattagaggaatagtcccattagcaaaggttgatggcgagctgcgaacactaacacctgtaataaatatggagtcagggatatccaaccctgaagatatttagagatggtgaagaagcgaggtgcttatgatggacctaggactgctgatggaatagtcagccacttgaagaagcaggcggaccagcttcagtgcctctcaggactgaggaagaatttacagaaattcattagtgatacagatgcctctatagtaggttttttcgatgattcattcagtgaagctcactccgagttcctaaaagcagccagcaacttgagggataactaccgatttgcacatacgaatgttgagtctctggtgaacgagtatgatgataacggagatggtatcatcttatttcgtccttcacatctcactaacaagttggaggacangactgtggcatatacagtgcanaaaaatgaccagtggcaaaattaagaagtttatccaggaaaacatttttggtatctgccctcacatgacagaagacaataaagatttgatacagggcaaggacttacttattgcttactatgatgtggactatgaaaagaatgctaaaggttccaactactggagaaacagggtaatgatggtggcaaagaaattcctggatgctgggcacaaactcaactntgctgtagctagccgcaaaacctttagccatgaactgtcngattttggcttngaangcactnctggagagnttcctgttgtgctatcagaactgctaaaggagagaagtttgncatgcaggaggattctcgcgtgatgggaatgctctgagaggtcctgcatgatactttgatggcatctgagagatncctgagctganctatccagagagcatgatggcctgtaagtantgtagcgagaatntgtnaatantgaatnnantangtgtctgatgaattatgccctgtgtgcactgtagacttgagcagttaagacttgcagagctacaaactgaatcgatgcagatgtgcaagcatgaggctttcatgagcagagtctacatactttcagcaaagactaccaggaattgagggccnataggattttcgttcacgaagtcaaccctgatagagaaccaaaaaagcagggcttagnngaaccatgaagcttaccgtggacttgggctgccatgatctagcagcaagaatactgatttactttcttgacacaactgtgaaaattcgtagacgcntanggggggggtggttttacaacacaaaaaacgcgttttttttttgttggtgggacatttgcgcggatagtctctcattctcgcatgnggccctctgtccgtcttcttcgct

SEQ ID NO: 652481 - DNA, 742 bp, Homo sapiens
  misc_feature (554)..(554): n is a, c, g, or t
ggcgcatgtcgggtaagcgcgtctagggcgctgcgcggcgcaatgaaaatggcggcttccattgtgggcgcgcaatggccgatggatcctgcatttgtgcacttcttgtacctgcatgcttgcatgcatgctactgctaaccaaccagcctgggggtcctgcagcgggctcagataggcttcagtcgccgggtacgtcccgacagagtcttaccactctacctccacctggaagaacgaagaaggatatgcgtcgattactaatgatgcagacgatggcagcgatcttctggaagtcgattgggagacagatgatgacattgatcgacggagatcttccacgagctacaagagatccttctagcagccttgtcgagcttctcagaaagatatgacccaagcatagcctgtgaagcatattgaatagtgacgataataacgggaagcactctcagtgactgtctgtcatctggtatcatggagagccctagctgatgaaggacgacacgaagcgaatatgtaccgagcctcgtgtctagggcaagtcttttcaantgccaaattattgacgtccagaggtgtcactcgtgggagtcagaccgtgctatcttcatgcttcgcgattgggagctaggcctgggagattcaaggactttggtggtcggtccagacaggtgtgctgatgtaactctggagggcctgttgtccccggcaaaggaggaggacatcctgagactacttgc

SEQ ID NO: 652482 - DNA, 1440 bp, Homo sapiens
  misc_feature (576)..(576): n is a, c, g, or t
  misc_feature (598)..(598): n is a, c, g, or t
  misc_feature (820)..(820): n is a, c, g, or t
  misc_feature (870)..(870): n is a, c, g, or t
  misc_feature (945)..(945): n is a, c, g, or t
  misc_feature (956)..(956): n is a, c, g, or t
  misc_feature (987)..(987): n is a, c, g, or t
  misc_feature (1000)..(1000): n is a, c, g, or t
  misc_feature (1004)..(1004): n is a, c, g, or t
  misc_feature (1009)..(1009): n is a, c, g, or t
  misc_feature (1015)..(1016): n is a, c, g, or t
  misc_feature (1018)..(1018): n is a, c, g, or t
  misc_feature (1021)..(1021): n is a, c, g, or t
  misc_feature (1173)..(1173): n is a, c, g, or t
  misc_feature (1231)..(1232): n is a, c, g, or t
  misc_feature (1328)..(1328): n is a, c, g, or t
  misc_feature (1331)..(1331): n is a, c, g, or t
  misc_feature (1416)..(1416): n is a, c, g, or t
gctagtaactcacggacgacaacttcgagagtcgcatctccgacacgggctctgtgggcctcatgctcgtcgaggttcttcgcgtccctggtgtggacactgcaagagacttgcacctgagtatgaagctgcagtaccagattagaggaatagtcccattagcaaaggttgatggcgagctgcgaacactaacacctgtaataaatatggagtcagggatatccaaccctgaagatatttagagatggtgaagaagcgaggtgcttatgatggacctaggactgctgatggaatagtcagccacttgaagaagcaggcggaccagcttcagtgcctctcaggactgaggaagaatttacagaaattcattagtgatacagatgcctctatagtaggttttttcgatgattcattcagtgaagctcactccgagttcctaaaagcagccagcaacttgagggataactaccgatttgcacatacgaatgttgagtctctggtgaacgagtatgatgataacggagatggtatcatcttatttcgtccttcacatctcactaacaagttggaggacangactgtggcatatacagtgcanaaaaatgaccagtggcaaaattaagaagtttatccaggaaaacatttttggtatctgccctcacatgacagaagacaataaagatttgatacagggcaaggacttacttattgcttactatgatgtggactatgaaaagaatgctaaaggttccaactactggagaaacagggtaatgatggtggcaaagaaattcctggatgctgggcacaaactcaactntgctgtagctagccgcatgctatcagaactgctaaaggagagaagtttgncatgcaggaggattctcgcgtgatgggaatgctctgagaggtcctgcatgatactttgatggcatctgagagatncctgagctganctatccagagagcatgatggcctgtaagtantgtagcgagaatntgtnaatantgaatnnantangtgtctgatgaattatgccctgtgtgcactgtagacttgagcagttaagacttgcagagctacaaactgaatcgatgcagatgtgcaagcatgaggctttcatgagcagagtctacatactttcagcaaagactaccaggaattgagggccnataggattttcgttcacgaagtcaaccctgatagagaaccaaaaaagcagggcttagnngaaccatgaagcttaccgtggacttgggctgccatgatctagcagcaagaatactgatttactttcttgacacaactgtgaaaattcgtagacgcntanggggggggtggttttacaacacaaaaaacgcgttttttttttgttggtgggacatttgcgcggatagtctctcattctcgcatgnggccctctgtccgtcttcttcgct

SEQ ID NO: 652483 - DNA, 146 bp, Homo sapiens
ggtcgctctagaggactcccccagtacccgactctggaaggagactgtattcaccacgtctccctatcaggagttcactgaccacctcgtcaagaaccacaccagtagtctccgatgcagcggactcaggacgaggtaccgagact

SEQ ID NO: 652484 - DNA, 257 bp, Homo sapiens
tacgatagaactataaagcagaagagtttagaaagaatttcctatttaagtgacgaaacctcatactccatttgtgatacatggcacaaaggttacaattacttatttttgaccaaaagctcttttgacattctattaaacaatcaccgacctatttaattatcatcatgcaaatggcagatgttttcataagtcttatactaataaatcatttccctgattttttgggtaaaaccacatattcataaaaaaaaaaa

SEQ ID NO: 652485 - DNA, 421 bp, Homo sapiens
ttatgctaaatgaataagccaatccagacaaatactgcatgatttcacttaagtgaagttatctgaagtagtcaaatttatagaatcaaagagtggaatcgtggttgtcaggggtgaaagggaggggagggggaaatgtggagttactagtcagcaggcatgaagtttcagttaagcaggatgaataagttccgccatacagtattgtacctatagtcaacagtactgtattgtacacttaaacatttgttaagaaggtagtattcatgtatgagaataaagtaaaaagtaatagttttggcagtggctcatgcctgtaatcccagcatgttgggaggcggaggcaggaggatcgcttgagcccgggagtttgatactagtctgagcaacatggggagactccatctctacaaaaaaaatt

SEQ ID NO: 652486 - DNA, 210 bp, Homo sapiens
  misc_feature (20)..(20): n is a, c, g, or t
  misc_feature (33)..(33): n is a, c, g, or t
  misc_feature (208)..(208): n is a, c, g, or t
gatgaataggcagagcctantttttagggcagngaacctaatctgcctgatgctataatgatgaatacatgtcattgtaaatttgtctaaacccatagaatgtataacaccaagagtgaaccctaatgcctatggactctgggtgataatgatgtgttagtgtaggatcatcagttatcagaggtaccctctggtggtggcgggtggngt

SEQ ID NO: 652487 - DNA, 178 bp, Homo sapiens
cgcttgtagggagtgtctaggtgactctccattgtggtctcatggcattcttgagcagctcggaggattagtcagtggcataggatgaagggaccgggcagcacatggccattgatgcggacacgtggcgcatagccatacttgtgctcacacaggcgtctggcaaagtccacccact

SEQ ID NO: 652488 - DNA, 427 bp, Homo sapiens
gagggaatgtttgtgcccacacttctcatctctcacttttgccagccgagtcactcactgggttattaacagttccctctgcctcctcactttttgctgcacagacgttccaccaggtaaattcacctgtctggctagggattacctggcactgcccatgggaacacaacaaagcctgcttatggtggctcagaaacacctgcttcatacatacagtagtgcctacttgaatggctaaggattaacaaaatccaggatatcgaggaatatatctttcatttagcagacacatctacataggaggtgggtaaccttgtacaagttagtgtgtgacttggtttcttcaaataaggttaaaaaataccagctacttcatagtagaaggtaatattaataatagtagaggcagctaacatttgagtgctaa

SEQ ID NO: 652489 - DNA, 346 bp, Homo sapiens
acctctgaccgagtcaagaaagaagtagtaaaaagtaaaaggcagaaatgaaatccacaagcggacagcctggcgccacaccctaggcctggtagttaaagcttgacccctgacctaatcggttatttgcataagaaaagcactgtaaagatccctgtcctgttctgttccattctaattaccagtgcatcgagcccccagccacataccccctgcttgctcaattgatcacgaccctctcacagggacccccttagagttgtgagcccttaaaaaggacaggaattgctcactagaggagctcagttgttggagatgtgagtcttcccgaagctcctggccgaat

SEQ ID NO: 652490 - DNA, 1112 bp, Homo sapiens
  misc_feature (549)..(549): n is a, c, g, or t
  misc_feature (1112)..(1112): n is a, c, g, or t
agcggggcgcgctgctttgtggggtggcggctggcggccgtcgctagcgattgctggggccgggcggctgacgtcgttacgctggtggctcgacggccatggcgtattctggcgcaggggggttcgcccagacagtactggtggacatattgtccctagccgagaagactttcatacctgtgtgcggcatactgcaagaacggagtcgggcagacgcttccaatggctatgtgggcccattccatgacagtacaggattatcaggatctacatggaccggaggcatggctgaagatagtggtagacatatatgtgtacagccctagtcatgaatcgagatactatgtggtcactcagttactacaattacaggtgccgacctttaccaatttcagcctttcagaaatctctacaagcaaggttttggaagacccaatgctggcactctttctggcctaacagggcgagtgcttcctcacaaggcaagatctggtgaagcgcatgcaccgacccaatggcattcgcacacatgggattgccatgccttgnttgcgtgcgttgcactttcgtcattcgctgcaactaatagctgagactattcagctggtgactcttaacccagcacctgcagcgtgcctgaccattgcaacagcagcacgtcttagacgaggtggaccggaacagagagattcgatgggacaatgacacgaacccttcacggcaactgtacctttcaggtccagcctaggagtgtcccggctacgaggacgaacgttgggcgctcctgggtgaagccctgtctagattccacgctacaacgttgcaccgacaaggtttgccctaatgcccatgcgcaaaaacgggggcttgcattttgcacgtaagccatccaatgtcggaaacacaggcgtagaggggaacgcttccccggaagacgcactccggcacacagcgtttaaacaacgtaagatgccatggcgagaaattcccatgcttgggaagaactttggagggggtttccccaggcgcttcaagggtcagcgcacccgtcctttgttatacaccgaacagggttgactcgccagcccagcctaaaattcactcgcacgatn

SEQ ID NO: 652491 - DNA, 113 bp, Homo sapiens
agaacatatacaatcgagctgatacccctggtgcaggcggcgctgcccggcatgcaggaacgcaagttcggccgcatcgtcatgatgtctcgcgcggcgcgctgggcctgccc

SEQ ID NO: 652492 - DNA, 244 bp, Homo sapiens
tcaatgtaaagcaaattagttcatcactttattacatcttagggctttcttaaaataaatacagtactatcatatcaaacttactgtgagaaataaagcccatgtgtgaaagtatggtaacagaaagcttactcaggactgtgtaactgagcacttgagaaatcatacagcctttatttccctatttacaggacagagagcggctgtgttcaacaccatttatacaaaatcccaagagactgta

SEQ ID NO: 652493 - DNA, 324 bp, Homo sapiens
acgacatatcaacactgagggacccactgtacagatcgtccggtagtaataaagctatacaagaaccgaaaggagtattcatcacagagatggatgcagactttcggcaaacaggtcacatctgtgctgcagacacagggcaaacctggaaattcgatatgccagacgtacttcatagagctggtgcgcgtgctgaaacaagcattacagaacacgagaaaaagttgtgttagcagtgcctgggcctgggcctcagagggaatgaaatccacagcggacctgcatcaaaaacttggcaaagcaattgaaatggtcgccaatccg

SEQ ID NO: 652494 - DNA, 120 bp, Homo sapiens
aattgagtaattccagaatgcagagtgcccaagtttcatcagctctgaaaccaaccatgccgtcgtaacggtctcgaggtctccctcttctgtcataggccatgaggtctccccctctaa

SEQ ID NO: 652495 - DNA, 113 bp, Homo sapiens
ccaaataggatctcccgaatcaacctgtacccctctccttcataaattattcatgcttcctagcactattaacatgtttaccacaaccaccaccccatcatactctttcaccc

SEQ ID NO: 652496 - DNA, 319 bp, Homo sapiens
cacgagggctgccggcgaacgcgctcgtactcggcccggacctcggccaggtatggttcccgcagctcgtcggagaggagattgctgcacaccgccaccgagcgggaagcgtccggcacccagatgaccgggcccgagtagttgggcgcgatcttgagcaccgtgtgcacgcgggaggtggtggccccgccgatgagcaacggaagcttgaagccctcccgctccatctcccgggccacgtggcacatctcctccagagacggcgtgatcagccccgagagcccgatcaggtcgggcttttcctcccgcgccgtctgca

SEQ ID NO: 652497 - DNA, 155 bp, Homo sapiens
gttgcccccagcatgggttttgctgtctgcatcatgtgctatagtctaaaatgttctgttgccctcggtattttctgtaaattgtagtaatgtccaggcttgatcaaaatcaagttttaagtttttttgcccagataaatttaatgattttggca

SEQ ID NO: 652498 - DNA, 364 bp, Homo sapiens
gacaaaattggtgctagatgggagacaaaattagatgaagaaagactaagcccctcataccagagatgtgttttatatatagtgaagaaaatatagaatattctccacccaatgccttcctagtctccttatttcctgtgcaaagtgctgcgtacgggttcatagcaagttgttattggtatttccttctcatagagaatctgtgatggtgcaaaagaaatgcgtggacagcagaatgctgtctctgcaatttgagaggaggtgctcttaagcaaacgaagaacaataggtgggccgcggtcccagaagttcgattcactaatgtcccagaaaggacacaaatagatgtaggcagaataccttt

SEQ ID NO: 652499 - DNA, 377 bp, Homo sapiens
gtcggagcagggccacctccgagcagtaatgctaagagttcaccagtcaaggcgaacgactatactcaatcgatccattaacttgaccaccggtacaagtgaccctatggataacagggcaatcctattctagagtccatatcaacaatagaggtgaggagctcgatgtaggatcaggacatcccaatggtgcaggcgctatgagatggtgcgtttgtacagcgataaacgtcctacgtgatcagagttcagaccggagtcctcgaggtcggtgtctatctacttcaaattcctccctgtacgagcgtgcccgcgaaataaggcctatttcacaaagcgcttatccccgtagattgatatcagtctcaagcttagta

SEQ ID NO: 652500 - DNA, 178 bp, Homo sapiens
gcaggagcatactgtttgtctaactggcttaacagtgaggccgatgtcagatgcctcagctaagccagggaattcttttgccttgagtctcgtatccagaacgttatgggtttgcagctgctacaggtttctttaggaatgctacattatgtgttagctctgagagaatgtttccttt

SEQ ID NO: 652501 - DNA, 169 bp, Homo sapiens
agcgctactttgtattttattccttggcgaaaccaaaaaggatgtacctaagtagactcttctgtcccggctccttcgcacaagtgagggagagatcagaccacgagatatatcatctctccaccctgctctcggtttcgcctggattaaaagccaaggtgaagcgggt

SEQ ID NO: 652502 - DNA, 421 bp, Homo sapiens
ggaagtgaaaaaaaaaaaaaaaaaaaatttataaaaaaaaaaaaaaaaaaaaaaaaaaaaaaagaggaaaaaaaaaaaaaaaaaaaaaaaaaaaaaaaaaaaaaaaaaaaaaaaaaaaaaaaaaaaaaaaaaaaaaaaaaaaaaaaaaaaaaaaaaaaaaaaaaaaaaaaaaaaaaaaaattttgggcccccctttcccccatctttttttaactcacaacatttttttcccccccccccaatttggccccttttggaaaatccccccttatggggggcgtttaaaaatatttggcccccttttttaaaaaccctaacctggaaaaacccggggtttccccaaattaaacccttttgaaaaaaacccccttttcccgggggggaaaaatccaaaaagcccccccccctggcctcttttcaa

SEQ ID NO: 652503 - DNA, 338 bp, Homo sapiens
ctcgagtctgtgagctcgctcatgaaccagaagatgatacgtcctgctccggtaacttgcccacattccctacaagagtaagagtcttgccccagctgtgaacgctctctggctgtcagtgaggtgggatcgtgtaacctaaaatgatttcccacattccttgcactcatagggcctttctccagtatgacctcgctgatggtgaacgaggtagccctttagaacaaaagatttcccacattctccacacttgtaaggcctttctccagtgtgaacacgctgatggttaataaagcagaacttctgacgaaaagatttcccacattccccacagtgat

SEQ ID NO: 652504 - DNA, 1307 bp, Homo sapiens
tggggcttaatgtggcttaaattaacgcgtgaatttataatttagccaccacaaattaagtgagaaggtttatagtttttgttttcctgtggctctcactctccaaatctcagccggtgttagaggtattatttcccttctctatacgaggcctttcccgtgtatttggcatgtggtcctctcaattctcccaaagagtgtagttctatacgctttgagtttacacccactctcaaagagggtgacgccactgtgtgtgtggcagaacttcacgtgtgcacaagaaacacgaggctgtgcgaagaggcgtgcgcaccagaggggaaaagtcgtgtgtgtccctctctgtggtgtctgtggagaataaagatactcagagtgtgtcgccacacaacacacagagaaacactcgcaaacatattttttgctgtggagacacatatataaatgcttcctccatatgtatatagagagacacgcggtgtgtggatatctcccacactccactattgaggaagagtcttcaataatcccacactttctctcagaatattctccctgctctatacactatgtgaggcgggtgtatatgcagtatgacgaggagggtctctgtgcttttgtggcccacccacgagctgtgggggcagagtgctgtggggggacagacagtggcgagtgcggcctacacaaggagggccctgtggcgttgagacaacccctcgctggtgaacagtgtgggggccaccaactttcctcggtgggggctgtgaggcgcggtggagtgagcctccgctttgggggaaagaaaaaagtcttcggtcggggcgccgcggtgggggaccaaacaagagaggggggagggcggagagtgttataaaactcctggggagacaacccacctccccgttttggtggctccaccggagggccttcccacccggagggggggtgcagtggcctttagagagaggggggacaggggggataaggaaccttattaaaacagcgggggaatattcccagagaggggcggggtggggcaaaaaacactgtcgtgcagacaagctttcacacaaaaacgcgtgttgggactgtggtcggcgccacacaaaagggcttacccgccagcaacaaatgggggtcttccacacgccggggggagagcgcaataccaccgactactggggggggcgtctctccacggagaagcgcgggtgtcacacaactggtgttgcaaacagaaagaaacaaggcagccaactcagagggagacaacaggagggtgtttccccccacatgtccca

SEQ ID NO: 652505 - DNA, 351 bp, Homo sapiens
ccgggcgatcggacgtgtagtccaggggtgagaaccgtgtcactcacttgctcttatcctgacactcccggcagcgccagagaaagctgccacatacaccacaaaaaccaagcatcccccaatgacgttagccccattgctcgattcactcccaggtgagaattcaggcaaacgtccacaaaggtcacaggcagcgtagcataacggttactgtaataccccattatattaccccttgcaggtcctaaacgaagacatattctcttacgagattgtacatttaacgtgtatctctagaagaaaaatcgggtgtaaacttggcctccgatctagtgactggcggtgaggaca

SEQ ID NO: 652506 - DNA, 1094 bp, Homo sapiens
  misc_feature (281)..(281): n is a, c, g, or t
tgggctccactgtctgttctcctctgccagttttcagttaaaatgcgttgtggcgtgacggactcttggcgatagaggtcccaaggtgtcattgcctgatacagagtacctccacaggtccggatcatgctctgggctgagaccatcatggtgcagttccagcggctggatattgtgtggcttgtgacactggtgctgctgggactgattctggtggcagatgtggaagttctctacgtgcaaaggtcaagtggtaagatctcgccagggacctggtacangaatagaccacgtgcatgcttgaccccttcctacgtacatgacgaaaaaggccccctggattaagcacgtgtcgggtttgcgcgtatacatagatcttcctgaacgcgtaatatttcattgcagagaaagcttgttccaaggggcacatgatccattgatacaacacatggtaggtgcgggcaccggcattcaacattggtgtctgactactccgtctgtggaatcgtagaataagtgagcagtgtggtccgcatgtgactgtgggcaccggatgcgctctatccccgagatgctctttgttgcccggttccctgatcctcctggtggtctcgactccccggagcgctttactggtcgtgtgggtgggccgagagtcctattccaatcagtcgtgtggtttatggcctggtgtctgtccgcagtcatttgccctctgcagtcttagggcgatgggttgacattgccgtcccgtgtcccagtttggtctggttttacggctggggttgtggcgcatctttagcatcatgacgtcttaagggcgggctgcagtgaaccacgtaagccccgtttcctggagatcaggtgacgcgctgaatgctccagaaatatgggtatggggctggcgactttccaatagccctgtaggaagcgttagactcgtctcatgggtacacttaagactgggtcctaaaggtggcgtgcagaaaaaaaacaggcgcgcgcgctctaagtttccgggaggccaaactatacggtctaccagttcttcaaccggcctctaggagaccaaataaacacgcgtggcgaaatgc

SEQ ID NO: 652507 - DNA, 979 bp, Homo sapiens
  misc_feature (305)..(305): n is a, c, g, or t
  misc_feature (314)..(314): n is a, c, g, or t
agcgaattctctgtgcgttgagagtccgtgagacccgtgggctgtgtccaaccgaggaccctctgccttatatcctcctgtcgaaccctaagttctttgtcgctctggcatggaattgacgcccgttgcagtacatttgccaagtggcaccttctttcaatttatgttatattttgctatggtggtgattcatttagtttagctggttgtcttttctcacacatctttctctcgtgtcgtctactacattgttacctgcctcgatttgcttctattcttgtccccaagaaaataagccctgaganctttccgantaaaccagaaagacaaaggaattgaaatgaggctttaacccatgtaacaaaagccgttccaaaatatgttgtctaccactataccacaacacgaaggctttttgttactaggcactaagggcaaaaacattccagaacattagtaacaacaattatatcgttaccaaaatccggcaatctgtccgttgtttttaccaagggactattttactaatgtcttaaaacgccaatgtttagtttactccaaacctttttggataatcttccatttttgaccgcggaaccggctgttgtataggttccgttccggggttttccgttctattgagtacagagtaactttgtggaacttgggcaacttgggaaacaaacgaagtttttttggcaatttaacacattgggaacaacttgggctttttaccatttgtggcgttaagttaaggtttctccaaggggaacttcaacacactgggacaacaacacaagatgaagaattatgaagaatgtctccgaaaagaaagaaggaaataatgctgccgggtggtgcctccgttggaagcaagtgtttttttaaaattttatagggtgtggggttatatataaatttaggaatttttaaggacgaaaaataatgtttttgtgtagaagaataagatggttggaac

SEQ ID NO: 652508 - DNA, 225 bp, Homo sapiens
catgttcgtggcatctgccgacgacaaaggcttcgacctgaagctgtccagcgaagtgcaggacatcacccgcaacaaggacggcttctggcacgtcgagtacaagaacctgaaggacggtaccgagtcggccaccgacgccaagttcctgttcatcggtgctggcggtggcgcactgaagctgttgcagaagtcggccattccggaagccaaggaatacgcagt

SEQ ID NO: 652509 - DNA, 699 bp, Homo sapiens
ctccgggaagagagggtccccccgggtttcgtggcctcgcgggacccccaggccctccgggaagagaggggcccccaggaaggactgggcagaaaggcagcctgggtgaagcaggcgccccaggacactaaggtggcgcaagggagcccccggtcctgctggtgctcgtggggagagcggcctggcaggagcccccggacctgctggacctaccaggccacgccgcgtgggcccccatgggccccctaggaccatggactcgcccgctggatttgatgacgatggaaggctccggggggcccttctggtcaacagcccgaagcgctgatgggccacagggacctcccgcgctgcgcgcgacttacacgggggatcctggcgtgcctgggctgccgggggcgacagggagaagttggacgcagatggaatccccggggttccccggcctccctggcagagagggcattgctgggccccaggggccaaagggagacagaggcagccggggagaaaagggagatccaggaaggacggagtcgggcagcgggctcctggcccccggaccccgggacctgtggtctacgtgtcggagcaggacggatcgtcctgagcgtgcggcactgagggcggcgggttcgcaggcttcccggactgcggaccagggcaactgggcttagggcgaacgagctcccggacaag

SEQ ID NO: 652510 - DNA, 604 bp, Homo sapiens
  misc_feature (589)..(589): n is a, c, g, or t
  misc_feature (592)..(592): n is a, c, g, or t
aattcgcggccgcgtcgacctgcagaagacgacagaagggagggaagtaagggatgagaacaagagtctctgcctggtaatccaggaattcttctggaagttacccaagaccaccacggtggtatctgtacaagcctgcaatagccacagtgttattgggcttggggcacccctaaagtagaaacgggtaaagtgaccaaaaacttagatgactacacccatgtcccttcaaatacctggaaagccttcccaaggataggcagaaacaagcccagactgaaaagactacagtgaatacctaactcttcaaaacccagacactgacaaacacccaaagcatcaagaccttccaggaaaacatgacctcaccaaactaagtcacctgtagccatcctggagagagagagagattgtgagcttcagaagggattcaaatagctgttttgagagctcgtggatccaggtaacacagagagggttcaggtgtattgacaatctatgaagaaggagtataaggatcaagcagggatctggagtgaaaatgcagctggctactgagatgctcaagtctgttatgcgaatagtaaanagnaaaaaagggcgc

SEQ ID NO: 652511 - DNA, 120 bp, Homo sapiens
aattagttagaggataatgtcaggcaacaatctggtcttatcccaaattaagggctgcaagatatgtgacccattagtataaagtgcttatgtccagtgcaaaaaaggcagactcagaag

SEQ ID NO: 652512 - DNA, 300 bp, Homo sapiens
atcatcttgacactcagtatttcaccatcacagatggagtcttgctatgttgcccaggctggtctcaaatccctgtccttaagcaatcctccccccgtcacgctcccaaagtgctgggattaacaggcctgagccactgtacctggcttgttttaatcttttatactgcatttttactgtacttattattattattattattatttttgagacagagtcttgctctgtcccccaggcaggagaatcgcttgaacctgagaggcggaggtggcagtgagccgagatggtaccactgcactc

SEQ ID NO: 652513 - DNA, 143 bp, Homo sapiens
  misc_feature (108)..(108): n is a, c, g, or t
  misc_feature (116)..(116): n is a, c, g, or t
  misc_feature (136)..(136): n is a, c, g, or t
aaacatcctatcatctgtaggctcattcatttggtgtatgcatcggggtagtccgagtaacgtctcggcctatccggaatgccccgacgttactcggactacccgatnataacacnactgaaacaatccatatcantcatttt

SEQ ID NO: 652514 - DNA, 193 bp, Homo sapiens
ataatcaacatccaaccatttaaaatataattgatgcatgcccagatgatcttccacaacctgtgatttaaggaaaaaaattttttaattcctagagactttttttttttcttgggaaatgtagggatgtttctattaaaaatttccctgggcgggttgcgacaacaggaacagagataaagatttgcggccg

SEQ ID NO: 652515 - DNA, 335 bp, Homo sapiens
gaggccctacactgaggcgatacacatgaggtcatacgacatgaggcatccgtacagatgaagctccccaggctccttctgcggcgaggatctgcgcttccactcgtcagcaatgccatcaaggatgcactcgctgcaacgtagccctcggtgctgcacacagcacggggggcaaggatgccccgtcgccctctggctccagctggccgggagcctgatcgaccatgccctggtgagtcccaggctgagcctcagtctccctcccttggggcctatgcagaggtccacaacacacagatttgagctcagccctggtgggcagagaggtagggatg

SEQ ID NO: 652516 - DNA, 317 bp, Homo sapiens
  misc_feature (32)..(33): n is a, c, g, or t
atccctcccccacacacaaagaggaaaaccgnngcttatggaagatatatttgccctccacagaccgcaactgtaccaagcgcaggtttgttttgaaattgtccatgtccttcctgaagcagtatagcagcccgtaggtcttgagcagtgcgtcatgtttgcgcgagcttgtgacaaacttgctgcaggtctgcttgaggatctgcccagcccggcggctgccgacttccaacctccccatcagcgtttggatgccttcctctagcgcctttaggaggagatagtcatcgctgtccgagttgttatacaccagtgtg

SEQ ID NO: 652517 - DNA, 1342 bp, Homo sapiens
ggacggaactggagtgatggaggacagcgagaagaaaggcaagagaaatgcacaagtgtgggcagccgccacgagtgaaaatagagggaagtgtcatgcaagtgctggacagaaggcggcagcgtgggacgagcccacagagcccccatcctcaaaaaacgaccacctccaggactcaggtgatccctggggggcaggcgtctgaccagacccatcggaccaacacgatgggctccggcaacccatggtcccagtgccttggatggagacggccagtatctggcaggcacagatgtggtgctctggaatccagtacccattaccattcctggccacgcctgtccagacggccatcttacagaccgaaattcaggcccatacatatacctgggagaccccaggattgaaggcacgagcagtaccacggggctggtaggagcccaaaagggatcaaggggaaagccatctggccatgagagggtatggaggcacgcattccccaaaggtgctggaacccggcacgggaggaaggcccaggagctggagtccatgacagacacaggaaactggggccatgacaacacaaggccgaggctcaagaacattgtacatgggaccaatggagcattaattgaccgcttgtgacctttggagcagaaccatgaggcactgcaacaatggtgcagagaggaagacgcatgggcgcgaacacaccagaagccaaaacgacaagatgacacaagacacacaaaccgcacagaaggaattgacacaaaagaatttcaatgcaccacagaacaacaacatacataaaaaacacaaaaacatacaaccaacccaccaaactaacatatccacaaacaatcaaacacaccaaaacatacacaaacagacacaacaacaacaccacacacacttcaacacaacacaacagccctacaacacaacatacacaacaaccactacataaatacaacacacctcactaccaacaccaccaccacaaattcacacaaaaacgagataataatattataagtaaactctatattctaatacatacaatcactaccataccttaccacaaccacattaaatcataatcgcgaatatactacgaaacaccgatacacagcaatagactaacaactcaagccaacgcatacaactaacaaacatagtacaactcacaacaaaatacaaccacacagaaacacaacaatacagcacacagtatcaacacacacacacacctaccacaacgaaccatcacatccacatcctacatcgtcgtaatcagtactccacaatctgatacctacactaaccataatcgcataag

SEQ ID NO: 652518 - DNA, 202 bp, Homo sapiens
gcaagatgagagtaccagcctacacgagctataggagatacgtggcaaccgtactgtgcatccccgctacccaccttagcatacctgttcctggccactactcttgggatcagcatcagaacccagagccaggctctatactgagagtaaagagtgtgcaggcacccaggttgacctgcaggtgatagggggaaaactacca

SEQ ID NO: 652519 - DNA, 110 bp, Homo sapiens
agacagaagcatagcccctctccaccagccctactcctgcggctgactgccccccagttctccctcatctccacccatgttatgttatgtaaaaataaataatagaaatg

SEQ ID NO: 652520 - DNA, 801 bp, Homo sapiens
  misc_feature (801)..(801): n is a, c, g, or t
ctcaccataaaggctccgccgacgccgagcctaccgcacacccccactcgagtagtcacatgaaaaccctgttataagatgtggccctcctctctgttagttttgaggacactgaagctctcccaggtgtaccccacgctgtacttgtcacctcgaattgagcatgcacttggaggctcctcagctcttcatatcccagcttttccagccaggaagatgtcccatcgattacgttcctcaagtatgccaccagctcaccaccaccgtgtcgtacgtgatacaacggtatcacacaattaagagatgttcacgctgctctcctcacacacattcgaacccggtgctagccccatgtgatcccccccgctcaaccacccaaaccctcatccccccctgtccccatttctgctttacccttcccacttaccacgctacctcctatatcagacacaactaccccctctcatccccttccgcgattaaccttcgccccccgtaccttctaacccacggcccacgaccaactccctgccatccactcccccctctatccgccattaccactcccgctccgccccatcccaccaccctttctcatcatcctaccaatatataaatcgactgcgacgcgtcgaaaccccacccccaatctccctccctattccacttatcgacgatagaccctgaaaccacccccacatattaccaatagttccccctgccattgccatcaaatcgccctctttcctactccaccccaccacgccggaagcccacacacaacttacctcgcacccccgn

SEQ ID NO: 652521 - DNA, 750 bp, Homo sapiens
  misc_feature (25)..(25): n is a, c, g, or t
  misc_feature (131)..(131): n is a, c, g, or t
  misc_feature (141)..(143): n is a, c, g, or t
  misc_feature (146)..(146): n is a, c, g, or t
  misc_feature (148)..(148): n is a, c, g, or t
  misc_feature (150)..(153): n is a, c, g, or t
  misc_feature (155)..(156): n is a, c, g, or t
  misc_feature (158)..(158): n is a, c, g, or t
  misc_feature (162)..(162): n is a, c, g, or t
  misc_feature (165)..(166): n is a, c, g, or t
  misc_feature (170)..(171): n is a, c, g, or t
  misc_feature (176)..(177): n is a, c, g, or t
  misc_feature (181)..(181): n is a, c, g, or t
  misc_feature (184)..(184): n is a, c, g, or t
  misc_feature (188)..(188): n is a, c, g, or t
  misc_feature (192)..(192): n is a, c, g, or t
  misc_feature (227)..(227): n is a, c, g, or t
  misc_feature (234)..(234): n is a, c, g, or t
  misc_feature (242)..(242): n is a, c, g, or t
  misc_feature (252)..(254): n is a, c, g, or t
  misc_feature (256)..(257): n is a, c, g, or t
  misc_feature (260)..(261): n is a, c, g, or t
  misc_feature (263)..(263): n is a, c, g, or t
  misc_feature (268)..(268): n is a, c, g, or t
  misc_feature (270)..(270): n is a, c, g, or t
  misc_feature (275)..(276): n is a, c, g, or t
  misc_feature (279)..(279): n is a, c, g, or t
  misc_feature (283)..(283): n is a, c, g, or t
  misc_feature (287)..(287): n is a, c, g, or t
  misc_feature (291)..(292): n is a, c, g, or t
  misc_feature (294)..(296): n is a, c, g, or t
  misc_feature (299)..(300): n is a, c, g, or t
  misc_feature (305)..(305): n is a, c, g, or t
  misc_feature (311)..(312): n is a, c, g, or t
  misc_feature (316)..(316): n is a, c, g, or t
  misc_feature (320)..(320): n is a, c, g, or t
  misc_feature (324)..(324): n is a, c, g, or t
  misc_feature (326)..(326): n is a, c, g, or t
  misc_feature (330)..(330): n is a, c, g, or t
  misc_feature (333)..(333): n is a, c, g, or t
  misc_feature (341)..(341): n is a, c, g, or t
  misc_feature (358)..(358): n is a, c, g, or t
  misc_feature (360)..(360): n is a, c, g, or t
  misc_feature (363)..(364): n is a, c, g, or t
  misc_feature (366)..(366): n is a, c, g, or t
  misc_feature (368)..(371): n is a, c, g, or t
  misc_feature (381)..(381): n is a, c, g, or t
  misc_feature (390)..(391): n is a, c, g, or t
  misc_feature (397)..(397): n is a, c, g, or t
  misc_feature (400)..(400): n is a, c, g, or t
  misc_feature (404)..(404): n is a, c, g, or t
  misc_feature (429)..(429): n is a, c, g, or t
  misc_feature (438)..(438): n is a, c, g, or t
  misc_feature (444)..(445): n is a, c, g, or t
  misc_feature (510)..(511): n is a, c, g, or t
  misc_feature (639)..(639): n is a, c, g, or t
  misc_feature (657)..(657): n is a, c, g, or t
  misc_feature (659)..(659): n is a, c, g, or t
  misc_feature (735)..(735): n is a, c, g, or t
gggaatgtgtatatattatcaatcnaggggggcttgggtttaaaataaaatttctttattgcaagtgtccaagtccttaggatttgtccttaaaggtactagaagatgagtaagaccacacacaccaggantatgtttagnnnttngngnnnncnngnaaanggnnggtnngttcnngggnggnttgnatcngacatcacagtacatgaagaaaatctgctttttgngaaaagncaccaggnattttagatnnngnntannanggggngnggggnnggngggnacgngggnnannnggnnggggngagggnngagngggngggngngggnttngggggggngggggagggggggaaananaanngngnnnngggaatagangggaggggnnatttanaanagtntgtttggtaggggggctggggagangtgggagcnacttcnngggcatccctcccctctcccaccaaaacaaacaaacaaaaaacaacaacaacaaaaacactgccnnttatcttgaaagtcaagttaaaactatgtggtgaaaaagagagtgcttgttccaggtaaaggacttcaagataatttacaggcagatttatttttattagtaaaagtcacaaataggaaaagacttantggctgactttgagctgngngcttttaaaaatgtctctattattacgttaacaagaaaaaaaaatcaagcaagtttttgcttccagttttgaatcntccagcaacagttgg

SEQ ID NO: 652522 - DNA, 474 bp, Homo sapiens
  misc_feature (9)..(9): n is a, c, g, or t
  misc_feature (16)..(16): n is a, c, g, or t
  misc_feature (44)..(44): n is a, c, g, or t
  misc_feature (47)..(47): n is a, c, g, or t
cactaagcnaagcccnaaaccccaatagttaaatcaacaaaacngcncgccagaacacgaggagggccaggttaaaacacaaaggaccggccccccccccatatccctctagaggagcccgctctgaaatcgaaaaaccccgatcaacctcaccacctcttgctcagcctatataccgccatcttcagcaaaccctgatgaaggctacaaagtaagcgcaagtaccgaaaaaaaaaaaaaaagagaaaaaaaaaaccttgtcggccgccccggcccaaacaactctaaactcgagcaagctaatgcatgcggcccaaattcgagcccacttggccaaatcccccaatagggagccgcattacaaacaaccggcccgccgcaaaacaaacgccggactgggaaaaccccggcggtacccaaacaaaaacgccttgcagaaaaacccccttccgccaaccggccgaaaaccaagag

SEQ ID NO: 652523 - DNA, 344 bp, Homo sapiens
gtaaacgaggaggtgtttactataagcgcctgccaacacgcccagtctaatttaaaagtattgtggagtagggataggggtaaatcattaatggccaggatggtatcgatactcttgagctcgtgatctgaccgcctcagactcccaaagtgctgggattacaggtgtgagccaccgtgtcccgccctggatttgatatcttgaaaataaccctggaaaagttaagactttttattttattttaatagggatgggaatatcgctattagtagtccaggctggaagtgctatggcgcaatctcgggtcaccacaaactactgctccccgggttcaggtaactctt

SEQ ID NO: 652524 - DNA, 224 bp, Homo sapiens
ccccttttagcccggcccccgaaaaaaggggctttttccccccctcatttgcccaaggggccctttttaagttaagggggttttttaaaggggcccaccccctgttttttttttttaattggggggcccagggcgggggaacttttttggggtttttgtttttttaaagcccccccccccggatttttttgggggtttaaaaaggtttttttttttttcccata

SEQ ID NO: 652525 - DNA, 133 bp, Homo sapiens
cgttggcgatcactgtactaacctcaaatatcagctatttctaaacaatttgggcttatatttttcttttttcttttcttttttgagatagtcttgctcctgttgcctaggcaggagtacagtgatcgaccaa

SEQ ID NO: 652526 - DNA, 182 bp, Homo sapiens
  misc_feature (7)..(7): n is a, c, g, or t
atctgcnagaagatggttggggatagcaccccttttaccactgactggttgcagaagcgcccatagagcactgggctccggaaggacacagcattgtagctttcgccatgtactattttacctatgacccgtggatctggcaggttgttgtatctcgaggtcttctccgcgatgagtgatca

SEQ ID NO: 652527 - DNA, 100 bp, Homo sapiens
atgatatgcacagatgtctgtctgcagattggctacccaactgatatgcatcagataccccatactatcatcaacgggatacaaaaagagtccatggact

SEQ ID NO: 652528 - DNA, 708 bp, Homo sapiens
  misc_feature (15)..(15): n is a, c, g, or t
  misc_feature (87)..(87): n is a, c, g, or t
  misc_feature (119)..(119): n is a, c, g, or t
  misc_feature (128)..(128): n is a, c, g, or t
  misc_feature (137)..(137): n is a, c, g, or t
  misc_feature (141)..(141): n is a, c, g, or t
  misc_feature (181)..(181): n is a, c, g, or t
  misc_feature (206)..(206): n is a, c, g, or t
  misc_feature (217)..(217): n is a, c, g, or t
  misc_feature (237)..(237): n is a, c, g, or t
  misc_feature (260)..(260): n is a, c, g, or t
  misc_feature (276)..(276): n is a, c, g, or t
  misc_feature (283)..(283): n is a, c, g, or t
  misc_feature (287)..(287): n is a, c, g, or t
  misc_feature (304)..(304): n is a, c, g, or t
  misc_feature (328)..(328): n is a, c, g, or t
  misc_feature (332)..(332): n is a, c, g, or t
  misc_feature (346)..(346): n is a, c, g, or t
  misc_feature (375)..(375): n is a, c, g, or t
  misc_feature (378)..(378): n is a, c, g, or t
  misc_feature (394)..(400): n is a, c, g, or t
  misc_feature (658)..(658): n is a, c, g, or t
  misc_feature (681)..(681): n is a, c, g, or t
aaaaacttcgttttnatcttctgccttcattattctttcaatatctacgtaaaaagaaatcgtttctcccaataaaatatgtggttnaaacctcagcaaggacgcacaggccctaaaanaacccagcnctccaacangganacctggaccctcccatttaaatgcagccttgtatgtatgnaccggggctctgccctggtcctgtnacccctgaaangtccgtaaggaaggaatgcnaaaaaggatctgtatgatgtgtnaactctgagtaaatanaagaagntgcnaggagcccccagctgangattaaaaggaaggctgtgtctgnatcnatttaaaaaaatgnagtaatgaattaacagcgtctgcaatggnaanaaccattaaaagcacnnnnnnngggggttttgggaaacgggctcagaaaggagcaaggtgtgttcgttccatttttgccttaggtggctgttccgttacccaggctatgctgtttcagtggccaggtggctgaggaggaagtttgaaggccgcatagttgcaagttgcttccctagggcctgcaggggacagcataggcccaaagctagaggaagcttggaagggcgcccacactgggtcctgcggggctctgcatactgcaggccaccatggcgctacnccttaccctctggagtttgtttnatccaggagaagacagctggctggcct

SEQ ID NO: 652529 - DNA, 570 bp, Homo sapiens
gaatgattaaagtgtcagtcggtgtctgtggtgtatatggacacatactgactacttttattttggtaagcttgatactctacgtacggtttagcaacttccttaatatgtcaagaaatacctttccaagagcttatatatttacatattatgtaatttctaatggttgctttcaaccaaatgactgtatcgtaatatatatagccagtttccttgttagacagctgcattggtgaccatcttagtagttatacctgatcatctgtgactgaatagctgttcaggtacctggcacagaattagtaactgcctgctcatcttccaagctaaaaggaaaaacacttctcttctgactttgttacttttttaattactaatgagttaaactttttgtttatgaccattcctattctgtaaggatattcctgtttatgtcctttgcccatttttttcctcttgagatattcatcttttgttaatttctaaaagctctttttgccaacagtgagattcctgtatctgtggagatttttcctcagttttacttttggttttgtttctggtgtttta

SEQ ID NO: 652530 - DNA, 316 bp, Homo sapiens
acaagaggacccctcttctcctaaaaggcaacgatggagtagagacctgaaggacacgtgtagagagagagagaaagccacgtgtatatctgcacaatagaggcttcttggactgcagggtatattttgaaggtagagagccagcccgacttgttaatggatcagatttgaagtgtgagagatgtgggagtgggggcctgtttaaggctaaggcccatcgtgcatgagccccggctgacggtggctccggagagctttccagtgttaggactcagtaagtgcggcgagtcttttcaatgttgcctttcggagaaga

SEQ ID NO: 652531 - DNA, 384 bp, Homo sapiens
taccaccatcatcgtgctgtctttctcttcacagcgtgtacaccgatgagcttctgttatacacctatgttcttattgtttacttgtatgtccccctgactggaatgtaaagccccccgagggcagagaggtggcttactattcagagatgggccctacacatcacaggacagacccattgaggagggagggacaggctgggctgcctggaaccttatacttcagactaaatcttgcgcaccacagtgccctgggcagtcctaacatccctttgtttgtgtgcccagagcattcagactcgagccagccattatctccggcgactttatctctctaagtatctgttctgctcctacgtcagctactttgaattcccaggcacca

SEQ ID NO: 652532 - DNA, 283 bp, Homo sapiens
aggcccctttttggggggattgcccccccatggtgaagtaatgggtttttaataaagccctatccggccccccggttttccccctgaaaaacccccttttttggggggtttttttttttttttttttggtttgccccgggcggggggggcccccccgtgccgggtccccccggggggggggcaaatgtttttaaattttggttgatggggtgggttttcccctttttttaaataaccggggaaaatgttttccaaaaaaaatttaattaattaattccgggga

SEQ ID NO: 652533 - DNA, 1023 bp, Homo sapiens
acctgcagtcccagctactgggcagcctgaagcagcaggatggtgtgaacccaggaggtggagcttgcagtgagccgaggtcgcgccaccgcactccagcctgggccacacagcgagattccgtcagaatcagttacttttcgggcacagccccaggccacttactgtgagcctttttctttctcaacaccacattccccacagggaaaacacatttctcacctcaaaagaagacaagacaacgagcaaacaagaaggagcagcaggaggggttctgagccgaggatgccgggcagacatgagggagacacgcacccccgaatccaaccagtgcctcggcacaacgacaaatgtcttcacgtcacagacctttagaagctcctgggcagacctgaaccaaggctcctgactggtctgtttggctcacatggtgttgagattttgccatcactcaatattcagatttcttataaatatccagatttccagcttctcttggaaaatcagaaaaaaacagcactgaactcctaggcccacaaggcactccccagtgaacagatgaaactgtcctctgctgcggggcaggagtctccaggtcacccccatccctccccacctgcctggaccctgaagaagccttctgagtctgtggctcaacgtgcgatgtgcagtgcaagggcctgccccgtagcctgccccgtaggctgccccgcagcctgccccgtaggctgccccatagcctgccccgtaagctgccccgtagcctgccccgtaggctgccccgtaggctccatggccactgccccacaaggcctgtctccacaggaatgggaagcggacagggagacgggcagcagctcacatgctgggacaacgcagtgttcaatccattctccatccagcagctccagacatctttccagaacacaaacctgaccccatcacctctctgcttagccactggcttaaactgccaatggtttgcctgcatgtaaaataaagccattctttaccattaaaaaa

SEQ ID NO: 652534 - DNA, 102 bp, Homo sapiens
tacagaagccactaaatcccctagtaaatgaaactgtgagtccaaagaggaacagctcttaggacactaggaaaaaaccttgtagagagagggggatcctcc

SEQ ID NO: 652535 - DNA, 366 bp, Homo sapiens
cgtcactagaggatcccaagcacaccctgaaaagaaccaagcacaccctagatgaaaattaagtaacttaactttcaaagtcacgttgaacctaaggtacctctaagatactatttccttaggaaaagatcattgatgattgtttaaatgttttcccttctacactgtcccatctgctcattgtacactggccctctagagaatttcactaatccccacagcttgggcaagccccataaagcagagattcccaagcctacaactctaatgcacagctttccctgggatcccaagccatatatcccttctactgtagaaatacactcaggtgtccctaggtgaacaacttccaacatggggtgtgct

SEQ ID NO: 652536 - DNA, 160 bp, Homo sapiens
cgacggaaggtagctgtactgtatggtgaaggataaaatccgttctgtatagccgtagttgggtcgtaaggtaagtgtcattccagcaagtctcacctctccttctctatgctatggtcttccattagggatgtatttgtttgggttctgtctctatttt

SEQ ID NO: 652537 - DNA, 707 bp, Homo sapiens
taaacttgggcccattgatctatctaaaccggggggggaaaattatccccacatggtgctcagggaaaggactcaattggcaactggtgccctccacactatccttacttctggtgctccactctggataccagagtgcagccatgcagagggttatccagctcgggtcacccgattcctttacaccaaatggcgtcctaacgggaagatctcattttcccctggtggggtaggaaccgatgccagtggggagggatgtgcccctgaccattaacgacggttgttttttttttttttttaaacacgaagggcaattcagtgaggcgcgcagagaattgccacccatgggtgaaaccccgagcacaaaagtgtgcgtttataaaccctgtggaacggtgcacaaggtggcgccccataagagaatctccctatagtggttttagaacggcgtgcggcgaaacggacggggtcgtcgacagtttccgcaccaacgaaaaaggggggggccaactatgtgagacagacaaagaccaaggggagcacacccatttccccctctgggaacacatttgggagcggtcgtaaaaccccctgtttgtgtgttggtgtgtttaaaaaaaaaaagaaaacaacttaggtggcttctactcttatggagtattcaaaacatattaaaaaaaagtgtctccccacgtgagaaaacaaaa

SEQ ID NO: 652538 - DNA, 363 bp, Homo sapiens
  misc_feature (30)..(30): n is a, c, g, or t
ccagcacccaagctttccttgcccccgtgngggccccccgacctaggcgatggaagctccacccctggcagggtgggcagtccggatcagttgcccctggcctgttccccccatgatttaaggccctgcttcctccccgccgacgcccgcccggattgctcccccagccccggggcccctttggacctcgggacctggaccccgtcctggctgcccaggaggggcccctggcatgggttaaaaaatccttccccccaaaagggcccctccctttttctggcagggcaacaggggggcttaaggctggaacggagggcctttctgggggttggattgggggtaataaacccgggcggaaacgga

SEQ ID NO: 652539 - DNA, 1540 bp, Homo sapiens
  misc_feature (452)..(452): n is a, c, g, or t
gtctggacccggagcaccctgtacgatgtgccccgctagaactggtgtgtctatcctcctgacggtgtgctgactggtggcgttgtgtcgacagtggctgtggtatgcgtgtgccgtcccccagcatgacacggtgaagcccctagcagagggtcaatgcgccttgatcggctcttccagcaccgtgcaggactacggcatgcagccagtatcttgctgttcctcctgtgtgacggttgagcaggcggtcctaggagtccagtgagaacactcctaggaggcttggacacgttagctcagtggagcggctcctagaggctgcagtggttggctacacatgcgtgttgtagaagccgtccaccccgtattgccacatctctttactcggacccctgggactggaggcaaggcgcacgagatgacggaacgtcggcgtaggcatgggtctgatnagacgacccccgcctgtagtcgcatcacgtgcacgtgcgtcttggatgtctggggcatgcatggctacgtgccctgacattggttggacgcggggcgtctcacataaatgtgtagccggctctcggcgatgtacttggatctagggaatggcatttgccccaccgttacagaccggcgggtgtgagggcgcgagagtgtgcctgggccccaaccaagcatctcgtgtaaccaccggttggcactcttggcagttgtcccaatagggctctataagggccgcagggaccaaggcactggcgaaccgaataggggattcgcgtcggtggaacgcgtgtttggccaaacgcgatgtagccggggctttgggggttggtgtgcgacctactatgggtctccatggcgtctcccattgccggctaccggcttcgtgtcccgggggggggaatgtggcgttccttcggtgtgccacgcccgtcggccctttctggacgcaggcactccgttggcggatcccccgtgtcttgtgggttggtgcgccgatggcgtccctgcctggggggccttggtttgccacccctggaggggatctgggcccacactgcacagctgcattcgtgttccctcactccttttgacacattgggcgcagctgtggctacacttagctgccttccatgctgtgaggcgttccgttctcccgcgggaccaggtggatcccacatggtggcccctccctctgaccgcttctcgggaggggtccttgcgacgtgtggggcggcttggggttccccctcctttggaagcccccagaatacgccccccctactgggggaccccacttagaccaaaacgactgcattattccaaggataaagagaaacccccacttgggcgcggccaaagcccaccttgaaagctcacagcagttctcccatgccacatcgtcgactacagtgggggcagataacagaggcacctcgagagaagagagcggcatgggattgaaaggcaaactgagagccaacctaatcagccacgcttggacacaggtaggaaattgcgtgcgaccatgagaggcacgtggagg

SEQ ID NO: 652540 - DNA, 100 bp, Homo sapiens
taataagccggccctcatccatgtcacaacaacaacttctgtgacaaaaaccaagagcaggatgatgacaaacgtggcaagtcacagcgactttcccgga

SEQ ID NO: 652541 - DNA, 131 bp, Homo sapiens
tgtgtggatacctccagccccaaggccgggaaagcggccctggagaccggggcccacgtgccccgcccccgcgcgtggcatgccctgcgcaccctgcgccactccatccgggaacctcggctcccgccatt

SEQ ID NO: 652542 - DNA, 909 bp, Homo sapiens
ctgataaaaagaggggccccctccctgtgtgcgcacttatggagacacggtagaaataaggagcgtgcccctcggagagcccgggcccccggcaaagcgggcttctaatacggaaaccccttgggcccgcgggccccaaactaagggcccacaaaatgaggggaggccccgcaccccgaggcagtcctgtatcgcggaaatccgagctcatacttgcgccgcgggaagcaggtagccgtcccaggtgccgggagacacaggcgtacttgaaaaccgccccgtaaacgtaagataaagtggcgctcccacacgcgctgctgtcagccgaccgtcactagtatccatggaggattttaagaattggtggaagcaacaaaaaaacccttgtaatttaccccccccaagttttgcaaaaaacgtggggttataccccacccttactgtgggacacccaacggtgggagaaaaatcctccccgtgctttcctcgacgaggataattagatccccctcgttcaccaccggagcatatggaagatttcccccccgggtgactgacaatgctgggacaaagcgtgaaggaagagattctttagaaagatgttttcccacccctctgcctcattaagaatacacttcaatgtataatatgaacaaaagactcctcacatatggtattgtcattaccaccccccacgcatttctacccaccaagccactcccacgcctggcacaaaaacattgtcttcgaggagatagtctaaagcagctaactcccactcggaattatttccttcatcaacttatttaaaagagattgattccaaaacagatctctctggccattttacccacctggctctttcaacccctaaatgcactattagaaaaaccccggcccacaaaaaca

SEQ ID NO: 652543 - DNA, 390 bp, Homo sapiens
  misc_feature (371)..(371): n is a, c, g, or t
ctctacaggatccctgagggtgaaggtcaaatattgagatgctagcatatggcaagagccttcttgcagcctcctcacatggcacaaaggcaaagagagtgagtgagtgtgtgtgcacgcacactggtgaggggggctagtccgcttctgtgataacaagcctactctcgctataatggccttagttcatccatgagggcagagtcctcatgacctaaacatctcttaaaaatcccaccttccaatactgtcacaatggcaattaaatttcaatatgagttttggaggggacaaacattcaaaccatagcaggatggctgccactttttcatgtaaattcaaaagcttctgggtgccaagcctggtatgtncttgaatatgctgttttca

SEQ ID NO: 652544 - DNA, 772 bp, Homo sapiens
  misc_feature (209)..(209): n is a, c, g, or t
  misc_feature (250)..(250): n is a, c, g, or t
  misc_feature (397)..(398): n is a, c, g, or t
  misc_feature (462)..(462): n is a, c, g, or t
  misc_feature (532)..(532): n is a, c, g, or t
  misc_feature (584)..(584): n is a, c, g, or t
  misc_feature (587)..(587): n is a, c, g, or t
  misc_feature (589)..(589): n is a, c, g, or t
  misc_feature (596)..(596): n is a, c, g, or t
  misc_feature (603)..(603): n is a, c, g, or t
  misc_feature (676)..(676): n is a, c, g, or t
  misc_feature (678)..(678): n is a, c, g, or t
  misc_feature (680)..(680): n is a, c, g, or t
  misc_feature (689)..(690): n is a, c, g, or t
  misc_feature (698)..(698): n is a, c, g, or t
gtcagatacagctatccgttcaggacttgaacttcttaaggttctgtcttttacacatcctacctcgttccactctgcagagacatatgagtccttgttacagtgcctaagaatggaggatgacaaggtagcagaagctgctattcaaatttttagaaatacaggtcacaaaatagaaacagaccttccccagatacgatcgaccttanttcccattttacatcaaaaagcaaagaggggtactccacancaagcaaaacaggctgtgcactgtatacacgccatattcacaaataaagaagtccagcttgcacagattttgagccactcagtaggagtctgaatgctgatgtgccagaacaacttataactccattagtttcattgggccacattnnctatgttagcaccagatcagtttgcttccccaatgaaatctgtagtagcaaattttattgtganagatctgctaatgaatgacaggtcaacaggtgaaaagaatggaaaactgtggtctccagatgaagaggtncccctgaagtactagcaaaggtacaggcaattaaacttctggtaaggtggcngtngngtatganaaacaancagtctaaatctgccaattcaacccttcgggttattatcagcgatgtggttagctgagggtgacctgacagancnanagaggatcnntcacctcngatattttctcgctgggaatagccggggttagtgcctaatgcagctgtctcacgaaccctggttccgacaactc

SEQ ID NO: 652545 - DNA, 269 bp, Homo sapiens
ttgcaatgtcattaacggagagaggaacgagaagtaagcagagggcgtcttatgattgtgtagatacgggtggaatgtgattttatctggaatgggacggctgattcctacggggttgtatgatcccgtctcgtgcaagaataggaggtggagtgctagctaggggctgcaataatgaagggtaagatgaagtgaaaggtaaagaatcgtgtgagggtgggactggccgtcgagtaacatcctcagattcattgcaacacggtctctca

SEQ ID NO: 652546 - DNA, 384 bp, Homo sapiens
ggtcgaccctccctcttcacctcctgccatgattggaaatttcttgaggcttcctcagccatgcttcttgttcagcctgcagaatcatgatccaattaaaccacttttctttataaaattacccagtctcaggtagttcttcatagcagtgcaagaacagactaatacagaaaattggtactgggaagtagagcattgtatgaagatacctgaaaatgtggaagcagctttggaagtgggtaatgggcagaggttggaacagtttggagagcttagaagaagacaggaaggcctgggccagtggctcatgcctgtaatcccagcactttgggagtctgaggtgggcagatctcaaggtcaggagattgaggccatgctggctag

SEQ ID NO: 652547 - DNA, 1309 bp, Homo sapiens
  misc_feature (481)..(481): n is a, c, g, or t
ggggtaggccttgggaatcgagagaggcaggattcgctgctccgcagcgacggccggaggctggttcgggtcacgagtcgggattagtggggatgacggttgtaccgacgaggtctacatggagagaggtctgttagagaaagacgggtgattcaatctcccggttgcgggctcccgcgcgtggtcccaattcttcgtagcccgcatccatgcgcaaggaaatgaatctgctgggctgatatattgagagtccagtgactcgtggatggtagcacaggatggcgtacacgtgttgggcatggagggccctgaggcatacgatagggacatagggggatggaggtagtctgccataggatggtccaacgggaggaggagtcatacgcagccgcatcaacgggttgtgtgcgaacagttgtagcatcagaaggatcatgggatagtagtcgaacgtggtggggcaagcacgtgcaaccccatnggagccttcgctaacgtctccattcgaagaaaggaccagatggatagacacaaagtagcacacccaggtaggggatatatagcttagaggtagaagtcgcttgacgcacatagtcacggattaacactatgggtgctccacagatggttcaatcaggaggactccacgtgtgcattgttgcattaccttagagtggaaccgaaaggggagggcaagcgaaatggggtagacacgatagtgaactgtcggagcaccgtgtgggcaacgtcacccatggagagaacaggggggccacaggcttggttggccgtcggtcggaattacaagacacactcaatccatagcgaagcggagagaaaggagcggtaagcattgccctattccactggttgaagtgtgggcgttgtggcgtagggacttgctggataactatgcctagaaagacccacagggatacgccttgagttggggatggtcgaatgggatgggaaactcgcttattcatagaagccggtgggaaggaccaggcatggcctccaagcaagaagtttagtgaagctcacggccgggtggttgcaatggcggcctaggggcgaggaggcaaaccaaacgtgaaagcagtgggccacactctgggggggggcaaacttagacgagggcaaggacccattaagcgggcgggttcaacgggacaccaaagggccatgaaatcccaggaagagacggcgtggtggccgagaccggcgaacctttcgcccgtgggccacatttccaatccgaccccactggaatgaaagggcagaggaggaagacctcgggggggaaacc

SEQ ID NO: 652548 - DNA, 551 bp, Homo sapiens
tggagggggagtctcgctctgtcacccaggttggagtgcagtgacgcaatctgagctcactgagaacctccgcctccgtgggttcaagcgattcttctgcctcagcctcccgagttagctcggactacaagtgtggtgttgccaccagtgcccagcataattttggtattttatagtagacagtggggtttcaccatatgggccaggcgtggttcacgaactcttgaccttgtgatcagcccacctgggcctctcaaaggtgctaggacttatagggcattgagccacgcgacacccgaaccctcttataaatttcttaaattgaggtacattgcggactccgtggtcacctcccctttcattcaaaccattccaacaggtttcccattgtgcccgtgagaatataaaaacccaaaaaccctatatgtgtgtggggcccaacaagggccccgtggggtgtgactccaggccccctgtgtactatattcccccagagcctctctattctttctctctcaccacctgtgtgaaactctgtgggggctccacat

SEQ ID NO: 652549 - DNA, 240 bp, Homo sapiens
aatctattttccttggtctcatactaagttttttatgtagtcacttagtaaataacctaacccgcttgttttttccacactaatactagggcgaattcctcattttatttttaagatcatggggcgagggagatgatcgcgagcacgaggacctaagacatcagatgaaaaacaatgcctctattccttcaagtataataaatgatacccgagagtaaagagctacacttcgcacctcta

SEQ ID NO: 652550 - DNA, 629 bp, Homo sapiens
agtgtacctatgtctagggaacagaggctgacagtgactgtaatgctaaggaggccatagaatgagacatgtggaacctgcgtggatgtattatggatgctgaaaggcatcatttagagagaagctggctgagacagaggctgcatcgagctgcaactcgttttcagtcgtggagaacccataggcactcgagctcaccagtgaattgtggcacgagtactatatccagctgtcatacccatagactagcatgtgatactgctagctgctacaggacaccagatgcaccgtgagcactactacctgcgtcacaccttcatgctagtggactcagtgaggatagcatcagtagaagtgtcatacagcctgataacacgcacagcggtgcagactatgcgtgatgctgctagctggacagtgagtactacatagaccgtgtaggatcagacacttctaggtctaggctagaccatgcagacatgaagaggattcgtacagaccacatatccaccagtctggccaagcttgagcatgatggggtgcctttgctgcagacacgcacgtgtacaagccaactacataatatcaagcttgattcctactgccgcattcttacagaccgaccgtgc

SEQ ID NO: 652551 - DNA, 140 bp, Homo sapiens
ggacaggtgcttgccttagtttgtgaaaaacaactcttgcgagcagaacggtggtgactaatgaatgtaatttgttaggttgtcagtgaaggtcaagtcccagcatgcagtggcaaggcattagctttttggaaaatgga

SEQ ID NO: 652552 - DNA, 1026 bp, Homo sapiens
  misc_feature (1005)..(1006): n is a, c, g, or t
tgtcactcctatcggcgtctttacgccgctgggatgggccccgctgcatttgccgaggtgggcgatactactctaggtacttctggtgtgtatgtgtcctcgaccatggtacggctcgtttgttccgcgcccactgtggaacgttctcagctcctctttacgtcgtgtgggtgcctgcgtgttcaatgatcctctccaaaatactgccggggtctatcctaccctcttcggttaatgagcgagagtgccttgtgctgatgccggggacgatacaattctgtgtttgcttttggtcgggggcaagtcggcccattgccgcctgctcgaggttcccaatctagcgtggcacgcgatgagatcagccataacggggaagggatacagttcagtgtcacgtaccgcgcatgttgccaatgcggccctgttgtgtctcggctgacaaccttgcgggtcaactaccgtgggaatcactggcttgagtcatggtaagggtctgccaagcgagggtcgccagtctgtcccccgtattcttcacatgtcaatctggattaccggtctctgacagaggcagggcacttacctgatggccaggcatttggaggagaatgactcgcggtgactagagcatggactctgtccggcggcttacgacgcggggacgcgaccagtgccccgaggatgacatcccattgggctggtgccaaagggaacggacgccttggatctgcagcggcgctcagacgcctatatgagcatccactcacgctgttctccctcccgcaaggaccttctgggaacaggacggcttcgtgacattcggagctaccctgacacgagcaggtcaaccaggatctgcccaaagaggtgttggctgagcttgaggccctggagagaccgtgtgcacaaaatgtgacctgaggccctagttctagcaatgagtactatagcaccctcatctgggaataccgggaaggcaccttgcagaaaatatgagcaatttgatanntaccacatcggcaatgtgca

SEQ ID NO: 652553 - DNA, 346 bp, Homo sapiens
cagcatttgatcttggacggcgcgcacaggtgagcacaccatgttatcccgagtccataccgagagagacagggggcgaggaatacgcagggaacgggaggtgggcccggaaagtgcgcgtccgaggttacacaggagattggaagaagagttgggatttgccggattaggcagagaaatgcctcttgacccccggagggaacagacccgtgtggcgggaggaagagcaacgggaagaggtccgcagtgcgccgaagcctggcgggagcgcagccgcaccgcagaagttcattcgtgcgcccatacggtccaagggcacccctctctcaccgattttgtgcggccg

SEQ ID NO: 652554 - DNA, 973 bp, Homo sapiens
cttcgggaattctgaatccgcgaaacttttcctccggtctatagtggaacattctatgctatgcgagggaattggctgcaatggcgtttgcagagcgatccaaattggctgggaattgccaaactcccatttctgttgcaaaatgcccatcctggggctcggcaaacacgggcaataccggggctcctacacataggtgaaagaaacatatgccaggtaagggctaagtatctatcattcagaggcctgtactcacgataggcctcgctagctgaactgtctgtctagtgaaaagctttgaaggctctaacagacatcctggaggctgctgacagaccgagactttgagcttctacttcaaggcaatatagttgctgcagtacaaggaccttctgttgaagatgagcaggatgatgtgagattgaccggccatcttctcatctgaggacctggcacccttacaaggaagaaggtggaagatatgtggtcctgctgaagaaactatagtaaagagcctgatttcattccttcgcacctttgggatcccaaccccaagattggagttgcttgaccgtcgatgtctgaatggtcatgcatttcccttgtgtggggcctaccaggagctctatggggtattagaccgtctccttgatcaggatctaccaagggccagggatttctactaggcaattccatgtgtgaaactggccaagtaccaaccaggaaattctgtggatctctccacacacactccttcaccttcttcaccagcacctgggaggtgatcaggagtgcagctgtcaaactcacagatgccgttgttctcaatttgaccagccaatatgtggagttactagacagagaacaactgaccacacgacctccaagcacttcgtcaagatccatgtattagttgtccagagagccagcctgaggcttggctttgcagacctaacctgcgagggtgtaaaca

SEQ ID NO: 652555 - DNA, 750 bp, Homo sapiens
  misc_feature (11)..(11): n is a, c, g, or t
  misc_feature (67)..(67): n is a, c, g, or t
  misc_feature (80)..(80): n is a, c, g, or t
  misc_feature (93)..(93): n is a, c, g, or t
  misc_feature (96)..(96): n is a, c, g, or t
  misc_feature (98)..(99): n is a, c, g, or t
  misc_feature (101)..(101): n is a, c, g, or t
  misc_feature (105)..(105): n is a, c, g, or t
  misc_feature (107)..(107): n is a, c, g, or t
  misc_feature (111)..(112): n is a, c, g, or t
  misc_feature (116)..(116): n is a, c, g, or t
  misc_feature (129)..(129): n is a, c, g, or t
  misc_feature (139)..(139): n is a, c, g, or t
  misc_feature (146)..(147): n is a, c, g, or t
  misc_feature (149)..(149): n is a, c, g, or t
  misc_feature (167)..(167): n is a, c, g, or t
  misc_feature (173)..(173): n is a, c, g, or t
  misc_feature (190)..(190): n is a, c, g, or t
  misc_feature (195)..(195): n is a, c, g, or t
  misc_feature (207)..(207): n is a, c, g, or t
  misc_feature (209)..(210): n is a, c, g, or t
  misc_feature (212)..(212): n is a, c, g, or t
  misc_feature (224)..(224): n is a, c, g, or t
  misc_feature (228)..(228): n is a, c, g, or t
  misc_feature (230)..(230): n is a, c, g, or t
  misc_feature (256)..(256): n is a, c, g, or t
  misc_feature (304)..(304): n is a, c, g, or t
  misc_feature (422)..(422): n is a, c, g, or t
  misc_feature (691)..(691): n is a, c, g, or t
tcacagcctgnacttcatggtattggttacagattctttacaaaggtgtttacctctctcatgaggncttcttgtttggnttcttcctcaganatntnntntttnanatcnnacancagcactggtttnttcatcagancctcatnntngagcttcgttgttttgtnattttnctaggtttcgtgttggncatgnagctgctctatntnngncagctcaatttntttntnctcctccctggccctctggtacagtntcttcaaacaaaccttgggagaagcctggaggtagatgaagccatgtnatgtgatccggctggcaaactcccacaggagaaaagaatgccagtactgatagatatgccactcgatgtcactgagggaaccattttcaaaaagattctttgcaaagatatacctgtnactgtacacagacctctcaaagatctgtactggcttcctggcctgtaagagtttctcagggaaggggtccagctgtactttcaggcggctcaaaaaggaaaatgtctggaatgtgtaggaccatcgtgctggctcccggtacatcatatccagcaagtttccaagactttgggcagtgcaggctttttgggtgccagcagcctggatattctgccatgttgctacaggttctgtagctacgtgccattctgggtaagttttcgtgagtnacttcacaaacgtggactttcccacagcaatgttgccttcgatggagagccttcggggc

SEQ ID NO: 652556 - DNA, 497 bp, Homo sapiens
taactagaggatccccgtcgccctcctgcactcttactgatttagtagattctaatataggcaaaaataacatgaaattgagaacagtgatcttacataggtactgactgtaagcggatccatgaagctctgggacaaggcagtatctcgaccaggggcgcgctcaaagatcaactgaatgcgagcagtgatcgccaattttcatctcaaaatcgatatatgcttgatattctgccagccttggtgcctctgccatgcaatcagtgcttcttcatagggtttatatttctccagctgctgtagtgcttagtgatagttctgaattactggctctggtataggatcttctgtctattcttcatactactgcaaatgtggcctccatatcatatagtgggatcgccaactgtcgccggatcagactgtggactttctcaagccgatcagtttccacaatcgcactttcaaactctcggtaagcctcccagagggcgagt

SEQ ID NO: 652557 - DNA, 307 bp, Homo sapiens
ttatcatggtgtctggggccaagttttatgggcatggcgtgccatctcttatacagaagaactcgagcccaagaccctagaagtgtagaccttgggaacagaggagaagtgtgctccgttaagcaagctacacagtgccgggggcagactcctagggaagggagcagaaactgggccaggggttccaacccaaaagaaaaggcggctgtaaattactcaaagtgggcgcaatactggggcgcagacactggcggctggcggcaaaacggaggggaaagatggcctccggctaaacctaaggaaatac

SEQ ID NO: 652558 - DNA, 825 bp, Homo sapiens
  misc_feature (264)..(264): n is a, c, g, or t
  misc_feature (732)..(732): n is a, c, g, or t
gacccattctaatcgcaatggcattcctatatgcttaccgagcgattaaattctaggctatatacaattacgctgaggccccaacgttgtaggcccctacgggctactacaacccttcgctgacgcctatataaactcttgcaccaaggagccccgtaacaagcccgccgacatctaccatcacccgtctgacatcacacgcccccgcgaccgtattaagctctcaacctactccgtcttccttctcgttatcttatttgatanccttcgcccacgtgcgcgccgataagcaactccaaaaaccccttccatgggttccaaagccccttcttaaaccgcgtgtagagcgccttcccctggaatctctttagtggtgcctttagggatcccgaacccccatgctttaaaaggcccttaaaaaagatctgggtgttggttgaggccttccccaataatcccccattgcgttaatggaatccccaaaaggtggggtatggaaagggcgcattcccttaaaaacaagtcttcccctaaaaacattctttgagaacccgaggccccgacatgggaattcaacagggtgtcgtggccgaaaccccttgcgcgaaatcgccaatggggtaaagctccgcaagaagcacccaagaacctcccattcctaagtgacgattggaaagccccgggctcttaaacttccgccctcaaaaaggcttccgagatttcgaacccttnttcggttgaagccctttaaccttccaaaaagcgcctaggattttaagcctttgaaaacactttaataccgggtttgtggggcccttcgcgctg

SEQ ID NO: 652559 - DNA, 290 bp, Homo sapiens
tgtgtacgatctagaggatccctgctcatttcatactggcgagcagttttgttgatttaaccgcttgaggtgaagggctaagcatagtggggtatctaatcccagttggggtctagactatggtgtgctcagatagtttaaagccacttacgtagtctatttcgtgtcaccgggagttttttacaactcaggtgagttttagctttatcggggagggggtgatctacaacactctttacgccggcttctattgggaactgatctgagccgggtaccgtgctccgatttcg

SEQ ID NO: 652560 - DNA, 141 bp, Homo sapiens
aatagagtgtcacgtcaatgactagagtgctgatatatagtgacggatcagacgccgaggggcgtttgtcatagagttattgcaggcagtcacatattgataattgtagtgatgccatagatggcccctacgatagaagag

SEQ ID NO: 652561 - DNA, 194 bp, Homo sapiens
ctgctatttctggccagtcaacagaggatgattggctggtttcttctcagtgacaggtcgaacttgacgtgcgggccttacttgcaccatggtgaactcctcctttacaccttcaaattcaagctccaagacaacatcagaggtatcataattcccaggtggagcaatgtaagttacagttcctctgtttcgtg

SEQ ID NO: 652562 - DNA, 556 bp, Homo sapiens
gtggctccaaaggtgtgagccacgagactggcagactgccaacttctgttagcttctgacactgcagcctgaccaatgtcttgagagacccaaagctaaactaactacttaagcgggcccttgcaaccttaactaaagagaattttaacaataaatgtctgttgttttaagccactaagttttggggtagtttgctatatggcaatggataatgcagcgtggctctggaccaggtgttctcaccctgcctctggcaatacagcttgtcctcctgtgaaacaacttcctactactgctgtctttggatgtctcaatgtcccctgttgacttcctttatcctgtcctcaaccctttactaaactctcttcaaacttcacaatggaatatgtcgcctgcttcctgcctggtgcaggttggaattatgaacaagacagacacccttcccttcagagtttatattctagtggggaaaacagacaataaattagccaacaaataaataagcaaggtaatttcagagaccagtaagtaaaacagagaaaccgtcgaattcgag

SEQ ID NO: 652563 - DNA, 628 bp, Homo sapiens
caacccggggttttacccttaaagccttacggccccgtatttgtggttgaattgttagggggatatcaattttcgccccggggaacaagttattacattattacgaattttaaaacggctcacaaataggaattttggccctggaggccaagaattgggcccaaggaatggttggtaagcaggccgtttcagcatcaggcaagtggcttgatggtattcgaaaatggtattacaatgctgcaggattcaataaactggggttaatgcgagatgatacaatatacgaggatgaagatgtaaaagaagccataagaagacttcctgagaacctttataatgacaggatgtttcgcattaagagggcactggccctgaacttgaagcatcagatcttgcctaaagagcagtggaccaaatatgaagagggaaatttctaccctgacccggttctgaaaaagggtttttcgggaaaaaaaagaaaaagaagaatgggccaaaaagtaatcatgtagttgaagtctgtggatgccgctgttatgaaaatggttaaacttgaacccacccattttaagaattatttggtctgaaaatgttttcctttaaataaatgtctattgtaatggctgga

SEQ ID NO: 652564 - DNA, 251 bp, Homo sapiens
gcgtagtgcttcagtcatctccaccacacaggtagtgcagacgctctggtagtcgcccttagtgtcttgcatggatactatagtacagtgtacttgccgtatttgctcttgagttcagacctcattttcaagcatgtccacttcactgcgggagaccatgattctgatcaggacctttactcgcgtccccttgcctttcatggagtcatacagccgatcagcaaaatacaggggcttgttctgcatgcact

SEQ ID NO: 652565 - DNA, 866 bp, Homo sapiens
ggggcgccacctaggctaggtacgaggccggtggtgaaaactccgggcccaggttgacgatagtccatgaaaaagctccaccgtggagctcacggaaagctgtctgggacatgatggctcgatacgtgttctccaagttcacggctgtcccgaagaggtctcctgtgggcgagttcctcctagcggggtggcaggaccaaaacctggctggttgggaacaagcttgtcagtgtgacgacaagcgtgggaaccgggagccggtcgttgactaggcctggagctcgggggagctgcgttccggcccggagtgcgagtctccagccccggggtgcatgtgagacagcaccatgtaggcttgccggctggctggtagtcccaggctgggcagccaggtgtcccgtggtgcccggggatcggggtccgttccgatgtcgtggggggcgcattggtcttcgaggttgcggcccgtggagcgtgcctgagtctcccagttcgctgtgagcatgtgctagcttctccaggaccactggactgcgaccagtgcgcgaaatctgagaaggcctcagctggcacccgggttcctgtgcaggagacgacgaatctggtggcctatgtgcccctgctgacccgggtctgggcggagatcctggtccgggaggtgcacagggaagcgccaggtgtggtgatgagcctggatgaaccgcttcagccctttgctcctcggacatcaacaacatgcccctgcaggagctgtctaacgccctcatggcggctgaagcgctttcaaggagccccgggacacagccctgtttccaagttcactgtcggtgccggcagaccaggaaggcaaaacccctctctgctcg

SEQ ID NO: 652566 - DNA, 325 bp, Homo sapiens
  misc_feature (91)..(91): n is a, c, g, or t
tcaactttatacttctgctgctatctaaacaacactggagacagtgaaaaatacttcggtttttcttttccatgcataatgcccttccttngtaggcaaaactgatgccttgttctgcgtaactatggaaaagcctgcgcatcacattcaaaagtcaaggggaaaagacaccttgtactccgagatgggggaaaaaaaaaatccagtcatctcacttagttttaaagtcccccaaattcccaaattaacaaaaccttgagctgttcctttaactactgactccctatgtccttgacttctgcaaaggtgttatctgaagatacat

SEQ ID NO: 652567 - DNA, 134 bp, Homo sapiens
gttggtctcgcccatcctccagacttctcaagttccaccctcaggtctcctggagttggcagcatagaaaagacaaaccttacatctttacacatatatttatttcaattatagattaggaagagataaattag

SEQ ID NO: 652568 - DNA, 354 bp, Homo sapiens
tcaagaggtgaatgtgacactgacactgaggagaaggaaacgtgtttttttgagacggagtctcattctgtcacccaggctggagtgcagtggcacgatctccgctcactgcagcctccacctcccgggttcaagtgattcccctgcctcagcctccccagtggctgggatcacaggtgtgtgccaccacacctggctaatttttgtttattcattcgtgtgttaatggacacaggttgcttccacctcttggctgttgtgaattgtactgctgtgaacatgggtgtacaatgtctgagcccgtgcctccagttctttctgggtgtatagccagaagtggaattgctggatcag

SEQ ID NO: 652569 - DNA, 1601 bp, Homo sapiens
  misc_feature (132)..(132): n is a, c, g, or t
  misc_feature (327)..(327): n is a, c, g, or t
atcaatgtctgagtgatcgctggtctgtgggcctggtgcgcccatctcctagtggcaggagcgggtggaggatcgttccccatggtctgtgaccctctggaatgctcgtacccaggtggggtcctagacagnctcgtatgggcatccgcacgagtggaactacatgttgtggggttaattgggacgactcagcaccatccatgagatgatcatgacgtgtaaggagcggggaagcagggtcctcgcttgcataggcaaggaaagtccggctagggttcactccttccggacgcatatgcgaaggcgattgtatacataactcgaagnacgcgtcagggcgagctcagagacgtaggcgcccgaaagcctcgcgtgctcgtgtcgcgcaatcgaggcatgtggacacagcgactacagcgcaagtcacaggtcgttcctgtaacaccttattggaagtcaccagaacacgcgaagtagaggctcgataccatattccaggcaaccgagtctcgtagcctgtaggaaccttccatctcgcgggtcttgacaatggcacctcgagctaatactatgcctttgacggtacgtttggagctcgttgatatccccagaggagcctcaactcggggacggatactgcgaaactcgcgtcaacagggatttgtgtgctccatccagacgtcagtcgtaaattttttggaccaaaaagtacttctccgaagggatttccttagggggccagaaggcgagattcgaccttatacggcgtccataggggatgcaaagccttctgcttatcgtgggcctttaaccggtaattcctcggagaacacaataccagaaagccaggtgcaaacattgggtcagtaacgaatgggttgtggctgcgatgtaccaagtctcccctatctaaaggtggcagaggaaactttggcagggaaccccgcccaaagctaccagcattcctggggcctagggtaaaggcccatggggcagcatttttgaacccatgttccttggcccggtcaaacatggcgttcctttgagtccaagccggaaagtcccacctagtcctaattccaacaccggtttatcagacactgtggctgcgctaggcttttgcacagtaaaggggaaccccataaggaggtgcggaaaagaaaaaaggttcacagccatttgggcctaagaccgttggggctgcccattctggggcgggttacccgggttaggtccgcccccttgtgggtgggcccaagggcccttccccggaatgaatcgttgagcccttgtgtcaccccggcggcacagagaaggagattaaagagggagattagggggccccaaatcttatgggttgtggtctttttcggggcccagagggaagaattcttggacgaaggggggcgattgggggctaatttttgggacgaccgccagaggaattaagttcacaacaccgaagaaaacatataaagcggaggacggaaaaacggtggctgtgtttgggtgaacagagaaggaggttgtggtccaaaaaaagggggaggaacatatgagacgagaacaaaagagaggtgtgccacgataaggggagaata

SEQ ID NO: 652570 - DNA, 532 bp, Homo sapiens
  misc_feature (246)..(246): n is a, c, g, or t
  misc_feature (249)..(249): n is a, c, g, or t
  misc_feature (260)..(261): n is a, c, g, or t
  misc_feature (267)..(267): n is a, c, g, or t
  misc_feature (271)..(271): n is a, c, g, or t
  misc_feature (284)..(284): n is a, c, g, or t
  misc_feature (497)..(497): n is a, c, g, or t
  misc_feature (523)..(523): n is a, c, g, or t
tggtcggtactgcttactgggcgtatgctcacagcgtgtcctccgtatgcctcacagtttgctccgtacacccgcgtttcctccgtatgccccagtttcctccatatgcctcaatttcctccatacgccccacagtttcctccgtatgccccagtttcctccatacgccccggtttcctccatacaccccacagtttcctccatacgccccacagtttcctccatacgcccagtttcctccatacnccncaatttcctcnntatgcntcantttcctccatacnccccagtttcctccatacgcctcagtttcctctgtatgcttcagtttcctccatacacctcagtttcctccgtctgccttcacagtttcctctataaggcctcagttttcctcagtacaaccccacagttttccttccttacaacttccggtttggcttggtttttggcaaaaatggaattggacaaacaggaacaattgtgggggtgtgggnagggaagtttggggttttggaaggtngttttttaa

SEQ ID NO: 652571 - DNA, 423 bp, Homo sapiens
  misc_feature (25)..(25): n is a, c, g, or t
  misc_feature (47)..(47): n is a, c, g, or t
  misc_feature (207)..(207): n is a, c, g, or t
  misc_feature (239)..(239): n is a, c, g, or t
ctgcccactccagctaactgagagncagtcagagtcagcatctgagnataagccaagaagccatcacggatccccatgatgcagaggactgaagaaggagcaggacaccagcgcccacctggagcgcatgaagaagaacatggaacagaccattaaggacctgcagcaccggctggacgaagccgagcagatcgccctcaaggggcnaagaagcagctgcagaagctggaagccgggtncgggagctggagaatgagctggaggccgagcagaagcgcaacgcagagtcggtgaagggcatgaggaagagcgagcggcgcatcaaggagctcacctaccagacggaggaggacaggaaaaacctgctgcggctgcaggacctggtagacaagctgcagctaaaaggtcaaggccttacaaagc

SEQ ID NO: 652572 - DNA, 393 bp, Homo sapiens
ttaaacccatgagtatgggatatgaatgtcttttttaaatggtaaaatgtgttggctatttaataagttaattaaaatgcagatcaaagcaccaccatgtgctttttccacagatcattaacatttccttaaagaatggaagtacctttgcaaatgcaaatgtactagtaattttcacttaagctgtggagaccgaattccattccaccagtgatcacttagccacgggaaattaaaaaacaaacaaaccaaacaaaaacggtctggggagagggcggtaattagactcaacatgtactgcctttttgcaggctattatgacaggggcttttagcacaaataatagagctaaaaaatgtcctgccacttccattataagaaaacgggattcat

SEQ ID NO: 652573 - DNA, 148 bp, Homo sapiens
caccgctgtgcttgtctgctggcatactcgcgggctcatgtggtggcggcgaccccaagagccatcacgggcaacggctggagtttgattacgtcagatctgtgtcttgtgttgttgcgtgtgttgtgtgtgtgagagatatgtgcgg

SEQ ID NO: 652574 - DNA, 132 bp, Homo sapiens
ggtaccatgctcctacctccactgctccaaaaatattcatctgtttgcaaaagtaaatagaacctcaatcacgagttcagtctgggggctgggaagtagttagcaggaaaaaaattatttggttttaattgt

SEQ ID NO: 652575 - DNA, 828 bp, Homo sapiens
aaggggcttcgttggggggggtttctttgggttgggttgtccgggcggatttgttgttgtgcggcgggggtttttgtgggctcgctttgtatcgacttcggggtgttgggcgctgtttcccggccccctttttttgggcgtggtggtctggggcccgcgctctagcgcgggggcttatccctttgctggtgtgtcccccctccggtggtggtgccccccctttcgctctttcccttcgttcccgtttggttgtttctgcgggtccaggggggtgtgtcccctgaacccccgcgtggtgggtccccctcggagttgtgggattaggtggtatccctaccccgcgcgagcccgccacgttgattctctcgggcctctcgctggtggtgccccgatgttcttctctgggtgtgttttatttggtccccctcgctcttgcccatcgccctctcggtggccctcttgggggttctctcctcgtcgcccccgcatgtctcgggcgcgcgtgtttgtctcgcggcggtcgccaccacttgttgtgtgtttaccccgcggggtcttccccggggctttctcccctctctttttttgcgcgctccccattttctcctcctgccttcttggtctctcgccgcccccccttcgtatttcttctcccttgttccactccccccaccctccacgcggtgggttgtggagaactccccccctctgttattctcggcgctctttgtgtgagagagatagtggggtgtgcacgttagtttttgtagattgtgtcccctcgtctatttgagtgagagggtgtcttcaaaaaacattatgaaaaca

SEQ ID NO: 652576 - DNA, 174 bp, Homo sapiens
  misc_feature (159)..(159): n is a, c, g, or t
tgatatcacatatatcgttcttgcacctttttcatttgatcttcgttgtaacggataactgggttttcaggcgtgtgaatcatagttgtataattcacagtgggaaagtatccatcaatgacgatcaaattcatattaaacgaagcattagtggaccanaattgtcttttaatt

SEQ ID NO: 652577 - DNA, 205 bp, Homo sapiens
ttcggagagtgctcccgaaggccaggccaacaacgccggacctaccgcaggcgaaggtcccaccttactacatgcggagaacccggtgagcgtcgaccacagtattccaaccctcctgtgcaggcagaagttgaaggagggtgcttgacaaccagggtagcaggagaccaaggtaaacccagtgaggcagaaatatgtatccggg

SEQ ID NO: 652578 - DNA, 466 bp, Homo sapiens
ttccatttgttaataattgaagcgcagaaagaaaaggccctttgacaagagagctttaattgtctttgacggggtgttgaacctaccccaacgggcaaaaacaacggttgaataaacttgggatcctcattgtctcactaatatcctaaagcctggccttacaggccgctaaacgagaagttacaagcctcttggagttggggttgaccccacaagtgttttaccattctgggcaaagcagggctccttatcgttagccttgcaggccttcattacagaagttgaaaacccatccataacagctatgaaatggtcagatgccaccctgctctcgggtttgacaagctgaacacgggcacttgggtattcgatgtgcctatacttctgaaaaagtgagcctatacacgtatggaaagtgaatggttttacattaaacattatgctaccaggtgttgtaatcagcctc

SEQ ID NO: 652579 - DNA, 138 bp, Homo sapiens
acgcgtcaacgtaaccaagtatgttatacattgctggtgattgacgttataaaaacccctgcaaactgtctaaacattataaataaacaaaaacacatcaagagttggactagctgggcaaggagttactttgacgcg

SEQ ID NO: 652580 - DNA, 367 bp, Homo sapiens
  misc_feature (27)..(27): n is a, c, g, or t
  misc_feature (237)..(237): n is a, c, g, or t
  misc_feature (319)..(319): n is a, c, g, or t
  misc_feature (323)..(323): n is a, c, g, or t
attctagaacctggcataatagccacnttgtcatcccagtgtaaaagagatgtgtggccagatggggtggctcacatatgtaatcccagcactttgggaagccgaggcaggaggatgacttgagcccaggagttcaagaccagcctgggcaatgttttgtttgtctcacgaaacattttttaaaaaatgagtgtggcatggtgttgtgtgcctatagtcccagctcctcgggaggcntgaggtgggaggatctcttgagcccatgatcatgccattgcactctagcctgggccacagagcaagactctgtcttcaaaanaatnataaaaaggagctgtgattatcccaaggtggggattgtgaatgt

SEQ ID NO: 652581 - DNA, 741 bp, Homo sapiens
  misc_feature (1)..(1): n is a, c, g, or t
  misc_feature (18)..(18): n is a, c, g, or t
  misc_feature (434)..(434): n is a, c, g, or t
  misc_feature (455)..(455): n is a, c, g, or t
  misc_feature (465)..(465): n is a, c, g, or t
  misc_feature (472)..(472): n is a, c, g, or t
  misc_feature (487)..(487): n is a, c, g, or t
  misc_feature (491)..(492): n is a, c, g, or t
  misc_feature (498)..(498): n is a, c, g, or t
  misc_feature (500)..(500): n is a, c, g, or t
  misc_feature (512)..(512): n is a, c, g, or t
  misc_feature (532)..(532): n is a, c, g, or t
  misc_feature (534)..(534): n is a, c, g, or t
  misc_feature (546)..(546): n is a, c, g, or t
  misc_feature (610)..(610): n is a, c, g, or t
  misc_feature (612)..(612): n is a, c, g, or t
  misc_feature (728)..(728): n is a, c, g, or t
ntggctcttctgaggggnaggagaaaaactggtgcagatgttcttttatacagatgaaacatgggttcagaaattacacgtcacttctaaagcaaccagaagagggacacgaaagcaaacctgtacattcactaggaatttgcagtcatttcagatttccactaggtaagaaaatacaattttgcgttagtttttccgtgctcgggtgtatgaaaaaaaaaacccagccgacatgcagcaacgtctccagcgcttaggtccgtaaaaatgttctaagcacatacatgtggaagaattctctcatcattttttgtaaaacaaagcgttctaatattttacagaacaagataggacagtttttttttttcttttaaagaagttgaagtttgaaggtgtgtttcttctaattttaattaccaaatccattttccttntaacttaacacaacaagcctncggttttcanctctctngctcataagctcaanagtnncatcanantcctctttttanagcgaacccaccaccatctntnaagggggaaaanggatgagagatggggaatgtccccagaccagtgccaaaatacgcctttaggttgctatttacanancagggcgttggatgcctctagcaggcctgagaaaagcaggtatcatcatgtgaaccaaagcaaaagatatggctggtgctcagcccctcctgggcattgagtaaccaaactgagancagccacagcctt

SEQ ID NO: 652582 - DNA, 191 bp, Homo sapiens
  misc_feature (24)..(24): n is a, c, g, or t
ttactgcctgcaacgctgaaaagnggcaccggcatttctcaagccgaatgtcatagtcaggtagcagaaagctccaaagggtgtgatgaaggcagtcttcaggcggtcagctgggtccaacttaatctgatggtaccctgagtacgcatccaaaaaaacttaacagctcgggtgttgcaggcgtttgaagg

SEQ ID NO: 652583 - DNA, 845 bp, Homo sapiens
  misc_feature (1)..(1): n is a, c, g, or t
  misc_feature (18)..(18): n is a, c, g, or t
  misc_feature (295)..(295): n is a, c, g, or t
  misc_feature (319)..(319): n is a, c, g, or t
  misc_feature (323)..(323): n is a, c, g, or t
  misc_feature (349)..(349): n is a, c, g, or t
  misc_feature (356)..(356): n is a, c, g, or t
  misc_feature (538)..(538): n is a, c, g, or t
  misc_feature (559)..(559): n is a, c, g, or t
  misc_feature (569)..(569): n is a, c, g, or t
  misc_feature (576)..(576): n is a, c, g, or t
  misc_feature (591)..(591): n is a, c, g, or t
  misc_feature (595)..(596): n is a, c, g, or t
  misc_feature (602)..(602): n is a, c, g, or t
  misc_feature (604)..(604): n is a, c, g, or t
  misc_feature (616)..(616): n is a, c, g, or t
  misc_feature (636)..(636): n is a, c, g, or t
  misc_feature (638)..(638): n is a, c, g, or t
  misc_feature (650)..(650): n is a, c, g, or t
  misc_feature (714)..(714): n is a, c, g, or t
  misc_feature (716)..(716): n is a, c, g, or t
  misc_feature (832)..(832): n is a, c, g, or t
ntggctcttctgaggggnaggagaaaaactggtgcagatgttcttttatacagatgaaacatgggttcagaaattacacgtcacttctaaagcaaccagaagagggacacgaaagcaaacctgtacattcactaggaatttgcagtcatttcagatttccactaggtaagaaaatacaattttgcgttagtttttccgtgctcgggtgtatgaaaaaaaaaacccagccgacatgcagcaacgtctccagcgcttaggtccgtaaaaatgttctaagcacagaagtacatgtggnagaattctctcatcattttttgtnaaanccagccgacatgcagcaacgtctccngcgcttnggtccgtaaaaatgttctaagcacagaagtacatgtggaagaattctctcatcattttttgtaaaacaaagcgttctaatattttacagaacaagataggacagtttttttttttcttttaaagaagttgaagtttgaaggtgtgtttcttctaattttaattaccaaatccattttccttntaacttaacacaacaagcctncggttttcanctctctngctcataagctcaanagtnncatcanantcctctttttanagcgaacccaccaccatctntnaagggggaaaanggatgagagatggggaatgtccccagaccagtgccaaaatacgcctttaggttgctatttacanancagggcgttggatgcctctagcaggcctgagaaaagcaggtatcatcatgtgaaccaaagcaaaagatatggctggtgctcagcccctcctgggcattgagtaaccaaactgagancagccacagcctt

SEQ ID NO: 652584 - DNA, 657 bp, Homo sapiens
  misc_feature (350)..(350): n is a, c, g, or t
  misc_feature (371)..(371): n is a, c, g, or t
  misc_feature (381)..(381): n is a, c, g, or t
  misc_feature (388)..(388): n is a, c, g, or t
  misc_feature (403)..(403): n is a, c, g, or t
  misc_feature (407)..(408): n is a, c, g, or t
  misc_feature (414)..(414): n is a, c, g, or t
  misc_feature (416)..(416): n is a, c, g, or t
  misc_feature (428)..(428): n is a, c, g, or t
  misc_feature (448)..(448): n is a, c, g, or t
  misc_feature (450)..(450): n is a, c, g, or t
  misc_feature (462)..(462): n is a, c, g, or t
  misc_feature (526)..(526): n is a, c, g, or t
  misc_feature (528)..(528): n is a, c, g, or t
  misc_feature (644)..(644): n is a, c, g, or t
gcagagaattgcttgagcccaggaatttgaggctgctttgagctatgatcatgctactgcactatagcctgggcaacagagcaagaccctgcttcaaaacgaaatcaaaaaacaaaaaggaaatcaaacctcccctcacccagccgacatgcagcaacgtctccagcgcttaggtccgtaaaaatgttctaagcacatacatgtggaagaattctctcatcattttttgtaaaacaaagcgttctaatattttacagaacaagataggacagtttttttttttcttttaaagaagttgaagtttgaaggtgtgtttcttctaattttaattaccaaatccattttccttntaacttaacacaacaagcctncggttttcanctctctngctcataagctcaanagtnncatcanantcctctttttanagcgaacccaccaccatctntnaagggggaaaanggatgagagatggggaatgtccccagaccagtgccaaaatacgcctttaggttgctatttacanancagggcgttggatgcctctagcaggcctgagaaaagcaggtatcatcatgtgaaccaaagcaaaagatatggctggtgctcagcccctcctgggcattgagtaaccaaactgagancagccacagcctt

SEQ ID NO: 652585 - DNA, 736 bp, Homo sapiens
  misc_feature (67)..(67): n is a, c, g, or t
ataagaaaatagttgaactgggcacagtgtttcatgcctgtaattccagcacttgggaggccaaggntgggcagattgcttgagctcaggagttctttcagaccagccagggcaacgtggcaggaccttatctctaccaaaaatacaaatagctggtcatggtatgtgcctgtagtcccagctactcgggagactgaggcaggagaatcgctcgaacccgggaggtggaggttgcagtgagctgagatcacgctactgcactgcagcctgggtgacagagtaagattctgtctcgaaaaaaaaaaagacgttaaaaggaacacttttcagtatctttaatttcacatagtgaatctatttgggatcaaatgcttttgatgcggggactgttaaagatattaaaatttttagctgttagtactatgtctcatcttttgatttataggatggtcaccagacctgagatctatggagcagattcggagaattatgagagctactgatgtccctgatacaggtaagtgtagagagaagttaatcggttcggtgtaaagtgtttgcatatttgaactgtgattacatttaggtggaagtaggatggggttatgtacataaagtaaaagagctttttcatagtcaataagccagttacagattactttatttgcagtaatacacaatttttcacttgtgcaatgttcctcaaaatggggaaccttttatttatagtcatatg

SEQ ID NO: 652586 - DNA, 403 bp, Homo sapiens
taggaagggcggtccttttttatttattattcagggtccccttaaaaaggtccccccgttttccatagggaaattttttttaaaaaggggtcaatcctccccttatgcagaggcagctttttcctttgcttttccatgcccagggtggttttggaatatggaggggctgggtagtgccataactagaaaccccccccctttggggtttgccagtccccggtttaaattttgattttatcaaatactggacttcctttgtggacctgagaaatttctccttcccttattttgccgactcccggtcatggggggtcataacttcttttttgcgatagttataaatgtttaataaagtggtttttgtaaagttggagcccaataataaagggtccttcttttttca

SEQ ID NO: 652587 - DNA, 628 bp, Homo sapiens
gtctgcgagaagaagttcgcccgctccgacgagtctgggccgccaccaccggacgcacacgggcgagaagcgcttctcctgccctcggtgctccaagcgcttcacccgcagtgaccacctggccaagcacgcccgccgtcagcccgggcttccaccgcggtaagcctgctccggtgccctggtgcccgcagtactctcccccagcgactcgtctgccctgcatgctggccgggagccctgtgccctggtctccgtgcccagctcagccccgcaggcctgtagggccctcgtgcagccagcctgaccgcaggatgcttctgccatccagggtgtagtgaggagccaacggggggcctggggcccttccagccgtgggcatagccccgtgaagacatcccgtgccccctccagagagtgaggcggggggcctgagagtggagctgggtctgctgacctcgaggtggtctcaggatgggtgacggggggctgtgtctgtaaatagccatgatactacctttcttcccatctgtgcaccggggcccccccaggggcagctcggaggttctccctgctctcttcaccacccggtgttgccccctcccgggtggggtttgcggggtggcgttgc

SEQ ID NO: 652588 - DNA, 518 bp, Homo sapiens
cgtgtgcgtctctattttcaagattgctttggatattcaaggttgcttgagattttcttttttttcttttttgagacagagttttgctgttgttgcccagactggagagcagtggcatgatcttggctcactgcaacctccaccttctggtttcaagcaattctcccacctctggccctcattctctcaacattcaaaagcttgtcacttcatccagttccgaattaacattttactctggctgatgatgaacgtcggggagaaagagacatttgtgctgcatacgggtttattggttataaaatggttatacaattttgattgctggaaactttgctgacatgtaaggtcacatgagatgtgaggctgttcaactttgatcatctgatttctttttagcactgtgtctgaaagtgcctatgtgccgtttttggtgagacatatgtagcatggcttctgtaaaggcacgttgctttttattatagtaatattgtgggcacagaaagggtgaggagtta

SEQ ID NO: 652589 - DNA, 346 bp, Homo sapiens
tcagcaccactggaggaggtacaaaaaaattatttacacaaccttggaaatattaggcataatacacgcagatttaccttttggaacgttccatcttttaaatttggccagtgtttccttcatgctattctaaatgctgtggctgattacttgcccagtgatctcctgtggcagcctctgcttgttctctggcttgcgagtgcatagtgcacgcctccagctcctgtgtaagtaatgcaatagtgctggacaggtaacacagagagggaggcttccagtaagatcggtgtgttacgccccgccatcatgtttggaatggcattaggcagcagaggacgcctgcgag

SEQ ID NO: 652590 - DNA, 264 bp, Homo sapiens
cctattctgaaataaacactttatgctagcactatattagaccagttcgaagtgtaattaatagacagcaagtaaattttttacctaaaggttagttattagtgaagtctacatatttagagagttattcagtaggcagatagtatataggtaggtaactacaatcaaacaatacttttatacatatttgcattatagtagctaacatgtgatagtcagtaacaattctacaaaaacctgtacattatgtcagtatgacgttgc

SEQ ID NO: 652591 - DNA, 142 bp, Homo sapiens
  misc_feature (25)..(25): n is a, c, g, or t
  misc_feature (32)..(32): n is a, c, g, or t
accccacatgcccagatgtccacgngcttgcnatacgcctctttgcaaaggacctcaggggacaggtacctggtgtgccagcgaaaccaaaccatgcctgctggttcccctgacctcgatagctaggccaagtttgccagct

SEQ ID NO: 652592 - DNA, 250 bp, Homo sapiens
  misc_feature (23)..(23): n is a, c, g, or t
  misc_feature (89)..(89): n is a, c, g, or t
  misc_feature (143)..(143): n is a, c, g, or t
atgtcggatatccatcactcccnagccgctgacttagccagtaattttacatttctatagcatacctgctgtgatctattcttgaatgntagccttatatgctcaaatagattacatgttgtctgaaagcaacaaatggaatntacactgcttggcattccacacaacatgtagcacaaacgagcaggctcttaaaaaagatccacaaaagtactgatgaaatttaacattgccccgtggggtaggaggt

SEQ ID NO: 652593 - DNA, 667 bp, Homo sapiens
  misc_feature (19)..(19): n is a, c, g, or t
gggtgtgaagaaaattacntttttttggatgctacttgaacttgatcagcagtggcgacagtggagagtgagacgaaatttcacagcgagctctcagggattcctctgcacaggtgacaccagcccaagccagagctatgcggagctcatgcgctcccagaggtcatcacggaaacattaaagacagtgacagagtcaagatagatgaggatggcagaagtttcaagattgttccgcaccttcaggattgagaccggaaggcttcaaaggctgtcgcaaggaggaagaactggaagaagttcgggaactcagagtttgaccccccggaccatgtggcaccacactgtcagtgacgatgtctctatgacgttcatcaccagcaaagaggactgaactggcaaggaggaggaggaccctatgaacaaactcaaggggcagaagaatcgtgtcctgcgcatctgcaaggcgacactggaccacccgtgccctacaatgatacgctggggcccatgcagaaaagagctgggccgagccagtggggcctgttctactgggaaaaggagaaagctgccgggagagctagaggcggtgcaggcacgcagaacagacggaagtatgtgccgcgagctggcgaggggccagcgcgcgggagtcatgcagccacgaa

SEQ ID NO: 652594 - DNA, 246 bp, Homo sapiens
acttcagcattatgacagcagtagcaaggtcatgcccgggtggctgcgaaactgaaacattcacatgtctattggtaaccaaagccttgcaaaatcttaaagggttggaattgggatattctttatatcattcaaattaacttccaccagatgagcatcgtgttctttagttctcttcaaacctctcttctaccttggttggattgggtggctcatcatataccggaagaatctcgtttagaagct

SEQ ID NO: 652595 - DNA, 124 bp, Homo sapiens
gaacaacttatagatctagacactaaaggattagctggatcagtaaatgagtttcctacattcgtgagactagttgccgatgtgctgtactccctaataaaacaggagtctgatcagtcaattc

SEQ ID NO: 652596 - DNA, 292 bp, Homo sapiens
gcgatgtcggaagaaaccgaaatcctgaccaagaacgagctgtttcttgccgtgacgcgccccgcactttgggcgggcatcccgatcgaggcggcggagatattgctgatctcaagcgcgtcggtgctgatctggagcaacagcccggtatatgatgcgctggtggtcgctttcggctattccatctcacggctgatcgtccgccacaatgtcaacgccttccgcctgctgttcctgtggggccgcaccaagctcggcaatcgcaaccgcacattctggggcggaagcagct

SEQ ID NO: 652597 - DNA, 701 bp, Homo sapiens
tgttgttttcatcaccccctctcttaaacccccccccccccccccccccccaatccccggagggagagggggggagggagaggaggcgaggggaccgcgcccctccccacacacaacaaaaaataaaaagtagggagggggcgcaccctcctctctctcttcctctgcgctctcattataataaataatcaccgccagtgggcgtctctcttcacgtcgatctcctcgcggtagcaaccaacacaacaaaacaagaagacgaggcgcgcgccacgcgagagatgggcgctcagccgatctctctctcgttctcatcgcgcgcggtgagagaggaagtgcgacacacccacctcgtcccgcccccctctcctccgcggtggaggccccgccccccccggcgaggcgggaacaccccagagtgcgcgcggccgcgcgggggcagcccagaacgcacaggagtgcgggcgcgcgacacacacagaggagactcgcgagcgggagagtggcaaacaaacgagctacccagtgcggtgggtcgtgtccctcctctctgcggtgggtggcgtggtggcgcgtccccctctcggcgagcgacgtcgcgcagctaacataagaagcgtgttttcctccacacgacggcgaagcacccccacctccctctatctagaatgttcacgagctctaatctcaaccacccctcc

SEQ ID NO: 652598 - DNA, 1128 bp, Homo sapiens
attttggctccttgagcctgtctgagcgaggggtggcagtgcctggtgccccagaatccgggacatgaagggtcccaagagtctgcgcttgcgtgagagaaatcccagatcctgtgatggtgggacaccagtgagtgatgcctcgatccatctgattggaaggacactgatctggacttgtcaggtatggctggtcttatttagcaagtccaaaagtgctggccagcgagcagcatagtcttcaaggctcctgctccccgcccttacattacttgggacttggacttgctggcttccctgaaacggagcagagcgcagcaggcagaagtgactgcttgcgcggcagtgaccaagcacagacagtccaacagtactctctccctacactggccactgtgtgcagcagagccacacggattgaccacgacaggcatgctagagcgaagcaggcgctgtgtgaccaggcttggcccacacacatatacctggacaatgacatggacatatatacggttcctggctccgtgcgtacgacgaacgtccaattacaccatacccgtggtgttgggtgttgcagctgaaaagaagtacctcgtgggcgcacacctgccgatccgagcacagaagcacgaagcccgtgtgacgctcggctgcgtgacacaccattgcgatagtatcgtagtttgcccctcatgcgtcccgcaacaagcaccacgaacagaacgcgcaattagcggccactgcacagcgggaccacaccattcccgctgctcgccactcctgacgaaaccctaccatggaccaccgggcgaaacgtcaaaggagggtcaccaactccacgcgacaatgcaacggcacccgggcgggcaacttcaggcaacacgcttcaagccgtccacaccaagtgccacaccgaccacggaaatttacagaagggagggcccgcacgccacatgtggggaaaagaggaggatcatccgcggacagcggggatttaacccacatggtgacaggatcaaagcacaatctcttgcacaccgccccccgcatgcaaatgacacccgacagcgcgcaaacaagttgcgaaagcaccatttgctcacatgcaacacctggcacacagcgcca

SEQ ID NO: 652599 - DNA, 176 bp, Homo sapiens
ggcacgaggcagagttgaaggtgaagcgcctgaggaagaagtttgccctgaagacacttcgaaaggcaaggaggaagctcatctatgagaaggcaaagcactatcacaaggagtacaggcagatgtaccgcaatgagaattcgggatggccagtatgaaaggtaaagcttggcaac

SEQ ID NO: 652600 - DNA, 336 bp, Homo sapiens
ggcagataaaaataatagtcccatactcagatctggaaagcgtgtctggggctgtctgatgtcgctatcctgttgtagtgaacacaagtagcagaaaatactgcctgggtccatctgctataaagtctgggtagaacagcattactatgaagaggatgaactcacctaccttcagatggaggaagagtgaagaggacttaggctttagttcctccatgacttttctgtaggcagctacctacctgtaataaagctgagtgcaataggatgccgaagaaaatctgcagccagaagctgttagaaagcactgcagagaacagggtatgaagcagatag

SEQ ID NO: 652601 - DNA, 132 bp, Homo sapiens
cgatcctatgccgttgtcagtgcgcgttgcggattggatgggtttgggtacccgccatggctgcatcaatgcacgcaagatgacatttgctctgcttaaaggcgtccttcagatgagcgagggctcaacgag

SEQ ID NO: 652602 - DNA, 391 bp, Homo sapiens
  misc_feature (244)..(244): n is a, c, g, or t
tgatcagtcatgtgatcagaatgcgtaacagcattgctattggtaccggaacgcatgcctcagatctgctgagaatgtgtgtgtggcgtggctttgcctgggtgtgctgtcatcatcgtgcgcattgttctcatcatctacttccggaagccttgctccaggtgactgattcttccagaccagagtttgatgccagcagcttcggccatccaaacagaggatgctcagatttctcaaatcctgnccaggatctcctcttagggtagaagaagtctctgggacatccctggggtgtgtgtgtagatttcccacctggtgactctgctgtccctgggcttgcatctcagggatcccagagtggcctgcctatcacaaccacaatccttccccc

SEQ ID NO: 652603 - DNA, 100 bp, Homo sapiens
aaaagtgcactcttctatatctactaaaataacaagcattaacacacaaaaggattcatgacagcttaaaaagacacattacatgttcctttacccaagg

SEQ ID NO: 652604 - DNA, 252 bp, Homo sapiens
tggggagtctataattttaaataaatttaaaactagctacaaaatggtcaatcacttcacaaccggacagaggaaacaggaggaatttaatataccttgctataatgattattaatctcacagttaatattccatccatttatataattttttaaaagggttcctttatcagctactaaacttctcagcaattgggtgtgcatagctctagattaagcaacaaagattggtcctgttaacaaaccacggggg

SEQ ID NO: 652605 - DNA, 81 bp, Homo sapiens
  misc_feature (23)..(23): n is a, c, g, or t
  misc_feature (78)..(78): n is a, c, g, or t
tcaccagtcattggccgcgcaanggaggtaagccgagctccagctgcatgtgcccgctcaggtggcacggcatggccntgg

SEQ ID NO: 652606 - DNA, 145 bp, Homo sapiens
gtgctggaccgttgaccaaggtttctcagaagctgctgtttcagactcaatcgaagttagcaggttctgggttccttgacatgtcttcatcgtgcttgtttaacttgccttctcgtgctgcgaccatgggccattttcttgcttc

SEQ ID NO: 652607 - DNA, 1436 bp, Homo sapiens
agttcaatgctgtttcaaacagggcaacaacttcttacttgtggcgggctgggcagcttacgactgtacttaacaaaaacgaacactacaacaactccctcttctaacgcaaacgtaactacccacactctctacgaccctcctagccttctgctgcttacgcacgcgctactctccttctcaacacttctttcttctaacacacgcccaaccctaccctgcgtccactctacacgacacactacacctctctctacgcactcttgctgcttcactagcacagcacacacactaaccctccgtgctaccccaaatccaaacctcctctacctgtggccccaaccaattctcacaaataacccaagcctggcctacgcgacacacgcactactttcctccaactctctatctctctctcacctctggcaccaacgccaacgaaccaccttctctctctaacttaccaaaccatctcaccctgtgaaccttctggcaacctattctgtgctaccccacttctcacctggcggcacttaccttatcaccatactcacttttggaacacacctctcgtctggaccccattagtgcctaaaatttctccccttctctaccacacctttttgcaccaccagacacatcaccaccgcttcccccaatacaataacttcttccccaccgaaagcctacatcctctctaacgccataacggctctcaaaacccattctccccctctaatttctcccttatctcccttttaaacacatctctgtggcacctggggcacgtacacggggggcacaaacaaccttcaaaccaactttggggcccaggaccttctaatttgcggcgaacttactcctcttgtggtgctcccatcttcccctctctgcgtcatcttcactcctcccttgctccacaccaccgccaccacaacctcccttcaattggccccaacttcttctcaaacacggcgcgaacttacaaacaaaagccttctaaagcagggccccacttaattgggcggggcctctcttaaccaaccttgggtaccacaccccccacttccaccggcgtacatctggcgtacacttcttcaccttcgggggtcgccccactttctggccgaactttcctcacatcttcccccggtccgacattacattaaacccttggttcgggccctcacatttccttccccttattatccctttacactggtattctcccatagttccatgtggacgggtttaaggacccattggatctcaaaccatctctcaacaaccacaaccggcaaatacggaaccaaccgcgctcattcaccccacttgggcacgggcatataccggttcacaattctcaacccccatgtaaaccatattgtggggcgcccacagtcttacatgcgcacagctatcacttccataagtcg

SEQ ID NO: 652608 - DNA, 205 bp, Homo sapiens
atatgcgttcccgataacacatagctctgactcttactcctctctctactctgctcgcattgctatagtggaggcggagcagacaggtgacagtctacctcccttagagggactatccacctggagctcgtagactacattctcttaactacagtgttctctattaggggctcattctcacatatatataaacccctgcataacc

SEQ ID NO: 652609 - DNA, 959 bp, Homo sapiens
catagatgacgttggcatcctgatttcacagaaaagtgaatggatatattaatgtttagcaatttgtccgaggatacagagatacaggttgagcatccctaatccaaaaattcaaaatctaaaatgttccaaaatctgaaatttttgaaagcccacatgataccacaagtagaaaattccacacctgactacatgtgatgggtctcagtcaaaatacaggtgcacaacagttttttcagcgtccccaagggaaaaataaagttaccttcatttatttagttcttctttaataccttccttaatatagtgtatatgacacataaatgaatttcctgtttacacatgggtctcgtccccaagatatctcattatgtatatgcaaatattccaaaacctgaaaaaatcctgaatccaaaacacttctggtcccaagcgtttgggatgagggatagtcaacctgtagtaatttgaattcggctcagtctgactccatggggctgaaatcttaaccaatatattgattttgtctaataaacataatatcgtcatgtccgtaattcttttgttgaaatgaaatgcaaattcccatgaactaagctattgccaattccctaaggctgcttgctattctgtttacagtgacaagtacttgataagtgggcttatatactacaatcactttataacaactctttatgagtgccaagtctcttcattcaaggttctcccttattattttcaacacttactttgttttctggacgggtgcgcgggcaccggggggggcggcaggtctcgcggactcggcctggtgggggtctgtgtccccccgtggttgggatgggccccaccccttgtttggtaccggcggcacggggtgccactgttccgccccgtggaagacccgccttgtgcacaccatcttgggtgcgcgtctccgtgcgttcttttttttgtta

SEQ ID NO: 652610 - DNA, 264 bp, Homo sapiens
cagcacagccagagcaatatgcgcaccctcaatgagcctggagcccagaggacgaggtggaggacgaccccaaggtgacagctggaggccaaggagctgtggagaccagttccacaagctaggcacaggagatggtcatcaccaaagtccgggacggcggatgttcccccccgttcaagtgtgcgagtcagcaggcctaggacaagcaaggccaagtaatatcctagctagatgtgacatttgtagccagctcgacgatttgcc

SEQ ID NO: 652611 - DNA, 249 bp, Homo sapiens
  misc_feature (39)..(39): n is a, c, g, or t
  misc_feature (138)..(138): n is a, c, g, or t
ggccgtcctagaccagcggggcctcaggagatggtgcanagtcctggaccagacaaacggcactgggaaagcaggagcccaaaggaaggctggaattcagggaagagccacgtgccaggctgtgacgaaggcgacaanatgaaacagtaggggggcgggggaggcatccaaactctatgtgctgtctttgcactactctgtaaatctaacattattcggaagtgaaagttaaaaatcaaaaaaaaaaaa

SEQ ID NO: 652612 - DNA, 327 bp, Homo sapiens
tctgccatgccagggaagaagacatcatgagcaaaaattaaaatataggttgaggacagagggaagcagctgtatggcttccaactgcaagcccaaggacacagtgacttttgggagggcacaggaggtgctaagcagagccctaaagaggcaactgtcagtgttcatctcacgctaaacttatttaggtcctcactctgttgcccaggctggagtgcagtggcccgatcatggccactgcagcctccacctcccaggctcaagcaatcctcccacctcagcctctcgagtagctgagattacaggcatgtgccaccaaaaaaaaaa

SEQ ID NO: 652613 - DNA, 100 bp, Homo sapiens
ctgcggagcttatactgtggtgggtaaagacagaactatttaattttatccctaaatatagttttgattgtttgttatgatgcaccgtttcagtcaagac

SEQ ID NO: 652614 - DNA, 208 bp, Homo sapiens
gagtagtgcaccaatcacctcctccatctccagaactcttttcatctggcaaaacagaaactctgtctccattaaccactcattcccccttctccagctcctggcctccaccatttgacataaagtctctctaagatatgatagacaccaggtcataaaagcagaatcatacaacatttgtctttagagtgactggcttatttcactt

SEQ ID NO: 652615 - DNA, 130 bp, Homo sapiens
tgctgagatatcagcccgttttcattgctagattacattgatagtgaatttgggaggtcgaggtgggtggatcacctcaggtctggagtttgagaccagcctggccaacatggtgaaccctctctgtact

SEQ ID NO: 652616 - DNA, 397 bp, Homo sapiens
gtaccagggattgctctggtggaagaacttggttctgattgtgccagatagcattgggttctgtcacatatgatcttctgctctcttctggccatctggttcactctggtgttaattggcccaggtgtctctgattgtaactggtctccttggaggcagagagctctgtaatctgagttagggctgatctctttggagacatgcagtgttgtctctgattagagtgggcctccaatgtctctagttagggtagaccttctgtgtctctggttacttcagaaatcctgtaacccttttactgaagatgtcctgtgtccttggttactatggaactcctgaaagacctgcaggctgtagtatttgggcaggaattgggccactgatctggcgtcgacgc

SEQ ID NO: 652617 - DNA, 169 bp, Homo sapiens
gtgggagagtggtccagggtgtgcatactacaaaggtaggtgaaaggtgtatttttttttttcctttaataaggagagtggtatgcttgggcaaacagggtatggctaacacacaaaacaaccagggagacagatttcttggcaaggaatgagcttcgggaaaaaaaaa

SEQ ID NO: 652618 - DNA, 253 bp, Homo sapiens
ctcaacacaagactcatttaaagcaattattatgcactgaatattagaatgacgatgtattctactccttaagatgaaaaaagctgatactatattgtaatagatacaatttgtataccactagtagaaaatgatttgcaattatgtgttaggactttacatattccatcattgaaacatcagtgcattctgtagcatggccatccagctgtacccatgacttacacctgcacatggcctgcgagcgggcatc

SEQ ID NO: 652619 - DNA, 161 bp, Homo sapiens
ccagggcattagacctgttccacaattccaatatccaaaaagctttaaaaagtaaaaagttttctcataacacactgggaagcttaaccccaaccaaagggaggctatttatagtatttaccctaactaagggagggattttcttttcttgaaaaacactt

SEQ ID NO: 652620 - DNA, 154 bp, Homo sapiens
ctgcgcagtatgtggagtaggttatacttagtggaatggttatttcatggaagagaagtcattggaggtaggattgacagtatattgtgaagtgtgatttgaacagcacatatgctctggtttgctcaacataactagcagtttattgcttaca

SEQ ID NO: 652621 - DNA, 377 bp, Homo sapiens
acgaatgcctaatccaaggattcccaaaatcagcccgcacatccacggttttgcggagtggggggctagtaactaatcgcttagcgtgggttgccgatactaaccgaagctttgagagccgtttggtccggtactcttgttttgcgagaatacgactaggcacctggaagaatagtgtagtttcctgcgcgttcgtacgccttcatacgcgtccgttggggcttttgttgggataaggcccgctgtccgtgctccggttgactgaataccttttttcccccgtctgatggtttgcggttggttaagaagctttttgtgattgtgtttgagaagggaagacgtattttgctctgtgtcggctttcttttcctacttgg

SEQ ID NO: 652622 - DNA, 597 bp, Homo sapiens
gggggtccctggcggctggtagctggctgtgctggctgtgtgcgatgcatgtctgtgtgctcttcgtgcgttaacaatggtgccccaatggtgtgaatgtgctgctggtggcctgccgccgcctttgcctgccctgcgcatgccctgtgttgcctgatgtgtgctgtgctgtgtgttgacctgctgtgtttttggagatgacctggcctgtgctgcccaatggacagaattgtgatgcacacttctgaccaccacctgtgccatggatgctgctgcctgccgaatggctgtgctggctgctgatgcttggatgcactctgctgttactgccaatggtgatgtgccctgagatcgttggctgcaagattgcatgtgatgcatgactgcattgcaatgttagtgagcaaaacaattgtccaaatggctccaaaatgaatgttattgatgtgccttgcctgttgtgatgcatgcttccaaatgatgctgatgccatgaagtccctgtgggctgcaatgtgctttgatgtgatgatgtgagtgaaagaacccatgatgctgatgtgaagaaccccgggaatgcaccatggccagtggccaa

SEQ ID NO: 652623 - DNA, 1115 bp, Homo sapiens
ctattatgtaggaggtgcttcatgtacgggggattcttttttgtataccacctattagttggcggtcgtgtcgtcttcttgtgaacccgttcattgttttataccgtgcaaaattaggcccagtgatcatccgtcgcaatcacgtagtataattatggtttttgtctgaccagatgttgaacttgttatgtgagagtatttctgttattatgtccaagtgcttgaccgggacacacttgggatggatggtgtagaatattgtggactttccatgttacaactagtcggaaattggaatggacgagtgtattatgctaaagagggcccaagaattggatccctcccttgatttgaatggctttgaagcataggacaatttgttttgcacgtttggttgttgagagttttacccaagtgactgtatctaggcaattcattatgctttgaactttagtttgcctgcagtttcttgtgtagatttgaaaattgtatacccatgtgtgtttctgtagactctaagataccctgcacttgtggtttaggaaaaaatactgaagatggaatatatattgtaaagaagggatattaagaatcttagataactttcttgaaaaagatggcttaagtcatcagtaaagtacctttatgttatgaggatataaatgtgtgctttattgaattagaaaattagtgaccacttagtttaccacggtggacacaaatgttgaagttgtcctgttaaacttataggcgttttttggggaatttggaggtagttgggtagaaaaattattagagacacttgcacctctttgttaacacgtattttcttcttttatttctgttatatagtggatgatatacacccgtggccaataccaaagtacacttggcttaaaatatatagtgagaaaatgtcacctatatcttcccactttaacacttgtttttgtataattgggtgtagagttttctgacactccaaacttggaacccttggaaaacacaaagcttttacattaaacaaaaatccttgtgacttacaatttgcacaatatttcttttgttgtaccttatatcttgtttaccataaagaattccctttggtatatgga

SEQ ID NO: 652624 - DNA, 160 bp, Homo sapiens
catggagagtatggattaggtgctgtagctgatggggtctcgtgcaaccccatcgtcacagtcttcctctgagtaacatatgacgcactctcccctgaactctacacaacatattttgtcaccaagaccttagcaagccaggagaccttagcaagccagg

SEQ ID NO: 652625 - DNA, 188 bp, Homo sapiens
tcggtacctattacacggtcatgtttttcgagttcttttgtggcctcttacagttttctaatcttcctcgtcattgactaatatttctccattccgatgtgttaaatgaccttacctactcctctccttttggatgcctctaatctgctgaggacttcaaaaccagaaatacgcagaacgcgcctaat

SEQ ID NO: 652626 - DNA, 113 bp, Homo sapiens
tcggatagccttggcgcgaccaggttatgcccttctgagattataggcgagtgcgtcagactgactctggccgcacttgtcgagccgcgcatcaggaaggcccttgtttcatc

SEQ ID NO: 652627 - DNA, 366 bp, Homo sapiens
gtcgttatgaggtcgggcacttattatcctcagtagaagttttcttggccagtgtaggatttgtgacttatacatcttactgtacttccccatcagttatcatatttaagtatacggtttttccattatactcatacttcttccttagaatggctattccgtcagccatctcacataccttcctgcgttactcctttccttcaagcgtttaataagtggtataggaatattaacctattttccattcgcattcacatctctgtttctacttaggtcccgacttacccatggttgacaaacattgccatgggatccttggacttccggccagaaggtttctcaccttctttctcgctactcattcct

SEQ ID NO: 652628 - DNA, 833 bp, Homo sapiens
tagctctttaattcatcagtattaatacagaattatcattgcgtttctggtactttttattcaatgtaatcagaagctgtgatgtttgccttgtagtcctgtgcttgttactgtaattttttttttttttaacgaagcaggtgactgggactaatgtaagggcagatgacgtgatcttaagacggcctatatatatcagtctcttactctatagggtttaaattagaataagcttttatcaaatagataatggaggcaatttaggattcacgcaagtttcagtgtcaaaggggggtcttatagttcaattctgaaaatagcaaattaataaacagccactttaaactggttctggaaaccagacccggggtagatatagtctaaaggtagttaaccatataagccttttcaactcttaatgcctccaatgaatcagcagttaagaaggttctagaacccatgaaagcttgtgtatgtatcactaggttgggtctttatgtggggtgatttacagttctgactaaagctgacctaaatggatcagttatgtgtaatatactagtgtgtaagactctttttgcttgggaggggggtaacattattggggcgatgcgaaaggactgttgtgggtcagacaacctttggagtaagggagggttttacctgtgacatttttaatgctttttggaattcggaattttttcgtgcgacaagggttgtaacggttcctttatgggagcttttttgtttggagtggcgcaactgggggggaaaaaaaaaaaatggcggggaaataaaaggggggaaggagtgaggagtgaagagaaatagaa

SEQ ID NO: 652629 - DNA, 217 bp, Homo sapiens
gggaaaaaccccccttggtgttttgggggcccctttttaaaattttttccccatcctaaaacttattcgggggggtggggtttccccccttgccccctggttttttttcttggggggggcccctttttttttgccctttggcctttttttagctgcttttcccccccaaaaaaaaattccttttatgggtttcccctgggtttttaatgttttttta

SEQ ID NO: 652630 - DNA, 1169 bp, Homo sapiens
ggtgattgggcctttcctctcatggagacaccagtgaagttagagatggcttcgcgggacagcgagagacgcgacaggaactgcctcgggacgggatggggcgaccactggctgtatccctaggggcagggccgcgcgcattgtttgagtcctgggtcctattgtttcggcagcatgccaccgtgcggagatgcgaagggaagattcagctgtcttgaaccggaggagtgacccggtcctcgactcaggagcgagctccggagcatgcactctgcagacagagcatcagttgtagcctgccatcacaggaaagctggtggcatgtgtcatgagcaggtcaccggagctaggacccttggcctcggggaactgtcccctgggatcctaagggtagccatagtggaccacaatgcccgtgcgcgagtcgagagcctagtgcccagggcttggggttggtgccttgcgcgcaggagggcaccatattgaccgtcggggcctatgtcccttttgaaactcccacttcggaggcggctctcggtttgtcgtcctagttcgacccatgcgttgttacgtcggtcgcccaacgccagggggggcgtgctagggccgacatgggttggtaagccggtccttcggagggcgtacgctttacggacgcgccattggtgtgacaattgtttggtagcgcgtgcttcattggcctttttgttcccgaggcggcccccattttggggggggccccctttggacctccaatcgaaattctcaaaaccttatgggtagaccccgcgctttgaggtcagctttggacacggtggcgcccccttggggatctttttaggcttgggctcccctggttgagcgtttgtccccgccttggtggtgtggggggggctttaaccgagccagtgtggcttaggtttcgcggttaccggcgcgcggtttcgctcgagagcccgagagggctttgttgcggcgccggttacgactttccgattccacagcgcctggtggccgcccccgtgtccgcgacacggccgaaagtgttggccgtttccccgggcttttccccagagggggcgcaaccttttcttgggggcagtttgggggccaagggggcttttgggtgtttaggcgccccgggcgcccttaacggtgtggggtagtta

SEQ ID NO: 652631 - DNA, 523 bp, Homo sapiens
ggaggatcccagggtgcatgtatacagacagctaagaagcatatgagaaaaggcttaatatcactaatagagaatagcaaatcaattctctaggaatggctattattaaaaagtcaaagaatcacagatgtgggcaaggttgtggagaaaagggaacacttatacactgctggcgggactgtaaattagtttagctattatgaaaagcagttggaagatttctcaaataactgaaaatagaactaccattcaccctagcaaccccattattctatatgtacctaaaggaatacaaatggttctaccataaagacacagtgcatgtgtatgttcatcacagcactattcatgataacaaagacagggaatcaacctaaatgcctatcaagggtagactggataaagaaaatgtgatacatatacaccatggaatactatgcagccataaaaaccagatggagctagaggtcattatcctaagtgaactaatccaggaacagaaaaccaactaccgcatgttctc

SEQ ID NO: 652632 - DNA, 675 bp, Homo sapiens
  misc_feature (675)..(675): n is a, c, g, or t
cgtggaaaaagagcctatccccaaggattttcccaaactatgaagtcctacaggccgctatcttaccgaggactgcgtgcggaggctaggtgcatagcttgcatgtggatgcctgtgctgcctgtgtgcctgatggcttctggcttgcatgtgcctgtccattgtgctgtgtggcccttgccttgctttgccatccatgtgaatttgccatgtggtgtgctgttgctttgtgatcttcatgtctttgtgtgtaccttcatccatttttgatttgtgtgtgatttgtgtgcatgtgaagcattagacagccatcacttgtgaccttgtgattcgtgtgcaatctgtgctgttcatttatcttatgtgctgaccaaaatgatgtgacaacatgtgaatgttacatgtggctacacatgggtcatgtctttgcccatatggcttccttcaaatatgccaactggggaatctacaagtgggtatttaaattgtgacccctttcctagtttttctccaatgctgccttccagaatttatgtggctatattatcccccccgagagtggctctcctattgttggtcccattgttgccccatggcctttggaattgccgcccccttggctgggtctatcttggcctttggtttgaatggcttttggccctttgtgccccttan

SEQ ID NO: 652633 - DNA, 101 bp, Homo sapiens
gtttcgcagggtcgcaaactcacatgaaggggaatgagtgtgggcaagactcactttccacgtggtctgctgttctgacaatcatctgattggctttctga

SEQ ID NO: 652634 - DNA, 338 bp, Homo sapiens
ccaggtttaacactgggatgacttgggttgttttcctgtagttttgaagtgggccttcccgctttttttgggggaaatctgactgttttgaacacttatcttggattagttgggttgttttgtattgtggatccctaaatagacaaaagagtcttggaaaggatttgctggctctgtcttgaacgttcgcccctattcaccagtgtgagtccttggggaagtctttctctcaagtggggttcatgttctgtaattttcctgcctgttcttagtttgttctgagttattttggattttgttcttttgccaattataggcagtttggttttacctgaaaa

SEQ ID NO: 652635 - DNA, 179 bp, Homo sapiens
acgggaggtgcctggggttctaaggactgaattacccaagcttgtcacacaggggatgtgaaacaagtcatgtatcttttcttgtaaatccttagttttcacacctatacctcatattgttttttatgacagatggcatccagacaaaagtaggtacttagaacatatttatgcatgca

SEQ ID NO: 652636 - DNA, 251 bp, Homo sapiens
ccctaccctccactcagtcttgtgatgagaaagtctggtgtctcatagttgccggtggtggaggtgatgatctcatcgccatgcttgttgacagtgcgagtctgtgttgccgtcagcgtgcgattgttcctctggtctgcttctcgactctcagcagatcttgcgtgccgccgcgtgtgactggtgccgacgatctccagtacccagtgatgaatgtctcgacatttctcgattgtgtcaagggggatcct

SEQ ID NO: 652637 - DNA, 221 bp, Homo sapiens
ccgggcgcaggaggcgggcggccgggcccacgggcccgatggacgccccagcgggagcgctgagacccccgcgtcgctgccagccggtccggcgcgccacgccgagggatctctggacatggacaagactccgaagctactcccccagcacacagccgggacccacaaacccagcttgccaccccgccccgtttcctctctcacctcctacctcaccaccc

SEQ ID NO: 652638 - DNA, 143 bp, Homo sapiens
ttgtccattagaggtttagagaatccttataaagaaaaattgacttgcttgcctaaaatctacagtgcccccttagcctccattacttgagtatctcttacagtttgctctggctctcaaataatattacgatcgagaacaag

SEQ ID NO: 652639 - DNA, 146 bp, Homo sapiens
cgtaggtgccagatagatgctaattgtcattcagcttgattgaccacctacggacggaaaacaagacagtacaggacctcctccctctaggaaccacaacattttcctgaaaccacatctgtcgaatcatacatggggatcctcta

SEQ ID NO: 652640 - DNA, 192 bp, Homo sapiens
aacgggttcgagttcattcccacttatccagtgattatcttgccacatgatgattcctaggcctgtcaaaattagttcaaagttccagctcttcctctctgcaaacactcccagcctcaccatgaggtaacaccttgtgcagcgatctgtagcaaacatttccatccctacctttaagatttataggaacat

SEQ ID NO: 652641 - DNA, 420 bp, Homo sapiens
  misc_feature (48)..(48): n is a, c, g, or t
ttagtaaatatatacttatagttagtaaatatattttatatctatttngtaaatatactaaatgtcaggcctctgagccccaagctaagccatcatatcccctgtgacctgcatgtacatacgtccagatggcctgaagcaagtgaagaatcacaaaagaagtgaaaatggcctgttcctgccttaactgatgacattaccttgtgaaattccttctcctggctcatcctggctcaaaagctcccccactaagcaacttgtgacacccacctctgcccgccagagaacaaccccctttgactgtaaatttcctttaccaacccaaatcctgtaaaatggtcccaaccctatctcccttcactgactgtcttttcggactcagccagcctgcacccaggtgattaaaaagctttattgctc

SEQ ID NO: 652642 - DNA, 128 bp, Homo sapiens
atgattagagatccttttgggtgctttctgagagtccaagtcaacctgtggcccctgttggttgggctggcctgcctggcccagccttcaatgctgctgacgtcctcattttcctttttatggtcccc

SEQ ID NO: 652643 - DNA, 378 bp, Homo sapiens
agaaagaggaggttcaggccctagagctggtgcatataggctgacttcgtgaactgctccttgtactcaaagtagtagcatcttatctaggccatgtagcgcttgaagcaggggatgcccttccgtaggatgctccattgggcgccgatctccagtatgtcacgggccagaattagctgctgtttggtcagcttggtcactgtggttgacaataagttgagttccagacgtactagcttgagtcgactcagctcttctccgctcgtgctaagattggggctgtctccggctccatctcgcccttgttagcacagcccgttgctcttaacagcctcgagatagtttaccagatgcgttagctttcattcgtcatgttcc

SEQ ID NO: 652644 - DNA, 462 bp, Homo sapiens
cgcatagtataatactaggtactagaatctcatgatagtaaactagtagaggacttgtcttaaagagaatcattgtatatgtaaggagtagattaagtccaaatggaaaagaaatctggtgctgagagacattaacagcaataactgcagtttcttttcgacaccaatcttctgcaacatcatcctgttcaacattagttcaacataagtgcatatattcactccttgaaattatgcaaaacatacatgcaaaattgtcatgacagcaatttttcacatacagtcatgcatagcttaatgatggaaatacattctagagaaatcttgtgacagcaatcatcgtagcagtgcacacttataccaaaccatagcataatatagctagtctgtacacctaagggtatcatggtataagacctataggctcctacgattaaaagacctttcacagcatgtatgctt

SEQ ID NO: 652645 - DNA, 716 bp, Homo sapiens
cgaattcctcgccgcagcaaggagctggttaccattatccccaacttcagtctggacaagatctacctcatcggggtggtgacctgggtgccttttaaccctgtgtttacccgtggaagtgcccctgctggctggcgattaacctgcaacacaacagcacagacaatgctcgcctgctccctccagcagctggactggactgctagacaacacgcttggcagaacgatgagcggatcactcgaacgcacaatggacaccgaacactttatacccccacatggcccccagcacccttaacctaaccacttggaaacctttaccgaaagcctctcctgtgtctcaacatctcatgtgcctctcgaaaaacaacaacactccccagacagcgccaaggaccgcaagcaactcccgtgcaaccccctgtggtcaaacgggactactggttgagggacccacactccgctcattcacgcccacaaaaccttcccgagacagttggttcctcgggcttgggaaccagactcacaagggcagcaggaaacacaggcccagggtgaacgtgccccccaatttggccccaacacgccctacgggcaattacaccctcttggaaccccctatgtggactcggggcaaggcatctccaagccaccccaagcccgggcgcaccctatatacacttcaaacaaccaaaggccgcccttcccacaaccca

SEQ ID NO: 652646 - DNA, 132 bp, Homo sapiens
cacgaggacgatccggagtctctcggtaagcggtcggctgtcctgtcgttgtctgtttttggtcggggaatctggtaatattaccagtatggtcgggtcactaccctctacgccgtcgtcagcagaggagga

SEQ ID NO: 652647 - DNA, 124 bp, Homo sapiens
ttaagatccgtcagccctgcatctcctttcctccagcctgtttcacacactgaatgaacccatccttgtcctgtgggttgagcaggatcctgccccttccaaaggctggggccctcttccccag

SEQ ID NO: 652648 - DNA, 102 bp, Homo sapiens
gccagcaccaaccagacatctatgtacctctgtgccagcagttcccttcgggcggtcgagcctacgagcagtacttcgggccgggcaccaggctcacggtca

SEQ ID NO: 652649 - DNA, 139 bp, Homo sapiens
ggtgctgacagtgctaggtaaagggtgataggacagtgatcactgccgaggctctggaaacgggatcttgctgtcacacaatgcaggtaacagagagtgggacaacaaaaagtgatcaaggcgccaacacaacattctt

SEQ ID NO: 652650 - DNA, 944 bp, Homo sapiens
caggctgttacgctccggggttaacgggctgtacgctcagagcatcaggacatatgtgctcgggacgacggacatagtgctgatgagtagccagtggagctctggatgggagactagacgtcctgtgtgggcaggtgttccctgcctctgctgctcctgctcatcatgggaggcatggctcaggactccccgtcccagatcttagtccaccgcccaggaccagctgttccagaggacccttggccctggctaggattagctgcctgagactcagtgccagccagctcgccaccatccgcatggttgctgaatgggcagcccctgagcatggtgcccccagacccacaccacctcctgcctgatgggacccattctgcatagctacatgccccctgaccacggggacatgccacacatatgtgccagtgcctgtaccacagacctgggatgtctacacatgtgaaggccagacaaaacaggccttggcacggcagatcagacagatggcagcatcggctagtactgtagactagtcccatccagagtggagggacttttccaagaatctcagccatctggagaaccatggttgagctgctgaggatggggtgaggcagaatttactctggggaaatgtgcgggaccagcccattggagagccaaaccctataagccgctactaggtacatcaatggtggcacaatgcattggagaaaacccattgacaccatcccaaggacccagggaaaggggcacaaccagtaggaccagtgagggattatccgcattgcttggagtgagcaaaagctgaccagatgacatcaagttgaccagaatgggacccctccaatgttggtgatgggccatcacaaacaatgaaacaggggacaatagtggagcagccgaggtcacacgcatggataaccagtgcaaggatggccaca

SEQ ID NO: 652651 - DNA, 171 bp, Homo sapiens
tctttgatgactctgaggatcccaccataggtaggagtcgtgaccacgagctcggagtcgtgaccactagctcaggagtcttgacgataggacagcagtctttaccataggtcagcagtcgttaccataggtcagcagtcgttaccataggtcagcagtcgtgaccacaag

SEQ ID NO: 652652 - DNA, 261 bp, Homo sapiens
cccccctgggaattgaggaagaggtgatttgatttatctaagagaatacagatgttacattttccttgcaccgcacactttggaaactgtaagtactcaccagataatgactctgggcaaattgctgctaggtgttgatgagagtaccaaggcatgggagatctgtcctagacctagacaggtttgatacacttggagaagatggacttggtgcctgcctgtgtacaagtcccagatgagggttacggaaggcaagaacca

SEQ ID NO: 652653 - DNA, 871 bp, Homo sapiens
  misc_feature (2)..(2): n is a, c, g, or t
  misc_feature (13)..(13): n is a, c, g, or t
  misc_feature (20)..(20): n is a, c, g, or t
  misc_feature (72)..(72): n is a, c, g, or t
  misc_feature (101)..(101): n is a, c, g, or t
  misc_feature (132)..(132): n is a, c, g, or t
  misc_feature (152)..(152): n is a, c, g, or t
  misc_feature (164)..(164): n is a, c, g, or t
  misc_feature (177)..(177): n is a, c, g, or t
  misc_feature (210)..(211): n is a, c, g, or t
  misc_feature (296)..(296): n is a, c, g, or t
  misc_feature (311)..(311): n is a, c, g, or t
  misc_feature (365)..(365): n is a, c, g, or t
  misc_feature (374)..(374): n is a, c, g, or t
  misc_feature (395)..(396): n is a, c, g, or t
  misc_feature (400)..(400): n is a, c, g, or t
  misc_feature (527)..(527): n is a, c, g, or t
  misc_feature (540)..(540): n is a, c, g, or t
  misc_feature (613)..(613): n is a, c, g, or t
  misc_feature (646)..(646): n is a, c, g, or t
  misc_feature (663)..(663): n is a, c, g, or t
  misc_feature (689)..(689): n is a, c, g, or t
  misc_feature (861)..(861): n is a, c, g, or t
gnagagctcgagncccggcncagaacacagatagggaccatagaactccgcgacacagactatcagccaganccacacatgcggcgcctcctatccatggngccggaggtggctggaggccggcccaggagnttccccagggctcccaccgnccatggcggtgnggggggagcacgnatctgccctgtccgttcagccacgcggagctgnncaccccctggagggtcttgggggttctgggaggaagcagccccctactaggcggaaatgggaaggccaccatgcagaatctcaangaccgcctggcctcntacgctggagaaggttcgcgccctggaggagcgccaacatgaagctggaaagcngcatcctgnaatggcaccagcagagagatnntggnagtaagcaaagcattactgtccgcagtatgaggaaaacatcacacgacgctgcaggagcagatagtggatggtaagagtgagcaatgctcagattattcttctcattgacaatgccaggatggcagnggatgacttcaanctcaagtatgaaaatgaacactcctttaagaaagacttggaaatatgaagtcagagggcctccgcaagacctntagacaacctgaccattgtcacaacagacctanaacaggaggtggaaggnatgaggaaagagctcattctcatgangaagcaccatgagcaggaaatggagaagcatcatgtgccaagtgacttcaatgtcaatgtgaaggtggatacaggtcccagggaagatctgattaaggtcctggaggatatgagacaagaatatgagcttataataaagaagaagcatcgagacttggacacttggtataanaacagtctgc

SEQ ID NO: 652654 - DNA, 404 bp, Homo sapiens
agacagtatacgattctgagctcggtaccgtctcatctacttgaatcccaagtcttgaagaacttcagagcagtgctaccataacttttcaaattctccataagcaatcatgcatcattttcctagtgcccagatactattgagtatttgataactcgagtctcttgtaattgcctccaccaaacgcaatgccctctgaataggatattctgtgtttcggatctttctcaattgtgtgataaatggcaacaagcgcctgtcttattttgtcctagctctcgtggcagacagcacatcattcagagggcaaatctatcatcagaggattgtactcgttcacagtttcctaagcctgtcttagacctgtgtcagattctttcccgcaagtggcatggaagcgcttg

SEQ ID NO: 652655 - DNA, 100 bp, Homo sapiens
tgtgctcatgcgaagcatttctcatcatcatcatctctgctacagtcatgtttctgcagttcagcgagcgacgactgtccctgcctcaggttggagtgtt

SEQ ID NO: 652656 - DNA, 398 bp, Homo sapiens
tttgatctctggtggccattggacaagtctcaacgtaccgaggccatcccggaacagcccctcggtcttcgccgctgagcctctgcagcacctagccagataggaacgtggtcgtcgcctgccttgtccagggcttcttcccccaggagccactcagtgtgcacgcgtggcgcgaaagcgtacagggcgtgagcggggggaacatcgttcccacacatccaggatgcctccggggccctgtacaaccacgagcagcctgctgaccctgccggcgacacagtgccctagcctgccagttcgtgatatgcgacgttaagcactaaacgaatcccagccaagatgtgactgtgccctgcccagtttccctcaactcgaactatgccatctcgctcaaatcc

SEQ ID NO: 652657 - DNA, 313 bp, Homo sapiens
gtgtagttcacaccacctgtgtccgtgtgttctcattgttcaactcccacttattagtaagaactatgtggtgttaggttatactgttacctgtatatagatttagctgaggcatgatggcttccagcttcatccatatccctgcaaaggacatgatctcattccttttaatggctacatagtgtccataatgtatatataccacaattactttatccattctatcactgatgggaattagggttggttccatgtctttgctcttgtatacagtgtagcaataaacatatgtgtgtgtacggttgagcggaga

SEQ ID NO: 652658 - DNA, 150 bp, Homo sapiens
tagctgttcttgatgaaccttgtcatcagcaatagcatgtaaggatgtaggcatcgacgtgtatacaccattgcgttgcatgcctccctgtacaagttccgtcgacacagtgagcactgtgtgacctccaaatatcgtaagctggagcct

SEQ ID NO: 652659 - DNA, 581 bp, Homo sapiens
cggcagtacggatgtggcaggactataggtatggtggccagagggtcagcaggaaaacatgtgagcaaaggactctgtgtcataaataagtttaaggaaaggtgctgtgccttggatgtgcacataggccaggtttatgtttgactttacacagacatctcagtgcagtaaagagcagtatttgcgccagcaggtctcacttccagccataaggcagttttctcctatctcagtaaatagaatatatgatcaggttttacactgagacattccattcccagggacaagcaggagacagatgccttcctcttgtctcagctgcaaagaggccttcctctttcactaatcctcctcagcacggaccctttatgggtgtcgggctgggggatggaggtctttcctttcctacaaggccatatctcaggctatctcagtggcgggaaaacttagacaataaccaggctttcttgggcagaggtccctgtgggcttccacagtgcattgtgtcccctcggtacctcagaacggagaacggggtgactttaacaagcaaacggctggaacattttaacaaggcaatc

SEQ ID NO: 652660 - DNA, 241 bp, Homo sapiens
atcgggtaccaggagcacaggtgagtgagattttcagcaccatgtgcgccatcgccgccccgagtgtcgccccacgcatatcccgcagcaccctctgccgaggtcaggtaaattcgggccaattcgcctaaatcagggtccgacttcacaccgggaagcagcgacttgagacctagagatgtcaacggtgcatcaccgcacgcccctgggtagctgccgcggaatattacgccgatgcggg

SEQ ID NO: 652661 - DNA, 173 bp, Homo sapiens
cagccaagatcagatccttgagcagcacctcgaccttgatccattcttcgtcagtacagagtgggccacatgtggtgtggttctgtaatagtagtcttgtctaggcttcagagatcacttattgcccgcatcgttgtacacatgatagggcacgcagtaacgcgacctaatgc

SEQ ID NO: 652662 - DNA, 333 bp, Homo sapiens
  misc_feature (2)..(2): n is a, c, g, or t
  misc_feature (94)..(94): n is a, c, g, or t
anattcggcatgagatttgacactttatttgtaaaaggtgctttatgtttgtcatctagaaaatgctaatgtgcagtaggcattggcatcagangtggatgctgtggctaaacacaaggggagatttcccatgaaaaattgataaatgtgtatttcatgaaaatgattgccagcactatcttaagtgggtaatgctgcccttggtaagaagaatatagaataaataccagtttttatttcttttatgccacagtttgtatgttaaaaagttagggttaattaccctggattatatggattaatgctggaaattgacttagggcaacactaggt

SEQ ID NO: 652663 - DNA, 943 bp, Homo sapiens
acccagacgagtgcgaggcaggagtagagcaaagaaagaaaagcaatgtagaacgagagcgcaggggacacgtcttcctacgacagcacgggttacgcacccacaaaccttggggcgacttcgccttggcagccccaagatccggctgcacgggggaaaggtagccccccccggcctgggccacatcacagtgagatggtccccacacaagcctgcaagcccccagagcagtacccggcttagacggctacgcagcaacccggccgtgctatgcgtgggtaaaaagggagcgcgctgcctgtaataatccagcgagcttctgtccttactttctggcggtcctagagccacccgtagcaccggttcggcgccgcccctcactggggcttaccgtgtgtccccgacccgggcggacacaacaaaagtgtctcccaaggaagagagcggccgcagcttgggtgacccaacgcgcaaaaattcggggcattcttgttgagcccaggatagtgaggggaaccccacacaggtttcacaaaaaaaggcgcggcatgtaatccccgggcgctcaccaccgttgcaaatcttataagcgacaagttaaagggtcccccacgcggggggaccccaaaagcaaacacccgtcgtggatatgataaatgtggcgaaaaaaattagactagaaggaccctggggccccgtacaatttcactctcccccaatcttgcgaccgcagagaggccttctctgggggagaagaaacattcaccagtgcttctccgctctcttgtcacgcgaagaaattccgctagaagctcgagaacactaagtgggatcctataagacccgcctgaataatgaggatagctagtctcaagatagaatcctacctcaatcataaaacctattttaaaatctaaaaaaatactgtcttggaaacaagaca

SEQ ID NO: 652664 - DNA, 853 bp, Homo sapiens
tgtcccctgttcggcggcttggcaggttggacatccccggattgttgttcattagagaaacactcacctgtccttgcttgctgtataagtactccccatacatgcagaaccttgatttgctctgtagaggaagcagaagcaccataacgcttttaatacagttccacgttcgagctcgttcaccgccggacccctcaaatctcttagtatccatgccatagaaagaggggtttttatcacccagtcctctgctcactatctggtgctgatctcactgcataatgactttctatttgtttggtattcgaagctttccgaagctttggaagagcccataccttgggctaggcccaggcactcttatgtctcgctgtttctggcagaccgctgtggcatcaggaaccagcagaggttgttttctcttaaaacaatgtctccacagaataccaaagcaacgaatctgattgccaaggccagatatctcaggaaagatgagggcagtaataagcaagtttattctgttcctcattttttttttagctggagcagctaaggagagatcacagatgaattctcaaactggaagatcatgccttggcacctgtgaggaaacactattcaacgtcccaagacaaaccttttgaattcagaggagttgggataacttaaggcagatttacaacgaaaaccccggaaagcccgttccgaaccgtggttcctttcacagatggctggtggccaagccctataaatgtggtaaatctctgcggctggttgcgcccaaattatggttgtacgttcgcttccgggcacattggtttccgggttcacatcggcttcacgttgtgttgca

SEQ ID NO: 652665 - DNA, 173 bp, Homo sapiens
  misc_feature (145)..(145): n is a, c, g, or t
acagcagagagatttagactggacctccatcaggaagaactcttcaacatatgatactaactgaaaatcctggggcggtgaacattgattctgcctcaagaattctgaaatcctggttccaagacgcgctcaccataccgccaantaaagtgcaacaggcgtaataagaacac

SEQ ID NO: 652666 - DNA, 444 bp, Homo sapiens
  misc_feature (125)..(125): n is a, c, g, or t
  misc_feature (440)..(440): n is a, c, g, or t
tgatctccttctgcaaaggtggcagaccgagagctctacaagcctgcagcccctaagtgcagacacagcaggggtccagaagacgtggtctagaccagtggctgctctttccactggcccggtgntctttccccagtgggcatgactggtcgccacacgcctcgtgtgtactttgtgtgcagagcagcacaggctacaaatgcagagatcgacagacagccaggtagtgggaactttctgttccctatggagaggcttccctacacagggccggctattgcagaatgaagccatttagagggtgaaggagaaatagccatgtaatttctctgagtttaagtgggtctttccatctatcactgcattatctggctcattcttcagttctctactccctcttgtcagggtagacacaggtcaccattatgcgggggtatgtnaatc

SEQ ID NO: 652667 - DNA, 435 bp, Homo sapiens
taacgtttacgatcatcaggtatataatgtcgagaccataacctaagagttatcttgaccccttctcctctcacactcttgctcgtcccattaatcaaattgtttcaatgccacttcctaaactgttcttaaattcatcatttttttctgctgacacttcccaattttgtgctagtatcatttctcgcctgaattacagcaagagcctaaatcaggggttggaaaactacagtctgcaagtccaatgtggctcatcactatttttcttaatcaaattttattagaacacagctatacccatttgttcacagatgggctatacctatttttgagctgtaatgacagaatagtgatgagagagaccattcagtctgcaaagctgaaaatacttactatctgggtcctttaaagacaaaatatgccagactcaatgat

SEQ ID NO: 652668 - DNA, 105 bp, Homo sapiens
atacagggaaattcttttacagatttttgctctaagggagaatattgacatagctttatgctttaccaagatcaagtgcatatgagggggcagttttgttttcct

SEQ ID NO: 652669 - DNA, 103 bp, Homo sapiens
cagcctgccaaggagcccgtgttaggagcgggtcggggagaaatcaggctctcggaaggcctcattaaacacttcaacggtgagggaaagcaatgttacaatg

SEQ ID NO: 652670 - DNA, 798 bp, Homo sapiens
gccctccctagcatcccaggtgccctggacccaggacccaacatggtctagggatgcaggatccccgccctggggtctggtcctcgcccatcctgcagggatgcccaccgtcttccagacaccccacctgaggggggcaccaggtttagtgctgctgctttcactgctgcacccgcgccctcggccggccccccaagcagccttgtactctgcttggcgggaggggtgggagaaccttcagaggcactatccacacctctcccactgtggtgccggtggttgtatgctatatgctactaataaaaaaaaacgcttgtttttccagacaaaaaaaaaaaaaacaaaaaaaaccccggggtttttttcttgtttttggggggaaaaccctttttttagattccccacttacaacggggtgggggacagtggggaaaaaccgagaactattggcggtaataaaccccccgcaaaaatgataccctcggggaggcggcacatctgcggtcatgggggacacagccgcggcacggggagcaaaactagcatgtgctcaacaaaagcgggcgggctttcttgtgtgtgacccaccccacagcaccgaggtgcgcgattatctccccaagggacccacagacgaatacacagtgttgaggcccccccctgttgggttaaacaacacggcacaaagaccccctgtggtgtggataaaccacgggttttctcggcagggacacctgtgacacaccgtggacatggccgcgcaccatggtcgccacgggaaccgggggtggaacaaca

SEQ ID NO: 652671 - DNA, 287 bp, Homo sapiens
actctagatatcgactgtcgtcccaccccagttcttccaccccactttcttccttcaccaacatgtcgagttctttccttccctgtcagccagatagatagacagatgggaaaggcgggcgcggcctccgtggtcagtagtgctctgatgtgaaaggggcggcacagtcatttaaacttgatccaacctctttgcatcttacaaagtgaaacagctcaaagaagtgtaataagaaggcgatgcttgtggaaagtacagggcatattgggtgcgccctgggggatccc

SEQ ID NO: 652672 - DNA, 212 bp, Homo sapiens
  misc_feature (1)..(1): n is a, c, g, or t
  misc_feature (107)..(107): n is a, c, g, or t
  misc_feature (120)..(120): n is a, c, g, or t
  misc_feature (122)..(122): n is a, c, g, or t
naacgcctcgttcctcccgtccgagagcgaccttatggctacagtaaccccaagatcctgaaactgagcctacagatgactctttctggcctgccttcgttaactgngtatgtacatatntntattttttaatttgatgaaagctgattactgcaataaacagcttcatgcctttgaagttatttcttgtttgtttggttgggtatcctgcc

SEQ ID NO: 652673 - DNA, 412 bp, Homo sapiens
  misc_feature (132)..(132): n is a, c, g, or t
  misc_feature (144)..(144): n is a, c, g, or t
  misc_feature (148)..(148): n is a, c, g, or t
  misc_feature (150)..(150): n is a, c, g, or t
  misc_feature (156)..(156): n is a, c, g, or t
  misc_feature (164)..(164): n is a, c, g, or t
  misc_feature (199)..(199): n is a, c, g, or t
  misc_feature (208)..(208): n is a, c, g, or t
  misc_feature (323)..(323): n is a, c, g, or t
  misc_feature (396)..(396): n is a, c, g, or t
  misc_feature (401)..(401): n is a, c, g, or t
ttgagggaccttgtagccagaatgagatgcttatactaaggaaagtctagcacagagagtctggcagataggtcctgggaacgcctttactctagtaccttccttgggtgaggagacacgcatgcctttatntgtactactgtnattncnagaaantggggctnacttatgaagaaatggattcattaacatggaagtngccccaggntgaacttttggtcagctgttcagagcacaatgtttctctagttaagtgccatttatttgaggagaataaaaggaacttgtctggacccagacaaggaactgatctggaagaatangataaatcccagatgaggtaccctagcttacattccccagatgtggaaagtataagggcctcggctctgcccnaagantactctgtctc

SEQ ID NO: 652674 - DNA, 1638 bp, Homo sapiens
gcgttggatgcgcgggatagtgtgagacggaggtagcgtgtagggcggagtggggtgagcgcgtagatgatgcgaggatgaggatgagcgggttggtgggaggcgtgagggtgtcgggtgtggcgttgtgtggtgcgaggtggcggagcggtggaggtgaggatgcgcggtgtgagggaggtggctagtgtgtggcgaggtggaggcgttggtgtggggggagcggtcgggcgtggacgtggtgagggcgggtgcgtgatgaggcgtgtgtggcggagcgtgtgagtgtcgtgggtgtgtgagcgttgcggaggtgcgtgtgtgccgtggaggcgtgtggtggactagtagtggggtaggaggtgcctgggagtgtggagctggggtgagcagtgaggtgcggcaggtgagtgtttagagatcggtgagggctgagaggtcgtcggtgtggtgccgacgtctgcgtgctgcgtttcgtcgcgcgtctcgcttgtcgggctcgtcgtgtgcgtgctgggcgcctcgctcgtgcgcgcggcgcgtcgcgcggcgtggcgtgtggggcgtcgcgctcctcttggcgtctggtgccgcgcgtgccgtgtgccgcgccgcgcggcgcgccggctcgcgttagctggtgcgtctgtgtgtgccggctgcctctgtcgcgggtgccgctgcgcgcctctgcctgcgctgctgcgccgtgtcgtgctgctctccctccgcatcccgctctctgcaccagcccggcgcgccggccgcgcgccgcccgccgcggccgtcgcattcacatggctgcccccgccggccgcggcgagcgtcgccgcgccgctcgttctgtgcgctccccgcgcggtcgccgcggtctctgcggcggtctccgcgcgcgacctgcgcgccgctcttctctctccgctctcgcggtcctcgacccggcgccgcctcggccctcttccgcctccttgtatcgttgtgttttttttgatgtggtgttactgctatagtgttgttggattatgtctttgccactgtctctggttatagttgcagatgtgatattagttttagtatgttatagatagtgacttgtcgtaacattgttgtcttcttttcctctatttctttactttcatgatgcaatcgagtgggcgctgtgctgtataattccgtcatctcgccgtcgctcctcgtctcctccgcctccctcctttctttcttctcttctttccgcctcccgctcctccccccgctgtgcccacgcatccgcgtctcttcctccttctcccctctccactcccgtcttcccaccctcgctcggtggccacctgcgaggcgcccgcttcggtgtcatgtcccgtccttcgtttctctctgttttgtctctttgtgtgttgttttttcttgtttttttcttttttttgtttgtgattcctctcgttgtttttttttttttttttttttttcttttttttttttttttttttttttttttaaaatcacatagccacacaatgtggtaaattttttatatttttgttatatggggtttctttttatttgaatgggcacacaccacacgtgggggttatacttgtgagaaatggcccaatttttttttaaaaatttttggga

SEQ ID NO: 652675 - DNA, 522 bp, Homo sapiens
ctgtgttatgttatatacatactagtgtaaggaacatggctgtgctttggtcaaggataggccaaagtacgatgtttacatcttgcatgactcagcgagtctagagcacaggtgtataactccacttgtcatcacagccatgcagacataacatagagaagctcaccaccatagccataacatagggaaggccatcacttggctctaagccactattgtctataaaaggtataattccctgttgacactgtgcaggtgctggcgcccaaagagaaagccaaagctgtccgtctttgcagacagacagagaggaaccaggacacagctcaggccactcgtgcctagagagagagaaagagttaagctgctgaccctgaaggcagggaagagccggctgcacagctgtgtggggggctgccaggctaagcagccaagacaaggcagacagtgtagacagctagtgtgagaaagctgttaagagctggtgctgaataaaatcatattcacctgcaaaaaaaaaaa

SEQ ID NO: 652676 - DNA, 533 bp, Homo sapiens
  misc_feature (97)..(97): n is a, c, g, or t
ctcaaggatcccggactcttcggatgaactctcagagctcagagtcaagggtgcatggcatgcttgtcatgtggatcctgggaaagtccttgctttntgtggggtcacggaccagtggtgggagatgggaaagtgggttaagctaagtaagaaagaggcagcagaagacagtgaacagttcatacagagttggcttcagtgtattgcttgcagcttgttgccaaggctgtaaaagatcttcccatccttaggttcacaaatgccactaaaatagttgttaactctcaggcaggtgtgactgtgccccttgggacatttgcactgtctggagacattttttgctgtccccacttgggggggattggggtgcgtcctgctggcacctagctgggtggagcccaggggtgtcgtccacacctgccgtgcagtgttggcccccccatagagagtgagctgccctgagtcagcagagctggggctcttggctcacacctgctccagtgcatccaagcagttgccgcggtaccgagctc

SEQ ID NO: 652677 - DNA, 100 bp, Homo sapiens
gcggccgcctactactactactactgctcgaattcaagcttctaacgatgtacggggacatggtggggtggagagaaggggttattaaagaggttaaaaa

SEQ ID NO: 652678 - DNA, 771 bp, Homo sapiens
tgccatgtttgtcacaagagcaagtcagtctgctggacaggtacactggacggatgccaagaggctgtatggctcacgaggcctattgccactgactttcaggactcagctgcagttaagaagctcatcaagcgactacgtgaagaatggaactagcggggcaaaatcacagatctgatcaaggagcttgagtcgcatactaagtgatgtgtcctgggtgaattgcatcttctttaaatgccaagatgggagatgccctttgacccccaagatactcatcgagtacaaggttcgactatgagcagagaaaaaggtgaggtaataggtgcccatgatgcgtttcgcatgcacctgactataccttacttcctggggacgaggagctgtccgtgcgaccgtggtggatgctgaagtacagcaggtcggatgccagcgcgactcttcatcctcccggatctattatcgagatggcggcaagctggaagccatggctgcctctcctgaagcacccttggcaacgccggcggacagactctcttgcgtagcgtccagacgcgcactaggttagccctcacctgccagagtctcaccatctcccagggactactaacctgaacgacatacttctccaggctgccgccttgacggaacccttacaccagccaaggctgaccctgtccagggatcacagccggccaggaacctagcagtcctcccaggtggtccactaaggctgtgcttcgcacgtattagaggagggcacagagcata

SEQ ID NO: 652679 - DNA, 153 bp, Homo sapiens
gcggtcgttaaggtaggtacttggttttggattagggatttttttttcacttaccttctttaaaagaggatgttgcccatagccttcggttcttggcatggattagggatggcttattccaactcttcaacatgatttcccagtccctatctt

SEQ ID NO: 652680 - DNA, 305 bp, Homo sapiens
ctgaactgattatatttgtcttcctttacggctctttctctgtctcttttttattggagatggactcttccggtatcgcctaggggggagtgctcactgcaacctcttgcctcctacggttcggtgtgattctccgtgcctcaggctccttacaggcatgcgccaccacacccagctaattctggtatttttaagtagacatggggttttaccatgtgggccagggtggtggcaggcaccgggtaatcccagctcatcaggaggattacgtgaactcaggatgcttctggaggggtcacgagctc

SEQ ID NO: 652681 - DNA, 1504 bp, Homo sapiens
ggggctgccaacatgccatccagactgaggaagatcacggaaacttcggggctcacgtgagccgacgtgccacggatcagcataggcaagcatcgcggatagcgaccccggacggtgcgcggataggtgctggatggatctgcagtcacccaccggtatcaaactttcgaccagaataccacccagggcgtatcttcgtggacaagtatggctatgaatggcaattatccactgttacaagacggaagcctacgagcttctggcgcgcgaactgtcacatcgcttggatcaaactctgtaggaccttatggtactagtgaaccagacatcggcgtgaaatgcatgcttaacaactaatgactggggtctgcttcccgatcattgcatggtggctgcgaatcgggcctactagcaatagtctctggggaaacggggaaaagactcgccaaaggcagccatgtcaatcgttgaaggcccataattccttcaggctagaacgcagctagacggcgaagaattgaacgagctagttctgggcggggacctggtgtccctgtgatcggacttgcaaggccgaccatggcacgcggcagtccgtccagttttacagacctggcattagaccgttcaccttatttcacaagcagcacacacaatcaaacatccagcaacaaacaacacaaacttctctacgagaggcaactactactacattgtcacaggcgtacgcccggaaaaacaacggcgcacgcgtcagaaggaaccacgtgggcccgccatggggacacccacaaaagagcggtcaattcaccccgctgaccacaccccacgagaacaactacgcggggcaagccagccgcagaggggagcacacacagcacgacggcccggacaccccccacgcccaataatactcgccagcagcagcccacccgatcattacacacacctctagcgcagagaaatagcagaccgcagggcgacttacaaccacgtggccccagttagaacgaagacacaactatgaggacgacacacaacaacggaccgaaggccagctgcacaacagcacacggaccacccacggccacaccccacgagcgcagaacaaccccagcaccaccccacggcgagaacaccccccgacagcaaacactacggacgaccgcacaccaacacgaaaaaccaccgagccacgccagcccgccacagcccccccaccagtgacccacacacaacacacccgcaccccacaccccacccccacccaaacgacgcgaacgacaacccacccagccacaaacaaaggaaaccacagacacccgccaagcagcacccatcacagccaaggccacgagataacacaacagagggcagaagagcgggccggcgccagcgacacgcgaaggcaacacacaaggccctacaacaccacacaagaacacgaccagagcggcacagcaaccaccacaccgataagcagcgcgccaagacgagcacagca

SEQ ID NO: 652682 - DNA, 1245 bp, Homo sapiens
  misc_feature (536)..(536): n is a, c, g, or t
  misc_feature (564)..(564): n is a, c, g, or t
tgagtatcggctttcttctttcactattggacgtcttaacgattatcgagctcaacttccacattaatgaaagtggatcatctatttatttccaaatgaaaaagaaggccaaactctataccaggatctagtgacctgtgatcgtcagtattagttcaggtattaagtgcttggttcctgaggcgatacaccttcataacgagtgaacatatgtcaagcgtgtcttgaacgttgctaccgtgcaggcgcagcagcctacctcatgtacctactagattgcgacgtcgtgggttgtggcatatgtcgctaggctagtggatgtaggatagctagtcccacatcattctaacagactctttcttattattaatggatatagtgttgcctgagtctatatccgttcacacatgtacgcctgtcgcacatgtgtactgctttattatcatatggggagcttggccctgtcagtttcgtgatactgttgatgtgctaccaaagtacattccttgtcattagagacgtagggacccctccangtgttgtagtaggtcgtgtaaaccgagnagctgtacagcgaaagtgccactgtgagtagttgttcagatagagctcgatttgtacacgcggcactccgccgtgccaagggaaagggtgtgggcctgaccctacgcttatatgtaaagtatgctaatctactattgtctaggacttgttcggatctattcctccagtagtttaaaggaaagggtcgaagggtgcccatggttcgggtagcccctctcagaaagctttagcacgtaataccgattggcttcttccccgggtttgacgagcaaattgcacaatcaggaaggggcccctattgaggggatagctgcaaagtttagtaacgcaggttttaggtgccttttgtttagccaaattttttcccttggtttgatccttacaacggtattcattcgcctttccgtatcaagtgccaaaaaccggtagggggaacacatcccctatttttggcactcccattccttgccggcagactctgtgggagccaaagaatgtgggtggccctgggatttgagccacaaaagcactccttttcatccttctctctgtcagccccctgcgaacgggtcccttacgcaccgcgggtttggtgttccaaccccccggagggccgcttggggcagacttcgtccgcacgctgtcgacccggttgtggatcactccgcggggctatcacac

SEQ ID NO: 652683 - DNA, 146 bp, Homo sapiens
cccggatggattatgtcatggatgggatgatccacgtatgccaaccgtctgtgggtatgcgtcgtcgtgattggaaccacaccaatggcgtacgtgacttctgtaagcgtgttggtgtatcgaagtcagatggtattgttgatgtt

SEQ ID NO: 652684 - DNA, 682 bp, Homo sapiens
  misc_feature (38)..(38): n is a, c, g, or t
  misc_feature (114)..(114): n is a, c, g, or t
  misc_feature (130)..(130): n is a, c, g, or t
  misc_feature (133)..(133): n is a, c, g, or t
  misc_feature (288)..(288): n is a, c, g, or t
  misc_feature (340)..(340): n is a, c, g, or t
  misc_feature (381)..(381): n is a, c, g, or t
  misc_feature (386)..(386): n is a, c, g, or t
  misc_feature (411)..(411): n is a, c, g, or t
  misc_feature (416)..(416): n is a, c, g, or t
cgagttcagagcatggggtctcggttgtcccagccttntgagtcctatatcactgcgcctcccggtacgcgccggcccgcaaactgcgcccccagctacacccggagcgccganctccccagcagaacancgnctgttgaagacctgctggagctgtcgcgtgctttctgggttggggctgatgggggcgggcgggtacgtgtactgggtggcacggaagcccatgaagatgggataccccccgagtccatggaccattacgcagatggtcatcggcctcagcattgncacctgggtatcgttgtcatggcagacccaaagggaaggcctaccgcgtgtntgaaagtaccaccagtgaatctgtcttctgtctctgtcccntttcnccgtgacacacagagcaggcatggnatttnatgggtgttactggacagacacttgtacatggacagacatcactactgtggatactacaagactgactaatgaaaatcgtactgttgtcattctctgggctatggagtgtcatgtggccttcacagatttcacaggaagccaataaatccctcagagaagtaaaacaggttcttggtcttatctggggaaggaacgtatagcttatatttaaatatgattgcttaattgagcattatatataagcagtaatagtatgtcttatata

SEQ ID NO: 652685 - DNA, 213 bp, Homo sapiens
cttcgtacgagcgccaagccccaggaatgcgagtggttggtaaaatccgtgagctcggcaatatgttgtttttctggaacttacttatggtaaccttttatttatttctaatataatgggggaggcgtgttaggaggctcgttaaggaggcgctgttacggacgtgttaggaggcgctgttacggaggcgctcgttacggaaggctgttagga

SEQ ID NO: 652686 - DNA, 452 bp, Homo sapiens
aggggtctggatcagatagcatgatgacagtactgatgaccgtgacatccgaccgaactcacgactggagaagagtgacggggatgaatttgtgcaccgtggataatggtgagagagaccacagatgaacgaaaagaagtcaggtctgagtgtacggttaggagatatgcctggaatatcaaggaataaaaagaagaacatgaaggaacagagtcctcttcaagccgtgatgcttcgaatgggaagtcaagaaatccctgaggaagggacgggaagtgacaggaaatttttccagaggaacgattaattgacagatgatatctgatagactctttaaaccaaaaaagcaattcacaaaaagctgcatataagcaggaatccccattctgatggcacattcgacagcttcttcacgagcaacagggtccgccgcagtctgttcctccttctca

SEQ ID NO: 652687 - DNA, 143 bp, Homo sapiens
tacgacaggcttagacttacaaaaagagtactttctggttgtgtggctaaaggagtctgtgacatttcctgagttggctaacagacatcatgtggcaggagctttagcgaagatcaactgagcaactggacctaatttcaatt

SEQ ID NO: 652688 - DNA, 304 bp, Homo sapiens
cggccctctctgtgcacggcgggctctgctccgggggccaggaggtccaggcattctagctgctggcctgtgggtctagaattccccatagaggccaccttttctaatggctcccgacagtgggtggcacagaggaaaagcagtagctgctcaatgaaaccagtgagttcatcttggtgagaagaggcaggtcctagaagtgccttgaggcttgcctcagtcctgggctgggcaggagtctggcggagcctctgaggtgacgagaccacctgggtgggtgaatgtccagagaggggcggagcag

SEQ ID NO: 652689 - DNA, 704 bp, Homo sapiens
ggcaacgcgaccggggcggcctatctcagcaccatccgcctgcggcgctgcaaggtgctctgtgagaagtgcaagagcactggctgagccccccggaggccagcccggaccccagccggcccagggcccgcaggaggctgggcagcggccggacaggggagctccgcaagccggaggagccggataacgggagcccacggctgggggccaccgccaggaggacggcaagagggagaggccgcgaggagggacaagggcccgggagagcaaggtaccgggagagcccggtcaatcaagatctcctacagcacgccccaggtcaccgggacgaaggggtggtcaagatccccgtcccgccgtgcacgagtctctggagcccttccgtaccccagcagggcccccgcaggacgaaggcggcaggaacccgaggtgctggacagagagtccgggaaccgggcggtctgcgccgccctcggcctcaatcacccaagttgaaacttgacacgcgcctagtcccggccggcgacgcagctgcgacccctaagatccgcctgaaagcgctaccggtctgggggacagccaaacacgagactgtgttacgcgcacgatactggtgtcggcacctaacgagatcctagcggaagatcgcggagccatgtgcagacggacatcggtgggtgacgactgaatcttgagtcgggtag

SEQ ID NO: 652690 - DNA, 132 bp, Homo sapiens
  misc_feature (1)..(1): n is a, c, g, or t
ntcggacatgctcacccctccttagactaaaaactaaaatctacgctgggatgtggctcatggctgtaatctccgcactttggaagattggccaaggcaggtggatcacttgaggtcaggagttcgaaacat

SEQ ID NO: 652691 - DNA, 161 bp, Homo sapiens
ttttgccccccccgcccccccgggggggggctgcccctaccaaggttggggttccgccaaaaaccaaacccagcccccccctctttccctccccgggttggaaaaccctgggtttgtttgcccttaggttttccccagggggtttaaagcctttgggagga

SEQ ID NO: 652692 - DNA, 232 bp, Homo sapiens
cccccaaaaaaaaagggtggggttccccaaaccccaacttgttgttttacattatttggaaaagttccataaaaaagggggccagtaataagggaacaatccaaggattgaatgctttcaatatgttcatgtaaaaaggcccctatttttagccataattttgcctgtggaaaaaccaatagccaaaaaagtcattttgtcccgcatatttttttgaaatgttgtctaagca

SEQ ID NO: 652693 - DNA, 642 bp, Homo sapiens
gccgtaagcatcatctactatgctccgagtgatagtagtatcaaaccgcatctctgcattcacaaggttctgggagtacctttgaaacctgtattcagatcacgtctaactcagtttcaaaagctgcaccaaatctactaagctaaaagatgaatactcatcactgcatgctctgtctatatgcatgcgtttgaataataaatataaaatatgggggacgcacagaaccataaaattaaaaatgaaaccaaactgaacattaaacaatagtacatggtagctggagaaatgaataagggccaacactaaatttgaggtaacaatagtggcccaaaaacactgatctgaaatatctgtaacaattcaactaagtgtttggagattccagtaacaaaccatctgctccaacttgttcagacttcccagagtccctgctgagtatcagtccatgagccggcaatcacatagctccttgtaaatcctcttccgcactcgggccagtcttcttgtgaacctggaaaagatgctctaaggcgagcacttgcagactggcgccaaagtaattatagatttatgctatacccatcaactaacattggatcttccagaatagaaaacactttaaatctatgagccaaatac

SEQ ID NO: 652694 - DNA, 124 bp, Homo sapiens
cgaatcccatcaggacatttgttgctgtggactcagttccgtcacggccaccagcccttcctgccgcccccggcgagcgggccggcggtctgcggctggtaacattgtccacgttcttgcgcat

SEQ ID NO: 652695 - DNA, 375 bp, Homo sapiens
  misc_feature (357)..(357): n is a, c, g, or t
agaaagtcgacatgttctagcaggctgccgggcgtcccggtgttgcctatagcctgtgaccgtgactggagacagagcgctgtcggccttgtcgaccttgtcagcgcctcgtgtgaggacatagaggctgtcgcgaacgtagtgctcctagcgatgatcctagcgagagcgcgatgacgacgactgttgcttgctacgtgcgccagagtcgggccccacatggacacatagtacgtacgcctgaagcctgggatggacgacgagccgccatctcaggtgctcggaggcgcaggacacgccaaggtcggaccacactcacgcctatcttctgttagctactgttgcaggccatactgnggtgatagtgtggctcct

SEQ ID NO: 652696 - DNA, 181 bp, Homo sapiens
tccctaaaaaaaaagtttccccctttaacccaaaacccccccataggggggggaattttgggatgggggggggtttttatataaatatataaaacccaatgtttttttttccggatgtggtttaggaactgggaaaaacgttttttttttcccccgatgggcccctgaaaaggttttgtta

SEQ ID NO: 652697 - DNA, 713 bp, Homo sapiens
aaattgtacatggacttaataaagggggtctccctatgttgcccagtcgagtctcaaataaggggcatcaagctcgatcccactcagccatccaaccgttctgaggtcacacacatgagccacagtgcatgccagagtcccgtctttactgttgatgaatgagccaggggtagtaggtttgagacctacccttacatagacaccatgacatcgctgtcaagatcgcacagtcagtgtaggattctattggagaattctggatccttggacctgttaaagtactggagaacatccagtaccaagattggcaagagcattccagcgtcgtgccaactcacaattggtgatggtcagctggtgtcaatgtgcggacacaattcaaggcactcatctggaataagcgcggtgatagatcaataatgtccgtcacaggtgccagaaaagggggtgtggagtctcggtcctccttgtcacaatacagtttgtccattggtcacattgatagcctcaggtttgtaacatgtcatatagtctcacctggcatgccagtccagaggctctcacatagatctctcccgctgtggtccccatcttcccccccatgttacctgtttcaccctttgtaggtccgagtactcactggagctgggcgtgcagggttgggtctcgaaagtggtcatctaagaagtcgatctcatactgggggagttggt

SEQ ID NO: 652698 - DNA, 428 bp, Homo sapiens
aggaatattgtcagggccaagtaatggaagaataagggcggcctttaccctgggcaagtattgagaagagggcataaaaacagggaactactttcatggagacagttttttttttataatcaagtaactagaaggggaaaaatcatttaagttatgaaatcccacataggcgctatattacaaactgggccggattatgcaaattgtaggtggtactgatcaaagtttaattgcttcctttttgtttaaaaagggatactgatgtcaaaaaatctgtaatatgttttattccaaagatgttaataatgtataccgacttgtatgtgatgggatgggaaatatttaaattttagggggttttttttttttaaagaagaaactcaatgtttataagaaaaaaatgaattaataggtacggttggccctga

SEQ ID NO: 652699 - DNA, 183 bp, Homo sapiens
tcctcggtacctcttctctctcttgcctctatgcctgtatttcttggcaatatacatggcctgcctacccaagatcagaactccaaaaccactcccaccccgtaatggtctgggagtggtcttgagcatgccctgtgtggcttgcctgtgctcagtgtccccacgctctcatgtgatcttatt

SEQ ID NO: 652700 - DNA, 248 bp, Homo sapiens
ggtccctggtctcaggctcccggaccacccagtggtattgtctagctgataccagcctcgtgtccgaggggcagcttctagctctagcctctagacttagggcacgccacatattgagagcactatctactcggacgtaatgaagttctaggatcgccgacactatatatgcaccagccaggtcctacattagatactatgggctataggggtacactagtaagtagcatacgaacacctatactggt

SEQ ID NO: 652701 - DNA, 277 bp, Homo sapiens
tctcgtactatgtcggatagtctatcgcttggcatccaatcagtaggacacataatgttcaggagaaccgctaaaatcgaacggaaggcgtgaacgtttgggatatgctgttgagtcaccgcgttgggccattgaaccccctcgcggtctcgaaaccagactgtgatgactgggacagccttgtggatgcaatggagtgtgcattacatttggaaaaaaaatgtgaatcagtcactactggaactgcacaaactggacacgaggacacgaatgttca

SEQ ID NO: 652702 - DNA, 248 bp, Homo sapiens
ctgcgagttagcgggtcgtattgagagtgagaggagagacgcgctggtgtttttcttcttgatggtcaatgacagagactagctcgttaactccggggcgttcctgggctggtcgctcctgctttggcagtgtagctgagaaaggtttctgcctcctgtgttcagcgggtgacggctcttggggtttactcgggggtggctttttaattttagtcttgtgcgcgaggcgggggggatgcttgtgtggc

SEQ ID NO: 652703 - DNA, 365 bp, Homo sapiens
  misc_feature (59)..(59): n is a, c, g, or t
  misc_feature (227)..(227): n is a, c, g, or t
tgctatgcatgaggcagcaacagccagtaaaaacgctaaacttaaagtgggacagtttntccatagggataagtgttatgtaacagaaaacagtccaggcgctgtggctcacacctgtaatcccagcactttgggaggccgaggcgggtggatcacgagatcaggagattgagaccatcctggctaacatggtgaaaccccatctctactaaaaatacaaaaattangcatgcgtggtggcacgcccctgtagtcccagctgcttgggaggctgaggcagaattgcttgaacctgggaggcggaggttgcagtgagctgagatcgcgccacagcactccaacctgacaacagagcgagattcgtt

SEQ ID NO: 652704 - DNA, 419 bp, Homo sapiens
gtattggaaaaggcaacatcgattggttaaaggcattattcagaaagaattaactgggaaaggatgtgcagacagaaacagaagttctcactccaagttgcaggtttcatccggaccagtaatctggtctttcagccttcaggctgttttttggcttgaaggtggggttcacaaggggacccgcccctatctgcctaggccatttgactaccccctgtcgctatcaaacccactgtgttccacttgttttcacagctgcccaagttgtaaggcaatattggttttcaaaactacagtagagctggagaaagggagatggcaatacataaagttaaaactctaaaattcactggtcttcctgagattcaggcatttttctgaataaacattcctcagattatggcaaatttttagttaat

SEQ ID NO: 652705 - DNA, 175 bp, Homo sapiens
tgcgaacgccgtactctactctcggcaaggtggaggcctcgagccgagtgtcgttgccgggcgcctcccctctgaccctcgcgtgcacccgccccgaagaagccgagtccacggcctgagacagcgacccccgacggtgagcacccgtttccggagccaatggacacgcaggagg

SEQ ID NO: 652706 - DNA, 413 bp, Homo sapiens
  misc_feature (23)..(23): n is a, c, g, or t
  misc_feature (34)..(34): n is a, c, g, or t
  misc_feature (53)..(53): n is a, c, g, or t
  misc_feature (92)..(92): n is a, c, g, or t
  misc_feature (155)..(155): n is a, c, g, or t
aaattttttttgtaatttttagntagaagacaangtttcccccatattggccnatgccccgttttccaaacccctggccctaaagtgattcnccccacccacggcctccccaaagtgctgggaggactgcttaaggcaaggagtctgagacccancccgggcaatacagcaagatccccatctctattttaaagaaaagtttcactttgggaggccaaggcgggtagatcacaaggtcaagagatcgagaccatcccggccaacatagtaaaaccccatctctaccaaaaatacaaaaaattagccgggcgcggcggtgggcgcctgcagtcccagccactcgggaggctgaggcagaagaatggcgtgaacccgggaggcagagcctgcagtgagccgagatcgcgccaccg

SEQ ID NO: 652707 - DNA, 597 bp, Homo sapiens
  misc_feature (33)..(33): n is a, c, g, or t
  misc_feature (327)..(327): n is a, c, g, or t
tttctttcctaagccttcctagaacaagtccancttcacatcagcatgtgtttaagaatatattatctggggaaatttcagggtatttcctgctttgtccataattcagtgatattgtacctgtttttctgggctgaaggaaaccaatgactaaaatacttttaaactactgctgcctataccttctttaaagaggtcttattttctcattgctggtagtgagagcttttaaaaggtcgaaatccatattattattccaaaatatgtttagttaaaaactaaatgcctagtagtagaaaaatggtcatataagtaggccgggcatgngtgttgcgcctgtaatcccagcactttgggaggccgaggcaggcggatcacggggtcgggagattgagaccatcctggctgacatggtgaaaccccgtctctactgaaagtataaaaaattggccgggcatggtggcgggcgcctgtggtcccagctgctcgggaggctgaggcaggagaatggcgtgggcccaggaggcggaccttgcagtgagccaagatcatgccactgcactccagcctgggcgacagagcaagactctgtctcaa

SEQ ID NO: 652708 - DNA, 340 bp, Homo sapiens
  misc_feature (64)..(64): n is a, c, g, or t
  misc_feature (70)..(70): n is a, c, g, or t
  misc_feature (228)..(228): n is a, c, g, or t
agatctttcctttgcattcacaacttcgctaactggtgcaagtagcctaacttttagccttttncatctnttgacataccttccttactaagcttaatcatttctagcttttgatttaaagtgagcatcgtgtgactcttccttttactggaaaacttagaggccattgtagggttattaatttggcctaatttcaatactgttgtgtctcaaaaactagggaggctnaaagggagggagagagatgtgggcaaacttaatcaataagatgggcgaacttgatcaatcagtgaccaggaattggttggtcattgggagcagtttagatcacactcaggca

SEQ ID NO: 652709 - DNA, 259 bp, Homo sapiens
agattggcagtgggagaagaatttcagatcatagggttgcttctcagggcatttttaatagtattcaatatatactaaaacattttatcttgagtttgtgattaagatgattaacattgtttcttattttaagggaaaataattttaacaaaatgctgctttgtgaattttaaatatttaacatatttaacttctcatttaaagaccagaaaagattgttattttgattaaataaaaattggctttagtaattcaaaaa

SEQ ID NO: 652710 - DNA, 177 bp, Homo sapiens
gccacaaggcattcgaggcgataagggagagcccggtaaaaaggggcccacgcggtcttcctgtgcttgaacgggacacaactggattgcaaggtctagcctggtatcgctggtcacgcatggtgatcacaggtgctccttggctccagtgggtccttgctggtcctcaggagccct

SEQ ID NO: 652711 - DNA, 114 bp, Homo sapiens
tgaagatcggtctgcttacttccggcggcgactgccccggcctgaacgctgtcatccgcggcgctgtcctcaacggcgtcaagaagtacggctacgagttcgtcggcttccgcg

SEQ ID NO: 652712 - DNA, 249 bp, Homo sapiens
gatctgtgcacaacggaggatgcggtggcgcagtcatggctcactgcaacctcgacctcctgggatcaaaaaatcttcctacttaagcctcttaagtagctcgggaccacaggtgcacaccaccacacctgtgctaatcttttttttttttttgggaaaaaacggggtctcacttattgtggcccacacgtggtcctccaacctccggggtttcaagcatttcctcctgtgctgcagccttcccaaatt

SEQ ID NO: 652713 - DNA, 1215 bp, Homo sapiens
ttttagatgtcgccctctcttctaatatgtggtaagattttttccaagagggaacttttggggcacaaagatgagtttataaaacagtgtgtttccaaattgtggccacaagtgtaaaatacgtttgtgagcgtttaatttttggggcccataataactcagggcctctttctcccaccaatgtgttcacagaacaccctcagagcacggggaatcaccaaagaagattttttgtcacacatgcgtcaatatcactgagtgtttcccctttgtgaggtgttttgtggcccgctgtgttccaccaggggggccccccagacagggtaaagggcgccctttttgactcctcctctctgaggaacacactttctcctttgttgcccctgggggggcacacacaactgggtgacacattgtcttttttttcgctagttggtgtctcgtctcttttctctctgggaatagatcttttataccagatttcctctttgtgtgtgctctctctcccccccccttgttgttgtggtcccacatatgttttttgtttctcccccccccttaaagatttataatgttcgtcgttcgtttgaggagatttttcctcaactctgttgatagttttatataaaaagaataataaataatgttcccccccctcgtgagaaaggttccacaagagagcattggggggccccgggtgttgtccgcgggggaggaaacaccacgcccgctgggctgccacagtgtttacacccccgagtctctcctctcgacacacaccccgcgcgtatagtctcccctctgtgcgctcgctttctctttatatacgcgcccccaatgtttgtttctcccttgagagagccacagagagttgtgggagagaggccccccgtgcaacacccccacagcccacaagcttctgtgcgcctcacacaagagccgaggggaacacaaaacgccacattctccaccccctccttagagggatcacacacacacacaagggctgtggtttttcctctgggggagagagagagaatggtgtttgtttaagaatatcacgggtaaaggcacgtacacgggcgggggttcacacacacactgcctttttttccttctgaggggtgagagagacacacctgtaaccccgcccctcgcccctgggtgccctttcctggaaatggctttaaaaaatccttttccctttttggggta

SEQ ID NO: 652714 - DNA, 97 bp, Homo sapiens
tcaggattacatgaatacttgacaccgggaggagagtattgagtaacgcgagattgaccactgcactccagctgtgtgacagagcgagactgtctgc

SEQ ID NO: 652715 - DNA, 97 bp, Homo sapiens
tttcaaaactttttaaaaggaaaatttaaatgattttttaaaagtttagtgatatgtatccatggaactaaaaataaatttttttcagtccccgcca

SEQ ID NO: 652716 - DNA, 389 bp, Homo sapiens
gatacccgagcatgcctgcaccagcttcccaagtagctgggactacaggcgctttctaccacgcccagctaatttttagacaggggggcaccatgttggtcaggatggtcttcgccctcctgacctcatgatccacctgcctcagcctcccaaaacgctgggattacaggtgggagccaccgcgcccagcctaaaaaaagcaacttttatatgtagtccaaagatacatacgctaagtgtcctcaatccttctctgctcaatctctatgtgacttgatgcagggtaaagtggataaaataataagccacttcacaattttgaaactttacagtaatatccaatatctaaaatttatttgaaagattctgggcctggtgcaggcatacct

SEQ ID NO: 652717 - DNA, 165 bp, Homo sapiens
ggatgtgcgctctgaccatgttttccccaccatgattgacctgaaaaaaccaagctatcctgtgcttggcttgtggcgcgcgtctttatcgcgttgacatgggttggtgggtctactattgccttgttgaaattcagagcccttttgggagcggcacatgcgttg

SEQ ID NO: 652718 - DNA, 144 bp, Homo sapiens
ttgcatatgcaaggccaaggagttgggtaggcagcatggtgcaggatatctagtgtggtggtgcccgagtgaagataaccacgtgacgaaataaaaaaagctacctatggagttgtgccccctacttggccttgccatatgcaa

SEQ ID NO: 652719 - DNA, 365 bp, Homo sapiens
  misc_feature (61)..(61): n is a, c, g, or t
  misc_feature (95)..(95): n is a, c, g, or t
  misc_feature (126)..(126): n is a, c, g, or t
  misc_feature (141)..(141): n is a, c, g, or t
  misc_feature (182)..(182): n is a, c, g, or t
  misc_feature (267)..(267): n is a, c, g, or t
  misc_feature (269)..(269): n is a, c, g, or t
  misc_feature (282)..(282): n is a, c, g, or t
gatccttcccagagctagggctgccttaaaggaaattgtagcctaagtaggtcatggcaanggctgagcctgtcctcacagctcccaggttaggnactgtgaataggctcagctcctctagagagntgaagccatctggtncttagattcctctcccagtcctctttcccattgttctgttntccaccttattgtctcaaggccgtaatctcatcaggttgggacattaatcttttcaactctttgtaagatttcccggtttggttntnttacatgtccttnagttccccacttctccttttcgctgtgtagagaatctctgcagtttaggcaataaaaataaattgtctcactaaaaaaaaaaa

SEQ ID NO: 652720 - DNA, 461 bp, Homo sapiens
ccctaaaggaacctgtacccatccacattttttcctaacctccccagctctaggcaactatcaatttactttctgcctgtacagattttcctattctgggcattttgtataaatgaaatcatacagtacatggttatttgtgactggcttcttctatttagcataacgtttcagggtttcttcatgcctagcatgtttcattatttcattcattttatcgccaaataacattccattgtatgaatataccacactttacttattcattcgtcagttgacgggcatttgggttatttccattttttggctgttattagtaatgcttctgtaaacattcaagttttcagtggatatatgttctcatttctgtagattatatacctaggagtggaatttctggatcatatgttaactctatgttcaaccttttgaaaaacaaccagactgttttccaaagtgga

SEQ ID NO: 652721 - DNA, 945 bp, Homo sapiens
  misc_feature (41)..(41): n is a, c, g, or t
  misc_feature (166)..(166): n is a, c, g, or t
  misc_feature (170)..(170): n is a, c, g, or t
  misc_feature (183)..(183): n is a, c, g, or t
  misc_feature (222)..(222): n is a, c, g, or t
  misc_feature (225)..(225): n is a, c, g, or t
  misc_feature (243)..(243): n is a, c, g, or t
  misc_feature (277)..(277): n is a, c, g, or t
  misc_feature (290)..(291): n is a, c, g, or t
  misc_feature (298)..(298): n is a, c, g, or t
  misc_feature (303)..(304): n is a, c, g, or t
  misc_feature (306)..(306): n is a, c, g, or t
  misc_feature (309)..(309): n is a, c, g, or t
  misc_feature (330)..(330): n is a, c, g, or t
  misc_feature (338)..(338): n is a, c, g, or t
  misc_feature (343)..(343): n is a, c, g, or t
  misc_feature (394)..(394): n is a, c, g, or t
  misc_feature (414)..(414): n is a, c, g, or t
  misc_feature (438)..(438): n is a, c, g, or t
  misc_feature (453)..(453): n is a, c, g, or t
  misc_feature (487)..(487): n is a, c, g, or t
  misc_feature (494)..(494): n is a, c, g, or t
  misc_feature (508)..(508): n is a, c, g, or t
  misc_feature (659)..(659): n is a, c, g, or t
  misc_feature (663)..(663): n is a, c, g, or t
  misc_feature (764)..(765): n is a, c, g, or t
  misc_feature (785)..(785): n is a, c, g, or t
  misc_feature (787)..(787): n is a, c, g, or t
  misc_feature (789)..(789): n is a, c, g, or t
  misc_feature (816)..(816): n is a, c, g, or t
  misc_feature (831)..(831): n is a, c, g, or t
  misc_feature (929)..(929): n is a, c, g, or t
aggggggttcccacgtaagcactggtttccataaccctgtncaccacttccatagcctctgcttcctccagagtaaccagggccgcctcctccataaccacctacaagaatacaattcttctcaataagacaaaagtatttgacaatgaaaactttttcaattttnacgnctgaaggcctgcncacagcatgcgttttatttggcaatattttattttttanatntcacctataattttattntctactaacctattctaaagatccaggtttccangaatttttctctnnttattcntaaannanttnccatcattaccaaatccattntatccatncccantgccaccatatccaccaccaccacggctgctaccaaatccaccttttatanaaattttcaatttttaattnttatttggacttaaatttacattnttaattcatttcccntactttaaaatcttcatatcaaatatttttatanttctatnactacatgtagttnaaccatacataccacgaccactgaagtttcctccacgaccgaagtttttattctctcaccgaaaccacctccacgaccaccaccaaagtttccagaaccacttcgaccttaagacatgaagtttaagcattaaatcattcatactggagtnactnaaagttacctttaaggtttaattaagcaacaagcatacctctttggctggatgaagcactagccatctcttgctttgacagggcttttctaacttcacagnngtggccattcacagtatggnantnctgaatgacaatcttatccacggagtnatggtcgtcaaaggntacaaaggcaaagcccctctttcttgccactccctcggtcagtcatgatttcaatcacttcaatttttccatactgttcaaataatctcttatgtgangtccttcagtcttttt

SEQ ID NO: 652722 - DNA, 153 bp, Homo sapiens
atggaattcagtttctcgcatcattattgaagaactaccaaattaatgctttacttttcatttgctacctcttttttttattatgccttggattggttcacttaattgacattttaattaagtttatgtatacagtctgattgaaaggcaaag

SEQ ID NO: 652723 - DNA, 131 bp, Homo sapiens
gcagtggcaccagtcttgtatttgcccagtgcagagccccacaacctaggtcagcgaatgaagagtatcttcagatctcccccgaagcgatgatgacaccatgaagccccaaccatttggacttatcgacg

SEQ ID NO: 652724 - DNA, 272 bp, Homo sapiens
tttatcgcatctacttattgtctataccacatcagatgacagtcagcacggtggctcacgcatatatcacagcactttgggaggccgaggcgggcgggtcacctgagtgtgggagttcgagagcagcctgaccaacatggagacaccccatctgtactaaaaatacaaaaattggccagatgtggtgtcgggcgcctgtcatcccatctactagggaggtggaggttgcagtgagccaacttggcgacagagtgagactccaatctcaaaaa

SEQ ID NO: 652725 - DNA, 435 bp, Homo sapiens
atccctcagctggaacaagaatgaaatgtctccgtaactgggctcctaaaacatttcatgtagcatgaggctctatacgtgatatagtaggctatatttacacaagtcctggtaaaattctgacaccaagaacacgagaataagagttgttctccatcaagctgtatacccttttctgggcagttgtcaagcagccacttgtcagcttcttgtatattctgggcaatcagcagtttaggtttgaaaatctatggtttatctgcaacatcacaaacaccagaaagttgtttatttggtcatcagcagttcaagattcaacatttagtatttgaaaacaaaaaataaaaattatgtgtgattagctttactagctaagtcacaggagaactttaacataactgaaagctacaacgggaagggacttattacccctcc

SEQ ID NO: 652726 - DNA, 935 bp, Homo sapiens
cagtgagtcgagcggaaggttgacgcaatgtcccagtggatgacttcgggcgcggcgggcggaatgaaacagaatgaggaaaagaaaattctgtgaaaaaaaaagcaagacagcactgcaaaaccacagtgcagtgccagccgaagaactagacaggcgccgtcacacaaggtagaaaaccgcaagcaaagccatcaaacctacagagcatggccacacagaagaaacgctacacgttcacacaaccatcggaaaccgaacgaaacgcaccaactcaactcagccatcgtgcaggaggaacctaaagcattgacacctggcccagcacctcaagtggaaactcaacacacatccatacaaaccacctcgtacaacattggacccgccggacacaccaataccactcacagacacagcaccctaccactggacatgagaccgacacgcaacaccagaggcaccgagtgcatgacccatgcccaaccaaaacccacccaaagcacgaacaccaaaagagccccacagggcccatcaagacctatcaatacaccacaaacaccgcacggcacaccaccatccacagcactcacacacaaacgccaaacaacagtacccacctccgaagcggacaacgaacacgacaccacttctgcccgcactccccacgaacggcaaacacaaaacccaagtatagggaaccacagagcagaaacagcacaccccacaaaactacacataacaggaaacaactacacgcacaaccaccaagaaaagaagccacggaaacaacaccacccaaacgacaccacacaccaacaccagacacaaacgcacacaaagcaaacacacccacaacaaagaacacacaacagaaacgagcacaacacaacaccaacacacacccccaccaacaacaacacacaacacaacaaaac

SEQ ID NO: 652727 - DNA, 229 bp, Homo sapiens
ctcggcaccttatacccacgatcacctgatgatttgggaggcagaggcaggaggattgcttgaggccaggagtttgagaccagccagtctaacatagggagactcttatctacaaaaaaaaattatttttaattagtctggagtggtggtgtgtaccttatactcctagactactcccaagagctggacaagcagtaccagcttgagcccaggtagtttgagagctgca

SEQ ID NO: 652728 - DNA, 463 bp, Homo sapiens
aggacagtcttaaacagcagctctgcattgctctgccgacaggctgcagaggggcagcacccaggtctcagccacggcaggagtggaggagcacagttcaaaggtcacagaattgcagtcctggagctgggtccctgccaactcccggagagtgagcgaggggccaactgggctgtgaatgcactgtctctggcagtggatgatttcctcgttcttctacgatagagactctaatgcctctcaggcccctgatggtctacaggccggggtgacgtaaatcccaagtgaggggtaagaaaaattattcctgcttttctccaggttataactggtgataatgtaggcttgtctgctttaatctttcttttctcaaagtctaagtagaacacctgcttaacaacttcctgcccacccatcactcagacaaaaatgccagcgtccaagaacaatgtagagccacctc

SEQ ID NO: 652729 - DNA, 217 bp, Homo sapiens
gacagaatctgtacaccgagtgtgtcaaagcagatttgcctggtcatagctaggagacgctctcccagtctaccgcaaggagagagtcatgaacattccgtaccagacacatgcaggccagctccccagatacatctgcgctgtgcgtgacaagatcggtgcagcgacgctgcgtggctacccccatgccacccatgacctggattctgctgacctg

SEQ ID NO: 652730 - DNA, 1379 bp, Homo sapiens
gaacacaggtgtcgtgaaaaactagcccataataattgtccaaaatgggatacggaaagagattacatatcatataacttgatcgatctagttaggtaactaactgatgaagtatttacggagagactaacgatcctaccaatctatcctggacacatcatgatctaataaatgggggtggggtcgacaaatagataccgattgaaaaatcgaggaaggaggctggtgagatgggaatagggctcgcattcaaagttgatgcacatgggtttatggaattaaaattgaatatgctagatgactgtagaagcgtggtatctatcatagatatctcattaggggagatttgatgaccagataagtactatgtgaactaatcaatttgaatgtcactcacggaataacatgaagaaacttatagtgcatgataagaatgagttaacatgggaagatacttcaagtgactgaactgttgcatgtacactgactcgtttgactggtcggtcgattggggagaagaatttggaaagcttgggtatcctccaaagagcttggtggcagtacccagaggagtccatagaccttattctgtgcatgtacaacactggtgtttggtgaagattaaaagaaaataatcggtcgggagggttaaacaaataatgggtagtatccaatcttggatgaccaaaccagctaacacggtccaggagagtaagaactcttggagggaaacactttgtttaacgggcaggcttcacgttaacctttgacaattcactcagacccacctggcgtcttactaaggcaccggaactaaggagtgacgttatgtttgatgcccaagcctcacaggggtacggacatcggctgaacagccaattgccttggaagccccacagtggttaaaccatgcctagggggtacaaaggggcatctgggcacaaattggcgccggtaaaagaaacacggggccatgcaccactgtggatagccaccgcaaggatatgaaaggttcttgagaaacggggttctcaaacacaccagaggcagtctccacttgacaagacccttttggccgcggatcataccaagggagtcttaaaccaatggcgggaaaataataagagggtaccaatgaggacaaaaagtgaaaaagtgtttcacaaacccggcgtgtggtggaacccctgtttgaatgcaagacgacaacagggagaaatggtgcagcaccaaagatggtagaacaccactagcagaaaaggtctcaacacgaatgcatacaaagcgcgtgcacggggtaccacacacagccgagagcaggagtgataaatacgacacagagcccacgacggcaaaagaagcgtcgagaacaagtagag

SEQ ID NO: 652731 - DNA, 556 bp, Homo sapiens
  misc_feature (85)..(85): n is a, c, g, or t
  misc_feature (128)..(128): n is a, c, g, or t
  misc_feature (159)..(159): n is a, c, g, or t
  misc_feature (299)..(299): n is a, c, g, or t
ctggcatagatggtttgccagttaggatgtctcaatttgagccttggcttttggtggataactcagctcccctcttgtaacctgnaaagttggttgcctttatcatcctgctggttttatccatggantgaacacccaacagcagtgcactatgctttntatggcatctttcattctcattttatattgtgctataaaaaggattgtttctccatatatatattatatatgtgtgtatatatataatataatatatgtgtatatatatattatatatataatatataatatatatattntatatatattatatatataatatatatataaaatatatatatatatgctctcctctttcagcctctttgtcacagggaagaagtgtaggaggttgccttgggccctgcctctctcctaacctccttttccccactgggtaccctcagcccctatattttaatttttgatcatgtagaaattgtttttggtaaatgttgatattattgttattatcattattaataaataaagagaaaaggaaattttgtttaaatga

SEQ ID NO: 652732 - DNA, 244 bp, Homo sapiens
tgatacggaccccttccccactgtgagggtgggagcagcggaacacgggaatggcagacacaggctcgctgctcgatggaaggctggggtgggacttccattcctctgtccggagaggcacaggtgtcaccatgttccagccaaaggctccctcacaggcgctgtgaatttttggtacaaggtcttgtaattattcgaatcaacaacttgtttcaattttaattaaaaattgctcacttgtggg

SEQ ID NO: 652733 - DNA, 381 bp, Homo sapiens
  misc_feature (57)..(57): n is a, c, g, or t
  misc_feature (86)..(87): n is a, c, g, or t
  misc_feature (286)..(286): n is a, c, g, or t
  misc_feature (314)..(314): n is a, c, g, or t
  misc_feature (324)..(324): n is a, c, g, or t
  misc_feature (340)..(340): n is a, c, g, or t
  misc_feature (365)..(365): n is a, c, g, or t
tagagacagagtctcaccctgttggccaggctggagtgcagtaagtggcacaatctnggctcactgcaacctccgcctccttggtnncagcaattcttctgcctcagcctcccgagtagctgggactacaagcggctgccaccacacctggctatttttttttgtatttttagtagagacagggtttcgccatattggccaggctggtcttgaactcctgacctcgtgatccacccgcctcaccctcccaaaatgctgggattacagggcgtaacaacttgcaccnaggcggggtcttgcttattttaaaaggnaatattctgnttcatattttagggantttttgttcaacgaaattggttttngatcccctttgggtac

SEQ ID NO: 652734 - DNA, 244 bp, Homo sapiens
ggaagtggcaacaaaaaggccaaaactgccccctttttgttttttcaatggacccttcacaagtgtttttcctgcccttggggctgttttccttttcctgaaatccaaaaacttttttggtcatcccttttccctttcacttttgttttttgctgcaaaaaacaaacttgcaaatccctgattaacaggtcgggtacttttgtaaacttcagatttggagagaaacccgaaagtctgaatcctg

SEQ ID NO: 652735 - DNA, 488 bp, Homo sapiens
catcccatatacccatagcgggcctaagccaagacaacaagaagcggcaccgcgggccacatccaatgtcttcgcaatgttatgaccagtcccagatccaggagtataagtgagtgctttcaacatgacttgaccagaacctgtgatggcttcattgacaagtgaggacctgcacgacatgctggcctcgctggggaagaaccccacagacgaatacctggagggcatgatgatcgaggccccggggcccatcaacttcaccatgtccctcaccatgtctgtgggagaagctgaacggcacggaccccgaggatgtgcttcgcaacgccttcgcctgcttacgacgaggaagcctcaggttacatccatgaggaccacctccgtggagctgctcaccaccatgggtgaccgcttcacagatgcggaagtggacgagatgtaccgggaggcaccccttgatacgcaaggcaacttcaactccgtggggg

SEQ ID NO: 652736 - DNA, 785 bp, Homo sapiens
atacacagcggggtaacgttgcaggcacggggcccacccctgtggtcaggcagagcccggccatgtgctcggaagtgctcgaagcgacccgtagggtgcgccaggtcctttctttcgatccttcggggttccccccctcctggagcacctcgtggggcattacctattggggttgtcttccccagtgcccagaatgcagggtgccaggaccacccagaagtgcagcagggtgccattcagccaccctgggggcaatggtttcttcccacggcaacgttgccaccggtggctgctcagcccccagatggcggttctctcgaaggctcaagagcggggcccgttgggcaaagtggggcccccgcgctctgatacaggtcaccggtggcacccacggaagggtagaacttgaagttcgtcctctccgaagccctcaggcaacaacatgtcccacgcagggagacggctctccccgggaggggcccccgcaaacggcgggcgccagggagtaacatgaagagctaacgcttctatgctataccatctgattcgtttgtatatcacaggtgaacctcaccacgaacgctacgggggttatctctattttttggcatatcacagcgtgcatctatgcccaaaaaagctcagcggttacaagggtgatgtcacgccactgtggtgtgaccactctcagggagtacacacgatggtgagctcccctcgctcaggggggataaaacccccctcccacccagggccaagcccccttaaaacaacccacaagaaca

SEQ ID NO: 652737 - DNA, 364 bp, Homo sapiens
ttcagaggctgagcttggctgcccatttgcgccactcaccttctaccttgtatctccacattcggcaatcctcgaacactactgaatgttttgctctggtggtcacttttacatcccaacaactctctcttggtcttcatgttttcttttttcatggcacccagctttcatctgacaaatgcaatatcccctcagcctcccacaaaatgttaattggagtttccctaagtaggatgcttatcaaaaagatcagcctctgttctctgacttgtctgtgtactttgcagtagtctgaattctctgccacagttctttacccctcgtcacactaccgtaagccagctgcagcatgggtttcagtgtg

SEQ ID NO: 652738 - DNA, 423 bp, Homo sapiens
gcgctgtgggaattttgcacgagcgcacctctcccgattgtggagaccacaggttgatgtgatgtgcactgtttttcatgacaatgaagagacatttttgagtacttatatgaaattggcacgaagacattcttacttttatgccccggaacttcttttctttggttaaagggataaagctgcgttttacacgaatgtgtggcaagctgttgataaagctgtctggctgttggcaaagcttgatgaacttctggatgaaaggaaagctttgtctggcaaacagagacttaagtgtgccactctccaatttcccaaagctgagtttgcagaagtttccaaggtagtgaaagatcttatcgtgcacaccgaatgctggcatggagatatgcttgaatgtgctgatgcaggcggaccttgtgccag

SEQ ID NO: 652739 - DNA, 297 bp, Homo sapiens
ttgctataatgaactgactgaatgatccagctccaatttcatttatagcctgaattctgatccggtaagtggttgctggaaggagaactctcataacatgcatggtggtgtcgcccacggtaatgctagtgtctcctagatcaatggtgtacgcaacggatccagatccggtattgcccggctcttcccagttcagtacaaggcacgcagaaggggaatcaggggtaggcatcaagggggctcctcctccaggacacagagagtggagacggggtcagggggcagaacgctggcgtc

SEQ ID NO: 652740 - DNA, 140 bp, Homo sapiens
gaggtaggaatcacttgagcccaggaagtcgaagcttcgagcgagcagtgtgcatgccatggcactccagcctgggacatagagcaagaccctatctcaaacacaagaaagcacaaagactctcctttgcattcacaact

SEQ ID NO: 652741 - DNA, 382 bp, Homo sapiens
tagtgatccccgtcttccgcatctgccgctcaccaagaccctgctggataatactgtatcacgtgcccttcccgaatttgatgggaacaggttccagaatgttgccaggtaaggagttaagttcgatgaacgtgagaaaactaaggaaagtcgtgactcggagacccctgacgtgagcctctgctgaattggatgaaagataaagcccttaaggacaagattgaataggctgtggtgtctcagcgcctgacagaatctccgtgtgctttggtggccagccagtacggatggtctggcaacatggagagaatcatgaaagcacaagcgtaccaaacgggcaaggacatctctacaaattactatgcgaggcagaagcaggaag

SEQ ID NO: 652742 - DNA, 512 bp, Homo sapiens
gacgaataagtaacatgtaaaaaaagtaattggctgggcacggtggctcacgcctgtaatcccagcacttagggagggcgaggtgggtggatcatctgaggtcagagagttgagaccagcctggccaacatggcaaaaccccatctttactgaaagtacaaaaaaaatagctaggtgtggtagtgcacgcacataatcccagcttctagggaggctgaggcagaagaatggcttgaacacaggacggaggttgcagtgagccgagatcatgcccctacactccagcctgggtgacagagcgagactctatctcaaaaaaaaaaaaagaaaaaagaggaagcagaaagggagcaacacagaagacgagggtatcattaagtcaatgaaaaacaggtatggatacagagctgctccttaaacagattgtcaaatacatgattggacatataatagttccttacatcttgggggaatctcaacctttattctattggacctatgggcctatgtat

SEQ ID NO: 652743 - DNA, 206 bp, Homo sapiens
ctgatagctgattctagagtatcccctatctgtcgtatcaccttcaatgaagaagggcatgctggctggaggaagtgttatgggactaccactatgactcagcacctttgttttttttttgttttggttatttgttttgacgatggagtctgattctgttagcccaggctggtaatgcaggtggcgcgagtcatcggctcactgca

SEQ ID NO: 652744 - DNA, 179 bp, Homo sapiens
cgttataaggatctttattatttattacattgaactcatccagataatctaggataattttcttatctcaaaatcttaaccttaatcacatctgcaaggtccctttgccatgtatggtaacatatgcacatattgcagggataaggacatgggcatatttgggggactagttttctgcc

SEQ ID NO: 652745 - DNA, 785 bp, Homo sapiens
  misc_feature (480)..(480): n is a, c, g, or t
ccaacggggtgtgtgagagacatctcttctagccaacgcggtttgtataaaacccttctactgttggtcgtatattaaaaatgggtgcggctcacgcgcgcggcttgttgttcaaaaagagacaaaatattttgccagaggagtcgcctcatcttttcccttctctctagaagacaaagcgcagtgtttacaatacgcccgctcacgcgtgaccgggcgtattatacagcacccccgcgctcgcatgatgtctcccactcatcacgcgcgcgcgcgagagcaaaacgtccgctctcactcgagggagagccctcctatgtgtcatacgccgcgtatgatatacacatccatactttctctagacccccgccacacttggtgagatacgcagccctacattctctcgcggcgagcctgagcgtatcgtagagctagtgagactcgccacttctctcggaggtatatcgtatatatagacanattttgtgtgaacgctgtagcgtaaaaaaccctgtacatacgacacacacagtgtttcgccgcgagatagcgggccgccagacgtgaagacgattagcagggacacggagatcgagcgagcagttctcgaagagagagcgagcaacaaaacgcgcttacaggcagagcaaaaagaagacaaaggtgtcagaaccgccgcagagtgacgggcgccccccacgtaaaataactacccacacgcattgaggacccacccacgcaaaagagcccagagaatgggcccacaaccggcccaaacaaaaaac

SEQ ID NO: 652746 - DNA, 951 bp, Homo sapiens
agaacaaaaaaaaaaaaaaaaaacctttaatttggtaggactccgatgatttggggacttcgggaaaattcaacccagcccagagttaccaaccaccattccatcttttcaacttggaacgagcaattagttaaaggtccaagtaggtggggacccctttctctgggaagaaagtcctattgggtgtctccagacgggtgtaaacaaaccaagccaagccggccaaccttggttaaaccttataagcttttaaaaatccaattatattctggcaagaaatatggcttggatagttagccctaagcccaataggtgttttggtttttaccagatttatatcctgtctggggggtgagaaaaaacccttggttttccaaagggtccatacggggtcacttggtttcattggcaccactttatgggtttgtcagtttaagaacccatttttggtgtggttcccttgtgaaagcttggggaaagagttaaacttggaataggtgggagaaatacgctgggtggaattttaagcggttttggcgttggtttcagcaccattggagccaaatttcattttgaaaactatatacttatttatcactctttgtgaaacgtttttccagtggaaacttcggccatagtggttttcttcaggtttgtgaaacgcaataggatatatattcttattatggtaacttactggtggatataacgccggcaagtgtggggtggtgtgtcttccccaggaataatgcgtttgggactcgtgggtttcatggatcggtcacaatttaattaagagtgtgagttataccaaatctcctgtccgaattagaacgtgtctgcaaacactgctgggactgaacccaaggtaagaaggtgcgcactacaaacaccgcggggcgtgtcaacaggttctcggcgtagaaaggggggccttatagtagtatcgcg

SEQ ID NO: 652747 - DNA, 162 bp, Homo sapiens
aagtcgggatgaggggtgactatttagacgggcgccctgagatgcttcgatcgcctaggtatgaaacgcggctcgataacttggcggcaggcggaaaagtactgcgctaccaacatggtacggtgcgcgtatcacacagtgaactggggcaaatgtccgaga

SEQ ID NO: 652748 - DNA, 436 bp, Homo sapiens
atgccagataggctttcctcggctcaaaaccctccaaggggttcccccatctcattcacaaggacctgactggggggggtctggcaaagccctccaggtcatcctcaccaccagtaccacggcatcctctactacttttcccctcactcatccacaccaggtacatatatagtagcccgaaccagcagggccttggaccgggcggctccctcaccgggcacactctccccctagataaccacaggacggagtccctggcttcctttggctcatttatcacctggaagaatctgaacttcctcctaataggccccttatctccttaaaaatacctggagatatctttgcagagcactcatcacggaataacatacgatatataagggagggtttttctggatgggcggacatcccatctcccccggaagggagccca

SEQ ID NO: 652749 - DNA, 406 bp, Homo sapiens
gggaaaacccaattgcttttcccctccaaatgtcccctccgggagcaaagtttggcccgggggaatcagcaaacatttatgcccggtcagctatgggcccatccgagcccccccaggggggggatgtttttaacgttatgcgggcccccgggttccttcaaggggtcctaaaaaccccccccggggtgggtccccccaattaagcccttttaaatggtttggggtccctggcccccccggccccccaggggggcaaaaagggccaaaaggggggagcccaaaagttggactgggggggaaggggagttgggtttgttttgggggcggcatgggggggccgggaaatagggtttaatgtgtgttttttgttcccctttcccccttaataaaggttggccccttttta

SEQ ID NO: 652750 - DNA, 295 bp, Homo sapiens
cccaaaaacccggggctttcgcctttggcccatgtcaaaaaaacagaactttgccccctgccccccttctggggaccaagaatgagccccttcttgtagtttgtttcccttgtttaaagggggggcctgcccccggggcttttccccaaggttttggctttgggggtttcccccctccccttccaggggcgccggtgtttcgaggtttaacggggcagctttgtgcagggttttggccccccgtggggtacataggggccaatttagaataattaactggggccttttcctggga

SEQ ID NO: 652751 - DNA, 315 bp, Homo sapiens
gcggccgcctactactactactgctcgaattcaagcttctaacgatgtacggggacatgatcttggctcactgcagcctccacctcctgggttcaagcggttctcgtgcctcagtctcccaagtagctgggattacaggaactgactcagcgcaagaagacagcttcgactccttgtgatttcatccctaaccaatcagcactcctggctcactggcttcccccaacccaccaaattgtccttaaaaactctgctctccaaacgctgggggagactgatttgagtaataataaaaccctggtctcctgcaaaaaa

SEQ ID NO: 652752 - DNA, 319 bp, Homo sapiens
acttgagttgttgagcaataatgctgatgcaaggctggcatggtgcttgagcctgtaatccagcactttgggatactgaggcgggaggattacttgaggccagaagttcaaggctgcagtgagctatgatcccaccactgcactccagcctgggtgacagaataataccctttgtccagaaaaaatacaaaaattagctgtgtgtggtggtgcatgcctgtattcctagctactagggaggctgaggcaggaggatcacttgagcccaggaattggttgctatgagccgtgatcatgccactgaactccagcctgggtg

SEQ ID NO: 652753 - DNA, 191 bp, Homo sapiens
  misc_feature (2)..(2): n is a, c, g, or t
antagcgaattacaggtgccgctatcacaccaagccaatccttatatttttagtagagacggggttttaccatgctggccaggctggtcgtgaactcctgacctcaggtgatccacccgccttggcctcccaaagtgctgggactataggagtgagccaccgcgcacggccttttaatttttttatttttt

SEQ ID NO: 652754 - DNA, 481 bp, Homo sapiens
  misc_feature (114)..(114): n is a, c, g, or t
gttattttaaaagaccccttttacccacgctggaagtgtttggttaaccaggactttttgggccggcaaaaaagattccccccccccccccttttttttcaattaaggggaaantgttaagggagggtgaaccaaagagccaccttgcccctttcccccccctttaaaaaaaactgtttaacggggggtttccgaagccccctggttttccccctttaaattaaaaggggccccccccttttttttaaaccaaggcatttgaaagttttgccccctggaccctttttttttttttggggcccattgtttaaaaacccgggatttattttttggaacccttggggaattgcccctgggttcccccccccccccctgggggtcccccccttcccacccaaaggggggttttttaaaacccccccttttaaaataaattttttggaatcccatgggtaaaaaaaagcccctttggggattttta

SEQ ID NO: 652755 - DNA, 161 bp, Homo sapiens
  misc_feature (48)..(48): n is a, c, g, or t
  misc_feature (139)..(139): n is a, c, g, or t
cctccagcagccacttcagagcccccgcctttgcctgcactcctcctntggggcttgccctgcctgctctgcggcagcctctggtgacgtgctgtccaccaggccttggagacaggctagcctggccacagaattaaanctgttgccaacactgccggctt

SEQ ID NO: 652756 - DNA, 848 bp, Homo sapiens
cggctccaagcagggcaatccggcattatgcattaccagacgggcggccgcggcggagccaggccggtcctcagcggcccagcaccgacgatcccggcaacccggaaggcgcgcaccggaggccggcggccgaggctcgcgcatcccagcgcatcagtcttccagcctgctccctctagagaacgggaacgcactgaagtgagatccgacgctcgaagatccagcctagcccttggcctcgcaaggcagggaagaaggacaggctagctgaggcaagcggggccggtggctatggccgtcggccgataggcagccgtccggtgatgtcccgggaacgacgcgcatgagtaggggagtcacgagagggtaggccgcaggcgacaatgtggccagacaccgtaagagagccgtcgaggggccgactcaaagggtaaggcaatgaacataggcgttgcatgcgcaagcaccgcggaaagagccgaccagcaacatccaggaaaggacaatgccaaggtggctggacgcgcaaaaatagctgtgagacaggggaggaagaggagggcatcctcggacaggagatcctcggcaggaggagacaagtgacccattgtcagtgccgacctgctccttcacgtggcggaggcagcttccgtcatgtgactgtacagcttgtgctcccggtccccaagggggaacgctggccgcaatgaccccgaagaaatacattggaacaatttcctactcccaaatggccaaaggcgtaaggaaaacaaaaaggataatccggaaacatcacgccggacctcggtggcctctgggccagagatggaagtacttccaaagacaac

SEQ ID NO: 652757 - DNA, 130 bp, Homo sapiens
  misc_feature (99)..(99): n is a, c, g, or t
tacaccctactggaatgagcaaagcagctatcaatctgtcaatcctgtctgtgtctgggcctgggtgggagctggtggagcaatctatgtgtggtgatnctcttagtcagtcgcacctgctagtgctatg

SEQ ID NO: 652758 - DNA, 235 bp, Homo sapiens
gctactgaggaggagctgattggcagccagttatggcttcgtacagcctgtcccgctggtggcacaggtgtgctgaatgtaccagttacggtgacgaagggaatgcatggcccagcttgttgtgatctcagcagcgttcatagcattaggcagatcctgtttgtttgcaaagacaaggagtacagcatcccggagctcgctctccgccagcattctcatcagctcctcccagtct

SEQ ID NO: 652759 - DNA, 1461 bp, Homo sapiens
  misc_feature (1164)..(1164): n is a, c, g, or t
gatcgggtagcaaaaatgctacctctctatagtaactctatctacgaatcttgccgttaagttgataacgagttcaacagtcgatacgaactagatctatagtcttgattactcgtgtcgttcggagaatccactcgttattacccaccttgtggctagtcatcaagaccgatgagggtagacagggctagacatcgcctgatgagcaaggcacgatactcccggattctaagagcccttaggtaggcttcccttgttgctccttacttcgatacgacatgtgagattttacacatgcactaatgaaatccgtgaggtcgtgcatctcaattgcgattgcatatgtaagctctagcgccctacagtggcccgaaggacatgttatcagatacctgcctgtatgaccaatcaaagctttaactgatggaacttaggcatttagcagccaaagtaggacctcttatcagtgaggataagaaggactactgctcattttgacgggaagcgtcccagtgtataagtgagcgtacccgctagagaagccacagtgttccggacagggcccgccccaatccgggcttgggggggtccaagagtaaggttaggcatttgatcccgaaaaggcaaagcttgcttattgaaaaaccaatagggacgggacctcactcggggatagttaatagttagcagacccgtacagacacccttccatgtgcatcgaaatccctcgcgtgtaaggaaacataacaaagatagggaccgtaaatccctcgtggtacaccttgtgtttaacctaagtaatcgctaagttgggagggcccaattaaagtcaccacttaaggcaagaggcgtgcccaatcactggaaccctaacgttaccacaaccaaaaggaaacccgtaaagaaattcggggtccattttaggtcgtttaactacctattctcacagtccatgacccttaaaattaagggcccccgtaccggttagaggtaaaagcgactgcccaagtttcttccccaattcccgaagaaagggcgcccaccttgggaaagaggttcttttctatcgcccaggggggctggcccatgtgccaatttctggtccatcacagttctgggcacccacgagggacacggtgttaaaccaatttccgcatcgagttntaacctcaaaatgtcacgtagggccgtgtaagttccaacaaggttacgaaagatctataaagagcccgcattggaaagtcagggggtggcacctatgtgtggacagcacagggtatatggctcctagaaatcacaaaccttcaaagtatgtggaaaaggttcgagccctatagggccaattaaaatgtcgtagttacatcagaagcgatattacataaagttatacagtggggctcctttttgagaccatctctcaagaactcgttattcaccggactcatagaaaacagcattttg

SEQ ID NO: 652760 - DNA, 361 bp, Homo sapiens
gttagctggctcagttctcaacaataaagtaatcagtacatatccccatatcccttttcagcttaaatctatttggtagtagaaaaagaaatgggaacatgaatatatatacatatttggcatcttaaaatagaatttgcaaaactagattagagaagaggatataatgtcaacaaaatgacggagaatggtgtatacgtaaaagcattggatcctgggaacaggaaaatcagagaatgggatgaatagaacaagattaccaacatgaagtagagtacaacaacaaaaatcactggattcgggggaatagtctgagacagggtttgccgaaggaagtaacgctagtctagattcttataca

SEQ ID NO: 652761 - DNA, 312 bp, Homo sapiens
  misc_feature (25)..(25): n is a, c, g, or t
  misc_feature (27)..(27): n is a, c, g, or t
  misc_feature (44)..(44): n is a, c, g, or t
  misc_feature (179)..(179): n is a, c, g, or t
atttgtaacactttggtcacatctntntctagatggtcattgantttttttaaagatggatgaaaggccaggcatggtggctcatgcctgtgatcccagcactttgggaggccgaggcaggtggatcacttgaggccaggagtttgaaaccagcctggccaacatggtgaaaacctgtntctactaaaaatacaaaaattagccgagcgtggtggtgcgtgcctgtagtcccagctacttaggaggctgaggcatgagaatcacttaaacctgagaggtggaggttgcagttgagccaagatcacggcactg

SEQ ID NO: 652762 - DNA, 885 bp, Homo sapiens
  misc_feature (696)..(696): n is a, c, g, or t
  misc_feature (885)..(885): n is a, c, g, or t
ggccccgggcttccgccgcagcgcgcagcattgggggtgccagaggagaccagcagcagcacttgatttagctgggctgcgggaatccgaccttgtacactttccagaagccttgatctctccaagtcccgcgcccaggggactcgagccccgggtttccatggtttgcccccggagcgctgccccctttcggtgctcttcggcccgggtcaccggcggcgaggcctccgggggtccctgttaaggcccggagcatggctgtgggcctgttgcccttcaggtttccaccccctgggaaggccctactgttgtgtggcagcgccggggggaaagggtgtgtggcattgttgaaccgggccgaaagaaccaacggttgcaggaaaggggggcgcctgttttgggcccccttcccattcctggctttgccggggagcgccctttaggctccttccgggatattggggcggaacaggcgggagtattgcttggggcaaggctcggcgccccctggtgggaaagcttcgcttcaccaaaagtaggcaaaacaaacacaataccactacattatacacgaagcaatcattgtgttgtggcggcaccctatcgcaccgacgaaaaatgcttagtacgaaccaccattccttggtgtggcgcgcgcggcgcccagaaggtgtaaatagggcagcgcggccacangctgtttccaccaaaggagcacctgcgggtcagtacacgagcgggtctgtgcttccacacccatagaaaaaccgccgggggccaacgcgaggttcttgttgaaaacaactccatagtggggttcgagggcacttagcggcatctacacagggtcccaggggcccgatgaaatccgcaccgcgtgtaggn

SEQ ID NO: 652763 - DNA, 467 bp, Homo sapiens
tagtctcgatcgttaggtgactggggctaatcatttaatgccttaggacatttttccttatgggtataatgaagaagtttagaagcttatttcaaagattcctcttggtggtgaagacttaagggcttcaaggaatagtgataaatctaaagtaattctgacaaaaaaaaattccagaaataaggaagactattacggccagcagggaaggcccaggtcccaaagctgggtcttcccggttttttttatggttttggttttttttggagacagagtcccgccccgtcacccaggcgggagtgcaggggtgtgatggctcacggcaaccttcacactctaagcccaaaggactcctcagcctctccagtagctaggactacagaggggtgccaccaggccggtgtgagtaattttttttaaagcaaattggtagataagtttcttactaattaaggatcgagaacata

SEQ ID NO: 652764 - DNA, 123 bp, Homo sapiens
cggacattcagactgagcgtgcctaccaaaagcagccgaccatctttcaaaacaagaaggagggtccttcttggagaaacttggcaagggaggaaggcttcccgcgggtactaaaaggaacaa

SEQ ID NO: 652765 - DNA, 587 bp, Homo sapiens
aaatgcggcacaggaatgtatgtaactagacggacgaggtgcagtgggcagagactccctagatgcttccatgcttatttccagtattatttgaagccaaggaggagtttgtatatgatgtgagtcatatgcccaggacactaattccaatccattctcttatcacctccctgaccagttcctaatcagaatctgcacctcatggaggttacaggaatccaaggtcatgataactgaggcttgtactgcatctggactcagaacagagcaaatgtgtgcctggtctaagtacttccgtaaaatacccagtgtcttggtgtccttctgcagcacagtctctgtcgtcttcggcataagtatcgagattatacacacatcactgataagggataaaaggcaccctggaaatccgtaaatcaaggactagcagtcacggcagtgcactgcattgagtctggtttggttgggtctgaaactgtacctgaaatggtttctttaagtatcttgctttctctatttctcgatgtttaataaaccgaagggacacggacatgtagagaaggctaaaataagaaatgctgtgtgag

SEQ ID NO: 652766 - DNA, 462 bp, Homo sapiens
cacctggtagtagtcgcacaccgaacaccagccacgtcatgcagtatggagacaaaacaatctcctagccatgtaatagtgatgcagtttcagggtatgaaacgctaggccagttctcccggtccctcctgatgtgcctctcaccatcatgataaggaaatcgtgatgaacaccaatgatctggtaggagtccaggctgctcacggagagagatccatcggcatctggtatgccaggcacctcattgagaagtcattgcgtgatatcgtctccttgttggcagcgctccgaggctgaggtgcagcagctcctgtccgagagagccccgctcacggggcacagctgctacccagatgccctgctgcacttccggacccactacttcaactgtgcactcccccacgtacgattatgcttttagacgtttgtacttgctggtcaaactttgttgagagccgtgtc

SEQ ID NO: 652767 - DNA, 139 bp, Homo sapiens
ctgccccgaatgatagaatcttagttcaacatataaatttacgaggggatttagagggttctgtgggccaatttaaatgttgaagtaagattctatcttgagacaagcaagctatcaccaggctcggttaggtatgtcg

SEQ ID NO: 652768 - DNA, 610 bp, Homo sapiens
ctcccaactcaacgcgggtgatggaaagggccagttaatcatgttacctggtctcatggaatggttctccctcccagactgaatttccttctttgctgaatacacaggaatgttctggataaccttcttcattagagaaagctatgagaagctttgagctcctcccagtaaactggttacttctctcaaacagggtggtcatgatgatgattaataataaattaagcaaaagaagggcaggtgcagtggctcatgcttgttatcccagcactttgggaaggcgatgcaggtcaatcacttgacgtccggaagttgaaaccaagctgaacaacatggtgaaaccccatgtctactaaaaatacacacacacacccacacacacacacccacacacacacccatccattctcttcacgttgtgacgcacgcctgtaatcccagctactccggacgctgaagccagagcacggcttgaaacccagaagtggaggtagacagaccccaaatcacaccacgaactcaacctgggggaccacgaggcgacatcattcaaacaacaccaactcaaccatccacgcatagtgtccgactctacctacattatcactac

SEQ ID NO: 652769 - DNA, 969 bp, Homo sapiens
tgtaaatgagaagacgtgtttttttccttcaccgatgctccatcctcgtatttctttttccttgtaaatgtaatcagatgccattttatatgtggacgtatttatactggccaaacatattttttctttgtccctttttttctttcctttctttttacttcctttatttctttattccttccttttcctttttttcttttttttttctttttttttttttttttttgggtagttgtggttacccacgccatttaacgtctccttcacgtgaggggctagtagttttaactttaaatttttaatatttaaatggtgtagactttggacactttaaaaaacaaaaaaagacaagagagaatggaaacacgttggataatttcctcaggtgtattttggtaaaaaaatttttaaagggggggtgttaattcggcggtgataaactcgcgtgtggggattcccgtgatcttataacaggggcggcgggttaatatctcacacagtttaaaaaatcagaccctaatttctccagtgtttacactttcaatcttgcaggcttctaaaagtgacagtatcccttaacctgccaccagtgtcaccctccggccccgtcttgtacagggggcggagaattacgcaaaactggtaggttttaaggaaaaacaaggttttaaacggaaattcttggtctgtccgaaggtttaaaaagtgggtgcattaccgaccagagggagtgtcgtgtctttatgctgtgtcaccccattctttgggtgctttttctttaagccaaaaggttgcgattaaccgctgtttatctaaggcgcttgagttcgcaacatgtagcggggctactctgtgttggacaaaaatcttgacggggcaaaaaagtgctcttggtgggataaaatgttgggcaataggtggttgataaaaggagattgctttggttatacacaatttgttttaggaggt

SEQ ID NO: 652770 - DNA, 383 bp, Homo sapiens
cggccaaatgtgttcccagaatttagaacatcattgcatccttgtgcacatggaaactcacacaatgtgacagtttctctttatctgctggcattcccaccctcatacactttatttatttatttatttgttttggagacagagtcttgctcttttgcctaggctggagtgcagtgctgtgatttcggctcactgtaacctctgtctcccagggtcaagtgattctcctgcctcaacctcgtgagtagctaggattacaggcacgccccaccatgcctggctaatttttgtatttttagtagagacagggtttctcccatgttggccaggctggtcttgaatttctggcctcgagtgatctgcccgccttggcccttatcgag

SEQ ID NO: 652771 - DNA, 485 bp, Homo sapiens
ggagcctgttcaggcaggatggctgaagcctaggggcaggctgcagtcagctggagtccgtggcttggaataagaacttacggtgctttctccaggcccactcatggcacccatggaccaatcagcacatacttcctcccttccgagcccataaaaaccctcggactcaggtagactcaggcagatgtcgggactaccagctgcaggaaggagatacccacttggggtctcctcaacttgtcaggacaacctgactatgggaagcacttacccactatgggtctcctctctgctgacagctggaaacccgtcaggatgacccgctgtggaagggagctacccacttctgatctcctaagagctcttctgtcacttaaatgaagcccctctccgccttgctcaccctctggttgtccacgtatctcattcttcctggatgcaggacaaaactcagcacccgctgaattgcgggactgaaaggggtg

SEQ ID NO: 652772 - DNA, 397 bp, Homo sapiens
ctttctggctaaagacggtgatcccccggtctctacttaaaattccaaaaaattagccggacatggttgcgggcgcctgtagtttcagctactcgggagactgaagcaggagaatggcgtgaacccgggaggcggagcttgcagtgagctgagatcgcgccactgcactccagcctgggcgacagagcgagctccgtctcaaaaaaaaaagaaaaagaaaaagaaaaaaaaaaaaccttgctacgactaagttcctgagggccaaggaaagccatttagatctttgggtttcatttgcttcacttaagcatctttatttttgcacttgaacgtctggcagagcattttgatgatgatgatgcacaaatactacgaataaatggatgcgtgactagct

SEQ ID NO: 652773 - DNA, 409 bp, Homo sapiens
ttgcagtgggatctgtctcaactcccattccgtttccagagccaaagtttggagggaacgtgagctcgggtcaggtcacatcaggtcagcctcatccaccacactacagtctccagacagttgttgcagtcacggagttgaaaccctaacttacagataagtcatctttaacaggaatctcgtgaaagatttttacatttccctctcagcccatcagcaatatttgctgccagcatcccactgtgggtcctaagttcaaaggttcttcatggttggttgtataggagttcttcctgtcccttgaaaccccactcttcaacctcctgagagctttcaaagttggaaaatatatcatgattttctttctgttcattggaaaaatatatccgataattttaatatacctggc

SEQ ID NO: 652774 - DNA, 1389 bp, Homo sapiens
  misc_feature (233)..(233): n is a, c, g, or t
atggcacatgcagcgcaagtaggtctacaaggacgctacttgcccctatcataaaaaagacttatcacctttcatgatcgacgcacatcataagtcattattcctatagttcgtgcttcctagttcctgatatgtcccttttacctaatcactcacaataaaaataatctaatagtaacatctcatacgctcattgaattacgcacacggcacgttctgaatctactctcggncaacccgaccagtacaattacctactgtccttcaatcggacactgctccgatcacactatcgcatttccttttagcttaaactaggactcgaaggtccaaccgactccacttcacccttatccagtcatagattcagagaagggccatccaattggtcactgaagaccaaactgcaggtatggtgacgcaagctactcgcgcactgaaacctaatgtgctgtacaaagctagcctattcaataaactttactgcgcgcaatgtaatgtctctaggaaagacaggcacgaacacttgtcgcaccctaccacttggaacgctttggacagaatacgtaggttacaatactttccgctggaatctagaaatggtctcaccgatatacggttcacttacaattacgtatatcggcttgcacacaaatgagcggtaattctggggcctatttgccaatttggatggcctgggtatcccgcaccaaggagttcaaggggggcctcttttaaagcgcacaaccgagtgtaatttgactccacatttgtgtcgcaccggaagacatccgatacgtaaaataacgcaataaatacccaagatttttacacagctcggggacgtagacaacctgtgaactcggtgggaggcgagataaattaccttaatgggctgcggtccaaatgagcatttcgttgggaacaatgtccttgttttgggcacaggacacaagtattcggcgaaccaagagtgtatctaggtaggacctcgactcttggttccgcataaagtaagaagtctatatattatcctcaccccgtatagggagaaggtacctttttttggaaaaagggtgacggggggtcccccgggaatattgttttttatcgcgcgcataaaataagggctaaatagcgccccgggattggtaacacccccggaggattctgtatgaaaagtccccatgagggggacaaactgagattacgttcaggcataaacttgagcacaaattaatattaccacaacggtgtaataggtgtgtgcgaggttcagccgttggatactgtaagcgttccatgttagtaagagaaagaccataggctcttgtgctgaggaaaaacaacacatttgtgttcattagtgagacgcattattgcgaaacc

SEQ ID NO: 652775 - DNA, 1147 bp, Homo sapiens
gggacctccccttttgggtcggtaggtgagcgccggcgccggtgtgcgagccgcggcagagtgaggcaggcaacccgaggtgcggagacgacctgcgagaggctgagccccgcatttctcccagggtttcttatcagccagccgccgcgtgtccccgggggagtaggaggctcggtgacaggccgctggctgtcatgtagtgtccttctgagtgtcagaggaacggccagaccccgcgggccggagcagacacgcggccagggcagaaacgcggctggcatggagaagcaggcagggtggccggaggacgtacgacctgatgacccgaggctgggagtgcggacctgcgagccggacatgtcgagtggtgagggttggacgtgggctcgcagagactgctaccatcgctggtagcaccgaagccagggggcatcgaagaccatcggacaatgagattcagaagaccgcatgacaccccgttcagtcatatcattaggatacaaaccatacgaacaatcaggagtatgcagcccaaaaatcagcaaatcactcatgccaaacaatacggtgtctaccttcaaagcgatttcatggcacgagcattcaatgacccattcattcacaaggaagcacggaaacacttgacagcttacgatataggtaccacatcgaaacactggtggcagctcaggaataacagcgtaaagaccacgggagacgagcaacacatattatagcggacgagccgggcaccataaggggccacaccgcgcacgacgacggacaggaagcgccgcgacgaacgcgagcgcacagagcgacctgagacgagaccatcacgcgaccacgactaccgacacgaagaacgggcacgcgacgtgacacaacgacgcacccccgcccacagcgcccgtcagcagcgacaaacactacatatcagaagacagacactaccatagcaccacactggagaacaaccccacacaccccctgaacccccaccacactacacgacccactcataacgcccgcaaaggcgcaacaacacacaaacattacccactcaactcataccaacatacagccacatcacacaacctcccaactgccaccacctacctttcgcccacctacacgcaaataatcc

SEQ ID NO: 652776 - DNA, 285 bp, Homo sapiens
atcgagccggtaccccgcggccaatggcatgtgaatgggagttgttcgatttggctctttcttgactgttgtggtgtatggaatgctagtgaattttgcacattgatgggcatcctgagactttgctgaagttgtttatttgtcaaagaagctttggggctgagactctgggattttctagatatagaatcatgttgtctgcaaatagagataatttgacttcccctcttcctatttgcatgcctttatttctttctcttccctgactgccattgggccagcggg

SEQ ID NO: 652777 - DNA, 177 bp, Homo sapiens
ctgatcggccagatcaacttttcagggttacagatcgcgtaccaggtttgccgaccagtcctggatatgttcaatgccgtaacacagccatttttccagctccacattattcagacggcatgtgccgatcagcgagtacagcaccgccgcatgttcgccaccactgccggaacccgc

SEQ ID NO: 652778 - DNA, 432 bp, Homo sapiens
  misc_feature (27)..(27): n is a, c, g, or t
agcagctttattcccaattaacaaaanacatggaagtaaccagttatttccttcagtaggtgaatgtataaacagcaggtacatcccagacaatggaagattattcagtgctaaaaagaaatgagctatcaaacaatgaaaaaacatggagacaacttaaatgcatataaatatgtgaaagaagctaatctgaaaagactgcatactgtatggttctaactatatgacattctagaaaaggcaaaaacagacagtaaaaagatcagtggttactaggagttaatgaggagggagggattaactggtgaagcacagaggatttttaagtcagtgaaactactctgtccatactccagtggtggatacatgccactatacatttgttcaaatctgcagaatgtacatcaaaaataaatcctaatctcaactaaa

SEQ ID NO: 652779 - DNA, 111 bp, Homo sapiens
  misc_feature (69)..(69): n is a, c, g, or t
aacggacatgattcagcccctgttactcacaaatcctatttgagtcaaagtggaaaactattacgtttntgggaaaaaaatcaataggtatcaggaaaccaaaggctggtt

SEQ ID NO: 652780 - DNA, 165 bp, Homo sapiens
aactgctgccgatatattgaatctagaggatccgctccatgtggtgatgcgttgcgctaaatctaactttcttcccacaacactttctcgggctatccggaagtgacccgacgtgagtcgaaccagaccgatgcatacaccagatgaaacatcctatcatgtgta

SEQ ID NO: 652781 - DNA, 709 bp, Homo sapiens
gtcttcttggaaggcggtgctctgagaagccggatctacgcggcagcggctcttcaaagcggagccgcgaggtttctggctactatattttctggcaccagtgagtcgcatgctataatgatgagctgatagttcttggagaagatcgaatagaaactgctggatggatcaatagaagggcgttcgtgcgccaattatgcatggttgaaggtgtttgtctatgtgaatgatgctctgtgacgaaattcgactgttgtgaggaattaacggatagtgcctgtcgatggtggtggtgtaggtgggcttcctgccaggcatgaagcagattggcaatgtggcagccctcgcctggagttgttcatcgatctattgggcttcctgatgtccattcaggatatgggtctgctattggcgaacgtgtgcagcctttgatatgaattgatcgctgaagcagtagtatccccagggtggtgtcgggtatgacatcaactgtggtgtccgcttgcttagaaccgatttgggatcgacagtgatgtccagcctgtgacaggagcagacgttgcccaagctactgtttgaccatattcctgtagagctaggggtcatcatggtgtgcatcccatatgaatgccaaagacttggaggacgccttgggagatggggggttggactggtccttcagagacaggtatgcctgggctgaatgaca

SEQ ID NO: 652782 - DNA, 944 bp, Homo sapiens
  misc_feature (16)..(16): n is a, c, g, or t
  misc_feature (82)..(82): n is a, c, g, or t
  misc_feature (190)..(190): n is a, c, g, or t
  misc_feature (195)..(195): n is a, c, g, or t
  misc_feature (245)..(245): n is a, c, g, or t
  misc_feature (248)..(248): n is a, c, g, or t
  misc_feature (275)..(275): n is a, c, g, or t
  misc_feature (315)..(315): n is a, c, g, or t
  misc_feature (348)..(348): n is a, c, g, or t
  misc_feature (516)..(516): n is a, c, g, or t
  misc_feature (527)..(527): n is a, c, g, or t
  misc_feature (530)..(530): n is a, c, g, or t
  misc_feature (534)..(534): n is a, c, g, or t
  misc_feature (537)..(538): n is a, c, g, or t
  misc_feature (542)..(542): n is a, c, g, or t
  misc_feature (550)..(550): n is a, c, g, or t
  misc_feature (562)..(562): n is a, c, g, or t
  misc_feature (600)..(600): n is a, c, g, or t
  misc_feature (621)..(621): n is a, c, g, or t
  misc_feature (632)..(632): n is a, c, g, or t
  misc_feature (685)..(685): n is a, c, g, or t
  misc_feature (689)..(690): n is a, c, g, or t
  misc_feature (692)..(692): n is a, c, g, or t
  misc_feature (695)..(695): n is a, c, g, or t
  misc_feature (700)..(700): n is a, c, g, or t
  misc_feature (861)..(861): n is a, c, g, or t
  misc_feature (939)..(939): n is a, c, g, or t
attctttttggcacantagtcccgcgctaaacactggttcttgcctccccacccccattctctaaaataaacccagcaaacngggaggtgcatttgtgccgctgcaggcttctactgctcactccatgcagcacacttagaccaaggagaaacggctgctttccagctcaaagtcgactcattagaaganaaggngggagactgggggtgacacatcgctgatttgtccggggttgttatctgcngcnggcctttgcctcaaaggccaggggcanaggccttgccaggcactgtgttctggggccctggcctcangcatgtgctcagcgggttggccacgcggcccangaagtgcagggcagtggcgctttgatcatacacagcaaacaggaatgggcggttcagggtcacctccaagacctcaggcttgttaagctgttgggtagactctagtgggctctctctcatccgcttcaagcatcaaaaaaaaatgctgattacagcacctcccccaancctgaatgcgngtnaaangcnnaaanaaaaaaanggttcagctcgngtgtgcagatatggcggcgcagctccggcctggggcgngccggtcctgccgggtcctanagatccttgcngcaccagttgggggcatggtcaggtggatggtccggggagacagtttcttcanccannanagngagtnttgctggaaagtgagaccctccaccttgtccaggtcagaggcatagtgaggctggatcagcagcaggcaggcgctctcagtgaagggcacttgagtcaccgagaagttgtcctggatgtcactccagtgctggaaggtgcccatgccagagagcatggganagacactgaggtgctgttgtcacccagaactcctggggctcggcagcagggagaagccttcatcttccttggagtggncgtag

SEQ ID NO: 652783 - DNA, 128 bp, Homo sapiens
catcccccgctccagcttggcaatcttaagaactttaattgacagtttcaattgaaggtgctgtgtgtagactcgacacccagtgtaagcccaaccatcatgactaatccttgaatgttctcttaaga

SEQ ID NO: 652784 - DNA, 279 bp, Homo sapiens
tctggcggctgagcctcacctcctcccggtccatagaacagggcagggccgaccaggacagccccagtcctctcatcccaggccaacacatctcactcgctcccacttctggggacccacgagcaaactgcaccctgaactcagacatcaccagggcccagaggcccacacaccagccccagaccagaggctggcttttgttcacgcccgccctatgccaggccccatccgagcactgacccagcctggacaggagcccacagcggctccgaaactccc

SEQ ID NO: 652785 - DNA, 366 bp, Homo sapiens
tataacgaaaactgtacacggtcatatctgcttccgaaaatatacatagtgagatagtaatttacaggcaattaagaatttgctggccaggcgcggtgacttacacctgtaatcccagcactttggaaagccaaggtgggtggatcacctgaggtcaggagtttgagactggtctgaccaacatggtgaaaccctgtctctactaaaaatacaaaaattagccgggcacggtggtgcacgcctgtaatcccagctactcgggaggctgaggcaggagaatcgcttgaacctgggagggggaggttgcagtgagccgagatcgtaccattgcactccagcctgggggacagagtgagactccgtctc

SEQ ID NO: 652786 - DNA, 639 bp, Homo sapiens
cacatgcgctgagctcgcactgattttttacctgagtaggcctagaaataaacatgctagctttgtattccagttctaaccaaaataaataagaccctcgttccacagagagctgccatcaagctatttcctcacgcagagcaaccgcagtccataatccttctaatagctatcctcttcaacaatatactctccgtgacaatgaaccataaccagatactaccaattcaagtacttcatcgattaataatcatagatggctatagcaataagaactaggaatagcccctctttcacttctgagtcccagaggttacccaaggcacccctctgacatccggtcctgcttcttctcacatgacaaaaactagcccccatctcaatcatataccaaatctctccctcatctaaaacggtaaggccttctcgctcactcgtctcaatcttatccatcatagcagggcagttgaggtggattaaaccaaaccctagctacgtcataaattcttagcatactccatcaatttacccacagtaggcatggagtaagtagcaagttctaccggtacaacccgtaacataaccattcgttaattgaactatcttatattatcctaactactaccggattcctactac

SEQ ID NO: 652787 - DNA, 452 bp, Homo sapiens
  misc_feature (105)..(105): n is a, c, g, or t
  misc_feature (108)..(108): n is a, c, g, or t
  misc_feature (239)..(239): n is a, c, g, or t
ggggggcttctcccgctccgcatcctttgtggttggggttttgtatcactccccatgtgggggataatgaaagctttttatgtaggggtttccaccctcatcagnggngggttttttcccgggcccttgacacagcaaaacaccagttgtgattttttgccacccataaagtttgcaaattttgaggggttttaccaggaatgagtgactgctcaaaggccgggttttttttcaagaanggtgggatcaaactccccccttgggattatggtttaaaaaaagggggttgggtaggcaagcactccttggttgggtcctttggttttttcatttactggtaggatcccgcaccagccaatttagggattgtgttgtttttgggttggttcccatgtaaaaaaacagcaaaaaaatgggatggttcaaaagctcgcccggccccctcaacccta

SEQ ID NO: 652788 - DNA, 149 bp, Homo sapiens
ccgtagctgctgtagccgccccgctgagctctcacgggagtacaaactagtgctgctgggtgctggtggtgaccggaagaatgccatgaccatgcagttcatcagccaccgaatcccagaagatcatgatcccaccattgaagatgctt

SEQ ID NO: 652789 - DNA, 427 bp, Homo sapiens
  misc_feature (40)..(40): n is a, c, g, or t
ctgtgatgtctgctgcccagtacgtgtacgcgctcaaggntgtcgcaggcctggaagacctctgcctgagcgggttcatggagcattgacatccctgccacccagcgggccactctggtatcctgtgcgacgtcttcatcggccgctactacactgtgtttgaccgtgacaaccacagggtgggcttcgccgacgctgtccgcctctagttcccaatgctgtactgtgctgccagcacagaatacagaggagagtcccagatgcaggaggcccctggcccaagctggaccctcccagacatcacccacatcactccgcccgcgccacttgtcctaggagctgccctggagagcacggctggtccaatgcctcagacttgcttgtttttgttcttgctggtctttccccctcccctgtggttcatgaa

SEQ ID NO: 652790 - DNA, 327 bp, Homo sapiens
ggggtgggggccccccgggccttttaagacccccccagccttttgggtcccctttgggccctcaacaagacctgaacaggttttgcccacctgggcctttccctacatcattatcatttcatggccccctggccccccccagcagaggttttcagtggggccagtttttttctcccctttttgctgcctttggccccgcctgggcccgcctgcccccctgtggggggggaatggtctgcagggtttggggcagggtttggtcctttttggggcccgccctttttcagctttttggtatttaaataattaacccccctgttttgtgga

SEQ ID NO: 652791 - DNA, 109 bp, Homo sapiens
tagtgctggttgaggaagagtcagctaaaagatgtgagactgaatagaatccatgactgggtgagaaggcttccttggcgataacactggatgatgacgtcatctgctc

SEQ ID NO: 652792 - DNA, 141 bp, Homo sapiens
  misc_feature (23)..(23): n is a, c, g, or t
  misc_feature (29)..(29): n is a, c, g, or t
  misc_feature (95)..(96): n is a, c, g, or t
tcggtaccggtgactagtatgtngagtcngtgagtaggagagtgatattgatcaggagaatgtggttactaccaactgaccagttttcctgtgtnnttgctggtttggggatctctcagaatgttttattctctattagct

SEQ ID NO: 652793 - DNA, 332 bp, Homo sapiens
atgaggtggtaccccgcggccaatggcagcagacacctgggtcttagcataaacggcgtagtaagctttgagcttccagtgtatatatttattcttttgtgggtttagtttgtttcttcttgtagaactgtacagaaactttttaaaagaaattggattcgaaactggatgtgtattcgtaacctcataattttgatttgtgtatagtttcttttataatgtcagtgtaaatttttacattatttggcatgtatatatcttcgtacagagaccttacatgtatagacagtatgatgtgatgtaaatatcttattttgccatagggccagcgt

SEQ ID NO: 652794 - DNA, 174 bp, Homo sapiens
gcgaattcactagtgattagagactgcgagaaggaggttcgagcctggggatacgctctcctcgttctgcacctcggccaccatgcttcaacaaaagagcctcttcacaacaataacctgcccccgcgcctgccccggctccttctcgcagtctctaatcgaattcccgcggac

SEQ ID NO: 652795 - DNA, 114 bp, Homo sapiens
  misc_feature (13)..(13): n is a, c, g, or t
  misc_feature (21)..(21): n is a, c, g, or t
  misc_feature (40)..(40): n is a, c, g, or t
  misc_feature (70)..(70): n is a, c, g, or t
  misc_feature (73)..(73): n is a, c, g, or t
  misc_feature (78)..(78): n is a, c, g, or t
  misc_feature (98)..(98): n is a, c, g, or t
  misc_feature (100)..(100): n is a, c, g, or t
  misc_feature (102)..(103): n is a, c, g, or t
  misc_feature (106)..(106): n is a, c, g, or t
caaagccctgtancttccccnaatgccaaggcccatctgntccggcgtaaggacgacaccgtcagctgtnccnactcncacacatttaataaactgancncnncantgccaaaa

SEQ ID NO: 652796 - DNA, 232 bp, Homo sapiens
tgtgcagaatccggcgtaatagatcactgaatgatatgtggattaatacaaaaccaagcctattgtatcagaattctttgggcgttatcagtagcacccactaaatctgcaaggaccggagcttaacagctcctgtcctcagccgtgccgcctgattctatccctccaccacatgcccacctgctccaagcccagatcccagtccaccaacgccaacacaccgcacgcagca

SEQ ID NO: 652797 - DNA, 621 bp, Homo sapiens
aggagatctgtcagtgatcatttacgcatggatgaggattcatatagtatttctcaatgagagaatctcgtaggacacatgattcgactatacgagattgtacagctgttgtcggccacggggtcaggctacatacctctaatcagtctcttagaactagtagcatctgggttcctccacagtgctacttcattcagaatctctgcacttggtaccgtggatcatgtgtcatatacaggctcgccaggtaagagctgtcacccagcaagagttcactgctgatgagtctatggtatggagttcgagacactatgtcctcagacacgtgtaagggtcctctctatagttcagtcttgaagttctggctgtacatacgtgaggtagatctgctgacataacatgttcactacagccatcaggatgaagacgttccctgactcagcctccacatgttgactgatgagttctgcattgacagtgtgacagttgattcatgcgatgagcacggatccccatgagaatgccatgaggacacttgcagatctacggagagatgattttatacatgattttagatagaaagccccagacagcttctgcggcatatcggcttcaatgcaa

SEQ ID NO: 652798 - DNA, 654 bp, Homo sapiens
tgaaaatattctgggtctctttttgagttctgtaaactagtcaagaattgtaagacgtcaacctgtaagtcccataacttttctgcgctcattaaatttaagaaattcagatattttcttttaaatttttgagtcttatcgtttaccccgttcccaaatccttctgtagtattttttttgctgatagcatttgagccacccataatagttattggattccaattagcaagcgatagggaatttgaattatcgttaatgaactgatctataccgttgattgctagttgtaaagttgaaatgctttcatccgaagtaaattttggagacccaaatggaacggacgagtcgatttctttggtggcattatctctgatcacataagcgaaggattccacgttatcgcaattttgagagtttaaaatctcattgtttagacattccatactctgacacaattggaaactcaagtcctttagatagtccctttcacaaatcttgttgaagtccggatcacagacaattacaattaaaaaatcatcaaagtaccaaaataggcagttataaaaatcctccttgtctttggagttttcaaaattcaaattcagtttcagggcttggtatgatgatggcaacaggtctgaattcaatggggat

SEQ ID NO: 652799 - DNA, 748 bp, Homo sapiens
gtacctgtcgaggccgatatcaagtgcacgccccgccctggaacctcaggggcccgcgttaggatctgaaccaatgatgctgggttcacccacatctccaaagccaggagttaatgcccagttcttacctggatttttaatgggggaatttggcagctccggtgtaatcctcaaaaactctatacacaatagtgggccttccatcaagtgagtagatggtagatgatatcatcttcatcttagcctatggctgggtgggtaacaaacacaatcgagattgatactcagtctcagtaaagatagaagtggcgctccaccagttagaagtatatatgatgacatttctagcccaggactgtggatcaacaccctttaacttcaagaagacagccaaacatttacagtaatgcagagtcctctgtgggagttacatctactcctggaacagggcaaagtaatgttaagtccagcaagtatcggtcagccacgaaagacgacattatctcctgcccagtgtggatccttcattatactcaaggagattctttgacttcagaagatcacctcgatgactcttgggtgactgtattcggggtttcctcaagcatctgcttcctacatattactacaatttgcaccagatggggaatatcttacaacatgtgatgtctaataccaggaacatggcatgcctattcggttatacaatatcaaacgtggggctcggaaagccttagccaagcttgga

SEQ ID NO: 652800 - DNA, 148 bp, Homo sapiens
atatgtaacaactatagctactatgagaaaatgtatctcacctatagcctaacatgattcattttttttttcccgggaaacagaaaatgtctttggtctggtattaattatcataagaattgaatttaacttactgatcgcacccaag

SEQ ID NO: 652801 - DNA, 146 bp, Homo sapiens
  misc_feature (71)..(71): n is a, c, g, or t
cgagtcgtccgcagcactggaattacaacttaggatgtagtcaccatctgtggcagtgcccagttgtctgntagatgccacgcgatccagctctcgatagcattatctgctccttgtcaatgacgagactgctatgtctaggggca

SEQ ID NO: 652802 - DNA, 216 bp, Homo sapiens
  misc_feature (108)..(108): n is a, c, g, or t
  misc_feature (166)..(167): n is a, c, g, or t
  misc_feature (216)..(216): n is a, c, g, or t
ggatattgtcattagggctggatagattacttcatttaacagtctttgtaacaccctgcttgattcagggcataaacggatattagatccaaatcagtatattcatcntcgtgacactcctcttgtcatcttgtatgctttgtaccatggacagggcatggatctnnccttctctgcacattgtggacagatgtggtctgtaattgagggtttcgn

SEQ ID NO: 652803 - DNA, 210 bp, Homo sapiens
agttttccaaaaggggtgaaagggttgcaggtcccgaccactgacccttcccgggtgccctccctccccagcttacccctcaagcccagcacccagtgccccttgaacaaagggaggggaggacccatggctttcccccctagcccgggagaccaggggccttccttttcctctgcttttatttaataaaaactaaaaccagaaccggga

SEQ ID NO: 652804 - DNA, 175 bp, Homo sapiens
ggtcgctgccggtggggttctaccccagctcgtggaggacgacaatccctgcgtctgggttcgtcgacggcgtgtcgccgccacgcttctccaccggctatttcccgctgcgcaaccgcatcggcatcctggtggagacccactctgtggcgcaccgtacccctgaccactgtgc

SEQ ID NO: 652805 - DNA, 836 bp, Homo sapiens
  misc_feature (5)..(5): n is a, c, g, or t
tatanagaatattacggctaggtacgaggctgggttgcggctaatcccagtcggtgccgcatccccagcccgccgcatggccgcctacaaactggtgcttgatccggcacggttgagagcgcatgtggaacctgggagaaccgcttcagcgtgtggtacgactgccgacctgagcccggcgggccacgaggtaggcgaagcgcggtcggggcaggcgctacgagatgcttggctatgatgtttgactagtcctgtcttcacctcatggtgctagaaggagatgcgagtccggaccctcctgtgacaggtgctaggatgccattgatcagatgtggtctgccagtgtgtgagtgaccttggccgccttctaatgagtcgagcactatggggtgtctaatccggtctcaataatggcatgaaactggtctgcaatcgctttggttgaggcccatgtgtgaggattcgtggagtgcgctccttatgtatgtccccagccactctccgattgggacgccggaccaatcctttcttacagcgagaccatcagtaccgggctcggcagggttttgcagaccctcagcagaaagattcagtacccttccttgtgaagagtcttgaaggggatacctatttgcccaggaagcttcttgccccgtctctgggagttgacggcaagttaggttcccccagaatccagggggggggaccgcgtgttcttggttggcggccgttgggcagcggcgctccggggcgcttggccccgcccttggggggctctccctgaggggcggctccagggggcctggactgcgggtgggttcccctgtccttggtgg

SEQ ID NO: 652806 - DNA, 499 bp, Homo sapiens
cctaatacactaattctctgatgcacctgtataggactacacctaattcacttcactgtattagcacttcacctcctcctatcacctcactgtattagtgaccctagactgctgctggcaatacgcgcggccacagccgttgggagacacctgtggctccactcccctcctccagggcatctgtcaccaatctctgcagaccagcaccctcccacgggcgcaggaccagcctgtcccaaacctttggctgccatcaagggctgaacacgcactccccagaaaagaggccatggagcacatagggaggccgtctccatccctctctgtcctctgtgtacctgagataggtgtgagtcacaccctgcaggctcccccttccttgagaactcacgaacagggggatcccagccacgggtcacgctgtggggttttaacccggaaagaacaagacaccacacacctgcctcacttccccaggatgcgtcctaggtcgtccata

SEQ ID NO: 652807 - DNA, 279 bp, Homo sapiens
  misc_feature (42)..(42): n is a, c, g, or t
  misc_feature (147)..(147): n is a, c, g, or t
tcaggcctcccgcaatgaccaggccgacgataggggaaacantcagcgaggagaaaattttggtcacttcacgcaggtttaacgcatccatcaccgatgagccggttaacagcgcgttggttaaaccgatgccgataatcgcaccantcaaggtgtgcgaactggaggccggtaaaccgaagaaccacgttcccaggttccagataatcgccgccagcagcatggaaaagaccatcgccaggccgtgggttgaccccatattcagcaacaaattcggtt

SEQ ID NO: 652808 - DNA, 115 bp, Homo sapiens
ttcgattggcgggcaccttatggctttatgaccagtgaaaagcgtgggggcggcagtgatgacttgcccatggctttatgaccagtgaaaagcgctaagttgcccgccaatcgaa

SEQ ID NO: 652809 - DNA, 706 bp, Homo sapiens
gagaggagtctcgctctgtcgcccaggcttgagtgcagtggcgcgatctcggctcactgcaaggctctgtctcctggggttgccattctcctggcttcagcctcccgagtagtcccaggagtagctgggactacgggtgcccaccaccacacccagctaattttttgtatttttagtagagatggggtttcaccatgttatccaggatggtttgatctcctgacctcgtgatccgcccgcctggctcccaaaagtgctgggattataggcgtgagccaccgcccgggcaaattttgtatttttagtagagatggggtttcaccgtgtgtggccaggatggtctcaatctgaccttgtgatctgcccacctcggcctcccaaagtgctaggattactggcgtgagccaccactcctagccttaatgcatattcttaaatatacaaaggtagattgttatgaaaatggctttggggctctaataacctaccttttaagaatgagaaacttgctgggcttaaggggagttcagtatgaatcaagatgtgaaccattcaaatgtgggctgtgatttctgatatatcatagatggggatccttctgagaatactggcattagggaattaggacaaccaagccaattcaggtgtgaaactttattctggtactttctttcttgcgggaatttatggggcggtttagaagggt

SEQ ID NO: 652810 - DNA, 507 bp, Homo sapiens
  misc_feature (389)..(389): n is a, c, g, or t
  misc_feature (476)..(476): n is a, c, g, or t
gtagccatttttctgcagtcggaattaaatggccaggtgggtttttcctttgttgcaaatggggaatgtttctcgtttgactctaccatccagttcaggacgtctcagtgtgtgtaacatttgtgaacaggcccaaggactcacatctggaggactggagatttttttttgagaagatctggacttgcgccttatgacttggaagccatgtgcaggattgaataactgagggcccagaacacaatgtatggcagcagttaacagcttttgcttccaaaaggacctaagtaaatgtcagatcattttgggtgtttctgttttatgggatttccatatcgtccaagcccatgcgaagctaagatttggctacaaacaaccccggtttattnacgttataaataaaaagagatttggctaattaagaaattttaataaattattccacaatatatattttaagatctagagattaaatnacacaaaaagtaaagatttaatttatatcca

SEQ ID NO: 652811 - DNA, 363 bp, Homo sapiens
  misc_feature (107)..(107): n is a, c, g, or t
  misc_feature (163)..(163): n is a, c, g, or t
agcggctctctctcctcttctctctctctctctctctctctctctctctctctctctctctgtgtgtctctccttttcccctccccaacccccggtagaggcgcgantgctacccgggaagggggctcactccgagttgcgaggggaggtaattactcaaaanaagaggccgccgttaggaagtataaatagtgggacttcaagcgcagcgtcgctatcagatctgaactctccgcaggaagaattgtcaaagatcttaacattgaacaagcgcgctccggcagggaagcatcagttcccatttccctccggcagcccccgccccttctcttctcctcctcctcctccctctcctcccgcacc

SEQ ID NO: 652812 - DNA, 331 bp, Homo sapiens
  misc_feature (292)..(292): n is a, c, g, or t
aggcgactcttaggatcccagtccaaggcaggaggatcgcttgaggccaggagttcaagaccagcctaggcaacgtagcaagactccatctctgttttattctgtgtgtgtgagactccatctctaaaaaaaaagaaagaaagaaaaaactaggtctgtactgtctaatgtggtagcctctagtcctagtcatatgtggctattaaataaaatggaaatttttgttctctagtcacattggctatatatcaagttcttggttagctactatattggacagcacagacatatnatatattcatcccacagaagattctgttgatagctgtgt

SEQ ID NO: 652813 - DNA, 716 bp, Homo sapiens
atatcccaccataaaatctctttacctccaccattatagtccttgaaaacatgcctggcttttaactaaaacttataagaagttccatgagaaggctaaaacaaccaacacactcctaagagacaaagaaattatcagaagcagactcaaacatgacacacattttcaaaatgtcatggaaaatttgaaaacacccaggaaaaaagaaaaaaaaattacatttgggagaaaacagtaagaattactgcagatttgacatcagaaaccatgtcagccagaagatatattaagtttcatgttttaagttttttttccaaagaaaaaaaagataacacccatgtttatagcagtgcaatttgcaaatgaaaaactatggaaccagcccaaatgtccagcaatcaataagtggataccatgcaatactactcagccataaaaaggaatgaaataatggcatttgcagcaacctggatggaattggagaccattatgctatgtgaagtaactcgggaatggaaaaccaaacatcatatgttttcacttataagtaggagcaaagctatgagggtgcaaagacataagaaagatacaatggactttgggtactctgggaaaaagggtggtgggagtgaaagggataaatgactatgcattggtttacaatgtacactgcttgggtgatgggtgcaccaaaatcttagatagtaccgtataat

SEQ ID NO: 652814 - DNA, 187 bp, Homo sapiens
catccgtctatcgtggcacatcactattatgccttcgaaggaaaattcagatctaacaatttcgggctgcgcacaatggctcatgcttatgattcgagccgtttgggaggctgaggcaggtggatcgcctgagtccaggacttcaagaccagcctgggcaacatagggcgacctcatcatctagtac

SEQ ID NO: 652815 - DNA, 733 bp, Homo sapiens
gccactgaaatccttgtgtcgccatggccccccccccgcccgttgttaccggtattgtaaggacaaccgtacccccagtctcgctttcttccgaggtgtccctgatcccccgattcgcacttttgacctcgggcgggaaaagggccaaagtggatgagtttcccctttgtggccacatggtgtcagatgatatgagcactgtcctctgaagcccttggaggctgcccgaatttgtgcccataagtacatggtaaaaagttgtggccaagatggcttccatatccgggtgcggctccaccccttccacgtcatccgcatcaaccagatgttgtcctgtgctggggctgacccggctcccaacaggcatgcgaggtgcctttggaaagccccagggcactgtggccagggttcaccattggcccagttatcatgtccatccgcacccagctgccagaccaggagcatgtgattgaggccctgcgcagggcccagttcaagtttcctggccgcccagagagatccaaatctccaagaagtggggcttcacaccagttccatgctgatgaatttgaagacactggtggctgaaaaacggctcatccccgatggctgtggggtcaagtacatcccccatcgtggccctctggacacaatggcgggccctgcactcatgagggcttcccatgtgctgcccccctcttaatactcacccataattttacttcctgtccca

SEQ ID NO: 652816 - DNA, 346 bp, Homo sapiens
  misc_feature (24)..(24): n is a, c, g, or t
  misc_feature (142)..(142): n is a, c, g, or t
  misc_feature (232)..(232): n is a, c, g, or t
  misc_feature (331)..(331): n is a, c, g, or t
  misc_feature (338)..(339): n is a, c, g, or t
accactctgtctgatgaaaccctnatggcctggctcctgactcccattcaaatctcatctcatgctgccttctttctcttccttccaccttcaaactgcttccccttcaagtctctgcctcaaatgttaggtcctcagagangcctccctgatcactctgtctaaagtcaaaatgcgacagaacctgatggctcacgcctgtaatcccagcactttgcaaggctgaggtggncggatcacaaggtcaggagatggagaccatcctggctaacatggtgaaaccccatctgtaactaaaaaaaataattggctgggtgtggtgacatgtgcnaggggtnncgagctc

SEQ ID NO: 652817 - DNA, 128 bp, Homo sapiens
  misc_feature (25)..(25): n is a, c, g, or t
  misc_feature (47)..(47): n is a, c, g, or t
ctgcgcaggagccgcaggcggtacngccatggcgcccagcggaatgnatggtcttgaagcccacttcacaaggactggcagcggcggtggcacgtggttcaaccagccggcccgtaagatccgcagac

SEQ ID NO: 652818 - DNA, 216 bp, Homo sapiens
agagggtggtttatccagaaaccaagaaaaaaaatcaatcagaataaactcaaaaaaaaaaggtggggggagcaaaaccatcaaccaccaggcagccaggccataagcccacctccacctttggggggccccaagagccccacccccgccccagccccgggggggcttaaccaggggccccggccggggaatcgcctttgctttctttttaagacc

SEQ ID NO: 652819 - DNA, 419 bp, Homo sapiens
agcggacatatgctactgtccattacaggacaatgccaaaaagtgagacatatcaactatcagtagaaatttaacttagctagacggtaccttatgcacatctattacactaaaagaaacgattgttaaccccttccagttgtttaaaagacagtactcctttacagggagtctcgtcaggcacctataataggctacataaaagatacagtataaactgcataagtcttaacgagtagcaaaaacactgatgcacttataaaaagtcgagaaaatctataagaatattagcctgaaatggcaaatctccaaacaccgatctgtgtcaaaatgtttaaatattgatggttactccaaaaatcattacttgtcctatttgttatctatttggaaccgtttataaaggcaaagaaacacct

SEQ ID NO: 652820 - DNA, 1110 bp, Homo sapiens
agcggagcagggttatgggagggctctggtgttctggatggaggatgcgtcccttgtctgtggcgtggggcgtggatccaccctggtgttctccaatcaggcctgcagagagggtagagccgggtcataagaccagaggtgcaaggtgggagcagagagggagccagagaaagagactggaggtggcattgcgcgacgagtggaacgcagcctagcgagggcatacgcagaccctggcagtccgagcactggctgcacggtagtgcgtaggaactaaggaagctccgaacgcgctaatgcacagctgcgccgcgggacggaaggacgctggcgtctggcagacacgaagaccgatgccatcacctgtagcggtggtccgggtgctcgtatcggtgggacaatgcttgcggggcgtactacgttcctgccgtagcccccatgtaatcgggtgctcgtagatatgccagcagtaacctggaagcgtgtgggatgttgattcaggacagggttgcaagaggtcagtggcgctacagtaacgaaagcatggaatagatcgatggagtgacaccttgattgacatgaattccggctagtctaatctaggacctttaggcgttttaaactgacagaattatgtgccatgtcaccgtgtcttcccgagggtggaacctggttatgcacgcttcaaggcgaataacacgataatactattgatgggaagccacgggaggaagaagcttgtcccctagggcagtatttgtaatccaggagacataaacggataataccgttagctgggtcgacacaatcgcaggtcacaattgggagatttatcataacaattaccggatgaattgctccccactatttgaacacacctgcgaactacgagaatctacccatcataccattaacaaagaggcctatctggtggataggacacgaacctcgaaagtgttaaatccccacaaagaagtgaaggtacaaatatgtgcccaaggaatccttataacgatttggactccttggacattctgctgggtagatcccgagccagcttgacggttgctaccatcacatgtggaatacacctttcttgggactccacag

SEQ ID NO: 652821 - DNA, 298 bp, Homo sapiens
tttttttttaagaatcagggtcttgctctgtgtcactcaggctggagcacagtggcatgatcatagctcactgaagccacaaactcctaggctcaagtgatcctttcgcctcaggctcccaagtagctgggaccacaggtgtgtgcaaccatgctcatttaaaaaaaagaaaaaacaagaaaaaacaaaaatggagataggggtctcacatctaccaatgaggagatgtgttgcccacgctgatctcgacttcctgggctcaaatgatcctcccacctcagcctcccaaagcactggg

SEQ ID NO: 652822 - DNA, 599 bp, Homo sapiens
cgatccgaggattccgattgcattgtcttcctcgattttatttttcttcctcatgtagcccaccatctaccagcttatatctaatgcatttacagccacctgatgctaatacaatatgcataataatctccatgagtctatccttcttagcattatcagcactgcatttttcgatttctactcattttcataaaatggacaaccttttaaaaaatgtgctcgttaggggccgggcgcggtggctcacgcctgtaatcccagcactctgtctcaaaaaagaggtaagagaacaagtgttaaaaagtgaacgcgtttcagtttcacatttgaggggaacaaagaaatggagctgaaactgtaagtgggaaatacggtcaagagaggatgtttttaagatgggaaaataatagcgtagaatacgcacaggaatgacccagaagagaggaagaaattggtgatgcaggagagagtggagctaattgctggagccatgtccttgagtaggtgagagggaatgagatctagagcacacagggtggggtccgtcatcggaacaaagactggtgatccacagtgttggtcaccaacgcaggcccatg

SEQ ID NO: 652823 - DNA, 876 bp, Homo sapiens
  misc_feature (31)..(31): n is a, c, g, or t
  misc_feature (37)..(37): n is a, c, g, or t
gatgtatccccttcgacggtgtctggacatngtcctnccactgaggtccacctaccctatggtcagcaccattgatgcttcagaaccagccaagatttccttctttgggaacagctctctgaatatcccccagctggctaggtgttctttctccaggctcctgtagacacctgcctggctctctctactcatagtactaaacaaaacagtctgctttcttctgcttgtgcctgtcttaatgctgagctcctgagctgaaggccctcgctcccatgcagcacactaagatcactctggggccagaccaccttggcatgaatcccagtgctgcatttactacctctgctccaggttcctcagctggaaaaggggttcataattgtgtgaacctcatggggatgctgtgaggattcaatgaatcaacacgtgtgtattagtcaaggttctttaaagacacagaactaatgtgatagatgaatatatgaaggggagtttattaggagaattgactcacatcatcacaaggtaaagtcccatcgtaggccatctgcaggctgagaagccaggaagtcagtctgagtcacaaaacctcaaaagtagggaaggtgatgtgcagccttcagtctgtggccgaaggccccagagcttctggcaaatctctggtgtaagtccaacagtccaaaagctgaagaacttggagtgtgatgttcgaggccaggaagcatccaacatgggagaaagatggaggccagagactcagccagtctgctctttccatgcctggttttatgctggcagctgattagttgagcccacccagactgagggtgggtctgcctctcccagtctactgactcacatgttaatatcctttgg

SEQ ID NO: 652824 - DNA, 939 bp, Homo sapiens
ttgaatttcaagtacacgggcctggcgttttacgttcacatatagcattaggtcccctcggtcgacaaagacccacttctggggcaaggaggacgcggcgcgcgaattatcgcgctatcagctatctgctagcagccccgagcctgaggcggaagccgaggctgcggcgggtccgggaccctagcgagcggtagctgagccgggtggccagccctagtaaccccgcgactgacggcctagggcggctataccagagcgcaactaatacgcgatagaggacggggactatgggtaagcctatataaccagatagacgaggaattgacaataggacatagtacctaacgtagaaggatagacatactataccgaatactaacatataagagagacaaacaagagtagccggtcgggaccaccagcacccaccggtagtagctacaggaggaaggccgcccccggacgaaacataggtagacaaccgccaaataagtagatactcagcaggataaggctagcaatagggagcctagtagggttaaggaaaccccggactaacaaggtaagcaaggtcgtactcaggccgcgaggaactaacagaactatgttgtcaagcggtactagccgaaggggaaaagggggctatagcacaccgggggggccaacaccgaaggtcttcagcatatcctcgcagggtctcctttacgaggacaaccctagtatagaaggggctatctacggcaccaggccaggctagagctcccgggaaagggttgaaaacgacagggaacacttaacggggtagggcccagggatagggcaaaattgtggtcccaccagggacaacttgggagtctcacgtctctcatacgttagcagcgcgaagggtcggcccctgggtccccaacggcaagaatcaagcttcctggtcccatccga

SEQ ID NO: 652825 - DNA, 489 bp, Homo sapiens
  misc_feature (51)..(51): n is a, c, g, or t
  misc_feature (124)..(124): n is a, c, g, or t
  misc_feature (316)..(316): n is a, c, g, or t
  misc_feature (321)..(321): n is a, c, g, or t
  misc_feature (340)..(340): n is a, c, g, or t
  misc_feature (345)..(345): n is a, c, g, or t
  misc_feature (410)..(413): n is a, c, g, or t
  misc_feature (481)..(481): n is a, c, g, or t
gctgaacatgctcaacatctcccccttctcctttgggctggtcatccaagnaggtgttcgacaatggaagcatctacaaccctgaagtgcttgatatcacagaggaaactctgcattctcgctncctggagggtgtccgcaatgttgccagtgtctgtctgcagattggctacccaactgttgcatcagtaccccattctatcatcaacgggtacaaacgagtcctggccttgtctgtggagacggattacaccttcccacttgctgaaaaggtcaagccttcttgctgatccatctcctttgtgctgctgccccnttctntgccaccacagctgctccnttctntgcagcccagctaaggttgaagccaagaagagtcggaggagtcggacgaggatatgggatttggnnnntttgactaatcaccaaaaagcaaccaacttagccagttttatttgcaaaacaaggaaataaaggcttnttgcttta

SEQ ID NO: 652826 - DNA, 355 bp, Homo sapiens
gaaacgatactgatacatttttatattaatactataatacatagtttgcattagggttcatactttgtggtgtacattctgcgggttttgacgaaggtatggtggcatatattcattgttactgtatcatgtagaatagttttagtgccctaaaaatcccctttgcgtcacctctttcattttcccctctccctgaacaccaggcaatcactaatctttttctgtgtccacatttttgccttttccagaatgtcatgtagttagaatcatctagtgtgcggtcttttcagagtggcttctttcacttagtaatatccttttaagattcctcaagtctttccatggcttgatagct

SEQ ID NO: 652827 - DNA, 137 bp, Homo sapiens
cccccatgaaatcactgagaactattagaaaccagtaagagaattcgatattggtgtatacggacttactgaggtaagaaagattaaaattctacaaaagaacatgaagcaagacttgatgttaattcagacataac

SEQ ID NO: 652828 - DNA, 205 bp, Homo sapiens
gggtctaaggcttgctactgacatctgatacgcatctgagagagaccttcagatgccaacaggagaagtgctttcaagaagtcaggtcatattaaccccgaaaaattcacactggtgaaacaggccatgtgtgttatggatgtgggaagggcctcagttaaccgtctaagctggggaaacacccagaagggttcaccactatata

SEQ ID NO: 652829 - DNA, 511 bp, Homo sapiens
  misc_feature (1)..(1): n is a, c, g, or t
  misc_feature (215)..(215): n is a, c, g, or t
  misc_feature (274)..(274): n is a, c, g, or t
  misc_feature (280)..(280): n is a, c, g, or t
  misc_feature (292)..(292): n is a, c, g, or t
  misc_feature (344)..(344): n is a, c, g, or t
  misc_feature (359)..(359): n is a, c, g, or t
  misc_feature (373)..(373): n is a, c, g, or t
  misc_feature (407)..(407): n is a, c, g, or t
  misc_feature (422)..(422): n is a, c, g, or t
  misc_feature (424)..(424): n is a, c, g, or t
  misc_feature (428)..(428): n is a, c, g, or t
  misc_feature (444)..(444): n is a, c, g, or t
  misc_feature (508)..(508): n is a, c, g, or t
ncccactgaaacgctgctgctctcaaacagccagagtgaaatatgatcgtcagtatcgacttcttttaagtgcgcttcacattcacattggtgtatgtgcatgtccttggtctgctgaaaatctggcccttttagtgcacaggggcgacataacgtcccctgaccagcagttccagaatgtcccattttcatatattggcatccatgcacacctnctaaaaatgaggtacagcagggcaaacacttttccaaaatagatgtaatatatataatntatacncattcgtacatncatacctttattcatgtgatgtccaaaaatttaaaaaaaatggacacatttnttacaaaatcgtaanaaagactggacagngttttgctcattctggaaagatgaagctcagtcntaacacaaccctggnanaccntccagagattgtggcnatatctttgcttctaaacagtcagatattcttgcattaagcttggcgaaactgcctttcaaaancag

SEQ ID NO: 652830 - DNA, 903 bp, Homo sapiens
  misc_feature (208)..(208): n is a, c, g, or t
  misc_feature (258)..(258): n is a, c, g, or t
  misc_feature (340)..(340): n is a, c, g, or t
  misc_feature (355)..(355): n is a, c, g, or t
  misc_feature (423)..(423): n is a, c, g, or t
  misc_feature (433)..(433): n is a, c, g, or t
  misc_feature (440)..(440): n is a, c, g, or t
  misc_feature (442)..(442): n is a, c, g, or t
  misc_feature (448)..(448): n is a, c, g, or t
  misc_feature (450)..(450): n is a, c, g, or t
  misc_feature (452)..(453): n is a, c, g, or t
  misc_feature (467)..(467): n is a, c, g, or t
  misc_feature (478)..(479): n is a, c, g, or t
  misc_feature (487)..(487): n is a, c, g, or t
  misc_feature (492)..(492): n is a, c, g, or t
  misc_feature (496)..(496): n is a, c, g, or t
  misc_feature (501)..(502): n is a, c, g, or t
  misc_feature (510)..(510): n is a, c, g, or t
  misc_feature (514)..(514): n is a, c, g, or t
  misc_feature (517)..(517): n is a, c, g, or t
  misc_feature (537)..(539): n is a, c, g, or t
  misc_feature (551)..(551): n is a, c, g, or t
  misc_feature (558)..(558): n is a, c, g, or t
  misc_feature (640)..(640): n is a, c, g, or t
  misc_feature (809)..(809): n is a, c, g, or t
  misc_feature (891)..(891): n is a, c, g, or t
tgagcttggtgtcccaccgccacaaggaggcagggaagaaacccactagtcccagctcctggggtggcacagacattgcaactggccctgcctgtgggtcctaggggcccttggctaccaggaggctaagaacactgctcatgaatgacagtgagccctgaaagctctgggggtgtcacccagtcccacaagcctgcatcccctgcantggagatgggctcagctcctggacgtgccacagacagataagacaaaacnaactactcgcccaagaaaaagcctttgcctgactcagggcagacacagagtgtgggaaagtgaaccaccactcaggcagagngcagagcacagccantaacccttggcacacacaagaccgtggggcaggggccaagccatgtgttcaaggcccgcaacaagaanaccggagagncggttgncntgaagntntnnacatcaccagtcancgcggtccccnngggtggcngtgcnggcntttgnngtgctgtnggantgnaaccaccaaaacttgttcannngcttgcggtggnaggaganggcggaagcgggcagaaggtactggtgatggagtactgctccagtgggagcctgctgagtgtgctggagagccctgagaatngcctttgggctgcctgaggatgagttcctggtggtgctgcgctgtgtggtggccggcatgaaccacctgcgggagaacggcattgtgcatcgcgacatcaagccggggaacatcatgcgcctcgtaggggaggaggggcagagatctacaagctgacagacttcggcgnggccgggagctggatgatgatgagaagttcgtctcgtctatgggaatgaggagtacctgcatcccgacatgtatgaacgggnggtgcttcgaaa

SEQ ID NO: 652831 - DNA, 613 bp, Homo sapiens
  misc_feature (448)..(448): n is a, c, g, or t
ggttgagagttatagaacttttaaatttctttagccaaacaggtctctatttttttaagttatcctaaactccaataaccatacttactgaaaagggagtcctgatacatctaatattggtaacatgtaacattatttgacaaagaataaataaacaatattcttggaagtcaatgttatatatttcaccaaactattattttatatatatataccattttctccctacaaaacatctcaacaagataaaaatctctacttataggacttaaattaatttctatttcaaataatttcctaatacattctacattataactgaacactattctattggaaaagtgaaaggaaagaaatgtaattttctttaaacattaaaaataaaacaactttcatagtaatcatttaacagtacatatacattattatcataaaactattctataantccaaggttaattatattaattgaaatatcactctttaatgtccaacttattgtaaggtacaaaacaactttctacttcactaaccattactcattaatcccttaaatacatctataatttcctgggactattatcactactagatatatatttagctatttcct

SEQ ID NO: 652832 - DNA, 947 bp, Homo sapiens
  misc_feature (439)..(439): n is a, c, g, or t
atggccgctgcgtgctcatcggattccgacgcctgcggagctgagagcaatgaggccaattcgacgtggttggatgcgcagtacgacccaagtggccaactatccacaccttttctgcctgcctagcgctggcagatttacatggggatggggaatacaagctggtggtaggggacgcttggccctggtgggcaagcagccccgcctgaaggtgctcaaaggaccactggtgagtgacgcgaaagcccggctacctgctcgtgccagcgtgcatgctgccagccttcctcatggagcaacagtgagccccggaccccagcgtcttggcacgttgcgttcgacggcccttgtgtcatagtgtgtatagagaatctcgagaccactacttcgaaggttcagccttggccccaatttgccgtccataatcctcgtggaacanagaccttgggaaccggggccagaagaggaccggaatcgagccccttaaccctgaaggagagtgctggagagcatccgggagacggcagaggagccttgggtccatccagttcactcagggtttctgcagctggagctaagtgaagatggaggcattttgtaaagccaatcacaagtccaactcctatcaagcggcgagacagtcatcgaccatccatgaccagccttgaagaagaacctggctgacgaggatgctgtgtctgtgcctggtgctgggcaccgagaacaaggagctcctggtgcttgagcccgagggcttcacattttagccaaggatgagccttcccagcgtcccgtcttcctagagggtgctggccagtttgactgttgagttccggcttgccgcgggctggccgcaatgggtaccatctattttctgagaagagactccaagcaccccaagtactgcttcgagctgagcgccagctgggggacttatgcggggtacc

SEQ ID NO: 652833 - DNA, 1153 bp, Homo sapiens
agcggattgtcgggcgctgctgtgaagctgaaagcggaggccggtccgctgggcggccgggcgccgggggccgtaggggcgcgcgcggcggggcaaccccagcgtataggcgctgaagagagcagacagtggcggtgaaacattcgaatcggaggagccggaagtagctggtactagggggctgggttgattcggcagtgcacggccgttggcgcttgcttgcagtgggcagcggcactgggggatgtacctgggtgctggagacgtcgatgcacacaggaccccgtggggtacatacttgttggctacaggcggtgcataaggatgaaatctcggcgctgatcgtctccgcatcgtacaaatctattcaatacaatgcgaaggcggcccttagaaggcccggcgctgagttgccaagcggtttgggcccggtctgcaatgtcattcggggccccgagatggttggatgttcgcccgttacaggagatcccgtcacatagcgacgaaattcaaagaaagattagaggaattatcaatttgtgccattggtcttttaaaccgatggggaaattactttagcgagaaaaatgtagaacgataattttggtgcgaaagcaccagttagcgacaactggaataggacttagtaaagacggaatgagtgatgtagccagagcaactgccgagtgaccaggtgcctaggtttgggcagcaggagaattctctagaggacagttgacgcgaccatgcggtgagataaatgtatggcgaacagatctcagtctgtatatggcgacatttcccaagggcggtgccacagtggaattggcaatcgagaacggacacacgcatacaccccgtattgacaaggcaaccggggcagacatgacaatcagatggcacgtgaaatccccgcgggaaaccacagggccctgtggcagcacgagacaacgggctgtgaggcaaccagctgcgggcgacagcggcacggcagcggaagaggcggcgaacgaaagacacagacgagcggacacatcaccatgagatcgaccatggatcgctccgcaaacaagcattcagacaacatgtgcctcgccgacccaccaatgcgaaccctcggcaccacgcgacgatggcgacggagtaaagcccg

SEQ ID NO: 652834 - DNA, 879 bp, Homo sapiens
  misc_feature (5)..(6): n is a, c, g, or t
  misc_feature (58)..(58): n is a, c, g, or t
gtagnncgcgcataataaatgtaaatattaagtggccgataaagaaaaagataacgangcgactcagtccatgcgactcagctcgccttattgtcttacaactgttccgtcacactcgcgtaaaaatatgctgccaacaataaattggggctaccccccggtgtgctataaaacctggctcctattatacaccctggcttccaaaatactgaagttgggtgccaccaacaagcctcctgctattcgcccccattaacccccggttataacgggccttttgataccccctttgggggccgccaagaaccccgcacttttttttcccgggtcctggcgcccccgtacctcttggcgttatttctgggatacgtccccccgcgcatagcaagtctcgggccccccctgctccccgggaagttctggccaacgcaatggtgcccccctggcgggcttccctcgagacggccacattaagatctcatttggtgcgccctcctggacccctgcaccaatcttcgggacgacccccgcgccctcgtttcttgttgtttattacacacaccacaaagggtttaatcagtgtcgcttaccccaacacctatcatagtttctccactcaaaaatccgctatactgacgagttctcacacgaatgcaatttcgagtagtccccccccctgaaatgatgcattcttcagtcctccctccacaaaagtagcttctgtaggccaccgcttcttcgcttgtcgtaaaatcatccttttgacccaaaaagatgtgcccattatgtaaacgacgaaatctagcccgcgatgaattcctccctccaaaacttcggccaggtttcgggaaaacccccaataaaaaaaacaacaataac

SEQ ID NO: 652835 - DNA, 273 bp, Homo sapiens
  misc_feature (30)..(30): n is a, c, g, or t
  misc_feature (34)..(34): n is a, c, g, or t
  misc_feature (137)..(137): n is a, c, g, or t
  misc_feature (206)..(206): n is a, c, g, or t
  misc_feature (225)..(225): n is a, c, g, or t
  misc_feature (260)..(260): n is a, c, g, or t
ccggtcgtggcaagttattctgagcaggantgcntgggtgcctatgtcagcctgacggcaaaatacccgataggagagcacgtcgtattgatggcgagcgcaggatacagcgagctgccggaagagattaccgacancccgatgattgatcgtaatgagagttttacctttgtcaccggggtgagctggcgtttttaattcaccgntggatgtcggtgcggctgntgctccgtcgtaatgccacaaaggttgttactctngatttgctctgtt

SEQ ID NO: 652836 - DNA, 106 bp, Homo sapiens
ctcggtaccggtgtaagcactgtacaacttccaagactcgatattcagagacgacgatttcttagtggcaataccttaactgcaccaaaagctaaagtttgccgct

SEQ ID NO: 652837 - DNA, 423 bp, Homo sapiens
gagagagagagagagagagagagagagagagagagagagagagagtagagagagagaggcctagacttcgggaaccaaggtctggacgtggatggcgtgaaggtgaagctgctgatgtgggacacagctggtcatgagcggtttcgcagcgttacctatgcctactaccgataggctcatgctttgatgctgctatacgatgtgaccaacatggacttgttagtgaacatcgcaggcctggatgaccgagattcactgagtactcctagcaggacgtgagacctatgcttgtggtgaacaaggggtagtatggcaatgatcgtgtggtgtctaggttggccggactgaacctgttcaatgagagctgaggcccgtgtgtccttggggtgtgcacattgaggttgtactacttgagttcctctc

SEQ ID NO: 652838 - DNA, 293 bp, Homo sapiens
  misc_feature (26)..(26): n is a, c, g, or t
gggttttgggtaaaagccctttaaanaaaaaaccgctggggtgaaaaagctttttccccctgtttccaaggttggaaaaaaacaaaggggggggctttttctgcccccgccctggaaacctttttagcccttttcctaagggaaaaagccgttttttttgggccccctaaggaaaatttcccccgttgggtaccccttgggggggggatgtgaggggggcttataaactcaaacttttgggttggttggcccaactgggaaaatttttttaataaatggggccccccccccca

SEQ ID NO: 652839 - DNA, 203 bp, Homo sapiens
  misc_feature (175)..(175): n is a, c, g, or t
tgagctgggatcacaccattgcactccagcctttgccatagggtgagactccgtctcaaaaaacaaaacaaaacaaaaaagaataggaaaatattaaaattcttaaaaagcatcaagctgaaactttattgttgttggtgttgttgaaaaagcactgaaaatgggaatagctttnctccctgttgtgactcagtggttaattt

SEQ ID NO: 652840 - DNA, 205 bp, Homo sapiens
ctatctctgggaggctggtcagcagtggggtgccaaacagagctgacctcgaaggcagcacactggcagtgttgatgatgaccccacgtatggcctccctggtctggttcattctaggcccatactcagcgagagcaacacgcgggatcaccataggaggtgttcatgagattcccatcaagaactcgctggaagtcttccaagg

SEQ ID NO: 652841 - DNA, 194 bp, Homo sapiens
tgacttgcatgctcctgctacacatgcatgtgtgatcccctcagtcactagcctctcctgttcccctgtgtgacccagtgcctggatgtgttggcagcatgctcccactattcccgtgtgtacccgtgcggccattacccatgccccgtgccgtctggtgagaattgaatctgtgtcagggtgatgcttgtgtt

SEQ ID NO: 652842 - DNA, 666 bp, Homo sapiens
taggaacagcgagcggttgctggaccagcttgaccccggagcttggttgctttcttgagatctcacagccacacgcaagagcaaacaggagagacagcctctgaggatgcagaggccaggaggaccctctgctaatgtcagcaaagtgaggaacccctcatgtcagcgttttgccagtgagcccaggtaagatgagacaagctggagctcagaagccccagctctggcattgcccgtgacccctcagaaagaatggctgcacatggacactgtcgagctggagaagctccactggacccagtgacttgcctccactgtctcggcgtgcagcatgacaccaggacatggatgcatggctcggttcacgtcttcagggagaactactggaccctgacgtggacctgaccacccaactgtgtactgcaccaccatggagaggaggcagagagagcggggtattcctcgtatcaggagctgttccaccgtgatcccgcaaccaggtttcccaggcagagagcactggtgactgcatgtgttagcccagtgtcattcacgtcatcggtcccaggctggtgagtccaggggaccggcatagcaagcagtgtcttaagcctccttttggatgctggtttcctcttcctactgcacttctccttggatgacaga

SEQ ID NO: 652843 - DNA, 439 bp, Homo sapiens
ggcctttgggcggtgggggccacggagagggtggtcctcggactacgtgcgggacacgaggtcatggctggcaagtccctcagggcttcctcgatgccccagctctcgcaggcgcgcctaactgccccgttccaagggtgccaccggaccccgctggagaggaacttatccgttggctgatttcatcaccacgcattcacgattgcacgtcacctttaagcggagctggcggagccgcatggcggcaaggaactggattgcgattggtcagcacgtgcctcggtcagcggcacaatcggctgaagcgctgggacttgtgaagcatatcccgacgggattggtcgtcgatctgcgagagcccgtctaccgcagtacgcggtccacgtgtctagtggcaggacgagactccaggactatgacgatggctctggccgcctcc

SEQ ID NO: 652844 - DNA, 114 bp, Homo sapiens
ctcggtatgagcggtgggtgagtgagcacagcttcattgtatttacagctgctccccagatcttgcattactgcctgagctctgcctcccgtcaggtcagcagcagcattagag

SEQ ID NO: 652845 - DNA, 693 bp, Homo sapiens
  misc_feature (68)..(68): n is a, c, g, or t
agtaatgatagcggttgtcccacgccaccagaagcgccaagaattgcgactttgaccatatttatgantgtttgtctctttttattttcttttgcactgacaagtgttttcccttgatttacgaaggccttgattgttttatgcttgaattcaaacccagcaattcttcctttttcccttagtcttttataggccggcgaaatttatgatgggcagtaaaactccaatagtaacgaaccgaaggggttcaaaagttgtcaactcgtggaaattcacacgtaagaaggatacagaaaatcttgagtaataggccatgccaagcatgtccactagtcataatggcattgctcgtcatacgatagggtattgaacacctttcggccggaccggcgttaactccggccatataaatgtggtaaaaaaggctactgcgctaatggcctacaagtgttcaaaacctcttctatataataagttataatgttcttgtacagatgtcgcaggcgcgaatacgtgatctgattttagctgtataattttaaattttgttcttttcctaaacaattcacggaaaatcaactgagagatttttaatatatataagaaatactaacaacaataacagcagctgttaacggatcttacttattatttagctcatttataacttctcccaaagtcttctgtttaatt

SEQ ID NO: 652846 - DNA, 215 bp, Homo sapiens
cagcatagctaagacccccgaaatcagacgagctacctaacgaacagctaagagagcacacccgtctatgttgcacaatagtgggaagatttatagtgtatgaggcgacaaacgctaccgtaggcctggtggactagctggattgtccataggtatacgaatctctatgttcatagctttataattgtgctccacaagagacctcgtctaatagt

SEQ ID NO: 652847 - DNA, 470 bp, Homo sapiens
tgacatattgctaaaaggccaaaataagtaaccataaagatgatgaaaggtgtctagagaatactatgatgcctataacagtagcatgactctcaattggtcccatggataacatggtacaatccaaaacagtccagcagacaagcactaactgaagatgcctgtggaaaaccagttatgtagacgtgtcagcttaccctggaggcaccaccagggattccgcaattaagctcgctggaagagagcttcacgtcactttctggggacttcagctccatttcacactttaaacacatgcaaaatatactcactatacataaaattaatgtttcttcagcaaagtcaaggcaaaaataattcagcatgagctaatggactgctaacagagaaaccaccaggtacaagtgcacacacatgcttggtgcctggacagccttccacctagtcggggaggagctgtttctcttcct

SEQ ID NO: 652848 - DNA, 153 bp, Homo sapiens
gtaaggtactgtgcttatacaacaagacaacctcatttctaataactacattttcttccattcacttttttctttatgaaaagaaaaaaggccgggcacagtggctcggacctgtagtcccagctactctggagcctgaggcaggagaatcat

SEQ ID NO: 652849 - DNA, 124 bp, Homo sapiens
cattggaagccctcatgagatgcagagaccgccacttgtcacaagagaggccacgacgtggggatgtacttgaacccacagcacatctgggatgagccgctatttcagccaccactgtcttcaa

SEQ ID NO: 652850 - DNA, 393 bp, Homo sapiens
atatggataatgaaatggggtctatccattcaagggaattttattcagcctttaaaagcaaggaaattctgatcatccatgttcagatccatgttcagatctgtgttcctccaacatggatgaaccttgaggacattatgttaagtgaaatcagccagacacaaaaggacaaagattgtatgattccacttaaatgaggttcctagagcagtcaaattcaaggagacaggaaacagaatggtggttgcgagggtggagagcaagggggagtttttgtttaatgggtagagtttcagttttgcaagatgagaaagttctggagatgaacaacggggatggctgcacaacaatatgaatgtacttaatgccactgaactgtacacttaaaagtag

SEQ ID NO: 652851 - DNA, 327 bp, Homo sapiens
ataagttgattgtaatgatataagcatcacacaagtttacattaagaaatactgtgcaggccatgcgtggtgctggaggcgtgtaatcccagcactttgggaggccgaggtgggcggatcaccggaggtcaggagttcgagaccagccttgccaacatagtgaaaccgtgtcgctactaagaatacaaagagtagccgggcgtggtggcaggcacctgtgatcccagctgcgagggaggcttttgaacgccaggaggcagaggttgcagcgagctgggatcgcgccagtgcagtccagcctgggtgatagagtgaggttcagtctca

SEQ ID NO: 652852 - DNA, 189 bp, Homo sapiens
gacgtgtccaggaatgcagtgccctctctcaatggatgaccatctccctgtggcacttctgagatgtgcaggtgccactatggtatccctccacgtgacagcctacaagacccagccaatacacaggcacgtccagcacttacggaggaatccttacctggttctcacaggacagagcagcagcagcgg

SEQ ID NO: 652853 - DNA, 345 bp, Homo sapiens
aaattaacagccgcgtcgacttctataattattgtgtaatatatatacgctaatgaaatgtataacacaaagtggggttttttttgatacatctatatctactaaaagatatatcattaccttgtttctaaattagtatattagtgactattagtagcaataacttcctatattatccactctccaaaggcagttatgggttatggtatccacataaaattagcctggttaacatatgccttctgattcacacaagtttgtgatgggtatggtgctctgaagccagagaatggtgcatgcatatttaatggcccagtgtggaagtactttggaatgatgtcgacg

SEQ ID NO: 652854 - DNA, 457 bp, Homo sapiens
cgaggcggctccgcccgcagcccgcgcccgagcccgcctcctccgggcatgaccaggacgttcctcctccgacctcttgctccagaaccgactacgggggcaagaactgcaaacgaatgccgtgccgatttacgggcctaacggtagaagcccctgcgggcggccgtgggtgagcctggccaaaaagggacgccgcgtgcaacccaccgggcatgcaggttcgcggcaaccatagattaccacaaccaggagcgcgacacaacacagaccacgcgccagcacgccaagcgagccatacagccatcaagagtgaaaggacggcacccgtcactgcacacacatgccgccgcggacacaatgccacaaaacagcgccacataagaatggaatgacccgagcacgaccacatgctgagtaagacacacagaccagcgaagtgaggagagaaaagaaaagt

SEQ ID NO: 652855 - DNA, 549 bp, Homo sapiens
caacataataccttaagcgaattctttgtgcattttcatgctcatttatatatcacttttaacagagaaattagtcaccaaatacctcttcccactaccaaattattccaataaattttagaatatttaattttatactaattactaaaactcctacttcttttcactatgctacccacagcaatctgtgtgtattataatattagcctcagaaagctgccatcagcagaaattctacttaaccatttaaaattactatagctgggcagcctggccaacatggtgaaaccctgtctctatcagaaatacaaaaattagccgagcagggtggtgcatgtctgtaatcccagctactctagaggctgaggcatgagaatcagttggatccgtgggcggaaggttgcagtgagctgagatcgtgccaccgcattccagcctgggtgacagagtgatactctgtctcaaaataaaaattaaaataaatattttgtaaagaatcatgcagggagtcagtcaataaaagctttgaagtaagtctcccaaggactg

SEQ ID NO: 652856 - DNA, 826 bp, Homo sapiens
agtcctcacaaagcatttggctgggtgcagggctgggcgcctcccgcctccggcgccgcgccgctccctccgctgcacgcccaggcctgagcagcgaggccaccgggccgcgcgctcccagcttcgctcggacgcggcttcggcccgcagagggttcgtggcccggacgcggcgagagctgggcccaggacggtgcgtccggcctcgcccgcggctgctcgcaccaacaagtttgaacaatgatcaccgtcaaccccgatgggaagataatggtcagaagatgcctggtcaccctgagaccctttcggctttttgtcctgggcatcggcttcttcactctctgcttcctgatgacgtcctctgggaggcgccgattctctcgcccgcggccgtcggtggggagttcgtcgccctatccatcctagtcgcgcacatgatggttggtgggggccgccccgtagctcgccgcgtccgtcctgcgcaagatgagcgacctgctggagctgatggtgaagcgcatggacgcactggccaggctggagaacagcagtgagctgcaccgggccggcggcgacctgcactttcccgcagacaggatgccccctgtgggccggcctcatggagcggatccaggctatttgcccagaacgtctccgacatcgctgtgaaggtggaccagatcctgcgccacagtctgctcctgcacagcaaggtgtcgaaggccggcgggacccgtgtgaggccccagtgagcccagtccctgactgctcagcaaggtggctggtgcgtcccctggacttgccctgtaccttcttggggtgcggcc

SEQ ID NO: 652857 - DNA, 969 bp, Homo sapiens
  misc_feature (1)..(1): n is a, c, g, or t
  misc_feature (113)..(113): n is a, c, g, or t
  misc_feature (133)..(133): n is a, c, g, or t
  misc_feature (137)..(137): n is a, c, g, or t
  misc_feature (169)..(170): n is a, c, g, or t
  misc_feature (178)..(179): n is a, c, g, or t
  misc_feature (182)..(182): n is a, c, g, or t
  misc_feature (194)..(196): n is a, c, g, or t
  misc_feature (200)..(200): n is a, c, g, or t
  misc_feature (206)..(206): n is a, c, g, or t
  misc_feature (209)..(209): n is a, c, g, or t
  misc_feature (211)..(211): n is a, c, g, or t
  misc_feature (218)..(221): n is a, c, g, or t
  misc_feature (223)..(223): n is a, c, g, or t
  misc_feature (225)..(225): n is a, c, g, or t
  misc_feature (227)..(227): n is a, c, g, or t
  misc_feature (240)..(240): n is a, c, g, or t
  misc_feature (245)..(245): n is a, c, g, or t
  misc_feature (265)..(265): n is a, c, g, or t
  misc_feature (283)..(285): n is a, c, g, or t
  misc_feature (334)..(334): n is a, c, g, or t
  misc_feature (341)..(341): n is a, c, g, or t
  misc_feature (345)..(345): n is a, c, g, or t
  misc_feature (394)..(394): n is a, c, g, or t
  misc_feature (399)..(399): n is a, c, g, or t
  misc_feature (968)..(968): n is a, c, g, or t
ntcgtacttcgttggaccaacaaagctactttcatgtttttatgttgttctttttagatatttagattaaccagataatcttaaattatcttagaaattagaaagtttctgcngtcttgttacatttgttccnagtntaccagttcgtttctatgccctacgcttgtcnntcctgtgnnagncgtctattaccnnngccntttctnacncnttgctcnnnngncncngtaacgttgtganaggcnttttgttggatttagtcccnttttagtatccccttaannngtttgagctgcatgactctggatattcagccaacagtgttgtgtcaaanacttgcntgantttatgctaaaaattcatagtcggtgctgaacctgaatttgtttgcccnaagcngccccgtccctgcgctgcgcgcaaaggtacaccatggtggtgagcacgcttgtccaggaagtagtgatggtagaccacatctgaggctaggacgtaatcatagtaaaaagctgacttgggaaagtttttgtccaggtcttccccccataccagtcgctttgcacttgaggcagatgtgctgtacattgtagtgtgttttttaaaagattgtattgaaggtttcccaggacatcaggcaaatgctgttgctgtgacttgagctcctaaaatactggccacaatggaaacaaggcctggtccggcaccaatttcaagtatttttgcatcttggaaattcaattcctcggcatgttcctccaagtattgacacaaagccatagcccctggccacaccaccgctccgtaactctctatggattcctggatgacaatctcctttcctgcaaaccgataatgctcctgagtgtagctggcgtaatctgtaggaacaaatttctggaggctatgaagagatggttctatcttgttggattcttctaggactcccccggtgctgtctttctgcgganc

SEQ ID NO: 652858 - DNA, 140 bp, Homo sapiens
tgactctagagatccttggacgcattcatcgtggctaccactcccctcattgttgccagcctccagaagccctcagatttgcccagcagtcccttgagacctactctactgctcctttcccccacttggcttttcaacct

SEQ ID NO: 652859 - DNA, 325 bp, Homo sapiens
ccaatctgtgctgacgttatttcacttaacataatgctccagttctatccatgttattgcaaataacaggattttattatgtttatggctgaatagcagtccatgtgtatatgtaccacattttatccattcatctgtcgatggacacttaggttgcttccaaatcttagctattgtgaataatgctgcaacgaacatgggagggcagatatctcttctatatacagattttctttctttcgggtgtatacctagccatggaatagctggatcatatgcatgcactggttttagtccactcctgtcacgaggcacagattgcagt

SEQ ID NO: 652860 - DNA, 198 bp, Homo sapiens
tgaccgaaaggcctcccgaaagagctgatgtcacttgagaccttgtaagcgggacacagctggtctcagctgattgaagcgtcttgatcgggggactgcactattatttccggagtggctcgctctaaacaatcaactggtacatggcccggtcaactgaactaggctgtctggctgaaaccttttgaaccgtgacct

SEQ ID NO: 652861 - DNA, 102 bp, Homo sapiens
ccgtggccttatttctacgtacctcgacgtgggcaacttccactacggagctggacacctatgaagcccatcgcctgcattgaccatagcctggtcctgcat

SEQ ID NO: 652862 - DNA, 939 bp, Homo sapiens
cacacgcacagagacctgccagaccatacaaggacaatgctgcctgaacatacacatcgcagcatccagtgcgcggatgtgctgcctggacccacagacttacacgaccggagtatgctgtctggacgcacacatgtgcagatatggtatccggaggcacacgtgcacagatatgcggcctgggcacacagataatgctgccttgacacgcacaagtgcacggaatatagccctggaacacccacacacactacccgatgaacagatattgcgtagtctggcacccgcgctactgcaacatgacagaatatggcgtgccaaggactacgagcaacgtatgcgcagaacaacaacggttacccacagggcggcgagtgaataatgcctggccctggcacaacgacgtcaaaattatgcgtgtcatagctcaacaactcagccgcaagacaatcctggtccggtaccactcgacacagctatgacactgggaatagtcgcatgatcgcggacacacatcatctggagagcatatagagcagcactgtggcacgacgacgacgatgaataaatgcttagccatccaaatcgctacgagcactgtgcaaggagtatttgccatggacagaaacaagcagtgctgcagcatgagtaatgccagttagcgtaaagtgcatcccaacgtgactagtaataatggatagttccgtgatcacgccaacagtctgggaccactactgatagatctctgactagacctgggtaacacgtcttggcagtgagaacacattgaacaacatagggttggcaccagtattgctgcctgggacacgacgcaaaacgagtgaagtgatagggaagggtgccaacgagaaaaccctgcagtaaagtgtgtccgtgaaggccccatagttggagacgcgaaattgacttggtcctcag

SEQ ID NO: 652863 - DNA, 120 bp, Homo sapiens
tgggttgcagtgtgactgtgtgcagcgtgggcagaggggcctggggctgtctggcttcacagcccagcaaggtcatgctcgcagaagtcgaacaccaggtatatactacccttgcagcgg

SEQ ID NO: 652864 - DNA, 256 bp, Homo sapiens
tacgagacacaataagcttgaggagcatatccttcgtaccggtgagggacctcttcagccctggtactcggcaggaccccagccccgccaggccccccactccgtatcctccgggagctcgtctcttccctcgccagcggaaatactgattcccactgctcctgcctctagggtgcactgtccgtacctgctggagcctgggccctccttccccagcccagacattgagaaacttgtccaacacgagagaaaactc

SEQ ID NO: 652865 - DNA, 545 bp, Homo sapiens
tcaaaattttgtgagaatttacattaatgtagaacctatatttaattttttgtaaaatagtgatggggtaggagttattatcttgaacagttttcagaaagttagaaaagaaatagccagagattttttatctgttcccaaacatcttaataagataaattactcatagaatgttagaatgctagaagagccctgtgaaggtcatctatcttatcctgctcatttaaagacaaggatcacctcctaatacttttgtcagttgtactctgtttatatgcatagatgataacatctcaccagcatcatcaattgtaaaggatagcaactgtctctcaatcacaatagatacagatttctgaaaatgtaaagccatgtcagagaagaactctggagctagtatcgggctgtgaaaagaatttgggctttggcccggtgcggtggctcactgcctgtaatcccagcactctgggaggccgaggcgggcggatcacgaggtcaggagatcgagaccatccttgctaacatggtgaaaccccgtctctact

SEQ ID NO: 652866 - DNA, 1026 bp, Homo sapiens
ggtggtgctagcaatatgtctctgtctgctgtgcccgggcctgctaccatgagcgtcccggccttcatcgacatcagtgaagaagatcatgctgctgagcttcgccgcttatctgccatctaacaggagctgagatttcagaacataactcggaaggtggacttcactgtccgattgaggctcaaattaattgaagcctgtggatgtgtgtctagaaggcaggatgcatcaaagatgttgaaaagtgtagatagaacagtgtggtatcccttacgtcctatgatcctggatcccccaaccaatcaagaggcgtttgcacttgaaagcctcatgttgaaccagagctcggtcaaataacagggaaagtcgcaagtgcccgtcctcctcgagagtgcagttgttaagcgaaacttaccccccggtgcatggataaagaatactcctgtcccgatacatcatgtgtacttgcacgcctgagtgtggcacgtggcagggatcttgtgggggcatccaggtacatgccacctgagctgcctcaccttggacgggtggacctctgactgttaaatctcggccacctgatttggacgcgggttcctttttccgactagttttattgctgccacgtgttggatagcccgaagagtgtgctgcatcaagaggtcatgccgaattgctcggggggtcacacagaggaaccttgcttaccccacgctcgaagttggatgcccggcacgctgttttgtccgcagcgttgaaagatcgacacgattacttgcggaccagcgcctacattacacgagggaggtaagcggcgagccactcgtgcacaggagcattgggtccgggtgatcggcgcggctgccgccccgggaaaaaccttgggaccctgcgggacggaaaacttggcggacaaaactctgcgggcctcaaaagacaaagaacccgccaaattagttgccagttcccaaactctgttctcaacaacagaccgtgtacaacgagccaataccacggggcataaaa

SEQ ID NO: 652867 - DNA, 315 bp, Homo sapiens
  misc_feature (75)..(75): n is a, c, g, or t
gggcccccccccccccccccccccccttggtgtggaaggcacaaaacacctggggttgggggaacagcctgggtncggctttcatcaactcccctggggaaaaagtggccatgcccaaactggtgcgctcagtgactgtggtttaggaccacaaggatgaggatggaaatgacctgctccctcccccccccgtgagtggtaaccccccctgaggccgagcctgccctggggccccccagccaggcctgggggcagcctctccccaccccccccgggccaaaaattttttcattaaaaaatgttttgggcctttta

SEQ ID NO: 652868 - DNA, 224 bp, Homo sapiens
  misc_feature (13)..(13): n is a, c, g, or t
  misc_feature (73)..(73): n is a, c, g, or t
  misc_feature (81)..(81): n is a, c, g, or t
  misc_feature (102)..(102): n is a, c, g, or t
  misc_feature (133)..(133): n is a, c, g, or t
atgtattgttatnattaatcagtcttttactactaaacttaaatgggcaattgtaaataaacagttgtgagancgttcttncaccactgattaggagtgggntggcaggtattagggataatattcatttagngttgtgtgttttgtggggagagttggtgagtttgccagctccagcagccttcttgctccactgctttgatgagacccacgggaagtgtgtg

SEQ ID NO: 652869 - DNA, 713 bp, Homo sapiens
  misc_feature (131)..(131): n is a, c, g, or t
  misc_feature (143)..(143): n is a, c, g, or t
  misc_feature (160)..(160): n is a, c, g, or t
  misc_feature (193)..(194): n is a, c, g, or t
  misc_feature (242)..(242): n is a, c, g, or t
  misc_feature (283)..(283): n is a, c, g, or t
  misc_feature (304)..(304): n is a, c, g, or t
  misc_feature (309)..(309): n is a, c, g, or t
  misc_feature (317)..(317): n is a, c, g, or t
  misc_feature (321)..(321): n is a, c, g, or t
  misc_feature (325)..(325): n is a, c, g, or t
  misc_feature (330)..(330): n is a, c, g, or t
  misc_feature (358)..(358): n is a, c, g, or t
  misc_feature (361)..(361): n is a, c, g, or t
  misc_feature (387)..(387): n is a, c, g, or t
  misc_feature (515)..(515): n is a, c, g, or t
  misc_feature (521)..(521): n is a, c, g, or t
  misc_feature (532)..(532): n is a, c, g, or t
  misc_feature (579)..(579): n is a, c, g, or t
  misc_feature (592)..(593): n is a, c, g, or t
  misc_feature (635)..(636): n is a, c, g, or t
  misc_feature (644)..(644): n is a, c, g, or t
gtcacgtcttctgcctctggactgaaccccacatctgcacctccaacatctgcttcagcggcccgtgtttctcctgttccacagtcgccaatacctcccttacttcaggacccaaatcttcttagacaatngcttcctgcttngcaagccacgctgcagnttaataattctaatgtggacatatctaaaatanntgaagttcttacagcagtgtgacacaagcctcactgcagtctataatncataagtttcttactgctggaccatctgctttcaacataangtctctgatttctcaagctgntcagntctctaanaagnccangcatntaatcagtctccgagtgtctttaacatntgntgcgtcatccccaagatcatatgttnctccaagaataagcacacctcaaattaacacagtccctatcaaactttgatcagtactcctcctgtttcatcacagcaaaggttagtactccagtagttaagcaaggaccagtgtcacagtcagccanaagcancctgtaactgntgacaagcagcaaggtcatgaacctgtctctcctcgaagtcttcagngctcaagtagccnngagaagtccatccacctggtcccaattcatacttctaatagnnagtcctgnctcaaatgcacagtggtcccaacaagaattttctttctggcccgatcccagtggttccattaaaggccg

SEQ ID NO: 652870 - DNA, 988 bp, Homo sapiens
ggagtatctaaggatcatgtctgcgagccacggattcccgatccagagacaatgggcccggaatgggatggagcccgaaggcgtcatcgagagtaactgaaatgaagcatagtagtacagcttagatgatcccatgtaagcctctcgagaaggatcctctgtctccgtgtgcatctacgcctatggtttttgagaagccccatctgtccatccgaggcaagacgtagtccaatgtaactacctaagtaatcaacggggtagagtagagggtgattagctcaaggcccaatctgggagctgggagggtacgggcacatgtcgcctatcatcgatgctgccagctagtattgaattaggatctagaagaccacccgccaaggtcacttgagtcctaggcattccacatcgaagaaataggctcaggcagattacagtacaggtgtgcatgtgactagggaagaacctacatggtgcgacctccatgtcacgccatgtatcggagggcacctaaggtgcgtgccgatgtgtgcagaagactgcagaatggaaggtctctccacatcatctgtgggtacctcctgcccgtgtgtattgctgtgcttaaacggagatacctgttcccaaaatacgtcagagatgtgtgtactggttgaagtgagtgaatgttaagcccgtgggtgcaaggacagatctttgaaggtgttccaagagctcaagaggacggcaggagatatggatagacacatgcgatactagggcttaaggaccaaatagaaggacccattcggtccgtcagacgaaaacataccgtaggatacgcagtctgagataagtggaacaagagtggggggaacatgtaatgtgaaccaaaacacgggatataaaacggaaggtgacaaaaagcgaaatacaaaaataagaaataaaatcaaacaagaacggatgcataacccatcctctgcggcctcgcctcacctctcctccctag

SEQ ID NO: 652871 - DNA, 460 bp, Homo sapiens
acctgctgttctcctcctcgactacgtcaatcatttctatcattctttaaaatttattttggtgattatttgactaatgtctgcttctcccactaaatgcttagctccctgaaggcaagggccatggctaattgttcacagcacctggcacagtgtctggcacatggtaggtgctcaatcaatatttgtcgaaagaaaaaatgaatgtggatatccttgataaacagtaaacagctgggcaaaaataaggcagagctgcagaaatgaagaaactgatcctacaaatcatgtggaaattcaaaggtcccagaatagccaaaacaatcttgaaaataaaaaactaagttggaggactcacacgtcccaatttcaaaacttactacaaagtaatcaaaagtaattacagcaatcaaagttttcaaaactatgtgctactgggataaggatacacatatagatc

SEQ ID NO: 652872 - DNA, 781 bp, Homo sapiens
  misc_feature (393)..(393): n is a, c, g, or t
aggagacatagacttgaacgacccaggccagcagcgaacagtatatgccacgccctgttgtgccctacgctagaatcaagtcatgctgttcagcatcttgccgaaacgtgctaagtgatggctgcgtactctggacatgcacgacgggctgtatctgccacgttacactagctcaagatctgatggctcagacgatagctcatctgctgcattaagaaaaccatcatacagagagcagggacttttacaacatcttcagaccttgatagagacatgcattgcttaccctgcagaacaactccaagctgactgtactagaaagagacacccatgtactaccatacctaagacgaggctgtcaagacgtatacgtcgtcatccacaccgcctgtntcactgatgggtccggtggcacttacagtgaggccatgctaaatgtcacatgcaaatgtacccacattctggtcaaaggcccctgtacaagacagggtttcaattttatgtccaccagttaatacaaggggacggggcaactccttgcgggcaaaatttataacggtgccgaaaaaaaccttttgaaaacacatgggcaactaaaaagccccacccaaaagcttctccaaaaagtgggctcccggtattgatggaaataaaaaagggtttcctttcattacggcgtaaacacaaaaaaaattgggggggagcccacccctctgccccaaactgtgtcttaaaaaaaaaacccgccggggggggggtcttctttaacaaccaactttta

SEQ ID NO: 652873 - DNA, 462 bp, Homo sapiens
tacaaggattactactggcatgagccacagcgtccagctccaactttcagaaataaaaattaacaagctgattcggaagtttaaatgtaaatgtagagggcctagaacagacaaaaacagtttagaaaaagagcagagttggaggattacagtccctgatttcaagactaacagcagtaatcaagacagtgtgtaagggtagatacacagatctactaaacagagcaacagccaagaagtagacccatcaatataataagttcaattgtttttttggtttcgttttttgagaaaaaagccaagttgattcagtgggggcaagtttagtctttttacagtctgtaacaactagatgattatgtgtgaaaaaatgaacttcaactcctgattcacactgtatatcacaacctgaaattatagtagatttaaatgtaaagctataaaaactacaagaaaatgggc

SEQ ID NO: 652874 - DNA, 347 bp, Homo sapiens
  misc_feature (19)..(19): n is a, c, g, or t
  misc_feature (220)..(220): n is a, c, g, or t
atcattattttaatcaagnaacttagctgtttaaacaaatccttaaggcagttcaatagggcaaagtgaaggattactctattagggtaacctgagaacaaagttcaggttatgagaatttgtattccattcgaagattggcaccaggctgaacactggtttaagccaaattttttagtgatctagaagccctgaacatgatttccctcaggttaaaagnagaactttataatagaacctcattagcttgacactgagaatgctgagagcaacttagcttaggacaccagtatctcctacagaattccagttaatgaaagcagaacagccttgcggcaaagaatttg

SEQ ID NO: 652875 - DNA, 190 bp, Homo sapiens
  misc_feature (5)..(5): n is a, c, g, or t
  misc_feature (18)..(18): n is a, c, g, or t
  misc_feature (168)..(168): n is a, c, g, or t
  misc_feature (182)..(182): n is a, c, g, or t
agctntttttttttaagntcacattttatgaaccgtttcatacagttgagcgttgaatttgtcctctggtgtgacatgacaattattattcttaagatgtgtcattttttcatcaaaatgatgtgtcatcattctttgtcattcctgtctcacaataatgtgttaccntgtggaaattaagnacaattag

SEQ ID NO: 652876 - DNA, 170 bp, Homo sapiens
ccctccccgggtagggtttgtagacttgaaacccactgtcattaaacagaggctaatgttgaaatagcttgcgcgaattgccagtgcgaacttcatcaatgactgtggattccaagtctacaaacactgcccggggcacatgcttgccagcaccctgtttactacccggg

SEQ ID NO: 652877 - DNA, 206 bp, Homo sapiens
ggttagtcttcttccaggctgatacctatctccaggcttatatgactatgtaatcatagttgggcgtgggtgttgtcgtttttcaatatgaaatggaatcatatcatagtcattattcagcttctctaacctaatgccatatcatggttttccttcttgttaaacaatacacatgtaactattaaaaagaatgagttaaattgtgt

SEQ ID NO: 652878 - DNA, 397 bp, Homo sapiens
tctcgtggtggggatcatgactcatgagcaaagcacctctttcactggtactagccgcaccatttatggcaccctggccaagcatcagtatcactgttctgtggtgcttacacatatatagtatatcattttgtccccacagtggctcaaggtaggcggcttggtaacatgacacccatttcagacgactaggtaagcgaggacagaacggcttaggtacttgtcccgacaacacactagagagtcattcatagatcttatcgtgggtgtacaagccgcctaaggagcccaggcatgtaacgcactgcactgtgtgggcctgtctaccaggtaatactggaacttttcccagtgaaggaagacacaggagaactgtacccttcctacacaggaccaa

SEQ ID NO: 652879 - DNA, 483 bp, Homo sapiens
  misc_feature (29)..(29): n is a, c, g, or t
  misc_feature (36)..(36): n is a, c, g, or t
cctattataaaataatgatgcagggcagncgtgggncgcacgcctgtaatccccagcactttgggaggctgaggcaggtggatcaccttaggtcaggagttcgagaagagccctggccagcatggtaaaacccccatatctactaaaaacacaaaaattagctgagtgtcgaggcacgagcctgtaataccagctactcaggaggctgaggtaggagaatcacttgaacccgggaggtggaggttgcagtgagccaagatggggccactgcactctagcctgggagacagagggagaatccatctcaaaaaaaattaactaatttaaaaaaataacgatgcagtgtacatccttacaactgaatctttgtgtgtgttatttatttttttgagacggattccaagtgattctcctgtctcagcctcccgaatagttgaattacaggcgcacaccaccatgcctggctaatttttgtatttttag

SEQ ID NO: 652880 - DNA, 271 bp, Homo sapiens
gggcaaactgcaaccctaaagattggagagacagacaaggaaatacaggtagtcagggcttcccagaacaaagactcaggaatggaaacttccaagggaaggagtacttgagtaaaaaatcctgaactgtaattgatgagtgctaaaggcccagtgtggacacatctgagagttaaaaattccacggggactcagttacaccccccccccaaaaccctttataagttttatctctagaagctctaccaggttctcccagtgaagatcagga

SEQ ID NO: 652881 - DNA, 282 bp, Homo sapiens
gtgtgcaaagagagcggggaccgaatcatcctcactagtactctcacatctgtccatccaccccgtgatgctctgctcgccttcccagagtagctttcgcctagatgtttcctgacatagaacaaggttgggtgctgggaatgagagtggcccgtgtgagagctgggtaatcagtgctgtgtgtgtgatagaggtgcaagctggcccaggagaatggctggggggtcatggtgagtcatcgctcaggagagactgaggacacattcattgctgacctggtgg

SEQ ID NO: 652882 - DNA, 283 bp, Homo sapiens
tggaaccaatgctccgttcggtgcggccggggccaaaaaaaccggcaggttttttttgttgggaacaacggttattaaataaacaaacaggagtgtgggtccggccccccccacccccccaaaaaaaaggcctttgaaatgggggcctgtttttttgcctggttccccaaggactggaggtccaaggtgaggccggaacccccaaccatattttgctttttgggtaaccatgccccggaccccccacccttttcagcaaaagtcaataaaattgttttggtca

SEQ ID NO: 652883 - DNA, 620 bp, Homo sapiens
ctcataagagtggtggtccctcaatccggtaatcgggatataaacagtcgcgatcaactctccgcgggcgtaacagctcaagctcatatgttacaagcttgggcgtcaacagacaaggaagtcttgctgcaacaatacacatctaacaattagtgaacatccattacttgccagaaacctcattaaaaggtacacatatatagtctcattaaacttatgtgcattagcaaacttgaaagctcagacatgccgagacaatctaattgatcatataggtagaaagtggcagagatgaaaaattaaaaattctgatcgaagggcccagtcttaacgcagtctaacacgcccctcctaagggaaatgtcttctacccctaaggaccaaagcttagagttagtgatatcattccccagcagctctctgcgctttggcatcaggttaagagtatgaaaccagctcgcagaaaaggagcaggatcttgaccgcgggtaccccgggagatagtggccaatttgagccaagggctagaaacctcctctagcatcggacaacacttagcagcctccggagaaaacacctcttcaggtaccggctcgattcgtattctgtctacttttacc

SEQ ID NO: 652884 - DNA, 323 bp, Homo sapiens
ttcttttctgagatatattgactgttaagaaaaattccaggctggctgggtgtggtggctcacgcctgtaaccccagcactttgggttacacgagggtggatcatgaggtcaggagttcaagactagcctggccaccatggtgaaaccctgtctctactaaactacaaaaattagctgggcatggtggtaggcacctgtattcccagctgctcgagaggctggggcaggagaattgtttgagcccgggtggcagaggttgcagtgagccgagattgcgccactgcactccagactgggcaacagagtgagactccgtctccca

SEQ ID NO: 652885 - DNA, 345 bp, Homo sapiens
ggtaagagaagggagtgtgtcctgtgcatgccctttttctgaggttgtgacactagctgtggacccctgccttgagactcatctcatcaatgctggcaacctcttgggttttagagctggtaggttacttcattctttgtggcacgaggcatgtggctctcaaacttcttagggcgcccgaagagtcacttactggatagtgtgaagatattcagagggcctctgtcccctttcattctcaaccacatttgactgtggcattggatctgtggactggtggcaattatgtgaaccttcacgtgttcttgctgtatatattgacatatcttgagatctgcggcttgg

SEQ ID NO: 652886 - DNA, 87 bp, Homo sapiens
ataaaactcgggaggcagaggttgaatgtgatgccgaattgcatatgcactccagcctgggcaacaatgagcgaaactctgtctcag

SEQ ID NO: 652887 - DNA, 82 bp, Homo sapiens
gctttttataataataaacccaaatacttaacagaaaattggcagcttttctggcaaaaataaaccttttgagaggctttta

SEQ ID NO: 652888 - DNA, 541 bp, Homo sapiens
ttccttatagtgactcctagaggatcccggcatgtgctgtagccagcgtaggtgggaaggaagatgtctgtccagctgtttttttatggctgggactttggactgttaggcgccatggtccgacttctgccgtaacactctgatttgcctgccatttgcagggtgatggcctccttctgataaaactgattctaccaatctaaaggggagttgcctgcatcatatgggccgtggcatagctcgcgcaccctgggggggccggtgtcattacgcatcccaggtacgggcaagaaggcggcataggcccccacagcaccttggctgcccacacgacttgctatgccgttagcgatacgaggggtacggaggtagagagacaggagaagcaggcagcgatgatctggaggtataggcggaaaaatgggacgcagcagtcatgggccggtcagcctcttttgtcagcacggttgctgtatctcctagtctcttctagataatcgatggtatcgtatctaccaaagctcctctttctccgggaagg

SEQ ID NO: 652889 - DNA, 101 bp, Homo sapiens
ataggatccccctggttgcgaggaatgctgagtgatacaggcttagtgttgaggaaatttctgcagttttacgcagtcgtgtctgtgattgaccccgtgag

SEQ ID NO: 652890 - DNA, 337 bp, Homo sapiens
cataacataggaacaggaagggctccacatcatactataatgtctcgtggtccacacactaagtgtaggccaacaggcacaggtattggcagtagatctatgtgtttcttgccatccacttcaaacacagagattgaaccttagcgatatatctcatcaccaggtgggtagtaaccacacacatatggccatgtgccggcggagtatcgtacggctcttcatatattttaaaccagaattcacacataatagagacgtcccagccgtgcatattcttcaggatatggcgaatgataccaggtatcaagctcatagcggtcaaaagcacttgtttcaa

SEQ ID NO: 652891 - DNA, 379 bp, Homo sapiens
ccatcgtcagctaacattcgagaggcacaggtctgccaagggtttcctctgcccacttagttccccagtggctcagtgctccttccttggatgttccctggcggtcggtgatgcagaggccgctctccgatgcacttgtgtgactgatcaatgtaaatgctctctgagttttcctcccaatgtcttaaggtggcttggcaagtcctcaaccctctcacactgtctcagggtctctaccctcaacaatattaaattcctttcagccagaaagagtaatgagaggctgacaattggatacacctggagctttcagggctggagtgcccagagcctcctgatgtcagagttcagacgttaacgtatgtcagtgggagaagat

SEQ ID NO: 652892 - DNA, 195 bp, Homo sapiens
atatatatgtatgccataccagtctatctatatatgtacatagaacacaaaccatctataatgatgcctcgatccccagcctagcattacatgattcattcatgccatatctccttaatcatatttgtcctatctttctcctggacagaaaactggctcttgtaacctaccatatatctgcttatttgttcatct

SEQ ID NO: 652893 - DNA, 1305 bp, Homo sapiens
gctggcacaggcggtttacgcatcaggacggttcctactcctcagcatcttccgtgcagttaccagtgtccctggcggggtcatcgactgtgccgtcggtacccttgtgcatgctcctattcaggtctgagcctgctgaggagcagggcatcgccgggactccttgtggtcctccccgaccctcacgcgtcatgctgccataagctgttgcgtcctaaggtgcttggcccacgatgcaggaccacggaggaagctgtgagctcgaccattgagtgcctctgaaggctgccatcatgtcttgtatggtgcctggccttgttgggccagggggccagtccatgtgcgctatagttggcgcccatcgaagtcgtcctagacgaggccagacgattgcgttgtctaaggtagccagcgagggttcgccatcacatatcatctgtgctcatgcatcgcgtctacctagcacttgcgattaccaaagatggcttgtttagtctgggctctggcacctagtcgcctcctgtagggccaggtggtgggaggtccggtggggggccggtaggtcctcgtggtccaaagtcattacgcttagcttgattgtgcgtaggaatgctagtagtgcacgaggtggttcctgacgttgggcggccccttcacttggcgccacgaccgttgaagcgcaggcgcgttgggcgtcagggggagggcgaatctcatgcgcttggggacatgaaccgggaagttcttccaggtgacttgtggtgcttcggtttcctggaccgtctccatgaggcatggacccgaaccctctggggctctcaaggtgttggctgtgcgccgaggtctccctcgggtttccccatcatagtagacgtacagattggggttggcacggagagacccgtacacctagagtgacacgtgcatggcaaactatgggcatgagaatcgagcaaattaccaccggttctatttaacggtatgactggtggaagataagcacaaagtggactaaatgcttgaactaggttttacacaccacactgtattgagcctagaacaaatggattgagaggagacggacacaaccaatggttgaacgggccgaaactactggaagaagcaggctagcactagcagaggacagagcaacaggccaccatcacgcggagaacaaggagacacaccgacgtacataaccgcccacaggaaaaaaaaaaaatgaaaacacgacagaacaaacagcaaaaagaacctgcacaaaaaaccaagaaagcacgccagacaaagagagcggacacccaa

SEQ ID NO: 652894 - DNA, 355 bp, Homo sapiens
ctggtatcctatactcttttaataagggcactaatcccaccaagggctccatcctcataatctcgctaaacctaattacttccccaaagcctcacctcctaataccatcacatgggggattagggctactttaacttgttaacttttaaggtcagaagtacatgtgcaagtttcttatgtaggtctcgtgttgtagggttagatgcacagattatgtcattacacactcttaagcccagtacccattcgctatgcttcctgatcctctttctctacactacaataggccccagagccacttgttcgcctctatgggtccatgcgttctcatcatttagctcacacgttgaggtgt

SEQ ID NO: 652895 - DNA, 296 bp, Homo sapiens
  misc_feature (74)..(74): n is a, c, g, or t
aggtcatatgaggattgtggttgggtgcgtcactcacttcattcgcagcgttaggctcagtttcgcccatttgntctgcgcgcacgcccaccgagttcagcgcatccagcatcaccgacgttctggttgcactgcgcgccttgaagcggccctcggtgtcgcagtcggggtcgtagaggccatcgttgtcctacgagcgcgtgctcagctcgcgaccagcgtgcgggcggtacttgggcgtcatgcgcgccttgagcagcagacacttggaggtcagcgtggagcagtcgaccgcc

SEQ ID NO: 652896 - DNA, 326 bp, Homo sapiens
  misc_feature (82)..(82): n is a, c, g, or t
  misc_feature (88)..(88): n is a, c, g, or t
  misc_feature (96)..(97): n is a, c, g, or t
  misc_feature (294)..(295): n is a, c, g, or t
aaacaagcgggttcagtactcagtgtgttccttatcccttgtagcatttgggataactattaaacactgcaaatataaagtngttttngttttgtnntgttttgtttttttaattggtgatcattttaataataccgtccatgcataatgttagataccaggagggaggaaatataaatagtaaaggtccacggcatggttcacttgcatttaaggaatttacttctcatcatatagacagattcacacctgaccatctatcacatttatggcatactcttgctgtatctagtnnagagggtgggggctttttgtagcaaggctgt

SEQ ID NO: 652897 - DNA, 1574 bp, Homo sapiens
  misc_feature (256)..(256): n is a, c, g, or t
  misc_feature (365)..(365): n is a, c, g, or t
tacagggttaagtaataaaaatttatggaaaattccggggtcgggggtataatctcttcccagccttgagggagggaacaacacgtggtaggaaaatctcacgtggaaaaatctcacgccaggtggtccccaaaagcccccagtttaaccacgagggacggagtagaaagtataattctccccagaaaagaggggcatagctctctcagctctttccttataatctccaagagaggggttcacagggacacaccgnggtgtgtgtggtgggcacccatctcgcatgtgcatcatactgtgggcgcgggggtcataggcgctgtgtgtcctgtggaacccctgtgtgctgtgtgctctcctctcanaacacactgtggcagaaaagcaaagattcacagcttatcctctgcgtggggggggtgtaggagagtatctcagtgggggggagacactataaagaagcgtctcaaatatctctattaatcacacgctgtgtgaagtgacgaggggccgtgagcacactatttcccgcctgttgtgtgggacacacacttttctcaaactacccgtagggagaaggggtactagagacacaacaagagcgtgtgttgctccagcgcccgtgtggcaaaaatataaaccacctctccagaactctctgtgcgtagacgtgcgtggggaagaaaatcggctctctgtgaggaagaatatattctctggggggggctgtgcgctccacacatctctttttgccagaaacattttgagacttgatacgcccaggggggcttccttggcaccagagggtgcgattcctctctcaagcgaccattcttgtgtgagcagcgcctctcggtggcccttcccacctctctcggcggcgcttggcgacaacatttttctctgggcccccgcgtggttccccggggcactttggggctttgtgttctttacacacggaacttttgggtcgcccccggtgtggggcccccccctgtgcgttggcgggccactttattgttccggcgcctatcatacaaaagcaacgcgttagtggtaacaatcttacggggaaaaaagagttccaaggctctcggactacatgcgccaaccattcatctacccaagggatagggcgggtaaaagactcttttggggcccatctcttgtgacaggatcccacgggggagaatcacccagaagaccaccttgaggccccccgtggaggcgacaccacggtggaacggcgttagaactttggggcacaccagttcttttatggagccccctctgcgacaacatgggcggcgaccacaccggtttccagaaatcaagcgccaaaaggcgggagaactcatcaaaagaagccccgcagcactggggtgggacaaacacaccaggggagaagaacccccatggagcgcataggccccacagggagagacctcacggcggcaggagaatccaaaagggcagggaccagagcacagagcgcccaccagatatccaccacaccaaacagcagtcgcgcgaacaaagcagcaggcaacaatcagcgacagctcaatcaccag

SEQ ID NO: 652898 - DNA, 233 bp, Homo sapiens
atgatattcggtcatgaatgatagggcgaaggggctgtggtgtattctgatgttgaatgctgagactagttctggatccccttctgcatggtcgaagggggtcggttgttctctgctagtgtggagataaatcatattatggccaagggtcatgatggcaggatgtaatcagaggtgtacttgtgtatgtgataacgggtgggtgagtgttaaatgtgagccacttacttagt

SEQ ID NO: 652899 - DNA, 96 bp, Homo sapiens
agcatcttcataacataaagtcaagtaaacagcacacgcttgagtgagtatgatgtaaagctgcacaggtattcagagatctagctaagataattg

SEQ ID NO: 652900 - DNA, 177 bp, Homo sapiens
ttattgctttgggactgctatgtgtgctgcttttcatcatggagagtggggcaaaggctgcgagactgtggtgtctgggaaactccgaggacagagggctacatccatgatgtatgtcggatagactgatgatccacagcggacacctgttaactactacgttgacactgctgtgct

SEQ ID NO: 652901 - DNA, 804 bp, Homo sapiens
tacagatgggaggtgagcgacgcagccacagctccgcagctggcaggtggacaggacaggccaggccgaggccaggccaggctgtgactccacagctcagatacagcagcagccctagcactgggcagcacaagccccgcactcagagcaggtagccctggtcttggaagacaggcccacactctgtcctgagttcatgttatgtgcccaggcgtggaagaccagggacagagtgtgccatgtcgacccaagtgacacccagcgtctggcacaataggctcacaacgcaccctgagaccaaatgtggaggacggaaaggtgagggacagatgaaatgatccataggattattcaacaacacatagaccgttgaatatggattagttgatggagacgaatgtttgagataaaagcaattatagaatgatttattacaagcattttaatgagagggggataattgatggtaaagaaactgagttgtacaaaagaaatagtaatcaaaaaatattgaaagcaaaaaaggttcaatattcgaagaacagtaccgacacacaaaaaacaaacaaagtcaaacctacggcaaggcgcgacgattactcagacaaagaacccgaccacaaagggtcaccacatcggacacaaacaaggacgaaccgagctagtacgaatcgtcaggaaacaagcaagcggccaccatcaattagtgcgaggagcgtagacatcaacagaacctagggaaaaagaggagcagcagagagagaagacaagacaacgaggaacacataagctgcgacacaaaag

SEQ ID NO: 652902 - DNA, 722 bp, Homo sapiens
gactgttcatctcaaaagctatacaaacctaggcaaagctatgcaaaaaagaagtagtttagatgtacagtagcccctcttatcaatagttttgctttccacagttttaattacccatggtcaactatggtcctaaaatagtaaatggaaaattccagaaataagcaattcataagttttgggccaggcgtggtggcttatgcctgtaatcccagaactttgggaggccgagggtgactgatcacctgaggtcaggagttcgagaccagcctggagaaaatggtaaaaccctgtctctactaaaaatacaaaaattagccgggtgtggtggcatgcacctgtaatcctagctgcttgggaggctgaggcgggagaatcgcttgagtacggaaggtggaggtggcagtgagctgagatcacaccactgtactccagcctgggtgacagaatgagactccgtctcaaaaaaaaataataatttaagttttaaactggtgcattcttagtagcatgatgaaatcgcatgctgtccagctccatctggcctgggatgtgaatgtcctcttgtccaatgtatccacactgtatatattaccctcccattagttacttagtaggtctcttgattatcagagaagaaaacaaaaaacatactatatatatgatccagtactatccgtggtttcaggcatctactggaggtcttgggaatgtatctccag

SEQ ID NO: 652903 - DNA, 324 bp, Homo sapiens
  misc_feature (222)..(222): n is a, c, g, or t
cgacagatagaatcgagccggaccccccgactagcccgacaggtctttttcatccgtttctctgggcacttgaagaaccctttcaatctggaaactcatgtccttctggagtttggagtaaacttttctgtatggtttatggatgacgcctctcctacatattctttttctctctggagcaccaattattcaaatattgaacacaccgggtttttttttggnatttttttgttttttgtttttatttgttttttgggggagacgcccgggggtatttttggggtgggggcccccaaaagaaaaaaaggtgggcccttccagagg

SEQ ID NO: 652904 - DNA, 139 bp, Homo sapiens
ccccttcgactagccggacagggagtggagggctgtaccaagtgcatcaagtacctgctcttcgtattcaatttcgtcttctggctggctggaggcgtgatcctgggcctcgactgattgcctgtcgggctagtcgggg

SEQ ID NO: 652905 - DNA, 153 bp, Homo sapiens
agtgtgtgatgggctcatggggatttgtaattctactctctctacttttttgtgttagaaagttcataataaataatgttgctcaaaggaagctataaatagttggaggccaggcagggtaaagagcatctcctagattttttattttttttt

SEQ ID NO: 652906 - DNA, 1001 bp, Homo sapiens
gattgttgatgttcgcagaaactctggtgaaaataccagctggtgttcaggttatcttgggaaattaattagaggcaaagcccaaattgttcagtttggcaacaaatgaaagggtgggccaaatctcgtgtgaaccttccaacgttagggggcaccatgtattggaggaacttttgacaggtgaaagccaccaggcaagaatgtgatagaatgattgaaagtacggaataccttacttcatgaatgctaatacaaagaaccagtagctcttctcacagcaaaagaaaagctgacgctggagaaaggttgctcttctgttgttacgcaaaaagtaagtattagataagaatgatatggttgaacttttgggccccagaccatttgcggaaaaatctacgtatgaagaatttgtggaaggcattggcagcttggatgaggacacctcacttcacagaaggccttaaggactggaaacaaggagcgggaaaaaggagataagaggagtcccccgggtgaagaaaagttgccaactagaggcccagagggaggccatctcagtactctccactgtgtgtttcagctggtgcattatttcagactgtggactttcagaagaatgggaatgctgcagctgattattagccagccaactggcccagctgaaatagatgagggaaaggagtccttagtcctttcagctctcagaggtcatcagtgggtggcaggtgactttccggaggaccttgagggaaatgcacactgtgccaccgcatagcctcaacttgggctcccagacgtgctggaaaggttgagcccagagtggccgaggctggaccctgtggcaccaagtggggtcggctgaccgtgtggcagggatcgattgcactggactcttggcgtgtgggaagggatgctttctctttgtcgcccactattcattcctgtttctcctcagttccgccttaaaacgatgggctgtaaatatagtttttttttttttc

SEQ ID NO: 652907 - DNA, 1277 bp, Homo sapiens
tggaaaaaaagaaaagttgagtaagaaggggaagacaaggctgggagaaggtagaagagacagtttgcaatattaaatggttgttcaagccaggcctgcctcattgaaagggtgaaatcttccttcactggaaggaagtgagggaattagtcaagcagctatctgaggaaagaacattccaagtaaagaatatacagcccatacattgttggatgtgtgtacattgaaatttttgtgcagtaaaatgaatatttcatttacctatataatcattttacataaaataaaatatattttgaatgtgagtttgttccaaacaaatcattttcttgccttcaaaaccactgagcttaaagaactctttcaagtgtcattagagatagattccaactacaatcaacattgtggaatccagaggaggcaaaatgaaggaagcagcactcattacaaaatgctgctttgtaaagaattaattctgtcctggtatgtttcacattaggtaatatgaaggaaatgaatatgtcatgaaccctccttgaggatgtgggggaattaaaagtaatttcgcttaatatccaactctcacttttggctttgtagtcagagggaaacaatgctttcccaggttctaaggtaaacgttaaaaggttacaaggagacttggaagagtcaaggaacgcttccaccaactattcctgccattccagttgggagggttgtctgaggggaagtgaaaaatagtttattacttactatatttttggtacaagatctgttatatttttctagattaaaaacaattcagtgaacactgatcctttaaaaaaaagaactcgaggtttataaaatgcctctaaggtgggggagtgggttagtggtaagaaaagcaaaactgtgatgcaattgttgaaaaagccaattattaaggcatcattcatggaactataatacctgatcctaaaagtaatatatccattatactttgcctcagttctatatgtctaactcatcaagttaatttctgagagctgcatttcttaaaagagatgttaaaggtcagggagatcgagactatcctggctaacacagtgaaaccccgtctttactaaaaatacgaaaaaaaaaaaaatagccaggtgtggtggcacacgcctgtagtcccagctactcgggaggctgaggtaggagaatcacttgaacctgggaggcagaggttgcagtgagctgtgatcgcgccactgcactccgtcctgggtgacagagcaagacgccgtctc

SEQ ID NO: 652908 - DNA, 326 bp, Homo sapiens
  misc_feature (44)..(44): n is a, c, g, or t
  misc_feature (251)..(251): n is a, c, g, or t
caacaacaaaggaacaaatgacccggtgtatgccaaaaatgccncagtatcaccaaccgttagggaaatgcaaatcaaaaccgcaatgagagagatcacctcatacctgttaggatagctgttattaaaaaacacaagataaagaatgttggcaacaatgtggagaaaagggaaccctagtgaactgttggtgagaatggaaattagtacagcctttatggaaaacagtatggcggttcctcaaaaaattnaaaatagaaccaccatttgatgcagcaatcccacttctgggtatacatataaaaaagagatgaaatctcgtgccg

SEQ ID NO: 652909 - DNA, 1694 bp, Homo sapiens
  misc_feature (25)..(25): n is a, c, g, or t
  misc_feature (122)..(122): n is a, c, g, or t
  misc_feature (254)..(254): n is a, c, g, or t
  misc_feature (289)..(291): n is a, c, g, or t
  misc_feature (296)..(296): n is a, c, g, or t
  misc_feature (299)..(302): n is a, c, g, or t
  misc_feature (309)..(310): n is a, c, g, or t
  misc_feature (363)..(363): n is a, c, g, or t
  misc_feature (382)..(382): n is a, c, g, or t
atgggcctgctgcttgtcccgcctntctctcccacagcccctgtcttttctgttcaatctcagggtaaccttctcccttgtcatctcagcctgagccctggaggctgggcctgcccactccngctccatcccttatttattccttccagcagggccctcttcccaaggttcgggccagcaggaggtgccggctggagtctccaccatagactcagtggcctggcctccccagaccccagagccaagaacacgangcactcgccggccttcggcaccctcgccctcccannnaaaanaannnnaaaaaannaaagaaaaaagagaaataagtaattggccgcgcgcctcccgtcagtccacggnactacccgggcctcccggngtccctcggcgagtggtaccgcccaggccttaatcacccccattccgtgcggtggtatctcccaggctctacattctcgggagcggcgcctcccaagggggtcctgggaccttctcgcgctcctcctggcctctgagggatgcgtcctacccgcgccatcgccccgtggcccaggacggggacctccccttagtccgtcctcccaccgccgggccctgccccgcatcccggccttatgcactgcccctcccacccggccccgcccaggcacggccgaccccgccccgggcaccgcccaccgagccatcctgcctcgcctccccccacgcctgcagcttctcgcgaggggcggcgacggtcccctggtggcaggaggggctccccctgttgcgggtgaggcggctgctctctattttcagatgttgctgtagaaataaagacggtttaaatctgaaaaaaaaaaaaaaaaaaaaaaaaaaaaaaaaaaaaaaaacaagaaaaacaaaaaaaagaaaaaaagaaaaacaaaaaaaaaacaaagagagagcggggggggcgcgccccaagaatctcctcccccggaggaggagcccaccgcaggacgaccgccccccacgtttgggaggaaagaagaggggggcgccaccacaaggagggcgagggcatacattaatataagagagcgagagcggaggcgcgggccgaatcaccacaaaacggcgaggcgcgcggggacaacagagggaggcaagaggggggaactctggggggcagaccggcggcacccacaaatagctgtgcggggggtcggccggagagaccaaagagaggggggcacaaccacaccacccacacacgagagataacacaacacagcccccgagggagggacaacacaccacaccctcacagagaggaggggaagagcgggggggacaacccacaaacgcgccgaaacaaacgagcgcatcagacgcggcaacagcagacacagtgagcggcccagcgcgggactaaacaacacacatcaaggcgaacccacttatatacccaggcggaggacaacaagagcacaaaaacgacaccgcaccaacagcgaagcaaggcagcaaaggaaagaagcccgcagccggacgcagagagagaaacacgacaaacagccaagggcggcgagaaggcaactaggggacaccaccacaggaaccaacagaaccagaacgcaacagcgcccccaaggcagagatctgagcgcaagtcagcacacgatccgtcaaacaaacacaagcaagccaacagcagcgatcagaagaag

SEQ ID NO: 652910 - DNA, 1714 bp, Homo sapiens
  misc_feature (25)..(25): n is a, c, g, or t
  misc_feature (122)..(122): n is a, c, g, or t
  misc_feature (254)..(254): n is a, c, g, or t
  misc_feature (289)..(291): n is a, c, g, or t
  misc_feature (296)..(296): n is a, c, g, or t
  misc_feature (299)..(302): n is a, c, g, or t
  misc_feature (309)..(310): n is a, c, g, or t
  misc_feature (363)..(363): n is a, c, g, or t
  misc_feature (382)..(382): n is a, c, g, or t
atgggcctgctgcttgtcccgcctntctctcccacagcccctgtcttttctgttcaatctcagggtaaccttctcccttgtcatctcagcctgagccctggaggctgggcctgcccactccngctccatcccttatttattccttccagcagggccctcttcccaaggttcgggccagcaggaggtgccggctggagtctccaccatagactcagtggcctggcctccccagaccccagagccaagaacacgangcactcgccggccttcggcaccctcgccctcccannnaaaanaannnnaaaaaannaaagaaaaaagagaaataagtaattggccgcgcgcctcccgtcagtccacggnactacccgggcctcccggngtccctcggcgagtggtaccgcccaggccttaatcacccccattccgtgcggtggtatctcccaggctctacattctcgggagcggcgcctcccaagggggtcctgggaccttctcgcgctcctcctggcctctgagggatgcgtcctacccgcgccatcgccccgtggcccaggacggggacctccccttagtccgtcctcccaccgccgggccctgccccgcatcccggccttatgcactgcccctcccacccggccccgcccaggcacggccgaccccgccccggcacggccgaccccgccccgggcaccgcccaccgagccatcctgcctcgcctccccccacgcctgcagcttctcgcgaggggcggcgacggtcccctggtggcaggaggggctccccctgttgcgggtgaggcggctgctctctattttcagatgttgctgtagaaataaagacggtttaaatctgaaaaaaaaaaaaaaaaaaaaaaaaaaaaaaaaaaaaaaaacaagaaaaacaaaaaaaagaaaaaaagaaaaacaaaaaaaaaacaaagagagagcggggggggcgcgccccaagaatctcctcccccggaggaggagcccaccgcaggacgaccgccccccacgtttgggaggaaagaagaggggggcgccaccacaaggagggcgagggcatacattaatataagagagcgagagcggaggcgcgggccgaatcaccacaaaacggcgaggcgcgcggggacaacagagggaggcaagaggggggaactctggggggcagaccggcggcacccacaaatagctgtgcggggggtcggccggagagaccaaagagaggggggcacaaccacaccacccacacacgagagataacacaacacagcccccgagggagggacaacacaccacaccctcacagagaggaggggaagagcgggggggacaacccacaaacgcgccgaaacaaacgagcgcatcagacgcggcaacagcagacacagtgagcggcccagcgcgggactaaacaacacacatcaaggcgaacccacttatatacccaggcggaggacaacaagagcacaaaaacgacaccgcaccaacagcgaagcaaggcagcaaaggaaagaagcccgcagccggacgcagagagagaaacacgacaaacagccaagggcggcgagaaggcaactaggggacaccaccacaggaaccaacagaaccagaacgcaacagcgcccccaaggcagagatctgagcgcaagtcagcacacgatccgtcaaacaaacacaagcaagccaacagcagcgatcagaagaag

SEQ ID NO: 652911 - DNA, 1755 bp, Homo sapiens
  misc_feature (242)..(242): n is a, c, g, or t
tgtctggtttgtttgccttggtggggtgctgtggtgagttctgtgtgtagggtggcggcgtgtggtcgctgctgggctgctgttgctgcgctgttgtgtgtatcttctctgccgtggggtgtgtgttctcgctgcttcggttgtgggtagctgccgcaccgacgtgggtttgtggtgggttgtatgtgtgtccgctgccgcactggttgtgctcgtgggggtgttaccagtggggttggctngtgtcgcctcttctttttagttgttcgctcccgatggttgtcctcccaccacagaggtggtgtgtttgtggtcgctccgttgagagatatttgtttggcttctttgtggagctcccccgcgcgggtagtgtttgttgtagtgggggttgctctgccgtgtgtgggtgtccctcgcggggtgttgtttcgtcgtgtcttgcggtggttggttttgcgctcgatgcccttcggtggggtgcgactcccacagcagtgtgtggtggtttgatgtctcctcctcgtcgttggtctgtcctctctgagtgaagttttgatatgaagggtggttgtgtgtcttaagtatgtaagcaccccttcttgtgggtgggagccttgttgtatcggccctgtcgtccgtgttcgtttgttagtagctttttcttgttccacacactttggagggaaggtttgcttccttattaaaaagagttgctgtctttttttgtggaagagtttgttttccctagggagaggtgaaaattttgtgcgcactaggatcctcccttacttcgtatggtggcggttcctctcattttgggggtaaatatgctttggtccaccactgctctggtatgttgggcgcacctaacaccattgtctgcaggaagtctccaaatttgctgcatagttgtcttctcctcctggtaggggtcctcccccccctgggtcttgtgcgtgttttgtgagggagcgtatctatattttgtgcgctctctcacgggtacacctctgttagacgacgggtctgttattgtcgggagcgccccacagatattggcgctcactttcgggggacaatagcgctagccgcactattacagggccacacacgagagagactgtctctatactctcatacagaggcggcagttgagtgtgagagagttcaaccacccagaggggtgcgacaccctactctcacagaagtgcgacacagtgttatgaagaccacccacgagaggtctcagtgtgtgtgagagagagagcgtgtctctctgtggtctcaaaggacacacgcgtgttaacacgtggcgggagtgtgtctccaacagaccacacccgcggtgtgggtcacacacagtgccatccacatgtcaatagagtgtagaggaacctgtctgagtcttgccttgtgaggacacatcgggagagttgtcaaagcgaacacacacacggaaatatgttttgtggagatgtgccccatacccagacatttcgagcctgtctatatttcggttactgaagagttattttttctgtgatagaactagccctaaattctccaggttgctaaaccagaacacatgtgtccacaaggcgtgactcgcaaatgtcccctcaagaagaaattatcccttgccccatggtggggtttgttacccttggtacatgctcgtcaaccctgttatccacccagaaaatgtcccatgtgaattttttacaaagatccataaaatgccagagaaacgaatgt

SEQ ID NO: 652912 - DNA, 314 bp, Homo sapiens
cctcacaactgcgcccgcataaggcgccgtggatgttgcgtggagagcaccgggcgccacaatctacttcacgctgcgtgcaccgaacgggggtggccgaggatcgatcttccagctgtccccatggcacatatccctggctctgggaacgctccacgactcacggcttagtgtccatgggtcaacgattcaaagaatccagtcatggccagtccacgcatccgtgtcggcgcaccgtgtcagagtcctactgtgtgaccggcgcgacccgtcgctgctcactacaacccacacggggccgctagatcgtgtgc

SEQ ID NO: 652913 - DNA, 820 bp, Homo sapiens
ggagagaactgtctcgcgtattattctttttttttttggaagtaggcaaagggcccatatttttaaaaaagtctcttaacatatgtccatcaaaatctggcaataaatacataaaaaccgcgaggcgccacccgtgcacagccccgccggccgggcgccgggaaaagggtgacgcgggacaacaaactatacggggtcagcggaagggcgtgggggacggcgacagaaatggcactaatatagacgacaggagcgtactgcaccacagccggagcccccgatgagcgcggggcgccccgtgacgcccaccgcagggggctaccccagaaaagctcacacaaaacgacatccgtgggagagcacacacccagggataatcacacaggcgactcacaccaagggggatctaggagcgcccacaactcgtgatagccccttagtgagagggcgaatagccacaccaacgtacccccacaaagacacaagacacaaccacacgggcacgcaccccattcgtccatacccaatggggcacaccacaacgccgcgcccaccaaagcagacaagggcgacccccgtgaccacaaccgaccccacccgcggggatcccccccccaaagaccgtggtcccccgagcaacgagttggggcacccccccgcacccaacggcggcaacgtgaccaccacaagaaggatgagcacggcgccccacagagcagcaaccgagaccacgcccacgacaaacggcaccaacgaggaccgaacccccaaggtacccacccaaaggagacgacccaccgcggcgaagcccacaaccggg

SEQ ID NO: 652914 - DNA, 247 bp, Homo sapiens
cttggggccaaaagggcccttttttccagggggaccggggggtccccccctggggttttttttcaaaaggggggcctttccaaaggggaaggggcccctttccctttttaatggtggaacccaaaggttttctttttttgggggacccttttgcggggaattttcccgccggtttttttaccccgggtcccggttttcccttttttttacccccccgggtttttcccttttaggggtttccccccca

SEQ ID NO: 652915 - DNA, 546 bp, Homo sapiens
ggcaggtgtcacccaggagccgccagatagcggtgaggagcggctgcgctacaagctaccccagtgtaggcctgcgagattctgacctcagatagtagccccagatacaatagatagccctagggtagctagatagagtacccttactagaaccggctctacggcttcctgcagagcaccggcagcctcaacccactagctaggccagcttcttcagcaaggtcattgggcatcctacatcaatccgtccaagcacagaccagctcgctgtcctattctatcgcgacacgacaggatgacttccgctggcaccttgcttgcctgccgtccacctctggccacctcgcgcccatctatcggaccctctcttgcctgccgccctgcctctcaccttgctgcctgcgcagccgggccctccaccttgcagcgccagcggatgctctgctcccccttggcttccacccgagggagcaagcactcgtccccgccggcctgccctcgcaccaccactccacccccctcgcacgcgctgcccactcccccctc

SEQ ID NO: 652916 - DNA, 909 bp, Homo sapiens
  misc_feature (9)..(9): n is a, c, g, or t
tctgtctcnttgtaataaaaatgagaacgacatgtatattatcatcatatgcagtacagaaccgacccaaagcaatacacctcatgtgccccacaagcgcccgtgtggactccctcgttggacaataatatctgtgcgcaacaattgctgttccattctcgttaacacactcattccctcctaaaaatttgtgccccccgttcaattttgtttcccccccgccggcacattttatgttcgtgccctcttgccccgacagactttgcttgtccccaagagcgccactggcctttgttacacgccttccctagcattgcggtagcaaacaagtgctgcttgtggcccgctgccatacgtctgataaaagggggccattgttctaatccatacggggagttcctaacccagcgtcgccccacttccgccgggccccccttagtgccaatggctgcccccaacgcctttcccccgatgtaatatcactgggggtaatgataacctggtctgtccgcccaacgaaactttgtttggcctcattcgcgagtaggcccccacctcattgctctggagctcctccctatggactaacacccacatgctcacctactcttatactacataggggcaattaattttctttcagtagcacgaaatcttatatcttttcttctagtgatgagcccttctcatccaacgccaaacacgccttactattcggagaaccccctccctatactccgtggggctctaatatcatgatgccgcccccccacctgccactaacaacttgtccatggaccccgtatacaacacttcaaacattcttatacccaaagaaaggtacagatggaaccccccccacggggtttagcccaaaccagggcccccctaattttccccacaaaaaca

SEQ ID NO: 652917 - DNA, 290 bp, Homo sapiens
  misc_feature (23)..(23): n is a, c, g, or t
  misc_feature (48)..(48): n is a, c, g, or t
  misc_feature (59)..(60): n is a, c, g, or t
  misc_feature (275)..(275): n is a, c, g, or t
ttttctcccacaaaaaggggggnggtggttcgcgactgtaaatagggnctttgggaggnnaaggcgggcagattgcttgaggcccggagttcgagaccagcctggccaacatggtgaaaccccctctctactaaaaatacaaaaattattgggcgtggtggtgcacgcctgtaatcccagctactccggaggctgaagcaggattattcgtttttttcgatgttgtaactgagggagttatagagagaactttttttctgcagatactcagcagncctggattggcagcg

SEQ ID NO: 652918 - DNA, 200 bp, Homo sapiens
gatcctgagctctgtccagtgacgcccagcatactgcgcccgacggggtcagcagcgcgtcatggtctattcaggcgctgttgggctctggttcccgtgatctccgtgtcccgctccaccagtcttcagggagcggcatggggtccgggtgcgcctggccaccggcgatagccggggagtctggcagagacatgggaggc

SEQ ID NO: 652919 - DNA, 320 bp, Homo sapiens
caggtctagatttgagagagacgcttttaactgactgccccgcatcaccggaccgtcccagctgcaaggagtgtaaacaggaacatcgatcattagtgtacaaacttgcacaatgaaatcccaaaccaaggatggaaaggaggaaagcctacagactgctttcaaaaaattaaaagtggatccatcagggtctgtactatctttgtctgttgaaaaaggcacaggtttcaaaccaccaatcaaaacaccaacaaatgatcccaaacctaaaaccacatgttcatctaaagactgttggcacgtatctacaaggaattctt

SEQ ID NO: 652920 - DNA, 879 bp, Homo sapiens
gcaggcgtctgtaatcccagctgcttgggaggctgaggcaggagaatcacttgaaccctggaggtggcggttgcagtgagcacagatcatgccactgcactccagcctgggcaacaaaacgagacttcgtctcaaaaaaaaaaaaaaaaaacttagaattgggatccttgggtcgggttctcccaaattctttggaggtgtccagggtcaacgggttcagcttggtttgggcaacccctgttgcccgaagtcgcatataggcggttcttcacctggtttccaaggctgaggaacagaaagtagcctctgtttggaggaggtggaagttaagtatacatttattttttacggtgactgtgttcaggaccacattttacaaaatgcctggtttccttcatggtttctgggaaaggaaagttctattaatatggttttacttggaatatagaatagtttttttaaattagggcttatttggaaaaattcggagtttaattcaaatgtttgccaataccttccaaagtaggtaatattcagagaaagttgtgtgatcagatgggttagagaaattttggaatattcacattcgaagattcttattatgaatgtcttgacttaatttaccaaaatgacatatcttgggcctttcattatataggtacaaagttaggtgcaacaataaattgtaggtattaaaaaagagaaattcaatgaatctatagaagagagagtaattaaaaaagcaaatgcatccaaaaaacaaagggggggggtatactcggggagataaccattgtaaggccgagtaaaagggggagaagagagaaagggttggcctgtggagacccacccaatttttggggtggtgatcttaattgt

SEQ ID NO: 652921 - DNA, 429 bp, Homo sapiens
gccgatgcgcgcgaagagctccgcgctgccggctggagctggttggacactcgcggccacctacggctcgccgccaatggactgctggtagacgcgaacgtgccggctgccatgcgcgcgccacgccggcgcgaaccgttcgccggtcaagttggcatcgaattagcgtcagccatgctgctcacacccgaccgcgtggtctccattcgtcccctcgccacgcagatcgaccgcgcccccagctcggtatccgacacgattgccgcgttccgcgacgccaacctgatcactccggccgggcaccctagaacaccagagctcttctgggagttagcgtcacggtggaagcccaccgacttcgccgtcgcaaatgagccgcgagagggtggcctgcttaatgcactgcggatgaatctcgacgacttcgac

SEQ ID NO: 652922 - DNA, 482 bp, Homo sapiens
aagaagaatagagagataaggatgtaagtatacgtcggattatatggaagagtcaggaaatatataggagataaggttataatagataaatggtctgaaaggatatatgagctatcgtgaacacaggtatgatcaggagagggaaagctggaaggcggataatggagggagggcaactgacgttttactgtatactcctttgtaccatgtgaatgtattaacctattcgacaattagtttagaaattttttttgaactattcaaaaggtatacattgtccttaggggaaaggtgtggtagaatttatagaagaaacaataaattttgtcccaaacccattatccttcccatacccactctgtaaggccactgctaacacagtctctgagcctgacctgacccaggcagggccccaaaagttctgcagtactggtcttgcttcctcaagaaaaacaaatcctctttctgagtattgtataaag

SEQ ID NO: 652923 - DNA, 1234 bp, Homo sapiens
  misc_feature (69)..(69): n is a, c, g, or t
  misc_feature (73)..(74): n is a, c, g, or t
  misc_feature (77)..(77): n is a, c, g, or t
  misc_feature (79)..(79): n is a, c, g, or t
  misc_feature (82)..(84): n is a, c, g, or t
  misc_feature (127)..(127): n is a, c, g, or t
ttattaaaagaatgtttcattaatgcattgataagaaaactaggttagttgcgagggatgtttctggtntcanncananaannnaatttctactgctactaccaagaggactggctcagtggtggcnaaatactggtgatgctccctagagcaggaggcccggaagtctgacgcagccatcagcctgccaagattgttttttaatcttcacagtgttttaaagaacatgttaaaaaaaaaaaatctagtgctcctgctgtcaagatttctgtcatggaaaccttgtttgagaaaggtgttaataaaattctattgcaaaaatttctttttctagaaaaaataaatacaaaaaaaaaaaagaagaatttccaaagtaattaaaatttttctggagacaaacaaaaaaaaggttggtcttaccatattggattaaattaaaatttactccttaccatttttcttaaagggtatttaaatttttaaagtgggtccccgggggacgtattggtatgatacccataattggtatattttatggtacgaattcaatttttttaaaccaggtacccaattatcttttttggaaaaaattacctttttattggttcttttggtttctaccaatcatttggtcgaataatttggaagtccataatagcgatatggataatggtgggaatggtcctaaagtggtttttattaacctggactttattttaaaccctaacggagcatgtatccagtctacctttccatccagtgggggggagttctgcggaagaaattaaacctaccctttttaattttcaaatcttagccaaagtgtttctcagcggtttacggttccagtcggtcgcacagcaacttcttactaccccttctttaacatctcacctggaactggacaccgagctcccttggtaatataatttcgggactaatttcaccgtggtggcactcttggctctgtgtttcgccgacaattgtgccgcagggcttcaagatataccccttaacactctttgtggtcaccccgggaagcgcaaatgtgttatatcggcgagcccgaagcttaaaagggggaagccttgggcctgaacacggcaaacggccttatggtggttgtcacatacacggccgtggggctctccccgactttataaaacatttgtgaaccatttgggcactaaattaataaatcccctataataaaaaagcgccccaaaaattacgc

SEQ ID NO: 652924 - DNA, 160 bp, Homo sapiens
atgcacatctgagatgcatacaacaactgaacgatctcatcacggaaagatcatctgagatgagctgagaggacgaggctactccatggccaccagacacagcatctgcagataggatggttctgcatcacgtcccggatgatcccaaattcatcgaaat

SEQ ID NO: 652925 - DNA, 148 bp, Homo sapiens
gaataaaagggtcctctaattgggtataatccaccttgggttggccaacggtggggccaccggctacttcaatggaaaccagaattctcaagagagcgggattggggggcaattaatgattttttggtgaacctggggggacgttaac

SEQ ID NO: 652926 - DNA, 269 bp, Homo sapiens
ccccaaaagaaaaaaaaagaaatattaaaaaaattataaaagcagaaatcaacaaaatagagaacactcaaataaaacaaagaaaatattaaactggctctttaaaaacactaataaaatggacaaatccatcaagactgacaaaggaaaaaagagaaaattttaagcaaaatgcagaatgaaaaagaattatgaacaatcaatgtgataacaatggatacagttctggaaagagtatatagtgccaaatgtggtaaaagattaactca

SEQ ID NO: 652927 - DNA, 638 bp, Homo sapiens
  misc_feature (38)..(38): n is a, c, g, or t
  misc_feature (95)..(95): n is a, c, g, or t
  misc_feature (101)..(101): n is a, c, g, or t
  misc_feature (112)..(112): n is a, c, g, or t
  misc_feature (169)..(169): n is a, c, g, or t
  misc_feature (220)..(220): n is a, c, g, or t
  misc_feature (321)..(321): n is a, c, g, or t
  misc_feature (335)..(335): n is a, c, g, or t
  misc_feature (344)..(344): n is a, c, g, or t
  misc_feature (357)..(357): n is a, c, g, or t
  misc_feature (600)..(600): n is a, c, g, or t
acataaaatcatatcaacccttttagataaatacaaanggacaaatgaaatacacaaaaaacaatatattttaaaaatccactgttagtttttanaaaaanatttagcagtntccattaagcactacatcccactattgcgcatttttaggaaggacagatggcttganggcgcataggttagcgcaggctgcttgtttggtctttaaaaatggcaagtnagtcggctaagcattttgcaaataagatttgcaagcataagctgctgagcaatggcgcagcaggagcagcagcagtttgggctccatgtacacgtaccctngggacagttggcantccccaggnctgctggcgcatngccaagatcagggccccaagggccattgcaggcaccagggcacaatgctcctggctttgcctgacaactgggcctgctttgcttatttaccttagtaggccttgccaggtaactgacactggtgtttgaacgcttaactttgcacaaagcttgtttaggcaaataaaatatgtgcatactgatgctgggaattttgttactaattttttgcgcgcttaagttgcaaataaaagctaaggagtngataaaagggctattctgaacagaaaagtaaaagccaa

SEQ ID NO: 652928 - DNA, 132 bp, Homo sapiens
aagagccaatcagataatgcctcattaccctgtgactataaaacctgccccaactcccagttcaaagagacagatttgagtgttttctcccattttcttgccaattggctcacattaaacctttctcactgc

SEQ ID NO: 652929 - DNA, 202 bp, Homo sapiens
cccccccccttttggggattttcccccccccttttttttttttcccaaatttttttttttccacaaaccttttttagtttttttccttcaaaaaaaaaaggggctttccctgggggggtttttttttgaaatgggcaatttttttttttaggggttttaaaacccccccccaaaaaaaaaatttgaaaaaaaaaatttttta

SEQ ID NO: 652930 - DNA, 914 bp, Homo sapiens
caggtcccacgctttgtcatctctgcctaaatgttagcttctccatcctcaccacatgatgacctgctgtgtccctctgattactatccagtggtgaaaactctgcgaatgggccacacttttgcaaatatactggtatctgacacttaggtcttgttggaagaatttcctttctggaaggtgtttacaagaagactgatagattctttcgagcccccgacatcacaggcttagggacggcacgtaactcactcccaggatctaactgggtagttcaaattatcactcttttaccttcagtataagcagtgtctcccccaaatcttgtgtcccttcttgtcacttgtgatctgctatagcccctgtgtcattgtcgccgcatagttcgtagtctttattttcgcaatcctatctttctaatatgtgctgtcttcaacaaactgtgttctgtgtctgtgctccatcacttccctctcaagacactggaagggcaagtccttcttccctttggaatgtactctggatcccttctcgctgctttgagcgcccagaatttgtccatctatgattgcttctccatcctggatcttgacatttgtcaaccccatctgggcttcctcaggtgccatcagtacaaatgctgagaactctggggtcctatcctccatgactgagattttgtcaagtggtagcttatcaactgcctttccttcactggcttctcctgatccatggagatggcttcctccactctctatctaaagggtttccagatacactgagggcccctagggccagtgatggcctcgagcccgtcctcccccttgttttgtgcccccggtagaccgttacacgcacccgggcttacgccgcaatcaagaggggccacaccatcgcctaaccccagcgactcc

SEQ ID NO: 652931 - DNA, 891 bp, Homo sapiens
taatggcaaaaaccacaattactttggcaccaacctaatatttaataatgggagttaaaggccgggcacattggctcacgccgtgtaatcccagcatttggggaggccgaggtgggtggactcatgaggtcgggagtcgggatcagccgtggccaagatggtgaaaccctgtctctactaaaaaatacaaaaaaaattgggccgggcgtgggtggtgggtgcctgtagtctcagcttcctgaatggctgggactgcaggcgcgccacacgctcagctaatttggtattttaagtgaaatacgaaaattagttttagcgaaacgggttctcaccatgttgggccaggatggtctcgatctctttgacctcgtggtccacccgtctcggcctcccaggtgctgggattacagacttgagccaccggcctggtgaacagttacaaaatcttaaagcaaccagtggttgcgacactttatctttacacaagcaagaaaacggctgggcgtgatggctcatacctgtacccagatcttggaggctgaggcgggatgattcctgaacccagggagttttgggacccggcctgttacgtatgaaccttgtcccagtcgcacaattcgttccttattaacaacaaacgcacggcagatgtaactacctctatattcacagggagccaaaatgctgacggttatgccaagaattggccatcaacggttcagagagtcacctctcaaagcagaggacattataccgccaggaatctggcaggatcgtagtgagaggcacacaagacaggggtcgtccacattaatcgaggtggcctcctacatcaagttgctgtgtctgtgctgtcagtctgtttttgtgatctcatgagcacgcaaaaaa

SEQ ID NO: 652932 - DNA, 895 bp, Homo sapiens
  misc_feature (41)..(41): n is a, c, g, or t
  misc_feature (44)..(44): n is a, c, g, or t
  misc_feature (103)..(103): n is a, c, g, or t
  misc_feature (115)..(115): n is a, c, g, or t
  misc_feature (126)..(126): n is a, c, g, or t
  misc_feature (131)..(131): n is a, c, g, or t
  misc_feature (134)..(134): n is a, c, g, or t
  misc_feature (141)..(141): n is a, c, g, or t
  misc_feature (148)..(148): n is a, c, g, or t
  misc_feature (164)..(164): n is a, c, g, or t
  misc_feature (177)..(177): n is a, c, g, or t
  misc_feature (184)..(184): n is a, c, g, or t
  misc_feature (186)..(186): n is a, c, g, or t
  misc_feature (216)..(216): n is a, c, g, or t
  misc_feature (226)..(226): n is a, c, g, or t
  misc_feature (245)..(245): n is a, c, g, or t
  misc_feature (248)..(248): n is a, c, g, or t
  misc_feature (258)..(258): n is a, c, g, or t
  misc_feature (278)..(278): n is a, c, g, or t
  misc_feature (280)..(280): n is a, c, g, or t
  misc_feature (282)..(282): n is a, c, g, or t
  misc_feature (284)..(284): n is a, c, g, or t
  misc_feature (299)..(299): n is a, c, g, or t
  misc_feature (304)..(304): n is a, c, g, or t
  misc_feature (322)..(322): n is a, c, g, or t
  misc_feature (325)..(325): n is a, c, g, or t
  misc_feature (334)..(334): n is a, c, g, or t
  misc_feature (339)..(339): n is a, c, g, or t
  misc_feature (343)..(343): n is a, c, g, or t
  misc_feature (345)..(345): n is a, c, g, or t
  misc_feature (357)..(357): n is a, c, g, or t
  misc_feature (359)..(359): n is a, c, g, or t
  misc_feature (363)..(363): n is a, c, g, or t
  misc_feature (375)..(375): n is a, c, g, or t
  misc_feature (405)..(406): n is a, c, g, or t
  misc_feature (412)..(412): n is a, c, g, or t
  misc_feature (432)..(432): n is a, c, g, or t
  misc_feature (435)..(436): n is a, c, g, or t
  misc_feature (453)..(453): n is a, c, g, or t
  misc_feature (463)..(463): n is a, c, g, or t
  misc_feature (467)..(467): n is a, c, g, or t
  misc_feature (475)..(475): n is a, c, g, or t
  misc_feature (493)..(493): n is a, c, g, or t
  misc_feature (503)..(503): n is a, c, g, or t
  misc_feature (509)..(509): n is a, c, g, or t
  misc_feature (511)..(512): n is a, c, g, or t
  misc_feature (519)..(519): n is a, c, g, or t
  misc_feature (531)..(531): n is a, c, g, or t
  misc_feature (539)..(539): n is a, c, g, or t
  misc_feature (542)..(542): n is a, c, g, or t
  misc_feature (544)..(544): n is a, c, g, or t
  misc_feature (552)..(552): n is a, c, g, or t
  misc_feature (555)..(555): n is a, c, g, or t
  misc_feature (559)..(559): n is a, c, g, or t
  misc_feature (563)..(564): n is a, c, g, or t
  misc_feature (876)..(876): n is a, c, g, or t
ctctgcactatgtcgggtggcctcctgaaggcgctgcgcanganctcctacgtggagctgagccagtaccgggaccagcacttccggggtgacaatgaagaanaagaaaaattantgaagaaaagntgtangtnatatgtnggaaatntttctttttaaaaaantgaagaaaaaatntatgaantnttaagaaaaagtggtgaaataaagaaaatnattatgggtntggataaaatgaagaaaanagnatgtggattntgttttgtggaatattaatnangngnagatgcggaaaaagncatgnggtaaataaatgggaagngtntggatgaangaatnattngnaaagaatgggangnaggntttaaggagggnaggaaataaggaagtgggagatatgggggnnaggttngggatgagtataggaaggantannatgctgggagaggaggntatggaaaantggnaaagaaanagtaagtggtgagaaaantgtaagtaanaaaaantnntttggantgttgaatttgntgaagaanatnanctaaagtntgnacangagnncatttttaccaagatttgatcagtgtctttactgagctggaagcctctgaaagttattaaaggacagaatccaaaagaatgcctttaattcttgtctgagaatcttggccatgtgtcagattatcagaacaattttgttaccaggtcagaaattgtgttctttgacaacagattggatctgtaatgttgattagtctttagccataaccactacactttttagaaagacagaaaaatgtaagaatttgtttttaccataatgagtcttaagtaggttcatgatctacattggggcctgggattatttttttnattttaagtttgcatgaga

SEQ ID NO: 652933 - DNA, 922 bp, Homo sapiens
taaggttggagggggaatgctggaaatggtaatgggtatggaaacttgtcatataagtaatgctagggtgagtggtaggaagtttttccataggaggtgtatgattgggccgtaccggaatcgggggtatgctgtccgaattcataaaaacaggggaggttagaagtagggtctgggtgacaaaatatgtggtgtagagtttcaggggagagtgcgtcatatgttgtccctaggaagatggtagtggtgagggtgtcactcataataactgtggtgtatcggctatgaagaatagggcgacggggcctgcgcggtatcgatgttgaagcctgagactagtcgggactccccttcggcaaggtcaaagggggtaccggtggggccctcaggctaatgtcggcaaaatacaatcatcatacggggccccaggggtcaatgaaaggacagagagtacaaacaagaggggggtccacaaggtccacgcgcacaacgggacggaccagcgtacaaaggaagcaacaacataaacaacatgcgacaactcaaatgaaagaataaaggaagcatcaacactcatacaacatcgacacgcacgaaaaaaaccacgacaaggcacagcaatcacagcaaacaccgagatatgaagaacacccacaaaaaccagaatgagccaaccgaacacagaacagacaggcggcaagaaaaataagagaaacgccaacgataacgaacaccaaagagcaagaaaggcgacaaggacccaaaacaaaccaagacaaggacagaaaggcagagagagccaaaaacccaagaaaaaaaaagaaagagcaccaacaaagaaacagaaacaaacagacacaacaacaaacgacacaacaagacacacacaaaacagcagaagaagaacagtagagccataaag

SEQ ID NO: 652934 - DNA, 688 bp, Homo sapiens
  misc_feature (99)..(99): n is a, c, g, or t
  misc_feature (115)..(115): n is a, c, g, or t
  misc_feature (125)..(125): n is a, c, g, or t
  misc_feature (164)..(164): n is a, c, g, or t
  misc_feature (597)..(597): n is a, c, g, or t
  misc_feature (614)..(614): n is a, c, g, or t
ctgacgggcacagaaatgggggacataggtgctctcaaggtggaggtaactctctccaattgctttctgggtaatgaaaaggaatccaaataggtgtcnggtcatctgtgtggtngatttctgcngtctccctttaaagactgtaactgagaaacaaccatctntccacctttgcaataccgttcttttacagggcacttactgtccacataacacaaccaccaacatttaaagttcctcaactacattttccattattctcatggtttatctagaaaaaagctggtgaattatacatagataatcctgttacaccattcaggctgtcctgagccatcacttacagacaaagactttatatactattatatttcatttcactcctgggggccacattgccctctaccctctagtccaaggtatagctcttccctgctcacttcaggatactttctaggctctctgcctttcaatttcaattcaggtgaggctgccctcctagcaggttcctaacatccggtgctatctagtctccagcactggggcagctctcttcaatcaccccaggcatccaactctgtagtctggccttggaancatcccctccagcctgnttctcatgtgctgcttctcaggggatctttgttcccatcccactgaatctcacatattatgttatttcttctga

SEQ ID NO: 652935 - DNA, 169 bp, Homo sapiens
agctaaggcgcttgttggcagtgctctgctgttaatgagaaaagtaagaggagatgccagaaacatgcccctataaattcagccctcacctggacaatgttgacaaacaggtcccaaagcctggaagggtagtactacaaatgatccaccaaagcaaagacctgggtcc

SEQ ID NO: 652936 - DNA, 845 bp, Homo sapiens
agcggagggggaaacagacgccggcgctgacagggccgtcaggccctccgccgcgcggaggccacctgaaggggacagagctagcctggcccaagtctcgggtctccgggggcaccgagcccttatgatctccgtcattgcaggtcccccatctgcccactggaacttggacgtaatcagatctgacgctccagaacctggccagcataactcgggagggccgcagctcccccgccacatccagtcaagatgccatatgcctcggagatgcatactggtgtccagctcgtgatgcatctctcaatgcgtccgttcccgaggctggacctcacaggtccgagatgatcagtcgccccgctgggtcgtacttccgacatcatcagtgcgatgttggacgagccggatacgcctttggggacagctctcttcctcaatagccaggttggcgagtccgatgacaagtccttggacgaacagcgctcttcttcagtcttccaaatcgcagccgccgtgtaccaaggatagagcccggggctagcaaagcggtcacagacggggcgccagaggggagagcgggagcagcaggtggacatgcgggggctccctgcgggactcggccctgtccgtacaagaatgccacagtccctgccccagcgcaatgagaaaggagggccgaggacgaatggggcgccacgtaggctgtcgcacagcagcctggtcgtccacgcccccgacgaacgaacggccaactgacggggacggggcggcgacgctgaggccacggccagggaggaaggcagagaccccggcggattagggccgcggtgcactacccgaacacgcta

SEQ ID NO: 652937 - DNA, 704 bp, Homo sapiens
agggtggccccttccggctttgaaatcaccgttgggtccctcataaattcaggcccagcatgagcgggaaaattaaggcgtaggaaaccgggctcctgttaaagtttgcacggaaggttctcataattgcggacgtgactaacctgggcagatctaagagcgtttcatgtcgtcgaccattggagtgctcgcgctcatcgcatactgtatcgagcaggctcgaatgctatcaagcaggcagatcttgatcatctatcgcctatgttgagatctctgtaagctgctgacagcatggaactactaactgacttcattgagctcaagccagtcctggtctcggcaatgtcacgttgcgcaggaccagtttagggtctcgagtcagcagtgcatgcgtggatcagtcttcagtatgcaccttacatctgtttcatgcccaaactaacagatctcttgtacagaatccaacgcctctagatgcggcttactccacatgtccttggcctaataagttacactatgccggtgttcatcatgtaagtcagctccttgtgctgcccgttgccaatctgatgcagtctagtcgattaccgaatccatagagctcccatacatgggccctgtagtcctgactcaagctcctatagaatgcgacacgcctgcacagcatcctaaaatggcaagtctaacagacgcgtacatccgag

SEQ ID NO: 652938 - DNA, 273 bp, Homo sapiens
ttcaggtaagcaaaattttactactggggttatgttccctttcctcctttgattaggcctgtcccttggatgggctcccccactgaagtttttaccaatggtagtatttggatgcctgggcccactttttataacttttctgcatagccttaggaggggggcctgtttattaatgggataattggggtttaataccctcccgttttttttgggattggttctggatgtttgccctttccaattcaaagttgggtggttttggttcctccccca

SEQ ID NO: 652939 - DNA, 843 bp, Homo sapiens
gagtcgccgccagcgggcgctccccgcccaccggcggctgggctctggggctctgcgcactgacttggggccggcgcgggcaggcgggcatctggcggcgaggccgggacttcggggcccctcccgggcgagtcgcggggcggcggcgggaaggggcgccgcacggaggaagtgccctcttggccgcagcagagccgcgcgcaggtgccgcgatgtcgtcctgccggggcgcgaggatgcgagggctgggggcgcgtggtggccgcggagccgtggatcaggagctgccaggggcccgggagcagaagcggggggacgacgccccagaagtgcagcagctcagcgcctggaggtcttaaggggtctcccctgttggccaggagcggtggctcacgcctgtaatccaggcacttgtgagaggccggggtggacaggatcacgagtatgaaaaaccttctcctgggcttatcagggtggctggcaatggtcggtcaccgacaggttacaaagagtgcctttctttatcaagacacccatgttccaccgttcagagtagccctgagatttctgtgtgacatctacgagacataacacctgaagatggtgatcgccgtcaacagtcgcggatttactccggagatagagcggtcagtcctgagtagagcaaccgaaagaaagaagaacgttaagggagacagaaacgaaaaggggcattcgcaaagtggcacaggaggggggttaaacttcacgccgcagagaacgaacgaaaccagattgtgtgccccctgtgaaagcgtgttaaattccttctcttctcgttttgcttgctatcttcctcccggg

SEQ ID NO: 652940 - DNA, 358 bp, Homo sapiens
cctcacagtgactctgtaaggaaggtaaatgtcattgctccccgttggtggggaacacagagcccagagtggttaaaagtttggccctaagtttaacccaaaatatgaaggctcacttggcctacaggagagaatcctccatacacaggccatttaaaaaaaaaaagaaaaaggttgagccaccctgtcactcttctctcagatgccatgaaagccttcttccacaccgtgtccctacatctcgtgtggaatattataagagccatatctctttttcactatggccaagagagaatatatgaagctcacgtgagtgtctgcacgagcacttccatatatatatctgatgcgatgtgag

SEQ ID NO: 652941 - DNA, 446 bp, Homo sapiens
gatatgtctgtcgccagccgatgcagatgacgtgatcttggtcatgcaaactccacctcccgggtcaggcgatatctcatgcttcagacctcccgaatagactgggacatataggcgcccaccaccacacccagctaatatatgtatatttggtggagacgggatttcaccatgttgaccaggcaggtctcaaacacctgaccttaagtgatccatccgcctcagcatcccacagtgctgagattacagagtgagccaccgaacctggcctcatgtctatgtcattacctacggctttccccctctttctgcgtatactacaacacaaaaaacagaatgaatccgactctgtataccattatacatgatgggaaactcagcttgtatgacggtaggtatacaggcacaattagcaaatattccttgatagtacaatgagtttgcag

SEQ ID NO: 652942 - DNA, 1529 bp, Homo sapiens
aaagtgtaatatacatttaatagcacattataaagttcctgaccaaagacgttgattccctaatttataattaggcacagaaaactccttataaaattataggtaaagcgtaattaagaactatctcagaagttaagtgaaaaaccaatagtgataaaaacaaaaatcctccagtaaagagaggaaccgtggtccattgtgagaagaaaactcacaatgtgagaaacttgtgcaaagtgagacacagagggaaagcagtggcaatgtgggaaacgtgcaatagaaaatacactatagcgagaaacacaaccaatttagagaaagtttatcagccagccaactagagatattataatatatctcgtgacagtgccacagtggtacgaggtgtgcactcttcttcattcattacacaacactcactcaaaagagggtgctatatagtggggatttattcttatactctatcatacatttataacccccgccgacaacgagcgcatctcttatatataggcatatatacacttctataaagtggggagattttctcttgtatactatctcgtgcatatacgatctcaattataacacagcgtggcgctataaaacaagcgtgtgtcccaacagtggtgctgtacaacatgtccatatacagacaagagcaatattttatcagcatgttctgctacaacgaggaatattacagacggtcgttaccacgaaacacagagttgtggcacgtgacaaggctcttatctgctacaaaagagcggcgttacatcaacacgcgtggcaacaaaacgaagaaagcggtccccagggtgtaggaacagtaccacaaggggggtcattgtggacacaaacacaagatgtggcaacataaagccgtctccgttaaagaactccgcacgaggaacagggcgggggcccctccgtccccccatagtattagctaaacgagtagtcacgacaccacaccgacgcggatcgggcacacaacccccccaacaacgagtgtggtcgtaacctcagctaccaacagagaggcgagaagcccgcgacaacagaacaccgacacagcgtggagcaacaccacgtgggcgggcgccaaaacactgtgcgtacacacacgagcggggtgacgatggagtagaaggaggaggaaaacaccacaccgacaacagagcagccaacaacccacccattacgacaggggaggcgccaccaccaccggaggaggtcaattaaatcaaccacgatggcgcgtggacaaaacaccgcgtgatcatacgtgagacgtgtcgggtggtcgaaaacaacccacccaaggggggggggcacgacccccgatacagtggtgaacaaccagcgccaggccaacgtactaattcatctgtcagaaacgagcggatgacagccgacgacgtagtgaaccaacgacgggcgaaaaacacgtggagcgggacgaagcgagttgtttgataacgaacgaaaacgccgcactcgacggaagcatacggacgccc

SEQ ID NO: 652943 - DNA, 117 bp, Homo sapiens
gctgaagcatggtatatagctggactgggtacttgcattaactgcacacaacaaaggcctttgataaggacacagcagagtctatcatgatgaactcaaaatcaaaacagttcagag

SEQ ID NO: 652944 - DNA, 634 bp, Homo sapiens
  misc_feature (48)..(48): n is a, c, g, or t
  misc_feature (93)..(93): n is a, c, g, or t
  misc_feature (172)..(172): n is a, c, g, or t
  misc_feature (249)..(249): n is a, c, g, or t
  misc_feature (357)..(357): n is a, c, g, or t
  misc_feature (367)..(367): n is a, c, g, or t
  misc_feature (396)..(396): n is a, c, g, or t
  misc_feature (426)..(426): n is a, c, g, or t
  misc_feature (430)..(430): n is a, c, g, or t
  misc_feature (460)..(460): n is a, c, g, or t
  misc_feature (464)..(464): n is a, c, g, or t
  misc_feature (496)..(496): n is a, c, g, or t
  misc_feature (515)..(515): n is a, c, g, or t
  misc_feature (517)..(517): n is a, c, g, or t
  misc_feature (521)..(521): n is a, c, g, or t
  misc_feature (540)..(543): n is a, c, g, or t
  misc_feature (583)..(583): n is a, c, g, or t
  misc_feature (601)..(601): n is a, c, g, or t
ttatttggtatacacttaatactgccaacatgcataacatatgccagncaagctcatgcattattggaagagaaaagaaatgtgatgtaactnctatattgtctgattataaattcattgcttcagtcagttttctttcttcagggataccatttacctgtagtctgctgtnggggaatctgagtctgatgtggcaagtcctgctgcgtttgcctcaatggcatgtttgtcctatcatagttgtctgtntgtcacgggggtatgatttccccagtccccgggtggaacacaggaagcgttgcccggggccatgctatctctcttttcttggccatgtctcgaagctccttggcaganttctgactanccctgtcatgcaccagttggctgtctggngtctgcctgtctctcttttccacgccttcncgtnggcagcacatgatataagccagtcttaganaaangaccagtgccactgccgagggcacagccagtnttattaggaaatccgtgtnanagtntctgcttttcaaagaattnnnngggggtttgtattctccaccatcaggtaaaatcccctctncacgaattacttcctganaggtggacaattgctttgttttatcaaccaatg

SEQ ID NO: 652945 - DNA, 118 bp, Homo sapiens
ccccttagattacctcaatccagctctcccccttgttacttttccttgaagccctcctcagtctctaccttttctcatctcacaacatttctaaattctaaaacttcacctgccgtgg

SEQ ID NO: 652946 - DNA, 129 bp, Homo sapiens
aacactggccgaattaaaaacaatatcgaaaccaaagacgtccaactaacgagtggggatttgtgatccataaactcacctctttctattaaatttttactccctttgtagtagagggattgaaccgga

SEQ ID NO: 652947 - DNA, 630 bp, Homo sapiens
  misc_feature (325)..(325): n is a, c, g, or t
  misc_feature (391)..(391): n is a, c, g, or t
ggggagttgtgtgtctctgtagaaaggcgaaggggcagttcctatcaggactgtgtatgtctgagcacatgtggctctgtttgggattacgtgtttgtctgtgaatgtgtgtctctgttggacctgtctctcctcagtctattcctgtcatagatgtgggtgtccctggtagggaagtgtctgtagatcaagatgtgtatacagctgcttctgctattgctggtttgggggaggggactggaaagctgagactgaaaatcaagagggaagaggtgaggaaggcccacccctggggctgggcagtgtagacctgccaccgtgtganagaaaaatgaaagcacagatagcctaagactgcacaggcctgtgcccacataccttatagcacagngcccaggtggatcatctcatgctaacaccccacatgtgctggtggatccactcccatggatccactcacatgctgcaggcatgcagtagactcacccacagaccactctctggacaccaatcctgggaggtgggagctggaatggggagcaatgagaggagggagtgagactgttggcttaggaagggtggtacctctccctgcatcatacccaggaacttccagctccaaaatattgg

SEQ ID NO: 652948 - DNA, 796 bp, Homo sapiens
  misc_feature (58)..(59): n is a, c, g, or t
  misc_feature (62)..(62): n is a, c, g, or t
  misc_feature (67)..(67): n is a, c, g, or t
  misc_feature (236)..(236): n is a, c, g, or t
  misc_feature (321)..(321): n is a, c, g, or t
  misc_feature (427)..(427): n is a, c, g, or t
  misc_feature (482)..(482): n is a, c, g, or t
  misc_feature (486)..(486): n is a, c, g, or t
  misc_feature (509)..(509): n is a, c, g, or t
  misc_feature (531)..(531): n is a, c, g, or t
  misc_feature (538)..(538): n is a, c, g, or t
  misc_feature (543)..(543): n is a, c, g, or t
  misc_feature (552)..(552): n is a, c, g, or t
  misc_feature (572)..(572): n is a, c, g, or t
  misc_feature (579)..(579): n is a, c, g, or t
  misc_feature (586)..(586): n is a, c, g, or t
  misc_feature (591)..(591): n is a, c, g, or t
  misc_feature (595)..(595): n is a, c, g, or t
  misc_feature (624)..(625): n is a, c, g, or t
  misc_feature (631)..(631): n is a, c, g, or t
  misc_feature (642)..(642): n is a, c, g, or t
acaggctgaggtttggtgtgtgatctgtcctattggcctcacaatgcattatcttgtnngcncaccncaacctggccccaccctcacccacgcttctgctcattggtctcaatcccagcctggaagcagggagtaaggctggactccaatggcccattcccctcaccccagcccaagacgtgggaggctgcttcccagtaagaatccaggagcaagctttggtgaatccagtgggnctgagtggctctatggatgtggttgttatggatgtggtagggagtgcttagcagaatgtgtgtgtatctctgaggctgtcagggnggtgggtgggtgtgtgtctctgttggacctgtctctcctcagtctattcctgtcatagatgtgggtgtccctggtagggaagtgcctgtgtggtctgtttacagtngcagaaggcggctcagcagtgcaatgggctgacagccttggaccgggagtcagangccntgggttctggttgtagctctggnccctccctgtgatcttcaacangccactntgctntctctcgtnttcagtttcctcaaataganaaatgancagcagntgaanattnatgttgaagatccttttatacctggaaannagtttnttcatagaaantttcttgtgggtggtggatggtggaacatctctggtgtagtgacacagatgactaagaggtaggattggagaagaagtagaggataatgaaaaagggagggggagagataagtaggtgggtatgtaggcccttggtatatgggagatgttgtga

SEQ ID NO: 652949 - DNA, 110 bp, Homo sapiens
cgaggttccccgcgcaggatcctgtgggctcaccgtgggctcccccaccccgctccgatcttgtaaattgacagaagctgaggcccatgagatggtcatcttgtcccaaa

SEQ ID NO: 652950 - DNA, 253 bp, Homo sapiens
  misc_feature (189)..(189): n is a, c, g, or t
gccggcagggtgctgtactgagggagaatagtactaggtgaatattcacaatccgactactccagctgacacaggatgccatcgaccattaaaatttattgatcatacttagatattctaagtgctgatcaacagatagcaaagatggaacccttttgtggagaaaataaaatcccttctgaccccagnttttgacacttttagagaagttattaacggactgttaaacttatttgagcatatttcaaataaa

SEQ ID NO: 652951 - DNA, 123 bp, Homo sapiens
aaatcgagctcggcccaaattatgacatgagtcggtggcatgcagtaatgttagcggttaggcgtcggccaggccgttggttgaatgagtcggcttatggtttcgataatactagtatgggga

SEQ ID NO: 652952 - DNA, 649 bp, Homo sapiens
  misc_feature (58)..(59): n is a, c, g, or t
  misc_feature (62)..(62): n is a, c, g, or t
  misc_feature (67)..(67): n is a, c, g, or t
  misc_feature (236)..(236): n is a, c, g, or t
  misc_feature (321)..(321): n is a, c, g, or t
acaggctgaggtttggtgtgtgatctgtcctattggcctcacaatgcattatcttgtnngcncaccncaacctggccccaccctcacccacgcttctgctcattggtctcaatcccagcctggaagcagggagtaaggctggactccaatggcccattcccctcaccccagcccaagacgtgggaggctgcttcccagtaagaatccaggagcaagctttggtgaatccagtgggnctgagtggctctatggatgtggttgttatggatgtggtagggagtgcttagcagaatgtgtgtgtatctctgaggctgtcagggnggtgggtgggtgtgtgtctctgttggacctgtctctcctcagtctattcctgtcatagatgtgggtgtccctggtagggaagtgccctgtgtggctccgttccccagctgccgccacgcggctcacgcagctgccctgggctgccagccttgcgcccgccactccgaccgcctggggctaccgagccgctacgccccgcgcccccacccgcgatcccccacacacccccccgcccccccctcgccccccagccccccaaccacacacacgcaccgccgctgacaccacgtgacccacccccaccgcacaagcccccacgacacccgcg

SEQ ID NO: 652953 - DNA, 830 bp, Homo sapiens
ggaacaaaaactgtaggagcattactggtgtaatgacctaacacatctcctaggaagctgcggaaaaagccgtcaagagctttcaagagaatcccaaaggcaagactgatagtagaaagacgtatgaaagccgagaacgtggtcaccacagaagtcccagaggacgatatgagcagtgtataagcacagcgtggttgtctagggttgaaatagaaggtgggtctttagcacatagtccagagttcttcagcttcacatcccgtttgtccacgaaaggaagaagtgaagttatgcaaaaatacagtatggatgcaatgtttgatcaggaaagtggaccattcctcctgatcccagaaatgaatgtgattgggctcttagcaagtgcacatcccaccgtaagaaaatttacaagtcagatctgaagaaggtgctttgacattaaatattgattatatggttcttctgaaagatgaggtatagcgcaaaaagaaatgggagaaatcatgtgaagcaagaaagtcagtcgtagtttcaggaaatagcacagaactttgctgtgattggatccatgtgtattacaaagtacagagagtcaattactccaggaggagaattgcaggaaaaagctagaagctctgagagcagataggttggctggactcttgggaatatcttaatccgaaagttacaaagaggctaccagcatggaaagtatagtgaatgaatatgccttcatagctggcaggaaaaatcggaataagccatgagaaatgagaaacatattccatgtgtggccaagcatagttctggagtgtctaaaagccaaaata

SEQ ID NO: 652954 - DNA, 107 bp, Homo sapiens
tccacactggagcagtagactgagggcacccacaggttggaggagttgttgtcaaagacgacggtgaaagcgctggtcaggagttccgatgccgatagtgccgaagt

SEQ ID NO: 652955 - DNA, 1620 bp, Homo sapiens
  misc_feature (84)..(84): n is a, c, g, or t
tgagtgtgctttgctgtgttgatgagggatccacgcccgtcgtcagaatgggtcgtgcggaactactaatgctcgttctcgatngatatttccgagcatagccgctgtgtgccggcggttgatggcgtaggatattaatatcgggtgttcgggtgcgactttgtagtaacactttttcttgtagtatcgtatccgcttagtggaggctagatgtggaaggacgaagtctgggaccagagatgttgatggtgcgcgtcgatactcgctggactgatacctgatgggccagtggtgacaatgcctaaccggggggtctcatgcgcgcgtgttggtactcgggttggggggactgccatgtgtcctccgtggggagcgtgcggggttgcgttccatttccagcgtgtgtgcgcttccagtgctcatggttggtgatttgggcagatactagctcgcggtgtgatagcgcggttgggtagggatgcgccgcggtgtgtccgggcagggttcaatgggcggagattcggggctttcgtgtttgcttgtgagagtggtctgtgtgtgcaatatagggaaccggtttccgaacaggctggtgtgtgctcctcgcgagtatcctcgtctggtcagctgggcttgggtttctgctggggaatgctgtgagggcattcttctgggactggtgcgactacgggaacgcgtagactggtgcggggttccgtctgtgacggggtaaaatcgcttttgcagccgttggggtggtcgcttcgatttggtggcgtgtctagcgtttgggtcacagtcctggtgggattgtttggttgaggattactaagggtgggtcattggtgtggggtgtattggggtagttattgataagattggggaattttattggtggtgtgatgttgtgatttggtgagtaggacgaattgtgttttggaatggggtgtgtttgcggagatgggatgaggctgaattggagatttcttttgaggtatagtgtcgactgtactgccatgcgagggtcttgtgcgggcgatctgttggtgtaccctctcatgggaatggtgtgagggatgatgtttgttcggggagtgctgccgtataggctgtctgggcgctctctgtatcgtgccggattgggaacggtctctttatttagtgtcttgcgagaatatcgcatcggaatagcgcatagtgatggtgctattggccgaggtttgtccaagcaatggcgatgactaggttagggcttatgggcccagttggtctagtgatagtagtgttgtgatatgtgagtgcgataatccaatagcgttaagacatggtacgatgtgagacgcctacgacgaatgtgatcagggatagctaccatggttgactcatcagactttgtggaatcttcagccaagcccatgtggtggaatgggcctagctgctatcaaagaatgacatgttttatgacagaatactcactgtgtatgggcaaaaaactcgaggactgtactcttgtgactaattgtatcaacaggttattcttagtttctgttctgtggaaagtgtaaagcattcctacaaagggcttttaaatgtagatttttttttactgcacccgatcgc

SEQ ID NO: 652956 - DNA, 960 bp, Homo sapiens
  misc_feature (58)..(59): n is a, c, g, or t
  misc_feature (62)..(62): n is a, c, g, or t
  misc_feature (67)..(67): n is a, c, g, or t
  misc_feature (236)..(236): n is a, c, g, or t
  misc_feature (321)..(321): n is a, c, g, or t
  misc_feature (427)..(427): n is a, c, g, or t
  misc_feature (482)..(482): n is a, c, g, or t
  misc_feature (486)..(486): n is a, c, g, or t
  misc_feature (509)..(509): n is a, c, g, or t
  misc_feature (531)..(531): n is a, c, g, or t
  misc_feature (538)..(538): n is a, c, g, or t
  misc_feature (543)..(543): n is a, c, g, or t
  misc_feature (552)..(552): n is a, c, g, or t
  misc_feature (572)..(572): n is a, c, g, or t
  misc_feature (579)..(579): n is a, c, g, or t
  misc_feature (586)..(586): n is a, c, g, or t
  misc_feature (591)..(591): n is a, c, g, or t
  misc_feature (595)..(595): n is a, c, g, or t
  misc_feature (624)..(625): n is a, c, g, or t
  misc_feature (631)..(631): n is a, c, g, or t
  misc_feature (642)..(642): n is a, c, g, or t
acaggctgaggtttggtgtgtgatctgtcctattggcctcacaatgcattatcttgtnngcncaccncaacctggccccaccctcacccacgcttctgctcattggtctcaatcccagcctggaagcagggagtaaggctggactccaatggcccattcccctcaccccagcccaagacgtgggaggctgcttcccagtaagaatccaggagcaagctttggtgaatccagtgggnctgagtggctctatggatgtggttgttatggatgtggtagggagtgcttagcagaatgtgtgtgtatctctgaggctgtcagggnggtgggtgggtgtgtgtctctgttggacctgtctctcctcagtctattcctgtcatagatgtgggtgtccctggtagggaagtgcctgtgtggtctgtttacagtngcagaaggcggctcagcagtgcaatgggctgacagccttggaccgggagtcagangccntgggttctggttgtagctctggnccctccctgtgatcttcaacangccactntgctntctctcgtnttcagtttcctcaaataganaaatgancagcagntgaanattnatgttgaagatccttttatacctggaaannagtttnttcatagaaantttactgatggtggggacgggggtccgaattctctgtgtgtctcagtatacctaaaggattggtggtggggcggagattggtgtgttctgctgtagaaaaggcgaagtgggacatgtgtcctatcaggactgtggtatagtctagatggcgagaatagttaagcctctagtcctgaggattaccgtggttgtgtgcgtggtggagagtgtgtacgtgtggtagacggaaggcggttgtcgatggtcgtgtgggggaggaatagaggtgtactagtgagaaatgccaagacttgttgtagtagaggccttgctttcatg

SEQ ID NO: 652957 - DNA, 590 bp, Homo sapiens
acgcgcacgcggttcaaaatcttatatggcctctaggcaattgtgaggcaattcgtggctattgtgcttctactgcacagtaaagggacatccccaggcactcctgatctgacaaatgacaatgagaaatggactaggaacaattgtttttttcttcgctttaaaaagacgcaataaccaatacaacacctccgtggggatcaaactctcaaaattggggtatcgatgggtaaagtatccacaatgcaactccttcttgttatctcttagggggttctagttgtcccctttcttctgtgcccatgcaaaagaggatggcaggaagggagcatgagagtccttgccgaatctgctcccggggtagctgtgtggatcacacaggcagacaggtgtgaatacgtctgcaaacatcagagcactctacagatgccatttatgagcagaaggcatgcttttaaagtgcaaaaactggggtgtcccctctgagctccccaggcttggtgtgaaaccattctggaatcttctgtgtaaactccaacagagcagtgatataggataacttacattgcccatagtgcgagaaacaatgt

SEQ ID NO: 652958 - DNA, 653 bp, Homo sapiens
tgtctttgttcctcggtgcatctcattctacggtatgtcttctgtactttccccttcttgccattattaacccatgttgtgtttattcttcctcaatatttttagccatttctcctcatgggccacgcgccctagctcactgttaggatgatgcctcggtcagtcttctgctggcacgagcgtgtagcagttttcctgtgtgtgtcctgggttctggtggcatcagccagctacccctttgtgggcatatagtctatgggccactttttgatgtcttccctcagatttccattgtgtggccttgtgtgggtctgggggagtctttgcaccatgtagatgtcactgactgtgcccctttgcccatcagccatttgcccatcaccccctaacaatctcagcttcggggccggtgagggtgaggggcctcccccaggtcactagatgaggagcagctggggtaggctgtctgtgccatggccccccactcccccttcccttggagggagaggtggcaggaatacttcacctgtcctctccctcaggggcaggtggtggaggggcagcccagggtcgtctttgtgtatgggggaaggcgctgggtgcctgcagcgcctcccttgtctcagatggtgtgttacacctcggtgtgtaaa

SEQ ID NO: 652959 - DNA, 180 bp, Homo sapiens
ggcatggagaatggctccgcttcttttgcagctggcggtgcttggcgcggcgcttgcggcccgagccctcgtacttattttcatcgttgcatttacaacttctacaaaaatgccagcacttcatcgacatgaaggagagaaattcttcttaaatgccaaaggcagagagagactttatcc

SEQ ID NO: 652960 - DNA, 559 bp, Homo sapiens
  misc_feature (18)..(18): n is a, c, g, or t
  misc_feature (22)..(22): n is a, c, g, or t
  misc_feature (27)..(27): n is a, c, g, or t
  misc_feature (140)..(140): n is a, c, g, or t
  misc_feature (258)..(258): n is a, c, g, or t
  misc_feature (408)..(408): n is a, c, g, or t
  misc_feature (451)..(451): n is a, c, g, or t
  misc_feature (464)..(464): n is a, c, g, or t
  misc_feature (473)..(473): n is a, c, g, or t
  misc_feature (481)..(481): n is a, c, g, or t
  misc_feature (545)..(545): n is a, c, g, or t
tggcagaaattaagatcncgcnatctnctctggctggctcaacatggaaggatcccaatgttgaaagaaaaagcatgtaagaaacagaacaggcgaaaaagtaagggcccggcatgccccccagtcccccccaccctgcntgccgcgagggccccccagtcctccccacggcagccatcgccctctcgccaaacaaaacagaagcccccaaacagaacaaaaaggaaaaaaaaaagaattttcacagaagaagaagtncacattcattcgattcattgagcctgcggagagggaagagaaaggaataggtcactacggggagggaagggtgggagactagggggcggaagagaggaggggctggaacaccgtggggggggccagggagcccccccccaaacctgcgcnggctcaggctggaaggacgtgctttttaactgtttagccaggngctcgcgggactngctgaagtnacgccgcnccctgacggagaaggagggacaaaccaggaagagaggagaggggccgcggagggcggaggcgcnagggtcgtagggga

SEQ ID NO: 652961 - DNA, 372 bp, Homo sapiens
  misc_feature (344)..(344): n is a, c, g, or t
  misc_feature (365)..(365): n is a, c, g, or t
ggaggctgagaaactactggagcaccagggacagtctgtaaagttggatggaccaccaatgggaaaatgagagctgcccaccctggccttacactccttcaattaatacataaacagaaaggaggatatacagagagccaaaggccatgggacgtgaccaacattccactgagtctatacgatcaaacagcaaactgtttatcatgaatacagaatgtgggcaaactcatgactgtgcctgccccagaaggtttgctgagggcaattgcttcctggacgccaagctccttgaggttatctattggggacatccagagaatgcagttcttgcaagccttactctnggaccgagcagctgacccccntttttcc

SEQ ID NO: 652962 - DNA, 815 bp, Homo sapiens
gagcggagaggcggggcgtggtggcctgggctgtgctcgtcgccgcgctcgtggtgacctggggccgggcggactcggggaccggcggagtgacgccgtggtgcgccctggccgagtgctgggtggatgcgtggtgctgtgctgtgtgcagtgtgcgctgccgaggactcccgatagccagggcctgggccagagaggctgccatgggctcctgtggggagccagcgccttgaggaagcccaggctgtggcaagtgcacaccatgacaccgggccgtaggtgatgaagcttcacctttgacagttaaaacagctgcgatggagtgcggctggacggcttggcctacacgggccaaggggacactaacagggacacggggctggtccccaggcattatccacggaatacttacgactatggagaaccggaagccagtggcacccgactgagccgggtatattgaacagaccattacttaactatatgcctgactagcatagaatgcgctgcgcagcatagggtgctatcgcattgagcgagccgagtagagaaacgaggaattacatccaactcgtgaacttctttgtggcacgtaacccttaggacattcaccgaattggtaaccaccaagcgggcactcgtttccgagtccgggtaggtcttgtgcagccataagattgccttacaacccgtactagtactatagagtaatgcgcgacagttgggccaacgcatagtagcttcaacttgagatgcagaccgttatctagactgggagcacgacatagagcagccaatggacaacacaggcgatc

SEQ ID NO: 652963 - DNA, 1607 bp, Homo sapiens
  misc_feature (1574)..(1574): n is a, c, g, or t
cgtggtgtgtatgaggtgggttgtgttgcggctgtcatacattatgagaggtggggggtgctaaacatactagagtgttgtaggagaagagtggagttgtgtttgttgtgtattgggtggggtgggttgtgtttctctgtttgttgttgttgatttagttgttagttgtgtgatttggtgttgttgttagtgtgtgtggtggtggtggaatctacaactatacaggcgagcagcatgaattgagttgatgttgatgatgagtagggggtgggatatcaaatctgctagattgtggtgatgtgttatgttggaggtgtggtgagatgtgttaactacatatgacagtagggtgtgtggttgtgtgtggtgtcagacaacaaacaacgtcagacgactcatgactcatcatactcttctgtcggtgtggctgactcctactccacccacactgactgcgatggtggagtagtttgatagatagtgttctagcggcttggtgtagcttcgacttctactaaggctgcggcttgcctgcagctgcgcggcagatgattaagtattataggttgtgtgtgttgtacgccaacacaacagactgtttgtctgggtgaggggttggacaactacaactacaacggagcgatcatcggacgtgtgtgttgtggagggggagagcatcacaacacaactgacggtgagtgctagtactagcgaggacgaacacaacaacaagaaggaggttggtttgtggttgctgctactacagcagtgtacgattcagcgagagtggtgatatcattagagcagccaccacaacatcgagtggacgcacaacaattaaagagaggtgttgcgtgacgtgggagaaatgtgtgtgcagcgcgagcagtagcgtcgccacacgattagagtagggcagcagcactgcgacaagaagtcgcacacacggtccgacgaggagagtagtatgttgagagagtggtgtgtgactatacactatcacacacactaagtatagtgttgttgggtgggagcagcgcgtcgctatttatgtgtcgctcttcatcgcgactctcttctcttgttacgaatttgtggcctctcgggcgcgacacatctgagaggagagtgtgaaggaggaggtcgagctgaaataaaatagtcgtcgcgttcgacgcgcgcaccccttattatatactccactggggtctcctatatgtgtctttcgtgtgggacgcgcgctgtcacataagagatgttcatcacagaagagagagagaaaatgtagtgtgtgtggtgtcgctctgatcagaatagatcgatctcacacaggtgtttcttactcacttcagttaacaatagatgtgtagatgtgtggtgtgttaatataagcaggcggttgtcacatgggtgacacaacacagtggtgggagcacaacacacacaaatccactgattatgctcctcaactggtctcactgtattaatttgttgttgtttgttaggtgataaatataatataataaatataataaaataaattaaaagggaaaatatacttgctgagtatgttnaagtcgaggggccggagatagagtatgtaccat

SEQ ID NO: 652964 - DNA, 855 bp, Homo sapiens
  misc_feature (648)..(648): n is a, c, g, or t
  misc_feature (824)..(824): n is a, c, g, or t
tgtgtttgttgtgaaaaaggaaaaaagttttttgcccttgttttacccgggggcaattggaaaaaagcttatttttaagccttacgcctctgcgcgggaaaaaacaccgcgtattcaacacggttatgacagggggaaataatgcctcataaaaaaggttttttaaacaccaaaaaacacactccggctttttttgttgggttccgcctctttaaaaatgactctggcgtcaagaaaaaaacagtgtgcgtttctaaaaaaaggggtttttttaaattataaccttcaaacccctcttgaccaaaagaccgagaatttttcggggtttttgccctctgggcttggtccttccccccaatttttggattggggggcattttctgttttatgccccctttccccttaaaagaaaagggttataaaaacgttcttgatgtttccgggggtaagaatatttctcttgaaaaatttcttttggtggtggtaggcggttattcccacggcttcaccctttgagtgtggcagataaaggcgtcctttctctgcagaaacgccttgttggcccccctttctgaaaaacgagggagaatagttttccccgctttctagaattttgtttggccgcttggggtctcattttttgtgagncccgccacccaaagatacctggcgcctgtgctaccttattatctccaaaacctataagaaggtgtttatttcttctttttgtgccccagggtgcccggttttgagaggggtgtgttaaagggtcttctcccacaaacctctagttaaaacgccaccggtgtggtttctcgggtgcnaagatgtgtctcttatctggaggttagaaag

SEQ ID NO: 652965 - DNA, 353 bp, Homo sapiens
  misc_feature (307)..(307): n is a, c, g, or t
  misc_feature (334)..(334): n is a, c, g, or t
gacttatttttacagacagggctagaatgcagtggcatgaccatacctcactgcagccttgcgctactgtgcttgtagcctcccaagtagctgggactacacgcacacaccaccgcacccagctaatttgttttttttttttttaagagatgggggtcttgtgctttgttgcccagggcggatctcgaattcctaggcttcaagagatcctccggccttcacactcccagagtgctgaggattattaagcgtgcccactggccccttggcctattttttgctttaggaatttgtgtatcctggattnaaaaatggaaaacaggcaccaaacctncccccattctggtggcttt

SEQ ID NO: 652966 - DNA, 879 bp, Homo sapiens
  misc_feature (149)..(149): n is a, c, g, or t
agatcactggtgtgcgttaatacactctgcgaggaaatggtagatgctgaaaaagtacaacacccgtggtgcttgcaaaggtgaattctaatgttttgcccggtatattcctctgccataaaagatgtagtataaccccgcgcgcgaanggatgtggtggtttccgcgggacaattactgctgaagacccaacacggctgggctataaaatgtgcagaatgttagctccccaccctcgcgtacacagatgggtctcattaatctagtacgccgccctgatcaattcattgtggtgatgactgataaacaccccccctgtagcaggtggtttccttccaagccggatcctctattggagagtcgtttgatcagtgtgtcacccctccatgattggccaaccaccaccacgcatggattatatccgcagcgatgtattttccccgacatgtcccctctcattgggtccttcatgtgcttggtaaggccaccccctctgtggcaggcgccccactgtgccctacacacatcgaggtcctcgtgcagaacctgattcttgttggtggcgtgaagtcagacaattcctcctacccacacgcagaaagtcatctgtgttctatacaagcatcagaacataagaagtgagactattttgtgaattgatgatatcatatcatcgttatttcaatatgtaccccctcttggcacaaaggtttattcgtattatcaatactcgcctcccattagaatagttatcttcgaaagctttaatacccccactagactcgaattttttaaatacttcttaaaagccctcggatacatataaatcaatgaatcaatacaataaacattatcttttttcccaacccccacatgaca

SEQ ID NO: 652967 - DNA, 2184 bp, Homo sapiens
agcggtggggaccgggccgcttcttgttcggcgtgggcggctcctggcagacccatcccgcggtgcagccgccggcccggtaggcgccaggaccccgagcctcggcggcggcggcggcggcggcagcgctgccttcactcacctcgtcctcgctcccgtcctaccccgttccgcgctgggtggagtccaagtctgattgcgagagtccggaacgccgcctcgggggcttgactccagccccggggatcgagaacggcgcccaggggtccctacgtctgccttgggggctcgagtcccgccctgggcgtccgtgacgtcgcccaggggtctccacgtctgtcctggaacctggagagccgccgtgggggccccggaagccgcccaggagtccccacgtctgccctgggggctcgagtccagctctcagggtcccggacgccacccagggggtccccatgtctgctttgggggctcgagtccagccatgggggtcctggacgccgcctcggcgtccccgcgtctgccttgggggcccgagtcccgccctgggggtcctggacgccgcctcggcatccccgcgtctgccttgggggctcgagtcccgccctgggggtccccgatgccgcccgggggtcctcacgtctaccttggagactggagttcccccgtgggagtctcggacgccaccccggagtcaccgtgtctagccttgggggcttgagtccagccctgggggtcccggacgtcgccgaggagcccccacgtctgcctttggggcttgagacctgctctgggggtcccggtcgccgcccaggtgggtccccacgtctagccttgggggcttgagtccagccctggggggcccggatgccgcccgggggttctcctcgtctgccttgggggttgggtccagccccaggcgtcctgaccaccgcccaggggcccccacgtctgcctgggggcctcaaattcagtcctgggggtcccggacgcctcccaggggtcttcatgtctgccgtgggcctcgagtccagccgtgagggtcccgaatgctgccttggagggtggagtccagctctgagggtcctgaagtcagctttgggggttcgaacccatccatcccaggggtccctgagtctacattaggggctggagtccagccttgagggtctccactgctgccttgcgggcctggatgggatccagcgggtctgagtccagcctcgggagcccctgcggtggagctctgagtggggcaggggcctgggagatgccaggaggatgagagcggcgcccccctggtccaggggacagtaagaggcagccggtctcagagaagctaccccaaaactgttacccgtggtgtgcagagcgtcctgcaaccccagccctcaccaggatttcttgcgtttttcaggaaatcggttgtgattggcatgttccttaagcgtctgcaggaagccgaggcctttttggtatttcaggaggggttgctaacccccctccttgtaggatcggggtatcccagctgctaattcccctcctaacagccctgcagcgcctggattggaggtgtgacaggtggcatttttggcccgaagtccctaggcaggacgggtggctgtagcctgcgcgtttgtgtaaattaacctccctttttagttctgtgaagggagaacgtgattagtttaaaatcacctgcgtgaaagaggctcttgattagtttaaaatcacccacgtgaaaggggctcttgattagcttaaaatcacctgggtgtttcgttttatctcagttggcctctgaatgtttatcctacagcttcctgcaagctccagtctaccttctaagggaataacggggctcgtctttctacgttactttatgtgggagtagttgtaaaacagaatgagggagaccgcggggattgtgcggaaatgtagccaccgtttacatgtcgggaggctgaggtgggaggatcgcttgagcccaggagtttgacaccagcctgggcaacatggtaagaccccttctctaccctcccccccaaaaaaaaaattttagtgtggcatggtggtgggtgcctgtggtcccagctactcgggacgctgaggtgggaggattgcttgagcccaggagtttgacaccagcatgggcaatatggtaagaccccatcatctacaaaa

SEQ ID NO: 652968 - DNA, 393 bp, Homo sapiens
  misc_feature (31)..(31): n is a, c, g, or t
  misc_feature (119)..(119): n is a, c, g, or t
  misc_feature (146)..(146): n is a, c, g, or t
  misc_feature (159)..(159): n is a, c, g, or t
  misc_feature (223)..(223): n is a, c, g, or t
  misc_feature (228)..(228): n is a, c, g, or t
ctggtctaaagaactaatgccaaatgtgtcnctggaacataaaaacttctttggttttccattaacctattctggagaaaaacaatggtgaactctgaagtaaagtggggcagcaattncaggttctttaccacaccacatgccancatttgtaacagncagtagctttggccctcccagaaccttgagtgacctgggcaggccacccatctctggccttttncttgncagtgatttttcacaggcacagagtaaactcctgcccttcaaatacctactgccatttgcttcctgatgcttaacattccacatttatagaaaaggcctcaaatataaggaccacaataataacacgtgatttaaattcacatagagatgtattggctcctattg

SEQ ID NO: 652969 - DNA, 1529 bp, Homo sapiens
agcggtggggaccgggccgcttcttgttcggcgtgggcggctcctggcagacccatcccgcggtgcagccgccggcccggtaggcgccaggaccccgagcctcggcggcggcggcggcggcggcagcgctgccttcactcacctcgtcctcgctcccgtcctaccccgttccgcgctgggtggagtccaagtctgattgcgagagtccggaacgccgcctcgggggcttgactccagccccggggatcgagaacggcgcccaggggtccctacgtctgccttgggggctcgagtcccgccctgggcgtccgtgacgtcgcccaggggtctccacgtctgtcctggaacctggagagccgccgtgggggccccggaagccgcccaggagtccccacgtctgccctgggggctcgagtccagctctgagggtcctgaagtcagctttgggggttcgaacccatccatcccaggggtccctgagtctacattaggggctggagtccagccttgagggtctccactgctgccttgcgggcctggatgggatccagcgggtctgagtccagcctcgggagcccctgcggtggagctctgagtggggcaggggcctgggagatgccaggaggatgagagcggcgcccccctggtccaggggacagtaagaggcagccggtctcagagaagctaccccaaaactgttacccgtggtgtgcagagcgtcctgcaaccccagccctcaccaggatttcttgcgtttttcaggaaatcggttgtgattggcatgttccttaagcgtctgcaggaagccgaggcctttttggtatttcaggaggggttgctaacccccctccttgtaggatcggggtatcccagctgctaattcccctcctaacagccctgcagcgcctggattggaggtgtgacaggtggcatttttggcccgaagtccctaggcaggacgggtggctgtagcctgcgcgtttgtgtaaattaacctccctttttagttctgtgaagggagaacgtgattagtttaaaatcacctgcgtgaaagaggctcttgattagtttaaaatcacccacgtgaaaggggctcttgattagcttaaaatcacctgggtgtttcgttttatctcagttggcctctgaatgtttatcctacagcttcctgcaagctccagtctaccttctaagggaataacggggctcgtctttctacgttactttatgtgggagtagttgtaaaacagaatgagggagaccgcggggattgtgcggaaatgtagccaccgtttacatgtcgggaggctgaggtgggaggatcgcttgagcccaggagtttgacaccagcctgggcaacatggtaagaccccttctctaccctcccccccaaaaaaaaaattttagtgtggcatggtggtgggtgcctgtggtcccagctactcgggacgctgaggtgggaggattgcttgagcccaggagtttgacaccagcatgggcaatatggtaagaccccatcatctacaaaa

SEQ ID NO: 652970 - DNA, 268 bp, Homo sapiens
atattcagcaactatccatctgacaaagggctaatatttagaatctacaggaactcaaatcagcaagaaattcacaaataatcctatcataaagtgggctgagcacatgagtagccaattatcacaagaagatacccaaatgggccaggtgcagtggcccatgcctctaatcccagcactttgggaggccaaggttggtggatcgcttgaggtcaggagttcgagaccagggccaacatggtgaaaccctgtctctactaaaaataca

SEQ ID NO: 652971 - DNA, 269 bp, Homo sapiens
cagtgtattaactaagtgcacattccacattgttgctatctcaaaattgttgaggacaatttgtgtcatcacttcccttccaaactgccgatcatgctcccaccccctgctcagccccttggatctgtaacctttgtcttggccttttatatgaaaaggggatctcaaaactaaggttcttatccagctcttttatttcacagatgggaaaataaggcactgtccaagtaacacacagtgacagtggcaaagtcgtgcttgcttcccag

SEQ ID NO: 652972 - DNA, 972 bp, Homo sapiens
  misc_feature (1)..(1): n is a, c, g, or t
  misc_feature (174)..(174): n is a, c, g, or t
  misc_feature (178)..(178): n is a, c, g, or t
  misc_feature (180)..(180): n is a, c, g, or t
  misc_feature (187)..(188): n is a, c, g, or t
  misc_feature (197)..(197): n is a, c, g, or t
  misc_feature (224)..(224): n is a, c, g, or t
  misc_feature (232)..(232): n is a, c, g, or t
  misc_feature (246)..(246): n is a, c, g, or t
  misc_feature (252)..(252): n is a, c, g, or t
  misc_feature (261)..(263): n is a, c, g, or t
  misc_feature (266)..(266): n is a, c, g, or t
  misc_feature (274)..(274): n is a, c, g, or t
  misc_feature (277)..(277): n is a, c, g, or t
  misc_feature (280)..(282): n is a, c, g, or t
  misc_feature (286)..(286): n is a, c, g, or t
  misc_feature (330)..(330): n is a, c, g, or t
  misc_feature (337)..(337): n is a, c, g, or t
  misc_feature (347)..(347): n is a, c, g, or t
  misc_feature (350)..(350): n is a, c, g, or t
  misc_feature (360)..(360): n is a, c, g, or t
  misc_feature (364)..(364): n is a, c, g, or t
  misc_feature (368)..(368): n is a, c, g, or t
  misc_feature (372)..(372): n is a, c, g, or t
  misc_feature (376)..(376): n is a, c, g, or t
  misc_feature (380)..(380): n is a, c, g, or t
  misc_feature (404)..(404): n is a, c, g, or t
  misc_feature (444)..(444): n is a, c, g, or t
  misc_feature (450)..(450): n is a, c, g, or t
  misc_feature (456)..(456): n is a, c, g, or t
  misc_feature (471)..(471): n is a, c, g, or t
  misc_feature (491)..(491): n is a, c, g, or t
  misc_feature (540)..(541): n is a, c, g, or t
  misc_feature (544)..(545): n is a, c, g, or t
  misc_feature (554)..(554): n is a, c, g, or t
  misc_feature (567)..(568): n is a, c, g, or t
  misc_feature (580)..(580): n is a, c, g, or t
  misc_feature (588)..(588): n is a, c, g, or t
  misc_feature (606)..(608): n is a, c, g, or t
  misc_feature (612)..(612): n is a, c, g, or t
  misc_feature (616)..(616): n is a, c, g, or t
  misc_feature (632)..(632): n is a, c, g, or t
  misc_feature (643)..(643): n is a, c, g, or t
  misc_feature (657)..(657): n is a, c, g, or t
  misc_feature (754)..(754): n is a, c, g, or t
  misc_feature (795)..(796): n is a, c, g, or t
  misc_feature (815)..(815): n is a, c, g, or t
  misc_feature (824)..(824): n is a, c, g, or t
  misc_feature (835)..(835): n is a, c, g, or t
  misc_feature (881)..(881): n is a, c, g, or t
  misc_feature (887)..(887): n is a, c, g, or t
  misc_feature (908)..(908): n is a, c, g, or t
  misc_feature (961)..(961): n is a, c, g, or t
ngattctggaattgggtaaagtgagaaactgggcctgaagactccgtaccctctgccatcttgccgagggagtctccttttagaaaacaatcaaagggttattgcatgagtctggatgaatcccactctcagctgtccacgggcccgaccacctcatctagccccctttttggnaggnanaacctgnntcccaagtnctcctccttcacttcgttacaaaccanggggaagngcccaccgtgagancgcgcnatctgaaannngtntccctttntanatnnntggngaaaccctttgcgcagaaggcaacgtggaagctgatgtttttantcatctngctgtttganagnacgattatgnagtngggntgtntagnagtnaaaagtaccttttatatatatatnttatatttatcatatatatataaaaatgtaaaaaagaggnaatagnggcttntagaaaatgattttntttaaggtttcctgtgtggnaggcacctgaaatactgtagaaaaatgttttgtgtggtgtttttgtttnnttnntgttaactnggttcttttttgnntgatcaggaatngtgctggnacgatatctcagtggctnnnaggnaatnctgccgcctgattttntctttctttcngtcccctgcttgtnctcctatctgatcaggctagagacaacaaaaaaaagatatatagtaaaaaaaaaaacccaaaaaaaaaaaacaaaaaacaaaaaaaaaaaaacaacncaatatatagatttctatagaatttccttttttcctctctnncacctttcctctgaaaggnattgttacnattttttgttnctgatttttgctgcaataaccttcttggtttcagtcacagcaaganacaaanccaaacaaacagaaaacccgnctgaaaagagtagaaaataaaaggtctgacggaaaaaaaaggggagggggatnaaaggaaggga

SEQ ID NO: 652973 - DNA, 447 bp, Homo sapiens
aaaataacatagagagtaaagaactaaccagcacaactactatcttactcataataaatcgagacttatgtagggtgtgcctagggtaagataacgcagagtgtccaatgaactcccgtcagtgccgaccgcatcctcattcatctcgtcctagctgtcccctgagaagatataagggaaaaaggaatggcagatctgttttgcatcctaatttaaccttctacacaaaatacttcattacaagcaaataaacaaacacaagatagtaagcttagaaaacaaaaggcctagaccacaaattacccagttaagcccaagtggtgacattggttttaagcctcaagaaaatgaaacttctgcttctgtaaaatcacatcctcatcaattgaatttaaatcacttagtgcattaacaatgttacaaattccaataatgtcagacatatgt

SEQ ID NO: 652974 - DNA, 1036 bp, Homo sapiens
agcgggcctctagccgcccttcccctgggcggctacgcgccgggagggtacgcggagcgcgacgcgggagctcgggctccatggtaggagcgtgcagtgacaatctgggcagatgcgcggagctttctactcatcgagccacccgtggttgccagtggatcgccgcgtctagacgtcccgtcccgtcccgcggtctggtagcggcctgtgcggctcccgggtagtgacctcgggcctcgccggacctcccgtctgccgactagtcgcttccccgggtcgctcctgctgcctcgaactctgcccgtcgctcctctcagcttcctctcgggtcgaggggcatggtcgggcggaccgggacctcgcgcacgtgacgggcggaccgggcagtgcagctagggaagccaggccgggtcatggcaggccctgcccttctagttgaactgtacatggtttcaaaggtcgctcgaaaccagaaacgctcggtagcctagcggaaccgaacggaggggtccgttttcgaatgcacacgtcgggaccggcagttgtcccttggtgcatttccctggcaatgccgaaggtcaggcgaacgtgaacagaaggcgttgacttggcttggggttgagctataggcaatgacccgggggtacccacaggacaccatgggtgggactttggtcccccaggaaggcgacggaaattgtggaagcccccttggatgggatgtgtagatccctgggcgtttttggccgttgacccggctggaaggggcaactggtattacatggcattggaacgggccttgcgcacggctccacatcacgggaaacaacaccttaagtggccccgaactctctccttggtggccatcttaagtttttgaacggcaccggaaccaccccaatagggatacccggaaacaggtcgcccctaggcaaagccaatttacttggttttaatgtggtgtccgaaaactagggggtcccaccttggagataactttaggttgcacacgccaaaaagaatctgcggcgcaaga

SEQ ID NO: 652975 - DNA, 433 bp, Homo sapiens
tggtgattacaggatccttaagacagacactcggggaattggtcacgaagtacacgggatccgtcacccttcggcccaaggatgggggagatgaaatcttggctcaaggattagatcctgggtacgctcattttccatgcgagatgcaagctccagcagctctcgctgggcctgctgcacgccctgtggttccccctcgatgcggatcaaatggctcttctcacggtcaggagggatgcgcacggacacctggtactggtcttggattctgttgatgtgggcaccgctcttcccaatgaggtgcctgtggaacttgtggtcgatgttgatctccacatagtccatccggtaaatcaaatcttggaccatgccttctatctgtgcctaggccacatggacatcctcggtagggccccccagagggtcgggctgg

SEQ ID NO: 652976 - DNA, 255 bp, Homo sapiens
taggtgctctagaggatctctcttacggcccaaactcagactactagtttgattatatgagatgacctgtggagactaccgggccattggagggttaactcagggggaaacttctccagggaatttgggaagtttccgtcgaaccacaggctactggaggttctataacaacactttggtagacacttctctcctgtcattcaccatgtattgggcaaagatggtcttcggggtaactccggaagaccaaattct

SEQ ID NO: 652977 - DNA, 656 bp, Homo sapiens
ttcctgtggatagcacaaccctggcatggcacgcaagagctcagatgatcagaaaattatctcatatctctggtgaaaaaacacagggacctgtatggggtgcacgcctcgagaatgctaacagcgagtgtcgctactgtgactgggctgcaacgttggggacctatgtgttcaccttgactgtcaagacgatgagaggaacctgcgagagccagagctctggtgcaactgtcatgtgtcaaaggaagaagatatagactagaagccagcctagtagccaatgataactgggaactgtggtgagttgaccctagcccatcgagcacagctagaggctggatggctctaagtcctcagatgacaagggaatagtcagctacctctggactcgagatgaggggagcccagctagcaggggaggtgttaaagtcactctgaccagtcacgcctatcctttttctttgcaaacctggttgagggaagcctacagcttttcacctgaaagtgaccgatgcgaagggtgcagagtgaccacagatccggtaccactgtggaggtgaaacctgatcccaggaaaaacaacctggtggagatcatcttggatatcaacgtcagtcagctaactgagaggctgaagggggatgttcatccggcag

SEQ ID NO: 652978 - DNA, 356 bp, Homo sapiens
tgctgtgttgcccaggctggtcttgaactccggctcaagcaatctgcccgcatcggcctcctaaggtgcttacaggtgtgagccacctcgcccagcccctgataagagcatttaagaggtgacagggctgcagggccatagtggctcacacctgtctgtaatcccagcactttgcgaggttgaggcaggcggatcaccagcagtcataagatcgagaccatcctggctaacacagtgaaaccccgtctctactaaaaatacaaaaaaaaaattagctaggcatggtggaatgcgcctgggtgacagagtaagactccatctcaaaaaaacaaaaacaaaaacaaaacaaaaccaaa

SEQ ID NO: 652979 - DNA, 669 bp, Homo sapiens
agcggggagtgtgctgcggcgcgagctgggccggcgggcgtggttcgagagcgcgcagagtccagactggcggcagggcccgagaggccgaccgcagcgtccctggtctctccagccctcactcggaaccgcacgtgagggcaaatccgcccggtggctggcttagcacgcggggacagccctccgaggcctccctagcggtgtgtggcgagagggcgtccgggtcgggagaagcacggaaaggtggcttcgcgaggcttgtgtggggggccggacgggcaagcctttgggattgccttggacactttgggtgtggggttggcccaaaaacatttatcgaaagatagcttacccacttagatggcaaggacaccggacaagtcaaagtcttcgcccgtaagcgggtggctcacgcctatagtccaggatgccgaggagggaggatcgcttgagtccagggagttggaggctgcagtgagccgtgatcgcgccaacgaacttccagcctggggcgacagagtgagaaccctaatcttctaaaaaacaaggaaagaaccgtctttcaacgcattggagcccattaagctggattttggcttctggtcgctctcttctacaagggtaccagggttgaacagggggggcagaccccctcatcaatgctttcca

SEQ ID NO: 652980 - DNA, 1023 bp, Homo sapiens
gagaaggaagaacagctgattccacaagatattccagatggtcatcgtgcgcctccgcccctcgcacagagaagcagcagcacacgaagcattgacacacagacccctgggggtgcagacaagggaagcaacaacagcagccgctctcagtctgtgtccccaacatccttcctcaccatctctaatgaaggcagtgaggagagcccctgttcagctgatgatctgcttgcggatcccagagataaagagaatggaaacaattctcctttgccaaaatatgcaacctcaccaaaacctaataacagttacatgtttaaaagggaacctccagagggctgtgaagggtcaaagtctttgaggaatgctcgccaaaacaacttcatgagattccagccttttactgtcctgacaaaaacaaggtgaatttcattcctaaaagtggctctgctttctgcctcgtgagtatcctcaaaccacttctccctacaccagatcttactctcaagggctctggtcacagcctgaccgtcaccactggcatgaccaccactttgctccagcccatctctatggcctccctgtctacaaacacagagcaagagcgggtatctcgaggaaccagtacagtcttgccatccgcctccctccatgcaccaccagaacccattgaggaagctgaaggatagggctcagctcaagcaatgggtgctgggagctaagaaccctgcagatcacgtgactgtggtatcatgtggtatcctgtcctcccggttggctgtgaagtgctttggctttccagtgaggtgtgacagcaaggctcctggaagaactagtggtcctctgagtgttctgcccctgcgcatgaaggccacagacgtgcttcacctgcttggccttgaagcactagctgaaacctgaaaggtctcttctttacttttggaggaacaaaaatcacattttatcacattttcatttgtttcaaattagacttgtttaaaaacaaaatacaaaaccggatccctg

SEQ ID NO: 652981 - DNA, 299 bp, Homo sapiens
  misc_feature (183)..(183): n is a, c, g, or t
  misc_feature (216)..(216): n is a, c, g, or t
gccagcaccaggcaacccggcccttgtccagggacctctgctgccttctctctggggtcaggaacctcagaggagggggctctggggactgcataggacgcagcactcggaggtgcggtgtggatgggtgggggtgagagaagagggttcttatcgcgtctcctgtgatcagcctctggcccnctggaggaggaatcctcagcgtttttcttattnccaccctgatccccaacaccaagagtgaggtgggcgtgtccaggcagcgagctcagccctggccagctactgtgatgccatct

SEQ ID NO: 652982 - DNA, 214 bp, Homo sapiens
aggctgcagtgcattcctctcctctagacactggttctcgtggcagaagctgcttgcggtaggcctggtgcaactgcagctttacagggaaccggcacctgtgccggtgcctggagctgcccgccccacggcagcagccagtgcactgctgtgtgcagtggctggacccttgactctctcactcacactcccctcaccgctctgcaccaagttt

SEQ ID NO: 652983 - DNA, 87 bp, Homo sapiens
cagtctcattttcatcttcccccagggttccacagaagttttgtttctggggcaagcagaaaaattaaattgcccctattttgtata

SEQ ID NO: 652984 - DNA, 259 bp, Homo sapiens
  misc_feature (207)..(207): n is a, c, g, or t
  misc_feature (215)..(215): n is a, c, g, or t
tactaatacaattagccaggtggtagtgagaggtgacaacgggctagcagccctcgctcgctctcagcacctccttggcctcagcgtctgctcttgccatgcttgaggggcccttcagccagccgctgcactgtggaagcccctctctgggctggccgagggggagctggctccctctgcttgcggggagctgtggagagagaggcntgggcggnccgtgccagcgcggttccgggtgggcgcggctcggcgggccccg

SEQ ID NO: 652985 - DNA, 568 bp, Homo sapiens
  misc_feature (236)..(236): n is a, c, g, or t
  misc_feature (460)..(460): n is a, c, g, or t
  misc_feature (485)..(485): n is a, c, g, or t
  misc_feature (498)..(498): n is a, c, g, or t
aggtagaactcttttaactcacttccctgtactacaattactattatgaaaagtgtgctcagacttcctctaaaacacactacagtgtatagaaagatctacggagttagagaaagaaagaagtgcaactaacaccttttcctttctttaagattagacatgttaagtttcatgtttcagtggttcacgttttctcttcaggccgttttctctttttctttttttttagacggagntccctcgggaggttgcccaggctggagtgcagtggtgcaatctcagctcactgcaacctccccctcctgggctaaagtggttctcagctcactgcaacctccccatcctggctcaagtggtctcgtgcctcagcctcccgagtagctgggacaacaggagagcgccaccaggcctggctaattttgcatggttttgtagaggcaggggtttcaaccatgttggncaggctgggtctcagaactccttgnataaaataaatgnttaattggtgggcattttggggttttccaaaatgagaattggtggtttaaaatgccaaagaggggaagaa

SEQ ID NO: 652986 - DNA, 296 bp, Homo sapiens
ggtcgacggaggttgtggtgagccaggattgtgccgttgcactccacctcccgggttcaagcgattctcctgcctcagcctcccgagtagttggcattacaggcatgcaccaccacgcccagccaattctgcatttttagtagagacagggtttctccatgttggtcaggctggtctcgaactcccgacctcaggcctgcctcggcctcccaaagtgctgggattacaggcgcgacgactgcacccagccttatgtgattatttttgagaagagaaactaaaaggaatggtcgacg

SEQ ID NO: 652987 - DNA, 656 bp, Homo sapiens
agcgggctcctccgcaaccgatccaccgcatcctggcaactgagcaggctccgccacccctagagcacaggggccaggtctgtagggatggcgctttcctgacggcgaccggggtcctcgtactgaccgcccagactagctaaactggcttttctgtggttggtgctcaactttggggacttgggacaggtttcttgatttcccaaagcttctccccttggtttgcctgggttactcgtcttcaactgaaatgcactgaaaaccaactgtgtgcccaccccaacccaaacacacagaggcccaaagggttctggctccttgcccctctgcgacagcaaccctcaagcccagaaaagacttatccttttgctgacgtatttttcagtaaatatgggctgctgtttcccacctttcagtagtgacacgccgttatcgtctaaaaccaagctggaacattacccgtcctgaccagctctgccctcccgcagtcccctgtatattccctctattccaaatgctttatgcattatttccttctcgagcatgagctctctgatacctacggttgtactcttatctttgtatactccatagtgcagcgtggtgcatgacacaaagtaggatctcagtcaatgtctgctgaatggaccatggtg

SEQ ID NO: 652988 - DNA, 288 bp, Homo sapiens
  misc_feature (224)..(224): n is a, c, g, or t
  misc_feature (235)..(235): n is a, c, g, or t
  misc_feature (260)..(260): n is a, c, g, or t
ttggcagcaatcaatgaaaacttgaacagtggggcacagtggctcacgccaaaaactgttttttttcatccgggtggtggttaacccaggtttatccaaccttgggaactaatttcacttaagcaatgaaaattgaaccaaattcgcagtttacacaccaaggattgacattttccaaaaacaattacttaaggttttaacaagttcaggccaaaaggaattancattctttggntgatttcctaatttaccattaaggntctcaaaagaaaagtctcaaaagacctc

SEQ ID NO: 652989 - DNA, 283 bp, Homo sapiens
cacctgtcgtacactcgtccccatgttccaatgatgctggtcaactgctatatacagcttcccatctttcttctcgcccagtcatcgtagcctttcttttattaaacacatgatccctagtactcatctttggaggacaaaaggcttaccatatgttagaatgatttgaatctcatagtactcacaacaacgagccgcattgaaagttgtgatgcattcatttgcagtggaacattctcaatcagtccttccactctaagtaaatattaggatcatgaacaca

SEQ ID NO: 652990 - DNA, 336 bp, Homo sapiens
gggagccgagctttgcttgtctacgtgatagctgcacgccgaaagcccgaagagggctagtagcattgcggctcgaactggtctcattgcgctctcctgcagagtcactaggaccctgaccacacctcctgtgtattcccccagtatggagccgtcgtggcgtggggctggtttagcaccagcagggccactttttaccataagccctgctgatgtgtgtcattattttccggctaacaatcgttggctatccagaaacatataataatttcaattcgttaccataaccggatgccacttcgggtaatccccgaaaacgtcgcccgggttcttgta

SEQ ID NO: 652991 - DNA, 465 bp, Homo sapiens
tttacaacgatcactgactggtggggggcatcatactaccagtcgtgtgtgtatactaaattagtataggatgatagagttgatacacgttaattgtgaccatttcttgtctattatgaataatgctgctatgaaaatctgtgtacaagttttaatgtggtcatatttcatttctttcgggcatatgcttcaaagtgcaattgcttggtcatatggtaactctgcatttaacctttgagaggaactgcctgattgttttctgaagtgagtgcaccactttacattttgtaccaccagcagtatttgaggcttccaatttatctaaatcctatgcaacataagttattttctaaccatcctagtgagtgtggagtggtataacatgatggttttgattttgcatttcccagatagcaaattatattgaggattttttcatgtgcctgttagccatttgtatttcct

SEQ ID NO: 652992 - DNA, 935 bp, Homo sapiens
  misc_feature (583)..(583): n is a, c, g, or t
taacatgaaagccattaactccgggggaattcctcggggtcccaggttacaaaattttccgggatgtcaaagtactcagctcggggatgatggggacggggtgtcaaaacagtttgtgagggtttgtgccagaaaaagtttttctctttatttcccataatgtgggtctaaggtccgttccttccagtggtctctcagtgtaaataagggtggcccagtggcaatcatgagttctgtacattgttatagctgccttggtaagtggacgagctttccaaatccctttattcatatcgacccctgggtgaagggggggtgtgaaggggtatgagggggcttgtgcatatgagggaatgtgacaggatttcattatgcacggaattgatgcgttatactcaatagagacttcaaaaattaccaatcgtccatgtgggtagtagaaaggtgcttgaggggatgcacaccaaagaagaacgggggttgcaataaggggagaggtaaactggcgtggagtagttgtcactaggaacaagattttttttagagaacgagaaacgcaaaagctgggttttggaagaaggangcgtctcgagaaagagggaccctccctttcaagcccgtggtggtgggccccctggtatttaaccacttctggacgtgctggcggggaggggacgccgttttgaaacaaggggttcccacatgtaaaagacaggtctataaatattattgcggcccgacgttccaattttctccctcccaacactcaaagcgggaaaacagggctcgtgggtcagaaacgagtgtgatgtcacacaccggaggagggacatctaatgccagcgaagcccctgtgtgacatgtgttggccacggcgtacagggaagcacaacactcgtggtttggggatcacacaggtgttgtctgacaatttg

SEQ ID NO: 652993 - DNA, 916 bp, Homo sapiens
gagtcgccgcgggaccgggggcgctgaggtctgagacgggggtcgccatgatccgtttatcctcatccagacccgggcaggcaagacgcgcctggcaagtggtacatgcgaggttggctggatgagtggagaaacaggacgctgagtcagaggggaggtgcatgcgggtggtccaccgtccgagacgccaaagcgactacccaagctttgtggggttccggggaacttcagagatcatttttacccgccgcatagtgctggcctcgtacttcgtgcgatcgtgtgtggatgtcaagtgacaacaacctggcttacctggaggccatgcacaagttcgtggagggtcttaaacgagtatttccacaatgtctgtgaacgtggacctggtgttcaacttctacaaggtttacacggtcgtggacgagatgttcctggctggtgaaagtccgagagagcagccagacgagggtgctgaaacagctgctgatgctacagtccctggagtgagggcaggcggagccgcatccggaccgggccctcctggactcgcctgtcgctatccccttctcaggccgtggcaagccgagcagccttcgctcagctgcctaggaggaagggacccagtggcgtctgggccacaagggaggggacggccgattgctctggtgcccggcgtggcatgcgggcacggggtgtccgagtacagggcgatgcgggtgcagccaaaccgttgtccgagaatcccataacggggcggcaaaaaaaggggaaaaaagggggcgccgtcgccaatcgttgaacagctggccgcgcggaaaaaaagggcatcgcaaagaggaacaagggggccacaaacagcggcacgtgacacagggaccgtcagccgaaaccccgagggcaaatgcagaaaacagga

SEQ ID NO: 652994 - DNA, 357 bp, Homo sapiens
gctcccaacaagacaggttgctttgacaatttggagtagatctgcaagcttcagactcggttgtgcattcattcaggaagtaaaggatagctagagcagtgcgtttagtgtgtgtatgtgtgtgtgtgtaaatgtttatcatacatacatagggcttgaggcaagggtgggagtgtcattgttgtattttaagtgaataaaaaattttgaagtccatttctgttctttattatctctggtaaagggaaagaaaaatatcctccttgtgtgtgcacttttctagatctttccttgggctgtcttttgccaccatggtcacctggacccttaatctatgttggagagctttgggtaccc

SEQ ID NO: 652995 - DNA, 208 bp, Homo sapiens
ggtgaggactccggcacagggacagtgatgatgacgagcagtgatgacgagcaggaaaagaagccagaagcccccaagcagtcaagaagaagtggcgccgaatgaaccgcttcacggtggctgaactcaagcagctgggggctcggcccgatgtcgtggagatctggaagatcaagaagctcattaagagctgggaggcggctcgcag

SEQ ID NO: 652996 - DNA, 382 bp, Homo sapiens
tcggcgccgagcacctctatgcatcaggacatgtgtaagaaagagctgcgttcttgccaggcacggtggcttacgcttgtaatcccagcactttgggaggccgaggtgggtggatcacctgaggtcaggagttcaggaccagcctggccaacatggcgaaaccccaatctctactaaaaatacaaaaattagccgggcgtggtggcacacgcctgtattcccagctactcaggaggctgagacaggagaatcgcttgaacccaggaggcggagtttgcagtgagctgagattgcaccactgcactccggtctgggcaacagagtgagactctgtttcacgaaaacaaagacaaaaacaaaaacaaaaaaaacaaacaacaca

SEQ ID NO: 652997 - DNA, 444 bp, Homo sapiens
cggggctgaccagaggatccccacttccagagtagttcagaaggaatggtagcagctcctctttgtacctctggtagaatttgggtgtgaatccatctggtcctgggcttgtatttggttggataggctattaatgactgcctcaatttcagaacttgttatttgtctattcagggattcgacttcttcctggtttagtcttgggagggtgtatgtgtcaaggaatttatctatttcttctagattttctagtttatttgtgtagaggtgtttatagtattctctgatggtagtttataattctgtgggatcagcggcgatatcccctttatcatttttttattgtatctattcgattcttctgtcttttcttctttattagtctgactagtggtctatctttttatcttttcaaaaaaccagctcttctactctggaaaggtg

SEQ ID NO: 652998 - DNA, 303 bp, Homo sapiens
tctagaggaccccgtcgtacagttgcggatatggtacggccggtgcgagattaacctctccccggatttcacaggcagcgagaactcacggacgccgcggaaacgcgacgctttccaagggcacgggccctctctcggggcgaacccattccagggcgccctggccttcacaaagaaaagagaactcttcccggggctcccgccgggcttctccggagaatcggtcgcgttaccggcactggaacgccctcgcggccgcccaatctcccgccactccgggattccggggaatctgaaacccga

SEQ ID NO: 652999 - DNA, 234 bp, Homo sapiens
  misc_feature (191)..(191): n is a, c, g, or t
ggtggacagctgttgaaggtagacattgcctaagaccgacttcgggggtccccggtctgcgtggggatgaacatcgacatcgccagcatcgacatggtttccgaagtcaacatggattataccttaaccatgtattttcaacaatattggagagtaaaagctcgctattctgggtccctctcacctcacgnttgacaatcgagtggctgaccactatggtgcccgacacatatt

SEQ ID NO: 653000 - DNA, 814 bp, Homo sapiens
ccttgttgttccttacgtgagcgcccctcttttttcttgtactcgccatgaggttgatttaatttgtttcccgcctcaatagcatgtgttgtttagtgatctgttgtgtggcgggcctccatcgctagttgattatacttgctgcctccccttcttgtcgttgtgtttttatctattcccctaggacttggcttgccggcacccccactccccctctggtggtggtggtgtgttttcttctatttgtgggtggtaccccacccccgcctgcgctggtttagaccccccaccctctgatctctcttttggagtggcatcactgcccaccctctgttatgtacacgcaccttgtgtccggctgctaggggtgggcgccaccctatttatatgtgtctggcgtctatatacacacacccaacagtctggtgttgtgtgggtgatcctcctcaacagaacatctatctgtgtgtgtatattttgtttgctgcgcgcaccactctgtgtgttctgccgacccaacgatgattgtctctcgtcgatgtcccgcagtgagtacaacaccactcaatgggctggtgattgtggtgagtatatactccatcgttggagaccacccgaccactcattatagctcttcctcctccccggcggagcacccccccctattactctcctcccccgcttttttttgtgacgatccaaaaaagaagagaggggttcgatctctccccctcccccccccccacagcgggggggggggagacccccttctttggggtttccccccccttttccccccttttttctttttata

SEQ ID NO: 653001 - DNA, 1349 bp, Homo sapiens
agtttgcctccttcatagacaatggtacggttcctggcagcagcgagaacaatgatgctggatgaccaatgtggatgcctcctgcagcagcagaagactgtgctcgaagcgaacatggacaacatgttctgagagctacatcaacaaccttagtgctggcagctggagactctgggccagtgatgcaatgcttgactgcttggatggctggagctttgcgcaacattgcatgtgggcctggttggcaggcacttcaatgcaacacagtcattgaggatgacgatccaatcaatgcgtaccagaagcatgtgcagcaacgcaattttgtcctcatcaatgacatggactgtgtgatgacatggcttacattgagacaatgtgtagacgcttgcgacgtctacgccttggacagggggccttgaccctggagcgaggactcaatcgttccgtcatggcaggctatattgaagcaggacgactccggggagcattgcaagtcgccaagatactcggggacaacaatcgtgtgtgttggcttgtccagtggaccaaacagtagtcgctgattcccgtgtgaaccagtggcacatgggactacaagttgcatgaggggtcaaatgggctacccagtaacctggacggggactatttctgcacatacctggcaagcactgtgcgccttgacgcgccttggagacaccaattgttacccaagactcaacgtattgaagggacgctggcaagaagccactgggaccttcggcgaacacgacacaccggagggacttgaagccctaggccgggcagccagcgagcacccaacctgacgacatcctcctggcgcggattgacaacacccgggaaacgaatacaaagacccggagcctcccaagacgcgaccgcaaacgaccttcgcaaggcggccccacacaaaaggggtcccaaataagagcagggtattgtccaccatggtgagtatggtgaccccgtacaccactttgtgacggtgaaatggtccgtgaagcactgcgatatggtgacagagagcaggtgacccacaaaataaaagggtggacgtggtccacaaaccgactccagacagtgtgctcaccagccaagctggggagagacgacagacccagcaaccgaagaggcgggccccacaaaaccaggcgcgcacatggtgccgagcagcgaacgagctgaggaacgatacagagaactgaccccacgatgacagctggacatgataacacgacaacacgcatggtgtcagcctcgatggaacagtggaaagatgacccgacccagacgagaacacggatgcgcttggacagcgcagacacaac

SEQ ID NO: 653002 - DNA, 470 bp, Homo sapiens
agaaaaaaacttgggctttaatatatttttgggggggtgaccatgagtgtgtgcgtgtgtgcaaggggaacagttgtttccagggcctcagggccgggcctttgtccttgttttttgctcatccttgcagccaatgcaggccccctccttggggggccggccctgcccctgggcaccccagttggggggggtcagtctttggtacaatggggacactttggtgtgccgggggcaaggttggggggggggccacacagcttttatcatttttgcaaccccaaaaggaaaatggccttgggcccccacaattgtgggctggactggcagggggctccattgcccggtttaaccacccctttattgggatccggttgtttccggggacactccccctttttcagggggacgtcattttatgggaatttcccccaggtagcccgggccttaaacccctttaaaaaatttttggg

SEQ ID NO: 653003 - DNA, 160 bp, Homo sapiens
actcaatatacagttacgtatgcatccggtacacttgtgctgggccgtaatcgatgcttgagattctaaattttttagctgactttgaattcatttcctgtagttgttatggacaccttctccgctgttaggtatgactaagatcatctgaagcctctgg

SEQ ID NO: 653004 - DNA, 1007 bp, Homo sapiens
catatgaattttaggatagttttttctaattctgtgaaaaattacattgttatttacattgtaatctgtacattgctttgggtagtatgaacatgttaacaattgattcttccaatccatgagcatggaatatttttttgtttatttgggtcatctctgatttctttcagcagtgttttgtagttctcttatagagaactttcctctccttggctagatagattcctaggtatttcctttttctgtgtgactattgcaaatgggattgtgttcttgattttgttctcagctagaacattattggtgtagagaaatgctactggtttttgtacattgattttgtatcctgaaactttactgagttcatttatcagctccaggagccttttggcagaatttttagcattttctatgtatagaattatattgtcagcaaagagagaaagttgacttcttcttttcctatttggatgccttttattttggctttggcaaataatttatggctgagttcccaaaagcaattgcaacataaacaaaaattgacaagtgggacctaattaaagagctttcttgcacagcaaagaaattaccaacagacaggctacagaatgggagaaaattattcacgaaataatgcatcttgaccaaggtctaatatccagaatcctacaaggaacttaaatcaaccaagtaaaaacagatagtccatctcacacatgcgccaggactaacagacaccctctcaaaggagacttccagtgacctttgaacaactgttcaaaacgttaatccatcgggcaatgggcagttcaaacccccgtgtagaatccctctttcacccagtaagaaggggattatttaacagtccgaataccgagtctggcaagtctgccctgtgcaaggccattggcaggttcgaaagattaaaagagatccctttgaccagaacgcatagggtttattcccaaaaaagacggacaaattttcgccggccaaaaagttta

SEQ ID NO: 653005 - DNA, 250 bp, Homo sapiens
gccgactgtcagcgtgaaggtggatctgctcttccaagccctgggccgcacctacactgacgaggaatttgatgaacctatgttttgaatttggtctggagcttgatgaaattacatctgagagggaatattaggtaaggaccagggtattgtaaggcagcaggagcctcttatgttgttctttacaaaattgacgtccctcccaatagatatgatctctgtgtctggaggattggttcgaggactcagg

SEQ ID NO: 653006 - DNA, 413 bp, Homo sapiens
aggaaagaaaagaccttttaccgaggaatgtgggctctttcacattattaggcccatagaagcattcaaatgatacggcaatcacatcttattctccccctttagagctatgtattcatctgtcaaaactgcctgctattgccacaagtagctatgaattaacctaataacacctcactggacacaacatcccacactctaaggcttaacaatgggtagccaatcactaatcaatgttatttctgtaaatcaatgagaatccgcggcagaactttgtatcagtccaatccttgtccccctccttttttgcctttaaaaatctgcctgtaataaaggccaagtggagctcatatccaaggtgactgatgtctgaatcttccctatcctggctcaaataaactctttacatcata

SEQ ID NO: 653007 - DNA, 120 bp, Homo sapiens
attttacagtgttagccaccgacacctggtctacctcataaatattgagctctttaattcactatacgggatacttagaataacatgctgaatatcgggattcactgtgataccgagact

SEQ ID NO: 653008 - DNA, 893 bp, Homo sapiens
  misc_feature (36)..(36): n is a, c, g, or t
  misc_feature (48)..(48): n is a, c, g, or t
  misc_feature (360)..(360): n is a, c, g, or t
  misc_feature (678)..(678): n is a, c, g, or t
  misc_feature (864)..(864): n is a, c, g, or t
atccccgtgctgcaggaattccggcacgagattaanaaatggccattnttttccagttcactatgtttgtatactaacttttcttcagccttttaatgcgaagccaactagtagagcatgctttcaggatctgacagctctgctagtagagcgagtatttattaatacagaattaaccttcgcccctttaaagtcaagtctgtctaatctaactagcgcctcgctttgccttctcacaatgctcactagccatcatgctcacccttctctttcagatccacttcctcatgatactgtcttctaactgggcttacttaaaggatgcgagcaaaatgcaggcttaccaggatatcaaagcanaggaagaacaggaactgcaagatatccagtctcggcaaaagacaactcaattttacacataaatgtttgcagaagtgttcggcgacgtattacagcttgacaaatcatagacagtcgtctgagacagatgtgatccaccaactaatgcgatgtcaacacttactgctgctcaagctgtggatgatcttaggaaacctcacgggtaatcctttcttagacaaatatgacgctcatgtagcatttaaaggcacacttgcaaatgacgtcatacttggaattgtgatggtacattatgtaggcatctacagacactatganatgtccactctataggacctggatcctataagaaccggcatgccagatcaaggataaaccgaactacaatatgccattggcctaggtattcaatggataaagggatggattaagtcattctggcagttgcttattaacattggctcaagaaagggatttatgatggttctaagtgaataggtcaantgggcgccccttaaagaatggacgggcct

SEQ ID NO: 653009 - DNA, 234 bp, Homo sapiens
  misc_feature (193)..(193): n is a, c, g, or t
cagggcgtatcatgtcctttatcttgcttacccttttgctgccggccgtctatgcgcctgctcaagcctgcatggccagctgctgatgctggtcaagcctgcagttctgaactgcagccgggccagtgtctggcaatgggcggcatctgtgcgcgatgcctgcccttgttcacctgagtgtggagttggatcnctctagtagtctgaccttgctaggctatgccatagctttgt

SEQ ID NO: 653010 - DNA, 112 bp, Homo sapiens
atggagtcgatactcagactctcaatctagtcgtgctaaacggatacgctccttgacacatccatgtatgtagtctgcacggggaacagtgggatatcctcatcttatcttg

SEQ ID NO: 653011 - DNA, 444 bp, Homo sapiens
cggtgcttcctttgtctcatgaaatatgtgacatttccttaatcattctgttgttttcatagagtgcttatttgccctctgttagcgagaataggctagaaatacttcccagaattgtttatagccctgtaggatttgagacagatttctcatgtttcaggaaaatatcagttggagcaaagagaactgtaaaagcaaacattgaagtcatccttttagtcctcccatggactttgcggttggaggtgacatgccttgtaaacaaaacctgcaccaatatttgtctgaggctgctgtttatcatgttgttgtctctggcaataaaaatgggaaacaattgaaaagccccgtcccaagggcatattaagttacagctggactctgggatagcatgtggttactaaaggtatgtgtttgcaaattatttaaagacaaagggaaaca

SEQ ID NO: 653012 - DNA, 991 bp, Homo sapiens
  misc_feature (158)..(158): n is a, c, g, or t
  misc_feature (162)..(162): n is a, c, g, or t
  misc_feature (167)..(167): n is a, c, g, or t
  misc_feature (254)..(254): n is a, c, g, or t
  misc_feature (287)..(287): n is a, c, g, or t
  misc_feature (293)..(293): n is a, c, g, or t
  misc_feature (299)..(299): n is a, c, g, or t
  misc_feature (303)..(303): n is a, c, g, or t
  misc_feature (314)..(314): n is a, c, g, or t
  misc_feature (328)..(328): n is a, c, g, or t
  misc_feature (331)..(331): n is a, c, g, or t
  misc_feature (348)..(348): n is a, c, g, or t
  misc_feature (359)..(359): n is a, c, g, or t
  misc_feature (376)..(376): n is a, c, g, or t
  misc_feature (399)..(399): n is a, c, g, or t
  misc_feature (401)..(401): n is a, c, g, or t
  misc_feature (411)..(411): n is a, c, g, or t
  misc_feature (413)..(413): n is a, c, g, or t
  misc_feature (417)..(417): n is a, c, g, or t
  misc_feature (430)..(430): n is a, c, g, or t
  misc_feature (464)..(464): n is a, c, g, or t
  misc_feature (467)..(467): n is a, c, g, or t
  misc_feature (470)..(471): n is a, c, g, or t
  misc_feature (480)..(480): n is a, c, g, or t
  misc_feature (491)..(491): n is a, c, g, or t
  misc_feature (502)..(502): n is a, c, g, or t
  misc_feature (512)..(512): n is a, c, g, or t
  misc_feature (516)..(516): n is a, c, g, or t
  misc_feature (525)..(525): n is a, c, g, or t
  misc_feature (528)..(528): n is a, c, g, or t
  misc_feature (531)..(531): n is a, c, g, or t
  misc_feature (537)..(537): n is a, c, g, or t
  misc_feature (541)..(541): n is a, c, g, or t
  misc_feature (546)..(546): n is a, c, g, or t
  misc_feature (548)..(549): n is a, c, g, or t
  misc_feature (564)..(564): n is a, c, g, or t
  misc_feature (569)..(569): n is a, c, g, or t
  misc_feature (578)..(578): n is a, c, g, or t
  misc_feature (597)..(597): n is a, c, g, or t
  misc_feature (599)..(599): n is a, c, g, or t
  misc_feature (604)..(604): n is a, c, g, or t
  misc_feature (610)..(610): n is a, c, g, or t
  misc_feature (621)..(621): n is a, c, g, or t
  misc_feature (626)..(626): n is a, c, g, or t
  misc_feature (634)..(634): n is a, c, g, or t
  misc_feature (676)..(676): n is a, c, g, or t
  misc_feature (689)..(689): n is a, c, g, or t
  misc_feature (876)..(876): n is a, c, g, or t
  misc_feature (900)..(900): n is a, c, g, or t
  misc_feature (991)..(991): n is a, c, g, or t
ggcagggtagcttctcccgcccccacaggttcttctacctctaccacttcgccttctatgcctaccactaccgctttaacgggcagtacagcagcctggccctggtcacctcctggctcttcatccagcattccatgatctacttcttccaccactangagntgccngccatcctgcagcaggtccgcatccaggagatgctgcttcaggcgccgccactgggccccgggacccccacggcgctgcccgatganatgaacaacaactcgggcgccccggctaaagcncctgantctgcnggcnagcaccccgcnctgggccccgtctngcntggggccagcgggagtnccgggcctgtngcagcggcgcccagctncctggtggccgcggcagcctcantngcagcagctncnggtngttacctgggttngatggcagagaccgctgccatcatcacagacgcntcnttnnttttttgcnttatctctttntttcttgagcngcgtccagcnatcncgcttggcnctnctngggggnttcnccacncnncccaggatatttttnccccnatttatttnttatcttcttatacaactntncttgnggcttnggtaggagggnatagnaaggaatnaatggttccaacggaggcgccctcggaggtggggtttgagcngcacagctgagcngcctcttaaccctgctggctgggcctgaccttcccgagcccgtgggggtgggggaggccagccacctccttcctctgggactgcccagcctgtgtcgggggctttcagggtttcgtggggtttgcccggaaggcggctttcctccccctgggtgtgaggtcgcgcccgaggcttgtacccgctagtnaaggtgtttgagctggtcagcaangagaggggggtggggttccgcggaaggttcttgagggggtcttggtaggtctgcagtgaaacgtcctgaggatggagtggggtccatggtn

SEQ ID NO: 653013 - DNA, 229 bp, Homo sapiens
ctctgaacggtgaaacacccgcgcgatatttccaacgtcagagcgccgggccagatgctcaggctcctaggactcttggcctgtggctcctcgccatagacactcgaggatctatttctagcgaaagtatgagacctcgtagctactgtagggtatgctactatactagtagtctacctaggggggcagcagtaggagaacggccaggtagggcagcacaggcagtcca

SEQ ID NO: 653014 - DNA, 1119 bp, Homo sapiens
  misc_feature (68)..(68): n is a, c, g, or t
  misc_feature (70)..(70): n is a, c, g, or t
  misc_feature (81)..(81): n is a, c, g, or t
  misc_feature (97)..(97): n is a, c, g, or t
  misc_feature (136)..(136): n is a, c, g, or t
  misc_feature (139)..(139): n is a, c, g, or t
  misc_feature (157)..(157): n is a, c, g, or t
  misc_feature (337)..(337): n is a, c, g, or t
  misc_feature (350)..(350): n is a, c, g, or t
  misc_feature (404)..(404): n is a, c, g, or t
  misc_feature (438)..(438): n is a, c, g, or t
  misc_feature (557)..(557): n is a, c, g, or t
  misc_feature (621)..(621): n is a, c, g, or t
  misc_feature (623)..(623): n is a, c, g, or t
  misc_feature (629)..(629): n is a, c, g, or t
  misc_feature (632)..(632): n is a, c, g, or t
  misc_feature (641)..(641): n is a, c, g, or t
  misc_feature (812)..(812): n is a, c, g, or t
  misc_feature (1024)..(1024): n is a, c, g, or t
  misc_feature (1039)..(1039): n is a, c, g, or t
  misc_feature (1098)..(1098): n is a, c, g, or t
tgaaccagccgggcggcgcggcggctccgcagctgacggagccagttcagccggaagtaaaatcactncnatcattgagcnctttaagcgcaccagnaagatcaccaaggtggatggcccatatccatttccagcngangcctcgcttatttccgancaaggaacgattacggaggtgaaggtgaaaacagatctgcccgataactacatccataaggtgatcttgcagggcgaggccaaggaggagaagaaggcggtcagcaaggatgggaccagctacgtgccttccgaaatctgctttgtgatcggcggcgtccgcaaccagcagacccttggntcttactaattcngaatcttttgcaagaattacaattattacaacttcttccagacccacgttcggnctcaccgaaacaccgaagccacctcatgggatgnagcctcccaaatcaacaatttcatgtacacatgttatatctgctggaagaagtacaaatactacatctgtttccaatatcaccgatacctgcacgcatgatgtttttagtgtggaaggngccccttataaccgggcagaccccttctaccaaagtgtcgtggccacggacgatgtgaaagatnancccccnganccattccanaaaatcgggccaatgaacaatattacatcagacatttttaagaagaaagaagttaggcagtgccaaaagagagaaactggcaattacacctgtgaattctgcggcaaacagtacaagtactacactccctaccaggagcatgtggccttacacgcccccatcagtactgcncccgggtgggagccaccggatgatccagacacgggctctgagtgttcacatccagaggtctccccatctccacgcttcgtggcagcgaagacccagacgaaccagtcggggaaaaaagctccggcctccgtggtccgatgcggcaccctcttacaccgcacccctccagccacccaaacccagacgttccgcactccaaattcgggatctcngcgagcaaggcaacncagccagaggtacttgtggcaaggaaagctattcaaatgtgcatatcagctgagcagtntaaagtttgcagctcaattgt

SEQ ID NO: 653015 - DNA, 225 bp, Homo sapiens
ctccagatacatgtcaaaaaaaaaaaggtgtttgggcttccgttttgtttttgcccagtaaaaaagtcaagcaagtttgttccaggtgccccattgagctgggtatgcatttttgtttatttcaataaaaaatatttgtattatttgtccttcaaactatccatccatcccccccttttttttgtatcaggtagtttaataaaaatatccctgttttgttctaca

SEQ ID NO: 653016 - DNA, 289 bp, Homo sapiens
  misc_feature (26)..(26): n is a, c, g, or t
  misc_feature (272)..(273): n is a, c, g, or t
tcagtaggttacgctgcatctttgtntttattctgatcccttggacacacattaagtgtttcagatgtagatcactacagcttttcttttcttttcttttctttttttttagacagagtctgactctgttgcacaggttggagtgcagtggtgccatcttggctcactgcaacctccgcctcacgggttcaagcaattctctgcctcagcctcctgagtagctgggattacaggcatctgtcaccacgcccggcttttttgtatttttagtnnagacgggattttacct

SEQ ID NO: 653017 - DNA, 149 bp, Homo sapiens
gccaagagagagatcccgggtgcataactgctggcagcaccgacgaaccccaatgctgaccaaggaggagcctgttccagaactgctggaatctgaggccccgaagcttacctgtctttgagccagtgccacctgtcgggctagtcggg

SEQ ID NO: 653018 - DNA, 118 bp, Homo sapiens
agatcgacgtgcgaaagcgccgagaatggcggcgggtgcgcttataccacgggcctgcgctgtagcctgcgcgttgtgcccccatgctgcccatgctgtttgtacatgctggggtgac

SEQ ID NO: 653019 - DNA, 150 bp, Homo sapiens
gggctgtaagcatggatatgcttgggtcagaaacaggccgaggcagacagtcgggccagagtgactcagcaagtctggagcacaggcgtataaatccacttttggttttattggttggtttaggttttttttttggctgtggttttggaa

SEQ ID NO: 653020 - DNA, 402 bp, Homo sapiens
  misc_feature (54)..(54): n is a, c, g, or t
tgggcttaagtgattctcctgccctcagactcctgagtagctgagacccacagntgcatttcacccactcagcctaatttttagtttttttgtagagatgaggtctctaccaagctggtctctaactccctgggctcaagcgatcttcccatcttggcctcccaaagtgctgggattacacatgtgaaccactatgcttggctcaaagatttattgataataccctgcaagcacaagcgtgcaaagcaaaaatggacaaataggatcacatcaagttaaaaagctgcacagcaaaggaaacaataaacaaagtgaggaaacaaccacagaatgggagaaaatatttgcaaaccacccatctgacaagggattaattaccagaatatataaggagctcaaaca

SEQ ID NO: 653021 - DNA, 1215 bp, Homo sapiens
  misc_feature (1215)..(1215): n is a, c, g, or t
gcacaggtgtcgtgaaaactaccccgtaaaagccaaaatgggaaacggaaaaaggactcatatcagcattgtcgatcatggacacgtacattcgggcaagtccacacagtacgtggccatctgatctcatgaaatgctggctggcatcagacaataatgagaccatgtagaaccatacagtttgacgaaggacggctgctgacgatgggagacagggtcgtccgtgtcatacgtatggcctgggttcttggaataagaacttgcataaggctgatgctggtggaaacagtgagtaatcatccaattattgtactatactcctttcgttggcatagaattttgcatggaacccaaggtcgatagctacgtgatgatgacactagtccatgtagatagcctcccagagtagcacattggagaatcttttactccagaaggaaacaatgaatgtagcagcgggaaccgagtctcaagagactggagcttgtagcatgtgcctggaattgttcgctgcatgagttgtctagggagaaatctggaaaggcttggtaagttctccagatgatagtggcgcatgacccgcgagtagcattgccccattcgctgggcatataacaaacaacttggggatgtgaacaaatcaatacattgaaatcggaggtccgagcttgtctaagacgtacacagactcggaacttccggacgtgaaagacacgactcgcatttgacgcaggccccaggagaagcagccaagtcatgaaagggtgacaagtttgcttacaagggggcaatggttccaaggcaactttgacgattttcaaggacaaacacagtttggggccttaaagaaaaccccctataaggaaacaacggtagaaccaattatttggtaggcccgcagcattttgggcccttaggggtccttgaggacaagtaagtggtctcgaaccttaccaccaatttgggccttggtgcatgtgccccaaatatggttggccattacaacgcaaattggacccttttaggcggttgtcacacagaagagggggacaccttgggggaataattggtgacaatcccccgggtgtcaaacgagggactttcgagtctcgagattcggccccaacgcttgtgcgaaaacgccaaacgggcttggcgctatggaagcgggggtccatgggaggacccttagcctattgcccgtgaaaccgaagn

SEQ ID NO: 653022 - DNA, 456 bp, Homo sapiens
  misc_feature (8)..(8): n is a, c, g, or t
cccacttnttgagataaaaggggcaaaaccctttgtgttccactatagcttcacgaatcagcaggctacccaaagatcacattctgagaaggattcacccccacacggagtgggtattatttttcctctagtgcatttaaaatatgattggattttaaatattcattttccacacaattaattctactaaaacatggggcccagcaaatgataggttctccacaaatgtttgaggacaacctgaatgaaccagtgatgggaatgaatgaacaatatggcactgtgccctcattttagaatctgaaatgagatattcacaggcttttttttttttttccttcttcgggccctcccaccaagggaaataggcttctcattggcctactagaaaattgttttcttccaagggagttggcggacaacttgaaacttggtcctacggttatacgacctcca

SEQ ID NO: 653023 - DNA, 1015 bp, Homo sapiens
  misc_feature (47)..(47): n is a, c, g, or t
  misc_feature (84)..(84): n is a, c, g, or t
  misc_feature (148)..(148): n is a, c, g, or t
  misc_feature (170)..(170): n is a, c, g, or t
  misc_feature (179)..(180): n is a, c, g, or t
  misc_feature (245)..(245): n is a, c, g, or t
  misc_feature (273)..(273): n is a, c, g, or t
  misc_feature (416)..(416): n is a, c, g, or t
  misc_feature (440)..(440): n is a, c, g, or t
  misc_feature (526)..(526): n is a, c, g, or t
  misc_feature (542)..(542): n is a, c, g, or t
  misc_feature (603)..(603): n is a, c, g, or t
  misc_feature (639)..(639): n is a, c, g, or t
  misc_feature (641)..(641): n is a, c, g, or t
  misc_feature (644)..(644): n is a, c, g, or t
  misc_feature (647)..(647): n is a, c, g, or t
  misc_feature (654)..(654): n is a, c, g, or t
  misc_feature (667)..(667): n is a, c, g, or t
  misc_feature (673)..(673): n is a, c, g, or t
  misc_feature (689)..(690): n is a, c, g, or t
  misc_feature (725)..(725): n is a, c, g, or t
  misc_feature (737)..(737): n is a, c, g, or t
  misc_feature (743)..(743): n is a, c, g, or t
  misc_feature (752)..(753): n is a, c, g, or t
  misc_feature (755)..(755): n is a, c, g, or t
  misc_feature (762)..(762): n is a, c, g, or t
  misc_feature (771)..(771): n is a, c, g, or t
  misc_feature (774)..(774): n is a, c, g, or t
  misc_feature (807)..(807): n is a, c, g, or t
  misc_feature (813)..(813): n is a, c, g, or t
  misc_feature (815)..(815): n is a, c, g, or t
  misc_feature (822)..(822): n is a, c, g, or t
  misc_feature (870)..(870): n is a, c, g, or t
  misc_feature (908)..(908): n is a, c, g, or t
  misc_feature (928)..(928): n is a, c, g, or t
  misc_feature (931)..(931): n is a, c, g, or t
  misc_feature (938)..(939): n is a, c, g, or t
  misc_feature (1001)..(1001): n is a, c, g, or t
ccgccgcttcgccgcagcgttgagccccggggccgcccctaatttgncaaaataacgcaggagagaggagccaaaaaagttcanactgctggaggaaaaaataattaactaatgaaaaaaaagtcagggggagaccttcctgggcctncctttcgtcccaagtgccccgntctaggganntagtggggagatgcgcgcgattcatagagaccatgggcgaggaggtggggcaggaaaggcgtgtnggcagagtttagtgtttggcaaacagtngggctgggggtgggatctgggagggagccgacgcgggcgctgcgcggaagggaaaagatcttggaccctgccaccggcccataggacgactctaaaaacactttataaaaattgagaggccgacagagtagaaagtaaaaacnagtcatcagaatcaaaaactaaanagtggaaagatttttttttcttgtctaaaagagcaaaaaactacaaacagcccaagtcctgaagctccccaagacctggatcctcnactgtccccctgaaanccggcaggagcgcgggatggggagcacaagagagatgggttcttaaaaaagtcacccgctnagatgggaaaagctcttcatcttctgccgccttccncngantcncgcagcngcagaggagaganatgganaagaacggggctatgnnggcaaactcaacttcttcccctttaggactttggngatatagaggtngaaganatcgcagtnnangactgtntggaccagnccnaccacaatggcgatgaggtcgagaagccctcgnaatggnancgcaganccagttgaagagatagagcgtgcggtaaacgcctagcgcaaacaagtngtggctggtgaaggtctccgcctcgccggtcttgctcnccatgaacagctgcggcaanatngccactnnctccaggtagatggagaaggtccagaggatctccagaagggtgaagtcatgattgaccaggncgccagattggtgg

SEQ ID NO: 653024 - DNA, 1148 bp, Homo sapiens
  misc_feature (1148)..(1148): n is a, c, g, or t
cggacgcgtgggtcgacccacgcgtcgagcctcccgagtagctgggactacaggtgcccgccaccacacccggctaatttttttatttttagtagagatggggtttcaccatgttggccaggcaggtctcaaactcctgacctcgtgatctgcccgactcggcctcccaaagtactgggattacaggcgtgagccactgcacctggccagcttcgtgtgtatttatagctgctccccatcactcacatcactgcctgagctccacctcctgtcagaacagacccagcattagactcccctaagagcgtgaaccctattgtgaactgcgcacgtgaaggatctaggttttgcgctccttatgagaatctaatgcctgatgatctgagatggaacggtttcatccagaaaccatccccctgcttccctgtctgtagaaaaattgtcttctatgaaatgggtccctggtgccagaaaggttggggactgctgtcataaataacattgaatttcatgtgggttttttttttggacacaccaggcatgtcatcttccattcaaaggctagggctacagagggaaggggttagccagaataatttatccagatggcttcaacacaaaaggataacaaacgttggcaactagatctagtgcctgcaggtttgaccaggtcatgcggggtgtgtgcgtgtccaggcctccggggattttcccggggttatccagtggcgcgtgcacaccggctggattcaccggtgatcaattcttcaccatacagcgccaatccttgggcctggttttgcgaacaggtttttggcccaggtatttatcatctcggctgggacgtcgcatcatctggtgcagcgcaaccatgcacctatgcgagaagtgccctcaccggttacccacctagtggcgtgcacaatgtatatagcggaacacaccggactcccggtagggagagacttcaacgcagcatcttgtgtttcgctgggccacacagatagctggtatacgactggtgtgctgctgaagaaacccattcgtgcaaacaaaaacggcggcgctagtcatcacaatgccctgactaattcatgttaaaaagtgccacgaatgagtgattagcagtacatcacttagtctaacan

SEQ ID NO: 653025 - DNA, 85 bp, Homo sapiens
taaaggttaaaattagattttatggttacaaggggggaccccaccaagcagggtcagtgacccccaaggtaggtgctggagggtg

SEQ ID NO: 653026 - DNA, 467 bp, Homo sapiens
  misc_feature (96)..(96): n is a, c, g, or t
tagatcaggcagcccttgagcataggtgttatcgcaacacacactccacactttaaggtacaatgatagtgcaaaagcattttgcggacgaatagncatacccaccacatcacaccccagcgtttgcatcatgcggatttccgctggtgtttcgaaattaggcccggtgtaagcggcaaataccccttcagccagtggaatacccacgcgttcagccacctgggccaactggctgcgcaggtcacgatcataagcgttcgccaggctaaagaaacgcggaccaaaacgctcatcgttgtcaccaaccaatggcgattcaggcataaaattaatgtggtcagtaagcgctaccaggctgcccggtggtaccgactggcgcagcgaaccggctgcgttggtcgccagcaggaattcacaaccaagcaatttgaaagtgcgcacggcggtggtcatcacttggtcgacgc

SEQ ID NO: 653027 - DNA, 146 bp, Homo sapiens
ctgcacatggacagagcaggtagaagagacgacataaaaaaatcagttagcagcttcacacttgcttatgagcaggctcatgagaactcactatcactagatctgaccctgtgatccaatcacctctgctgggaagccacgcggtc

SEQ ID NO: 653028 - DNA, 160 bp, Homo sapiens
aaaacaatagccaggtgtggtggtgagcacttgtggtcccagctactcgggaggctgaggtaggagtactgcttgagcccagcgaggcagaggttgcagtgagctgggatcgcaccactgcactccacccttaatgacagagtgagtgagcctctgtctt

SEQ ID NO: 653029 - DNA, 420 bp, Homo sapiens
ctagaggatccccgcggcagtggagagagaaagcaagagcaagatgaggaggtggggaaggctgatgtttgtatgtgatctcagagattctcctcgtgtgggaaagaggttgaggcttcctggtgtccttcagagtaatcctgaggagtcccagcttagggagtcactattggaggcagagaggcatgcaggcggggtcctaggagcccctgcttctcgcggcactcttgcctttgatgtcttcgtgtgaatggatggcctccctactaggacatgggaggagaataacccaggtcttaaggaccccaaagtcaggatgtagtatgatcttctcaatcatctagttccctgcttgatgagaggatcctaatgaaatacctgaaaaatatattggcatttatcaatggatcaaatcttcat

SEQ ID NO: 653030 - DNA, 591 bp, Homo sapiens
  misc_feature (15)..(15): n is a, c, g, or t
  misc_feature (171)..(171): n is a, c, g, or t
cacaaccaaaaaaangacaatgacactctcaaacaaaatggacctacaagatattacaggaacgttctatccaagatatgcacaataacattctcctcatcatacatttacattctccaagatagaccatatgataggctcagaccacagtggaataaaagtagaaattanctgcaaaagaaaccctcaaaactatacaaatacatggaaattaaacaatctgctcctgaattatgagttaacaatgaaatcaagatggaaatttaaaaattcttttaaatgaatgacagtagtgacacagattattaaaacctcttgagatacagcaaaaaaaaaagtgctaatgggaacgtttatagtgctaaatgcctgcatcaaaaagtcggaaagatcacaagttgacaatctaatatcacacctcaaggaactagagaaacaagaacaaactaaacccaaagctagcataagaaaagaaataataaaaatcagagcagaactaaatgaaattgaaacaaaaaaatgcaagagataaatgaaaaaaagctggttctctgaaaagataaaattgatagactattagctagattaacc

SEQ ID NO: 653031 - DNA, 179 bp, Homo sapiens
cttttttggaattttggggtgggggtcatttttggggattatggctgccccccgggattttagtgtaggaagtgtgggaccacccttggcaaatggggcacccgtgccctgcaggtgtttacaaaatcccccatttgtaatgtccttggcccaataaaaccaaatgtcagtttccctga

SEQ ID NO: 653032 - DNA, 825 bp, Homo sapiens
caaaccttctgtaatctctaaaacaatgggaccaagagtccactgagcccattcagcaacgtttacaggtttcgttctccggaacgtccaagacctggtacacagtcagtagtgtcaatttgtgtaaagtgtggtacttgttgtcacaaatgtgtctaatataatggacgcatgagccggtggtgaggcaatacggaatagcaatcaaccagtggtcaagacgagtttgtggaagtgtggcagtctggtctggaccgtcagtgcggagcacataactcgcgttcatgagtacagttgctgcctacaagagcagataggggagcgcgacacgacgcatggtgatagagacatcactagagatgtacaaaatatacgaaagctggactgtcaagatcaccacagacgtgataaccagcagctagcacataagacatggtgagagaagcaagagcaaggggacagaccataggagacgaaccagtagcgcgatatatatcagtgagacacagattacacaagtgggcaacatcacatccacataaccatcaacaagggacatgctaagatgaaggagtgtaaagagtagacatagcggatgtcacgtgcgaagaacgacccaggacatcggggtggacccgagacccagtcgggaggggcaaccacaaagtaacacgcgtaacagagcgtggacaaggggggaagagggcgcggaggaggagaggaggaagcgggggcgcggaggagaaaggaggaaagagagggcgagggggaagggaggaggggggggagcggggacggggggggggggggagaggagaggggaga

SEQ ID NO: 653033 - DNA, 412 bp, Homo sapiens
  misc_feature (403)..(403): n is a, c, g, or t
cccccctgcggatgggaaggtgagtaccagagaggagggagctgcacaaagagatctgctcaatagtacttggaagtcttagacaaaataactctggaaaattataaggctgaggaattcccagtgttcacaaagaacaagggtaagacatttaaatttggtcaagctagagtagaaaagccactctaaacactggggcaacgaacagacttcttggggagggccatcctttatatcaaggctaacctagttctaggtctgtcctaaccaaactgatctacaagtaatttaaatgacggccaaaacatacttcaccattctttaatgggataaaatctactcaaccctgcaacattccaaatgtatgtcattttaccaaaaatttctagatatctgaaaatgncacaaatgg

SEQ ID NO: 653034 - DNA, 380 bp, Homo sapiens
agttgttcgtttggagttactgttcgaagtatttattgaagatgattacgatgagtctcagtcggacgggtgtagagaattctaagaaggtacgaagttagttttcgtagcgttgcttatttgttttctcgggttcgttcgcggtctcgccgtttcttctcgcggtggtaggattcccgaggggtcctgcgtttcgtctcggggtttaggtggggtcggcttatacctttaggttttaatagttcctaaagacgggcaaaggagtccgtttctttcgggtttttgattccggcgatctgttttattatttttagtttcgctttcgttattttcttcagcggggatcagcgaacgatccgattcgcgattctaactccgcg

SEQ ID NO: 653035 - DNA, 991 bp, Homo sapiens
  misc_feature (505)..(505): n is a, c, g, or t
ggttgatctgcagaagccctaggtagatagtcatgcagatcacagacggtttaccagtcttcgtgttcactttagtaacacttgtgaatgtgctcaagtcatcaaaggtatgcatgttcgaatagtctgaatctctcttagagatgctcacttcacagaaatcctgtggtgttaccaatgtgccgtacgttatcacattggctgagaaacgattaggacaggatgatagtcgccagagaccaagtcgaatgccgtccctggtaactactggatggatctgtgtgagtgcgctaataacagatgtgcttgacactattaatggcctcgtgagcatgacctcttgaaacactgcgacaaagtctatgatgcagtgcaacgtaaatgagtggtatgtagtattgatggtaataccggcactgtgactcttcttcgcagccattagtccatcgtgtgaacaatgagctacctgtaaagacctacaggccgacccggagaccagactccnacctgtcactggaacagcaaactgcaggcgcagtaactgatggacgccttcgtcctccgtgaactcagcaagtttacatgactgtgaaatccgtgtcactgtgtgaccgacacgtgcaaccacacgcacgtacgcatatgcgcctgaacaatccatagaacgaacgtgaaggcgtctatggttccccagtacaagatcaaaccatacgtgaatatgtctcacgaaaagaagagggagaagaaccttcgtagacgcaacaaattagataatctacccttgtacaatggggccaactccgtgggaactgtatacaacgtttcccacgacgaattgttccaacacggacattcaccacttgcctacaattaaacaattgggcggtaatcgcccaaatatatccacaatatacaaaagaaagaacccccttcaaatcagggccatccatataagtcactacagacatgcacaagaaacgggcataaacct

SEQ ID NO: 653036 - DNA, 219 bp, Homo sapiens
tgctgggtgactctaaggatcccatgcaccattccgactaaagaggtcattcacttgttactcttagctgtctagctttttcaactttcgagacgtctttcaatatcatcatctggaatagtcagctgaagtgatcgttaaggtcttcaagacctgatgcagtagtattaacattgagtgatgaatgaatattactgggagggctcggagaggagatgc

SEQ ID NO: 653037 - DNA, 146 bp, Homo sapiens
cggaccaggatggcggaggctaataacccctcggagcaggagctggagagtgagcctcgcagctggtccctgactagagcagctgggcctggccggggcagacctggcggccccggggtacagcagcagctggagctggagcggga

SEQ ID NO: 653038 - DNA, 1930 bp, Homo sapiens
  misc_feature (950)..(950): n is a, c, g, or t
cccctagccttaccagtggctgggattacaggcacgcaccaccatgccaagctaattttgtatttttagtagagatggggtttcgccatgttggtcaggctggtctcgaactcctgacctcaagtgatccaccctcctcggccttgcaaagtgctgggattacaggcatgagccaccacgactggcctgaaggggcttcttcatcttggggagttggtggaccctgtcctgcctcagccacggcaccttgcaaatatcagctccttggaacaggtgaagttccaggtaccaatgccaatcagaggaaggcagtttggttcaggctttggagttagaaacacctgaagttgaatctgggctctgttgcttccttctttcatgggctagagcacgactctttacctctctcttggcctcaatttcctcacctgtaaaatagatgaggaagctgctcacttattattgtctcgttctgaaagcttggaaagctacatcgaagatgagctcttcattcagctttgatttgacctgtacccctggtgggggattgcactggcaacatttgggtctcagcaaaaaaaccaagcacacacatctttccttccatttattgaaaaacatctttgtaagatccattcattgaaaaacataatccatttattgaaaaatatctttgtaagatcacctgctaaatatgaaaatctgacttgaatttgtactctttaaagttgcgtatctgctctagtgggcaggacctagggcttaaaggggaacttcctttctccatttctaagaactgggactctaaaatgagaagctggttgtctgaagtaaccctgcaggtgtggttggggaaggtctgttttcttggatgaaggaactaaactaagcatatcagagcactgtcttaaccagttttatttccctggagatagaattcttttaaaaanagttggggagctggtaataggaagtgcctttcattataactacattttgcagagcttcatatttatatacaagcctcctaggtgatacactgttagcttgcagactttcctatgcttcatttctcctgttgctttcaaagaaggcaggagacacgtttaataacggagtatctggtgataagaattgcttgggcaaaccagctcatctggactctttctcagtcttggaagtgggaagaggaaaacttgtttccttcctgcttcttaaggatattctgagggtacactgatcaataacactaaatttggaatgaaaataccatgtgatgagtttagcctgctgatgcttccagtagatccttgtatagtttcaagatttaagttttccgatttcatataaatttcttaaagtcgaggaccttataagggtgcaatggatgtttgctaaatatgaaaaactgacttgaatttgcactctttaatgttgcgtatctgctctagtgggcaggacctagggcttaaaggggaacttcctttctccaattctaggaactgggactccaaaatgagaagctggttgtctgaagtaaccctgcaggtgtggttggggaaggtctgttttcttggatgaagggattaaactgagcaaatcactagaagtatgccctgtcccctgctcagaacactggggagctcaagagtgggctgcaatgtgcacccctcaggaatagctgtgaattgcaggtctactggctttttgctttttgtcctttgctgcaaggtaccccacgtacttaaccattctcaacagtgtaaatcagtgtcattttagaatgagatactcagcttgcttctaaagtcactgaattactgagtgagtctctcctttagagtcttcggcaaccaaattccagaattgaagagtctactactcagaggcaacaagattaaaaaaagaaaacacaaaaactgttgaggtg

SEQ ID NO: 653039 - DNA, 112 bp, Homo sapiens
gtgtgcggctgcactcagagggctcagccggaccatcctcatgtgtggggctctcatcaaggaggagactcacaggagactggatgacctgttcctccccctggtcatgggt

SEQ ID NO: 653040 - DNA, 1226 bp, Homo sapiens
gtgggatgttagccacgccgagaagggctttacacggcaaagaagtctgcgactgtagggaggaaaaacgtcagcagacaagctgcaacatgtcaagggcaatcgtgtatcagctggcagcaggccaggcaacacatgggcaacacagcagcaggtgttcaggacacagtggccgttccagcagtcaagcttgcgcactggcatggtccaccattttatccacgagggcattggaggaaccaactacgcaattttacgatcacgcttatgttattagcaaagatgcactccaagaggcttgggtcgccggtggcatcacgcacgtgtaaatcctcagcagatccagggcaagcacgaggcagggatagatcaccatgagagtcacagacggccacagaccacgccatggaccacacactggtgcaaacacccgtcatctcacatacaacatacacaaattcagctgggcagtagctggcgaggcaccgagtaatcccaggcaacatcgagaaggcctgacggccaggcagaatccactttgaaccacaggaggcgaaagatacgcaagcgaagccgacgatcggggccaaatggcaccccaagccagggagaatccagcagcaaaaacaactcacgtcacacacaaaacaataacaacgacaacaacagaaacaaacacaagcacaaaaaaaacacaggcgagaaacagaaagcaaaaaacaacgaccacaaacagagaggccacaacacgcaaacaccatgaaccaaagacaccacaacagaccacaaagaaaaagacaacacaacagaacgcaacataaaaatgaaacacgagcacagaagcgagggcagcgaccagcaaccacacagacaaccaagaccagggcaccaacaccgccaaacaaaaaaggaagaaaacaacgtggggacaccgcgcgccaacacaaaggaacaccccacaccgcaaagagcgagcaccacaacaacggcacacccaacacgacaacaacaaggcacacagatggaagaaacagacaactaggagaaaaaacaacaacagacaaccaccaaaaccagagaacaatacacagaagccacaccaacaacagcacgacaacaaacgacagaaagacgacaagagaaagacaacacagaaagaaaccaacacgaaaacgaaaagagacaaccaaacaatagcacgacgagacaaaaacaccaaacacacg

SEQ ID NO: 653041 - DNA, 1970 bp, Homo sapiens
  misc_feature (950)..(950): n is a, c, g, or t
  misc_feature (1945)..(1945): n is a, c, g, or t
  misc_feature (1956)..(1956): n is a, c, g, or t
  misc_feature (1970)..(1970): n is a, c, g, or t
cccctagccttaccagtggctgggattacaggcacgcaccaccatgccaagctaattttgtatttttagtagagatggggtttcgccatgttggtcaggctggtctcgaactcctgacctcaagtgatccaccctcctcggccttgcaaagtgctgggattacaggcatgagccaccacgactggcctgaaggggcttcttcatcttggggagttggtggaccctgtcctgcctcagccacggcaccttgcaaatatcagctccttggaacaggtgaagttccaggtaccaatgccaatcagaggaaggcagtttggttcaggctttggagttagaaacacctgaagttgaatctgggctctgttgcttccttctttcatgggctagagcacgactctttacctctctcttggcctcaatttcctcacctgtaaaatagatgaggaagctgctcacttattattgtctcgttctgaaagcttggaaagctacatcgaagatgagctcttcattcagctttgatttgacctgtacccctggtgggggattgcactggcaacatttgggtctcagcaaaaaaaccaagcacacacatctttccttccatttattgaaaaacatctttgtaagatccattcattgaaaaacataatccatttattgaaaaatatctttgtaagatcacctgctaaatatgaaaatctgacttgaatttgtactctttaaagttgcgtatctgctctagtgggcaggacctagggcttaaaggggaacttcctttctccatttctaagaactgggactctaaaatgagaagctggttgtctgaagtaaccctgcaggtgtggttggggaaggtctgttttcttggatgaaggaactaaactaagcatatcagagcactgtcttaaccagttttatttccctggagatagaattcttttaaaaanagttggggagctggtaataggaagtgcctttcattataactacattttgcagagcttcatatttatatacaagcctcctaggtgatacactgttagcttgcagactttcctatgcttcatttctcctgttgctttcaaagaaggcaggagacacgtttaataacggagtatctggtgataagaattgcttgggcaaaccagctcatctggactctttctcagtcttggaagtgggaagaggaaaacttgtttccttcctgcttcttaaggatattctgagggtacactgatcaataacactaaatttggaatgaaaataccatgtgatgagtttagcctgctgatgcttccagtagatccttgtatagtttcaagatttaagttttccgatttcatataaatttcttaaagtcgaggaccttataagggtgcaatggatgtttgctaaatatgaaaaactgacttgaatttgcactctttaatgttgcgtatctgctctagtgggcaggacctagggcttaaaggggaacttcctttctccaattctaggaactgggactccaaaatgagaagctggttgtctgaagtaaccctgcaggtgtggttggggaaggtctgttttcttggatgaagggattaaactgagcaaatcactagaagtatgccctgtcccctgctcagaacactggggagctcaagagtgggctgcaatgtgcacccctcaggaatagctgtgaattgcaggtctactggctttttgctttttgtcctttgctgcaaggtaccccacgtacttaaccattctcaacagtgtaaatcagtgtcattttagaatgagatactcagcttgcttctaaagtcactgaattactgagtgagtctctcctttagagtcttcggcaaccaaattccagaattgaagagtctactactcagaggcaacaagattaaaaaaagaaaacacaaaaactgttgaggtgaaaaaaaatagaaanaaagatccgtngacctcaggggggn

SEQ ID NO: 653042 - DNA, 145 bp, Homo sapiens
gtgaattatccttcaaattgtttctttgagcttcattgaagatctacagagtctagaggctagactgtctcaaaactaaggacagaaccctgtgggcaggtgggtgtgagaaactcacacaccgcactcttcacagacccacaag

SEQ ID NO: 653043 - DNA, 1446 bp, Homo sapiens
  misc_feature (950)..(950): n is a, c, g, or t
  misc_feature (1437)..(1437): n is a, c, g, or t
cccctagccttaccagtggctgggattacaggcacgcaccaccatgccaagctaattttgtatttttagtagagatggggtttcgccatgttggtcaggctggtctcgaactcctgacctcaagtgatccaccctcctcggccttgcaaagtgctgggattacaggcatgagccaccacgactggcctgaaggggcttcttcatcttggggagttggtggaccctgtcctgcctcagccacggcaccttgcaaatatcagctccttggaacaggtgaagttccaggtaccaatgccaatcagaggaaggcagtttggttcaggctttggagttagaaacacctgaagttgaatctgggctctgttgcttccttctttcatgggctagagcacgactctttacctctctcttggcctcaatttcctcacctgtaaaatagatgaggaagctgctcacttattattgtctcgttctgaaagcttggaaagctacatcgaagatgagctcttcattcagctttgatttgacctgtacccctggtgggggattgcactggcaacatttgggtctcagcaaaaaaaccaagcacacacatctttccttccatttattgaaaaacatctttgtaagatccattcattgaaaaacataatccatttattgaaaaatatctttgtaagatcacctgctaaatatgaaaatctgacttgaatttgtactctttaaagttgcgtatctgctctagtgggcaggacctagggcttaaaggggaacttcctttctccatttctaagaactgggactctaaaatgagaagctggttgtctgaagtaaccctgcaggtgtggttggggaaggtctgttttcttggatgaaggaactaaactaagcatatcagagcactgtcttaaccagttttatttccctggagatagaattcttttaaaaanagttggggagctggtaataggaagtgcctttcattataactacattttgcagagcttcatatttatatacaagcctcctaggtgatacactgttagcttgcagactttcctatgcttcatttctcctgttgctttcaaagaaggcaggagacacgtttaataacggagtatctggtgataagaattgcttgggcaaaccagctcatctggactctttctcagtcttggaagtgggaagaggaaaacttgtttccttcctgcttcttaaggatattctgagggtacactgatcaataacactaaatttggaatgaaaataccatgtgatgagtttagcctgctgatgcttccagtagatccttgtatagtttcaagatttaagttttccgatttcatataaatttcttaaagtcgaggaccttataagggtgcaatggatgtttgctaaatatgaaaaactgactttccgtatggatgcacaacaaanaaaaaaaag

SEQ ID NO: 653044 - DNA, 205 bp, Homo sapiens
gcgacgagatgtgacattctgaaatcagagatactacggaagcgacgcggtggaggacaggcacctactggtggaaataaaatataacagcgtgtgacgctcgccaaagaagaggaagcatatttgaaagatgtggctacagatacagccaaaagaggaggaccagaaccattacgtcatcgaatcaagtatatagacttagact

SEQ ID NO: 653045 - DNA, 383 bp, Homo sapiens
tgatgacaactcgacactgattgcataaacaaacacacaaaaagaaaactaatgaaaactctgcagtttaactttatctccctccttttggctatttggtttctctttagttcttattgccttcaaaagttctgtatcttcaaaagttgttgtagttacgatttcctgttggtttaccatttagcccttctactgaagataggagtagtttacatagtacaattacagtgttataatattctgtgtttttccgtgtgctcactattaccagtgagtttgtaccttcagatgatttcttcttgcttattgacatatttttctttcagattaaataactccctttagcattttcttgtaggacacgtctgatgttgatgaaatct

SEQ ID NO: 653046 - DNA, 580 bp, Homo sapiens
  misc_feature (568)..(568): n is a, c, g, or t
  misc_feature (576)..(576): n is a, c, g, or t
gagatgggatcttgccaggctggtctcaaactcctgagctcaagcaatcctcctgcctcagcctcccaaagtgctgggattacaggcctgagctactggacctggctggtagtcctatttttaattttttgaggaaccgccatgctgttttccacagtgcctgtaccattttgcatccctaccagcagcacacagggttccaatttccccacgttctcaccagctcttgtttttttcctgtgtgtggttttgtttgttttgtttgtttttgttttagacagagtttcactcttgttgccccgcctggagtgcaatggcatgatgtcagctcactgcaacctccgcctcctgggttcaagcaattctcctgcctcagcctcccaagtagctgggattacaggcatgtgccaccatgcccggctaatttttgtaattttagtggagatgggtttcaccatgttggtcaggctggtctcgaactcctgaccttagatgatccgcctgccttggcctccaaagtgctgggattacaggcatgagccaccgcgccccgctttcttgtgttttntatagtangtat

SEQ ID NO: 653047 - DNA, 395 bp, Homo sapiens
  misc_feature (3)..(3): n is a, c, g, or t
ccnatctgcgcgggtagcgccatacaccatcagcatcaggtaaggcacgcagtgcagtgccatctcgcgcaaccaccagcaaagccatatcgtgcgaggtcggtaatggcaacgggcaaagcacatccaacagaagaagcagcgaaagcagtccagcacaactccagcgcagccaagtcaatgcacgatcatcgcgcaaacgaccaaacatggcggccgacaatgatggaagcacgaaacatactcactgctggacgggatggctattgtgcctgctccaccaaggactcataaaatcaaagccttatgggaagttaaagagcgatcatgcgcttcggtcactctgcataggcgcgcataacccttcaaacatatgatcttggaagtcagaacgt

SEQ ID NO: 653048 - DNA, 274 bp, Homo sapiens
  misc_feature (195)..(195): n is a, c, g, or t
  misc_feature (201)..(201): n is a, c, g, or t
  misc_feature (225)..(225): n is a, c, g, or t
  misc_feature (262)..(262): n is a, c, g, or t
ggaaagctttaggcaccagctgcaacccatttagcagccacgtagggtgcacccagcaaagccacaggcacggggctacctgaggccttgggggcccaatccctgctccagggtgtccgtgaggcagcacacgaaatcaaaaaagattatttttttcccacagaaaccttttttttcccatgaccctttaacagnatttgnttcattcccctcaccttcccaggntgatttgaggtaaactttgaagtaaaataaaagctgngtttgagcatca

SEQ ID NO: 653049 - DNA, 825 bp, Homo sapiens
ctactgcactccagcctgggtgacagattgagacaccaattcaaaaaaaaaaaggccgggcacagtggcgcaagcctgtaatcccagctactcgggaggctgagtcaggagaattcgcctgtgggaggttggaagtggcagtgagccgagatcgcagcactgcattccagcctgggcaacaagagcaaaactccgtgtcaaaaaataaaaaagaaaagtggctaatgtggttcacgtgccgtggctcatgcctataatctcagcacttgtgagaggccaagggtgggtggatcacctgagcccaggagttcaagaccagcctggccagcatagtgaaaccccgtctctccttaaaatagaaaaattagcctggtgtggtggtgcatgcctgtaatcccagctactggggaggctgaggcagaagaatttcttgaacctggtagatggaggttgcagtgagccaaggttgcgcctttgcactccagccggggcaaaaagagtgaaactccatctggaaaaaaaaagcgaaaagtggctgatgtgacaagaggaactggaatgtaaaattttatgtaatggtaattaatttaatagttacatgtggccagtataagtatagttatagaggttagaagaaggccaaatacagttactagtgagtactaacgggaagtcaaaatattgttgggaaagaaagcaaaggataattaaggagtattaaagtagaaaatttacgagaatatagggggacataatggtccgtgggaataagttagaagtgcggaataatgtagcattaagtggtaaggtagggtactgtagaga

SEQ ID NO: 653050 - DNA, 786 bp, Homo sapiens
  misc_feature (494)..(494): n is a, c, g, or t
agcgggctcctccgaaaggtttcggaagctggtggtagctctgaagataacgctgcgttagggcatactgcggcggaggatggaactccgattgaaagcagttgctggagtggagcacgaatttcaacaatgaagtctcactctgagatcgcgccactccattccagcctgggcaacagagtgagactccatctcataaaaaaaaaaaaagtaaaggaaaaaaaagaaaatgtctttattccattttctttcctaaagaaatatattgggctggataaaggatcctggtgcttgacagtttggtgggctttttaaaagccactttataaatgttggctccagtggtttctgatgagaaatctgccatcactgaaatcttgggttctcctatttacaaagtgtgtgtattctcccagtgtgttttcaacagtattttctttacagtgtggtttcatcacttgtgattatgatgtgcctgggtgtggtttcctttngggatttgctgtgccagcagaccggctttaaatacgaatgttctgtacaatgtctgtgacatattggtttattgccagatgttgggaagtttttagctattatttcgttcagatatttttgttcttccaatgtgtcctttcgtgggctcctaagacatgaatcttagacctgtttcatattgtgtcccacagatccccaaagggtcttctcattttttgcacttttttctctgtcattcagactagattatttctggtcatgtatcttcaaatttacgtgactcttccctca

SEQ ID NO: 653051 - DNA, 281 bp, Homo sapiens
gtcccactgtccaggtgcacagcacccctctcttgggagtggatgctggccctgccgggtgaaggctttctcgtctcggtgacagttcacagcaggtggggatcgttgagcttttgggccatgtgaggtgggaacctttgcaccctgtggagcgcccagctcccaggacccgtcaagtccatcagacctgccaaaactctttcatctgggatacagctaactgcagcctgtaggtcacgtctggctctctgcctgttgatgttaataaagttttcccggca

SEQ ID NO: 653052 - DNA, 412 bp, Homo sapiens
cgatctacaggatctcccggctctgaacttaggaattctgaccgtactaaccatgctaggaaggaaaggagttgttcttttgttagggattgaggtttgggagattaatcggacatgatcagcaggaagagcacatgtgtttctatgagaattatgccgagataggtaacagatgaggatgaaatttgggcttgactgaagtaatgggggctgtctgtgaagccttgcggcagtacagcccaggtaatttgctgagcctaatgggtgtcagggtcagtctaagtgaaggcaaagagaggctgggatgaagggtgcaaaggaatagtaaagaaagcatgtttgagatccagaacagaataatgggtagtagagggaggtattgaggataggaaaatatatgggttcggcacca

SEQ ID NO: 653053 - DNA, 904 bp, Homo sapiens
  misc_feature (3)..(4): n is a, c, g, or t
  misc_feature (6)..(6): n is a, c, g, or t
acnncntgactgagtctcactctgttgtccaggctggagtgcatgacgtgatcttggctcactggaaactccgcctcccaggttcaagcaattctcctgcctcagccccctcagtagctgggattacagtgttgcacttttctacaattttggaaaatcttggaaatcagatccagggattattaaagcaacagaagagcaaaagaaaaagacaatagttgaacttgcagagacaggaagtctggacctcagtatattctgcagtacctgtttgatacgaaaaccggtgaggtccaaacattgtggtgtgtgcaaccgctgtatagcaaaatttgatcatcattgcccatgggtgggtaactgtgtaggtgcaggcaaccatagatattttatgggctacctattcttcttgctttttatgatctgctggatgatttatggttgtatatcttactggggactccactgtgagaccacttacaccaaggatggattttggacatacattactcagattgccacgtgttcaccttggatgttttggatgttcctgaacagtgttttccacttcatgtgggtggctgtattactcatgtgtcagatgtaccagatatcatgtttaggtattactacaaatgaaagaatgaatgccaggagatacaagcactttaaagtcacaacaacgtctattgaaagcccattcaagtatgtacatatttataaatttaatattttacctggtcataaaaattttcttactaaccagactcttttacttagtgatatgtaaaatagcttttaaacctttttaagatttctgtagaaatagcatcagttcaccataataacaacaaaacagaattcatcacattaactgtatataataaagttgtgatatctcctt

SEQ ID NO: 653054 - DNA, 737 bp, Homo sapiens
  misc_feature (550)..(550): n is a, c, g, or t
  misc_feature (580)..(580): n is a, c, g, or t
  misc_feature (594)..(594): n is a, c, g, or t
  misc_feature (635)..(635): n is a, c, g, or t
gtcttacaccccggcttacctagttaactacttacctagttaactacttacctagttaaatccactggtgtaggcacagccatgacaaaactgacagtttattaatttgtgattagcattctagctattcatgttcttcaagcatgcatgaagaattccggtctctgaacattgtcctcaatacaacttctgtaaacagatgttcttaacttttttttctttgttgaaagataccttccaactctaaactttcatgattttcctgagtatttcctggccattcaagctttttccactctactaagctgtctagattttatccattttaccttgatgatccagattttgggcagttcaaaaatgagtagagagtaagggggaagagaactattcccactcccaacagataaatatcatgctcagtagacactctgtgtccagttttgttttctgctttttccatctgttccacccacttgcttacccatacataaaagcctttccttagtctcttgagaaaatatatagaaggaaagtttgcacagcagcnaaatagcctgaaatgtgctccagttctttntggttaacattatngtttagaccatatgacccaatttgcctcagacagtctcagngtgtaattattaataaaactcctttttcactctcaaaattgtccatgtgaataataaatgatacgaccagcataattatgggatctcagccagctgaaggga

SEQ ID NO: 653055 - DNA, 93 bp, Homo sapiens
tctgaggacacggccgtctattactgtgcgcgaccgcaggcatattgtggtgctgaatgcttcaaacgccctcttgagtactggggccaggga

SEQ ID NO: 653056 - DNA, 127 bp, Homo sapiens
gataatccttaagaattcagtctaaattagcaaccaggaaggaaaaatatattaaaaacaacaaaaaagtggcactgccccggtccccgtccctcgtcctccccccctctcttctcgcctcctccca

SEQ ID NO: 653057 - DNA, 312 bp, Homo sapiens
aataacggaacatgcacactcgaaggaaattttagagttttcttgaagcatggaaatacagattcagagggaatagctgaagtaaaacttgtgcaccaagataaaacaatgctcatattctatagcaactgaaacatgagggaagccaaaaaatcctgccttgaccttgggtttcaacaaggagctgatactcaaagaaggtgcacgtgagcgtgatctctgtataaatggcactgaatgtctacatgcgcatggccaaagataaaagaccatggagtctgaatgtacttttactaaaagaagaactatggg

SEQ ID NO: 653058 - DNA, 945 bp, Homo sapiens
  misc_feature (945)..(945): n is a, c, g, or t
cttgggaggccgaggcgtgtggatcacaaggtcaggagatcgagaccattgcggctaacacggtgaaatcttgtctcgactgaaaatacaaaaaattagctgggcgtggtggtgcgtgtccgtagtcccagctactcaggaggctgaggcaggagaatcgcttgaacccgggaggcagaggttgcagtgagctgagatagtgccactgcactccagcctggtgacagagtgacactccgtctcaaaaaaaaaaaaaaaaaaaaaaaaaccggggttcaatgtgggggggggaaaaaggggtatggaaggggccggggccaagggggttccgggacccaggtttttggtcaagggggaaatggcgggcccccaaataggggaggtcggtataaattgcgagaaaaaggcgagggtaaccccgggcttaaagggaacccggggaacgagaccccgggaaattaagccaggcaagaaggacgcggggccattaggtaggaacgaacagggacctcgggaaacaccatccaggacgagatcacccggtggcggaaaaacaacaaaaacaccggtcacacagcagggcggatagagtagccggaccaagaagaacaacaccatacgcagcaagggcacggctaccgcagaggggcgaattaaccaaaggggcataacggagccagaaaaggccaccccgtcacaaccaggaaaccgccacaaaccgcggccagaactccggacaggagtgggccaagggcaaagtcgtcaacgggggatcagacgataccgaaggcaagcaggagaaggggtagcacaccacggcgacaaacacgaggacaacggacgaacggacaggaaaagagacagagaggcaggagacgcagcagacccaagaccaccaaaagagggaagaaacaaaacagcacgaaaagcaagaaaacgacgcgn

SEQ ID NO: 653059 - DNA, 1371 bp, Homo sapiens
gggcggggtgagtagcatgttgtgtgaggataccgggggccgcgcggtcgctcgggacccggtccaaggaccgtgcaccaatcgaggcctcaagagacggcctgtcaggcagcagaaccttcaagatccgcagtggagacctgacgagagcgggtgaaggtgcgtaacggagtaatgatagtaaggctgacgaaggggtcgaggtagtggcccgttccactcgtagaggctcgagcactaggaaagaactcaatacgtactgtctcgtggcaaaggagtctatgcatgctgaacgcatggatccccgtaatgccacgtgggaacctgattccggccaatacgggacttggatggaatggataggttatgttgggttccgctcgattggggtggatccccacagaacacgaagagccacgggtcactaggggctcagcgctaacagaacactcgcccccagaaagggccctactagccccaacgaggtctggtggccccacagaacgttgctactcgacagtacccttttcagccgacacagggcacccggcgcaaccgtgcaaagggcaatttggtttcctaggtgctccactaagccgaaactgcccgaggaatgaagtgtaaccgaacgcaagtcccccactaatacgaagaggaaattcacgggtttcctccaaacagaaaagtccactcgcgagggagtggtatcgaagggtcccacgagactacctagattccctccccggcgtatgcatggagctgaaacccactgggggagccaataccgactgcgagcaagacccgaagcgaacccatcacaaggggacggcaacgcaaggactggacaccggggcggtgcaggtgaccttgcaccgaagacgaccggaacgagcaacagggagtgccctcctagatgacaactcacgggagggggccacattggacacggggacgaaacgcacgccgaacgcaagtagcacccgccgggcgacgttcagtcagtcaagaatgggccaacccgcaccccaaaaagcggcggcgacaccgataagaccacgcacaggaggaaccaaaacgccgtgtgaatcacagaccagagacaacacttggagaggagggaaaaccccagtggaagccgcgccgaacacaaacgaggaatcacgatggggctaccaaggggcggattaaaacaggcgcaggaaatgacaagggggcatacagtggcagcagccccccgtgcgcatcacaatgcggaccggggtaatattgcccagggaccgacccccgagcacagatatgacctatagcttgagccacatatgggtaaggaaacaaggcaaaacggacacaacggacaacagggaaccaggg

SEQ ID NO: 653060 - DNA, 1497 bp, Homo sapiens
  misc_feature (1371)..(1371): n is a, c, g, or t
gactaggcttctctataggtcgtggaaatggtgctttcacgccgggctcattagacggggctatcctgaggatgttcaggttcagcagaggcataggtgaacgatagatatcagatgactaggctcccggatgcagggctcgaacatggcactcctatgccttgtactagtaggttgtacataccatatacacacgaaggtagatcggaattcagtcatggatggttggtggtcacgagcgtgacgagtggggagaggctagcgagagagtggcatagtatagattctgcatcatgtgtagtgcgtatttcccttcattcatacaaacatgcgagtggatcataggcgatcatcaactagcgaacaggaagaatggcgagtatccgaaccacgtggtggtcgcgttagtagtcacatgctaacgaattttcataggcccataccaggtggggcgtagggtcctcgctttggcctcgacaccggggggcgtggagaaaccacacatgctcctgatagtgcacatacgtccctataaggacgttcgacaggggggactcgggttttccctgacatggaattctaatacacacctcatctgcccctgattctcacatgcggataaaaaaatcgggtctatatagcacatacgtcaagcatactcatgtcttgcaaactggctaactagttgcaatacggacccttgggttcattaaaaaggaaaccaagttatggcgcctggcgggcaaaacttcaaatgggcataggggaacctgcgagagtacaccaaggaagaaactttccccgactcttgtggggaaataacttcgaaacacaggttgactcctagtctaaccgcacgaatagcccccgttaaaagaacaaggaacaaaatcctcccgcacccattggtggtcctcccgccactcgggtttttccccgcaccgcggtgagaaacaaaattggcctcatgcggaaggacgaaattgcgcaaaccaaagcgtgtgagggaaagacgcctctcagtgccagggtccaccagaaaatttagcacgattgggttatgggggagcgctatatggcgacggaggcaattttcctcggcctatggtggacaccttggtgggccaatagtaaaggaagggacagcgctatcttcccacaggagttcccccttagagtggaatttccccctaaatggccattccattaacctttaccgtggaacactattgtaaattaggcatgggtttggccatttggaaaaccttaataatccttccctatatccacaaaaggaacaccattgccttcgtctttgagtgtgcgcccccttataatatccgtgttggtgggtctatcataacccagctnggggcggggctttggcccatattgaccatagtaaataggggcggtgggggtccttgggacggggtggatccatgaggaaaacccgctgtgggacgcaaagtagagaattctgcaatacgcttgtag

SEQ ID NO: 653061 - DNA, 177 bp, Homo sapiens
gggagcggtgatacgcgaggaagggaccaggagggacatgcacgcagagcccggggtgggcggtcgtcggcatggttgccatggtaaccctcacccccttgggtggagcagccttctatatcatcttccagacagaggaccccgaggagctaggccacttctacgacatggtgatta

SEQ ID NO: 653062 - DNA, 223 bp, Homo sapiens
aggatctggttgatgctgtcgaagttgtacgagtagcgctcttccggatcggcgatgaagtcgtaggccggatcgtcgtccaccaccaggccgtcctccgcggtcagcgggctggggtacggcagcagcacctgcgtctccgcggtgggacggccggtggtgatgcccatgacgtcgacgtagccgtcgttgaagccgaacgagttgaagtcgccgatcacca

SEQ ID NO: 653063 - DNA, 167 bp, Homo sapiens
cacgagcgccccagtagagaggtatgggggtggtttttttgtgttgtgtttgttgtgggcgctgtttgggaggcgtgtcgctgtgtgtgtgtatatacttgatgatagctagatgttgagcgtgtcagacgaaacatgaattttcttccagtacttgcgggcgcttc

SEQ ID NO: 653064 - DNA, 758 bp, Homo sapiens
  misc_feature (278)..(280): n is a, c, g, or t
  misc_feature (290)..(291): n is a, c, g, or t
  misc_feature (571)..(571): n is a, c, g, or t
ctggctcggttacactgctctgttccttgcttaaaataaccaaaagttcttcacagggaccgtgaagaacaggctctacccgggagacacgggctggtctcggtgcctgtcgggcgtctctgagcccaggcccaaggcatcggagacagcaggagtgggcacgtggcccacgggggtgggggggcagctgggggccccatcatgctgttttgggcccaagaaggcaggatgtgagtctgtggagccccccagaggaggggtgaatttcaggggtgatnnngggaaatgcnngacctcagaggcaaggcagtgacggctggctccacgacgcagccaagagatgcccgcaattctgctgctgtgcacagggcaccatgttctctcccagtcacagacctgcctgcgcctaccagacgtgcaccaagggccccggcgtgggcactgagcctggtgttgggctcggtggggatgaggacagggagggcacctggggcctcagacagggagggaggggcaggggagggacacagtccccacccgggaccaggggaccacgtagggaccctgcgtntgggatggggcatcagggtggctgccatgctgggagtgcttccccgggaacctcggtggcctcccacacgttcctgtgtgagttggggaaacaggtggctggagtcagactggggaaagtgggggcctgggatgacgtacagtgtctgtggcttagtgacagagattaaatactttcatgctcttca

SEQ ID NO: 653065 - DNA, 998 bp, Homo sapiens
  misc_feature (707)..(707): n is a, c, g, or t
cgagcgagtgggcatctctcgggacaactggcacaagcgccgcaaataccgggggctaggagatagccctaccactaagaagcggaagtatgagattggggcgcccagttgccaacagcaagattgggccctcggcgctagtccacacagatccgctgtgcggcgttgagggtaaccacgaacagtacctgtgccgcttgaggttggacgtggggaatttcgtcctggggctcatgagtgttagtactcgtataaacaaggagtcagtctgatgttgtctacacatgcgatcgtagagtagacagatgctggttcggtagccagagacccgtgggtgaacgaagttgcactcagtgctcgaagtcgaacaagcaagcaccggatacccgatcgagtggtacggacgtcgccagctagtgcggctgcctccttgggccagcaagaatgggaggccataggcgtgactccttgacggaagacagaggacttttatcaccatacacataaacggattcgtatagaagataatttctagcaagagaaactactggactgcacaaggcgaacaacacgaacatgccatacaattgtcacgcgagttcgtgccgtaggatggagccacgattcccagcgcacggggcatatgctttctttggcggtggctatcagcgtatactagaggcctggagagcagatagtagcgcgcngaggtcgagaattccgctagtggtgcttgagacggagcaaaggaagtatgggacgttcctactcgttaagcgcaagagattcaagcgccgcgcgaacaagggcaacaattagaagtcccgtatggacggtagctcatttccagccgccagttggtaagagacagcaagacacgataggcagttgaacaaaggcccctctcggtcgacgagcgctggccattagagaaaggtagttcacccgggatgagagggaggtccccagcaacggattaagcgccgggtaatcgccgg

SEQ ID NO: 653066 - DNA, 462 bp, Homo sapiens
gaggaaatccccaccaccaaaatcggagcgaacagagcgatcacaaagatctcataaagagagctcacggtccaggtgatctcacaaagaatctcctagagatgttagcaaaaaagccaaaagatcaccatctggttcaaggacacctaaaaggtctaggcgaacacggcctaaatctcctaaaaaatcaggaaagaagtccagatcccagaccagatctccacacaggtctcataaaaagtcaaagaaaaacaaaacactgacgaaaatttttaagatgctgccacttattggaaatgcgatttggattgggcctgaacgggctgttttttaaaaaaacaaaaaatcaaatgaaagaacattcctggggggtttttgtcagccggcggacgcatgtgaaaactcagggaacaactgggacaggaaaaaccggcataggaggaaaaggggggaaaaactgca

SEQ ID NO: 653067 - DNA, 408 bp, Homo sapiens
  misc_feature (221)..(221): n is a, c, g, or t
tagttcacttcgcgtcatggatgtgtgactcccacactcccgccattcctactggaacttgcaaccaagccctaccgagcaaagggcggaatggggtcaatcagaagtactgaccgggagaaaagctaaggacccacgcatggctccagcctgtcctcagagcctgcgtttcagaggcactgcaaggaacgccgaccacatgcacgtagggaccctgcgtntgggatggggcatcagggtggctgccatgctgggagtgcttccccgggaacctcggtggcctcccacacgttcctgtgtgagttggggaaacaggtggctggagtcagactggggaaagtgggggcctgggatgacgtacagtgtctgtggcttagtgacagagattaaatactttcatgctcttca

SEQ ID NO: 653068 - DNA, 162 bp, Homo sapiens
  misc_feature (31)..(31): n is a, c, g, or t
  misc_feature (62)..(63): n is a, c, g, or t
  misc_feature (68)..(68): n is a, c, g, or t
  misc_feature (89)..(89): n is a, c, g, or t
  misc_feature (94)..(94): n is a, c, g, or t
  misc_feature (105)..(105): n is a, c, g, or t
  misc_feature (110)..(110): n is a, c, g, or t
  misc_feature (116)..(116): n is a, c, g, or t
  misc_feature (132)..(132): n is a, c, g, or t
  misc_feature (141)..(141): n is a, c, g, or t
  misc_feature (155)..(155): n is a, c, g, or t
  misc_feature (161)..(161): n is a, c, g, or t
gtaccttctgcctggaatttccttgtacgcntggagaacacctcgtactgcaagaatccgcnnaaaanagcacctacgagaagactgcnctgcncctaccctgcnttgcnccaagnacccctcccttgggtncccagagcnacgcacatccagcncagcanc

SEQ ID NO: 653069 - DNA, 425 bp, Homo sapiens
cactagagctcccccgttatgcaccgtggtatgatccttctatgactaatatgttgaaagtttttgatcatgaagggatgtagaattttatcaataatttttctgcatctattgaggtgatcatatggtgtcttagtccattttgtgttcttaaaaaggaatacccgaggctgggtaatttattttttaaaaaaaggtttccctggctcctgattctgatgcctcaaaaagttcaagactgggcatcttcatctggtgagggcattaggctgcttccactcacggtggaaagcaaagggaagccaacttgtgcagagatcacatagagagagaggaagcaacagagaggtggggaggtgccaggctctttttaacaagcagcactcacaggcactaatagagtgagaactcactgatccgaaagg

SEQ ID NO: 653070 - DNA, 713 bp, Homo sapiens
  misc_feature (67)..(67): n is a, c, g, or t
  misc_feature (114)..(114): n is a, c, g, or t
  misc_feature (169)..(169): n is a, c, g, or t
  misc_feature (554)..(554): n is a, c, g, or t
  misc_feature (566)..(566): n is a, c, g, or t
  misc_feature (589)..(589): n is a, c, g, or t
atgctgaagagattttgcaattgtgcttttgaaactcgatgaagtaaagggtttcaattcaaacgcnggatagccccaaattgttccaaattaacagacaaaacaagtcattgnatccaccggttttcatgaagcttgtcttacgctggcaaagattattgaagcaagnctaaagatgtatagcatttccaataataaggcaatgactcggggggcaattgctgcaatgctgtctacaatcctgtattcaaggcgcttctttccatactatgtttacaacatcatcggtggacttgatgaagaaggaaagggggctgtatacagctttgatccagtagggtcttaccaaaaagactccttcaaggctggaggctcagcaagtgccatgctcaagcccttgcttacaaaccaggttggttttaagaacatccagaatgtggagcatgttcccctgtccttggacagagccatgcggctggtgaaagatgtcttcatttctgcggctaaaaaaaatgtgtaccctggggacgcactccggatctgcatagtgaccnaagagggcatcngggaggaaactgtttccttaagnaaggactgatctgtgtgctcttatcaccaatcagttcagacctggttgattttgtactttggaactgtaccttggatggttttgtttattaaaagagaaccctgaagttaaaaaaaaaacaaaa

SEQ ID NO: 653071 - DNA, 135 bp, Homo sapiens
gctcgccgatccgatgaggtatggccagagccctggaacatctctgggcttgacaaacctgatttcctgcttgcatagaaaaactcagtactttgggcacaaaaaagggttcaccagatactgctgagaactctt

SEQ ID NO: 653072 - DNA, 413 bp, Homo sapiens
  misc_feature (7)..(7): n is a, c, g, or t
cacacgntcgagttaatggatatatatgaatactcacagtaatagtcagtgtggaatcaacagggagaaagaaaaggcttggggtataaaggaaattctttattaaattcaaaccattaaaatatgtagcatgatttcttataacagggtttaatacctccattttctctaatagtttcaggttattaagaaacagtatgtgaactttttgggttaaaagtttcccagcataggtttaatcactatataatatccttttatttccttgcaatggctgattgtcaggccgaaatttaggaccaaggagctggaaaatattcatgagactcaggaaccaagctattactccaactgtaaggtttcattataagcacgtaaatatagttcaaagttaccacatctgtaaactccaa

SEQ ID NO: 653073 - DNA, 99 bp, Homo sapiens
aaattgcggacatcccgaggtgagcaccctataagtgcaccaagctgagtaaaaatgctggccccttcaaagagaactagactcagttcctcatccttg

SEQ ID NO: 653074 - DNA, 323 bp, Homo sapiens
cagccgtaattaatatttgatactgtgatactatttgtttgccatgctctcaattacacaaatcaaattgtattggtcacatacacatgtttagcagatgttattgcaggtgtagtaaaatgcttgtgtttctagctccgacagtgcagcaatatccaacaagtaatattcttaatttcacaacataagtatcaaaagtaaaataatttttaaataccttgtattaagcaaagcagacagccacattttctagttgtggggaggtgcaaactcaatattaggaatgtgttctttatgttttgtagactaagtgtatgtgaaaa

SEQ ID NO: 653075 - DNA, 216 bp, Homo sapiens
gcaggctgtccctgtcatggatatataacaaatgctcactatgagtgtaaactacggttgactacttgggtaatgagattatgcaagatcatgaaaggctgtagaaggaaatataccttaacaggctgatgaggagtgagccagaaaaaaaaaaataacaagttcattatcggtgtggctaattatacatcagcgttatttaagcacataaagacc

SEQ ID NO: 653076 - DNA, 177 bp, Homo sapiens
  misc_feature (10)..(10): n is a, c, g, or t
  misc_feature (103)..(103): n is a, c, g, or t
  misc_feature (119)..(119): n is a, c, g, or t
  misc_feature (146)..(146): n is a, c, g, or t
atgttttttngggacaagttaggttggcttggggaccgtggacagggaagtgcgcagcctgattgccagtgggcggaacagggtcaggctcggggaagcaggnggggtaaattcaccangtcctcgtatataaagtgggccaatcntgggaccataaaacttgtgccccacgattgt

SEQ ID NO: 653077 - DNA, 757 bp, Homo sapiens
cacaccacctgagtcgccacgccttgccacatgatcccggtggcgaccgcttgcagtttcacgtcataaccgagcttttgcttgatcacttctgccgccacgtgggtggtggcgacactgtctgaccagccatccacatagccgatgctcagggttttgctgtcggcgctggccagtgtggagctcatcgcaactaccagagtggcagctgcgcccaagagtcgtcgcatcttcatagtgcttccccgaaagtgctgcgcccggcggatgccgagcgacgtcaacctgttgttatgtggtgcaccgcgcccccttcacgcgcatcaatcacgtgggtgcctcgtcagtggagggctgacacttcgatcatcaacctgctgccacaagcgacctgctctgactgcgacctcaggtaagcaagaaacgacatcacatcgccagcaggacgatttgtaggatattcaccgacgatcccgcccgaactttgcatgtcaaaactatgcggctccactgggacggcacaaatccgggtaagatgcgcgcctttgcccccagacggcctgatcatgcccgcgactgcacgtttcccgctcctgccctatttatttgccctgatcctcggtgtgctggccctcggcggctattggtacggccttggccaaccggtggtgcgccggacgtgccagcgccagcaaagctgcatgtgcgtctaccggactcggtgtgtggatccctagagtgactgcggctgaactgg

SEQ ID NO: 653078 - DNA, 542 bp, Homo sapiens
gagttgttgttaggttctgactgaaggtaaaaggttatgtttaataaatgtgagaaaatactatttgaagcctacttttgaaaactcacttttttttttaacctaggcattaatcctttggttgcgagctactagtctgatttttacttaccagattatctttctgtctgtcttactctctgggtatctttttctgtctctgtttccccgtgtgtgtgtgcacgtgtgtgtgtgcatgtctgtatgtgcaggtgtacgtacgtgtctgcatgtgtgtgtgtgtgcgcgtgcatgactgtgtgagtgtgtgtctgtgcatgtctgtgtgactgtgtgtgtgtgtgtgtgtatgtgcacgtgtgtgtgtgtgtttctctctgtctctgctccatgcatgttctctgccctctgtctctctctctctcttattggtctatccagaatttctgacttggaacggaaatcttcacagttgaattcacgtgcggtgtctttctcccctttgctttttcagttcctccaggagtgatcctaaatggagc

SEQ ID NO: 653079 - DNA, 123 bp, Homo sapiens
  misc_feature (33)..(33): n is a, c, g, or t
  misc_feature (73)..(73): n is a, c, g, or t
  misc_feature (97)..(97): n is a, c, g, or t
cctgaagtcaggagttccttttttcttaaggantagggaccatgtttttcagggccttttgaagttgttaaancattgtcaactggctcaactacanaaatgccatcatttattatccactga

SEQ ID NO: 653080 - DNA, 391 bp, Homo sapiens
cggtgtgatctagaggatcctactcgatccgctgatccagcaagggcactcgttggtgtcactcatagtgtaccagagaaaatgaagactgactcccagcaccttcattcataacagcccaacactaggaactacccaaatgtcctgtaatggtgaatggttaaagaacctatgggacatccataccatggaatacgatccagccataaaatggaacaaacctttcactcaggcaacaacttggaagaacctcaaggaaattatgctgagtgaaaaaaaaaaaaaaggccgttctcaaaattggtgcttaaaacttagtcctatttttgtaccttccaaaaaattaccttatttccggaattgaaaaccagtataggggaatggccagagg

SEQ ID NO: 653081 - DNA, 647 bp, Homo sapiens
  misc_feature (647)..(647): n is a, c, g, or t
ctctggaccgtgttatcgatgcacctctggatcccttgaaccggaggcagaggtggcagtgagccaagatcatgccagtgcactccagctgggtgacagagcaagaccctgttccaaaaaataatcccactcttcatcccatttttacctattagttttaaaatacttccctggattcattcttattttatggttgccagactgctgtgaggtacagttctatactctccagcactaacattttagaactaattacactgtattatcatgtttaatgttaatttttatgaggtttcaaattatctattgttttaaggacaagttaggtaaaaatgtctgaagttttagatttaaaaatttagatttagaaatacttcagtgagcagagtaaataattcgatgtttgggcaaaaaccaggtcgctgaaatacatgtgtcaaaactagatgagtgagtcacgtatcatggtcacgtcggggtttgataaagattttctgttcttgtcaactctcttatctgccttcatcccgggtttgtttccagcgtgcttgattgacatgcctgtatctgcttcgtcgtctcacgctggactcctgtacatcatcaggctacgtgcgttgatggtgaatcagcgatgttgacatttn

SEQ ID NO: 653082 - DNA, 813 bp, Homo sapiens
  misc_feature (694)..(694): n is a, c, g, or t
  misc_feature (770)..(770): n is a, c, g, or t
  misc_feature (774)..(774): n is a, c, g, or t
  misc_feature (781)..(781): n is a, c, g, or t
gcccgccctagcgtggacatttatcctctagcgctcaggccctgccgcatcgccgagatccaggcccagagagaaccagagaacccaccatggccccctttgagcccctggcttctggcatcctgttgttgctgtggctgatagcccccagcagggcctgcacctgtgtcccaccccacccacagacgtgcttctgcaattccgacctcgtcatcagggccaagttcgtggggacaccagaagtcaaccagaccaccttataccagcgttatgagatcaagatgaccaagatgtataaagggttccaagccttaggggatgccgctgacatccggttcgtctacacccccgccatggagagtgtctgcggatacttccacaggtcccacaaccgcagcgaggaagtttctcattgctggaaaactgcaggatggactcttgcacatcactacctgcagttttgtggctccctggaacagcctgagcttagctcagcgccggggcttcaccaagacctacactgttggctgtgaggaatgcacagtgtttccctgtttatccatcccctgcaaactgcagagtggcactcattgcttgtggacggaccagctcctccaaggctctgaaaagggcttccagtcccgtcaccttgcctgcctgcctcgggagccagggtgtgacctgcagtccctgnggtcccagatagcctgaatcctgcccggagtggaagctgaagcctgcacagtgtccaccctgttcccactcccatntttnttccggncaatgaaataaagagttcccccccacccgaca

SEQ ID NO: 653083 - DNA, 287 bp, Homo sapiens
catggtcgcaagagagaagcagctgaagccgtggtgctggtattgtaatagagattttgatgatgagaagatcctttattcagcaccaaaaagcaaagcattttaaatgccatatatgtcacaagaaattgtatacagggccctggcttagctattcattgcatgcaggtacataagaacaatagatgccgtaccaaatgcatacctggagacagcatgagttggaattattgtatggaggtattcagaaaagcatggatgaagcgcgctcttgacagaaccaagag

SEQ ID NO: 653084 - DNA, 87 bp, Homo sapiens
  misc_feature (45)..(45): n is a, c, g, or t
agggctgctggattgagggtgatgcgccccctggagtcctcactngcctcttccaggctggaagtgtccgtatttagtgctccccca

SEQ ID NO: 653085 - DNA, 767 bp, Homo sapiens
gtaatgtgaatatttgcaattatatatgtctccttctggtagagtgggatattatgccctagtatccccttgcgattactgcaggggctgctgacgtactcaaaacttctccgtgggactgttaataggcacaatggcagttatcaatggttttctccctccctgaccttgttaagcaagcgcccaaacctaaccttagtttcccatgggataattaaaggtatacagcatgggagtataccatgcactagtctagtcaatacaggggtccataactcgcaatcctttggcatttgcgccagtgtgtgaaatcacagggtagccatggtgtcatgctttatatacgaaggtcttccctctctcatgacccttgtgtgcccttggaccctttttacagactatgctcagaatctcaggtgtgcagaatatgcagctattaggtaagatggtgctgtctccctcgtaacctctaccgctcgtgccctgccgcaatttgacctactttgctgggtactgttgaccagaacaagggcccggtgctcattgggactgtaaggcaattctcagttgcactgtccattggtccagccattatacatgaaccccgtcttactttcctttcgcattgcttctgagtatgccggactaaccaaaagcccattctgtgtcattaataaacacagtactgattgtcccatttttcaagcccatcaggccaggatctgccgtacactttggtggtgctggtgccgagtggatatgcaacg

SEQ ID NO: 653086 - DNA, 308 bp, Homo sapiens
gactctagtggatcccccgtccttcatcatacctacctcttcatcatacctaccaatgggatgataaataaaaaatgctgaaagaaaaaaactgacagacagggatactatatccagcaaagttatctttcataaatgaaggagaaataaagtctttcccagataagcaaaagctgaagattccttaccgctagactggccttaaaagaaatgcttaaggagtcctacacgtggaaacaaaagaacaatgtccaccattatgaaatacataaaagtacaaaacccactggtaggtatgatgaaggacg

SEQ ID NO: 653087 - DNA, 108 bp, Homo sapiens
attataaaaagggaaactgtattaatcttattcaatcctcttttctttctttttggtgaacatattcattgtttgtttattaataaattcccattcagtttgatgaga

SEQ ID NO: 653088 - DNA, 170 bp, Homo sapiens
taaaaaactttattgaattatgagcaggatgaatgaaatgttattttaaaaacaatacatttgttaagtcttccataaaggttatgttgaaatttggtcagatgaatatttgtatgtaaaaagtatttgcatatctgaacctcaacaaacatggatttgctgtttataga

SEQ ID NO: 653089 - DNA, 176 bp, Homo sapiens
tgagtatcccccaccggcggggagaagacagaaagcatggtgaaatgaaacagaaaggtcattttttacaaagaaatggaggtcagagattacgtgacatataagagcacaagcaaagtaacatgttaaggagaggatgaagattttaactaatattacagagggcccaccgaatg

SEQ ID NO: 653090 - DNA, 170 bp, Homo sapiens
atatacctaatctctccctcactagacgtaagccttctctcactctctcaatcttatcatcatagcaggccggatgtcagaggggtgcttgggtaactctgggactcagaagtgaaagggggctattcctagtattattgctatagccattatgattattaatgatgagt

SEQ ID NO: 653091 - DNA, 838 bp, Homo sapiens
gtaacctttgccttccaaattaaagaactccatgccactcctcaaaaaaaaaaaaaaaaaaaaaaaaaaaaaaacaaaaaaaaaacaaaaaaaaaaaaaaaaaaaaaaatcgatggtgcgggcgccctgcggccccaagaaaagaggtctttcacaaacccacactgcggggggggccccggcggcccccaggaggatgagagcaacaagcgtgtgcgcaccacggcggtcgtcccgagagagaagaaccgcgcgcacacgaacaacagggggcgtgggtgttctctccccacaaaaaaaaagagcgccgcgcgggaggcaaccagagcaggcggtgcttgtgttgagaacaacaaccccccagaagagaggaacttgttgagcaaggcgctaccaatacgctgggggctctcttctatcaaagagggtgatccctccccgagcgagcagcgccgcgacatatattataaaatcagtaacccccccgcccgcgctagggggtgtacaataattagcagcacatcatcggaccggcgcagctaatatcataccaaccacgtctcgactccacatcacactgaacctcatcccgagctcagcgagccaccacaaccacgcactcaccaagaacccaaacctgccgcaactgaccgacaatcacgcaacgaatacatcaaccacaccagcacacgacccagaccatcacccccaccgacgcccgcaccaactcacccacatccacagaacaccatccaacacacacaacaacccaccatccacccacaacagcaacacacgcagccaaccacgcagcatacccaacgacacaccacaacca

SEQ ID NO: 653092 - DNA, 109 bp, Homo sapiens
tggcagttcttggtgccacgactgggagacagtcctcaggccctcccctcagggagctcactgtccggggagggacagtctttattagttcctgttcggccagcagagg

SEQ ID NO: 653093 - DNA, 293 bp, Homo sapiens
agatgcgatggacatttgggttgtttctgctttgttggctattataagtaatgctactttgaacattcatgtacaagttttgtgtgtacatatgttttcaatactcttgggtatacctaggagtagaattgctgggttatatggtaaccctgtgtttaactttttgaggagttgtcaaactattttccatagcagctgtactattttgcattcccaccagcattgtatgagggttccaatttctttttatctttcccaacacttgttttgcttttttatcattatttttacag

SEQ ID NO: 653094 - DNA, 289 bp, Homo sapiens
acaatcgggcgtagagcggatgatcctgttcagacaatcagaatacgcatggcttcaaacctactgaaaaacacagtgcatgacggctcgcccgctatacttcacggctcaccgatccatctaactacgcattcccattgaatgctgtgtccctagaagcggagcactggatcgatcacatcgggatcgttgcggctgcatcagctcttcgaggcaagtgcgtcgatgtactcgatgctcgagccggcggaaatttgccaggatggtagccctgaattgtctgaggttt

SEQ ID NO: 653095 - DNA, 356 bp, Homo sapiens
taacataggtcatctcatcaaatagacgactctcacacttgatcacattgttttatgtattcaatcttcagtatactagagaacttctagttgtgtataattagtgctaatgctatccatattccttctctattttctatgatactagaaaatcacattaagctgccttaagtggtgaaaatgtattgattctatttttgcagtattcctgcagtcttttaaatcacatacgaatactgctcccaaaattatcatcagcttctgcctcatactcttcatgacataagctgaaacaatgtgggtctgtctattaaaagactgattgtttaacatcccgacatacatagttagggtac

SEQ ID NO: 653096 - DNA, 355 bp, Homo sapiens
cgccgcgggacaaagaagtcgaagatcgactgtcatgtggcatagtggcccctttacgtagtcggagtccctctaccattgatgtgggaggagttcatccccttcaagcagtatgctggccaatacgttctcttagtcaatgtggaccgctactgaggcctgacgggccagtacattgaactgaatgcactatatgaagagcttgcaccattcggtctggtcattctgggcttgtcctgcaagcaactttggaaaacaggaaccaggagagaactcatagatccttgctcacctccagtatgtgccaccaggtcgaggctttgttcctaattttccagctctttgagaaagggga

SEQ ID NO: 653097 - DNA, 108 bp, Homo sapiens
acggccgtgtattactatgcgagacaaaaccgctattgtagtagtaccagctgctatgatcctcgggatctttattttgactactggggccagggaaccctggtcacc

SEQ ID NO: 653098 - DNA, 348 bp, Homo sapiens
  misc_feature (121)..(121): n is a, c, g, or t
ctagaggatccctgttgctaggctggagtgggagaatcctctgagcccaggagtttgaggcaatagtgaccatgatcatgtctgctaatagccactgcactccagcctgtgtaacacaggnagatccagtctctacaaaaaaaaattagaaatttagctgggtgaggtagcacacacctgtgatcccagctactcaggaggctgaggtggggaggattgcttgaagcccaggacgtttgagggctgccaatgaggctactgattgacacccacttgcacttccaggcctaaaggcaaccaggggtaccggaagctccgaaattcggtaactcattggtccatagcttg

SEQ ID NO: 653099 - DNA, 461 bp, Homo sapiens
  misc_feature (37)..(37): n is a, c, g, or t
tctagaggatcccggcacatctgacccagagatgtcngacttcctacgaccgacagtacgaatggtggtttccaaagacctgggacgcacggggaaggggagtcactgtttcatgggtacagagtttcagtttgagaacagacttttaaaagtcctcgatctcaatggcgatgatggttgcatgacaatgtgaacgtacttaatgtcacatagctgcacacttgaaaatggttacgatggtaaattttcatatgtatggtcactgcaattttcagcaacctaacatcaaattttcacggtcacatcactatctgattccatttatacacattctaggcacacatatactctcatcgtgccagcaaaacagagccgtggttgcctacggctgggcctggcaggtggccggctgggcagccggcgggggtccgaacacacttcggggtcagatgtggccgggt

SEQ ID NO: 653100 - DNA, 479 bp, Homo sapiens
  misc_feature (72)..(72): n is a, c, g, or t
  misc_feature (74)..(74): n is a, c, g, or t
  misc_feature (76)..(76): n is a, c, g, or t
  misc_feature (384)..(384): n is a, c, g, or t
  misc_feature (406)..(406): n is a, c, g, or t
  misc_feature (444)..(444): n is a, c, g, or t
  misc_feature (453)..(453): n is a, c, g, or t
  misc_feature (475)..(475): n is a, c, g, or t
agaaattaacacgtgggaaattatacaccacaaatagtacaatccatggaagaaccaagggaatggcgatancnanatgtcaggaaaggactttgtaatgtgtaggccttagagaaatagggaactgagacaagaatctatttgaattcttggaaataaaaaatgtaattaccatgttggccaggctggtcttgaactcctgacctcaggtgatccacctgcgtcggcctcccaaactgctgggattgcagacatgagccactgcacccggccaagaagtgactattgtttctccattgtgtcctcttgatgcccttgtcaaaaattagttgaccagatatgtttgggatttatttctgagctctctgttgtgttactgtccanttttccatatcctgcttttctntttttttttttggctgcaaaactttcttccccttgggnccaggcttngggagaaggctggaggtgggtnaaaa

SEQ ID NO: 653101 - DNA, 270 bp, Homo sapiens
aatagatatagtaccgcaaggaaaagatgaaaatttataaccaagcataatatagcaaggacttaacccctataccttctgcatattgatttactagaatactttgcaaggagagccaaagctaagaccccgaacagacgagtactaagacagctaaagagcacaccgtctatgtagcaaatagtgggagattataggtagagcacaaactacgagctggtatactggttccagtagatctagtcacttaattcccacagacctttaatc

SEQ ID NO: 653102 - DNA, 746 bp, Homo sapiens
aacataatgaagctggttggttgctcctaagttcagtggataaagtgatgaaagaaaatgatgaactcggggattctatctcacggcttcagaagcagatactgagcctcaaatctgccaagattgccctgagtgagagtctaatctcctgtagagaaagaactgaaatgtggaaaaatagacataagctcttatcatgttagtggctgacctgcaatgaacaggtgcatgcacagcctcaccatgcacagcctcaccaagtatctactgttaaagtgagggcattgattgttttgcaggaagtcagggaccctgaatggagggatcggccagagctgaggcagaagaacataaatcgtgacagatctcatggcatatctatcacttcccaaaattcaatacttttatacatttcttatgcctgtctttactgcaatctctgaaccataacatgtgacacgattccatggacactttatcacgtccccaattaacactcttatagtttcttatgcctatctctactttaatctcttaatcctgtcatcttcataagctcagaatgtacttcacctcaggactactattgcacaaatggactgtcaaacatgtgtgcttgaaccactatgaccatcagtatacccggaccaccgaaccagcatcatcagtgcatttcacgggcaacatggcagataactttacggtctgactgcctgcggggtcgggccgaatagagcctattctca

SEQ ID NO: 653103 - DNA, 125 bp, Homo sapiens
cggatgaacagtttttagaaaatgggctcacagcaatgcccaagttcatgctagctgtggccagcagttcccagttctgtggtttcatgttagttaccttatagttgctgtgtaattatgtgcca

SEQ ID NO: 653104 - DNA, 143 bp, Homo sapiens
ctctagaggatcgtatagacgcatctgtgaaataaacaagtttgaaactcaagaaagcattactagctctgctttagtgcctaagggtatcacaggcatcacgttagtagacagaacatcttaatcttccccgttaaaaggta

SEQ ID NO: 653105 - DNA, 794 bp, Homo sapiens
  misc_feature (313)..(313): n is a, c, g, or t
ccaccatcttttgaacagccgctcctcccctctcattcaccggccgtcgttattgataaaaagcaagccaccaggtcaacaacaaaaatcatcatcatatatgcttgggcgacacccaccctgtcctccatgattcccccgtggtcaataaccgagcaaaatgagaaacatgttaagtcctcttaaccctgtcgctctctctttctcaccgcgactagtgtctccaacacagcagagagtgttatcaccctgctggggccaaattaggccccccaacgttttcgggccgcccccccccacagtagtcttgggnaaaaaacaatcttcgttcccacatctgcccactccctcgcatcaccacggtaggcgacaacaacagtgccaggctgcatgctaacattgtatcgcccccgagaagccaacgaacttgggggatcaaccgaggggcccactaatacaaacccctcttttttccgcttcctccactcgggagggaataatacggacgcaccagtgggttatcaatataaagagggaccaaacctggggttaatgcaccgatacggtgcaagaagataagacgctcccctcgttgcttgtgtataaagacaacgtggtgccaccctacgtgtgtgcggtggacgccccctgcttgtatatcgcacagagtatggttacgcgccatacagatgagacgccgggctttatagccacattcgtgccacctaattttgttcaggcgcgcgcataaaaaagagaggtgcttttctaaaacagcccaacaatatacgaac

SEQ ID NO: 653106 - DNA, 572 bp, Homo sapiens
caggctctctacctccgtgagatcaatgttaagagtggaatcagtgggagatgatggaatcataggggtggtttccctcatgctgttctggtgatagtgagtgagttctcatgagatctgatggttttataacgggtcgggcatttccccggcgggcactcattctctctcctgtcgcccggtgaagaggtgccttccgccatgatggtaagtttcctgaggtctccccagccatgtggaacggtgagtcaattaaacctctttcctttataaattacccagtttcgggtatttcttcatagcagggtgagaacagactaatatacaagctctttggtcacataaaggtaaaccggtgccagctcagaggggggaattggaattggggagagagttcggaaagaatcatgacacataagtaaggtcttgaaaagtatgtatcagtcggataagccaaggaagaagaaaagaatattccaggaaatgggttatcacaacacaggaagagacaaaaccctggggaagggcaaacggggacctgcaaacaggcatggactcatggtccatgagta

SEQ ID NO: 653107 - DNA, 97 bp, Homo sapiens
  misc_feature (95)..(95): n is a, c, g, or t
gactagttctagatcgcgagcggccgcccttttttgtgacttttcaagaacagtgaattactgtcaccttgatggacaagtttcaataaaacttngt

SEQ ID NO: 653108 - DNA, 289 bp, Homo sapiens
taaagcacaccccagcaccttcaaatgctttctgaagtaaggctggggatggcatggttggcataaatggaatgggtgtatgggtgtgtgcaatgggtgagtgggtgggtggcatggctggaccgcatggctgaatggagtgggtcaagtggcatgaactaggcaggtcgaatggcatgggttcggcggatgcaatgagccacaatggcatgcaatgcactggcatggcatggtgtggcatgcagtcagatcaggtggcatgcagtgcacattcggtggcatgcagtgg

SEQ ID NO: 653109 - DNA, 127 bp, Homo sapiens
acccactactggctgacccactactggctctactggccccactactggccttttcttggttttgttatttctccttttggagggtactctttagatagaacaaaaccaagaaaaggccagtagtggg

SEQ ID NO: 653110 - DNA, 627 bp, Homo sapiens
agaaactgaaataatgctggcccaggaataaatacgttcctgaacatcgttaggtcttttcgaacgaagaaaaagacagaggatcgtccttaagtccctgctaaaacattccatggttgaaaattggcacttggaaggtaagcttgctaggccttgagcctccagggtgtcaatggagcttgtggctaataatattgttgtattctgggtatcaggtttaaaattgcagacaaggcccacagaatgaagattttccatgcattggcgaatacgtatatgctggttccatccactggcacaatatcgggaccatcattgcatcatctcagtatatcaatcattgaaggttgcgtaaaatttaagaaggggatgtcacttaacatttgttgagtaagtcggaatcagcatgtatattaaaacatattgtggcgaagagtgttggcagatggaaaggaacgataatcaagagattgatagccttgggtcattgactttcagataggggtggcaatgggtactatattatcgtggggtagcactttttcaaaagttcggtcaaagaggggaaaacaatcccttgagaaataagaaagttgaaaagggtgaaaaggaggaagggaaacagga

SEQ ID NO: 653111 - DNA, 801 bp, Homo sapiens
  misc_feature (314)..(314): n is a, c, g, or t
  misc_feature (489)..(489): n is a, c, g, or t
ggctgcttcgccgagagtaatcgaggtaacgcatgttgcaacagtgcttggacggaatccggtgtctcagtatgccgtcagcaaccaagtgaccgtgacgcctcaatattagtaggtccggtcctagtcacccatcgtatcatccggtacaacttcggggagagtggcctcagaatggcctgccagtagcgggcagagtcgaagccattgtacggtcaacatagcgacacagagacagccggaagctgtcggacctcagtctctattagctctgccagtaggagtgatgtgacatgcagtgttggaatatgtcnagcaggagtttggtgataaagtgaaaataaagtagaaagtgagtgaacatcacagtcaaacgtgcggcttggttgtcagactttctgttctcaattagttagagctgatttgaacagttgatctgtgaggagatgtcgcattgattgctatcaagaatagaaaagcactgtgtcnatagaaaagttctattcaacaaggagataatacaatgatagtgaactgtagggtggaacaaagaaggtagtgtgacctgtgtggacttcgacattgtgagggataggtctgctcacgaaaatcgatcaaggttgaatgagaatgatatggggtaatagtcatttgagtgtgggacgcttgaaaaagtagaactgaaaattccattggtgggaaacaagatccaatagggaatgagattggtgtccgtgaagagtcactttcgcgttgtgaagggtctataaattctgaggtagaaataacacaagaatgaac

SEQ ID NO: 653112 - DNA, 1516 bp, Homo sapiens
  misc_feature (1)..(1): n is a, c, g, or t
ncccgcttcggtatagggatgtgggcgcggtcgtgtgttccgtgtgctgtgctgtgtgttgcgtctgtggtgtggggtggcctgcgtcctctggtgctgttcgctttgttcgttcgtgctttcgtcattgttctgcggtgctctgtccgtggtcgttggttcgtttctggtgcttcgggtgtggtgttctggttggtcgctgatctctggtgtctggtgtgtcgcttcgttcttgttgttgtgtttgttgggcgtcgctctggggtggcttcgcgttctatctggccgttgtgttgtgtgtgtgttcgcccttttttgttcgctgtcgcttttggtcttctcctcttgtttttcgtctgcctgtgtttgtttttgtgggctgggttttgttgctcgcctgtcgtgtctggttctggtttctgtgtctgtttgttgtcttcggctaccatggtgtgctcggacggcggtgtgcctctcggttttcgctggttgtctgcgttgttggtggtatgtggcgttgtgtgttggctcggttgtggtgtcaagggtgcttgctgatccagagtgatgttggtggtggtggtgttaatgtggtgcgccccggtttgatggttcgagttgtgtgctgtgcgtgtcgctccttcgtctctgtggttggggtgctgtctcttttcctccgtctggcgcgtgtctcttgtgtagggggcgggggtgtgaccgcttggtgtgttctgcgttttcgcttgggtgtgtgtgtatgtgcgctcgtgcgcttgtctgtcgcgtgtcgccgcggtgtgttgcctgtgtccgctgggttaggtctgggcgagggtgtgtgaggcttggcggcctgcccctgtgggcgtccgtttggcgtctcatgtgcttgctgggtttgcgccggccctgtgtgggtcccgccgagcagtgggcatccgcgggtgtccttcgccgtggcgtcggctcccttggtgtctcctcgctggtgtgcgacggccgcgcgtgtgtgcaggcactggggcggggttgttgtatttcccttttgatgggggtcttagcgcttgtgtccccgtgggtgggtgtgccgcggtgcgagcgtgagtgaattcttgtcggggcgacgctccgtgccgggtcactttgctgcgtcccccatcctctcctatgtactttcctgtggtgcctgtgagctgtccacccgtctgaccgtggacttgtcatagggccgtcgctgtggcggggcctgtctcttgcgtcccccgggcgttcccggatgctccctgatggcccccgcatgtctgcgccctgcacgagcccacggggctgtagcgttctcctaggcgcgttttggggcatcccccttcctcgtcaccgtctcctcccgccgaaagaggcggcttttagtgggccatgtgcgctgtggcgggcattgggaggccccctcgtgactgtgtttttcataacttatgtttttatatggttgcatttacgcccataaatcctcagctgggga

SEQ ID NO: 653113 - DNA, 1100 bp, Homo sapiens
tttttcgaaggagagggagatagagcgcaagtcaccttctgtcatgctcggttctcacatcctttgctatcgctttcttctatgtctccaagctgtgctcgtgtacccaccagtctagcattggagttctcaacagttcaatcctgtcatcggcctacagggaagcctgacagtctcgtacagtcgtaggttctcatcatgttttcactatcctgactgctcggcggtgtaatcttggtgcaggtgataggctcctctgcaggtattgacctgatgcacagggccttcagacatccggcagcccatacgtgatgatgtcgagcccgtatcagcggcgtacctccgtgaacatcatcactcgtatgaccagggagaccgttcaacggtcatcgagaggtgccccaagcccgtgatttccctgccgtcccatggggcctatcaattggctgaggtctggaccttgttcaccgcttgtcgacatccgggtactgtccccaggagtgctttctgtccagggtgaaggaggtgcaccgtgtggttctggctgccaatggtagtgaacatcctgcatgcgccagccctcaagttcatctgggtaaccagagcctggtcaacgagctggccttcatccgtcccgcaagatgatggctcgacgaggccctgggcagtgggtctggtcagtccgtggtgttcccagacaaagaggtcatgcgatggatgctgccttagcgacttggcggccgagatttccagtcaagagccccgtggcggatcgacagagcaccaacggtcaaccatcgctgtattcacctgcgaccattcggtggccgagagcctcaacttacgtggcgtcctggaacatgtagcatgctgcagacccatagacctcgtgaagtaccggtccaggccacgactgagaacaaggtaactgaaaaccgtcaccttctccaagctctgagagccctcgcagtcccaggccccagccagggggccggcctaattcccgcctcatccacagaaaagggaggatgggcgatgacagtcgtgttctatgccttctgacccagtgtcccagtctataactcgttaggacaatgagt

SEQ ID NO: 653114 - DNA, 541 bp, Homo sapiens
  misc_feature (1)..(1): n is a, c, g, or t
  misc_feature (68)..(68): n is a, c, g, or t
  misc_feature (87)..(87): n is a, c, g, or t
  misc_feature (135)..(135): n is a, c, g, or t
  misc_feature (160)..(160): n is a, c, g, or t
  misc_feature (174)..(174): n is a, c, g, or t
  misc_feature (190)..(190): n is a, c, g, or t
  misc_feature (251)..(251): n is a, c, g, or t
  misc_feature (263)..(263): n is a, c, g, or t
  misc_feature (278)..(278): n is a, c, g, or t
  misc_feature (291)..(291): n is a, c, g, or t
  misc_feature (296)..(296): n is a, c, g, or t
  misc_feature (378)..(378): n is a, c, g, or t
  misc_feature (392)..(392): n is a, c, g, or t
  misc_feature (396)..(396): n is a, c, g, or t
  misc_feature (453)..(453): n is a, c, g, or t
  misc_feature (487)..(487): n is a, c, g, or t
  misc_feature (497)..(497): n is a, c, g, or t
  misc_feature (511)..(511): n is a, c, g, or t
  misc_feature (524)..(524): n is a, c, g, or t
  misc_feature (538)..(538): n is a, c, g, or t
naattacaccaatcattttacttacaaaaaatcgttttataaatcctcctcttaaaattatgttcaancccaccatggtaccttatncctgcaatcccaccacttcgggaggccaacgcacaacgatcgcttcancccaggacttcgacaccagcctggncaacatagtaagancccatctctatatttntttaaaaaaaaaaaatatctgttcaaaagtatttcagaccaaaaggaggtcataaaaactnttcatataattnctctatgagaaaaanatccctgtatggnaaggngcactgaagatctggcacagagaaacaaggggaaacagggcagtaataaaatccagccctatttttctagcatgcatttacnaccttattgatatntctntactgggtgttaatagccccctccttgtatttaaaaaaaaaaattaaaaaattaaanttaatcttttttctaataaaatcttcaattacanaatctcaaanccaaacctttaaantctttaaagcaanatctttttcatcangga

SEQ ID NO: 653115 - DNA, 835 bp, Homo sapiens
agagacagcggctcaggagtgggggagcacgggccttctacaccacatgggaaggctctggcgtgaggttttcctttgggaaggttgtttgggcccctgaagttccatctccgagagtggtgtgcagggcaggccagggcccatgctggctgcagtctttgtggctgcctgcctgggccagcctgtttgggagctgggactgtgggctcgccttttcgtacctgggctcaggtgcggtgtggccaccgccaccctcatcccctgcctgggaggctctcccaggggctgatgggggggttctgtgaggggacaatcagcggctcgcggaaggccacgcctgggcaaggcaggacacagcgcacacagcaagctcttcttctgcgacaatctccccaggtgacggattcacaatcccaacaataaagattcacaagccacggctggcctgtgctccccatgggtgacctctggaggcagtggaccaagatgcagcaaggagaggatgcagaacagcttcttgcaggaagcacctgctccggacatccaagcgctgcctgaaaggcacgcaaggagaccgcagcggcacgacacgctggtctgagatgagggggagccccatgggccccagagcagaagctaaagcaaggccaacagggcactgccaagcgccaactcaggtcagatcaaacctgaggctgtggcctccaaaggggtctgggcgcaccccccaaggtcgcagggtgtctgagaggccagacaacctgccatgaaccatcgccggcgtcgagtggagcgaaacagcacagtgccctcaggaaaccgcctaaaatccaaa

SEQ ID NO: 653116 - DNA, 395 bp, Homo sapiens
aggcttgagcccaggagttttgaggctgtttctgatccacccccccctgagtccagcctgggtgacagaggccaagaccctgtgtcttgaaagaaagaggctgggcgcagtgactcacgcttgtaatcccagcacttgccttgggaggccgaggcaggcagatcacaaggtcaggagatcgagaccatcctggctaacacggtgaaaccccgtctctactaaaaatacaaaatattagccgggtgtggtggcaggcgcctgtagtcccagcgactcgggaggctgaggcaggagaatggcgtgaacccgggaggtagagcttgcactgagctgagatcgcgccactgcactccagcctgggcgacagagcaagactctgtcccaaaaaaaaaaaa

SEQ ID NO: 653117 - DNA, 888 bp, Homo sapiens
gaggaagcacgaaggcattgtcccacaggcagaggtcaccgtggcaaggcaatccaccaaggccagaaagggtataacgaagaaacccacgcggtctggatgtgcgggaaccctggggaggattgtgagtgcacgtccccgtctcaaccttccgagccgcctgtgaaaacgtgtagataaccgctagtggttggtctgagcacaagaactctcggtaaatcagctggctttctcacgcacggcctttgcatggggagtcattatgtaatagaaatctgtgggatactttaacttggcctgcatgggtgcttcagcgctacctgctccctctgctgacttaatgtaacgtgattctgctttcttcagatatttaaggctgcttaggttgtgtgagccttgaagtgtgatgtgtgtgtcccagcagactgtccactgtcacaggagatgcatgtcatttgtattggagatatttcatgtgtactcattctcattggtgctcacgattgccatggccatagggccacaggtgccgtatctgctgcagacatgattgtattcttgttctagaggcttttcttgttcttcgaatcattgccgtcgatgaatccagccagagccaaggggcctagatttgacctctgtcctagggctcctgggccaggtgcaggaacatctgaggccacatctgctggccacctccagtgggtgctgaccacaggatggctttgttacactcattttcaccctgattcttgcccccactttcataaaagaaacttcaaaatgcatgacgctttggagagtaagaaaatcaatcttggctgggcacggtggctcctgcctgtgatcctagcactttgggaggctgaacctgaaggatcactgagg

SEQ ID NO: 653118 - DNA, 120 bp, Homo sapiens
tagaggacccccgcggggcacaatcacttcaaagatatgcagatagcaaactaagcacattaaaaaatattcatcatcatcagtcactcgtagaaaggtaaatcatagtcacaattgcgg

SEQ ID NO: 653119 - DNA, 396 bp, Homo sapiens
tgacttcaatcaggctcttcatcctggggtattcccacacttagataagttttatggcagaatttagtatattaaccatcactatcatttggcacagtgcgtaccaagacttcaaaatgaaactgtaaagtataaagtgtagaatttatgcattcaaggtttcaaaaatcatttccttgtgtagtcatttgggtttttgcatcattcttccagtgaagtcgtcaattctcatgcatcttctcatagtcatgcaaggatagtcaataatggtatggttggtggggcagcatggtgtctggctctgtcacccaggtaggaatgcagtggcgtgatctgggctcacggcaaactccatctctcaggttcaagcaattctcccggcctcagtctcccgag

SEQ ID NO: 653120 - DNA, 1002 bp, Homo sapiens
  misc_feature (1002)..(1002): n is a, c, g, or t
gaaactattcccagttgtatccacggaacagttctctcaggacaggatatctgggtgtactctgagaattgacactcgctgcactcatggtcttgggcaatacacgaatgttgaggctgttcatgccaggcatacttatgcgcagcagcctatgagaagtataagctgggcattggaacctgatcaacagctgtcctatgtaaatgccattgagaaagtcttcaagagtgtgcaatcgtaagctggtgttaccttcacataagagtggcatcatggttgactatacctctaggtatccctcatcaccatgttctctttctgccaggacctatcacgaagttatgcatgtaaggctacgagaaaatcctctttctcgtccttgtactcgattaattaactggttaccagttctcattgaagttcagaatccaagcgtcacgtgccgttaaccggatgaaggaatacttcatatggcttgagccgggattcagtgataaccaaagctagacgtagtgatgatgtgagtagaattcgaccttacgatcgcaggatgagacccaattgtggcggtaatgtgtgtagcgcctttataggatactacataagcacttccctttttactctgggcgtggtcgcaaaggccttttgcctcgtttgtggcgctttttttaccgcaaagcactaatccagtagcttgaagttgcttggggggaaggaaaccagagccaatgaagccacgatcacgttcgcgtgaagcgtgcacttttttttgtctgggaatgacgttcctggcggaacacacgttggttaaactttttaaaacaacaatgttaaagaacagtacgcgtagtgatgggcctttttccacgaaaggtgggcatggtccctccaaggtgaggttctttaagaaatcttaattagtccggccaacaataattcaaagttttgcagggtttgcaaagcaatattattaagagcctcgtccatggatttatgaatatn

SEQ ID NO: 653121 - DNA, 1043 bp, Homo sapiens
gcacctcatggttcgttagacagtatctactaagaagctaacacgtgctgggtccgtgttcccacagaatatctcattgagtcctcagcatggtgtctgtggggtggaagcatctatcattcccattttatagttcacaggaaacagaggcgacctgcctagggtcattcagctactaagaggcagaaccagggctcaaacccaggtagcgctggccccaggacgcccacaaaatgatgacgctcgtctgcatagaccagcacatatgatgcttgcacgcagtatggaagacatgcatacatcgtccccgtggacgacggatcttcgcaggactcatgggaccatgcgctatccaagatatctcatccaaggacttcagctcaccagcacagcaggtttcgagcttgctcttgcctgcacaagaacctcgaccaagcacaacttctagtgcacaaaccaggcgcgctgtaggcgtaaggaaaaggccagtacaggcactcgatgctcacggagcagcagggcccagatgggaacgagctagatcaaccccaagtactgaccacacagacaacctcaccacaacacactcgcacgcgacacagacgcaccagcgaacaaaacacctagacggaaagaacaccacaagaacacactgacgcagctacgcaccacaccgcccaacacaacagcacccaggcatcagaacacgagcgaatccgggacccaacccggacctgaacaccacacaatcctccccaaccctcacaacgcaaccaaacagggaccagcccccaaaggaagcagacccctggcaccacggacgacgcacccacccctcaccaaccacaaccactgactcaaaactcccacccacagcaccatccacgcgagcgcaagcgcaccgcaacacccgcggcacaagcgaaactcaacataatgcaccccctccgagccaacctcacaaccacaccaaacccacgcacaccaacccctcggctgccaacaccacaagacctccaccccaccgcaccaacaacaaccaa

SEQ ID NO: 653122 - DNA, 258 bp, Homo sapiens
ttgtgtgagggattcgatacaaggctcagttaaagccacaaaaggggccgggcatggtggttcacgcccataatcccagcactttgggaggccaaggcaggtggatcatctgaggtcaggagtttgagactaatctggccaacatgatgaaaccctgtctccactaaacaatacaaaaattagccgggtgttatggcgggtgcctgtggtcccagctacttgggaggctgaggcaagagaatagcgtgaaccggggag

SEQ ID NO: 653123 - DNA, 470 bp, Homo sapiens
ttggtataattatttactggagaaacaggagacaggaggaggtagacaggatgctgagaagaaagaagcaggggggggatgaggaaaagattgggcaaaaaaaaaaaaaaaaaaaaaaaaaaaattttgggggccgccctgcggccccctggaaaaagcttttcagaaacaatgctttgggggcgccggcggccccaaggatagggataagtgggacattgggggccataccgcgtgttcccaagaggagaggatccccggggcaactggagccataactgggctgggggggttctctctcccccatataaaacaacccgccgcggggggggaaaaccgagccgcggctcgtggacacaaactctccacagaggggggagaatcacaggagggtaataacgggagtcctcctattcccaaggaggcttcgaggaagaccctgaatataaattacccccggcgggtgggga

SEQ ID NO: 653124 - DNA, 494 bp, Homo sapiens
  misc_feature (41)..(41): n is a, c, g, or t
  misc_feature (154)..(154): n is a, c, g, or t
  misc_feature (157)..(157): n is a, c, g, or t
  misc_feature (161)..(162): n is a, c, g, or t
  misc_feature (164)..(166): n is a, c, g, or t
  misc_feature (168)..(168): n is a, c, g, or t
  misc_feature (170)..(172): n is a, c, g, or t
  misc_feature (175)..(175): n is a, c, g, or t
  misc_feature (178)..(178): n is a, c, g, or t
  misc_feature (181)..(181): n is a, c, g, or t
  misc_feature (193)..(193): n is a, c, g, or t
  misc_feature (196)..(196): n is a, c, g, or t
  misc_feature (198)..(199): n is a, c, g, or t
  misc_feature (201)..(201): n is a, c, g, or t
  misc_feature (206)..(207): n is a, c, g, or t
  misc_feature (222)..(222): n is a, c, g, or t
  misc_feature (231)..(231): n is a, c, g, or t
  misc_feature (239)..(239): n is a, c, g, or t
  misc_feature (243)..(243): n is a, c, g, or t
  misc_feature (248)..(248): n is a, c, g, or t
  misc_feature (255)..(255): n is a, c, g, or t
  misc_feature (259)..(260): n is a, c, g, or t
  misc_feature (268)..(268): n is a, c, g, or t
  misc_feature (271)..(271): n is a, c, g, or t
  misc_feature (273)..(274): n is a, c, g, or t
  misc_feature (283)..(284): n is a, c, g, or t
  misc_feature (286)..(286): n is a, c, g, or t
  misc_feature (291)..(291): n is a, c, g, or t
  misc_feature (294)..(295): n is a, c, g, or t
  misc_feature (298)..(298): n is a, c, g, or t
  misc_feature (309)..(309): n is a, c, g, or t
  misc_feature (313)..(313): n is a, c, g, or t
  misc_feature (317)..(317): n is a, c, g, or t
  misc_feature (321)..(321): n is a, c, g, or t
  misc_feature (323)..(323): n is a, c, g, or t
  misc_feature (326)..(326): n is a, c, g, or t
  misc_feature (330)..(330): n is a, c, g, or t
  misc_feature (333)..(338): n is a, c, g, or t
  misc_feature (341)..(341): n is a, c, g, or t
  misc_feature (344)..(346): n is a, c, g, or t
  misc_feature (351)..(352): n is a, c, g, or t
  misc_feature (354)..(354): n is a, c, g, or t
  misc_feature (358)..(358): n is a, c, g, or t
  misc_feature (378)..(379): n is a, c, g, or t
  misc_feature (385)..(385): n is a, c, g, or t
  misc_feature (391)..(391): n is a, c, g, or t
  misc_feature (394)..(394): n is a, c, g, or t
  misc_feature (398)..(399): n is a, c, g, or t
  misc_feature (401)..(401): n is a, c, g, or t
  misc_feature (411)..(411): n is a, c, g, or t
  misc_feature (413)..(413): n is a, c, g, or t
  misc_feature (416)..(416): n is a, c, g, or t
  misc_feature (421)..(422): n is a, c, g, or t
  misc_feature (428)..(428): n is a, c, g, or t
  misc_feature (443)..(443): n is a, c, g, or t
caggccctgtggaagaatccagagcaggaataattggattntttccagccagtgactttcaggaggaccacatatcttcaatgtcttcacattgtatctgaaaaatgtatctgaagcactcaaacaccaagtctactcaaatacgcttcccaancancttnncnnntnannncgncgncgnccacaccagcancgncnnanaggannccaccaccgacaagnaggagatcnctaccgcngggnccaanaacggcngggnngctattcnacncnnccccaacannancgccnccnncgnccaactcaacnccgncacncaangnaanaaangcnnnnnncangcnnncgccnnanccanaaataaaaccaacaacaaanncagagngctccncanccanncnaacccctccncnacncgacnncccacnccccacccacccccnccacttcagggccccaataaccacccaccccccagccaaacccacccccac

SEQ ID NO: 653125 - DNA, 663 bp, Homo sapiens
aatcgaatccgttggcccacttgaaccttgtctttttagaaccacctactctgaataatggcacccgccttaatccacgtacacaaaggctcaggcaaaaaattcttcatctggagggtgagttcacattcatccaggtcgtgcctaaccttcagcctgggtccaaggtaacttccactctcacacaaaacataactcagcatgttgtctctcatatgtggattctgacaatgggccctcatagacactaggcagagtttcaccattctctgccgcttgttgagggtatgtggtctagggtaggtctagcattaggattagtcctcgatgtagatgatggggtcatcagtccagcaaagttgcatggcacatgcagacctgtgtatttgacatgctcgggcagcacatgtatctcagaccttaaagtttaatacaaattgataaataattccagtacctgcctgttccagttgaacatgtatatatgtgttagtctcaagtttcagacatatttcaggggagataaggtttcgaaggatgcaagggcatgctcgtatacaaataattaaagcttcataggtctcaatgtcccacatcccgagagattaatatgacctatcctcctggtaaccctatgaacaccttaaaataaacttgtatact

SEQ ID NO: 653126 - DNA, 169 bp, Homo sapiens
  misc_feature (66)..(66): n is a, c, g, or t
  misc_feature (85)..(85): n is a, c, g, or t
ggtcttgaactcctggccacaggtgatcctcccacctttgtctcccaaagtgttgaggtaaaaggnatgagccaccgcactcggncaatctaatttttaaaaacaccttttcctcactgggtggagcacgtgctacttttactgggaactgaatgaatgtgcaactcta

SEQ ID NO: 653127 - DNA, 1322 bp, Homo sapiens
  misc_feature (48)..(48): n is a, c, g, or t
  misc_feature (213)..(213): n is a, c, g, or t
  misc_feature (994)..(994): n is a, c, g, or t
  misc_feature (998)..(998): n is a, c, g, or t
  misc_feature (1000)..(1000): n is a, c, g, or t
  misc_feature (1055)..(1055): n is a, c, g, or t
ggcgccccaaccaggataggtgctcccccccatcttatgtaggtaggngtgttagataattagtaagcaagtgtcggggggtgtgtattaattccccgcccacactatccgggtgggtttgtgttgttcctcacactccagcgtgtgtgcgtcctttcggtgcgggaagtgaagaaggaaagtaattgtccctgtcgggagagaattgttttnggtgggggccaccaaaaggaccctgttgttagatgacccacccaccggcgtgctccttcgttcttcaagcgggcggctcttggccagcaacagccatccacccccttcggccttgtgtgttaagtaagtggaagaattcctcctcttggtggccgccacttccttcgcccccaccaacagcgcattaatactagtgttgtggacgacccccccgaagtaggtggacggccttcgttgatgaaatgttttcttcctctgcttcaccgctcctccaccattagtacggccctcctgatgttatagccccaccagcgttcgccccacaggctcttgtacttcgtgggcttctcttgtagtatagagatgatagagagcccgtggtagtattgtcggtgccccacagagatactccatcgcttcaccgcggagaggggcacactcgtcgagagagagtgcacacagcgcccgcgcgctctctcgagagaggccctcataaagctctcgtgagcactctcgcgctatcttctcgcgagagagatagaggctcctctagcgagagagtgctcgttcacagagagagctcttcgagatctgtagagaggctcgagacacatttctctctccacagagaggtgatcacacagcgcgcggggcgcgcccactctctgtagacactctcgagatgtgagagacacctcttctctctcgttggacaacacacctctctccgactggatgttcttgtcctctcgccccatctctctcttctccgcgcgctctntttngnggagatgagcaagagatagagatatagccccagcggtctctctttgtttattgtnggggccctctctctaaggccacaaaagagccccgcgctcgatctcggagaagatggagaaagccaccacggagaaggaaaccggcaccctcgagtggtggattcttggcacactctctcccacatgtgttcttctacaccacagaaagctcttgtggtggaattggcccctctgtgggtttacccggccaaaaacccccagattctcctttttagttagtataccggaccttaatataaagagggaaaaactcttgccttccacgta

SEQ ID NO: 653128 - DNA, 760 bp, Homo sapiens
  misc_feature (365)..(365): n is a, c, g, or t
gcgtctccatttcggtctcaggtgtggagtcggcaagaagccagcgcaagagggaagcggagttatagctaccccgagtccgcggagccggctcaggtgcactagccccgccccgcttctttcctccatgacgccgaagatcgacgggtcgctcatgcgcgggtcctcggtaggtatctgttgcggcagtcgcgcaggacgcccgggcatctacctgtctagggccaggagcgccgctacggtcctgtctctcttgtcgagttggagcaaggtggtgacagaacggcggtagcgtgctggctttggcgtgtccggttgcacccagtccggaggctctcgccgaatggatcaagcaagtctggaanaactggactagtgcgagccataggagtctggacaccaacacgaatcataagacactagtgatagtctcgtcccgggggtgatgcacggtcaataaacgggcattggcgtccgaagagacaaggctcccgttggggtggaccacgcctgaatcaagccccgtggggacgcagccaaggcacttggagttcccttcggaatttgcttagccatttgggaatcagttattggggcgtaccaacctatgcaaaacgattgcggcccagggaacccttttgggattcccccgttggagaaccttttggggcatctggacctctgatgactttcggtaattcgcctacgtaaaaacgaaccccttggggggttggaacctattcccaactagggggaactc

SEQ ID NO: 653129 - DNA, 138 bp, Homo sapiens
gaggttagagatcgagccttcctggataacacagcaaaaccctgtctctactgaacatacagaaaaaaataaattagccgggcactgtggcaggtgcctgtagtcccagctactcaggaggctgaggcaggataatgg

SEQ ID NO: 653130 - DNA, 4994 bp, Homo sapiens
cccggaaggaagtcgcgtgctgaggggtgtgacggttttcttgctcgtgggctcggacgagtacggagcgcctgcagggacagcctggataaaggctcactgatggctcagttgggagcagttgtggctgtggcttccagtttcttttgtgcatctctcttctcagctgtgcacaagatagaagagggacatattggggtatattacagaggcggtgccctgctgacttcgaccagcggccctggtttccatctcatgctccctttcatcacatcatataagtctgtgcagaccacactccagacagatgaggtgaagaatgtaccttgtgggactagtggtggtgtgatgatctactttgacagaattgaagtggtgaacttcctggtcccgaacgcagtgtatgatatagtgaagaactatactgctgactatgacaaggccctcatcttcaacaagatccaccacgaactgaaccagttctgcagtgtgcacacgcttcaagaggtctacattgagctgtttgatcagattgatgaaaatctcaaactggctttgcaacaggacctgacctccatggcccctgggctggtcattcaagctgtgcgggtaacaaagcccaacataccagaggcaatccgcagaaactacgagttgatggaaagtgagaagacaaagcttctcattgccgcccagaaacagaaggtggtggaaaaggaagcagagacagagcggaagaaggcgctcattgaggcagaaaaagtggcccaggtggctgagatcacctacgggcagaaggtgatggagaaggagactgagaagaagatttcagaaattgaagatgctgcatttctggcccgggagaaggcaaaggcagatgctgagtgctacactgctatgaaaatagccgaagccaataagctgaagctaacccctgaatatctgcagctgatgaagtacaaggccattgcttccaacagcaagatttactttggcaaagacattcctaacatgttcatggactctgcgggcagtgtgagcaagcagtttgaggggctagctgacaagctaagctttggcttagaagatgaacccttggagacggccactaaggagaattgaaaaaaacttgatatgactgcaaatgatacttaagcagatctttattttttaagatgaatcagaatgttcctccctccccgactaccttctctgactgtcttccagttactgtggtgaaaaagaagaaatgaacttaaatccactccctttctagggaaaggagggtggggactgatgatggggggttttatttcaggtaagcagtttatatgacttccaataagatttgtaaatcatgggcttgacctttgacctctagacactaattttatcctttgaggctggcttaattagggatgctgtcattaaggagagggagaaatgtagagtgttacctccaactcatttgatttcccttacttgggaaaatgcagtccagtgttctcacctctgcctccaaggtaggagatgtctgtgggtgaggctcagcaactgagcaaatatgtgcctgtgagtttgccagtagagctgtgaagaaacagctgcagagaacatttgaccttcctggcattcttgtctgcatgtgtgtgagttattttagaggtgtgctttcttgagccctcataaggaagtactggtgctaggttttgcaagattttgtatacactttgctccttgccctagggctcagagtggtggtttctgactacatttctagagtcagagcttgatcaccacaactcaattatttcggcatcttttcacctatgctgtgatttgtgaagaaatgaacttaaatccactccctttctagggaaaggagggtggggactgatgatggggggttttatttcaggtaagcagtttatatgacttccaataagatttgtaaatcatgggcttgacctttgacctctagacactaattttatcctttgaggctggcttaattagggatgctgtcattaaggagagggagaaatgtagagtgttacctccaactcatttgatttcccttacttgggaaaatgcagtccagtgttctcacctctgcctccaaggtaggagatgtctgtgggtgaggctcagcaactgagcaaatatgtgcctgtgagtttgccagtagagctgtgaagaaacagctgcagagaacatttgaccttcctggcattcttgtctgcatgtgtgtgagttattttagaggtgtgctttcttgagccctcataaggaagtactggtgctaggttttgcaagattttgtatacactttgctccttgccctagggctcagagtggtggtttctgactacatttctagagtcagagcttgatcaccacaactcaattatttcggcatcttttcacctatgctgtgatttgttttttttttttcttctcaaaaattctgttcattggttccactcagcatcaagaagacagggacaaacaactcaagtgtcttaacagctgctggagtgggatccttgttatctcttagccactgcaggacctgcctgacaggttatgtgtgcacctcgagatgaagtgtctttctattattgtagagattctgtagtgaagaggtctgacaccatgtgtggaggaggaggaacgatcagtcaagagatgtcctggtcttaatgcctgtggcttgtgctgggagtgggtctgacttagtgataaaaggactctattcactaagtagcctgtgtttttaaatccagggctgcaggcagcaacgcaagtcaggctgaacattcagtctccagagacagctgtgtggagcaaatcagagttcatgcccaagtccccaggttggaatggctgtgccaaaatccattcaaagggttttctttttcattactaggtcagaacattttgagtcaccttgggagattcaggatggggagagcaaatttgaacaaaaggtttttcttatatcctgagattgaggggtagggggtgtccaacctgtatagcccatgggttgtgtctagaattaagtggagggcagctatctggagttaacttgcaagcatattggtgccctccatgaccacctctggcttaggacttggccctgttatgagctgacccccaccccccaccccccacccccccccccgccaactcctatacccatcttccctaggtgaatctgtgaatggtcctttctggcagcaatccctgccttctttttgggcccatgcccagacttctggtttaaggaatggtcccagagcttgggccagcttgctcagaagttttgggagcattgagcctgcctagaaagatacagtgttagctccccttacttcaaagttgcccttctctgttctgactcctgggacttctggtcctgggcacactttttgcaggcaacaaaatgtgcctgggagtgatggattttaatgtgctccagagtcctttcagaaggtggtcatttcccttggccgggcgcggtggctcacacctgtaatcccagcactttgggaggccaaggcaggcggatcacctgaggttaggagttcgagaccaccctggccaacatgcgaaaccccatctctacgaaaaatagaaatattagccgggcatggtgtcaggcacctgtaatcccagctacttgggaggctgaggcaggagaattgcttgaactcgggaggcagaggttgcagtgagccaagatcatgccatcccactctagcttgggcaatagagcaaggctccgtctcaagaaaagaaggtcatttcccaagactagcatagggagtatccatttaaaatacattcatcttcctcccatttccgtgctattaatcacttgttagagcaacatgacatgcccagcatcccacttcccgaaaatgtctactccttctactctgagctcttgttgcctagacctcagaaaacaccaattcaccacagtagaaccgggagcagggatagctcagcttctctgaatagcacactttgctcaggtcttaacttgagggcctctccggtactaacatcctgcgatagcttgtcccatgagcacagaagagcctcagtagagtcaagtcctgctgcagctgccccaccccaagtttctatcatttcctctttaaacaaaaaatatgttatcctacacattagtgtcaatccaatggttgtctcttatctgtctaaatagcaaaatcatgaaaatcagctgttttatttgcataggacaactaacctgtctgtgtaactttgtttttattttaactcttactagaaaatctaatcttaaaacatttgaattctaaacatgtaaaatgtgacagcctgcaattttgtagacagtgaagtaatggctgctatttataaatggaacatctatcaaaataagtaactgtttataaaattcagtttttgtagggttttccaaggaaaaatcaccttggttgaatgtttctcactcattaaactttgcagaagtgattcatattcagtactgtttttaatcactttttaaaatataaggaccgaatgcaaggaaaccaaagtttattaataatttttatataactaaaataaaatagatgtggagggatctgtgatcatataaaaagggagggttactgaaagaattttagcaatatattgattcaggaaaaggagctgttttataaatgatcattcactgttcctatggttctatgtatctttcaaaccgatacctttactatttaaagagcgtaaatagtgaaagtaagatggtcatacttactgactttatctatttaagtttgatggagataaactatatcttggctagtggctactgtgtctgtgaatgtaaccagtacttctttaagctctattcagtagggttccagccactgcttttttgttgtttctagccactgttttttttttcttgtttccttataaaacaggtaataacc

SEQ ID NO: 653131 - DNA, 671 bp, Homo sapiens
  misc_feature (2)..(2): n is a, c, g, or t
  misc_feature (25)..(25): n is a, c, g, or t
  misc_feature (35)..(35): n is a, c, g, or t
cnccagtcgcagcattgagaaccgntcagatgaanaagaagctgcagacctcccaacaaagcctacagtgatctccaagtttggatttgccttagttggatgacaaagaaagcatcaacaatatccatcaaacttggatcaaataagccaaaagaaactgttccaactcttgctccaagcactttttcaggagcagcagcttttaatgaagatgaagatagtgaaccagaggaaatctccagaagcaaagatgaagatgaagaatattggaagggatacaccaacatcagctggaccaaactccttcaataaaagaaagcatgggttttttgataaccagaagctatgggagcgaaatataaaatcttatgttggaaatgtcaatgaccaagacaattaaacgatgttttgaaattggggtgtggggtgggtgtaaacttaaaaggaacagtttccttttttaaagaatggtataagactatttttggagccactttttttttctctttcattttttgtttaaatattgagctgtacactaataagttagggttcaaaattagaggtaatttatgttttatatacagatttcaagacatttgctaattttgtagtttcatgtgattagtttccaaaggttacagataataaatcagaaatggtaccttttt

SEQ ID NO: 653132 - DNA, 211 bp, Homo sapiens
tgtatgatgacgggtgcctgggagctgctggagcacgatcagctgtggcttgccctcggccgtccatatctctcggtcggtttcccggtgccagggtgcgttgcctgggtgtgaggtgacaccacagttctggtgtcagcggtcatgatgctaggatcgtgtgcctgccgagttcccggcttgcattgggagtaccgtacgctcaatactt

SEQ ID NO: 653133 - DNA, 985 bp, Homo sapiens
gagctctggagcctcatgcgaagcggatggagtgagtgctgcagctgtgctgacggcctgagtactgctgtgtgagatgccagtggtgccagctgccagcctcaacatgcctgccagaagtacacgaggaaccgtgcggcgtgcgtgtgcgtgtagtgccctgtgttgctgtggcggctgtgcgcgggagtgagctgcggagcggccagcctgtgcctgtgtgcgctggtgtggcatcatggacgagaaggtgttcaccaaggagctggaccagtggatcgcagcagcctgaacgagtgcaagcagctgtccgagtcccaggtcaagagcctctgcgagaaggctacaagaaatcctgacaacacaggacactccatacgtgcaagaggttcgatgtccagttacttgtctgtggatgatgtgcatgggcaactttcccatgattcatcagttgcgcaacctgtcctagcacactcggctgcgcacaatcacgcaaggatacaaactctacttcgctcactaatgggccagactctcactcgtctgagcacgacggcgactcattactctcccgtcagacacacccagcttacacgtgctttgttagctctctacgcgttccgcttcaccgttgaacctgcagtcagccgattccttctcgacgtggacatccactgatgacgcacgagcagactcacaccaccgcttctacctgggcggcttccatcctaactcgcttcgcacacctgctcctcacacgaaacacactcctcggcacacactcgccaacacactgctacaccgcgcacaccaacctacttccattacggacgcaatccttccctctcatgcaccgatactccctcacccctacgtcacccttgccccctcggggttgtggacttgggcgccccggactcctccaatggtccctcccccctcgcgtctggttcctccttgccggccagaccctcactaagagtac

SEQ ID NO: 653134 - DNA, 808 bp, Homo sapiens
  misc_feature (391)..(391): n is a, c, g, or t
  misc_feature (471)..(471): n is a, c, g, or t
agcgtgaggagccgccggcaagggggcaacgaggaagctcttaagagcgcggccggaaagcagttgagttacagacatcctgccaaaatgatttcttcaagagcccagactggtcagtaccctgatggcctcaaggacatcgtagctcggagggaattaggcagagctgttctcggaaacgcaaggccatgcgaaacgatcaacaacgtgttgcagctagctgtattgttcaaggaacttgactatgtgatagagggaatagctactatggatataacaagatcgtggattaacagcgaagtgttcagtcaagattaggagtacgagagaagtgggtcaggaaggaagcgaaaccacgagaagaacattagaagtgtttaacaacgaaccnaggaagataacagtcgtgtaggaactcgtaagagtagcctgacccagtatggagaaagatctacacggcacgagacgagngacatagtgttagacgcagaacacgaactagtaagtgacgaaagaaccatgccagttttcacatcgagtttactggctgtgcgcaggcacttgagcaagagcggaaggcaagattggtggtcgtttctttccaagacgcaggcaccccgtagagactagtaccccacccatcatcaccaccgtccaacagcatgtctcgacaatgagtttgcgctacgtcccagcgtgagccagctcagggtagctgctcagatgttagcaatggcgaacaagtgaacgaggacgagcacaccatgttctaacatgtggaccctttattgtctaactgatgagaatg

SEQ ID NO: 653135 - DNA, 436 bp, Homo sapiens
taatcagctcggcgcatatcatcatatttaaatgtactacatatgagaggctgcatgacattcacttaaagtggtgaaatacattaacctttaataagtgactcagactgatgcctgtgaagctgaaatctattttctggtcctaagctgtttccctgtgtgtacaattccctcggaatggtaggcagctgccatttagaactctgtgatgaataaagaaaaatctatatggaagcagaaatactatagaaatattatactctccaggcaaagaaaagtgggtgattgaggcaaatgcaccgataatttggggtcagggagaacacttgtctgaattacacagaaaatgttttcataaccttcaactttttaatcacagaaacatgcactaatatgcaaaacaagtgtgacagaatcatgggataaaagtatttac

SEQ ID NO: 653136 - DNA, 341 bp, Homo sapiens
  misc_feature (54)..(54): n is a, c, g, or t
  misc_feature (286)..(286): n is a, c, g, or t
  misc_feature (307)..(307): n is a, c, g, or t
  misc_feature (320)..(320): n is a, c, g, or t
ataccacagttgtcaccattttcttctttttttgaggcagagtcttgctctgtngcccaggctggagtgcactggcgtgatctcagctcactgcagcctctgcctcctgggttcaagctattctcctgcctcagtctcccgagtagctgggatttcaagcacgtgccaccatgcccaactaatttttgtatttttagtagagactgggtttcaccatctttactggccaggctggtctcaaactcccaacctcaagtgattcgcccgccttagcttcctaaaatgntctgggattacaggcatgagncacaacaactggnttctaattgtttttggtttta

SEQ ID NO: 653137 - DNA, 362 bp, Homo sapiens
ctttgtgtcacttcatgcttgtccttatgcgttcaccaagtgttcactggatttgaaatacagtcatctacagccacatttttctccaatgcaacatgtctactgagtggaatcaacaattatacccagcatctgtcagcactcaacaatacctttctgcatgactctttccataatgcggctgctgtctgtgattacgctcagaattgtctgcaaaaatcgtcggcacaactgacctagcacagctcaaagcatgtcaacatgactgactgcagactcacttcaggaaagtatccccagtgccgctatagtgctgctgcccagtacaaattcttcattgttgcctgtgacccccctcagaa

SEQ ID NO: 653138 - DNA, 205 bp, Homo sapiens
  misc_feature (56)..(58): n is a, c, g, or t
aagcttcgctacatcgaggccatttccagcgacttgagcgccttttctatatactnnngagtgaccgagaccgcggccggaccgagggttttgtaatgagaggaagtaggacagggcttatctggaaagaagtttggaaccctggggagaaattagttaaaaagaggtggaatctagatgagctgcctaaatttgagaagatttt

SEQ ID NO: 653139 - DNA, 140 bp, Homo sapiens
ccttggggtctggacgcaacggcggcggagcatgaacgcccctacagccttcgaggtcgttcttgtctcttcgagggcgagaaggaagatcaaccattaacaagggacaacaagggtacccaattgcctttttattcacc

SEQ ID NO: 653140 - DNA, 349 bp, Homo sapiens
  misc_feature (44)..(44): n is a, c, g, or t
  misc_feature (84)..(84): n is a, c, g, or t
  misc_feature (259)..(260): n is a, c, g, or t
gacgaaatgttcacgactcaccatggagtttgggctgagctctngttttcctcctttcttctttaaaaagtgttcaatgtcgantgcagccccttgaattttggggaagccttatccaacctggggggtttccaacaaaactcccttcacaattcttgattcaccctccctaactatggaatgcactgggtccgccaatctccaggcaaggggctggagtgggtggcagttatatcatttgatggaaagaaaaaatatnntgaacactccttgaagggccgattcaccatctccagaaaccattccaatgacacactgtatctgcaaatgaacagcctgagaattgaac

SEQ ID NO: 653141 - DNA, 181 bp, Homo sapiens
caggctcgagctcgtgggtggcagtgtgcgacgatttttgcagacgatgctgagcaaatcagagacagcagccacattctggaaacagtcatgcatgaaaggtatcttgatgcttacagtgccgctatagtgctgctgcccagtacaaattcttcattgttgcctgtgacccccctcagaa

SEQ ID NO: 653142 - DNA, 953 bp, Homo sapiens
  misc_feature (5)..(5): n is a, c, g, or t
tagcncccacatgaatatactagaaataaaactaaatgggacgtcgaactaagtacggaatctttatcacaatatcttggtgaccactggtaatacgacctccgtcagaccattctttcgtggacctatgcccccttttaccgtatcttctaggtcccccgtgttttcaaaacatcttttggtgaaaaacacacacaaaaccttggatcccacagactcccaaaggcgttttttttttacagcaaactattggtaacccttttaagaccccttcgtcagtaagcccttaagaaattctttggaaccaacacaagttttccctggccaaacccataagtggtgtcttacccttgccccccgtcccctggggcaggtgcttgtttttaacccgagtgccagagccgcccccccggggctttttcaacacgggtgaacagccccccaccagcctccagggggccaccgtgccaaaattcatatatattagctggggtgacccttacatggggccaacgcacgggggcggtttgcaagccaccccagttcgtgctcattatctgcaaggagcgtccacccttttcttcagttgcccgagaaagatttcttcgtatataattttgcggctaaaaagatttctactgcatctaaaagtttttcctatacgacccccaaacaatagatattttcttgagccccccactgtccatcagaatccagtcctactccacactaccgactctttaggagatcaacccctttatctaggcacccaaattcattgagagaacgcattaatctccatcccaccactctctgttagggctctaaaagaacacaaccacccactctgttgcggtatccaccaccagacagcagcacaattatcaccgatcttccccttcatcccccatctgccggtttttttcaaaaccattctttcaacccacaaaaca

SEQ ID NO: 653143 - DNA, 223 bp, Homo sapiens
agggaatctatttcttactgtttactcctccactaagtaccacacggtggtgactgtagtagctgagagagtaactcttaagcgtcatatagggcaattctttccggcttgattgatttatatttgcagaatggctttagcttttcttgtcccttgtcctttccataaaaattcggaataagcttgtaagtgtctacaaacaaacctacctatggcacaagcg

SEQ ID NO: 653144 - DNA, 173 bp, Homo sapiens
tccagaagagtgtgtagtgagtgtgtgtgtgccgattgtgtgagtttgtgatggtgagagagagagagtaagtgtgagagcgcgtgagtgtgtgtgcgagtgtgtgcgtgaccaagagggggtaagagtgtgtgtgtttttgtgtgagagggccgagagtgtgaaacccgttt

SEQ ID NO: 653145 - DNA, 131 bp, Homo sapiens
ctcggtattaaggatccctaaagggagtcgggtatcaaatgcagctgatggagatggagttgatgagcacagcctagtgatcgatacactgaaggaggtagatgaagctcgtaagtgctatcggtatggtt

SEQ ID NO: 653146 - DNA, 580 bp, Homo sapiens
aacattgacacgggagagcccttgactattgctggcatccgaggtcacaatctgtcagttatcctaaagagcaacgaggctttcttgcctggaagacctgtataacacctatggcattgcttgagccaaatagaatcgaactttgatgtgacgggtatctgatgaaacacagaggggatgtaactgatggaacctacccgatgggactatatgcagatgagtgggcaagcccactgaacatgcgacgttgttgcactgagagagcgcggagcctatgtttacatctgcctcagctgaagacacacacttgatgcatagttgaactggagctaagaaagaggatgtctctccatgagccgtgtttgtaccaatttcgcagggccttccggagctccacctgtgatctgagagattatgttaataacaaaaaccagagcatctttcttcattacccttaaaacgaccgttggaaccactgctctggccatatgccatgtaaccagctttcggctgatgcactagttgtagaacatgcacactcgcaaggctctacagatatatttgcctaaatgtgaataat

SEQ ID NO: 653147 - DNA, 157 bp, Homo sapiens
  misc_feature (26)..(27): n is a, c, g, or t
  misc_feature (34)..(34): n is a, c, g, or t
  misc_feature (36)..(36): n is a, c, g, or t
  misc_feature (42)..(42): n is a, c, g, or t
  misc_feature (44)..(44): n is a, c, g, or t
atgtgtgtgggtcatggcacaccatnngtgggcnangtgcangnaaaccatctttctccctctactcacggaatttctgtctattaaggtgacagaaattccgtgagtagagggaggaagatggtttcttcacgtgtcccacgtcgcttccacacta

SEQ ID NO: 653148 - DNA, 125 bp, Homo sapiens
aggccggtagtcatctgcactcatctacaaggcatcaatctgcgtgtggcatcaacgtaaaagtctacagctagggatcttcttgaagcaaggttccaagcacaaaactagtatgaccggaggct

SEQ ID NO: 653149 - DNA, 193 bp, Homo sapiens
accggttagagcggtctcttggcaaaagaatcctcagagccttcacgcagagacatcagccttcgtcagcccaacactcctaagatctccatcagtgaagtgcagcgtgtcatgccacagcccttctagagccagcaagcaaagacgttccaacagggtgcggcggcactgactggtcgtcatcagaccgctc

SEQ ID NO: 653150 - DNA, 1527 bp, Homo sapiens
  misc_feature (26)..(27): n is a, c, g, or t
  misc_feature (34)..(34): n is a, c, g, or t
  misc_feature (36)..(36): n is a, c, g, or t
  misc_feature (42)..(42): n is a, c, g, or t
  misc_feature (44)..(44): n is a, c, g, or t
  misc_feature (112)..(112): n is a, c, g, or t
  misc_feature (164)..(164): n is a, c, g, or t
atgtgtgtgggtcatggcacaccatnngtgggcnangtgcangnaaaccatctttctccctctactcacggaatttctgtctattaaggtgacagaactgaagggcctggcnaaccatgtggttgtgggcagtgtctcctgtgagaccaaggactgtttgccgncctgccccaggttgtggctgtggatatcaatgaccttggtaccatcaagctcagcctggaagtcacatggagccccttcgacaaggatgaccagccctcagctgcttcttctgtcaacaaggcctccacagtcaccaagcgcttctccacctatagccagagcccaccggacacaccctcacttcgggaacaggctttctataacatgctgcgacggcaggaggagctggagaatgggacagcatggtccctgtcatctgaatcttcagacgactcatccagcccacagctctcaggcactgcccgccactcaccagcccctaggcccctggtgcagcagcccgagccccttcccatccaagttgccttccgcaggcctgagacccccagctctgggcccttggatgaggagggggccgtggccccagtcctggcaaatgggcatgcaccctacagtcggactctgagccacatcagtgaggctagtgtagatgctgccttggctgaggcttcagtggaggccgttggcccagaaagcctagcctggggacctagcccacctacacacccagctcccacccatggagagcaccccagtcctgttcctcctgccctggaccctggccactctgccacaagctctaccctcggtacaacaggctctgtccccacatctacagaccctgccccatctgcacacctagactcagttcataagtccacagactctggcccttcagaactgccaggccccactcacaccactacaggctctacctatagtgccattaccactacccacagtgctccaagccccctcactcacactactacaggctccacccacaagcccataatctctacccttactactacaggccctaccctcaatatcataggcccagtccagactaccacaagccccacccacactatgccaagccctacccataccacagcaagccccactcatacttccacaagccccacccatacccccacaagtcccacccacaaaaccagtatgtcacctcccaccactacaagtcctacccccagtggtatgggcctagtccagactgccacaagtgccaccgcatcctaccacaagcctcgcaccatcccatgcaaagccccatccttataaatgtaagcccttaccactgtgcagctaaggaaataagcaaacccactctacccagggcccactcaccaaaaagctgcaaagagcccacacaacctggcccaaaggaagtaagaatgaccacgaagagcgcgagaagaaccagcccaggagatcgcacaatagaacaaatgaatgcgaaggcaaacaccataaagggagacccaagaaaacagcaag

SEQ ID NO: 653151 - DNA, 135 bp, Homo sapiens
gatatcccctcctccagccgatcagcagtattaaagtggatctccagcctgcacagcagtattaaagtggatcatccagccatgcacagcagtattaaagtgtactcatccggcctgacaagcagtattgaagtg

SEQ ID NO: 653152 - DNA, 1475 bp, Homo sapiens
  misc_feature (26)..(27): n is a, c, g, or t
  misc_feature (34)..(34): n is a, c, g, or t
  misc_feature (36)..(36): n is a, c, g, or t
  misc_feature (42)..(42): n is a, c, g, or t
  misc_feature (44)..(44): n is a, c, g, or t
  misc_feature (112)..(112): n is a, c, g, or t
  misc_feature (164)..(164): n is a, c, g, or t
atgtgtgtgggtcatggcacaccatnngtgggcnangtgcangnaaaccatctttctccctctactcacggaatttctgtctattaaggtgacagaactgaagggcctggcnaaccatgtggttgtgggcagtgtctcctgtgagaccaaggactgtttgccgncctgccccaggttgtggctgtggatatcaatgaccttggtaccatcaagctcagcctggaagtcacatggagccccttcgacaaggatgaccagccctcagctgcttcttctgtcaacaaggcctccacagtcaccaagcgcttctccacctatagccagagcccaccggacacaccctcacttcgggaacaggctttctataacatgctgcgacggcaggaggagctggagaatgggacagcatggtccctgtcatctgaatcttcagacgactcatccagcccacagctctcaggcactgcccgccactcaccagcccctaggcccctggtgcagcagcccgagccccttcccatccaagttgccttccgcaggcctgagacccccagctctgggcccttggatgaggagggggccgtggccccagtcctggcaaatgggcatgcaccctacagtcggactctgagccacatcagtgaggctagtgtagatgctgccttggctgaggcttcagtggaggccgttggcccagaaagcctagcctggggacctagcccacctacacacccagctcccacccatggagagcaccccagtcctgttcctcctgccctggaccctggccactctgccacaagctctaccctcggtacaacaggctctgtccccacatctacagaccctgccccatctgcacacctagactcagttcataagtccacagactctggcccttcagaactgccaggccccactcacaccactacaggctctacctatagtgccattaccactacccacagtgctccaagccccctcactcacactactacaggctccacccacaagcccataatctctacccttactactacaggccctaccctcaatatcataggcccagtccagactaccacaagccccacccacactatgccaagccctacccataccacagcaagccccactaaatactaccgtatggccaccataattaccccatactccttacactattccgtcattacccaaactaatgaaaaagaaaaaaaacgccgggctctaatcagcggggggacacgaggcagtgaagtgggccatgtcattggcgtcctgacccacttcttggcccaagtggccacctgccgcccccaatgggaccgataagtcgacagccggtaccgtagactgcccgcgaccagcagcgctccacccagggcggcacatcagacaactacacaccgcaccagccagaacacaccacaccacatacacagctaagcccgcacgagcacacacgaaaacgcaca

SEQ ID NO: 653153 - DNA, 1223 bp, Homo sapiens
  misc_feature (26)..(27): n is a, c, g, or t
  misc_feature (34)..(34): n is a, c, g, or t
  misc_feature (36)..(36): n is a, c, g, or t
  misc_feature (42)..(42): n is a, c, g, or t
  misc_feature (44)..(44): n is a, c, g, or t
  misc_feature (112)..(112): n is a, c, g, or t
  misc_feature (164)..(164): n is a, c, g, or t
  misc_feature (1197)..(1197): n is a, c, g, or t
atgtgtgtgggtcatggcacaccatnngtgggcnangtgcangnaaaccatctttctccctctactcacggaatttctgtctattaaggtgacagaactgaagggcctggcnaaccatgtggttgtgggcagtgtctcctgtgagaccaaggactgtttgccgncctgccccaggttgtggctgtggatatcaatgaccttggtaccatcaagctcagcctggaagtcacatggagccccttcgacaaggatgaccagccctcagctgcttcttctgtcaacaaggcctccacagtcaccaagcgcttctccacctatagccagagcccaccggacacaccctcacttcgggaacaggctttctataacatgctgcgacggcaggaggagctggagaatgggacagcatggtccctgtcatctgaatcttcagacgactcatccagcccacagctctcaggcactgcccgccactcaccagcccctaggcccctggtgcagcagcccgagccccttcccatccaagttgccttccgcaggcctgagacccccagctctgggcccttggatgaggagggggccgtggccccagtcctggcaaatgggcatgcaccctacagtcggactctgagccacatcagtgaggctagtgtagatgctgccttggctgaggcttcagtggaggccgttggcccagaaagcctagcctggggacctagcccacctacacacccagctcccacccatggagagcaccccagtcctgttcctcctgccctggaccctggccactctgccacaagctctaccctcggtacaacaggctctgtccccacatctacagaccctgccccatctgcacacctagactcagttcataagtccacagactctggcccttcagaactgccaggccccactcacaccactacaggctctacctatagtgccattaccactacccacagtgctccaagccccctcactcacactactacaggctccacccacaagcccataatctctacccttactactacaggccctaccctcaatatcataggcccagtccagactaccacaagccccacccacactatgccaagccctacccataccacagcaagccccactcatacttgcacaagcacctcacccgctagcctgtcctctcccgatggggactactctatgagntcgaccctgttggtcatgcgagcctt

SEQ ID NO: 653154 - DNA, 133 bp, Homo sapiens
cttttggatgtgggtcttgaccacgtcacgcgacttcccaggaggccatgccctagtgctggggctcccagactggtcctctcccagccccacagagagagccctaccccgccccgacactcaccggcccagg

SEQ ID NO: 653155 - DNA, 1271 bp, Homo sapiens
acctgcgcggtatgtatctctggagcggcgttcttttatctccgtccgccttctctcctacctaagtgcgtgccgccacccgatggcaagattcgactggacatggaccatgagccccctgcaggccccagaactatcttctacggtctgtgcaactaacaggccgacaaagcattatcactttaaggtggataactgactgaccaactgagcaccagttatatctttacagaaccgcgtcagcttatacgggcgctgtgtgcacacacggcctgagctatgcaccatcgctcgcacacgcccgaggccacactgacattacgaaagcgccaggtccaacttcaacagctaacccacctgggccaacctctctgcaccacctgctcctgatacgcgccccaaacgggcctaataccccattgggagagcgccatatcgaaaccattaaacgtcccccaaacccaaagcctggcgctccttcctatacggggcttctgacacgccgcaacgctagagcatctcccagcgggggctcaccaagatggcaagctaacttctacgactggggcccaccatccaacccctatacaccaataacggcccttggctcgaccacgcctgaaccgcacctgcgcaagaaacgcgtcccacgaacaccgaacttgaccgcgccacgcgaacgctacccgggcaccgcttcaccacccccctctcctttcacaccgtagcactaagctcctgcggcaacaacagccgaggctatcttaggccccccattggactatccggcgtgcgaccacaccacaccgcgcggctctaccctcccccaggcatacactccactcgctcttcactacaccccttacgggtcattggcgcctagaactcgccacaccgaccatgacctcgaacccgaactggagattagcacccggcaacaagcacacgcggacacgacctggcacctcggaaacccgcgacggcagccggacaacagacaccgccacccttgcaccctccctccgaacccttacctctacacctgcccccacccctctacaccccaccacacctcaacccacccccctcctatcccttaccacaatcattgactacaatcaccccaatactcattcacccccccctagaacctaacaacacaatactgacaccaccacatccccttctcaacactctacccctacacaatttagttccaccaccaacttcctccccacactacactactcaacccacaagccaccacgcaa

SEQ ID NO: 653156 - DNA, 988 bp, Homo sapiens
  misc_feature (12)..(12): n is a, c, g, or t
  misc_feature (32)..(32): n is a, c, g, or t
  misc_feature (41)..(41): n is a, c, g, or t
tctctgggtcantctggactggaatacaggangagaagggngcgtggccccagtcctggcaaatgggcatgcaccctacagtcggactctgagccacatcagtgaggctagtgtagatgctgccttggctgaggcttcagtggaggccgttggcccagaaagcctagcctggggacctagcccacctacacacccagctcccacccatggagagcaccccagtcctgttcctcctgccctggaccctggccactctgccacaagctctaccctcggtacaacaggctctgtccccacatctacagaccctgccccatctgcacacctagactcagttcataagtccacagactctggcccttcagaactgccaggccccactcacaccactacaggctctacctatagtgccattaccactacccacagtgctccaagccccctcactcacactactacaggctccacccacaagcccataatctctacccttactactacaggccctaccctcaatatcataggcccagtccagactaccacaagccccacccacactatgccaagccctacccataccacagcaagccccactcatacttccacaagccccacccatacccccacaagtcccacccacaaaaccagtatgtcacctcccaccactacaagtcctacccccagtggtatgggcctagtccagactgccacaagtgccaccgcatcctaccacaagcctcgcaccatcccatgcaaagccccatccttataaatgtaagcccttaccactgtgcagctaaggaaataagcaaacccactctacccagggcccactcaccaaaaagctgcaaagagcccacacaacctggcccaaaggaagtaagaatgaccacgaagagcgcgagaagaaccagcccaggagatcgcacaatagaacaaatgaatgcgaaggcaaacaccataaagggagacccaagaaaacagcaag

SEQ ID NO: 653157 - DNA, 256 bp, Homo sapiens
  misc_feature (56)..(56): n is a, c, g, or t
gcttagtagataagaactatacaccattttagaggaaaaatatattatctaatttngaaatgttgagtttcagggtaatattagtacttggatctatgtccatgtcctagattttttttcctgagcagatgtttcatctttaaggagaaattaacattaatacattcatgttagctaatagcaaaatgtgggtgccatttgacatatatacacgggatattatttatttagtgataggaggtgtgttcacaggaaa

SEQ ID NO: 653158 - DNA, 1025 bp, Homo sapiens
  misc_feature (5)..(5): n is a, c, g, or t
  misc_feature (161)..(161): n is a, c, g, or t
cttgnggcacacatagaacacattgtttccataaagacagctgtttccgttcgctattctccgggatttgtgctcaccacccgtcttccaccagcgggcgccgtggttttttccgaccgtgactgaagaacatacatcaaggtgtttcttcctagaacacngcttggggtgaactcagccgctcaccacctgggggggtgagaacgacccaccacacagactagtctttgtgggtggagtaggcccacccctttgttgtgtgcgagtgcccatgtatccatctttgtctcctccccggagttacttttttccttcttggtggtgggtagaggatttttctcccctgtctctctgctcttcctccctcaactgcggcggcgtgtttgttctccacaaactgtttttttttcacaaatgttcgttgtgttcactcttttgggaggcgcctccttctatttctccctcctgttttttctccgtcctcgctctccatctgcgcccgaatgttcttttattattgttggtggcaattctttctaagaccagactcgctctgtgggagtgtaatataaccccttgctctactcacgcgcgcgggagaacccttcctgttgcgtggttcttctctggtagatagactaactctctattcttcacacagttggtttctccccgcggaggagcaccacaacacctctcttgggggcgcccccgtggtgtgtgaggcagcgcgtcctttggtgagtgtgccccccttcgccccccctttgatgagcacagcacgtcttctgtgtggttgttgtgagcacacgcgttcttctttcgagtgtcttctcctccggaactttcttaaaccactcctttggtggggccctgacttcatgaagttgatctctattttctctcagggtgttcctcttactttctcttcccttaaaaaaaaggcggggggggggggccaacccccccccggtttttccccctccccccaaaccctttttcccttggggggccccccccccaca

SEQ ID NO: 653159 - DNA, 1887 bp, Homo sapiens
  misc_feature (1078)..(1078): n is a, c, g, or t
  misc_feature (1126)..(1126): n is a, c, g, or t
  misc_feature (1138)..(1138): n is a, c, g, or t
  misc_feature (1274)..(1274): n is a, c, g, or t
  misc_feature (1379)..(1379): n is a, c, g, or t
  misc_feature (1388)..(1388): n is a, c, g, or t
  misc_feature (1407)..(1408): n is a, c, g, or t
  misc_feature (1418)..(1418): n is a, c, g, or t
  misc_feature (1433)..(1433): n is a, c, g, or t
  misc_feature (1480)..(1480): n is a, c, g, or t
  misc_feature (1482)..(1482): n is a, c, g, or t
  misc_feature (1484)..(1485): n is a, c, g, or t
  misc_feature (1488)..(1488): n is a, c, g, or t
  misc_feature (1494)..(1494): n is a, c, g, or t
  misc_feature (1507)..(1507): n is a, c, g, or t
  misc_feature (1520)..(1520): n is a, c, g, or t
  misc_feature (1522)..(1522): n is a, c, g, or t
  misc_feature (1534)..(1534): n is a, c, g, or t
  misc_feature (1630)..(1630): n is a, c, g, or t
  misc_feature (1634)..(1634): n is a, c, g, or t
  misc_feature (1638)..(1638): n is a, c, g, or t
  misc_feature (1645)..(1645): n is a, c, g, or t
  misc_feature (1654)..(1654): n is a, c, g, or t
  misc_feature (1666)..(1666): n is a, c, g, or t
  misc_feature (1699)..(1699): n is a, c, g, or t
gctaagagaacccccacaaagggttcctttgtgccaaaggaaagggaaataatttgggctccccctggagtctaattgaagggtgggctccccggggaaaagaggaccttgtgccccgcccaccgggaaaatgggagcctggttctttagccggaaccctggttaaacacaagggttctgcgttgctcaaagaataatgttcccccaaacccagggtaacaattttttgccgatctaaactgtcttagcgcccacaaaatttgggccccccctgggtgtggctacacaatggaattggagatgagtttagtttaaatggttaaaaagggtccctgttttatagagaaaaggggaaaaattggggatatacattggggccccaccccacatgtgccccccgggcacactatttggtaagaaaataaagtatagggatttcctccacccccccggtaagttttggtacacatggagaggccacaacgcacaaacacaccccacagaaaaaatgtgggtggagagaaaaccacaggaaacacaaaatccttttctgggtttctttttaagagtttttatatagtgggggtgcactggggtttctaaaagccccagaacctgagagaattcacatttgtgccacaaatggggagaaacacacgcgtaaaactcgtgtgttttataaaagagtttttttttctggggtagagctctttaggcgcttataatgcgctaaaagagagaatataaaatgagcaccttgggggtaaatcttatattgtccttttctctaagagccaccacacttaaggataggagaaaattaaaatccttttgtcacatgcctataatgagattaaacgctggttttggtgggaaattgctttttataaaggaaagttaattataataatcaataaaggttaatataattaaataattttgagaacacacacgggggagaagtgaaaggaatttgtcacatttaaaaaacccacagtggttttgactttttctgttgagaatgagacacactgtgccctgtggaaatttttgcacagagaagtgtttatgctttgtnagcatttcaacttgcattattataaagaggtattaatgcctcagttangtgtttgtcaangtactggctgaggattctatctcagctgtcttttctaactgtgtaggttgagttttgaacacgtgcttgtggacatcaggcctcctgccagcagttcttgaagcttctttttcattcctgctactctacctgtatntctcagttgcagcactgagtggtcaaaatacatttctgggccacctcaggaacccatgcatctgcctggcatttaggcagcagagccctgccgtcccccacaggntctgctcangtcctcatctcatttgctnntgtaaagaantgggcaacggggaanggagagagcaattgaggcagttgaccatattcagttaattaattatntnanntgntttttntcccaaagtccancagtctctgaaantnagaacagtaggnggtatgagataatcaggcctaatcatgtgtgatctctttcttagtgagtgaatgttctatcccaaaagagggattatatcttatagactggtctgngtcnagantctgtanttaccccanttttattggaancattatactaaagttccagtgtattttttggtnacaaaattctttcgttgaaaaaaaaacgcaaagcagtggggaacctttacacattaccaggggcttaattattaaaaacaaaagagagaaaaataaggaacaagatggatgaagaagaaaaagactagactaaatagagaagagagagccaagagaaaatattgggggggggcggaagaaaaaaaggg

SEQ ID NO: 653160 - DNA, 199 bp, Homo sapiens
actgctagtcagctgcctcttcctgtttgcttgggtgttggctccggacggactgtccctctcgaaccgcctcctttggggctgcggtggggctggggaccctcttcagtgccacctcagtgttgcacaggaatgtgtagtagccctctgagtcacctagaactggaggccagaggaggaaggaggacgatgacgaaga

SEQ ID NO: 653161 - DNA, 969 bp, Homo sapiens
  misc_feature (501)..(501): n is a, c, g, or t
gccgtggccggggacggggacggggcggggccggggccgggccgtcccccgagtggcggcagggcttgggaggacggggcggctgccggcgagcgcctgtcagcggttgtgcggcggcgccccctcgggggggaagcgggtcccttttcccggtcggggagagcgccggggccggggccctatgggggaacccgggggccaacgggaaaagtcgggaaaaagaggcattggactgtgccgtggcccattcaccccccgggtattgtacatcaagtcggagaaaggtgactccgaaaattctgggggcaaatttgttggcgaagacgcggatgtgtctaactaacttcagggcacaaggggtgtcacaggaaaggttcgaggaaggccagcgccatcacggtgggggcacggggcacccgggggacaacactcagtggggcggaacaccacacaggccagggtgtgtggacctccaagaaacgtggacaacagcaactggangtggccagagactaacattcgcgaggaacgcaaccaacgcagggacggcgcgtgcagaacgacggaatccctcttctaaacccagaaactaaggggtgtacaaccccgagcactttgaattaccaatctttggcccaatttaggtacaaagcaggtcatccaatttttcccaacacaacccgggttaaccccaaaggttcaccaatttccttccttagataatatacggggtgaaatctcagacccccaccaaggaatttgattggacaggccacgtcagtttttcgggcagaaaggaggctacaaaggaactttagggccatcagattgttcaacggaacacatttatacagcgcgcgggaatcatcccacaggtcgtcaaggtgttgtccccgtgttcgaatggatgagaccctttaacttgtggttggcaggtgtttggacaacaagttgtggccaattaagggc

SEQ ID NO: 653162 - DNA, 447 bp, Homo sapiens
ttttggcacatgtcagttttgtttatataaaatgaagagactgtctctctgatgatgggtttaatgaaaggcactctgctttgggtgtgggcggtccaggattatgtggtaactattgtctgttagttacctggatattttatttttctttttggatcttgcaaggggaaaactacaagtaacaagttttataaatttaatttaaattgttacaggttttcatgttcaggacaaataatttttcaaccttcgatgatatccttgcagcagtttgttggtaaggtgactttcacctagggcagctgttgcatgccaattttttttttttgtgtgtgtgtgtgaaaacacttcagaattgaattaaaagatgtaaatttaaaattggttgtgtatctaatatgcccaggttcagtaaataaacaattctttttaaaaacaaaaaaaaaa

SEQ ID NO: 653163 - DNA, 142 bp, Homo sapiens
cattcagaaaatcggttcaaatgatacctcccctataaaactgtcactgaaatccctaagctgtatgtcctaatttttctcccatagtatcttgactctgcctacataacatatggcattatgatctgccccttccagcaat

SEQ ID NO: 653164 - DNA, 177 bp, Homo sapiens
tttaaaaaaaaaaaaaaaaaaaaaaaaaaaaaaaactttagaactgggtcagtgctcatgcctgtaatcccagccagcactttgggaggctgagatgggaagatcacttgagcccagaattagagataagcctatggaaacatagcaagacacttgtctcttacaggggaaaaaaaa

SEQ ID NO: 653165 - DNA, 293 bp, Homo sapiens
gggtttttaaaattgggggtttttttttccaggagggggggcccccggggggggcccttgtttttttccagctacccccaaaaaggggggccttttttggggcttccaaaagccaatttttttttttaggggaaaaagggtttttttaatgcccccggccaaattgtttggggggttttagcccccttgccccccctttttggggtttttctcccctttttttgttttcccccccgtttcctgaaaagggcccccagggggaaagggaaaaaaaagggttttgcccccttgga

SEQ ID NO: 653166 - DNA, 109 bp, Homo sapiens
gtatcatgggggacatgtgtcttcgagaaggacggatcaacgccacggtgtgaagctccagcccacagctggctccaggacctgcacatccactcccggcaggaggagg

SEQ ID NO: 653167 - DNA, 779 bp, Homo sapiens
ggagaaagcagaaaaaggagctccctggttccgcaagatcaccaatgcaagcatccctgctccacaccaagccgcagcgctttcttcgccttaacgcgctccattgtcatcatggggagacgtgggccagggctcatcccagcatcacagccacagcgctttccccgccgaatctcccagctcataggctacctggttgacccccgaatgctgtgcattcagtgggcagggaattcatcacagagctagctcccccatgctccagctgtgcccatgttcccacagccggctctgtggcacacacggcccaagctcccttccactggtctggcacccaatgctccagacgccaggtacctgctctccacaggcgcaaggtcagcaggcagcatcccacgtgtcaccaactggcccgagacccctttctcccctgaacccgcaacagcttcacctcagcaggtccccatcgcccctgtctggccatgtagcccaggcctttcccacaaatgcttcacttgtcacactcacctgggcaggcaactctcacgggccaagagtgcggagccacccgtacacccactactcaagagggtgcagtcggctgagaagctgccagcagcaactggccgctctgagaagaagctagccagttctcgcaagcacagctttgactgccccaatctgacctgaaagaaggcactggcggcccaggaactgaaccccctggaaaaaaggggacccagatgtactggccggccagcgggccgtgcaggaagggg

SEQ ID NO: 653168 - DNA, 207 bp, Homo sapiens
cttcatcagacaaagactgggcacgtttttatttatcagcaaaatcttggagactggtcagctatcacggtcagtgaacttccaacaatccaaggtacattgactgtttcgttctttcgtcttttacacttcttggtgcataaattaatggcttgataaatagtgaaaagcaccaggcagcgttggttctcaagaaagatgcaacaa

SEQ ID NO: 653169 - DNA, 234 bp, Homo sapiens
ccggtgacctcccccagggcctccttgcacagcccagtccaggttgttgtgccaaatcccaaccagccacgcctcagcctttcccagtttttccctgcagtcctgcagcagcagcccccacccccaagcttggtgttaagccctggtaagaaactaagggggatgggttgttggggccagaagggtttttcctccagcccctgcacactcccacccaggacagcccccagccca

SEQ ID NO: 653170 - DNA, 139 bp, Homo sapiens
tcagaaacttcatttttgttttttttccccatggaaaaatcctcctggagcccccagttttttaaacttccagcaaaggtaaaatcctgggacttttttccctgttttccaaaaattccctttaccccctttagagcca

SEQ ID NO: 653171 - DNA, 152 bp, Homo sapiens
gagcttggactggcggtcgttacaagtcgtgagtggtagcggatacaattggacacaggataggtttaacaccgtggtgagggggagtggggtataaaattttcacagaggggatgtttaatccacttgaggcgaggtgggggggtgaaatc

SEQ ID NO: 653172 - DNA, 112 bp, Homo sapiens
ggaataaaagtgtaagtcagtgctgggagttctcatgtaccttcccatagtcttctctgatgttaatatcttacataccatggtacagtgatcaaaaccaagaaattaacat

SEQ ID NO: 653173 - DNA, 367 bp, Homo sapiens
gctcgacggagccgccgccaatgatccaagcatcaacttgctgatgtggtgaatccgggtgctggttatcgttgggcgttaaaggcgtgttgcccgcgaggtaagagccgcatccagcgacggaacccaaagcgcgccatcgcctttaagaggcgcggctgaatcgctcgtaatactgcggctgatgacgatattggtgcgctcgggcagcggtcgaaaacgcggtggaaaagactcccaggtgcgccgccccatgatgacgggcttacccatggtgacggttttgaaatgcgccaggtcttcggggggcacgcagggccatggtgccgtcgcgcccaataatacccgcatcggtctgcgcccaaat

SEQ ID NO: 653174 - DNA, 953 bp, Homo sapiens
gatggtgggaatgggccagaaagacagctatgtgggggaatgaggctcagagcaacttgagggtaataatgatgatgatataataataatagccactatttaaaaaaaaaaaaaaaaaaaaaaaaaaaaaaaaaaaaaaaaaaaaaaaaaaaaaaaaacaatcaaaaaaaaaacaattgtggtgcggccccgcgcacccccagcccaagaaaaaggcttgacagaccacacatgcgttgtgagggcggggcggcgagccccagcgaagtcgaagcaatgcacacgacaccaccgcggaaaccaagagacagaccgaggcgcgaatgaacaagctgcggtgggtaaatacccaatgaaaaacaagcgacggccgcgggacaaacgaatctgtattgaagaaaacaaacccaacgagggctacgacgagaaaacactcgtggaggaatacatacaacaaagacagggaaccacacgcaagcgactacacaaaaaaaaaaagccacacaacgcggcggtgaacagaccacaaccacaaaagcgcacaacgacaagcaaccagccacacaaacagcaaagcaacaacgacaagtaagaagacagccgcaaaaaccagaagatctagataagagagacgacacgcaatcagcgggcgcagaagcaccagccagaggaaaagagaggcgcggaaggacagagaagcagacggagagaggggagaagacgcgacagccgcaacgcaaaggaagagaaaagcaagcaaatgagaagacgacgcgacgacgaaaccagacgaagcccaagcagagcaaccgaagacgcacgagaagcacgaggaggacaaagaaggcgaagataggcgccagacagaaaaaggagagaaggcaggacaggactaggagaggagaaagggagagagaaaagagagaagagcgacggacgaagacagacgcgca

SEQ ID NO: 653175 - DNA, 639 bp, Homo sapiens
  misc_feature (159)..(160): n is a, c, g, or t
ttcgtttttccaccccctggagataattcttgtgaaagccattagaggggcgtataataaaggggaagggttttctttttttagggagaaaggccttttttcttcttccgatatatatacaaaaaattaagcagtggtgaaaagtgccgtggttatccnnttttttgttaagtaagtgttggccaacaaaaacttccattggaagatgtggttaatttggaactggttagttttaaacgggttgtgggccaaaacttttaaaattagggtcccatattaccttatcctttccaaagtatatactcccaaaactgtgtatggcccgggtcccgtcctatctctgattgcagtttgtcttttatactcaaccaacctgtttactcgcttgggttgccgcccacggccttttgcctttactcctgggggcacatttcgatgtcattcggtctgccatctctttaataacaatgttccactctctcctcctttgtggtaaacgggttcacaaatcccgacatagattaagtttacatccttgccccatatgaataaaaaaaggagctgatgtgggacccccctcataccaggtggctgtgccctgttcatatatttgtggatgcatgtcaatttaggccaatg

SEQ ID NO: 653176 - DNA, 194 bp, Homo sapiens
tgctcgtcaatagcggctgcacttcgggatgtctgatccaacatcgaggtcgtataccctattgttgatatggactctagaataggattgcgccgttatcccttgggtaccttgttcccgttggtcacagttattgcgatcaattcgagtatatgtcgttcgctatttgatgacgcacggtgggggtactcgag

SEQ ID NO: 653177 - DNA, 3061 bp, Homo sapiens
aaaaaaaagatttttaaataatagctaaaggtatgctctctaggtcatccttagtttattagtactgtacttaaaaattattttttaatagtcaattttgggagataattatttctttccttatattttccaattagttggtgtctaaaaataaatgttttgtctaattttagatcaggtatacattcacaaaagcataaatcatagtctcacaggaaattcaccaattttccatatgtcgtgagataactgtcctttctacaacctcataacaatgaatttatataattacctagattttcttagtgtgaatctacccattagttttattttcttggtagttatttttttccctcctctctgttactattggccttaaaatacacagaggacggttacagtgtcctaatagctgttacatgtgtgtgtttcagcgtacttgaatcaagtgtacatttatagtaccaataaccgcctttacagctttacagttaacaattctctcacaaaactgtagagcattaggcatctgagagccatagagggccaactttgttccagagtgaacatgctttttttcctcaacatatacactactgattttttttaaaagtatgactttcaagtgaattaatgtattggttaggagaactgcttgctaagtccttattacctcttgttaaagcctcagaaggccgtgctgaaagccagaggggaaaaaaagagtaatgcacaggtatctcttttgcagtggtgactgtattttgagtaccttgtgtgacagggtattattacagcatcttgtgggaaaacctattaggcctttgcatgttaaagctgtataatttgttgggttgtgagtggtctgacttaaatgtgtattataaaatttagacatcaaattttcctactaactaactttattagatgcatacttggaagcacagtcatatcacactgggaggcaatgcaatgtggttacctggtcctaggtttgaactgtcttatttcaaaagatttctgaattaatttttccctagaatttctccttcattccaaagtacaaacatactttgaagaatgaaacagattgttcccatgaatgtatgctcatactcgactagaaacgatctatgttaaatgactgtgtatatgaattatttcaagtactaccccaaataactttcttattgctctgaaagaagaaaagcaatgtaaatcactatgattattgcacaaacaaccagaattctccaacaattttaagtaatctgatcctcttcttggagaaaattgttacctaatagtttttccttatgaatgttattactactggtataaatcaaatttctataaatttcctacttaagtcttaagaactgggttcttcctttgatgttattcatgttcagaaaggaaacaacactttactcttttaggacaattcctagaatctatagtagtatcaggatatatttgctttaaaatatatttggttatttgaatacagacattggctccaaattttcatctttgcacaatagtatgacttttcactagaacttctcaacatttgggaactttgcaaatatgagcatcatatgtgttaaggctgtatcatttaatgctatgagatacattgttttctccctatgccaaacaggtgaacaaacgtagttgttttttactgatactaaatgttggctacctgtgattttatagtatgcacatgtcagaaaaaggcaagacaaatggcctcttgtactgaatacttcggcaaacttattgggtcttcattttctgacagacaggatttgactcaatatttgtagagcttgcgtagaatggattacatggtagtgatgcactggtagaaatggtttttagttattgactcagaattcatctcaggatgaatcttttatgtctttttattgtaagcatatctgaatttactttataaagatggttttagaaagctttgtctaaaaatttggcctaggaatggtaacttcattttcagttgccaaggggtagaaaaataatatgtgtgttgttatgtttatgttaacatattattaggtactatctatgaatgtatttaaatatttttcatattctgtgacaagcatttataatttgcaacaagtggagtccatttagcccagtgggaaagtcttggaactcaggttacccttgaaggatatgctggcagccatctctttgatctgtgcttaaactgtaatttatagaccagctaaatccctaacttggatctggaatgcattagttatgaccttgtaccattcccagaatttcaggggcatcgtgggtttggtctagtgattgaaaacacaagaacagagagatccagctgaaaaagagtgatcctcaatatcctaactaactggtcctcaactcaagcagagtttcttcactctggcactgtgatcatgaaacttagtagaggggattgtgtgtattttatacaaatttaatacaatgtcttacattgataaaattcttaaagagcaaaactgcattttatttctgcatccacattccaatcatattagaactaagatatttatctatgaagatataaatggtgcagagagactttcatctgtggattgcgttgtttcttagggttcctagcactgatgcctgcacaagcatgtgatatgtgaaataaaatggattcttctatagctaaatgagttccctctggggagagttctggtactgcaatcacaatgccagatggtgtttatgggctatttgtgtaagtaagtggtaagatgctatgaagtaagtgtgtttgttttcatcttatggaaactcttgatgcatgtgcttttgtatggaataaattttggtgcaatatgatgtcattcaactttgcattgaattgaattttggttgtatttatatgtattatacctgtcacgcttctagttgcttcaaccattttataaccatttttgtacatattttacttgaaaatattttaaatggaaatttaaataaacatttgatagtttacataataaaaaaaaaa

SEQ ID NO: 653178 - DNA, 2062 bp, Homo sapiens
ccagtggtgcaattactatttgctcaccaagaccctgctagaatttctccttcattccaaagtacaaacatactttgaagaatgaaacagattgttcccatgaatgtatgctcatactcgactagaaacgatctatgttaaatgactgtgtatatgaattatttcaagtactaccccaaataactttcttattgctctgaaagaagaaaagcaatgtaaatcactatgattattgcacaaacaaccagaattctccaacaattttaagtaatctgatcctcttcttggagaaaattgttacctaatagtttttccttatgaatgttattactactggtataaatcaaatttctataaatttcctacttaagtcttaagaactgggttcttcctttgatgttattcatgttcagaaaggaaacaacactttactcttttaggacaattcctagaatctatagtagtatcaggatatatttgctttaaaatatatttggttatttgaatacagacattggctccaaattttcatctttgcacaatagtatgacttttcactagaacttctcaacatttgggaactttgcaaatatgagcatcatatgtgttaaggctgtatcatttaatgctatgagatacattgttttctccctatgccaaacaggtgaacaaacgtagttgttttttactgatactaaatgttggctacctgtgattttatagtatgcacatgtcagaaaaaggcaagacaaatggcctcttgtactgaatacttcggcaaacttattgggtcttcattttctgacagacaggatttgactcaatatttgtagagcttgcgtagaatggattacatggtagtgatgcactggtagaaatggtttttagttattgactcagaattcatctcaggatgaatcttttatgtctttttattgtaagcatatctgaatttactttataaagatggttttagaaagctttgtctaaaaatttggcctaggaatggtaacttcattttcagttgccaaggggtagaaaaataatatgtgtgttgttatgtttatgttaacatattattaggtactatctatgaatgtatttaaatatttttcatattctgtgacaagcatttataatttgcaacaagtggagtccatttagcccagtgggaaagtcttggaactcaggttacccttgaaggatatgctggcagccatctctttgatctgtgcttaaactgtaatttatagaccagctaaatccctaacttggatctggaatgcattagttatgaccttgtaccattcccagaatttcaggggcatcgtgggtttggtctagtgattgaaaacacaagaacagagagatccagctgaaaaagagtgatcctcaatatcctaactaactggtcctcaactcaagcagagtttcttcactctggcactgtgatcatgaaacttagtagaggggattgtgtgtattttatacaaatttaatacaatgtcttacattgataaaattcttaaagagcaaaactgcattttatttctgcatccacattccaatcatattagaactaagatatttatctatgaagatataaatggtgcagagagactttcatctgtggattgcgttgtttcttagggttcctagcactgatgcctgcacaagcatgtgatatgtgaaataaaatggattcttctatagctaaatgagttccctctggggagagttctggtactgcaatcacaatgccagatggtgtttatgggctatttgtgtaagtaagtggtaagatgctatgaagtaagtgtgtttgttttcatcttatggaaactcttgatgcatgtgcttttgtatggaataaattttggtgcaatatgatgtcattcaactttgcattgaattgaattttggttgtatttatatgtattatacctgtcacgcttctagttgcttcaaccattttataaccatttttgtacatattttacttgaaaatattttaaatggaaatttaaataaacatttgatagtttacataataaaaaaaaaa

SEQ ID NO: 653179 - DNA, 140 bp, Homo sapiens
  misc_feature (134)..(135): n is a, c, g, or t
  misc_feature (139)..(139): n is a, c, g, or t
gggagaggaggaggagtttttttccccggggcggggggagggggattttttttttttttgtggagggggggtggttgtgttgtgtgggtgggtgtgggagggggggcgaaaggggggtgtgggtgggggggggnngggng

SEQ ID NO: 653180 - DNA, 875 bp, Homo sapiens
tagacggtcccccctgacggtgctgacagccatctctttgatctgtgcttaaactgtaatttatagaccagctaaatccctaacttggatctggaatgcattagttatgaccttgtaccattcccagaatttcaggggcatcgtgggtttggtctagtgattgaaaacacaagaacagagagatccagctgaaaaagagtgatcctcaatatcctaactaactggtcctcaactcaagcagagtttcttcactctggcactgtgatcatgaaacttagtagaggggattgtgtgtattttatacaaatttaatacaatgtcttacattgataaaattcttaaagagcaaaactgcattttatttctgcatccacattccaatcatattagaactaagatatttatctatgaagatataaatggtgcagagagactttcatctgtggattgcgttgtttcttagggttcctagcactgatgcctgcacaagcatgtgatatgtgaaataaaatggattcttctatagctaaatgagttccctctggggagagttctggtactgcaatcacaatgccagatggtgtttatgggctatttgtgtaagtaagtggtaagatgctatgaagtaagtgtgtttgttttcatcttatggaaactcttgatgcatgtgcttttgtatggaataaattttggtgcaatatgatgtcattcaactttgcattgaattgaattttggttgtatttatatgtattatacctgtcacgcttctagttgcttcaaccattttataaccatttttgtacatattttacttgaaaatattttaaatggaaatttaaataaacatttgatagtttacataataaaaaaaaaa

SEQ ID NO: 653181 - DNA, 103 bp, Homo sapiens
tcccaactcaggtgctgagctgagctcgagatgtgatgcgccacagcttacgcacaccgaggagcgtgctgttcgtgtgcggcgactgtggccaggcttcgtg

SEQ ID NO: 653182 - DNA, 989 bp, Homo sapiens
aaaaaaaagatttttaaataatagctaaaggtatgctctctaggtcatccttagtttattagtactgtacttaaaaattattttttaatagtcaattttgggagataattatttctttccttatattttccaattagttggtgtctaaaaataaatgttttgtctaattttagatcaggtatacattcacaaaagcataaatcatagtctcacaggaaattcaccaattttccatatgtcgtgagataactgtcctttctacaacctcataacaatgaatttatataattacctagattttcttagtgtgaatctacccattagttttattttcttggtagttatttttttccctcctctctgttactattggccttaaaatacacagaggacggttacagtgtcctaatagctgttacatgtgtgtgtttcagcgtacttgaatcaagtgtacatttatagtaccaataaccgcctttacagctttacagttaacaattctctcacaaaactgtagagcattaggcatctgagagccatagagggccaactttgttccagagtgaacatgctttttttcctcaacatatacactactgattttttttaaaagtatgactttcaagtgaattaatgtattggttaggagaactgcttgctaagtccttattacctcttgttaaagcctcagaaggccgtgctgaaagccagaggggaaaaaaagagtaatgcacaggtatctcttttgcagtggtgactgtattttgagtaccttgtgtgacagggtattattacagcatcttgtgggaaaacctattaggcctttgcatgttaaagctgtataatttgttgggttgtgagtggtctgacttaaatgtgtatttggtattaaatcctcattagaacaaccacctgtttcactaataacttacccctgatgatctatctaaacatatgcattttaagccttcaaatacaatgttgggccg

SEQ ID NO: 653183 - DNA, 876 bp, Homo sapiens
ttgtgaatgttctatattcaggagtaattacatgtaataaataatttctccatatgaagggaaaaacctcttctaagtagatttgttaaattacacaatagccactatcatcactgtactttatttcatttcctgtcactctagatttccagtactcataaagagcccaagcctctcctagaatttgaaaaatcaagttactgtaaaataaggcctcccaaggttgccacatttaaaatcggagatttcagtattaaatatttgtaggcctttgaagcagatgaaacacggtatttttgtttcagtagtattctcaggttgcctcaaatactgaaattaaatctattccctacaccatccatcttcaaacaccatccatcttcaaagtttgaactaatcatcagcaacttgaagatgttcagaaaaatgttaaaatgattataggtgttttagtgcatgaaggtcagtgtgatattctggaagcataaaataatgtattgaatgtttactctcttagaatatgtatgtctagagctaaagatatatgttacattcccgacattgtttcttgtgaatgtttaatttgatgaatttaaattctgagaataatagttttcagtttcaattaattcaagaactgtttctgggtaacttcctatacttcagctacatggcattgaaagaggtcagataatttccttcaaccataaggttttctatgataacagtattaaaaggcttaaattatagagaatgtatcctatgaaccccaaactaagaaattcaaaatcaataaaataatttcttcaggcaattcccaaatatttgaaaattacagattctgaaaaaatgcatagggcagagaaaaatatcccc

SEQ ID NO: 653184 - DNA, 948 bp, Homo sapiens
  misc_feature (948)..(948): n is a, c, g, or t
tataactgttaccttacctgtgtggtgtacaccacaacaaaatgacctagatgattgaagcccctcgcccctcagcagggatgaatgtgccttggttagacggcaggaggtagaggtggttgtgtctagaaggagctctaggagcttggcatcgtggcagcctgtggtcttcctcaaccctctggttcctggagtaagggcacatcatgatgctcatcatgaagtcttccaattatacgcgtcgatctgcctactttatagtaacgcctgctgtggggcacgcaaaggtgatcgagctcgaggagaagagcttcctaatcatagatggtcaccattcagatgcaagaagctccatgagccccgactgagtaaacctctgggggttgtacatacgtccactcgaattcgggtcagacactagtgcagtgccgtgggttaggtgtctcgatctcttaagtgcccctacgtggggtacgaggagcctgtgggtcgtagtcccagctctatttcaagggcccagggaacccattaggcccctggtagtctagtggcccatgcacagtctgtagcctgaggcccaggcgtgctgggacctgaaccttttccccctggctcctgttcacaggcgggattggactgtacacgaacgtcgctcagctgtgccggttgaaaaggcagcaactcactggccaaggaaggcgggcgaacggtaccccactggacacgggtacaagcacgctaggcgggaggggcacgccggaatccgactgggaagccgcgggggaactaggcacgcggcacgcggccaggggaaccctttctaaacaaacagccggggggcgcgcaccatgcacggcggaagcgccgcggggggacaacacccgcgggaggcgcgaaaaacagcgagcacacacggcggccgaaggggcacacaacacagcaacaaan

SEQ ID NO: 653185 - DNA, 281 bp, Homo sapiens
catcacggtcaatttagaccccggactttcgggaaataaaaggtgtaattaccttttactcggatcataatctcccaccggtctaagaggttatttattccttatttagagggcctctatggccaggtgccgggaattattatatgctcatcactttatgaagaataaaattggtctttccggccttaaagttacattcgttcttccgctcaaatccggatcgggtccattaaagagtgttcgcagacaaagtttcggaaagattagagaagaatcccccc

SEQ ID NO: 653186 - DNA, 208 bp, Homo sapiens
cggagactctctccatctctccgctagcatgaggaagagtccgggcacagagagatggagagagacctagttaggaaaaatatattcaggcggaagagatgtactagatttcacattatggcagttactaaagaagcacgtgaacatgacacatcaccttcacctttgggatatggaatttgataagcagttagcccaccagcaatat

SEQ ID NO: 653187 - DNA, 1262 bp, Homo sapiens
  misc_feature (264)..(264): n is a, c, g, or t
ggaccgatcgcggcaagtatgggaccggctccgcgccagctaactgtgattaccggggtcgcgggttcagtcattatacatgagatacttactactgtcgccatgtggcaaacagacattcactactacataggcaatcgacgcggatggtgcggacgcgtaggactctgtcagttgaatcccgcgagctggagacacgactccgtcaatcaaagagtagcgcgcgtaagtgtcgacagacatcatgaggttgatacactaaanttgcgagcatgagatgacccgatgtacatgaatggtcatcgtaccgatgccacagcgttggcgaaggcagggcagggacagaggaccgcaacatgcaacgaaggaccatatctaatcgattgcctaggactggtctccagtccgtctgggagtcatggtaggaattcactttgaagacgattcgcaattccatggatgaactagaggtgcaaacagtcgctgcaaaggccattttgggggaacctttctgcgccaacggtcttgctaccgaaaggcgtatcgagttggtacacacgtccatttacttagcaatcttgggggcactggacactttcaccaacgataacaaggggccccgtccgtttgggagtacgcctaagctaacaaggacacgtacgaaaacaccttggggtaaggataggcctagtgaagttgcttcgttgttcatactcagaggagtccctcgggggaaccagaactcatacgcacctttgtctacgcccccttatgcgctacctgcccacgtcgaagactttggactgaccggcacgcaaaggactgaatagacaggggtcccggcgcaaagtgaaccctgcagaggacccagctgaatagtgcctttgcaattgttcctccctaatttggccacttagcaccaattccccggtgtggaatgacagccattcccgggaaatgcacttgcttaaaagcacgcaggatctgggcccttggcgcagcccgggacaacagcaaaacgccgagccttgtaacagcccgaatgcccccaacactgaacacaccgcccgcacacaagcaccacccggccatgagccacacaagaatgacacagcacagcaaccccaaaccgggaaaccaccctccgctcacccgcaccgactcacgcacaaccgacgacgtgactggggagaaaagacatcacggtctacaatgtcacacacactgacaaacgtggccagaacgacccacaacaccacctg

SEQ ID NO: 653188 - DNA, 1007 bp, Homo sapiens
ggcgcacgcagggtggggggagggagcgcacgagtgcgcgcacctctcccctcgtccaccgtgccgcctcttcttctgccgttcctggtgctgttgtgtgctcgttgtgcggaccttggtacctctttgtgtgaagcggcagttggaggagactcgggcgctcgcattggccgaggaaaagcccaagggaagggagtcaaagaactggagaacagaccgaatcatattacctttggaacggtggcgggcgccagggatgcttcctgtggtgtgcaggttcaaacgaattagagaaggccatacaccccatttaagtaaccttaattgaacggccctattgtcgacccgacacgggacttttgtccacttggacggcgcaacggaatccaggtatccccgtatttggacgggggcaaagccaattccaattgaaacgagaacacaccttgcccggtcttggcacactgggcggattgcacggaattccaccttgttggttgtccccaacagcaagaacggagagggtggtccacctgcaagacggccacccttgttttttaacttccaagaaaatctgttcttaaaggcccaaggattacttctccaatttacgaaaacttgcattgggtcttccacccaacatcctgactactaccggtatagttcctctaattctgtcatttcccccctttccccattccttttgttgttccctagtagtggtttttgtgcaccagcttttgccttctttttttctaaccacaccgccactggttgtttggtctgccctccaggtggagcgggtggcgcccccgtttggttcttggtgaatcccccctttcccaggggcggcccttcggtcttttttttttcgcgagtttttgcttccggtttcccacaggaccaccctttaatcgttgcgtgccgggatcgcgttctcttgggaccgggtccattggcgggtcggggctgtgggtccccactcttgcggctttgtgaaaaagggc

SEQ ID NO: 653189 - DNA, 370 bp, Homo sapiens
gtcacagacctatagaatacacagtgagtatgttcgagatgtttatacacaacaaatccatatgtgagaagtaaaattctagctaaaaagagcaagaagattttaaagaaatttgatagaatttctagaaatgaaacatatactaataatatttaaagctcaatggactaaacagcagacgaatcatagttgaagaattggtgaattaaaggatagatctaaagaaattactcagaatttatcccagagatgggaaacaggaaagagaggttaggaggcatagcagaagacatctagcatcagtccagctgggggttctattaagaaggatcctgggaactaagggtgagcgacggtttatgaacgaaaa

SEQ ID NO: 653190 - DNA, 215 bp, Homo sapiens
cgaatcttctcaatgggataacggctgagctccagccaccccgcagtcactttctttgtatcaacttccactgttgccatcgcttacatgacacagtgtttataacgtgtacatacatcaacttattacctcatgtagttatttcccgaaacaaagccctgtggaagaaaatggaaaacttgaagaagcattaaagtcattctgttaagctgcga

SEQ ID NO: 653191 - DNA, 370 bp, Homo sapiens
cacgaatgtggaacatccggcacatgcgcgcagtcagctagtaacacttgcccttgttggagactgatcatgagcgacagcaaaaccttgcgacctatcatcgaagccgcccccttgaagcctcaacccacccagaacgtgcatggctgggagcgcatcggctcggtggccggcggggtaatgatggtgggtaaaggcttgcgccgcggcgggattttcggcttgatccaggtggcgattggtggcgtggcactggcccgtggctttacagggcacagttcgctcaaggacaaacttggaacaggggccgccagggaaagtgaacagcgttgcgccaccaaagattcggaaacggggatcgggttgacag

SEQ ID NO: 653192 - DNA, 371 bp, Homo sapiens
  misc_feature (22)..(22): n is a, c, g, or t
ttttcgggggggtgggggttcnttccttccttccttctatccttccttcccctcagcctctctgctttagtgaactttctcctagttttttgaagaagttcatcaattcaagcttttgtacatgggatttcctaaacctgaaatgtgcctcccgttttgtccaaacagacacgggctccactctgccccctggctcacacctgcttaacctgtcaagtcacatctgaactgtcactcttcagagggtccttctctggcaccctaatgtaattgagatcatcctattattctctgctctagaacttcccacttccgggatttctcattcctgcctaacctcttgtgtgtctggtttttggccatcgatttca

SEQ ID NO: 653193 - DNA, 920 bp, Homo sapiens
  misc_feature (1)..(1): n is a, c, g, or t
ngtcgaactcaagtaccgcggccttgtaaagccgtttacacatgcaagtgggaaaccgtgggggggaacggccccccaaggtccccagggcattttggccaccgcgggccaagacccaggggcaccccaacggtgtagggggggaacaaacaaggaacggatgtattcccggcccgtgaacaaatacacatccggccatgagggaaagtcgtaaccacccggggggtccaacacaaagcaacaaaccctggccaaggccccccgggtatacttcatcgcacccactgtgcaaaggccactttcatgcgcgctcgggccctttttgggacgacacatcaatctcggcgcgtcgcccaagaaccccgttagtagccgggcgagtcttccgccccctatgggttttgggcaataccgggggaagctttttactaggaggccccgtgttaaccgcggcatttgccccccgacgcactgtatctttcccccccggcgtgtcttccgttctgtttttaaagcccacttttgttacaaagtgcgggcaatcctcgctcccgtcaaaacaaggctttggtggtgaggcagcccttcctcttcagcttgtttttttattgaggcaccttcttcctcagtaatattgtccccgcaaatactccttggatgtgccttactcccccaccctcttccctccttaagacgctccccccaccctcctttacaccaggctataaaaaaatagactgacatttcgtgtgcattatactgcctgagattttctgtcacaatcatcatatctctttacatgcaaggtctgtattacatagaagtttctaaaatttctgtgttatccgccaccctcgatcaggggtgtcgttcacctagtcggcaaaaaaaaaataaccctcctcatcccacataacaca

SEQ ID NO: 653194 - DNA, 404 bp, Homo sapiens
ctgactctacaggatcccccggaggcgttgaatggccaattggatccaacagttgatacaacaagacgaggttttgtatttatcacctttaaagaagaagaacccgttaagatggttctggatgtaaaaagttccatactgtcagtggaagcaagtgtgagatccaggtgcgtcccagtccatagaagtctatcagcagcagcagtatggctctgggggccgtggaaatcgcaaccgagggaaccgaggcagtgtaggtcgtggttgaggtggagtgtcagagtcagagttggaatcagggctacggcaactactgtaaccagggctacgggtaccagcagggctaacgggcctggctattgcggctacgagtactcttcgctatggccattcaacgcctccgt

SEQ ID NO: 653195 - DNA, 198 bp, Homo sapiens
gggcctttaagctctcttatatcttatctctctcactcatgtatgcatacatgccagagatgcatacacaggtgcctatgcaagttcatttacgcctcagggctggtccctgcccaaagggtgtgaccctcctaatcctctcctaggtggcggggctggtcccttgacaccctttctccccttccgggctagacctta

SEQ ID NO: 653196 - DNA, 1175 bp, Homo sapiens
cacttggcttctgaaggcctatcaggagctgctggcaacagtgaatgagatggacttatctccagatgaggctgtgagggagagcagccgcatcatcaagaacaatattttctatgtgatggagtaccgagaactatatcctggaactattatcagaaagtttgatgagagatgccagcgcccgaatcgtattccattcgatgacctggctggagaccagaccacctcattcctcaaaatgtggagcgattctgtcggagccgatgggaacctggtggtgcagaaaaaacaaaagaaaagaaggaagacgaagacagaaggtcctagaccaggccatagtatctggtactgtcccatctagcccagaagaagaggaggcatgtgtggacaagcaccatggcatgagccaagcaacacgagcagtgaccccagaactactagagactcagcatggaactccgaaggaacacactatgactgcggacacagagcgagccaagtggcaccgcacacaaagcgagagacagcaagaccaatggacgaacggaaaaccaaagcactgaaaccatgacaaggacaaggcaccaacacgggacacaatgacaacatccatgacacggacaagcaacggaaacaagatcgagcgaccagacaggcacgaatgcagaaagcaaacaatcagagcacagatactctccaaaagggcacaaaagaaacacacgaaggatgacaccacaactcaaacactaggaacacgaaccacacgaaaacacaagcacaacaagaacccgcgagcaacgacagcaagacaaggcaagacacacacgagaaacgcagacatccacacaggcaacagcgacagcagaaaagaagaccagagagagagcaaaccagacgacgacaggaggagaacaaaagtacgacagagacaagagagcgacaaccagacacaaagaacaaagaagagcaaagcaacacacagaggcaaagaagaacaagaaagacagacaagaacaagacaaaaacaccgacagaacccaacaagcaaagaaggccgtaagcaaaccagaggagaggacagtgagcaagagacgacacgcggtagcagaagaaaatcaacagcaaacccaagccgaaaagacagtaggaccgacacgggcgcacggtgccggagg

SEQ ID NO: 653197 - DNA, 887 bp, Homo sapiens
cctcatgtctgtgctagctgtaggttcacggcccgactggtggaagatgtgtaaatgcggcgccaggtacaaagtatgctggcctgtgatggcaatgagattgacaccatgtttgtggaccgtcgggggacatgctgagcccctaggggacacgaagctggtgatctgctgtgaggggaatgcttgggttcctattgaagctgggctgcgtctccacgcccctggaatgcttggcatattcagtcctgggttggaatcatccgaggctttgttggataggcacgggggtgtcattcccgcacgaatgaggcttaaatgccatggatgtggtggatccagttatgccatctcagcgaactggtgcttccaggcacccaggaacgatcatctatctagcgactctgtgttacctatctgggcgtgtttcacttgacatagatggtgccatgcgcatgttccgtacctcagaatgattagtgtccattgatcctggtattgcctccttttgactggacctgtgtgccctttgggtcttgaagcgtcactgccagacagcatggaggggcctggttgaccatggaccggtgacggcagcagtctctattctaaacaagcgcgagactccacgctgtgtcaagataccatgggtaccttgtacttgccgtgatccgtgagaaccaatggaatgcagatcattagcactcgacgggttcctgatggaccatctatgtttcaactcggagggccatgatcctcctggttgaatgctccgtgacagcgatcggcatagcccgggttgatggcagaagcgagggtctttagcagtggtgaggcagtggttggaaggcctgctcgacagatcggaggaaagctcatttataatcgat

SEQ ID NO: 653198 - DNA, 575 bp, Homo sapiens
  misc_feature (239)..(239): n is a, c, g, or t
  misc_feature (320)..(320): n is a, c, g, or t
  misc_feature (336)..(336): n is a, c, g, or t
tgcatcaacgcgttgggagctctcatattgtcgacctgcaggcggcgcgaattcactagtgattgtgagctgagatcgcaccactgcactccagcctgggtgacagagtaagactctgtctttaaaacaaagcaaaacaaaaatctggagttggctagtcctggactagtatggccgaactatagtcatcagagacccagaatgccttcagcttgttgctctgccaccttaaatacatngtcccagcacctggtccaaaatgactgctcaagctccagtcatcacatccacgttccagccagtgggaagaggaaagggcnaaggagggaacctcanccttcacatggttagtcacgtgaccacactctatggcaaggaagcctggggcatgtgagctcttttcccatggaagaaagcagggtaagcgggagagggaacatccggcagtctcaccagggggtcacagctgccaagttagatctagttcagaaacagaatgtgcaaggcttgttgagtatggggaggaactcacacgcaagatccacgttcccagcccctgcaccgtccgtgacggg

SEQ ID NO: 653199 - DNA, 131 bp, Homo sapiens
ctagtgtggaagctgacgttatttccgtgaggtcatgacacatggaagtggaatcctagccactggctgcggagctctcgtgatgaatggccagagtgctgactgacatgcctgggtggaccagtgagctg

SEQ ID NO: 653200 - DNA, 320 bp, Homo sapiens
tgcatcaacgcgttgggagctctcatattgtcgacctgcaggcggcgcgaattcactagtgattgtgagctgagatcgcaccactgcactccagcctgggtgacagagcgaaactccatctcaaaaaaaaaaaaggtaagatggtgggattaagactagacttgcagtagtcatgatgattgtgactgggtaaattagcctataaaaagacagatgctcagatttgatttttttttttttttttttttttttttttttttctcctctctttattatttcgcacgcgcccccaaacccggattaaaaataaaaaaaagggc

SEQ ID NO: 653201 - DNA, 763 bp, Homo sapiens
  misc_feature (560)..(560): n is a, c, g, or t
gggggacttcaatactctactgacagcacaagacaggtcatcaagacaaaatgtcaacaaaaaaacaatgaatttaaactatatcttggaataaatggacttaacagatatatgcagaatatttcatccaacaactgcagaatacacattctattcaacagcacatggaactttctccaagatagaccatatgataggcaatgaaatgagcctcaataattttaagaaaattaaaattacatcaagcattcttttggaccacagtggaataaacatggaaattaactccaaaaggaaccttcaaaaccatgcaaatatatggaaattaaatagcctgctcctgaatgagcactgggtcaaaaaggaaatcaagatggaaatttaaaaaatcttcgaactgaatgacaataatgacacaacctatcaaaacctctgggatacagcaaaggtggtgctaaaaggaaagtgcatagccctaaacagctacatcaaaaagactgaaagagtacaaactgacattataatgtcacatatcaagcaactagagaaaccagaacaanacaaacgcaaccccagcagaaggaaggaaataactaagatcaaggcagaactaaatgaaattgaaacaaatgaagaacaaaaaaaaataaacaagatagatgaagaagctgtttctttgaaaagataaataaattgatagaccattatcaagattaacaagaaaggagagagaaatccaaatagctcacttagaaatgaaacg

SEQ ID NO: 653202 - DNA, 220 bp, Homo sapiens
cctttcatctcaataaagctgaaaaaaaaacctgggaagctctaaaaaaaaatgagccatcaagtcacaaaaagaacacggaggaacctaaaatgcatactgtaagttaaagaagtcaatctgaaaaggttacatggtgtatggttccaactatatgacattccagaaaaggcaaaactatgccgacagtaagtaacaagattagggtttcccgggtttg

SEQ ID NO: 653203 - DNA, 170 bp, Homo sapiens
ccgcttgtatcctggcacttggagctgaggaaggaggatgcttgaacccgggaggcggaagttgcagtgagctgagatcacgctactgcactccagcctgggcaatggaatgagactccatctcaaaaaaaaaattttttttttttacccataagtgaaaatgaaaagtt

SEQ ID NO: 653204 - DNA, 904 bp, Homo sapiens
gtcctttccaccttgcgccgctgcagaatggctcccgcatgagaagggtggcgagtaagaacactgggccgttctgccatctaactgaagatgagtaacccggaggaatacaccatcaacattcacaagcgcatccatgcgagtgtggctttcaaggaaggcgttgcaaccctcgggcaacgtcaagagagcattctgggataattcttgccaatgaaggatgatggcgagctctcacgatggtgtcgcagttgaacacccagagcatcagagcaaaacgctgtcatgggtccattcacggaattcagtgacagtgtagcacaataacacgaactccaggtgttgactgagactgttccatgaaacgagacgttcagctgagcgaatgaaacgaattcagccctaaagggtaacgctaatagtacattatggtatagcgcattatagtaaccgtggtataaccaacaattttcccagaaaatcatacaggaccatggtgcagactcgttgcgaatgtaagaaacattagatccggctgtagaatcgagtcaacagcttcaacaacatacaccacgtttgtatcaacataatcctgcggtaacaatgatcaggccacatggatatacaaaatggagcagaaaacatggagcaacaaacggagatgcttatccgatcagccgatcagcactaaccggagaacttgaacaagataacgtaaatattattcaagtacagacaccactgctgacttaggacgcgcaccgcgcggtgggtgcaccctacgctaacatgacacacagtagcacaggtcacaccatataacggctggcaccgacagaatacacattagaaaaacctgaccacaacaggtcgaagccagcacaagagtggaatcgcacaacac

SEQ ID NO: 653205 - DNA, 146 bp, Homo sapiens
attgcattccagcctgggtgacaagagcaaaaattctgtctcagaaaaaaataaaataaggaaagaaacttgaaaactaagaatttgggtgaatggcttgtggaagtgactggatccctagaatagccccagccatggcacttcag

SEQ ID NO: 653206 - DNA, 1338 bp, Homo sapiens
tggcaaaaaacaaaacaaacaatttttattttaatccaagaagttaatttcccgagggtgttgaaagaggaggcccacaagtttatgtgtgtgtttaaaaaaaacacaatattaacaccttcgtgctaaccccaaggtgcgtgctattatagagtgcaacacccacctttaagacacagacaaaagagagcactgtgaagcacacaccacactgtgaagagacacccgagcccccaccgcggagagcctctcgagagtatcagcgtgactatcacaagaaagccaaaccctctcccttctatctacagagcgaaaatctcgagcgtggaatctccccgatttgtgggagaaaacagcacagagtctccagctgtgtgtgtgtgtgtagagaagccacacgcagagaagagcgcgtgagagagagtgtgtgcgttgtctcaaaaagacgttctctactcagagacagagaaccctctcctctgtgtggcgcccccacagtatggtgtccacccgcagaacaacctctccaagcagtagaaggtggccactctatttgcagaccagaattgtggagcagaacaccagcgcagaacctgctgtgtatacctggtgaggagaatatctctcccccacagcacagaacacaacagcacacacacccgtgttggtgaggtattgatgtggtgggctcaactctccacttattagaaaagagttttcgtggccccaatctctcgacagacccacagccacaaaggggttatctataatataggaagcacgacgggaagattataatcttcctcgccgcatgattatcttacacaacgactagtagaaggaatagcaggatataatcatcattctccaggaggagtattcagccgcctacatataattaagggccgcctccaattgtagacatccaatatatagtgggaggatacatagcgcggcggcccagaagtataaatataatgttctccaccccaattcatcttcttgtaagacccacacacaacgactaataaaaaagaagacgtcgtcccccaagcggaggcaaaactagtgggggccgacacaccagggggcagaacaatctaagtgggagaggacacgccgccccacaccatacgcaaaggagtcataccgccaacatagaggcacaccgccccaaggtaggcgcctccttccagcggcaccggcgacgatatataacaaaagacacacaactagacgacaaataaaatacaacagcgattagaggggatgagagaaaacgcgggggtacgaaccacttctaagaggaccccgcccttgcgagagacaagaacaacc

SEQ ID NO: 653207 - DNA, 167 bp, Homo sapiens
  misc_feature (5)..(5): n is a, c, g, or t
  misc_feature (121)..(121): n is a, c, g, or t
  misc_feature (157)..(157): n is a, c, g, or t
ctgcngggaatcagctgacgctccgcattgcagctgcggagtcagacggcgctatgtacgccctctccctcctggccagcctcctggccgcggctctcgccggcccggtccttggcctganagactgccccaggggctcggcagtgtggtgccagantgtgacgacg

SEQ ID NO: 653208 - DNA, 761 bp, Homo sapiens
ggtgtggtgtgtttgtgttgtgtgtgtgtgcggtgtggggtcgtgcgggggttgctagccgctaaggaaatgttacttttgtagtaaggccgcctgacctgattcgccccgcgacttccatcgcaggatctaaacgtggtcaccttcgagtagagaggcccgccgccccccgtgggcagtgccccccgccgatgacacgcgctttttcacccaccccaccccagaccctgagaatttgcaacaggggaggaaaaagaacccggacttcccaggccctgctttttttcttaaaagtgactttaaaaaggagaatttgttgtgtatttttttatttaccaatttgatatttttgtgacataattgttagggtcagccctttttaatgatctcggatgacccaaccccgccttcggagcgttctctgtcctacttctgactttacttgtggtgtgacccatgttcaattataatctccaaggagaaaaaaaacccttgtaaaaaaagccaaaaatgaccaccaggaaaaacaatcttattccgagccattcccagtaacttttttgtgtatgtacttagctgtactataagtagttggtttgtatgagatggtttaacaaggcccaagataaaaggtttctttttttttccgtttttgtctatgaagattgctgtcttattttttttggcctgtttgatgtatgtgtgaaaccatgttgtcccaccataaaccggaattttattttgctgagttgttctaacca

SEQ ID NO: 653209 - DNA, 1650 bp, Homo sapiens
ctgtagttaagctaataatcaatgtgtgtggggggaggaattaagtcccccccccgccggtggttgttcgtgtggaggtataatgatggcgcgactgctttattataaaggtagtaaatatggtgtggtgggtgcaccacatatatttgttggtcagcaatcagagaggagaaatgttggctatgcacgcttggtcggtccgcctcctacctagtggtagggagcgctctcgcttgactacattaccctcgccacccttcttgttgtggtatgggataagtaagggggctgccgccccccccccgtcttgatatgttgcacacgcgggtgggtttgcatctacccgggcgctgactggtggggagggctcctcaatcctttctccccttcttctttgtagtattaatctgccgcggcggcgttcggtggtataataagtggccgccgtctcttcctctcgtctgcggtgattgtgtgttgcccccccccggttggttttctacatccccccagaggggccccctcgttgtggggctactgcaccctcccgtattatcaattcgaatgtgttgctatctgtcatcggcgacggtgggcggctggtttagtaggagcagtggggggcgccgccccaacaacaagaggaggcgactgcaacgacgaccaccacgacgagaggcgacgccacagtacgcgccacatgagagagatatgatataagccacgacaagagaagactactggttgtttgtgcggcatcacgcggcgcgccgccgcgagaggagagaagagaagaagacgcgggtccttggtggggcgcaacacaaagagaggtgagataacgtctctctccgctcgcgacgatgagagaagagacccccccccctgcgtggtctctctctctggtgcagcacccacagagagagtgtgatacacacacgcgggtctcgcccaccccccgctgctgcgggtgggagagagacacacacagcagagagagtagtacttcttcagcacgctgtgtgtgggtgtgtgagtgtggcgacacacacagcacacacagctgggagatctctccctctgcagagcgctgtggtgtgtgtttttgtgtgtgtccgcgcgccccactgctgtgtgtgtgtgttagaaagagggaggaggtctctcctctctctctcgccactgtatatacacacagagagagaaagcacacacacacacgtgtgagaacactgtgtatgagttccacacacgcgcagaataactctcgccaccacacctcgctgtgcgctctctctcacacacacacacgcggagatactctccgcgcaaaacacacacagaggcgcgctctgtgtgtgctataaacgtcgggtgtgagagaactgtcttcacgggcccacttccacacgaggcacaaataaccagtggagatatcccccctctcacctcggggggggcacaattgtcctcgggtgtctctcaaattgtttggggtgctcgtgattccccccacgtgcgagaaaaggccccaagggttaaaaaactttccccttaactggggttaaataacacccccttgagattttttgatacacaaaaaaatataattgaaaatataaaccaccaattttcccttcccaaaaaaaa

SEQ ID NO: 653210 - DNA, 111 bp, Homo sapiens
aggcaagctcctactctcagatgatctaaaagatcctatttaatttttacatgctccaccctccagttctatacaggcccactgggttggcaaggcaatgtttctactggc

SEQ ID NO: 653211 - DNA, 1455 bp, Homo sapiens
cgcggtagattactcctgtaatcccagcactccttgggagtgccaaggtgggcagatcatgaggtcaggagttcaagacaagcctggccaacatggtgaaacctcgtctctactaaaaatacaaaaattagctgggtgtggtggcgggcgcctgtaatcccagctactcgggaggctgaggcaggagaactgcttcaacccaggaggcggaggttgcagtgagccgagatcacacaactgcactccagcactgggtgacagagcaagactcatgctgtcttacgcaaaagcacagccaacgaaccaacaaacaaaaacacattcaaccacacccactggcaggcgaacaacggcccacggaaagcaccacaaacaccaacaaccgatatggtgcaccaccgggacccagaaagagacaagcgtcaacacactggcacacacagcctagaacccaagagcaacacccagtggacagatgactaagaagtgcaggacatcatacacacccactccaaacaacgtcgccgcgggtaacacaagaaacggtacatgcaaaacaaacaccacaaactgagacacccgcagcaccaacacaagggcaccacacacaaacagggaatagccaacaagaacgactcatacaacaaagccacgaaaccagggacaaccaaaacaacagaaaacacaaacaacgacacctgcacaagaagaaacaaagaacgagacagaaacaggcaaaaacactcgatacaagagcgcgaggacaaaacagcacaacgacaccacagcaacgacgcgctgaacgcgagcgaggagacgcgagacggagaggagggtaaggggtgagggagaagggacgtggaggagaacgaccggagaggagggggaggagaggatcagggcagcggcctcccgcaggcacgagggagggatgggaagatggaggacgaggggtgaggcaggggaaggaagaggcaagacgcgagatcgagcgagagggggaccagtggcgcgagcaagggagaagagagtcgaacagccgtacagagagacagagcacaagacggagcgagaacccgcgagccaggaggagcagcaagcgcagacagaaagaagacaagcaagaagaagcacacgaaacagaggggacgagacgcacccagcaaaaacaaagacggagaggagccaggaacgagcagcgagcagacaagaaccagacagaaccaggccgccagcgagacgatgaacgaaaaaaggaggcaagcgagagcagaaggaagcgcaagcgaaagagacgacagacaaagaaaatagggagcgcgagcagcgagcagacgcagtgcgaggagtcggggcaagcgaagcatgcggaagcgatggacaggacgaatgacgacgatcggaccgtcagcagaagaagaagcaaagaaagagtagtgcgagcaaggcacatcc

SEQ ID NO: 653212 - DNA, 231 bp, Homo sapiens
  misc_feature (128)..(128): n is a, c, g, or t
catacttggtcggactgtctatttctgaagcagggcctgagcatctcgtcccacagctcagtaccccctctaactggatgactcacagagttatatttccagcagagactctggctctggacaacaanccatatattccagcggccaacttgtaattccccttggatgcattgaacacacaacacgacacggccagagccaggccgtcctctcttctgcaaggaaaccacg

SEQ ID NO: 653213 - DNA, 331 bp, Homo sapiens
tacattaattaatgaattatatacatttacaggtcgtaatgcaaaccgcttcctactcaatagcaagtaacagcccacggttgttctggtccaatgacatcagctaagaaaggaaactgggtcctacggcttggactttccaacccttacagacccgcaagacaaaacagctggttcttgccagcctctagaggacgtcccagaacactctgccctgacacgctcataccctgcacagatcataggctgctggccactctgactcaccaagccacagacttgtcttccacaagcactttcttacctttgccattaagtgacctagccacac

SEQ ID NO: 653214 - DNA, 381 bp, Homo sapiens
aagatttttgaaggagaggaccttccggacccagatttgtgattctttggctgtggccccattggatgggattttaaaagcctttattgagccttggccaatttgttagcttcatagggatgggcctcctatctataaagcccctctatatgtggccccctaaatgggcactttttggccctaaaatccgtctttgaaaatggtaaattgagaaacccgtttacttaccttttatgggttgggcccttggatttctttctgccaaagatatttccttttcagcccagggccaaaggttttttaaaaggatatgtcttttttttttattccggtttgtttttaagcccctttttaaaggaggtttttcctttagttaaaggt

SEQ ID NO: 653215 - DNA, 475 bp, Homo sapiens
gccctgtagatcggttcctcactagtcagcaggttgccgtgtgcttttaatagaaaacctgctcatgcaccctcttgactcttgtcctgctttcttccttaaggggaacagttttctattctaatttattcatcctagtattgcgggtaatgtgtccttaggtgcaaggttcaagttccctccctggagaggaatgtcgaggattcgaatttacattctacagacctcatcccttttattttttcttactgtctccaaaatagtactgtgaaaggatatccttgaatgagttcttgttattggtcctgaatgaaaccccaagcttgatgtgttgggtcattggtttcataactgcagaaaaactcgatggttttggtggctgttagcactctacccctgttccctcacccagttcttagctagagatttaagagtgttatcacttggatacctgactggggagctggacggctgc

SEQ ID NO: 653216 - DNA, 620 bp, Homo sapiens
agtggtagaatgaactcacacggaaggttcaaatgagaatgtgtgtctagcagatgttcatttacaggctatgtgagatggtactggccgcacttgaaaaatcagtgttcctgcatttaattgttcaaccgttaaagttgatgggaggccattgttttggaccagtctcctgtactaggtcccagcagacctgggggtgtgtgtgtgtgtgtgtgtgtttgttgctctgtcacccaggctggagtgcagtggggtgatctcggctcactgcaacctccgtctcctgggttcaaggaattcatgtgcctcagcctcgtaagtagctgggactacaggcgcaggccaccacgcttggcaatttttttgtattttaagtagagatgaggtttcaccatgttggccaggctgatcccgaactcctgacctaaagtgatccacccgcctcggcctcccaaagtgctgggattacaagtatgagccaccgcgtctggcatgtcgtttcatttataagagacagggtctccctctgtttcccaggctggagggcagtggtgtgatctcagctcactgtagcctcaaactcgtgggctcaagcgatcctcccatctcaacctcccgaa

SEQ ID NO: 653217 - DNA, 141 bp, Homo sapiens
acacctggcactatccctccctgcccatgctgtgtatgctggtcatgctctagtctccgtgaggtgcacgctcccctcaccttatggctcctcccaagctctgccatcttgccattcctagtgtgggctgcctggggtgaa

SEQ ID NO: 653218 - DNA, 847 bp, Homo sapiens
  misc_feature (477)..(477): n is a, c, g, or t
ctccgttccgggggggggttttattatttatcaccacgaggcgtcttcttttgtggtggtgaccccctcctagtgtgctgctgttgtgggggaccgcccttactccttactcccttgggtgtgttgtgggcacctctcgctattattagtaggaccacccccggggggcgcgcgagtttctcatgcaccttctccgggagcattctttttatccttttgggctcgccgtggggggcgcgcgggggatatacacataagatctgtcgtcagcccaccgggcgaacacagcgccgtgattgtgcccccacttatgggcgcttatattttatagagggggacacacccagtatataggaacaaaaaggttgtgttccccaacaaataccaacagggcgttgggtgtaccccggtgctccgggaatttttcctcggggggtctacttccgccagagtttatagggttttggggcgcacaanacacgaaagaacaaaatgagagaacggtggggacaaacgccctgggggtttcactgggcacacgggagttttttaagctcctgcgttttccatgccacgcggtgtgttcctggccttattccacgggctttctgagttttgtgagcccaaaagaacagggggggtccccttccgttcccaacaggcccgggggcggcacaacctcctgggaaattgggagagggttgggtgcccccccacccagaggttcccccaaggcccttttggattcccggcctcagccctaatttggtttgggataagtggaacttcattttgaaaagaggggaatttgtccaggttccaaacccattaaatttgtagaggggga

SEQ ID NO: 653219 - DNA, 107 bp, Homo sapiens
tctctatatacgtctcatctccttaccgtcctcatatacccttacgtctggtattcttactggtatgtgagctgggcctaagccataaacatattttttattattat

SEQ ID NO: 653220 - DNA, 613 bp, Homo sapiens
tttctgatactttactttctgtcaaaaatcaatatgcagaatggcattgcaataaaaggtttcctaaaatggtcaaaaaaaaaaaaaaaaaagaaaaaaaaaaaaaaaaaaaaaagaacaaaaaaaaaaaaaaaaacaaaaaaaaaaaacacaaaaaaacaaacaaaaaaacaacaaaaaaacaacacacaggcgacgaagcaacacagaaaaacaaagacagaaggcgagtgtggcgggccggccccgcgcggggccgggggggggggtagtcccatagagcacctgtggtggcgggtgggcgggccggtccgccccgcaggccgggcgggcgaggaagacgcacgcaggctcagcggagagcagaagaggaagcggaagcgaaaaaacagcgcgggggggggtggcacctactctacatagaataccgagagcagagcggggggcggagcagcaagcccgggtgggcaggatacacaaaaccgagaggtaggacgagctggggacggaggcgacggtaggtggggtggataacaacaaacagcgcgccaccgcagggaggggggccaaaaaaaacaagaccgccgcgcgggggggggcggtgggaggagat

SEQ ID NO: 653221 - DNA, 866 bp, Homo sapiens
  misc_feature (263)..(264): n is a, c, g, or t
  misc_feature (334)..(334): n is a, c, g, or t
  misc_feature (780)..(780): n is a, c, g, or t
  misc_feature (800)..(800): n is a, c, g, or t
cagaaacataaactacatagaaaagacatgaaagccagccaggcttggcttcgaatcccagcactttggaaggctgtggcaggagggttgcttgatctcagaagcttgaaactagcctaggcaacatggtgagccctcatctctactgaaaatcagaaaaattacccgggtttggtggtgtgagcctgtagtcccaggaatcagtggatgaggccctaggatgtcataggcctgagaattccatgctgcagtgagctgtgatnntgccactgtactccagcctgggtgaaagagtgagatcctgtgcagaaacaaaagaagaaaaaaagagatntgaaagcctatatattgaagactaccaagtactgcttagagcagttaaagacctttggaatagaaaatgtttcttcttgcatttcaagattgcttttgttttggggggacacactattttttaggaatatgaagttcttcttaggcattcctgtaaaaaaggccacttcttgataggattgtattgaatctgtgggttgctttgagttgtatttttatcttaaccatgttacaacttccaacccatggacacaagatgtctgtccattgatttaggtcttcctgaatctcctcgagcaatgttctgtagttgtctgtgtacaagtacggcaccttcttgaacaaatttattcccaggcatattattcttacaagtgctattataaatgaaatcattgtgtcaattttcttctcagattgttcattgctaacacaactgattgtttnctgaaagtttgctgaattcncttaactctagtagtgtgtgtatgtgagtgtgtgtgtgtgtctggcctctgtgtgcatgtatgtgt

SEQ ID NO: 653222 - DNA, 131 bp, Homo sapiens
actcgaagtcaaatcagaaaaggatatgccccatcctactcccccatcctccatcccactcagattctatcccaagtcaggcactggacacctgctgaaaaggctgatgaggggctagacaggagtggggc

SEQ ID NO: 653223 - DNA, 214 bp, Homo sapiens
  misc_feature (3)..(3): n is a, c, g, or t
  misc_feature (7)..(7): n is a, c, g, or t
ggncggngcgaatagatcacttgaggtcaggagttcaagactagcctggccaatatggtgaaacaccatctctactaaaaatacaaagattagctgggcatggtggcatgcgcctgtaatctcagctgttctggaggctgaggcagcagaatcgcttgaacccaggaggcagaggttgcagtccccagcccggcccggccccagcccggcccgg

SEQ ID NO: 653224 - DNA, 723 bp, Homo sapiens
gaccccaggggggggggggagaaaaagaaaactctggcgttagaggatatagaaaaatataagtacaatggttacaaataacgcagaacttcaaaaacaaaaaaatcacaacccaaacaaaccaaaatttaaatgatcagaatgggcagcacaaagaaaacgccctctcctgacttgtattgggggcagtctgaacgcccccagaaaattgtgccaaagagtttagaaaaataaattttcaataaaaggtaaaacattacacacaaaacggcaaacttcaggtaactatttggagattgcaaacaggataaattaaatggttcaaacaatctgataaaataaccattgggaaactggtgggccttctggtgcttatattggattggactacaagtggggaatgggagctctgtggctgcacttcaaaagcaaccaacaaaacaaaaacaaaaaaaaagtgtgtgtgtgtgaattacccaaaagactaactagaaagtctgtgggatgaaaatggcacttggaaaaggggtaaaatttttccactgaacgttgaaggttaataaaagggtgtaaaaagttcccgggtcaaacacgtggaaatatacagttaaaaaagggtgaagtggaatgataaccattaaaatcagaattaagtaattgcgcgcttatacacagaagacagggaatcacgaaattaagaagctttcagatagaaaggaagtg

SEQ ID NO: 653225 - DNA, 858 bp, Homo sapiens
agcggggaccgtcgggcggaacccagcctcggcgatctgtcaatgtcatgtcgccccagtgggcaggtccccctttcgggaggaagttagggaaggggatttctcataaatcacctagccgcgcgttccttctagctcccttccttagcagccgcgtaggctcaggtaggagggcccgcgagcagagtcaatcatgatcgtcgacaccccggggcagcaggctaggggataccaggacgagacaaaggaggacaccagcgagtgggaatgacggagtaggcagcaacgaaagccaaaggcatatgaaagacaagatcgcgatgaacagaagactcaagaacccaggagggaagagtgaggagccacggaaggcctgcgtaaggagtggacgccacgatataagacaccacacacagactaagggggacgaatggcaggagacgagcacagatgggacacgtgcggaggacaggaacgcagccgagggaacaacgcattgacacgggagaggcaagggaccattggaggggccaataagtaggaaataggcgcacaaagcaagggggaacaacccaatgcaagccgaacccattggcccttttggcgggacatggagagttcacaccgagagacgagattcccccacaaagaccacataacgagggtcgagaaaacgcccgcaagcaggcgcaaaagtacatccaaaggttgagtcggcgagagacaaggacagggaaactatcgggggaaccacacaataggatagtagcggagaaaaataggccgcaggaggaaccagaatcacacaggccacatgaaccagagaaaagccaacgagcagaggccaacagagcacag

SEQ ID NO: 653226 - DNA, 662 bp, Homo sapiens
  misc_feature (74)..(74): n is a, c, g, or t
  misc_feature (651)..(651): n is a, c, g, or t
gctggggcagaggcatcataagttaaaatcataactttcattttataaaaaatagtttgaataattgttttatnaatctttaagtgcttacaaagagcaggaaatacatttaaaatagtctttttaacacagattcatttgtacaatgtggtcataacatatgtccggaaattgacatttcagtagtctatattcttttctcagcaaattccacataaaatttaactaatttacaattcaaaataagattttaactgccaacaatgtcagactagttgtggttagtacctgaatatcaagctcttctccattttatatattgtaccaaaattttaaatacagctcagcagtgataggtactaataacaatacctgactacatggttaccacccgtgactactgcattgcagcttaaaacatgctttggtcagtaaatttaaaagatatacatcaaataacaaggccagaaaagttgttttagaatttcctgaccttaagtaaactttaaatacattgacaaggcaaaaaaaaatatgatcaaatatacagaaaggtttctattttttcaaccatttggcattttatattattcatttcgctgtttaaaataatattttatactcctgtgcactgattatcattgctctccngaataaaacta

SEQ ID NO: 653227 - DNA, 330 bp, Homo sapiens
  misc_feature (74)..(74): n is a, c, g, or t
tgctgggcggcctgtgcgtggtgcggcgcagcgcctcgtaacgccgtggcgtggcggcgctgcgaggaccccantgcctgacgctggtggggccggccgctgggcgggcgccgctgtggccgccagcctgctctgcgcgctgcgcgtgggcctctacatggggcagctggagctgcacgtggacctggtgcccgaggacgacgcgccgcctccgcggaacgccccgactgagcgggtcggccgccaccccagtgcgcgatcacgcgcggcgcctcggccggtgcacagcgcccgagcactgggacctcaacctcgaccccccctcctccc

SEQ ID NO: 653228 - DNA, 115 bp, Homo sapiens
tctatatttacatatgaacagcctgagagccgaggacacggccatttattactgtgcgactccctttggagaggtcgatttctggggccggggaaccctggtcaccgtctcgacg

SEQ ID NO: 653229 - DNA, 453 bp, Homo sapiens
  misc_feature (444)..(444): n is a, c, g, or t
aaggctaccatcaccgcagctgagatcaagcaagaagatgtatataagacttggctcagggcataccttatgcaaggagcggcaagacatgatcaagaacgaagtgccttccactgaatatgacctatctgaccaagagcatcaaccctctgggtggcgtttgtccactgatggtgaagtgaccaatgactcttgtcatgctgaaaggctgtgtggtgggaaccaagaagcggggctcaccctccgcaagtccttgctggtgcagacgaagcggcgggctctggagaagactgaccttaagttcagttgacaccacctccaagtgtggccatggccgcttccagaccatggaggagaagaagcattcatggaccactgaagcaagaccgaatgcaaagaagacgagctactgccagacaacataactggggttccatagcctgnttgtcctca

SEQ ID NO: 653230 - DNA, 311 bp, Homo sapiens
tactgggattcgcaggcatgtcccaccatgctcagaataatatttacttttaatcatgactaagatagtggttactacttgagtatgctatggctccagactgaatagtagagcccagtgcagtcatatcagcgcgtaaacattatgctgttatgcttaaaaatatgcgtggacctgggccttacacgatagttacaaagtctcactaaggatgtctcgaggtagctgtattaggttactgttgcagtactgcatatgaagaagatacgtggaaagctgggtacatttatataagaaaaatgaggtttaag

SEQ ID NO: 653231 - DNA, 342 bp, Homo sapiens
gatgccttgaagctggtatctgatatcaccactggattgtacaactcgtagctgatttcgacctgctattgaagttaactgattccccttggctatttgtttaataccccgtacatatctttgagcttcaaccattaattacgtgtggcttggtcacttcgtggctaaggtaagcaacgtgcttgtggaagacaagtctgtggcttggtgagtctgtgtggccagcagcctctgatctgtgcagggtattaacgtgtcagggctgagtgttctgggatttctctagaggctggcaagaaccagttgttttgtcttgcgggtctgtcagggttggaaagtcca

SEQ ID NO: 653232 - DNA, 600 bp, Homo sapiens
agacaagataacccttgtaattgtggtgtatacagtggtgcaactgggctgtgtggtgtagacagcgctgcagctaggctgtgtggtgtacactagagttcagctggactgttgtatgtcgacagagtatcacatggtctctgtggtgtttacagtggagcactggactgtgaggtgtctacagcttaaaccactggtcggcgtggtgtagaaacgggtgcagataacctatgcggtgcatacagaggagcaccaggcctgcgtggtgtaaacagacccaggttcggctggtctctgttggagaagcaactgatcttaagctatgtttattgttgcaataggcctaaatattgacagtgtgacgatgtgctgaataatgttgggcagatatataacaaccgcattgatcggggctatcttagcatgcgataaagggaagtgctttccattccaattatcattggctacaacgatgactttgcataaggatatgtcacatttagtattttgttgaaccaccctggagaatggagtttgtagtgggccccttataccttaagtgacccaagggaggatacccccgtaattccccggggttgg

SEQ ID NO: 653233 - DNA, 346 bp, Homo sapiens
caactctgaccgataccgggagtgaggcgaagcacacgctgacgaggatcggcggccggtgagggggaagcacgtctgtgctctctgtgcagttgaagcaagtcggctctggcgctccacgtgcgggaatcacacacatacctcagaatgccgggtctaagttgtagattttatcaacacaaatttcctgaggtggaagatgtagtgatggtgaatgtcagatccattgctgaaatgggggcttatgtcagcttgctggaatacaacaacattgaaggcatgattcttcttagtgaattatccagaaggcgtatccgttctatcaacaaactcatccgaattggca

SEQ ID NO: 653234 - DNA, 417 bp, Homo sapiens
  misc_feature (70)..(70): n is a, c, g, or t
  misc_feature (73)..(73): n is a, c, g, or t
  misc_feature (111)..(111): n is a, c, g, or t
accatacaggaatataatgtcaggcatgcttcttctatagtagcgggtataactctcaaacggatttagnatntcatcaaattctcttcagcatcaactgaaataatcatntggtttttatccttccttctattgacatgatgtctctggctccttgtggtgtgtatgatgtatcagacattcatccatgttatagcacatattagtactttgttatttagtatggtttcattttatagtattctattgtatggctatatcacaattaatttatccattcaccttctgatggacatatgagattctttcctgtttggattatcataaatgccgacgacagaggatcttcttccatccacctgctgatgtaccattcgtattcttgcccgtcggtatatcacataaatgccgactaag

SEQ ID NO: 653235 - DNA, 335 bp, Homo sapiens
gcgcttccacggagctgccttttttttgtggtgtacctcgcaccttcacgaggctgggtaggctccactacccagcaatagcgggctctccgctccatgtgtggataagccaggggtattagaaagggagtggtccacggtcctacaccagcttgcagcttgccggccatattaccttgggcacaccatacccccagctcagggcctggcttcttcagtaaaataaataggactggacttgatcagtctcttaacagccatcagaagccacggtcaacccacaagccacggtcaaaccacaagccacggtcatcccacaagccacgtacacccac

SEQ ID NO: 653236 - DNA, 317 bp, Homo sapiens
  misc_feature (156)..(156): n is a, c, g, or t
  misc_feature (191)..(191): n is a, c, g, or t
  misc_feature (226)..(226): n is a, c, g, or t
  misc_feature (232)..(232): n is a, c, g, or t
cagtttggtgggtcagaaatttgatagcatcttggcccagccgtggtggctcatgcctttaatcccggcacactgggaggctgaggcaggcagatcacttgaggccggggagttccagaccagcctggctgacatggcgaaaacctgtctctactnaaaatacaaaaattagccaggcatgatggcacgtncttgtagtcccagctacttgggaggctgaggcatnagaatnacttgagcccaagaggcagaggttgcagtgagctgagatcatgccactgcactccagtctgggggacagagtgagactctgtctc

SEQ ID NO: 653237 - DNA, 689 bp, Homo sapiens
cacgggttgtctgcgtagagggggcaggcggaggcttgaggaaaccgcagatacgtttctctctttgagagatagagatgtagtacacagtacttaacaaaatatagtcaataggttacttgaagtagtatgcttagacgatgaagtatgtaagcgtaacttgtaatgagcttagagatttccacacgtagaagatatatgaacgacttagaaagactagtcatgaggcaaggataatggatacaaaggttgctaaagaacatgatgcgagggtgtgatatgaaacgttctatcaaggtgtaaaaaatgtgtgtcaacgaaatgtgagaggaaggattacagagtcccctgaataatatgcagatagaagaggccatgcttttaagattacgatgatggtgacttatacagcttgaagtgtagtgttcacacagtgtgaggtgattacgactaggtttggaaggcgactcttttacacaggagatcaaccgcgaaggtgattcacagaccttgagaatccatgtaggcaggggagaattggcgtcattgaaaggctagttaacggcatttactaagacgcgcagagatggcctggttagtgggagtggtcggatgcagacaattggccgaagataaaagtgaggtggcaaccttgggcaaccgaagttcggaggctaaaaaggattcaa

SEQ ID NO: 653238 - DNA, 839 bp, Homo sapiens
  misc_feature (663)..(663): n is a, c, g, or t
  misc_feature (676)..(676): n is a, c, g, or t
aatcctcctcatgtccgactcagtatccaaagaacagacaccttgggatgctataaaattgatttgtgaagcaatgaggaccaagccatatgtccttctatgttcgagcccgacaaagggtcaagactttgctcagtggtctcttggcaatggcatgcccagtcacaaagtaataggaggagactacttggtctgcttgactccctatggactgcccaggcctctgccatggtcggttctggcattactaaggtggcagagttttcaggaaggaacgatgctgtataggttaggtgtgtcgaccgtgggcgcttctggctgcccctacgttatcttgtgctggtgggacaggacacagcagatcccctcgagttggggcatgctctgcacaggtagacatagttgtcccgaggattggggacggtttgcccctcgtggccgtggagtgtggtgcgccctgacggagtcgtcgttctggtactgtgttaatgtctctgattggcagtgaggctcgtagaggtacgactgcccgctaggtgggcagctgactcgcgattggtgaccccaatgggcgttttcgtccaccctaatagttagcggtggcattggtttgtaggtaacacttgctaacaagttccccacactggcgacactagtttaagntagacatcaactntaattgatttcccaaacaagagaagacgctctatcccctgcgggactttgaaacgggcgctctaatatccgaaggagccccacaagccataccttaattaacaacgggcggttttgtcaagtccctcgaatggggccatgcccatgttggccattgccaattg

SEQ ID NO: 653239 - DNA, 811 bp, Homo sapiens
  misc_feature (3)..(3): n is a, c, g, or t
  misc_feature (73)..(73): n is a, c, g, or t
  misc_feature (76)..(76): n is a, c, g, or t
  misc_feature (87)..(87): n is a, c, g, or t
  misc_feature (105)..(105): n is a, c, g, or t
  misc_feature (129)..(129): n is a, c, g, or t
  misc_feature (133)..(133): n is a, c, g, or t
  misc_feature (136)..(137): n is a, c, g, or t
  misc_feature (185)..(185): n is a, c, g, or t
  misc_feature (193)..(193): n is a, c, g, or t
  misc_feature (202)..(202): n is a, c, g, or t
  misc_feature (208)..(208): n is a, c, g, or t
  misc_feature (217)..(217): n is a, c, g, or t
  misc_feature (219)..(219): n is a, c, g, or t
  misc_feature (258)..(258): n is a, c, g, or t
  misc_feature (263)..(263): n is a, c, g, or t
  misc_feature (273)..(273): n is a, c, g, or t
  misc_feature (277)..(277): n is a, c, g, or t
  misc_feature (291)..(291): n is a, c, g, or t
  misc_feature (308)..(308): n is a, c, g, or t
  misc_feature (310)..(310): n is a, c, g, or t
  misc_feature (335)..(335): n is a, c, g, or t
  misc_feature (377)..(377): n is a, c, g, or t
  misc_feature (379)..(379): n is a, c, g, or t
  misc_feature (399)..(399): n is a, c, g, or t
  misc_feature (401)..(401): n is a, c, g, or t
  misc_feature (403)..(403): n is a, c, g, or t
  misc_feature (410)..(410): n is a, c, g, or t
  misc_feature (426)..(426): n is a, c, g, or t
  misc_feature (430)..(430): n is a, c, g, or t
  misc_feature (436)..(437): n is a, c, g, or t
  misc_feature (485)..(485): n is a, c, g, or t
  misc_feature (500)..(500): n is a, c, g, or t
  misc_feature (506)..(506): n is a, c, g, or t
  misc_feature (544)..(544): n is a, c, g, or t
  misc_feature (550)..(550): n is a, c, g, or t
  misc_feature (651)..(651): n is a, c, g, or t
  misc_feature (790)..(790): n is a, c, g, or t
tcnggccatcaggagaccaggccagggaggtgcactggggtggttctgccttgctgctggtactgataacttnttncttcagttcanctacaatgatctttcccnctgaatcccagatcttgatgctgngggntgnngcagcacacagccagtagcggttagggctgaagcacagggcgttgatnatgtcccnaccatctancgtgtnaaggtgttngncttcgttgagatcccataacatggcctggccatccttgnctccngaagcacagngggntccatctggagtgncagtcaccgtgttcagntngcctgtgtggccaatgtggttggtnttcagcttgcagttagtcaggttccataccttgtccagcttntnccagccacaggtgacgatgntngngttgctnctgttgggcgagttgngganacaagnnacccactctgagtggctctcatcctggacagtgtatttgctcacaccnagggtattccatagnttgttngttttatctctagatccagagacaatctgccggttgtnagaggngaaggccacactcagcacatccttggtatggcccacaaatcgcctcgtggtggtgcccgttgtgagatcccagaggcgcagggttccatcccaggatcctnagagggcaaactggccatctgaggagataaccacatcactaacaaagtgggagtgaccccgcagagcacgctgtggaattccatagttggtctcatccctggtcagtttccacatgatgatggtcttatctcgagaggnggagaggatcatgtccgggaa

SEQ ID NO: 653240 - DNA, 137 bp, Homo sapiens
gaactggtctccaaaaaacgtcacttggtacttagacggcggcaatcaagatgggaagtaaaaagaaaatatcccctaagtcaggatcagattctatcatgcctggccaccagtggtaacctgtatggctcagcgct

SEQ ID NO: 653241 - DNA, 232 bp, Homo sapiens
  misc_feature (15)..(15): n is a, c, g, or t
  misc_feature (41)..(41): n is a, c, g, or t
  misc_feature (51)..(51): n is a, c, g, or t
  misc_feature (78)..(78): n is a, c, g, or t
  misc_feature (149)..(149): n is a, c, g, or t
  misc_feature (186)..(186): n is a, c, g, or t
ccttctacttcgganacagctacaccgggtcgagcagggantcgagctganaacttcggggctcagcaccctctcctnaccttcgggtccacctcggcccagttcgacatgcccgcctcccttagatgagtggccccaccgcactgctnacccgggtcagccagcttgtgtgcggcctggcagggnagaagttacagctataactcagctccccgcacgccgcaagcctccc

SEQ ID NO: 653242 - DNA, 112 bp, Homo sapiens
tcaaacacgcatcttttggattggactagctgagcaggtgctgggtcactgtggctcccagatgccacacgggagctctggcaaagctgtcacatggtctgtggctcagcta

SEQ ID NO: 653243 - DNA, 179 bp, Homo sapiens
cctgttgctaggctggagtggacgtggcgtgatcttggttactgcagcctttgctccccggctcgagcagtcctgcctcagcctccggagtagctgggaccacaggttcatgccaccatggccagccaacttttgcatgttttgtagagatggggtctcacagtgttgcccaggttgca

SEQ ID NO: 653244 - DNA, 137 bp, Homo sapiens
gactagaggatccctcattccagttggtgcagctatcttcacccgctccgcttgtcttcttaatcacatcttttaaccctgtcagctcagtggaagcttcagctgtgggtgcccagatcttcacatcatggtctagg

SEQ ID NO: 653245 - DNA, 671 bp, Homo sapiens
atgcctctgatagagacttccaacctgtatatctcgaaatcctgccaaggttagtttgaagacgctcgtgtggtcacaaatacctggaccgtttctgtgtgcacatgattgaaagccgtattctatgagagaattttcatgatctgggtagggggatggattagtggtgtagctctataatccctagtatattgtgtaaagcgctgtgcaattagtaatctgtatgtacatgagagcgtgaggaggtaggagatgtgcctggaatagcaggatgaggaatatgagattggggaaggaagtagaagacatcgggcccagattgaaagatgaagaagaaggattgtgaaaaggaagactcaatggaaattccgtgcacttggttttaactggttgttactgattgttgactttgcgtcggaagatatcgggtacagcaatgtcgtattgacacgtatactagaaggctgttgaagaggtattagcgttgaagacttcagagtgctggataggactatgagtacgactttggaatttgaatatgagtaatcgtgatattttttacacatgaaggtgttgacacgtacgttctggatgaggttgaatagatgaatttgaaccttatgatatgagggaggcaaattatgggttgtaagggtgcagatgggtggaaa

SEQ ID NO: 653246 - DNA, 175 bp, Homo sapiens
aggcatcagtaggctgtcttgggctcccgaacagtatcatggcttatccacagctgacgatcgtggatgctctccttgtcctggatttgagagggataaaggagacaaggctattagtcttcgatgagctgcctagcttctcattgagctggtggtagtggcggaagaaagggtc

SEQ ID NO: 653247 - DNA, 293 bp, Homo sapiens
  misc_feature (13)..(13): n is a, c, g, or t
  misc_feature (57)..(57): n is a, c, g, or t
  misc_feature (91)..(91): n is a, c, g, or t
  misc_feature (192)..(192): n is a, c, g, or t
  misc_feature (219)..(219): n is a, c, g, or t
  misc_feature (259)..(259): n is a, c, g, or t
  misc_feature (283)..(283): n is a, c, g, or t
agtaataccatgnaagtaatacctatgtcccccccgaactgttttacctcctgaagntccctgcctacttttgcctgagagagcctaaggnccccatcacagacaaaatcccctattacaagataactcgactaccccattttcaacagagaggaagatagtggtggtattccctagaattctaattgcaanagaggcatttttctggccgagtgtggntgtcacgcctgtaatcccagcactttgggaggctaaaagnaaacttgaggccgggagtttgagnccaacctggg

SEQ ID NO: 653248 - DNA, 957 bp, Homo sapiens
gcgccagcaaccatgtccaagggagcatgcagtaggtattgatcttggcaccacctactcttgtgtgggtgttttccacgcacggacaaatgtctgagtataacttgctcacatgattcaggggataaccgtaaccgactccaagactagtgtcgaccgtttatcggtacacctgaagcgtgatgactcgcgtgactgcctgcagtacgacatcaagattgcagatgtaacctccatcgaacacagatttttcgatgccaatacgtctgagttggatcgcacgagttcgagtgactgctgattgctccagctcttgatactgaagcacattgagcccgtttactggctgagtgacactgactagctggacagtgccccagaggatccacacggtagaagtaccaaggcgagaagagccgaagaagccttcagtatccgagaggcaggatgatcattctattggcttcgtgaccaagaggatgcaaggatcacattcgcagacatgccatacctatgggcaacgacatgtataccaaagtgctgatggatcagcagtgaccaggcattagcttgtcacacatgaactcatcaagacgtacagtggctacccaggagaattgcttggaacactaattgcctggatcatcaagtgtacgttagaccgttcattacgttgacgcccaaacttggctgcttgactacttggactatacgcgcattcagaccgaaacaaaggctatggcaagacagtcaacacgaaacacgatgcgtcaatcatattgaacccttggcgaaggataggaccacattattagactgatgctcaagtcacattcacctacattgcgcggaattgcgaaaatccttatgagagaggttcaatagagtcttaccaggcattggaaggaacaagccccacatttgcggactggcgacagacccgacatttaggcacaa

SEQ ID NO: 653249 - DNA, 223 bp, Homo sapiens
  misc_feature (183)..(183): n is a, c, g, or t
gagctggtaccccaccgcaccggtgcgaggacatggtctgatcagctggaacggtccagcgccgtgtcgcggccgggttggcgcgcacggtcagcgaggtggcgcccggctgccattgcaggaccttgcgggcgccgtcctgcgccgccagggtgaccgaatgctgcgcggtgaacaccaggncgtacgtcaggatcgcgtagaacaccaggaaaaacaccac

SEQ ID NO: 653250 - DNA, 796 bp, Homo sapiens
  misc_feature (39)..(39): n is a, c, g, or t
  misc_feature (263)..(263): n is a, c, g, or t
cctcgtgttctgcccgccttggcctcccaaatttctggnattacaggtgtgagccaccatgcctggcgccatatagattttatcaatacaaaatacaggatattttgacaggccactttatttagaattggaaacaaaagtttccaaattgtttgaatgtgctaaatgcttttagctttatttttctagtctgaacctttccagtagcctttcagtaagatgtaaatattgaaattaaatgtaatatttactgtggtatatanaaccagaaactccagaactacttgtgttagtcatgaaatcactggcctagagtttggtagcttctaacttctattgccagtactgctaaatcttctttttttttctttttctttttttttgtgagtcatttggtgaggctcttgatcagtaattttcatcttcagtttgtagatatcttaagtctcaggtgtgcaattagttatacttgaattataaatttaaggattgacggaaaaaatcacccactgccaagctgttactgccctgaatcaggggttttcctggaacaaaaaactactagacataaaaacaccgcgaaggccttttcctttaaaacccttggggttaaaggctgcgctctttccccggtcccactttaccaaattcaataggctcagctttcttcaagtgcgcgggttagtaccctggcgccccaaatgtattttagacggggcttatattttgggcgttttcccagcggagggaacaacggggggatacccaaacaaaagggttcccccattgtggacga

SEQ ID NO: 653251 - DNA, 474 bp, Homo sapiens
ttctagaggatccctgtcatttactccatgggcggaatgcaatgaattggaacggaacggactcgaatggaatggagtgtcatggaatggcatcaaatggaatggcatcaaatggaatggagatcgaatgcaatggaatgctatggaatggaatggaatgcattggaatggaatgtcctctaatggaatggattcgagtggaatggaatcgaatataatggagtcgaatgaaatggaattgaaaggaatgggatcgaatacaatgcaatatactggaatgtaatgtaatgaactcgaatgtaattgactggaatggaatgtacatgaatggaatgtaatcgaatggaaagtaatccaatggaatagaatctaatgcaataaaatcgactcagatagagtagaatgtaatggaatggagtgcagtgccatggaatggaatggaatggaatggaatggaatggaatggaatgcaat

SEQ ID NO: 653252 - DNA, 896 bp, Homo sapiens
taagtaaaatcttttttatccaaaaaaaaaaaacccccaaaaaccaaaattttcccacccccacccgggagggatttggttagggggaggtgtctgcccacccaccctcgggcccccaccccttgtgttttgggcaccaatagggggtttggggtattggcccaaaaattaaaagtggtctgtgtgtgtgttttggggaaggaatggggtgcaaagactggtggggaagcggttgatggggagagggacagcacgaggtcataccgggcacccccgagggggggaggccattccatacctatttccttgttggctcaacccccgcgtggaccaccttctgtgcccatcacccaggacctaccgtctggctcgcctgggtgacagtcaccatttggagggtgggtgcccccccgcgtgtgctctggtgtccggaaatatccctgggctcaaattccccctctcttccagcctgttgatccccgggtatcaccgcacattttctggcccccgagtgtcagccccattccctgtaaaatctgccgcggtcttggccacccaggacccccacctcacgtggcgtgttgttgaccactcgttccccgggtactggggccccccagggtggggggaattccccgaagtcttagaaaaagaggaagccgaattggggatacccgggggctgggggcccacttcgggtggcacccaactcttgtagccggcgttgttttatgccccaaaaaaaaaaaggcgggtatgcaggggattgacagacccgtagtctttgagggtgaccttccgttagaagttgctataagagccaacacggtgttgttgcaaggcccaagaaacctttgtgcaggccccgaagtgcacacaaaacagcaaattgatca

SEQ ID NO: 653253 - DNA, 141 bp, Homo sapiens
ctgactctagcaggatccttagaacggagctggaactacaggcgcatgcactacatctgactaatattttattgtttacagagacaaggtctcactatgttgccaggatgatgttgaactcctggggctcaaagtgatcct

SEQ ID NO: 653254 - DNA, 186 bp, Homo sapiens
caaaatcatttggtatgttaacctaaagtacgtgggaacccatacattaaatcctaaaagtctcagctaaaagcgcaaatatctagttacatatttattaataataactaacttttattgagccctttataaatgccctatactggtctgtgtactttgcgtgtcttactcaactcatttattcaa

SEQ ID NO: 653255 - DNA, 1655 bp, Homo sapiens
  misc_feature (218)..(218): n is a, c, g, or t
gcttactgcgcccacctaggctgttgttggttacgcactagtcgaccatcgttctcacctgaggggctgcattcgatagcatgttgcatgcattactcgctatctgacccgaggcatcactgccctatacggagctggcctcccgtggtagtcgactagtatcatgctcgcggtgaagatcgctctgaatcccaacgactatctcgacttccatgccnagtagtagaccgaggtgcaacacagccgagacctgggggagatcgcgcatatgacacactgggtgaccatcggtgctaggagagatgagagcgacctcaccctccggcctctaggacttgcggcatatcactcctccatagcgctagtcaggagatagagaggagcttgggcgtcaaagagcgagtggtcgctatgcaggaacgagaggccatgcgtcgaaagcgctctgcctaggcaagagaggtagaacgcactgacgcacgtggaagtcgcactctaaccccgtcgatctctacacccctcgttggccacgtagaagacgtcgcttcaccccctttgccagcccggcaagggaactcatctaccgtttaccatcgagtggcgcctcttcgaatcaccccctaggacaccaggcagggtggggggtacgcttctacaactaccccgaacttgtgctctgaccctatgcctgttgcacctaggccccctcggtaagaagcactccttgggcacgctcgggggttatacctattactttgtctcaaggccacgtcagggcagaatagcgcattcggggaactgggacccccggtcgataggggaaccacaagcggcgttccccttcttcctacaatccacctgtgttgcctcgactagctgggaatgcggattggtcgtggagcctcccctacttctggaaagccacaatgcctcgtgacgcaatcttcccacgccatcaacagggcagacgcttgccccttgtacccactgtgaagtgtggtccccggtgcacgaaccccgctctgcgaatcccccgttgcgccgcggattaacagcccttagctgggtgacaggctcgccccgtacctctcggaggcctaatccgctatccccaaaggaatgtcccgcgtgccctccccgatttcgtcaattcgacaccgcggaggaagtgtggccaatcagacccgggggcacagaacacgtgggttggccaactgcccccaacgcgccccctccaccgggggcgccccacaatcggttggcgtacaaagactccaccctccggccgtatctccttcggtatcggcacctcgccgacgccaatacgaggtagcccatcacctcaaccgttatgtgtctgagcgtgtgctgcacatgcaggccttggtagggttcgcgcatgtgcccctctagtttacgcctctttgcgtcctagcgcgactgcgtgtcctggtgtatcccatcactccgcttgctctggcggctgcagacgcactcgttactcgcggtcgatcgcggggggttctctcccgcggtggtcgtgagtggtcctcctgatgttctgccgccgtgcgcagcatgagtaccgcacacgcatcatcttcactacacttgatcgtgcgcgcgatctgcgatctggtctccacactcctggg

SEQ ID NO: 653256 - DNA, 477 bp, Homo sapiens
gctgaggcaggagaactgcttgaacccgggaggcggaggttgcagcgagccgagattgcgcccttacactccagcctgggcaagaagggcaaaactccgtctcgaaaaaaaaaaaaggaaaaaagaaaccaaattgtcctatttattacattgtatttctgttagatttccatgaaacatggggaattttaaatggcagttttaattttttttttcattaaacaaccccaaaccaatttctactgtgatttgtacaatgttatccatttgaagaactattgacttcagatactttctacagcagacttttcatttctcaacacaaatgagaaaaaggactactttctccagggccaaacaggaggtgagaaaggtaatgttgtaccgtaaattagggttaaattcagtatttggacctgacatttcaggttatatctccaaactgaggttaattcttacaatcagttttcaaacaat

SEQ ID NO: 653257 - DNA, 143 bp, Homo sapiens
tctagaggatccctgactgctgcatatttgttgcactgtgggtatcagtcatggggttagtgggttatcttctaagccttctcctatgtatgggggttacgtacttgacttgtacgcggtgtggtcgggtgtgttattactac

SEQ ID NO: 653258 - DNA, 906 bp, Homo sapiens
agcggagcgctgctgtgggctagcgcctgggctgcgacactgcagttgtctacgcggccggggccgggacgaggaggcgttggacggggtcgcatacgttcgtcccctcgcattgcggcccctgacaagctgcgccaggatccccgagtgcggctggcagcaggaggcgtgaacgctcttggggcatcagaccaggcctgagcgggcccgaggccggaggaacccaggacatcccggcgtaacgggacaatgacaacaagggcgcatatcttcaaagcacctagtacctcctaccattagtacaactgattccatcgctgaaagtcctggtaaaatctctaacttactagagtacttaatgaaataaacccacgattgtactatccaaaaaccaatcttacaccatgaaacgctaaaaacaattacccaaatacaagccccataatttacgtattgtaatattcatatgactcaacaatatttatcctaccagttattccacctttacagataacctagcttcttaaaagcactacacatttcgcgggtcacacaactagattattacattcccgaaggttccaacgaacgctgctcgccaccaaacactccatatgacccgcaaattataaaagggccaacacggccccttggttaagacacgtttcgacaaaaaaaccccttgggaagttgtcgtttggccaagttagcagaggaaactacattgcgttataaagtatcaggttatagcgagaatgcggtcgaacgcggaccttaccaggatacctctagaataacccccattgcgacatggtagacatagaccataccgaacgacagtacaaccggcgataatctagccattaactgcccaacgcaaagaacccagaatctacacacaagccc

SEQ ID NO: 653259 - DNA, 991 bp, Homo sapiens
gcggacaactccagggggacggtagcgcgatgagcgcggtgcccgggcctggcgcggacgcctgagacccagtcggacggagaggcggccccgccggagtgcttcgggcccaggaacccagaaccctgacaggcaatggccggcacgagacatgataccgggccgatgaatcctggataccgggtgcataggtatgacagtcaaaaagtgtgatggtcgaccagtcgacgaaggtccaggagatgaggaagaatctgactgggtgcactgtgggcagacaagcttaccgttcgtatcttcaaggtgtgtgtgccatgtggcatggattgcccccaagtgagggacaggaatgcagacacgggcgagcgacaacgactgcctcggagagggcatggactgaggagtctcgccgctgaggcggagagaaacactgttggcgagggcccaggggagtcaaccctagattttctcacctaacaggcgggaggatgggagccctactcgaattgccatgacttaggaagttctttaaggatggcgtaaaggacaacaaggtcaacaaccacaggacgctctacgccaccttgacgggaaaacggtttttacaccttgcaaacaacgggggccaacaggacaggcgccatgagtcccattgggtgcggacaacagacaccacaaaagagatcaatttagtgtcccacttgatgatacaacccatgggtccggggaaagcgcctcaggaacggggggattacatgaatcggaacgtcttcaggtccccacccaaacgggacatggcgggcaccgtccactgatgtacgattacacagtgggcggcacttaacgtttggcattggggcaaagcagcccgatccaaagagcaccgtcatttgcctagaacccacaaggtatggagcccctttgtttaccaagaacactctggctgtgaacgcttgcgagggccgccccggaaaggtattacacactagct

SEQ ID NO: 653260 - DNA, 99 bp, Homo sapiens
atcactgcttccctgagattttatggagcctcaatgttgacctgacagagttccagtccaaccctggtgcccctaccgctgcaatgcacgttccctctg

SEQ ID NO: 653261 - DNA, 155 bp, Homo sapiens
  misc_feature (107)..(107): n is a, c, g, or t
actccagttccaagaccaggccgttccactcatacacgccactacatgtgacgtcagccctgaaaaggtaacaggaaattcagaacattaacaatagaaaaaggcangtggtaaactaataagaagtgtgtttttatatgtgaggttattggcat

SEQ ID NO: 653262 - DNA, 568 bp, Homo sapiens
  misc_feature (32)..(32): n is a, c, g, or t
  misc_feature (550)..(550): n is a, c, g, or t
gacccgcctgctctgcccttttgattgttccnaagatctattatccatgtctataatcgtcttttgttgtttttttcttttcttgctctgttacagaagcgagtttttgttactgataggcataagatagcattcttttttttcgtttggtttgttcttacaagtcttctgcagtttactcgtacggcgtatataaagaattcctgtaataagagctatattgcatttttatatcctctcgtcttgatctagtctagcaatatagatgcataattgtattgattctcctttgatagatgtatccaggttgagagcacgcgtgatcgccccagtaacagtcaatttcccatcagcgactagcccggctgacagtaaaggggcatgaagcatctggagccagcagtgtcacggaggaccggaagccaaaaattggaatgcaatcagacaattcactggacctgggtagaagaaggactcttggattcaatgttgatctatttcatattattactcaacaccagtctgggatccctgaattcgcgagaagatnttcgaaaaggtcacgcgc

SEQ ID NO: 653263 - DNA, 292 bp, Homo sapiens
ctactacgcactactgcgctggcgctagtaacgcactgcgccaaaaggtcccccagcggctgccacatagtctctgcccatcctgagtgacgctgcacacttggctccacaggccctgctcgctccaccgcagcgggcacccagggggcatcgcagggcacctggctagaactaccaacaaatcactattatgacaggactagaatcccacaaacacacatcagcaggagacaatataaacgagggagcagtcggactataaaggtcacaatgtcatcccaccaaacatgcc

SEQ ID NO: 653264 - DNA, 781 bp, Homo sapiens
tacactagctacggcgaccatttgtccaaagcgccgaagaagcagaccatgtgggactcacaggccaggcccgatcggcccccaccagtgcctttaccacccgctcctagacccgtcttcagctgctgagatcatcgactgagggggcctgaatgccccctgttgattctgctgcccctgcacagcaagctgctagtgcctgggtggatgggccaccgcctttgcccagcctggatgccatccaagtcagatattcttgtttaatctcgcgactgaatggacttgagcacacttttggcccagggtggccacacctctatcccggcttttggtacaggggtacacaagaggaggatgatttgcgtgaatacccctagactcccatgaggagatgccatgagccgcccaaggccttccctggcactggcaaacagggcctcctgcggagcacactggctcatcccagtcctgcccgccaccgttatcggtgtcattcacctattcgtgttttttataatttatcctctgttgattttttcttttgctttatgggtctggcttgtttttcttgcatggtgttggacgctggatcgcttctcccccaccccctagtgtagccagcaggcagagcattgccctctgtctcaggctggtgtccactgggaggggcccaagaactctgctcagagaagtgcagggagagccttccaagctcactgtccctgagactggcatgacaggggctatggttgctatggtgtagttttaagaaaagtaataa

SEQ ID NO: 653265 - DNA, 252 bp, Homo sapiens
cgtcacatttggtaccccggaggagttattcgtaggcctgctgctggtgtggtgcctggcttcttttgccaagtttgcgtgctagcactggggccactgcgcaagaccggtacgaccggaggctgcgccccggcgtaaaggagcaactcgttctagctggaagagctggtctcagctggaaagcctaccctacgtgcctacgaataactcctcgggatccgtgcacgttaacgattactaggactatgcaga

SEQ ID NO: 653266 - DNA, 246 bp, Homo sapiens
ataaaagcctgtgtcggcttgctaaacctgctcctccaaagccagagcccaagcctaaaaaggcccctgccaaagacagggagagaagtgtacccaaaggtgaaaaagggaaaatgctgatgctgtgcaaggatggggaataacccgtgcagaaaattggagatgccaaagacatgaccagtgcactagaaatgctgaatgtgtgcttgtgagatgccacagtgcaagtgttgtgcagttttttga

SEQ ID NO: 653267 - DNA, 1881 bp, Homo sapiens
gagaacgcgtttgtctgtgcgaactgctgacgtcctctcggtgccagggcattgcggactcggctcgcttggcatgcgccctgcggagccgcgtgtgcggcaagcagacttgaatgccgccgagctgggcgactgtcggcatggacgcaggagccgcgctcgcatcacttgcgcaaccgagctccctgcgctgtgtgagagtcctctatcgcgcaacccatcgcgtgcatgtgatagcactcgagctgccgcgatgggccgacgcgtaccactctcactgcagtccgcgcgcacacccccgcatatgtgctcccaggctcccaggcccccatacgcgtcttcacagacgcgcgctcatcgagtgactgcctgggccctcagccgtgcgcgcgcgcacctagcgacccctcgctctgtcgaccgcgggcgctctcgctctccattggccgtctgcgcgcctgccttgctgcttccgcgagagcgcacgattgctgccacgcgccaagtccccatatgactcccgtgagcgcttaggcaacacggcagcctacgtggccacgaccgctactcgctggcccgcgccgcggggcccggcgcatgcggcgacaacgtaggccgacgcgcttgccccccagttcctaccgcagcctcgtcttgcgcctgcatgctgcctggcccccgccgtccgtgcacccgcttcccgtccctggcgcatcgtctcgccattgcgagttcgcccgttctgcctcgcccagagtccgtcgctcgcttgcctctcccgggaatactacccccacgggattacctcgaccccccacctaggctcggccccacgcgaacccttcttcctccccccagtcccggacacccacctcgttgaacagccctgtgcttcccccccccggccctgaggtccgccctgtggactgcccggaccctccccttcccacccatccatccccctcgtcggcttggcagcgcgaacctcgccaatccccttgcgcgtctcgcgcctggcgtgctccgtgcctacggccggcctatcccccccatagaccgcatagccggcgacagaacgcatcgcaccccaaggcaacaccccccacaactgcgacccccaaagcgcgatcacacacatcgagacccaacgacagccgagcacacaactacccacacaatacaacgcacaagcaactatcccccaacgtagaccccaacaggcgacctgcaacaccgaagacaaaccagggagcacctacgccagaaaagcgacagccaaaacatgcacaaacactccacccctcaaccagacggggctccttcacgcaccactgcacaagcgcagccagaacgccccccccttgacagcaccctgagcaccaaaggccaaaaaccgagcacaccccgctacgcgcaacgtacgcgcaacccgcacgccaaccccccactgcgcacccagcccagacgacaactgcacacccgagaaggacaccacccaccaacacccgcccactccaccgacgatcccaacacgccccgaccacacaaacaacacaagcaaccccacgacagcagacacacggcgcatcacacctccagcaacacacacaccaacacacataccaccgcacacgcggcaccaccaccaccggcacccacccgcccaaccacacgcggaccacaaccacgaccacgcgcggcgacccagcttaactctacccgccacgcacaccacaccaccgcccccaaacacccacgacaaccgccccaccccccacaccccacaagccacacaaacaacacaaccaaccaacccacaacaagccacccacaccaccacacgacaacagcacaccagacacaacactacacaacccacac

SEQ ID NO: 653268 - DNA, 576 bp, Homo sapiens
gggacggcaaagtagagttaggaagatattgagaagaaagagaaactaaatgccaatggaatctgcaatataaaaaatgtaaaaaatctgaaatataaaaaatgtaaggtttggtgggggtcatttaggattaatcaaacatcaattccaaagaaatttttttcttacagtaaaatatttaaatatatttgtgtactccaaaaattattcacatttgcatgcaacttcccaaatgccaatttcaagagtcataacattgtaattgaaattacatgctggaagatgtcataaatgtgctatgcaatggtgggcttcacaagattaagcaaaaatttaggatttatagcgcagattagtcttaatacatttctgtttatctttccaactagaataaaagggaatatcttgccaagtaatatgctacttgatttaacaaaaaaggtaatggcagttaagttaaggaaaggaagatttcacatagttttgttaattaccatgtaaatgttacctatgatatgacatttaaatctacaaatgattaacaaagattcttaaagcatattgctctaagcaaag

SEQ ID NO: 653269 - DNA, 753 bp, Homo sapiens
cctcgtggagagatatcacaattggacccacccatagggcgttatatacccttccctttatattattccaccacgggagcaaagttcaaacgccagttggcgacgcacgtagaatccatcgctgcgccctcaagccggtttcggtacacatatgtgtgccgacgcaacggttggcccccccccttgttttggacgccgcatgtgtacatctgccgcccgccactgcgtggagataggggcgacacaaacaacataatcatggcagaggggaatttttctataaataaatacagggggcacagaactcccatgataccctccaagggaatccatatataacatatcttgtacaaacctcctttgtcggacataagacaccctcttggaggagattcctagaacaatatcgcaccccaagttctccccttctacatacggccgaaacttttctccccctgatagaatgcacgctccacaactcctcctcctccggtattatagaatcgggtacgctgtataaggtccccgcatgagatactgaccatggtctgaacacaccaggatgtctccccgcaaaacctatgaccctcgtacagttcaatagacctctctagtcatttcgcccacctccctagtgcggatacccattattaaactctgccaataagtcggtttctcttgaggaaaatacaatgtttcagttcaacacaaaaacggtctcatacagataccaccaatagatcgcagaaatct

SEQ ID NO: 653270 - DNA, 160 bp, Homo sapiens
acctctttaggttgttcctatacataagccgtcatttaacccccaggtcgctcaccccaagcttgtgagctagcgtggagtccatactacaagctagtattatctaaataaacagaacttggccaggctcagtggctcatgcctgtaagtaatcccaaca

SEQ ID NO: 653271 - DNA, 151 bp, Homo sapiens
  misc_feature (144)..(144): n is a, c, g, or t
agaggatcctcccgccgtacagtggcggaaataaaaactctcctgggtcaatcacatatttttcttaatatggctacaaaagttattaccaaaaggtgttttttggtttaatatcatattataatcgtgtcgcaactgggtagncggcggg

SEQ ID NO: 653272 - DNA, 219 bp, Homo sapiens
tgtttcataagtaattctccccacttgatttttcttcctatccaatcccatagatcacagttgacgctatagccatttaatatatgttcacattgtaaagaatatgtataaatgttttcctcgtatgttagagcatgtataagccagcatataaataaattgtttaataagacggtacagtaaattctcaaagcattttttcaaatccaaaaaaaaaaa

SEQ ID NO: 653273 - DNA, 564 bp, Homo sapiens
gtaagataactgcgccatccggactagctgtttggttacgcaccaaagcgaagggcccggggtatcaaagtaccgcttttgtgcaagttcgcccgctccgatgttccaccaggtctcgcgcgccccccccggtggcgtgaaaacgagtggacccttcttggtcagaggcgcaccgtgtagtatttgcccttaagcggacttttggaggaacaggggacatgcctccaagagtatgttttttaactcttctaagaacccacccaatcgataatcttcaacttttaccaagtatttaagaagtgttggttaactcccagctttgacaagacaaagtcccacaatcactcacacttgttgatagcacctctatggttatttgcaacaacttccactttgttactggcacttcacgaaagccccctggcactggccgccgtctgtgagtggcacttttagaccctgttaaacacttgaggccccacctcgcttttaccccaaccgagtgaccacccccccttatattttcaaaaaaatcccctttaattcttaattgccaaaaaaaaa

SEQ ID NO: 653274 - DNA, 303 bp, Homo sapiens
tgttacccggtggttacggcatcaccgtcaccaaaccaacccatgaataagaccagtcgccaggctctccctgaattacctgttgctgggcacggatgtcgtcatcgccatcttcatcatcgtggccatatccttcgtgccgggccagctatcgttgtctatcctcgtaggccaagaagtccagcaaggacaagcacctagcagtttagtacaggggctgcaatcccatcatctactggctggcgaactacgtttgggacatgctcaaatagctggtccccgctacctggtgtgtcatcatcc

SEQ ID NO: 653275 - DNA, 326 bp, Homo sapiens
tagtgtcttactagttggtcagtacaggtatgacttatgttgaattttgcctagttacgaagatatgaatcttaataataggatctcttagtattagcactcattggattttctaagtggaaatgtaatgggcagtgcaatgatttaacattgtttactacagacgtttcttgaagacttctgagttatcgtaagcatgtacaaaaggttatttcttaagcttgcatttaaaatgcgtttacttcgtatgatcctcagcaagactatgagtggaatattacatgctcacacaagcatacgtgcatatggtttaattaaaaaaaaaa

SEQ ID NO: 653276 - DNA, 438 bp, Homo sapiens
gttggccagcgtcgaacggggggctactcaaggcccagtaagcccggccaggtataagcgcttagaacaccagtggcgtggcacaggcacagagtaccgagtggcctagaggtgaaccaagagcttagggtcctgcgctgtcacatacgagcatactaccacgacatacgggccgagccaccagctagctagagttacagccacagtgaagcggttcatatcggcgcaacttcttctaggccagctagggggcttcaggctacttttcctagctcgtcatcactgctagtcatcgtcactgtcctagtgctcctcttcaaatcccttcttctagggggctgcagagttctccagttggtcaagtttctctggctctttctctttctccttcttcacatcatcagtgagcttacaagcctcacagatcctcttaacgaa

SEQ ID NO: 653277 - DNA, 202 bp, Homo sapiens
  misc_feature (9)..(9): n is a, c, g, or t
  misc_feature (17)..(17): n is a, c, g, or t
  misc_feature (75)..(76): n is a, c, g, or t
  misc_feature (122)..(122): n is a, c, g, or t
  misc_feature (178)..(178): n is a, c, g, or t
aaaaagggnaggaagcngggaaaaaagaagggggaagcgggttatttggggaatattgtttgggggcgccacggnngcccccccccccccaaaaaaaaggtttttttttcaaggcctagggngggtatgaagtgtggggcgggggtcaaaacattcctgagaatctgggaaaggggcncaaagatggactgagaggaggggt

SEQ ID NO: 653278 - DNA, 923 bp, Homo sapiens
  misc_feature (627)..(627): n is a, c, g, or t
ggccctcttcctcctggccagcctcctgggcagcggctctagtctggccctggtccttggactgaaagaatgcaccagggctcggcagtgtggggccccgaatgtgcccacggcgtccgactgcggggcagtgaagcgatgctgccagaactgtttggacacaatgccaggcagtgaaatcccttacccgtgcgagtatatgcagatgactgttgtcagcggacaggtggtgatatagcttgaagggacaattgcgcatttggaggaggagactccttgtgaagattggagaagagctgtgattggccttcctgaggaagcgaaaccactgtctgaattcatgcaccggagatatgctggaactccttatcctttccctgtacactcctaggacagtcatttaacacggactgacactgacgccggtcctggagggacgcgtgtcggctcctgcttctccccttcgtcatgacttacgttctcgtcccaagcagggtgctcgcctaggcacgacagcttgaactcacccaggagaacgtcaacgccgtggcggctcgcaagtttcacgaactcaccaagtactctggtgagcagtggatctagatgagttgtgtgaggactcccctnttcactgagccagaagcgactacgcctccttcgttcgtctctaacccttccgagcggacatctggcccgccccgggcaatgaacaactggcaccaccgacatccgaaacagcgcatttcaactggggggggacgttttattgtgccatgatgaactggccctttccacgcatgggctggacttggacacaatccccaggaacgtggctcggtacgtggcacccacagtacccactcctatggatccccgcgcccgttgtggattggaaacgattttcaacggaagagcgtttctga

SEQ ID NO: 653279 - DNA, 740 bp, Homo sapiens
  misc_feature (27)..(27): n is a, c, g, or t
  misc_feature (150)..(150): n is a, c, g, or t
  misc_feature (159)..(159): n is a, c, g, or t
  misc_feature (170)..(170): n is a, c, g, or t
  misc_feature (223)..(223): n is a, c, g, or t
  misc_feature (227)..(227): n is a, c, g, or t
  misc_feature (396)..(396): n is a, c, g, or t
  misc_feature (398)..(398): n is a, c, g, or t
  misc_feature (462)..(462): n is a, c, g, or t
  misc_feature (473)..(473): n is a, c, g, or t
  misc_feature (494)..(494): n is a, c, g, or t
  misc_feature (498)..(498): n is a, c, g, or t
  misc_feature (526)..(526): n is a, c, g, or t
  misc_feature (528)..(528): n is a, c, g, or t
  misc_feature (530)..(530): n is a, c, g, or t
  misc_feature (557)..(557): n is a, c, g, or t
  misc_feature (581)..(581): n is a, c, g, or t
  misc_feature (588)..(588): n is a, c, g, or t
  misc_feature (595)..(595): n is a, c, g, or t
  misc_feature (606)..(606): n is a, c, g, or t
  misc_feature (636)..(636): n is a, c, g, or t
  misc_feature (646)..(646): n is a, c, g, or t
  misc_feature (657)..(657): n is a, c, g, or t
  misc_feature (666)..(666): n is a, c, g, or t
  misc_feature (734)..(734): n is a, c, g, or t
tcggtttctggttaggtggctggagangtcctgttgccagcttcttgtgggctttctcttgttcaggatgttaggtaacagttccccaattccgccggggggagctagatccccaaggctggggggccaggggctgcagggaacacagcnaaggctttnggagccaagtnagatcagttcaggccccttaggcccaggaacccgacaccaccgcgtacctgtnagcncacactcacggccaccccagttacaagtgcagccacaaacacccacactcactcacacccacacccacacgcacacccactacacacacacacacacacacacacacacacacacacacacacacggctgtaacaacacaggacccacaccctggacccctggtatgtntntggaccagaaccgaacagctggatccacagtgcgcggggctgctcagggggcgggttctctgtntcgctacttantggccgcctcgcaggcgtttnttcnatcactgtacacatccacgggttctganananacgttatgggcgtgtggtatccctctnggcacacggtacaagatatgactncggtgtngcgggcncggtccatttncacatcacaggatttctcgtggtttcaganggggcaggtnaactgggtttngagggtgcntgttatcttcttcttgggagggggcttttgttttgactttttgcgccccatgtttgcgggtggatganccttct

SEQ ID NO: 653280 - DNA, 190 bp, Homo sapiens
tggggcagtaacatatcacaatggtgcaatgtcatcagttaaggctattttcacttctgtggatcttcagtaacttcaggccatctggatgtatatgtgcaggtcactgggatatgatggcttagcttgagctcagaggacggacagagaccagcctagccaacagtgcaaaacgccctctctactaaaa

SEQ ID NO: 653281 - DNA, 759 bp, Homo sapiens
  misc_feature (260)..(260): n is a, c, g, or t
  misc_feature (327)..(327): n is a, c, g, or t
  misc_feature (384)..(384): n is a, c, g, or t
  misc_feature (404)..(404): n is a, c, g, or t
tagttttattggtttttatttccataacacaaaagaggaagcgaagggccagggcccgaggcatccccttggcacggttcgaaggctttcaaccgtcccgggttggtttggaaggcaatttgggggccgcgcccaaggaaacccgtgcaggcttgtcagttcccagcattgaacagcttaaaataaaaatcgtcccgtcgggttgctgctcggagaggctccaagaaatgcaaaacaaacccgcctggaaaatgctgccntgagaaccagagcgagggcttgaaagatgccttcaacacagactcttctaggaatccagccagcttngggacggccgtttcacaaaaccaaaaaacaccaagtaacatttctaaccggagaatngccggttttagcaagaaaanggggcttcacctaaaggggggggtcacaaaacacgaggggggtccccccgggcgcctgcctcttcctttctgagcagatccgtccgagactggtgtgagcggattcgccaccctgtgctggagggggccgcagcagccggtctggggtgggcgctcactgttggccccgcctgtttgccaggttcttctctggtggctctgcctgtgccgggatcccacctcggctcggccaccaaacttcggcaggcgccatggcggcttttgtgttgtgtgaggctccgggcgggcttgcacacttcttgctgtcaatcgggatccgtctaggggggttgactggccgaatgcgcgagaatcg

SEQ ID NO: 653282 - DNA, 667 bp, Homo sapiens
  misc_feature (260)..(260): n is a, c, g, or t
  misc_feature (327)..(327): n is a, c, g, or t
  misc_feature (384)..(384): n is a, c, g, or t
  misc_feature (404)..(404): n is a, c, g, or t
tagttttattggtttttatttccataacacaaaagaggaagcgaagggccagggcccgaggcatccccttggcacggttcgaaggctttcaaccgtcccgggttggtttggaaggcaatttgggggccgcgcccaaggaaacccgtgcaggcttgtcagttcccagcattgaacagcttaaaataaaaatcgtcccgtcgggttgctgctcggagaggctccaagaaatgcaaaacaaacccgcctggaaaatgctgccntgagaaccagagcgagggcttgaaagatgccttcaacacagactcttctaggaatccagccagcttngggacggccgtttcacaaaaccaaaaaacaccaagtaacatttctaaccggagaatngccggttttagcaagaaaanggggcttcacctaacatgagtggtcctacacacaaaggtggttccccttggcgcccacctcatcctctttaagaaaaacggtctcagtctcatgagtggtgtccacaccctcacagaaggccatgcagtcatctagttgatattgtgtctgtgatgggtcagcatccgtcagggcatttaagcgatggtcataggcaagtgttggcaatctcgcctcagccaaagaagtcagaaccccctagacgagggcagcctaccagagc

SEQ ID NO: 653283 - DNA, 830 bp, Homo sapiens
  misc_feature (150)..(150): n is a, c, g, or t
  misc_feature (156)..(156): n is a, c, g, or t
ctccccggggagcgtgttttgccagtatggggaagtagggcggaggcataggaatgaccgcgagagtggctgctttcatagctccgcttgcgaaactcctgcccggctttgacaccgccacggctttcagtgatctggaaaatccctagnttccanaaatagtcttagggcgaggacttgacagaggtaatttgattatgcctgggagtctctattcatacatggttacctaccgcgggtagggtgaggtcaacctcgtgttttatgttttttttcctgtgatattagctagcaatttccagcgtttcctgaaccttgaagtaaaaacaatgatactgatctaaactactagaatctaggttggaaggaaaggaatgcatcacgttttactcttgacgctcagaaagcgataccccaaagacagaggctttagaagctgcctcataatgcaggtcccccaaccttgacttgttgctcccacttttcccaagtgcagggaggtactctctgaaatttcctttcctgactagagaagcctctttgtagaagaatcaatcgcattcctcccctcgctgaaatctcgtatcctatttcaaaaagactcagaaatgcagccattcctggagggactttttcacaagattactcaaaagaaaattatttactaatttctgtccattcattgttcctaataatcatttgctgctcctcaaaataaatgtctacatttctcatctaccctttcccctatgaaaaaaagatataaaatcttctgtactccattaagctactgggtaatcatcctcctgcttttaccccggtgttatgta

SEQ ID NO: 653284 - DNA, 776 bp, Homo sapiens
  misc_feature (150)..(150): n is a, c, g, or t
  misc_feature (156)..(156): n is a, c, g, or t
ctccccggggagcgtgttttgccagtatggggaagtagggcggaggcataggaatgaccgcgagagtggctgctttcatagctccgcttgcgaaactcctgcccggctttgacaccgccacggctttcagtgatctggaaaatccctagnttccanaaatagtcttagggcgaggacttgacagaggtaatttgattatgcctgggagtctctattcatacatggttacctaccgcgggtagggtgaggtcaacctcgtgttttatgttttttttcctgtgatattagctagcaatttccagcgtttcctgaaccttgaagtacatcacgttttactcttgacgctcagaaagcgataccccaaagacagaggctttagaagctgcctcataatgcaggtcccccaaccttgacttgttgctcccacttttcccaagtgcagggaggtactctctgaaatttcctttcctgactagagaagcctctttgtagaagaatcaatcgcattcctcccctcgctgaaatctcgtatcctatttcaaaaagactcagaaatgcagccattcctggagggactttttcacaagattactcaaaagaaaattatttactaatttctgtccattcattgttcctaataatcatttgctgctcctcaaaataaatgtctacatttctcatctaccctttcccctatgaaaaaaagatataaaatcttctgtactccattaagctactgggtaatcatcctcctgcttttaccccggtgttatgta

SEQ ID NO: 653285 - DNA, 607 bp, Homo sapiens
aacaatgtaccagaagtactatagccaagacagcattatgacttgatgtaagtcatgccacatccccattattggccacctcacgatgaagagacagataactccctaaatgttaagctggctctactcccctcaactacttaaactagtaaaaaccacatgggaaatatagaaattcaaatagaagtaacataaacctgtcataaatcgtaaacagaaaaactatttgtgggacagcatggatgacaaagtggtctactgtgtaaattctagaatgaggcagacaaaagttggaaggccggttaattttcccctccttctcctgctccagcttcgtctccttgggtatccgatgtccacaagggtcaagttgtctctcagtaattgcattattagcgtgctgtctttgtatgactcttcacttaatgtatcaagttcagcaatggcttcatcaaaagctgtctttgcaagagagcaggctttctctggggagttcagaatctcataatagaacacagagaagttaagggccagacccagtctgataggatgtgtaggttgcatttcctttttgctgatttcaaaagcttcttggtatgcttgttgt

SEQ ID NO: 653286 - DNA, 229 bp, Homo sapiens
agacagtcagcatcagtcctgttatgggcccatgacaagaggtggagaaggcgcggacggaggcggtcactgaggcggtcgcggaaatagtggaccgtacagaggcgactatagcggtgccgggaactatcaaggcagatccttctaaaggaaatagtgcaagtcctaaggcccacacccttacacacaccgaattccctgttttgcttgagggagcccttctgctggt

SEQ ID NO: 653287 - DNA, 350 bp, Homo sapiens
  misc_feature (47)..(47): n is a, c, g, or t
  misc_feature (146)..(146): n is a, c, g, or t
  misc_feature (186)..(186): n is a, c, g, or t
  misc_feature (190)..(190): n is a, c, g, or t
  misc_feature (192)..(192): n is a, c, g, or t
  misc_feature (241)..(241): n is a, c, g, or t
  misc_feature (253)..(253): n is a, c, g, or t
  misc_feature (268)..(268): n is a, c, g, or t
  misc_feature (312)..(312): n is a, c, g, or t
  misc_feature (317)..(317): n is a, c, g, or t
cgtcccctttgcacatgttccctgggcacctctgtcctccgcgattncctgcctgcccagagagctccctgctctggttaggcttgtgaggtccccgtagctgtggctgctgcagaggcctcagcctggccggaaagcctgttcanctgctggcactcagagcctcgcagtggtccttcccttttntgcntncggaatcttagggagaccctgatgaacactttgagttgtctccccaggnacacacagctcnctcctcattgaacanttagcacacaattctggccattccaaagacttcagatgaagaantcctngtagacagtttatgaactgggattatgcaggac

SEQ ID NO: 653288 - DNA, 270 bp, Homo sapiens
  misc_feature (107)..(107): n is a, c, g, or t
  misc_feature (124)..(124): n is a, c, g, or t
  misc_feature (141)..(141): n is a, c, g, or t
  misc_feature (146)..(146): n is a, c, g, or t
  misc_feature (159)..(159): n is a, c, g, or t
  misc_feature (184)..(184): n is a, c, g, or t
  misc_feature (243)..(243): n is a, c, g, or t
cgagggaaggctggctgccagaagatagcgagtttacttcagacattgccaaaggtgctgataacacagctgctatcagagctttcagaacacataccaactgcaangaaagtacagtagccgngctgagtgtccaatagngtcanggttcattctccnccgatgactagacacaaaagaattncctccggtgtagttctaataaaaagaagctcaagctccaagtgaagggaggagagtggnctgtagcagaggttggcttcaggcttg

SEQ ID NO: 653289 - DNA, 173 bp, Homo sapiens
  misc_feature (2)..(2): n is a, c, g, or t
  misc_feature (39)..(39): n is a, c, g, or t
  misc_feature (102)..(102): n is a, c, g, or t
tntgcaagggacagggctccccatggcctcctggttgcntccctcagggctgatagcagcactccctggccacacgccatggcgctccctcaggcgagactnagaggccagtgaggcctgcacggtggcctcagcttctggggtgcccttgctgggcggtcccctcaggcccc

SEQ ID NO: 653290 - DNA, 705 bp, Homo sapiens
gactagttctagatcgcgagcggccgcccttttttttttgtttcttaaagaattttcaaaatcaaattccagaatggatttaacgggagatatcccaggaaaatgaaggcttctcttaaacactaaaaaggcatgtaatggctggtaagcaaaagggatatgacacatctctgatactgttttgcattatgggtggggctgagcagtcagaagaccgggtcgtcgtctggacttgggcaaatgagccggagcccctggggcaggtcacacaaccggtcccagcgagggacacggaggggcccttcaggtacatcgcagggggtgcgggttaaaaggtaattaatctggtaaatatactcctagtaatttaagattgggtgttaaaaggggaattaacagatggtatagggcagtgtctttaaacaaaacaaaaaaccaacaaaaacacacacacaaaacacagggggggggagcgcacggaataacacacaagccaggaccaccctgggacgcaaaaacaccgcgggacacacacacggaccgggacaacaaccacgcgacgcgttagaggggagcagagacaatagggtccaaacgaggcggtgtcagccacaaagagcgacgaaacggggcgcacgagcaagatgaagagaaaaaccgaacgccgaacaaaccaaacgcgcgccagccgacgcagcgcgcagc

SEQ ID NO: 653291 - DNA, 369 bp, Homo sapiens
ataggatccccccgtggatgcgatgaatgttcaagtgctttgctacagggacagctgctctgaactctgagggaggtcgctaattggaaaacccttggggaattattatgcccatttcggtctctgagctgcacacaggcttccagagagtggtgatagggcacatttgttataagtgacctaagtgacaaatgtaactctagctgtcctaagcaaaaggaaattcatagacttaggtcgtaagttcagcatgtaacctccggggacatctatgtctggatgctccaaaatgatcttgagaaattgagtctgtttctcctttctgcttcccacttcgactccctctttctgcttcattcttggcaggct

SEQ ID NO: 653292 - DNA, 417 bp, Homo sapiens
  misc_feature (25)..(25): n is a, c, g, or t
  misc_feature (90)..(90): n is a, c, g, or t
ccctggaaatacctatgccagcccntaaaaaaatgagttccatgtcctttgccgggacatggatgaagcctggaaacccatcattcctcngcaaactaacacagaagcagaaaacccaaacacccacatgttcctcactcataagtgggagttgaacagtgagaacacatggacacaaggaggggaacatcacacaccgaggcctgtcagggagtgggggacaagagggagagagagcattgggacaaataccaaatgcatgcacggcttaaaacctagatgacaggttgatgggtgcagcaaaccaccatggcacatgtatacctgtgtaacaaacctgcacgttctgcacatgtatcccagaacttataataaaaaagaaaccagtaagtgctcaataaatgttactaacatcta

SEQ ID NO: 653293 - DNA, 244 bp, Homo sapiens
  misc_feature (153)..(153): n is a, c, g, or t
gtgctgactttcgtctcatcacattctgccggtataataaggacactttccttgtcaccgatccgtcgatgcagatgtcatacgtatgtcaggaactgcaagttcacctcgcctggtggcctccccttcatcagtttcatgcaatgaacctanatggacctgctggccctcaagtcggttagtgtcctaccagcacgccttcctctacatccgccagtctcgccatacacctgcgcaacgccat

SEQ ID NO: 653294 - DNA, 655 bp, Homo sapiens
tggaaacagagtctcactctgtcgcccaggctggagtgcagtggcgcaatctcggctcactgcaaactccacctcccaggttcatgccattctcctgcctcatgccattctcctgcctcagcctcccaagtagctgggactacaggcacccgccaccacacctggctaattttttggtatttttcgtagagacggggtttcaccgtgttagccaggatggtctccatctcctgacctcatcatccgcccgccttggcctcccaaagtgctgggattacaggcgtgagccaccgtgcccagcccccatggctggctaattttttggtattttttagtagagaagaggtttcaccatattgggccaggctggtctcaaactcctgaccttgtgatccacccacctcgacctcccaaagtgctgggattacaagcgtgagccaccgtgcccggccccctttatgtttttgagacagggtctcacttcactctgtcccccaggctggattgcagtggtgcaatcacagctcactgcagccctgatttcccgagctcaagggatcttccagcctcagtctcccaagcagctaggactataggttgtgcaccaccacacccagctaatttcggtctgggtacgagatggggttccctatat

SEQ ID NO: 653295 - DNA, 145 bp, Homo sapiens
gctcgaccttaagatcctcacagtcacagaagcataatgctttgctgggtgtgatggttcatgcctataatcccaacactttgggaggcgaggcaagaggatggcttgagcacaggtccagtatagtgagaccccatctctacaa

SEQ ID NO: 653296 - DNA, 148 bp, Homo sapiens
cacgtatgtcgatggttgcggggttaaattaaaaagaaataccacacatagcaaaaaagaatgtaaggtatggttagtggttgctgccgattaagaacaaaaaactgtaaatcatcttaccacccaagagtgattttatcacttatgg

SEQ ID NO: 653297 - DNA, 1315 bp, Homo sapiens
gcggatggttgctgccgaacatgggcaagttcatgaaacctggcgaagtgtggtgcttgtcctgtgcttggacgctactccggactcaaagctgtcatctggtgaagaacattcgatgcatggcacctctaagatcgcccgctacagaccatgctctaggtggctggacatttgaccgctaccccacgtcaaagtgacgagctgccatgggcaagaagaagatcgccaagagatcaagacgataaaatctttgtgtgatagtgtataactacaatcacctaatgcccacaaggtactctgtggatatccccttggacaatactgtctgtcatataacggatgtcgttcatgagatcctgctcttaaagcgcaatggctccgatcgggaggccaaggtcaagtttgaaggagagattcacaagacaggcaatgaacgaagtaggttcttccaggaatactggcggtcttatagattgcttaggttgtctgatcgattcaagacaattcataccactgacacacataaagagatccttagaaacaacaaaactcggggggactcgttgttgggcgtcgagtgtcgcataacacatttgcgtgttaacttaaaatgtgctcagcttggggttcggacccttcgggtagaatcgcacggagatccccaatggttcatcctctggttaccgccaggcgcaaggtagagaacttctgcagggcaggtggatccccctcttataaggggaaaagctgaaattacacatgttcgcgaatgagcgcgggggatgccttaaccccttgggagggacttaaagagaacgcggggaggcacaaaaactgtggaaacggctgtcccaccacggggaaattccttgtgacgagcctctgcggccatgacggcccactggcaatctgtaacgtgcggaggcaaacggcatgagcacaagcggacagcactacagggagcgctaccccgcgaattaaatccgccaacagggtggtccacaaaagggacggccctcgagagaggcgcggttaaaacgctcggcccccccacatacacccgtgtaatcaaacgatacagagaagctttgtccggcgcaaacccctacacctgggacacagctgtgtatcacatcgcgtaggctcaaacacccaaggggcgctccacacaaggagcaccaccacttcaccaatgggcgattcaacatggagcaccacccacatggtaagcacacatacaggcggcgttgcgtctcacaagccgcgacacctccgagacacgcagtaaacacacactagtgcgacggccacctct

SEQ ID NO: 653298 - DNA, 582 bp, Homo sapiens
  misc_feature (98)..(98): n is a, c, g, or t
  misc_feature (115)..(115): n is a, c, g, or t
  misc_feature (131)..(131): n is a, c, g, or t
  misc_feature (139)..(139): n is a, c, g, or t
  misc_feature (143)..(144): n is a, c, g, or t
  misc_feature (149)..(149): n is a, c, g, or t
  misc_feature (154)..(154): n is a, c, g, or t
  misc_feature (164)..(164): n is a, c, g, or t
  misc_feature (166)..(166): n is a, c, g, or t
  misc_feature (187)..(187): n is a, c, g, or t
  misc_feature (189)..(189): n is a, c, g, or t
  misc_feature (192)..(192): n is a, c, g, or t
  misc_feature (194)..(194): n is a, c, g, or t
  misc_feature (208)..(208): n is a, c, g, or t
  misc_feature (218)..(218): n is a, c, g, or t
  misc_feature (224)..(224): n is a, c, g, or t
  misc_feature (244)..(244): n is a, c, g, or t
  misc_feature (249)..(249): n is a, c, g, or t
  misc_feature (257)..(257): n is a, c, g, or t
  misc_feature (260)..(260): n is a, c, g, or t
  misc_feature (276)..(276): n is a, c, g, or t
  misc_feature (287)..(287): n is a, c, g, or t
  misc_feature (297)..(297): n is a, c, g, or t
  misc_feature (316)..(316): n is a, c, g, or t
  misc_feature (324)..(324): n is a, c, g, or t
  misc_feature (340)..(340): n is a, c, g, or t
  misc_feature (347)..(347): n is a, c, g, or t
  misc_feature (367)..(367): n is a, c, g, or t
  misc_feature (374)..(374): n is a, c, g, or t
  misc_feature (382)..(382): n is a, c, g, or t
  misc_feature (423)..(423): n is a, c, g, or t
  misc_feature (479)..(479): n is a, c, g, or t
  misc_feature (500)..(500): n is a, c, g, or t
  misc_feature (574)..(574): n is a, c, g, or t
ggccagtgattccgagtgtgtgaggagcggcagtggcggcggaggagggggcggcgtgggtgggggcgggggcgggatgcgctccccggcccctctanccccgtggtggtacaangcgaaggtgtgggaangccgcganaaannggaantgcancccgccggananctccggcttcacttccgtaananganangagtgtacggcaangggcgggaantggaanttggcccgcctcgttgtganctganctcagcgncangcttttgtggcgtcantgcactgttancccgccctangtgtctctgacgctgacancttctcantgtgaaaagtcgcganctgtgangtctggggggcgcctcaaancttccantccaacancggatcccggaaaggcaacgtcggagactggacccaaaaancttcctgttctgcctgcagagttgagccccgtccgggtcctggacccgcgtagtantgaccctggatccctgttcantgcgttctcgctccccgcgctccctgctggaccccgggatgccgggcatctccgcccgaggcctctctcatgangggaggaa

SEQ ID NO: 653299 - DNA, 403 bp, Homo sapiens
gtacacacctgggacgacggtgacgtgctgctaggtcaggggagtccgctcggccaatccacatgacctagctatgagccactagggggccactgagactgcagcgtgtgcaactgagagaggctgcgtcctgcatgacataaggagccgcatctggatcgcgagcccgtgctgcatgcagaaagtgaggcacagacagcagactgtagatctagccagctaatgcgaacggatctggaccgtcattggaagtaatgcctcctgagctccagatgtgcacagactgttgcatgagcgtgagcgacaactggctgtagactgcggctgcaaacagaatgcatgatgaagtttaaggactgctgctgccgtcattgctgctctatactcgagaggtagcagagct

SEQ ID NO: 653300 - DNA, 268 bp, Homo sapiens
  misc_feature (8)..(8): n is a, c, g, or t
  misc_feature (14)..(14): n is a, c, g, or t
  misc_feature (50)..(50): n is a, c, g, or t
  misc_feature (173)..(173): n is a, c, g, or t
accaaaanccgganaaaaggtgcattttaaccttgacccaaggacaaatncggttgcagagaagaattaagggccccaagtcctgtctcctctgagggcatcaaggacttcttcagcatgaagccggagtgggagaacttgaaccagtccaacgtgcggcgcatgcacactgncgtgcggctgaacgaggtcatcgtgaagaaatcccgggacgccaagcttgttttgctcaacatgcctgggcctccccgcaaccgcaatggtgatg

SEQ ID NO: 653301 - DNA, 377 bp, Homo sapiens
tgtatggttcggacccaccgtacttttgctgagtccccaaggggctgtcgggtacagattccaggagagcggctgctggtcaggcagcagtgatctctaaagccacgcaggtaattttatcagatgctggcagagaaggggttctcatgtggtgggtacctggcaggcggactcggggctcattcctttcttcttggtccttggaggggcagggcagtgagagacacagctctacccccactacccagcagctgttgtctctcccacttccaattcctgggtgtgaggcccacctgatccggggaggtcgaggctgcagaggtgggaggatcacatgagcctgggaggtcgaggctgcagaggtggcaggatcacat

SEQ ID NO: 653302 - DNA, 156 bp, Homo sapiens
actaaagtaccctgtactgcctcctcccacccttgattgcttacttgtcaattaaattaaaatatgaggtacaattgtattggattgcaccatgagccagactattgcttccaggtactttctgggttgaacaatcattcaatatctaaccttgta

SEQ ID NO: 653303 - DNA, 151 bp, Homo sapiens
cgctttatatctctcaacgctttatacttccctctacgctttatacttcctatacttcctcaacgctttatacttcctctacgctttatacttcctatacttcctcaacgcttctcatttcatttcccggtatgaagtataaagcgttgag

SEQ ID NO: 653304 - DNA, 236 bp, Homo sapiens
  misc_feature (19)..(19): n is a, c, g, or t
caatgcatattccagtggnttacactattgaccctatagagagagagagtgaagcaaaaaatgaaatcttactagtgcatactagttggtaacctagcatttttcacctaaaaaataatccgcaataaacataatatgtgtcaaaacttttgtagcccagcctttaataaatttccgtatataaatttactaagcctaggaacttgactgactattaacgcataatacacgattat

SEQ ID NO: 653305 - DNA, 266 bp, Homo sapiens
agaaagagagagacagatgtagtactatcttaaatgtcttagaaaatataatagtgaatacgatcgacagaggaatcacggaaattgctccaaagtggagattctaaacaaggctatgggagaaagcaaaaaactcttccattgcaacatttgatggtcatttgtactttcaggcatgtactaacataacatcataacagcctctttaatggaatggagggaattctctaacgggagacctagagtaagtcagtccttcattctat

SEQ ID NO: 653306 - DNA, 494 bp, Homo sapiens
  misc_feature (8)..(8): n is a, c, g, or t
  misc_feature (76)..(76): n is a, c, g, or t
ccggatgntgattttagataaatctttgccgaactttcaggtgttttactcaaaagtctcccagcttttgaaaaanggagaatgtctagagcagtgaaattagttttttttactgcaatcaaggtttcaaaacaatgttagtgcgcccgacaaactgggactatcttgtttcctttttacacccttcctctctgagtagtggggaagggtgtaaacctccctaggagcaggtaaggtagactatgattgctcacaattggtaaccatacttgcagtgatctttgtgatttattgaatcacatctaggatgtacatattaatccatatttgtgctgagcatattcatttatcaactaagagactacagaaaaaagccattgttgtggtgatgaaaatgtcaacactttatcaggttctgaacccaaagagacttttgcttattatgtaagaagcacacctgtggctctaggcctttggaagaaaataaaagagaa

SEQ ID NO: 653307 - DNA, 89 bp, Homo sapiens
aggggaagcagatctgaggacatctctgtgccaggccagaaaccgcccacctgcagttccttctccgggatggacgtggggcccagctc

SEQ ID NO: 653308 - DNA, 440 bp, Homo sapiens
  misc_feature (241)..(241): n is a, c, g, or t
  misc_feature (250)..(250): n is a, c, g, or t
  misc_feature (255)..(255): n is a, c, g, or t
  misc_feature (364)..(365): n is a, c, g, or t
  misc_feature (398)..(398): n is a, c, g, or t
  misc_feature (438)..(438): n is a, c, g, or t
ttgttgtgggtaggggaagagctgaggattctggagtgcctgaggacagaggaggtcagcaaggtctgaatagatttctctggaaataagaatcttagatgctaaaatttccttctgttcctcctggtctggaacctcccagggactgtccttatttctctctcctggtgtgggtaaagggacagttacaaaccaggtcaccatcctcagaggctgatgcctgtacccaccccagcacagncacctccgncagancccgtggctctgggagagccagctttgctattcccattgtgacagcgatggcaggcctgacccacggggcagttagagcagcctcgtggagctcgcccctcccctcagnnctgccacctctccctgcatcctgaggccagtgngccccgggcctgcacagatacctcatcatctaaccacaanca

SEQ ID NO: 653309 - DNA, 370 bp, Homo sapiens
cacacacatcgagcagacacacacacacacacacacggagaattatgcctggggacttgggcccactatacacaccgagcgaatacagatatctgtgggtgagacagacggcgggactcagctttcatgtgtcgccttccctgtggagcagggcgatcacaactatcgtagctctctgtgcccaggactcttgtgaaagcatagagagctacgagtatgttgtgatcgcctcacccagtcctggacgcagccagctcctctttcaacagcctgcagcgtgttccctcctatgacagacttcgactcagaggatctctccgggtgccctgcccaaccacaagcccggggcgcaccttcaaggatctatgtg

SEQ ID NO: 653310 - DNA, 320 bp, Homo sapiens
tgatctacggatcttaggactggcgtgcttatggcctcgtaacataccaaggccagcacagacaatatgtagacaaatgagcttggtgagtatcccacaaaacatgatttctaaaaacaagtagctagctctgctctggatgataacagggatcttttttttttttttttttggattttgggcctttttccttttgaaagggccgtccctgtggcatagggaggtcccagggctagggctcatactagagcgtgatagccaccagccatacgcaaaagccacagcaagggtgggtctccagtctaccaggtgtgcaacca

SEQ ID NO: 653311 - DNA, 237 bp, Homo sapiens
  misc_feature (62)..(62): n is a, c, g, or t
  misc_feature (102)..(102): n is a, c, g, or t
cactcaccttactccagacaaccttagccaaaccatttaccaaataagtataggcgataganattgatacctggcgcaatagaatatagtaccccaaggganagatgaaaaattataaccaagcataatatagctagggactaacccctataccttctgcataatgaattaactagagaataactctgcaaggagagccacagctaagacccccgcagacagacgagctacctcaga

SEQ ID NO: 653312 - DNA, 187 bp, Homo sapiens
gggggctgctgggaagatggcggactcggtggctagccgatgaggaggccgcggggggaacccggcccctcgggcccctgaggaccgatctgtagggatgcgatcctgcgcaagggccccggggaagtcatggtctccatcatccaattccatgcttcgagtcctgctctctgctcagagctcccct

SEQ ID NO: 653313 - DNA, 199 bp, Homo sapiens
ggttctgtcctcattccccctcctgaaatggaaggagcaaattttcaaggagcagttaatgtaagtaagctagacggctagacggctcttcagcgctgtctgaatcaagtacttagtagttttatgttgttcaaaatacattttaagtgaagttagttattttgggacttcctttactatattgcctaaactacatcaa

SEQ ID NO: 653314 - DNA, 750 bp, Homo sapiens
  misc_feature (617)..(617): n is a, c, g, or t
acgcctgatgacgcgcgggccgtacaccttccgcggttattacaaaagtccacagcacaatgccagcgcctttgatgccaacggtttttactgttccggcgatctgatctctattgatccagagggttacatcaccgtgcaggggcgcgagaaagatcagattaaccgtggcggcgagaagatcgctgccgaagagatcgaaaacctgctgctgcgccacccggcggtgatctacgccgcactggtgagcatggaagatgagctgatgggcgaaaaaagctgcgcttatctggtggtaaaagagccgctgcgcgcggtgcaggtgcgtcgtttcctgcgtgaacagggtattgccgaatttaaattaccggatcgcgtggagtgtgtggattcacttccgctgacggcggtcgggaaagtcgataaaaaacaattacgtcagtggctggcgtcacgcgcatcagcctgaaggagagaacacgatggctattccttacaggcttacgcacttgccgagtctcacgatattccgcagaataaagttgactgggcctttgaaccgcaacgtgccgcgttgttaatccatgatatgcaggactattttgtcagcttctggngcgagaactgcccgatgatggacaggtgatcgcgaatattgctgcgctgcgcgaatacttgaaacaagacaatatcccggttattacacccgccaactcgaagaacagaacgatgtcggccgctgtgtgtttt

SEQ ID NO: 653315 - DNA, 588 bp, Homo sapiens
ggctgcagtggggcctctgcctcccaggcttaagcaatccgtcccacctcagcctttcaagtagctgagaccacaggcgtgtaccacccacccatggctaattttttattttttattttttattgtttgtttgtttgttttgagacagaatctcactctgtcacccaggctggagtgcagtggcatgatcttggcgcactgcaacctctgcctcccgggttcaagtgattctcctgcctcagcctcccgagtagctgggattacaggtgcctgccaccacgtctggctaattttggtatttttagtagagacgaggtttcaccatgttggccaggctggtctcgagctcctagcctcaggtgatccacctgcctcagcctcccaaagtgctgggattacaggcctgagccactgcgcccagccagcctggtagtccggttcccgtttcgagacaagagtctcactctatcgctcaggctggagtgcagtggcatgatcttggctcactgtagcctccaccttccagattcaagcaattctcctgcctcagctcccgagtagctgggattacagactgtacaccacaag

SEQ ID NO: 653316 - DNA, 591 bp, Homo sapiens
atggctgtggtacgggcgtgggacgcgacgtgaaggcccgtgatcaggcaccaactcctacgaatgtgcctgacgcagttgagaatgcgcagctacatcagtactaccagatgtatgcgtcgacaaatccgagtggatcttcaaccgtcgacggggagacactcttcaaaaacggggagctgaagtcgctcgaggagatcatggctgatgccgggtcaaatcgagaagatcaagttgtcggagtgcttcgccccctcgtagaggccgcgggcgtcgatatccacgcgtaccaggaccagtacaacgagtcgaagggtgactccaccgaagcgatgtcgtacgacgagtacaagaatcggctcctacatgaagactagttatcacgcatttccacttctggcgaccgcgactctgatcgcggcttgttcgacagtgcagttggacggcgtcgagtccgtgcctgtcagcaccccggcgtcgaccagcccaaccaactacgtacttctggccggttggatcattcaccaatgtgtggtccgcggaccctggggtcgacttgttcgctgaaccagtggcggtcgtccgcgcggc

SEQ ID NO: 653317 - DNA, 576 bp, Homo sapiens
aaggaccccctggcatactgagctactgggggccataggctgcagtgtaggatggggaatgatctgccctgtttgccaggtccacccctccacctgagcccgagagacctttcttcagtttcccaagcctaacctgtctcttgtgaagcctctgctcttccctggttctatgctgatcatagaggacgagtaagggtttaagcctgtgagtgaccatagaggacttttatggggtaagagggaaggtccattggctgtgagaaaaggccagaagctatttctattaaggaacaagcacaagggctagagaagttaataaatatctgacagatacatctgacatatagtatgcttcatactgggctaggcactttacattaactcatataattctttttttaagtttttttaaaattttttattttattattttagagacagagtcttgctccattcaccaggctggtctcaaactcctggcctcaaccaatcctcctggccttggcctcccaaagtgctgttattacaggcgtgagctaccatgcccagccccgtataattctttttaaaaaaaaa

SEQ ID NO: 653318 - DNA, 554 bp, Homo sapiens
gggtacggccggaatgttaggatgtcaccacagtaggtcctcggctcagtcggcccagcccctcgtcaggtcctccccaaccgccacaagcgccgcggctctgagacgcggccccggcggcggcggcagcagctgcagcatcatctccaccctccagcgcatggaagacctggaggagctggaggtgctggatgaggaagcccgctcgcgcgggctgtccgcggtcccagtgtcccaccgggccctgctggcgggcgcgctcctgatggacttcggaaatgagcttcgtgccgtcggtgccccggggacccctggccggttcgtccccccgtggccccggaggcggcaggcgttcttgggatctcgagcccgggtgtcggtcgatcgtgtcccgcgccatctcccgtcttgtctgtctgtgcgtcagttctcggcgtctcgcaagtctctctggagggagcgattgaggctctcctggtccgtgtctgtgggggtgtggctgtgtttggggggcgtatgttttggggtgtgatggttttgtagtgggggggggg

SEQ ID NO: 653319 - DNA, 278 bp, Homo sapiens
cggttctccgggttgccggtgcgctcctacgtcgcctcctgaacatgaccgcacctaggtctgacttcatcgtccgaggatgtcgaacggcagcttcgtgccaggaggtgcgtgcaaacgccagctggtagccgtggccaggcagctgcgaggacgttccggtccaagcggctcatgggcatgacgccctgggagcaggacgctggcccatgctggaggctttgcggttcgacgggaccgagccaggcaccgaggcccgggagcggcatcgtgccgga

SEQ ID NO: 653320 - DNA, 338 bp, Homo sapiens
  misc_feature (33)..(33): n is a, c, g, or t
actaaatggctgtatgtgtgatatggactgtgncaccataaatgttaggccctaactcttgaagggagtgcctgtgaagctgcaagacaggcacaggggtctagtcccttaggcaaccagacatgaaaacatattcatggcaaggggtgaaataagtgtgttagtatagaagtgagaaaagaacctgcattttgagggaactcaagcttttcacattgctacagcatagggcatgattgtaggatgagaaaaggaaaggcttgccttgagcagctggactttatacttgttgggctgaaggagcaaatggaaaattgtgaaagggaaaagggtaccga

SEQ ID NO: 653321 - DNA, 105 bp, Homo sapiens
taattcgtgtcacgtagtgtagtctctttcttttgtttcccaggtgttgggtgggtacttattttaacaaaaacttgtaacaattgtgtccaaaaaaaacaattt

SEQ ID NO: 653322 - DNA, 318 bp, Homo sapiens
ggtcgactgcaatggaatggaatggaatgcaatggaatggagtggaatggaataaacaccagtggaatggaatggaatggaatggaatggaatggaatggaatggaatggaatggaatggaaaggacaggaatggaatggaaaggaatggaatggaatggaatggaatggaatttaatggaatggaatggaatggaatcaacgcgagtggagtcgaatggaattgaaagaaaattaatagaatggaatggaatggaatgcaatggaatgcaatggaatggaatacaatgaacccgagtggaatggaatggaagggaaa

SEQ ID NO: 653323 - DNA, 141 bp, Homo sapiens
tacccggccatctctagtcagcagtatcatccatggatctgtaattcttaagtaaaaggaatgaaatggtttgtcagatcttgactttgaagtcagaccattccacaggctcagatgcccctcttgctctgtcgtccagat

SEQ ID NO: 653324 - DNA, 1088 bp, Homo sapiens
  misc_feature (397)..(397): n is a, c, g, or t
  misc_feature (650)..(650): n is a, c, g, or t
aaaagtttactcccacatggattctcacaagacatattacaaatgacagcgctgaaaataggtagtcttggagcgatatgtcaaagtttcggctctacacttgtacccgttatatctggcagtgaggattatttgaaaatcacagaattatgcaccataatagaagtgtcacagaatcaggccactgtacttccatactactggacaatacaatataacggacactgtcatgcaccttcaaggcggtgcgtgtacaacttatctttgacaacattcacatatcatatactcagactagtgcaacacatctgacccagagactgagcatgttcggatttctatcaccaaagccgtctatatattacatatgtagcacgcatcttacgtattatcccantgcatgtgaccatgttgatattccaccatgcagatatattacaggagcacatgcatatagttctaacgtcataagcgtgctaggccgtcatagtccccagggtcattggtaacaataagaaaggtaacatcctatcagtatccacatactttgtgcgccagatatgatcttcgttgtaatattgacacatcttagaaaacgcacacatactacacctatacctgtttgagcgacacggatatctaggaggtgntcttagtaaaatacaagcgtcatagatgacacataaacgtcaagacacgatatccaagatggcacaaggttacaaacttatatgcaattagaaggcgaaaccattagataagaggctagaccacgtactttgggtacattagcagtgtcctcgatatgtatcccttaacaagacccatacgagcaattacacctttcgtagaaccacggatgcatagagacaagccgatttcacaaaggtaaaaccacctaaaaaaagaaccaagcgtaaaaggcccacacacaaactaggacaatctgacgacaccccggcccatagagacgaccgtgaccccgctcactaggcacagctcaaacccgacaatacccaaaagcaacccccacacacgcgagcacgcgcaaaatacaacgaaagccaacgcgccccagcagcgggcgc

SEQ ID NO: 653325 - DNA, 278 bp, Homo sapiens
acgcgcacgcgcgttcaaagttaagaacgggaagaatgggtggcacggtggctcctggaagagctcacccagcacagtctgccctgagctcggagccttggtttctagtccctggggcagatttatatttaactaaatttttactataaatacacagacgaaatagaacaatataaaatcgtgaggggttgggagaagaaactgtgaggaactcagcatggaagccagagcttggagaggtccattcacggccaacttgaccttcctccttgaccccc

SEQ ID NO: 653326 - DNA, 602 bp, Homo sapiens
tgcgtgagtgagaactgaaataaccattcactatttaagtggacatattcatgaatagaggatacatgtatccatggacaaaactgggttcagaagcagtggtaattaccatcaatactatgggatgccttttggaacttaaggatgggatacaggatgaccatgaaagctgtggttctaattctaacaaccgtagtactgctgagagcccaaatcatcaatcaaaacgcggaggaaatagcagcagggtggtcctacagattctgacttaacacccaggttatgtgccgagtctgattagacgagttgtaaataatgtgtaaccttgtgataaataatctcatactaaaatatgttgaagatgatatacgtcctttccgtcaatatacacttctgcagaatgttatacagtaggtgaataatgggatcgtgcattcatggatatttctgcaactgatttggtgctgagaaaggttatcaatttttctgactgtacagtttgtcttgataaacggaatgccagtggtaaaatagaattttaccaggatcctttattatacaaatgttccttcagaactcgtcttcattttacatatgaaaac

SEQ ID NO: 653327 - DNA, 1388 bp, Homo sapiens
ggacgcgctgggtcgacccacgcgtcacgggacgcgtgggtttcctaacactcacaacaaaactaactaatactaacatctcagacgctcaggaccatcgaacccgtctgaccatatccgtgcccgacaatcatcctagtcctcatcgcccatcccatccctacgcatcgctttacataacagacgaggtcaacgatccctcccgttaccagtcaaatcacatgggccaccacatggtactgacacatacgagtacaccgagatacggcggaccataaatcttacaactccatacatacttgccgaccataataccgtagaaccaggcgaactgagacatcatagaacggtatgaacaatacgagatagatactacacgaatgagaagcgacaacgtacgataataataatgaacagtcaacgaagcaagatcttgacaactcaatgacgctggacacacaccaacatacaagacgcatataacaacaccaggagttgcaaagtataccaccgcggaacccacatcaacaccccacaacacacaccattatcagaccagagtaacacacgcagccgacacgagatactacgacaagcgggacccaaacagccaccagcaacatgtccatagtggggacaacgacacagacagcaacacaaagcgatatagcaattggcccccaaggtacggatcccagtaaggacaccgtcttcaaagtaaccacccactttaaacaaagttgcatttgcgaaaaacatataagagcgagcacaccggagaatagaaacacaccgtccgtacgccaaccccacgaccatccgaaagacacacgcgtacataaacaagaccacaacagcagatcaccgaccggacgcaaaaagacaaaaaaaaacaagagaaaataaaaagaaagaaataccacaaaacaaacaacggagacgacagaagccgacactcgcaagacacaaaaccacaccgcagtcaaggggaggacacaaacacagaacagcaggcagactacaacagacagagagaaatgtgaaagcacaccagaacgtcctccccaacaaaaacgaggagaacggagcacacgcaaacaccgacaccagacacgacggacacccagcccgatagtaaaagaactacggtccgaggacgtgagggcaaaccagacgaaatacagacgtggcccataaatgtcgacacgacgaactaattcttacattgaggaagtgacaaaaagttagtgaaaacatgtcattaagcagctactaagagcccaccgcaacagataaaacacagtagggatatagggtgaagaagaaaggaagagagaaggcacacaaaagcacagaacgaaaagcagaacttagcgagaaagcaatgg

SEQ ID NO: 653328 - DNA, 264 bp, Homo sapiens
gtcgactgttaatgttcagtgtcacagaaaacataaccaaacaactcccttcatacactgctggtaaatacacaagttagcatcatctttacggacagaaaaatgcatacacaaaatctaaaaataattgttttttactccttctcctagcaattgtactcaaataattatgaggatttttcagccggcattttttaatgatagtggataattgaaaaacatctcaaaatccaaaatatatggattaaataaagtgcgtcgacg

SEQ ID NO: 653329 - DNA, 232 bp, Homo sapiens
ctgaggatccctctcataccgatcaggtaagtgtggtggggtgagactcacggatttcagataaggccgctacggcattagccaccaccatgggattggaatctgctatgagatcccgtagagaatccagaaatcccggatcttccaccattggggcatggatatcatggagtttggccacgcagacggcggcggttttccgaacatagggatcctcatcggggtaccgagc

SEQ ID NO: 653330 - DNA, 217 bp, Homo sapiens
ctacgagcgcattatgctgtgtagttaacacttctgtagcaaagatggtggtagatatcttttagttactagaagttgcccttcaccatggctatttgaaaaggagatgtacttggacgtatcagtaaatcttgagataaactgtttggagatttaacctcctctctgatgggggaccaactctatggagattgtaaatacgttttatttataaacc

SEQ ID NO: 653331 - DNA, 108 bp, Homo sapiens
ctacactgaaagaacttagtgacttctaattctattcttatacaaatgttacataaatgtagtaagtttatagcacaatatcacatctgcaacaataacaaattgaac

SEQ ID NO: 653332 - DNA, 768 bp, Homo sapiens
  misc_feature (469)..(469): n is a, c, g, or t
acccgagaccccgttgagcaccagccctagtcccccgcgcggcccttattcgctccgacaagatgaaagaaacaatcatgaaccaggaaaaagtcgccaatactgcaggcacaagtgcgcattggtgtggaaaggaactgctcgccagaaagaagaaggtggttctatagaagctagccacgagcgaggatgacaacataataacttcagattctccttaaagaagttaggggtaacacaatcatctctggtcatcgaaagaggtgaatatgtttgacaaagccaaggcaacgagtgatccactttaactaaccctctaagttcaggcatctctggcagcgaacactttcaccattgacaggccatgctgagacaacagcaggctgacagaaatgctacccagcatcttaaaccagcttggtgcggatagtctgactagtttaaggagactggccgagctctttgccanacatctgtggattggaagagccccactggctactggacaggatgatgatatgaagttcccagatcttgtggcgcattttgatgaggccttcccagaatgaggcgcactgggattgagtccacttctggagattaacctggagaagttctgggagctgctattttatattatggctgccttttcacaacctttcgttctggtctcgctcctctgatttctatatttttagcccagcctgtgcctgggtctctcagtttgcttcccctcttcttgcggattcccgaaccggtccgttgccc

SEQ ID NO: 653333 - DNA, 865 bp, Homo sapiens
ggctatcccagtggattcaagcaagatgccaggaacactggcatagttttctattctccccatatccccactaacacacccgggaaacacacaacacacacacacacacacacacacacacacagttaatatagaaaaacacagtaaatatccaaaataaaactaaattcacaagttctcccacaaaatctcaaatatatccagcgtgtgtggggggaagtgcccaccatcaccaaccaagaccaatgtgaaatccaccaatcgtgtacaagagaagtaaaacggaagcaacagagctgtgtgatggccccatgacctcgcaaaatcaccaggaacgctcagtggcaccagcaggacagcagcagctgggctgtggcacagagttttcatcttctccatagtgggcaagtgtgtgaagtccatgcatgaaggaggacagggctgatgcgggctatgaactctcaaaaccccatgctagggagaacctatgggaaatagaatccaaagtgagcaggacaacgagcagggactacacactataagattcacgttaagcagtatctgacggggcacgcagatacaggtcttaccactccacaaacacagaacgagggagaggctaacagtcacgctactccaactcacgtctttctcttctaacaagccccgcgacaggcactctcatgtaaccacggagtcacacgccagataatctcggggtagtatcccataaaagagtagttattaacacacacagaggctgagtgccacggctcacaccgtgtaatcccacgcattgtgcgaggctggctgcaatgtgcacttgcttgaagttcagggcgttcaagactcgctgggtcaccag

SEQ ID NO: 653334 - DNA, 377 bp, Homo sapiens
  misc_feature (16)..(16): n is a, c, g, or t
  misc_feature (21)..(21): n is a, c, g, or t
  misc_feature (29)..(29): n is a, c, g, or t
  misc_feature (32)..(34): n is a, c, g, or t
  misc_feature (36)..(36): n is a, c, g, or t
  misc_feature (41)..(41): n is a, c, g, or t
  misc_feature (56)..(58): n is a, c, g, or t
  misc_feature (60)..(61): n is a, c, g, or t
  misc_feature (63)..(64): n is a, c, g, or t
  misc_feature (73)..(73): n is a, c, g, or t
  misc_feature (75)..(76): n is a, c, g, or t
  misc_feature (81)..(82): n is a, c, g, or t
  misc_feature (95)..(95): n is a, c, g, or t
  misc_feature (102)..(103): n is a, c, g, or t
  misc_feature (105)..(106): n is a, c, g, or t
  misc_feature (108)..(108): n is a, c, g, or t
  misc_feature (110)..(110): n is a, c, g, or t
  misc_feature (112)..(114): n is a, c, g, or t
  misc_feature (117)..(118): n is a, c, g, or t
tctgtatttgaccttntaatngcatgggnagnnntnaatanatggagaaagcaccnnncnnannctacactancnngaaannattccatcaagcntttacanngnnantntnnntanntacacaaagattcttgatcttacttgaagtatacatgagggaaagagccccctcagcaggtgttcccgttgcttacagaagcaaactaaaggacctaaaactggaggcaagccaggatgccaaaaagggggaagagaaatgataaagaaccattcataaattccatgtctacttcaagacatttgtctaatgacccttacataataagtattttagggaaaactaccacccttttaagataaaagcacaatcttaaaag

SEQ ID NO: 653335 - DNA, 509 bp, Homo sapiens
gcccgtcaggagaattctgaaaggctcaatatacaggaattcagagtaaaagcctcttatgtcttatttcgggaacaatggtgtattgtaacctagctttttcacatttttatttttagagatggagtttcactcgatcaccctaggctggagtgcaatggcgcagatagtcggctcactgacaacctcgagccacctggagtttaagatgattctcctcgcttcagcgttcccaacgtagctgggtattacagtgcacccaccacctatgcccagaccaattttttatgtatttttacgtagagacggggtttcaccatgttggccaggctggtcttgaactcttgacctcaagtgattcccccatcttggcctccccgagtgctgggattacaagtcatgagccactgcgcccggccacaaccaattttttctttgtttttctccactcccactgtttcacttgactagccttaaaaataacaatcaaaaacaaataatcttttaag

SEQ ID NO: 653336 - DNA, 164 bp, Homo sapiens
  misc_feature (74)..(74): n is a, c, g, or t
ttctgcggtcgacctctgacggactcccccgatgcgcctacgacgccttccgtaacgagcgcctccgtaacgangccgcctccgtaacgagcgctccagtctggtgcagacagggcgtgttaggagggtgttacggaggcgtcgttactgaggcgctcgttacg

SEQ ID NO: 653337 - DNA, 221 bp, Homo sapiens
ccacttcagagtagctggaggctgtgtcgttccttttcaaaattcttttttctctcaatctgtcttctcactttatttcattaagttgatcttcaatctctgatatcctttcttccgcttgatcagttcagctgttaatacttgtgtatgcttcatgaagttctcataccgtgtttttcagctccatcaggtcatttatattcttctctaaactggttatt

SEQ ID NO: 653338 - DNA, 282 bp, Homo sapiens
tttgtggcacgctgctccatctgcagtggagctgggccagcttgctcctccacgctgccaatcatctccttggatctagggcctgttgcattgcagtagcgagctttggcctcctccaggctgttctccatggcatgctttcatgctgatgctggtgactgcagctcaatctccaggtgctgcatgcagaaccgacctttggtctcctccaggctgtactccagtgatgctttcatgctgagcgtgggactgcagctcaatctccaggtgtaccgagctcga

SEQ ID NO: 653339 - DNA, 755 bp, Homo sapiens
tcctactcctcattggtagccatctctagtcggaatggcgtgcctagtgcttagcgaacgaggaacttctaggctatatacgactacgtcaaaggtcccaatggtagtaggtgcctacggggtactagaacccttcgctgacgccatgaaactcttcaccaaagagcccctaggacccgacgacatctagcgatcacccgtcctgacgatcacacgccccgaccctgttagggtctcaccgagtcgctgcgttctacctagtgaacccagccgtgggcccatactggcgaaatccctgggggtaagacttctctaatcgtgaggcgcctactaatactagttgtagtgcccacgtgaagaactagagcggttgtgagtctatcgtccgtcgtggattgcagggctgactagttaccacattcggacaagtacgcgccgtgcaatcgagccagcaaaatggacgaaggcagatgatccccaggaggcaaggcatggcgatctgtgggtcacgccggagcccattcattcatactatcaaaatattcgtaactgaagctggtgtcccttgtgagacgcttctttgcagacgctctgagtcgagcaccaaagaagcagacatttgtcctgtatttagctccctggtgcgattcatgcacgctcttgctggcgattacaatatgatggtagtcttcgccactgtttatgagtactacccaaccgatagccgctgcgtacaggtggaaacggaacccgaa

SEQ ID NO: 653340 - DNA, 462 bp, Homo sapiens
tgtgctcaggtctggatcagtggcctgatatattctacagaactctccacctgaaaacaagagaatgtacattcttctcagcgccacatggcacttactctaaaattgatcacataattgaaagtaaaacactcctcagcaaatgcaaaagagctgaattcataacagtctctcagaccacagcacaaatcatattagaactcaagattaagaaactcactcaaaaccacacaactacatggaaattgaacaacctgctcctgaatgactcctgggtaaataatgaaattaaggcagaaatcaagaagttctttgaaaccaatgagaacaaagagacaatgtaccagaatctctgggacatggctaaagcagtgttaagagggaaatttatagcactaaatgcctacatcaaaaagctagaaagatctcaaattgataccctaacatcatgactaaaagacc

SEQ ID NO: 653341 - DNA, 612 bp, Homo sapiens
ggagacctcatccacctggccagctcagacgtgcgggcaccacagcgctcagagctgggagccgagtcaccatcgcggatggtggcgtcccagtgcctacaacctgacctctgccctcactgcccatccatcactgctgctccctgcgtgctcaactgacgtgagcccctgaactgctggctgtggtgagtgagatctgttggcccatgtggcaatgctgctctgtgacccgctggagccgtgcatggtagcatatagtgcatgtgacgcccgcatgtggaccttgtgctagccacattctccgatccccttagggctttcatgcagtggcccctggccaaaccgtcagttgatgttggttgcatgcgtcatcgttatactgggatggacctcacaaatcccatttcgccttatgcggctagtatcacggcgaacgtacaacgcggttcatcacaacccaagggttgtgccctccggatagggcgggttcacatggaacacgagggccggggcaggcccaaagaagtaccccaatacgaagcggggactgggccttcaagaagctggcgcctccaaccggtgaaagggatgccccaaacaacttccgggaag

SEQ ID NO: 653342 - DNA, 372 bp, Homo sapiens
aacttgatgcctccccccgaccctagaggaaccccgccgcttatcgaagccattgttctgctcttcagcctgggcaccaaagaaagactctacctataaaaaaaaaaaaaagcctcccgcgcttttctgaaaaagagccccctcaggggcaattaccaatttacccgcctggaattaggaacccttaaagaaccactagaattgcctacccatggccagggctccctatatatggcacaaattcatacactcaaaacaggttacttcatactctggtcctttaaaaaaaaaagggagagatttggaagattgttttattttgggaactccactgtttgctttttcctaaagcttcacaaagcatatacttag

SEQ ID NO: 653343 - DNA, 145 bp, Homo sapiens
cgggctggggaagagggggcttacaaaggggctacactgaatattacgatgcagaaaaggcgaattgatacgaagcctgtccatcagcctgtctttccctcttccccagccagccctcttccccacgcccagggtacccgagctc

SEQ ID NO: 653344 - DNA, 188 bp, Homo sapiens
taggacagactgttgcagcggctgtgtagcacgacgtctgttgctcctcagggccactagccaggctagccgatttctgggactgttgtcgctccggctgccactcttccgggctctgctagctccctgcgaagcaggatggccgcgaccgcgcgcaccgcgtgcttggagctggcgatgctgctcag

SEQ ID NO: 653345 - DNA, 331 bp, Homo sapiens
agtttttttttcctttttaatttcattattttggggttttggtttttgcagtcccatttatttgcagtggtattaagtcctattgctagaataggtttctccaaaaaaggttatattttgaaagaaaaataactgcccttaaataaaacccctttatttaaaggtttgcccctttaaattcccccctgagggcatgtcctatgcagccatagatttttttgttcatttattttttttccttccagggggttgatttgataaaaaaatgggttgaattaccccctttgctggccatattatttaataaactttattcaaaattggggggcca

SEQ ID NO: 653346 - DNA, 610 bp, Homo sapiens
gagccactagacgctccaccaccatcttttgcatgtgcaacatttgcagccggacagaaaacctctcccagggctatggagactgcgggaaaaatctggcggctcgcgatggattgctaaggagaactagtcataatcttaaaccaccgaaacctctttccttttttttctttcttttctttcttttcttttttttttttattttgggggtgtgagatttatacatttataggcgcgcccatcggtctctcaaggcgttctctgaacagcctttaggaacgagtgcgagagaaagagagagagcgcgcgccagggagaggagaacaagaagatgaggattatttccagacagatggtctggtaattttcgggatttgggggactcgccaggggagcctttccgagcagcgtgcaaatagggggtctcttcatccgaaacacagatcgggaatacacgggtttccgattagacaatttttcttcataacaccagccccaaggggtcggaagctcctttaaattggggtacctctggtgggaccactttgagacagccaacaagtttggcggtaacaaacgccttcggtcccagtattctagaggagtatag

SEQ ID NO: 653347 - DNA, 1055 bp, Homo sapiens
ggtatcccctttatgtcctttctctatgggtcctttctgttctcctcctctgctttgcctgctcggggccagcgcctgcttttgtgcagcttccatttgttgggttgtcatctgttacgctacttggggcgcgggacgctcttggctcttgttcccccccggggcttctgttgcttgcgaatattttacgctgtggtgcttttcgagccattccttttctccccagaggggggctattcctcccggtgttttttccaagagttcattatttgtttcatgttgtcttctccattgttgcgttatttactcctaattcgttccagaggttccctttcggtaggctaatatgttggtttcaaattgttgccctcatgtgctcaagtgatcccttcactttgaacgcaagggtctctgcaatgcccttctgggtttggcatttggaaatggcttccatctgcaattacgcagcgaaggtcttggcctgttggtcgggccaccttgctactagctagtgtacaaggctgttcagtgtatgcacggctgcctttggtcgattccggtcatcgctgatgggaggaatccgaaatgtgggtcatattgcgaaagccttggcccttggggcactccacagtcatgatgggctcgtctaccgtggcatgccaccactgtaggcccctggtgcaatacgttcttttcacgatgggatctcggctagaagagaatatcgcggtatgggttctctctgatgccatggacaatgcacctcagcagccaggacagatatttcaagtgaagctgacaaaatcaaagtggcccagggagtgtctggtgctgtgcaggacaaagggtcaatccacaaatttgtcccattacctgattgctggcatccaacactcatgccaggaacaattgggtagcaccaagaggcttgacccaagtccgagccatgatgtactctggggagctttagtttgagaaggagaacgtcctcagcccaggtggaaggtggcgtccatagcctccattcgtatacgacgcgggtttctgtaaaaagg

SEQ ID NO: 653348 - DNA, 276 bp, Homo sapiens
  misc_feature (3)..(3): n is a, c, g, or t
acnctcaagtatcgcccacctcagcttcccaaagtgctgggattacatgcgtgaaccaccatgccctgccagcaggtagcttcttgatggccagggtggtgtcttcacctggaatgggctggaaccttggtggcatgatcatctgaagcttgatggtttctaggcgagagggcaatgcaattgggttcaaacagcatttcaatgggcaacttcagaggtggatcactcatgctgtcaggaagcagacccgcatgcgggtctcttcctggggtaccg

SEQ ID NO: 653349 - DNA, 347 bp, Homo sapiens
gctgttccccgtcgtggtgtggcgaatcgtgtagtgcacagcacctcgtggaaggccaatactactgctaccactgttttctcgacttccacttcctccactacttccactgtgattggctgtctccatagttttgatgttaccagaatggcattattgcatgtagccttttcagattgacttttttttcacttagtaaagtgcatttaggtttcctccaagttttttcatggtttgatagctcattgtttttagcactaatattccattgtctggatttccactgtttatttacccattcacctattaaggaacttgttggttgctttcaacttctttcaactata

SEQ ID NO: 653350 - DNA, 929 bp, Homo sapiens
tttatggtgggcgcgtcggaggccccactccagatttcaggacaactctagcttacttcctacctcattcccggcttccctcctccttccctgcagcctggttaattggatacctgcctcgtgtagcatgtgagcgtcaagctaaggcctggcagggtctgagtgggataccgatggtccccacggcgcaccaagattcgtcagcacgaagcagccaaacagcccctagggccttcgccccggtgttagaacagtagttgtatctcggatgacgcttctcgtctggcgcccacatgcccttctcgagccctgagtacttggattgcgcggcaatcgttatcgctagtccccttcttgcggtttcctgggcagccccgatgtatcctctctcacaccggattccccaaagtattgcttcggcgagcgtgctcgaatcgtggacgcgcgcgattgcaaagcgagacctcatgtctcagatatacccaagaacatagctttcccaagctgtccccaatcctagagatcgcattcctcactcaattgctgggcctagccaaagaaatgggaaaaggggcgtccacatacgggcgcaaccgcaagtcttcttaggccttggaagcgtgcgcgaagggcacccaacgtgtgttgggaagcgggtagggggcttaggcccatgggagttttccttactcctcgtttgcaagactaacaaatgaactaagttcactgatgaaagacctgaaacttctagacctacaaagggagagcaaagggaccccctggaatgtaaatgacttgtgtcctaacccttgaaatgagccgtaaagagccccatggacatacaggtggaataaccggttaaattgcccaaaagacttatggtagccaaggcccaaatgaaaggatagtataacaacacttggctgcaa

SEQ ID NO: 653351 - DNA, 408 bp, Homo sapiens
gtacgactatatatgatcctcggctgactacggcggaagggtgggagggggacaaggataaaaagctacaaatagggtgcagtgcgtactgctcgggtgatgggagcaccaaaatctcacaaatcaccactaaagagcttacccatgtaaccaagtaaccaaacaccacctgtaccccagtaacttacggaaaaataaaagaggaagacgcagctctgccttctctgcacaccctggtaatactaagaaaaatgaaaaccaaaaaaaaggaggccaagtttgacatcctgaaatttaacaggacgaggcggctaagaattcagccacaaaatagttcccggtgaagaagccgcgtttgctttgaaacgcggtaagaaatgcccccgaacacctgggcttaaattacac

SEQ ID NO: 653352 - DNA, 87 bp, Homo sapiens
cggcacgaggctagaaatcgctgtcgccttaatccaagcctacgttttcacacttttagtaagcctctacctgcacgactacactta

SEQ ID NO: 653353 - DNA, 200 bp, Homo sapiens
ataggatccccgtactgttaagtcagagagagaccacctagtgctcagtgtagcccagtgatgccctatgagggggccctctgacgccgtgctatcaccaccttacttgatagtcatcatatattggcaggtaatttctatgacggcaggtcaggtccaccactgacacgtatggcatgtggggacacggaaggccatgc

SEQ ID NO: 653354 - DNA, 326 bp, Homo sapiens
  misc_feature (241)..(241): n is a, c, g, or t
  misc_feature (302)..(302): n is a, c, g, or t
  misc_feature (315)..(315): n is a, c, g, or t
ctatcattgcctttcttcacagaactagaaaaatctactttacattttatatggaacgaaagaagagcccacatagccaagaaaatctaagcaaaaagaacaaaaagttcataatcactgggacattggagaaatgcaaatcaaagtcccaatgaggtaccatctcatgccagttaggaatgggtgatcatttaaaaagtcagggaaacaacagatgctgggaggaagatgtgggaggaantagggattgctttttacactgttagtggggagtgttaaatttgttccaaccattttggggnggcatgttgctgnttcctccaggg

SEQ ID NO: 653355 - DNA, 380 bp, Homo sapiens
aagcgcatgtgacagcaatgaggcagaaacttgtgagggtgcatagagactaggagaggccttacctgagtaagagatacagaagcggaaggagaggatctcacgcacagtaggctatgtacactcaacccatgctgcaaaaaccactctagactcttggaactcctgggacttgtacatacacagctcactcagacggctaaggaaagacagactcccaaaagatcaaactagctaaaagaagcccctctgccatcaccaggaagaatggacccgtgttggtggaatctggaggtatatatactgcagccctgtgccttgggcatcacctggagatgctgtgtagtgctgtcgtgggcgtctaaatttcttgaggccac

SEQ ID NO: 653356 - DNA, 124 bp, Homo sapiens
tgccaggttctctacctacctccatccattcactcctcctccaggaagtcttcccgggaaacaccagggacacaggctaccctaagttagacggccgcagccatcattggtgcttctggctctg

SEQ ID NO: 653357 - DNA, 758 bp, Homo sapiens
gcccaggtggagtgcagtgagccgagatcgcaccattgcactccagtctgggcaacagagtgagattccgtctcacaaaaaaaaaaggaaaagggaaaagaaaaataggcattaattaccttctttccttggttcttcaaccggccattgaaactttctgaacacttccaaattctcaggtggaattaattccaaacacaaaactttataaggtattacaaataatttttactccctttattagtaattaggtattacttttaacaaccgcctcagggggtatattaatcgtctcttaaacagcttacacatttcagggtgcagcttacattttaacccacacttaatgctccctctagttggagaaacaacttaggccatatttctcactgtgctgtgttgttagccctcaaggggccttaacaatgtggggtgccgaaataaccttattccggtagacatttacaccgtgaatttggtccaaacccaatacgttcttggatctctaccaattgggccaaaaatttcttcaccagggcctcgtgttactcccactgtaacctccctctgggacatctctgctccactttcattcttggaactctcctcacgctatatgcgaccgggctgggctgttgacctccagttacctgtagggctccctcagcctattttatacaacacgcctcacaacttttggcactcgatttcccgcaactttccttccccttttctccacgctactttttttccccttc

SEQ ID NO: 653358 - DNA, 452 bp, Homo sapiens
  misc_feature (29)..(29): n is a, c, g, or t
  misc_feature (69)..(69): n is a, c, g, or t
  misc_feature (95)..(95): n is a, c, g, or t
  misc_feature (416)..(416): n is a, c, g, or t
  misc_feature (418)..(419): n is a, c, g, or t
  misc_feature (421)..(421): n is a, c, g, or t
  misc_feature (423)..(423): n is a, c, g, or t
  misc_feature (425)..(425): n is a, c, g, or t
ctccttttggtgctaagctggctagtttntgggccgctgggtccagctccaagcgggcgggctcttgtnttctggtccccaggttggctggtctntgggttcctttttccgggctcttggtggggtggactttggtcctgggctccaggctaggccaggggccttcagggctgcagcgggtggctgccttcttggctgggcttctggggtggtggggccttctcagggcaggggccagggctggggttgggactggttttagagagagagttaacgtcggcagagcgggattggcaggcccagcagaggataacccagagcagcagcagcaagaagcccacgagaccgttgcagacgatggcgatgagggccccctgggagatggctgcccccatgacaggcagcaccctcaaaanannanananagtggagctgcctcaatggtgaggccc

SEQ ID NO: 653359 - DNA, 1027 bp, Homo sapiens
ggtgatgaggcagacccagcagattggaccatgattccttctgtgtcctttttacgccttcttggcatggtacgaataagtggttcaaaacctggcatgttctctggatttcgccaatgatccccttgtaacgatctgcgtgcctttatgtcctgccttggtggtggaatgcaagttttcgatgcctttctatgtctggctagtcttgttcgtcacgcatgtcctttgctctgtactacctggagagagttcctgtgcttactcgtttggaccatcgtcaaattgtagaacgcgtaaatctagtgtgccatgacagaaagcatgtcctggcttaggcgttccagcataggcaatagcctctccgtgtccacagctagggagccaacgaggagcacatgccgtccatggtgatgtgaccatcgcagtctacagttgccacgctcaccgtctgccccttgatgagtctgtggagacctggctctcagcaacggggcctatccttgagcctactggcgtccatgatgaatgctgaatgggccatcacttatgctgggtacacacttctctttacgagtctatctgctaacggcaatccttgggcacagcgtcggaggtctttacccagtggccccaggctaactctgtctcttgtttccactggagctattcggactactcttacacaagggagtatgatcttatttgaatcttctgcacagccgcgtagatacaagtcccatgtttgagtaaaacgggtttatatgcgttcctgaattacaaggagctcctcgtggaacgctcgtgtaaatatgtgtattattaattccactgtataagttgagatgtacacgtcattacctgtccccggcagcctgtgctctcgtgtatagggccataatgggattctgaagaaatctcgggagagggaaggggagttggaacaaaggtctgttacctggaggccagtccagtgctcagacctttagactcattgtaagttgccacataaccacagggaccaaagtgt

SEQ ID NO: 653360 - DNA, 291 bp, Homo sapiens
tccccttccaaattccggctgcccttcacagtcagtcatgtgatcatgtactcttgagcactgtttggcaggcctgagggtcgtacccttatcttccactgcctgtgtcagtgccgagcactttctagcaggagcttaatcagtgtttgttgaactctagatctgtggtcacgaacaagtcatggacgctgcaaaggctcctgccctttcaagagcagctgagatgaggccagccaagccctgggtggagggggccaagaccagcccagggcagcacaaaggggttgggtt

SEQ ID NO: 653361 - DNA, 465 bp, Homo sapiens
  misc_feature (12)..(12): n is a, c, g, or t
cagccccttacnaaaggtcagctagccccttgaggacatcagctttggcctcagggtcctaatggccagcagaacccactgacagagcttagaggagtcccattgagaccgtggtcaccaccttcttcacctttgcaaggcaggagggccggaaggatagcctcagcgtcaacgagttcaaagagctggttacccagcagttgccccatctgctcaaggatgtgggctctcttgatgagaagatgaagagcttggatgtgaatcaggactcggagctcaagttcaatgagtactggagattgattggggagctggccaaggaaatcaggaagaagaaagacctgaagatcaggaagaagtaaagccgcctggctgagatggggtgggcagggcagagctgatcagggccgagcagaaccgcactcttcccaaataaagcttcctccttgaaacacaaatgttttc

SEQ ID NO: 653362 - DNA, 459 bp, Homo sapiens
caggcagagcagcccagttagccagcaacggatcaggccgaggcaaatggagcaaccgcggggaaaaattccagacccgaccggcaaaccgagaggaacacgggccccatgcaagcaaaaccagcagcagggcaggctgaagcaggacaaaggcccgaaccatcgaggcggagaaggcagcgagcagaggacgcaccacggggccgaagccggagcgagacgagagaaccccactgaccgcgaagcaagggacaccgcgagagcggcacagactgaagagaaaaacccaaccgcccaattcagacgagcaggcggtaaccaacatggggcaacgccgagaaagcccccagaagaacgatgagaaacgcgctctaggaccccggaacgataaccgggcgaatcagaccgcccagaacccgactagaccccaaggggacgacagcgccccctccggggccc

SEQ ID NO: 653363 - DNA, 140 bp, Homo sapiens
aggatcctctgaggtggagtaattaggcgtagtagaagtagaggttacggagggtgatggtggctatgatggtgggtgttctgtcagcgttaggaaaaaatgacagtttaggtgtaaggaagatctcataatgagttttt

SEQ ID NO: 653364 - DNA, 216 bp, Homo sapiens
  misc_feature (137)..(137): n is a, c, g, or t
  misc_feature (151)..(151): n is a, c, g, or t
  misc_feature (180)..(180): n is a, c, g, or t
cggccgagctcgaattcgccgagatgtggtgctgagccgggtgccggagcaggaggaggaccggacagtgagcttgcagaatgccgcagccatctatgacctcctgagcatcacgttgggcagaagttctcgtccgncgtgctctcggagngcctggagcgagccatgatttttgttttnggagaatttcacctttggtaccaggtggccctctcc

SEQ ID NO: 653365 - DNA, 336 bp, Homo sapiens
tcgacggtaccaacatggtgaaaccccatctctactagaaatacaaaaaattagctgggcgtggtagtgcgcgcctgtaattccagctactggggaggctgaggtaggagaatcgcttgaatccaggaggcggaggttgccgtggagccgagatcacgccattgcactccagcccgggagattaagcaagagtctgtgttaaaaaacaaacaaacaagcaaaatacaaaatgtactgtatattggttaaagatatacgtaataaaggccgggcgcggcggctcacgccctgtaatccccagcaccgttgggggaaggccgaaggcgaggtggatca

SEQ ID NO: 653366 - DNA, 263 bp, Homo sapiens
cgactctgaggatcccgacaggctgcttcagcgcagccacagtaaaaccaatgacatcacgaactcacagctagcagttttgggtgggaacatataagctatttgtaaaacacaacattttcatcccacccttaacctgactcctttttttttttggagacagattctccttctggcccaggttgaactgcaggggcgtaatctcggctaattgaaagctccgcctcctgggtacacgcaattctcctgcctcagcctcccga

SEQ ID NO: 653367 - DNA, 617 bp, Homo sapiens
  misc_feature (21)..(21): n is a, c, g, or t
  misc_feature (102)..(102): n is a, c, g, or t
  misc_feature (115)..(115): n is a, c, g, or t
  misc_feature (122)..(122): n is a, c, g, or t
  misc_feature (135)..(135): n is a, c, g, or t
  misc_feature (138)..(138): n is a, c, g, or t
  misc_feature (144)..(145): n is a, c, g, or t
  misc_feature (179)..(179): n is a, c, g, or t
  misc_feature (230)..(230): n is a, c, g, or t
  misc_feature (250)..(250): n is a, c, g, or t
  misc_feature (254)..(254): n is a, c, g, or t
  misc_feature (275)..(275): n is a, c, g, or t
  misc_feature (284)..(284): n is a, c, g, or t
  misc_feature (286)..(286): n is a, c, g, or t
  misc_feature (325)..(325): n is a, c, g, or t
  misc_feature (328)..(328): n is a, c, g, or t
  misc_feature (444)..(444): n is a, c, g, or t
  misc_feature (556)..(556): n is a, c, g, or t
  misc_feature (607)..(607): n is a, c, g, or t
ttgttgccacttctccatggntcctgttttggggggctccaaacaagtgcagagaagctgccttttttttcccttccttttcagtttttgttgctgcctttnaaaatcaacttcntgaagtnacagtttttttancantttttnnttttttttccaggtgatttacctatttgctttcnaagaattgctcttccctaggctgcttttggtgttttgttcagttggttaanagataaaagctttcagttcntttnatttggtaacaggttcttttnttctttttntnttgctcaaaaaaaaaaagttattatcctaactcacaatntcnttactgagcaggaacctcctgtgacaggtgactaaagagaggcaagaaaagcaaattcagaattgtagagcagctcctaagagctgaaatttggtaacagagggaaaatgaaaggnggtaagatttccattagcaaatgattaaatcttaattaaatgagtattggaaagctcctagactgcataagctattgggagacacttaaaacattcatatacactggggaancattcactatgatatgtaacgttaagaaaaaaatttttttttttccatggnaaatggggtt

SEQ ID NO: 653368 - DNA, 972 bp, Homo sapiens
accacacggaatgttttttttgttggaggaagagggaggaggggcttataccagacgctcataagcaattttgagtgagtgaagagccatgcccagcaacagaggggagcctgcccacttggagcaaaaggagccggacaccagattcacccacggcgcgatcccggtgacggaggcagtgtgagcaggcaggcgggtggcactctggggaagggagaaggattgaaggtgaaaggggcacaaatggcctccagggtaacagtcctattagtgcctctttttctggggggggggaacttcttatcaaatctttcttgcattcccgtgataaaatgttttttaacgtgagctaccataaaaaaagcgagtaagaactaaaggaaataatatttcccccggctggtgtgtcctatacgtgtacggcctctcattagacgtcatacttgatcatcggggtttgtaccgaccgctctgttctacttctttattctggcatgcagagattggcacaccagttttactatatcacccgcgtcccccaactatatgtgagtctgcacgactttaatataggtcaatattaccgtacataatactcgatacctacattatacgatatatgtcacttcccgccccgacgccgcccttgatattcatctatgactattgttgcagtcttacatttataacaatccaccagatacagcttgctacacggcagtacatgttataacgttgttacgtagtatattgatccgagataggatattccaacgataatttgtggggcgcgcgagactgtgtttataccccgcgagtttagatatgagggttgtgtcgctaacacgagtcaacacaaggagttagatgcgtagattgtgtctgctattttatgatgtcagtactgcggtatcggaatcggtgtgcattattagtaagagatcaggacgctagcatggacgacgttacgag

SEQ ID NO: 653369 - DNA, 285 bp, Homo sapiens
  misc_feature (113)..(113): n is a, c, g, or t
  misc_feature (169)..(169): n is a, c, g, or t
  misc_feature (192)..(192): n is a, c, g, or t
  misc_feature (249)..(249): n is a, c, g, or t
  misc_feature (275)..(275): n is a, c, g, or t
gaaattaagactaaatgtcagaatatttacagtagacagaaaaaggcattaacacttgaaacattacagtatatcagagtgtaaagtataaaaaaattccaaagctgaaactnttagataatttctttctatataagttgaaaaggagtagctttttgaaattattccnttgaaattatactttttttaccngaaaaaattatagattttttgaaaagcaaattcaactctaaaattacttcatactgnttcaacttgttggttatatgaaagcntgtgatgaat

SEQ ID NO: 653370 - DNA, 882 bp, Homo sapiens
  misc_feature (857)..(857): n is a, c, g, or t
acagatgtgtataggattgttagggtatatttgttgatcattactttaatcgtaaatcgatgggaatatttgtgcaatatggattggagttctttaatttaaaatactggataccttgagattacatttccattgtcacagtgtgttaatctcatagtgggctgatgcagtttgttagattcaatttgggttgggacgtagggatgagctattgcgccaggtggatagacccagctgatggggtctcctaaggctgtatggctgttcctgtcagtcgactctcttggacatgagccgtacagtatcagcttccaacgagagcttaggcaataagtctagattcgcactgtaaggactcttatctgttgaataccttacaaacgtcttgttacgtgaactggagatgctcggcaataggttcctgttaatgaaacgtgctcttagctaggttggtatacgtcatcgttgtgcaagagccttcaacattactctctaacttgctttccaaattctgctgcaacggaagaaggccagtgtctacattgctgaagaagtgttaattgaaaccatagtattagtagaaactgatgttcacgaagtctttgggttcaagtgctggagacaagagtgaaaaactattccactttctaatgatacaattcaacacaggatatgatgaactatcctgcagacatgtgaagaccagctgattcaaaaggtcagagagtcaaagtggtgttgcccattcagatagatgagtcatcagaaattctgcagaatattcacaccttgttttgtgctatattcgtttcattgattatgatggtcgtgatgctaaaagaagaacgtactaatantaagcactgggatgcacatctcaaa

SEQ ID NO: 653371 - DNA, 183 bp, Homo sapiens
agacaccacggcagagcactttgtttgttagcatcttcataggctgacttggtaaacttagatagattttatagcgggtgcatacattaacttattacctcattttgttatttttcgaaacaaagccctgtggaagaaaatggaaaacttgaagaagcattaaagtcattctgttaagctgca

SEQ ID NO: 653372 - DNA, 1046 bp, Homo sapiens
ggtctgggtactggctgcagcatcatgaagctgcctgagaagagtttctgtatgtgcaatagatgaggataaagaatctgtggtatgattgatcttacacttcgtcagtaatgctggtagtcgtaggagcgatgagataaatgaataacaggcggtgagaaacgtgctatagtacgcagtaccgtcgaggtgtcagatccttgtagaggaatgcagtgtgataagtatatagaatagaatggcattggtcacctcaggtggacacgttaggtgcggctagtgatcttgtgcaactgcttgtacgttctagagaggacttggttatgcgaaagagataagaaaacacaacatagacataacaaacacacacaactctgcagggcgctccttcctgctgggcgcccgggcgaaagaaagagtgggcacgcgagtacccgcgggtacacgcgtgcccccatatagcgcgagccattgctcgcacgcgtacgacacactaagcgttttctctccagtcgcgcaacgacaacgtgcgtgggtgcaacgaactatctaatggcgggcgaagttcgtttgcaccccaaatatccttaaaggggctcggatttcgcctattgtgtctttctgtacggcacctaatagcagcaatcgcgtgtgtatgaacacccacggcgcgcgtatgcttccgagactacttacggcaacgaaacggccgtggcctggggcgacacatcccacgccgagtctgacccgggccaggggccacctacttcagccccccacggggaaacgaaaaccccaacgctcggcgacctgacggaccgcgcagaacatttgaacggacctcaggggcttagcgacccaccgccccaaacgaccaaggaaccaggggcccatctaaaccaacgcacagcccgacactgtaggcaccataccaacgagaccttacgctgggaccataccaagcgcccttcggccgaacagggcaactgcggcacaactcatcgccacaacgcccacacccttcgggacaagatcataccccatag

SEQ ID NO: 653373 - DNA, 969 bp, Homo sapiens
gcgtagcctggagggttggcagtgagactgactgcgtcggggtggagactgggtgagatggaggctcaaccccggacggtaagaatgggacgagagagtgggcgtgacagcgcgaaggtccgggagtgtccgccatatagtcgttcgaggtgaccgtcgcgtagttgtgagtctgtgagagaagatgtgtaagtatggcctcgtcccggtacatctggtgcgctgcgggtcccggagctgtagatctgctgcgttggtgctagattgttagacttgctagctcatggacgaatgatcgcaggagagctactgactgcgaccctgcatacgatcctcatcttgagtagatggactcagaacgtgatgtgatcacgcatacaacgcaacatcagtgcccggcagtaaggaagcaagagagtgtcagcgctacttcaggtgtaggaatacaacctcatacgatctgcattcttaacagcacgagatgatactaggctttgcagcgagctcagcttgcccccgtgatgccattgtaaggtacgcacgcacaatgcattggttataacgagtttcgcgtcagtcctcgaatccgtatttatctctaagtcaggcgaattcaaggtgaattcgcctctccataatccgtaacgcaaacatcgaccgtcgctcgctaagtcctctgtaggccttgtaacacaattggtacggaaggccacgtgtgcatctagcgctgtatgtcatattctaggtctcccgttggttgcaatgttaaatcgaacgtgtacacgacagaaacaacccatacacaggacccatgtgataaaggatcccccaattgaggtaaatgaccttttaattggaagaccaccgtgtccttggggttcaattgagcatacccacccatgcgtgtgagacaaatatcgggtcgtaagttcttataaaacgccattggcttcggaaacatcttggtgg

SEQ ID NO: 653374 - DNA, 252 bp, Homo sapiens
ctgaggcgctcgtgggtggacgggtccacgtagctgcgcacctctgttgggtctgacaggtggtcgtgcgtgtccttgttgaggtcgccacgctggtaagctacctccaggggaaggtggaagctcaggcgggggtccatgatgccgccggtggccagctgggcatccagcagccgtagggcctcctcagtagggatcagctccttcttcatggcctggaagagcgagatggtctgggagtcgcccttgcgt

SEQ ID NO: 653375 - DNA, 565 bp, Homo sapiens
atgtagatgtaataagaagagtcatggtcatatgtccgattgttcctctattagtacgggtgataagtttcagagtacgatagaccagagatcccaggaaaggttctagtgaccctagttacccatgaagccagtctttccttagactctgagctcctcaggctagcgctggtcccagtctgcacatctcagaccataccctcttcctatacaggaggtggggcaggctttcagccctcaggtccagtgtggggagcggcaggagcaggagggctgggatcctccagctgcacatcatgcaggtgcactgtgggggtggtggggtctttgcccacaccctggtttgggtcggcttggtcagggtggtgcctgcgtacgtgcttgaccacctggaactttggcttggccttgtagttgcagaggcggcaaaagaaggggtggcggtcggtgtgggtgagggcatgatggcgcaggccagcagcccagcggaaagcacggtggcacacattgcacacatagggtttggcctcactgtgcttgcgaaggtgggtgcgcagcaggaagc

SEQ ID NO: 653376 - DNA, 779 bp, Homo sapiens
  misc_feature (779)..(779): n is a, c, g, or t
aagcgccagctttccatttggggcatcttcctcctcggcactttctgtgcccatgtggcttagccaggtgcttacagtaatcactttctaaatggcttccatcttttgccatgcagtaaacatttcgttgtttatgccctcgaccacaagagacagaacactgcaatataaagcaatggcaaggttgttgttgttttttaatcacacggagtttgagaaaaaacctgcgtcttgagatgttaagacaatgcctaacaagagttaccattcccctcttttacagcgccagtttggataatatctcaaggcttaatagggaaggaaggtggcattgaaaaaaacaacatgtccacagcattacagcagcaatcctgtgtggcattttgggctcactcaagagtgtgggtaaatcctgagaatgggagccaaaaataaagctcatgaacctgaaattaccatgaaattctgatttaagaagtcctactatgaaatagtgatatatttcttcaacaaaatgcctgtgattcactgactgggataaacggtgcatttccaaaatacaactatgttcaatttcttaatttacctgatttccgaataaaaatcttcaaccattttccagaggataagctctcgttatcccagtccactgggaacaggtgaacacacggcacgtcagcaaactgaagggtaagctagccaggtaagtctgtgccaatttgcgaggacggcttacctttcaatttgatcgcagattccctggactgtttcaatgtgan

SEQ ID NO: 653377 - DNA, 245 bp, Homo sapiens
gatctatggcctctaagcactgctttaaatcatcacacaagtttgacatgctgtattttcatttttgtttggtttaaaatattttctaatttcccttgatgcatgggtttatttagaagggtgttttaatttcctattatctttctctaattatttctgttttgattctgttatagtcagagagcatattttgtttgatctgagttctgttaaatgtgtctctgtttgcttcataaccaggaata

SEQ ID NO: 653378 - DNA, 235 bp, Homo sapiens
gctttttaaaaaaacctttttttggctaaggccggggggcggtccctttggggcatttccgcccgggatggggggttaggtaaaggctggtccggggcggggccctttctttaatttggtttttttttttgtctgggggaaaacaccggggggctcctaaagggatttttttttgggcccctttttttttttttttcttttgaggtttttaattaaaaggtttattcccccttga

SEQ ID NO: 653379 - DNA, 1272 bp, Homo sapiens
gggcccgccgagtctgtggggggtgtgcctcgtgttgtggggcgcagttggcgccggtctccgttggttacggcgtgtgctttgtctgcgggtcttctctttttttcctgctgagttgtggtttgatcttgtcggtaggttggccctgtctgttgtgtgtcgagcggcgggggcccggttagtagatgtgccgggttgcactttttttatcgtgtctttgttgtgtgctccccggtcctttgtgtttctgccgcgagctggtgctgccggggattcaagtggttcgtgttgggggtgttgttgggctcttggtccccgtgatcgcggtgtcgtgacgtctggtggtctcctgggcgtttttggtgctttgtattgccgttcgttgtggcttttgggtttcggtctgcggggcttcggtcagtcttcgcgtgtgtctgtctcggctgtggcctggtcgtttgttgtggttgccgtggtgctgggtgtggttggttgtgtttgtgttcgttggttattggtgcgttcgggggtgtttttgcggttggggcttctgggtccagtagtttcgtatgttggcgagtgttgggggtgtcggggtgtcggtgcgcgacgggtagttggcgctgtagttacgtgtggcaggttggcgggcctgtgctgttctccgcttcctgtttagtgtgggtgccgcgtgattacaggtgcagtttgttgtggcttagtgttgtgtggaccttgttatctcccttggggggagcaggcgcttgttttttgttgtgtgttcggtatgtgccgttgcagtgcctgtcatggtatgttgtgcctagacccgtagatttgtgaagggactcctcttgttcttctgttgtacgtatgctccctgaaccagttgttcagaggaccgatgtcacatcgcgttcatgggcatggtcccatggagcatctgggtgatatctgtctacagtgttggctcttctgcgaggctgatacacaaggcctctcttccacatgatcatgtgtgcttacctcccccagcccctaccatccaatgtggataggatattacaagtaactgccgtgaagtagagtccatagtctacagagtacatcagcgtgtgcattgcggctgtcaccttcctcgctcccacttctgtatcctcagagatgctgcgtggatgtttccttaacctgcagcatgacttccctgtgaatgtctaatgctagttcaggtcctccaggcattgatttgtacagttaaactccgagtgagcc

SEQ ID NO: 653380 - DNA, 119 bp, Homo sapiens
cctagatttatctatgaatatcctcagactctggcgagacttttgaattcataaccaagccaacatctccagacatgtaaaaatagggaaaagtgattcaaattgaaaaagacagagaa

SEQ ID NO: 653381 - DNA, 193 bp, Homo sapiens
taaattcgcggccgcgtcgaccaggcttatgcggtggagaatgttttcatgttactcatactaacattagttcttctttagggtgatagattggtccaattgggtgtgaggagttcagttctatgtttgggattttttaggttgtgggtgtcgagcttgaacgcttccttaattggtggttgcttttaggcct

SEQ ID NO: 653382 - DNA, 284 bp, Homo sapiens
tgaagccaaaggactcgttgacgggcagataggccttaccacaaacatgggtggtgcggccacctgggactcctcgtaacactgtggccccgtcttccatgttcaaagaccccggtagcatgccaccagaccacctagctctaggacagctggcatctccatcaagtgtagcatgggctcacatggaggctgtggactgggtcggtctagcacactgcgcatagtaggcagcgcccgtgctgtgtgggatgatctcggccccgctctcgcggtgtgatacgcgt

SEQ ID NO: 653383 - DNA, 180 bp, Homo sapiens
gaggtgatctgaggatccccgggttctattaaaaatacaaaatagtcgggcatggtggtgcgtgccttgtaatcccagctactcaggaggctgaggcaggagaatcacttgaaccggggaggcggaggtggaagtgagccgagatcacgccatggccggacaggggggccgggccgcggg

SEQ ID NO: 653384 - DNA, 123 bp, Homo sapiens
aaggaatcgtgctggtgctaaagccagatgttcagtgtgatcttctgggcttagcttgctgagcttgtcatggggaggtgtgctctgctctcaacctctgcgtagtctctccagtaagcacct

SEQ ID NO: 653385 - DNA, 383 bp, Homo sapiens
gcgatatagagagagagagctatctcagaatctttgtttcatggaggaccacatgtgcgcctatactagctgcgccattacttgggacttaggattcgcgaccagtgagtggccctgatgccgcatcgctcctgctttacagcttggccgatggataactcgcccagatgaccatcgagcatctaggactggatctccgactagctgatggactggctggtgcagacgaccgccatgccgaccaccatctcacattgacagagcatgtgccagctgtgcgtgttcagcacttccggttttctcatgagagccgcactccgtattgaccttgcgctggcgcttcaggacagagtgctgctagagctgggcccggctatagcccc

SEQ ID NO: 653386 - DNA, 281 bp, Homo sapiens
  misc_feature (269)..(269): n is a, c, g, or t
gacacctgttcccgaagccctgtgagctgatggactacgtaacctctgggtcgcaatgctagaataaaatgcatggacacttgttccaaaacgatggagggacggtgtgggaaacagccccagccctgtcgactgagggtgaatgcacgagtgaaagtgacaatacatgggtaaactgaggcaggcgcatcagccgtagaggagagaggatgaggttccaacctggggtgtaagagaaacaagatgctacaggagcagaagggccatcngctgtgctaaga

SEQ ID NO: 653387 - DNA, 134 bp, Homo sapiens
  misc_feature (1)..(1): n is a, c, g, or t
ntctacggtttctcagaaataatcaatctttcctggtgtagtaatagaacactatgactttaaccttcatttataatcacttaataataaatagaacatcccaggaatagactcccaaatcttatcactttttc

SEQ ID NO: 653388 - DNA, 1668 bp, Homo sapiens
  misc_feature (1668)..(1668): n is a, c, g, or t
ttaccatcttcgcaggcacactcatcacagcgctaagctcgcactgattgttttacctgagctaggcctagaaagtaacacatggcgtacgcgtttccattgcccagattctgaaccgagacagaagataaagcccgtcgattgccacagcagagactgccatgcaacgctagttatccatcgacggcaagactagatgcgcatccatacagtccttctgaataggctatcctctgtcaaccagatatagctcttccgtgcacgaagtgacaccatgaagccgaataactagcgcaatgcagatactcattcattacataatcatgaagtggctatagccaatagactagctaggaatacgcccccatattcacttgctggagttcccaggaggtgtaccccaagcggcaccctcctctgacgatccggaccctgccttcatgtgcgtcacagtgatcaagaaagctaggacgcccaatcgtcaaatcgaatagtagcgcaagaagtcgtacttcggcgtacaccttacaagcgttgagagggcctgtgcctcaccttgcgaacgtctccttcaaaattcgtgtagtcccattccattacggcaaggtccaggtctggacgcggtgggacttgagagatccagagaccgccaggcttagcgtcggaaagatctttagccactaacttccgttccacatctgacctccaaccatttacgcagttgacctttacttacgccagactttctttaactcgggcaccatatctcccgttagacaccttcaaccagttttcttttaaacttctcaaccttccttcccataatattaatccacaacctctacaaacccggacattcccctcaaataaactccaactttaagaagattccccaattagccccacggaaggaccctattatataaataattatcggcgacccccttaacaacacagggctctacgccgtcttagcctaactaaaccccccttataagatgtcccatctgcaaccaccatccaatttcccccaacaagaggaagcagatcccctccccctcaatacagcgccttcttattctcccatatttaggcgcccgactataactaagaactaacagcatccaaccaaacaacaatcattctcaccatattacctccatcaaaatttgctacccacaacacaccctcctctctctgactaaatcatttagaacgacgcaacaataaactacatcacctaccaccaaacccccccccttcacaccacccaaccaacacacaccgccaccaccacaactactccaacacaatcatccaacacactcaccgcactcagctcccactacccactgacctcaccaatcatcaacacactcaagaaccacaccacaaccctacccagcacatccctccactcaaactacacccaccccacgcactacaccccccctctccaccactccacgccttcaatctctatgacctcgcaactaatatcacacatacaacatagactcacccaggcactcctcaccacacagacccctaccgacagcactagaccaacacaaccctatacagcctctgtcgctactatctctcatcctagcttcctgccctcttctcctcagccgtactctactcccgctatcgctctcatctcan

SEQ ID NO: 653389 - DNA, 118 bp, Homo sapiens
agcggggaacaatcactttagttcaggatggtcaagtgatggtcaagtgatggtcaagtgatggtcaagtgatggttcaagtgatggtcaagtgatggttcaagtgatggtccccgct

SEQ ID NO: 653390 - DNA, 359 bp, Homo sapiens
ttcacttcactatatttatttatatattaatggcgtctcgttctgtcgcacagtctgaagtgtaatggcatgatctcagctcggtacaacatctgcttcctgggtccaggcaattctcctgcctcggtattttatagtagagccggggtttcaccatgttggccagcctggtcttgaactcctgacctcaggtatccacctaccttggcctcccaaagtgctgggatcacaggcgtaagccaccacgcacactgtgattaagtttttaaatacaccctttcatatgtcagagacgaggtaaaaggagagtggtacgcgagaccccacctttaacagtatcctcgcgtgccgtattcgta

SEQ ID NO: 653391 - DNA, 208 bp, Homo sapiens
  misc_feature (47)..(47): n is a, c, g, or t
  misc_feature (57)..(57): n is a, c, g, or t
acactcaaactccgggccacaggaggaataggaccagcccctggacntgggccccantcgcccctcagagccgccgctcggatgaaaatcgggcggattgagggatgtcacccccatccctttgacagcactcgcaggaaggggggtcgccgtggtcgccgtctgtgaacaagattcctcaaatactgttaataattgcccttcatgt

SEQ ID NO: 653392 - DNA, 1137 bp, Homo sapiens
  misc_feature (357)..(357): n is a, c, g, or t
  misc_feature (430)..(430): n is a, c, g, or t
tgtggtttatttagttttaatttcataaatccataaaatcttaatctccggcaacccagtctaggcatgtgggaggagaacaaggaaaaacatgtggacacccaagaagggaacgtgcaggcgagaagcacaaagaattctaaggaatacgtgcgagccaaagtgggggtggacgggggtgcctcctccgtgagcctacagaaaggaaagtgactcgtgggtggttataaaatatataacacacaatgtctcaaacctttattctcgagtgtgtgctccaccagtctcagccaatgtgggtgactcttctctgtggcgcgtggactctgtgtggccattctccgtggacaccacaanagggcgcctccatgtgtgcctctccaaacatatatattctcattgtggccttctcttatctcactttgtgtgncacaaaaaacacccacacatgtgtctgtgtgcccatctcacaaaaccacctctcacgtctctgtgtgtgacacgtgtgcaccaatattaataaaacagtgtcgtgtgagaaacccccattgtgtcgtgtgtgtgtgtgggtctccacacgcacatatgtgtgcgcacatgtgtgacacaagatatgtgctccaaaggtatcccccgtatatgtgctcttttaggggaatgttagaaagttctctctacatatctgtctacacagattttttctcttcccccatatataatgtcggcacctgtgtggcgacaacccgagtgtggcccactatatatgttggggggtgtgtgtagaaaggtctctaccacaacgctgcgtgtgaacacacatttatagacgcgcgtgggggaatataaaatctctgtggtagaaaacgcgagggtaaacccctttttaattatacccaaaattcgctgttctctctcctccccgagggttcgctcaagaaaggcccgcggcacacaatattttccggtggcgggggggcctatgtgggggagaacccttgtgtgtctgttgtgaaaaaccgaggtgtctccaaagaggggagaaaccggcgggggccccccaagggggtggctctcgaccccggatcagcaaaccgggggcacaagtgtctcctgaaagaaaaccaccggggtgggcgg

SEQ ID NO: 653393 - DNA, 411 bp, Homo sapiens
ttccaggttaatgtgtccctgtatattacatcccctaccccgagcacacgactgcacattctactcacttgggtctcgtggcactgcaggaagccatccatgacctatggtgtaacctgtgcaccgtgtaaagtggggcgctcctgacactgcataagggaggggtgctgctcgaagccaggcatggccaccacgtgacgctgttcttagttcactaatgttagccttatttaggacaaagtcagccagacaccttgtactgggcacgcgtcagactgcagccagtccgtttcctttctttagccagccatcctggtactgtagtttaggggttgatggtggttgaaattgatttctggctggtcactaaggtgcctgctagccattgtataaaattaaaacatgaagaat

SEQ ID NO: 653394 - DNA, 313 bp, Homo sapiens
cccgggggggggggggggtttcccgcgccggcgccccccccccccggatttgcctttttttaaaaaaccccaaaggggggttaaggggggggcgcccccaaattaattaaccggaagggggggggggggcgccttttttgtttttgggggggggggggggggttttttttttttttaccctttttaaaaaattggggggtttttttttttttttggggggggggggccccccccccccctttccccctttccccaaataaccgggggggggccctttttttttgggtttttccctggtttttttcccccttta

SEQ ID NO: 653395 - DNA, 384 bp, Homo sapiens
  misc_feature (84)..(84): n is a, c, g, or t
  misc_feature (119)..(119): n is a, c, g, or t
  misc_feature (166)..(166): n is a, c, g, or t
tggaatctagcggatccccatgctcatccctccttaagaaatatgtagtcacctgaaccccaagtaaagaattaaagggctggncacatggactcgcacctgtaatcccagaactttgngaggccgaggccagaggatctcttgagcccaggagttcgagaccagnccgggtaacatagcgagagcttttctctacaaaaaaataaacaaaattaactgagtgtcgtggcacacacctgtagtcctagctacttggaaagctgaaatgggagaattgcttgaggtcgggaggtcaaggctgcagtgagctgagatcatgccacttcataccagcctgtgtgacagagcaagactgtgtctccaaaaaacaaaacgggtaccgag

SEQ ID NO: 653396 - DNA, 1186 bp, Homo sapiens
ttgagcctgagaagccgaggcgctgcgcgttctgcccgcgagctcacctcagagacagtcgcttccgcatccagtccgagggcgtgacacttgttacgcatgcaggcgtcgtcacccagtggaggcaagaacacgtagtcctcgctgcctagccagtcgagcccacgcggcggaacggtcaggaggtactgggccgcccacatgaggctgtcattgccactcggatctcgaagctgcgtttcaaggagaagcttggcgagggccagtttcggggaggtgcacctgatgtgaggtcgacagccctcaagatctggatcagtcttgaatattaccaccacttaatgtgcgtaacgggacaccctttgactggtagctgtcaagatcttacggacagatgccaccaagaatgccaggaatgatttcctgaaagaggtgaagatcatgtcgaggctcaaggaacccaaacatcatacggacatgctgggcgatgtgtgatgcaggacgaacaccactctgcatgattactgacatacatggagaacggcgacatcaaacagtacctcagatgcccaaccaagactggaaggacaaggacaagaccgaggagggcaccccaggggcacagcgagcaaggctgcagacacgagccccaaacatcagacataaccaattgctggatgcactgtggacaagacaccaaatcgccatcgagcatgcgcgaacaggacaccaacacacccaaagcaacatcgagagacacaggacaagcagggaaagtgcccacaaggggcaaaaaacgaacaaccaagaacgggaacacggacagacccacgaaaccaacaagcacggagagaagaaccagacacaagaacgggacaaggggcacgcccactcacgcggaaaggcgacaagcaaaagggatccaccaaacggcgaacacgacggcggccacagaccagaggcgacaaaaggaagaggaaacggggacgtacacggtatagagcgcaacgctatgtggaagaacgagaagaagatagaaaggagagaagaagaagaggacgaatgaggatagagcacagagtgcattactacagaaaagggaaggaagcaggagaacaaagacaaagcggagggaggcagagaggtcgagagaacaaaagagggagaccgggacgggacgacacag

SEQ ID NO: 653397 - DNA, 91 bp, Homo sapiens
catggatttgctggtgcagtacaactaggcttaatagggactcgaattcgagcctgaattcgagctcgaattcgagctttcaaaaaaaaaa

SEQ ID NO: 653398 - DNA, 198 bp, Homo sapiens
gatcaagtgcccacagtttgtttatcccttaccacaatccaatgaagtcagggattaccccagttctcagatgagaaaattgagtctcactcaacattggactatttgtaaccttcagactcgagaggaccagaggaatcttagaggagtagaggtcgcatgttcatcttcatctagaacttagatatcaagtctcta

SEQ ID NO: 653399 - DNA, 379 bp, Homo sapiens
acccccaaacaccggaatctcttgcccagcaaccttttgcgttgcatgtctatctatccagggtacggtgcccccacatgcaggctacccaactggtggcctcctacggtcccaggtgcctccatttgactctcatgaggttgccgaggttgggttcagctccaatgatgatgaggataaagacgatgatgtgatagaggtcactgggaaatagctagggagcccctccccacctcacttggggcccccagcaggttgcccaccaagctggaaggcagtgatttagaccttttgagaataggacacttggcaggagggaaaaggaagaggacaaaggagggtggttggccaaagtggcacagctctgttgctgtttaac

SEQ ID NO: 653400 - DNA, 995 bp, Homo sapiens
  misc_feature (304)..(304): n is a, c, g, or t
  misc_feature (322)..(322): n is a, c, g, or t
  misc_feature (353)..(353): n is a, c, g, or t
  misc_feature (356)..(356): n is a, c, g, or t
  misc_feature (366)..(366): n is a, c, g, or t
  misc_feature (422)..(423): n is a, c, g, or t
  misc_feature (426)..(426): n is a, c, g, or t
  misc_feature (431)..(431): n is a, c, g, or t
  misc_feature (434)..(434): n is a, c, g, or t
  misc_feature (448)..(448): n is a, c, g, or t
  misc_feature (468)..(468): n is a, c, g, or t
  misc_feature (470)..(470): n is a, c, g, or t
  misc_feature (473)..(474): n is a, c, g, or t
  misc_feature (489)..(489): n is a, c, g, or t
ggaggcgcgggtggggaacatgtctgagtcggagctcggaaagaagtgggaccggtgctctggcggatgcggtcgctgaagcataggctactggcttttggcagttaggaattgattcttctcacttaccttctttaaagacgaagaatgtgcgccattagccgtttcggattctggcatgggattgaggagaatggcttattccaaactgtcagtatgatttccaggctccatatcttctacacggcaacacatatgtcaaagatgctaggaagcagtgactgtcacctgagaacatcccagngggaggacaagagaaatnatgtttattcctcaggaatactgaagtgccntgnagtaagctgncattcttctgtaacaatgttatcagtaatgctttaaactccagcacctggttatgnnttngaaancangtctgtttcttgtnttgtattttctctctggaantngtnnggaggtggtcttaantaaattaaacaagaaataggaaataattaaaaaaacagaaagaaagtaaaagctgcctgcattggcatttggagtgacttgaattaagtaaggggaagctgaggtaggccattcagtttctggctaacgggaggagggaaactagcgagtttagtgcaggtaaaaggggagtaaatatgggactctcacttttaaacttttacctagaaattatggatgaaaaaaagccaagctcggtaaaatactggaagagacttggttctggagccacttgtgaggaccgtgacccgtcacagtggcctcgggaggtcctattaacattatgcctaggggtggttgggttacagctttggtttgacatgtttaagggagacctaagacttcagttcaacatacgtagggtgatacagtgattgggtccagaagggtaggacaatttgaaggcaatgtggcgtgggtggggagtcataaattctcggatggacgatcagttaaaagtgatatta

SEQ ID NO: 653401 - DNA, 394 bp, Homo sapiens
  misc_feature (12)..(12): n is a, c, g, or t
aagccccggcgnccattggtccctacagtcaagctgtgcaagtggacaggaccatttacatttctggacaggtaggcctggatccttccagtggacagcttgtgccaggaggagtagtagaagaagctaaacaggctcttaaaaacttgggtgagattctgaaagctgcaggctgtgacttcaataatgtggtgaaaacaactgttttactggctgacatgaatgactttggcactgtcaatgagatctataaaacatatttccagggtagccttcctgccagggctgcttaccaagtcgctgctttacccagaggaagtcgagttgaaatcgaagcaatcgctgtccaggggcctttcatcaaggcatgactataagtagccatgctgatgtt

SEQ ID NO: 653402 - DNA, 106 bp, Homo sapiens
  misc_feature (4)..(4): n is a, c, g, or t
  misc_feature (11)..(11): n is a, c, g, or t
atgntacttanggagagaaggaagagaagtaccgagggcgtctttgatgtgtagtaaggctggagcgtaatggcgtgatctcagctcattgcaacacggtctctca

SEQ ID NO: 653403 - DNA, 306 bp, Homo sapiens
  misc_feature (34)..(34): n is a, c, g, or t
ttagaggatcccgggctcaggtgatcctcacagncactcagaggtcatttcatttatttatttatttattgtggagacagcattctcactctgtcacctaggctagagtgcagtggcactatcacagctcactaaagccttgacctcccaggctcaagcgattctcctgcctcagcctcccaaatatctgggactataggcaggtgccacaccataccaggctactttttaatttttttttagagatgaggtctcaatatgttgcccaggctggtcttgaactcctgggctcaagcaatcctccca

SEQ ID NO: 653404 - DNA, 335 bp, Homo sapiens
  misc_feature (248)..(248): n is a, c, g, or t
  misc_feature (256)..(256): n is a, c, g, or t
  misc_feature (317)..(317): n is a, c, g, or t
aggggacacctgtggagggcatttcccgtgggcccccgagacccgccaagagggaggaagcgctgctgggcgccctctaaccgcccacggggagctggggccatggaggggacaggagtctttgtccctgctcagcccggaggctgtgcacggccctcgtcacaaggagacccatgcagcacaggccgcgggggccccaggctcggctcaggtcttggaggccaagggcatggcttccggaagtgggnggggaggngaatgttaaaaaaagatccaaacggccccagcaaattcgggagattccacccctgagaaanacaatgtgagaaccgcca

SEQ ID NO: 653405 - DNA, 124 bp, Homo sapiens
  misc_feature (71)..(71): n is a, c, g, or t
  misc_feature (122)..(122): n is a, c, g, or t
atctagagatctcctgagaagagtgtgcaccaaccactattattctagatattacagcactcagaaagaancctataccattagcattcactttccattctcttcttcccctaggccttggnaa

SEQ ID NO: 653406 - DNA, 173 bp, Homo sapiens
tagtacggcactatgagaaatcttattaatgcttatttgccatcatgaaaccctagggtccttaagaattatgctaagtctacactgcctatgctctataaatggaacaacaaatcctggatgacagcacacctgtttactgactatcttaagcccactgttcagacttactg

SEQ ID NO: 653407 - DNA, 129 bp, Homo sapiens
gctacctcgctgggaccctggtcttgctggcccccgctggcctcctgcccaagcgactgcggccaggatggaccggaaggcgctcgcggccacgtgtgcactcaaccagggggccctggacttctttgt

SEQ ID NO: 653408 - DNA, 497 bp, Homo sapiens
gaagtaaccagagtgctatgtctgcatgctgttcagtctcctttgggaaggtgggacataaagtcattggtatgttatttctctcttgcacagcctaaaatgaccaatgtgtgatttacacggtggacactacacactggcgtccaaacgtcacacgactgctactacgtctggtactcaacaacgacacgacttggacgcactactgactcacaccaacactatctgggacacacacactcgtgttggacaccacgacgacgaaacactcacacggttatactctacacacccttgtggtgctacacgggacactacacaccgcacacacgacacacaccacgccaccacgtgtttgacacaccccacggaccccttcaactacgcactgattggacctctgtgttacacgacgggcggtcctggcaactattgccacaaaggggccaacaacgcccttgaacagcgtcccttgggggaccttttcctcctgaacc

SEQ ID NO: 653409 - DNA, 335 bp, Homo sapiens
  misc_feature (267)..(267): n is a, c, g, or t
ttttgtccaaataaatgggcaatttttccaatccttgaaaaaaaaaagatgcctaatgaatttccagttttggtgttggtcctaagtagcccaaatgtattttatttgacctatttggagcccagtactcataaactgtggcagacttagcatccaatcacaattcctgagttttaagtaattttataatacgggttgaaggacaaatattcaaaaatataaattgttccttcttttgttattgtttacaaagttattattccacanggtaaaggatgaagacttttagaatcatactcatggagaaacactttctaattaagaacatataattc

SEQ ID NO: 653410 - DNA, 2732 bp, Homo sapiens
  misc_feature (253)..(253): n is a, c, g, or t
  misc_feature (257)..(258): n is a, c, g, or t
  misc_feature (260)..(261): n is a, c, g, or t
  misc_feature (263)..(263): n is a, c, g, or t
  misc_feature (265)..(265): n is a, c, g, or t
  misc_feature (269)..(269): n is a, c, g, or t
  misc_feature (276)..(276): n is a, c, g, or t
  misc_feature (298)..(298): n is a, c, g, or t
  misc_feature (453)..(453): n is a, c, g, or t
gctgcgatggctgccgtgcgaagggctggagaagcggagtgtctcggttcctctcaggtcctggacgttccttgacgccgccagtgggggggggccctgtggcggtcgccaccacgtgtagtcatgtacccgaccgcgccgcgccgcctcatcgggacttcatctcggtgactctgagcttggcgagagctagtgacaacagcaagagttggtgagggcgctcgctgctggcacggaacatggcacagcaacntgcnngnntngngatncgcggantatatctcttcctcctgccttnctgcttttctgtggactcctcttctacatcaacttggctgaccattggaaagctctggctttcaggctagaggaagagcagaagatgaggccagaaattgctgggttaaaaccagcaaatccacccgtcttaccagctcctcagaaggcggacancgaccctgagaacttacctgagatttcgtcacagaagacacaaagacacatccagcggggaccacctcacctgcagattagacccccaagccaagacctgaaggatgggacccaggaggaggccacaaaaaggcaagaagcccctgtggatccccgcccggaaggagatccgcagaggacagtcatcagctggaggggagcggtgatcgagcctgagcagggcaccgagctcccttcaagaagagcagaagtgcccaccaagcctcccctgccaccggccaggacacagggcacaccagtgcatctgaactatcgccagaagggcgtgattgacgtcttcctgcatgcatggaaaggataccgcaagtttgcatggggccatgacgagctgaagcctgtgtccaggtccttcagtgagtggtttggcctcggtctcacactgatcgacgcgctggacaccatgtggatcttgggtctgaggaaagaatttgaggaagccaggaagtgggtgtcgaagaagttacactttgaaaaggacgtggacgtcaacctgtttgagagcacgatccgcatcctgggggggctcctgagtgcctaccacctgtctggggacagcctcttcctgaggaaagctgaggattttggaaatcggctaatgcctgccttcagaacaccatccaagattccttactcggatgtgaacatcggtactggagttgcccacccgccacggtggacctccgacagcactgtggccgaggtgaccagcattcagctggagttccgggagctctcccgtctcacaggggataagaagtttcaggaggcagtggagaaggtgacacagcacatccacggcctgtctgggaagaaggatgggctggtgcccatgttcatcaatacccacagtggcctcttcacccacctgggcgtattcacgctgggcgccagggccgacagctactatgagtacctgctgaagcagtggatccagggcgggaagcaggagacacagctgctggaagactacgtggaagccatcgagggtgtcagaacgcacctgctgcggcactccgagcccagtaagctcacctttgtgggggagcttgcccacggccgcttcagtgccaagatggaccacctggtgtgcttcctgccagggacgctggctctgggcgtctaccacggcctgcccgccagccacatggagctggcccaggagctcatggagacttgttaccagatgaaccggcagatggagacggggctgagtcccgagatcgtgcacttcaacctttacccccagccgggccgtcgggacgtggaggtcaagccagcagacaggcacaacctgctgcggccagagaccgtggagagcctgttctacctgtaccgcgtcacaggggaccgcaaataccaggactggggctgggagattctgcagagcttcagccgattcacacggcctggacgcctacgtgttcaacaccgaagcccaccctctgcctatctggacccctgcctagggtggatggctgctggtgtggggacttcgggtgggcagaggcaccttgctgggtctgtggcattttccaagggcccacgtagcaccggcaaccgccaagtggcccaggctctgaactggctctgggctcctcctcgtctctgctttaatcaggacaccgtgaggacaagtgaggccgtcagtcttggtgtgatgcggggtgggctgggccgctggagcctccgcctgcttcctccagaagacacgaatcatgactcacgattgctgaagcctgagcaggtctctgtgggccgaccagaggggggcttcgaggtggtccctggtactggggtgaccgagtggacagcccagggtgcagctctgcccgggctcgtgaagcctcagatgtccccaatccaagggtctggaggggctgccgtgactccagaggcctgaggctccagggctggctctggtgtttacaagctggactcagggatcctcctggccgccccgcagggggcttggagggctggacggcaagtccgtctagctcacgggcccctccagtggaatgggtcttttcggtggagataaaagttgatttgctctaaaaaaaaaaaaaaacacataagcaaacaaacaacatcatctcgcccaatacaaaacataaatccaacacggggggcgggccctcacaaaaaatatctcccggggggggcccccatttgcccgccacccactccatcttgtcaaagaggggccccctatggga

SEQ ID NO: 653411 - DNA, 218 bp, Homo sapiens
actttccactcggtgatatacattttcacttcatcagaagcacctatatctacagctcatttataattgatactgtgtcatgaaacccaaatgagcccgacaagttcctataaacaaagcttcccatgtactaggacagtcagtaatttatgcctcattcagaggattatggctgttccttaagaagtgcaagttcaaacctatcaaccagtgtatat

SEQ ID NO: 653412 - DNA, 517 bp, Homo sapiens
  misc_feature (76)..(76): n is a, c, g, or t
tcggctaacggtcgcctataaaaaactatcaaaaattccaatagacggccaggcacatatggctacacacctagtnatacccagcacttaagggaggctagaggccagcggatcactaggaggccaggggtaaagagaccagcctaagccaacataggtgaaatcccatactactaacttaaaaaatagaaaaataagctagggctagtaggcacacacctagcaatacccagccactccggaggctgaggcaggagaatagcctagaaccagagaggcggagataagcagtgagctagagaccataaccactagcactaccagcctagggtgacagagtgagactactgtttcaaaaaataaaaactaaactaaaaaatattcaaagagccagtagacctagccactcaggaagtaaatagaggcagaaggatacccataggcacaggagtacgagaccagactgggcaacataactgagaccctaactcaacaaagaaaaatatcaaagaggtag

SEQ ID NO: 653413 - DNA, 3682 bp, Homo sapiens
  misc_feature (253)..(253): n is a, c, g, or t
  misc_feature (257)..(258): n is a, c, g, or t
  misc_feature (260)..(261): n is a, c, g, or t
  misc_feature (263)..(263): n is a, c, g, or t
  misc_feature (265)..(265): n is a, c, g, or t
  misc_feature (269)..(269): n is a, c, g, or t
  misc_feature (276)..(276): n is a, c, g, or t
  misc_feature (298)..(298): n is a, c, g, or t
  misc_feature (453)..(453): n is a, c, g, or t
  misc_feature (1866)..(1866): n is a, c, g, or t
gctgcgatggctgccgtgcgaagggctggagaagcggagtgtctcggttcctctcaggtcctggacgttccttgacgccgccagtgggggggggccctgtggcggtcgccaccacgtgtagtcatgtacccgaccgcgccgcgccgcctcatcgggacttcatctcggtgactctgagcttggcgagagctagtgacaacagcaagagttggtgagggcgctcgctgctggcacggaacatggcacagcaacntgcnngnntngngatncgcggantatatctcttcctcctgccttnctgcttttctgtggactcctcttctacatcaacttggctgaccattggaaagctctggctttcaggctagaggaagagcagaagatgaggccagaaattgctgggttaaaaccagcaaatccacccgtcttaccagctcctcagaaggcggacancgaccctgagaacttacctgagatttcgtcacagaagacacaaagacacatccagcggggaccacctcacctgcagattagacccccaagccaagacctgaaggatgggacccaggaggaggccacaaaaaggcaagaagcccctgtggatccccgcccggaaggagatccgcagaggacagtcatcagctggaggggagcggtgatcgagcctgagcagggcaccgagctcccttcaagaagagcagaagtgcccaccaagcctcccctgccaccggccaggacacagggcacaccagtgcatctgaactatcgccagaagggcgtgattgacgtcttcctgcatgcatggaaaggataccgcaagtttgcatggggccatgacgagctgaagcctgtgtccaggtccttcagtgagtggtttggcctcggtctcacactgatcgacgcgctggacaccatgtggatcttgggtctgaggaaagaatttgaggaagccaggaagtgggtgtcgaagaagttacactttgaaaaggacgtggacgtcaacctgtttgagagcacgatccgcatcctgggggggctcctgagtgcctaccacctgtctggggacagcctcttcctgaggaaagctgaggattttggaaatcggctaatgcctgccttcagaacaccatccaagattccttactcggatgtgaacatcggtactggagttgcccacccgccacggtggacctccgacagcactgtggccgaggtgaccagcattcagctggagttccgggagctctcccgtctcacaggggataagaagtttcaggaggcagtggagaaggtgacacagcacatccacggcctgtctgggaagaaggatgggctggtgcccatgttcatcaatacccacagtggcctcttcacccacctgggcgtattcacgctgggcgccagggccgacagctactatgagtacctgctgaagcagtggatccagggcgggaagcaggagacacagctgctggaagactacgtggaagccatcgagggtgtcagaacgcacctgctgcggcactccgagcccagtaagctcacctttgtgggggagcttgcccacggccgcttcagtgccaagatggaccacctggtgtgcttcctgccagggacgctggctctgggcgtctaccacggcctgcccgccagccacatggagctggcccaggagctcatggagacttgttaccagatgaaccggcagatggagacggggctgagtcccgagatcgtgcacttcaacctttacccccagccgggccgtcgggacgtggaggtcaaggtgggcctgggcctgggtcagggtccatcaggaggagggtgctggcagggctggccttgccctgagctctgctccgccancagccagcagacaggcacaacctgctgcggccagagaccgtggagagcctgttctacctgtaccgcgtcacaggggaccgcaaataccaggactggggctgggagattctgcagagcttcagccgattcacacgggtgagcacctgtcctcgccccgcgtggtcacggccaccgggccacaggcacggctgggctgtggggctcaggttggctccgctcttggtggtggctgtgacctgggtccgggagggcgggcttgccgcagcctcggggtggccacgctgcagcttgggggccctggcatccccatccccactgagcttcatggttgtgggacccagagtacttggaggggctgggcacccctcattttcatttctcagggcctgtctagggagggtctctgctgtgggcccagcatccccccagtttaggaggcacacgcacccatgactggggcaccatccccactgtggaccaggccctgttttaggtcacgccctccacgccagagtgtcacctcctggctctgctgtgatcttggcctgaggcccccgctgcctccgctcccaccgtctgccctgtgccctgtgccctgtgcggcaactgtgaggccccctgagcccaggttctgggggaggcggtttctgtcgtggtcacttgagggttgttggcatttccaggtgggctccggtggaaccacacggctcgcctgggggtggccatcatccaggcgccctccaccctgagcttgcgctgggggccacattcactatggggtggagagcgcttcggtgatgaggctgaggggggtgcagggtgccccccgtgtggtgacgaggccctggctgctgcacaggtcccctcgggtggctattcttccatcaacaatgtccaggatcctcagaagcccgagcctagggacaagatggagagcttcttcctgggggagacgctcaagtatctgttcttgctcttctccgatgacccaaacctgctcagcctggacgcctacgtgttcaacaccgaagcccaccctctgcctatctggacccctgcctagggtggatggctgctggtgtggggacttcgggtgggcagaggcaccttgctgggtctgtggcattttccaagggcccacgtagcaccggcaaccgccaagtggcccaggctctgaactggctctgggctcctcctcgtctctgctttaatcaggacaccgtgaggacaagtgaggccgtcagtcttggtgtgatgcggggtgggctgggccgctggagcctccgcctgcttcctccagaagacacgaatcatgactcacgattgctgaagcctgagcaggtctctgtgggccgaccagaggggggcttcgaggtggtccctggtactggggtgaccgagtggacagcccagggtgcagctctgcccgggctcgtgaagcctcagatgtccccaatccaagggtctggaggggctgccgtgactccagaggcctgaggctccagggctggctctggtgtttacaagctggactcagggatcctcctggccgccccgcagggggcttggagggctggacggcaagtccgtctagctcacgggcccctccagtggaatgggtcttttcggtggagataaaagttgatttgctctaaaaaaaaaaaaaaacacataagcaaacaaacaacatcatctcgcccaatacaaaacataaatccaacacggggggcgggccctcacaaaaaatatctcccggggggggcccccatttgcccgccacccactccatcttgtcaaagaggggccccctatggga

SEQ ID NO: 653414 - DNA, 240 bp, Homo sapiens
ctaatagtccttcagtgcataatgtctgtctacaacgtggacaccaggtaggctagtgtcaagccagagattcggggcagatagataaatgttcattttactgatgcactttagttttatgggtctgttacctggttttccaggaaagtttgtcgtgccttttaggacgggaggttaggctgaccaagaccagatgtagagccccaaatccctggcagatatgctggcttcaaggtgtgg

SEQ ID NO: 653415 - DNA, 2099 bp, Homo sapiens
  misc_feature (335)..(335): n is a, c, g, or t
  misc_feature (354)..(355): n is a, c, g, or t
  misc_feature (369)..(371): n is a, c, g, or t
  misc_feature (373)..(374): n is a, c, g, or t
  misc_feature (378)..(378): n is a, c, g, or t
  misc_feature (385)..(385): n is a, c, g, or t
  misc_feature (387)..(387): n is a, c, g, or t
  misc_feature (399)..(399): n is a, c, g, or t
  misc_feature (401)..(403): n is a, c, g, or t
  misc_feature (416)..(416): n is a, c, g, or t
  misc_feature (436)..(436): n is a, c, g, or t
  misc_feature (473)..(473): n is a, c, g, or t
  misc_feature (475)..(475): n is a, c, g, or t
  misc_feature (508)..(508): n is a, c, g, or t
  misc_feature (536)..(537): n is a, c, g, or t
  misc_feature (541)..(541): n is a, c, g, or t
  misc_feature (550)..(550): n is a, c, g, or t
  misc_feature (555)..(555): n is a, c, g, or t
  misc_feature (564)..(564): n is a, c, g, or t
  misc_feature (571)..(571): n is a, c, g, or t
  misc_feature (576)..(576): n is a, c, g, or t
  misc_feature (584)..(584): n is a, c, g, or t
  misc_feature (590)..(590): n is a, c, g, or t
  misc_feature (602)..(603): n is a, c, g, or t
  misc_feature (605)..(605): n is a, c, g, or t
  misc_feature (607)..(607): n is a, c, g, or t
  misc_feature (615)..(615): n is a, c, g, or t
  misc_feature (645)..(645): n is a, c, g, or t
  misc_feature (660)..(660): n is a, c, g, or t
  misc_feature (665)..(665): n is a, c, g, or t
  misc_feature (680)..(680): n is a, c, g, or t
cagagctctctctgctgggagtcagtcggtgctggggcgaggggaggcagagctcacagagcccctctacagctcaccctgcagctcggccctggccagtaaacccaccatccccctttctgccgcagaggcagtggagaaggtgacacagcacatccacggcctgtctgggaagaaggatgggctggtgcccatgttcatcaatacccacagtggcctcttcacccacctgggcgtattcacgctgggcgccagggccgacagctactatgagtacctgctgaagcagtggatccagggcgggaagcaggagacacagtgaggcccggcccgcngcccccagctcccgcggtnnccccgttcccgctnnncnncaancctaaanancccaactcccanannncccgcaccagcanccccccgccacacagcgcgncaggaaaccgcagccgcgccaggcccggcccaggcangnaaggggagggcggaggcaaacaccacacaccgnggccacagggggggagaggggggcaacnncacngagggccangggcngcgcagggnggcaccngcagnccggcaanggccangccagcagaacnngngngggcccangaagagccagacccaaaaaccccacggganccgaagcaccgtccnggtanagtgagaagactgcnggtgtccacaggctgctggaagactacgtggaagccatcgagggtgtcagaacgcacctgctgcggcactccgagcccagtaagctcacctttgtgggggagcttgcccacggccgcttcagtgccaagatggaccacctggtgtgcttcctgccagggacgctggctctgggcgtctaccacggcctgcccgccagccacatggagctggcccaggagctcatggagacttgttaccagatgaaccggcagatggagacggggctgagtcccgagatcgtgcacttcaacctttacccccagccgggccgtcgggacgtggaggtcaagccagcagacaggcacaacctgctgcggccagagaccgtggagagcctgttctacctgtaccgcgtcacaggggaccgcaaataccaggactggggctgggagattctgcagagcttcagccgattcacacgggtcccctcgggtggctattcttccatcaacaatgtccaggatcctcagaagcccgagcctagggacaagatggagagcttcttcctgggggagacgctcaagtatctgttcttgctcttctccgatgacccaaacctgctcagcctggacgcctacgtgttcaacaccgaagcccaccctctgcctatctggacccctgcctagggtggatggctgctggtgtggggacttcgggtgggcagaggcaccttgctgggtctgtggcattttccaagggcccacgtagcaccggcaaccgccaagtggcccaggctctgaactggctctgggctcctcctcgtctctgctttaatcaggacaccgtgaggacaagtgaggccgtcagtcttggtgtgatgcggggtgggctgggccgctggagcctccgcctgcttcctccagaagacacgaatcatgactcacgattgctgaagcctgagcaggtctctgtgggccgaccagaggggggcttcgaggtggtccctggtactggggtgaccgagtggacagcccagggtgcagctctgcccgggctcgtgaagcctcagatgtccccaatccaagggtctggaggggctgccgtgactccagaggcctgaggctccagggctggctctggtgtttacaagctggactcagggatcctcctggccgccccgcagggggcttggagggctggacggcaagtccgtctagctcacgggcccctccagtggaatgggtcttttcggtggagataaaagttgatttgctctaaaaaaaaaaaaaaacacataagcaaacaaacaacatcatctcgcccaatacaaaacataaatccaacacggggggcgggccctcacaaaaaatatctcccggggggggcccccatttgcccgccacccactccatcttgtcaaagaggggccccctatggga

SEQ ID NO: 653416 - DNA, 160 bp, Homo sapiens
caggataccggggcgtatcacatcattccgtggtcttcgataaccacctttgctaactttgtccgcggcattggttcggtggtggcaaatatgatgttgatcgccatgaagatgctgataaagccaatcaggcactgaaagatgcggtagggaattaatg

SEQ ID NO: 653417 - DNA, 1163 bp, Homo sapiens
atgagcatggagtggggtgtggttagtagctgtgcaggaagcttggatgatcgggctcgctcataggcaggactgacatggatgatgcccacaagttcatggcttttggggggtctgaggtgtgcgggcgatgcctagttcactgacaatgggacgatgctacggatggaagaacgagagagagtgggcttaggagttgggactgtgtttgctgtgaagcagtcatgtggcagtctggtggcggatggtgaagccatctggtgtctggagatttgatcggcgtagtgagtgagctattaggagaagtgaggggacgatggacatgaaagggagatggcccagagtcgataggtgctgttcgcgttggtacactgtgaatgagatcgaggataggaattgggcgtgggattgagcgtcaatctagtttggtggtaagaggatgaggaaatatggtcaactgggaaaaaggggcatggagctaaactaggcctttctaggcgtgaaaggagcgtgtacccattcaggtgaggttttgtcccttattccagtagacgagagactggcgctcggtagcccaagacccagagctgggaagcacatggggtcccctgggaggaaaccagggctacatcctaggtctcacacaggagcggcccttgcctctcctcgatagggttgatggaaactactcaccttgggaagaacggtacatccttaaccttttacaacgtccgcaacttgttcaccccatggcttcctggaaggttcaagggtccctcaccacccatggggaaggaaagccgatggctcttggaatcgttcgctcttgagggcaagaaccggtgcgtaatcaacttgcggaacggccagggaggttcggatgaaaggaaaccacgggctttccaccgccgtaccggttactgggggacgggccaacctcagaacaggccaaggaagttcccacttcgcaaaccaagttcgaacccataggaaaaccacacaaaaggaaaaaggcctaaaggaaatctggtcgcggacaaacagaaagggccccaaagggaaaccaagagccgggccacagaaaacgctccaaattcccggtagcctgtaaccaaggccacgggccgggagacctgggactccccctggggctatacaacccg

SEQ ID NO: 653418 - DNA, 865 bp, Homo sapiens
  misc_feature (354)..(354): n is a, c, g, or t
  misc_feature (470)..(470): n is a, c, g, or t
atcaactgcgtggtaagacgacttgagcatcattcagtggaaacttgtggaacacgttatcttttgcctcagtaatgagactgtagcggatactactctaaccaaagcccccgctttcttccactgaaaagtgtcatccaatactaagtactcccacaccgcctccttctcacgcccttaaatgagacagctgtaagaggatagagtagaataagcagttctcccacacttctgtgagaacagtctggaatcaaacttgtggagccaagtgaataccatcagtcgaggaggagtagtgaagatcggcagctggatgagccttgcgttgagtcctctttatgtacatgcagccantgcaagcgagagtaagactagtgacgccaggccaaagccagcccttctggaggaccagcaagacccttcgccctcttcctaacaccctggcttcagtgcaactcttttccttcagnctgcatgtgagttccgtgataaatgttcaggtaacatggatgggcactgatggagaatcactgttgacttgagatcccggtttccatgtgatttgttttcttcaatagtcttattttcagtctctcaaatacagccaacttagagtttgagtttggtgtctattgaaccattaaccatgacttacatagctaggagaacgactgacatcagttaactgatgtctcacaagattactgtgtacctaagtggtcgtgatgttgaatactggtaaaccacaaacagtcagtttgccttgatttttgaaaaattaagaccccccgttgtcatcttgaagcctgttttctcttcaggaacaatcaagagggtattcacgaaactactggttaacgtcaac

SEQ ID NO: 653419 - DNA, 244 bp, Homo sapiens
acggactgacgatgtctgctatctcgggggcctggccctgacccagaagtgggcgggctcccactccatgaggtatttctacacctccgtgtcccggcccggccgcgtgggagcccctgcttcatcgcctgtgggctactgtggacgacactgcagttctgtgcggttcgacagctgacgccgctgagccagagtgatggagaccgcgtggcgcctgtgtgatatgcgcagtgagtgggcctgg

SEQ ID NO: 653420 - DNA, 2174 bp, Homo sapiens
  misc_feature (24)..(24): n is a, c, g, or t
  misc_feature (358)..(358): n is a, c, g, or t
cctcgcacttggttgcccgtgcanctgcaggctgagggcagggcctgggatctggggctgaagagaccctctgattccaggaccacctggtgtgcttcctgccagggacgctggctctgggcgtctaccacggcctgcccgccagccacatggagctggcccaggagctcatggagacttgttaccagatgaaccggcagatggagacggggctgagtcccgagatcgtgcacttcaacctttacccccagccgggccgtcgggacgtggaggtcaaggtgggcctgggcctgggtcagggtccatcaggaggagggtgctggcagggctggccttgccctgagctctgctccgccancagccagcagacaggcacaacctgctgcggccagagaccgtggagagcctgttctacctgtaccgcgtcacaggggaccgcaaataccaggactggggctgggagattctgcagagcttcagccgattcacacgggtgagcacctgtcctcgccccgcgtggtcacggccaccgggccacaggcacggctgggctgtggggctcaggttggctccgctcttggtggtggctgtgacctgggtccgggagggcgggcttgccgcagcctcggggtggccacgctgcagcttgggggccctggcatccccatccccactgagcttcatggttgtgggacccagagtacttggaggggctgggcacccctcattttcatttctcagggcctgtctagggagggtctctgctgtgggcccagcatccccccagtttaggaggcacacgcacccatgactggggcaccatccccactgtggaccaggccctgttttaggtcacgccctccacgccagagtgtcacctcctggctctgctgtgatcttggcctgaggcccccgctgcctccgctcccaccgtctgccctgtgccctgtgccctgtgcggcaactgtgaggccccctgagcccaggttctgggggaggcggtttctgtcgtggtcacttgagggttgttggcatttccaggtgggctccggtggaaccacacggctcgcctgggggtggccatcatccaggcgccctccaccctgagcttgcgctgggggccacattcactatggggtggagagcgcttcggtgatgaggctgaggggggtgcagggtgccccccgtgtggtgacgaggccctggctgctgcacaggtcccctcgggtggctattcttccatcaacaatgtccaggatcctcagaagcccgagcctagggacaagatggagagcttcttcctgggggagacgctcaagtatctgttcttgctcttctccgatgacccaaacctgctcagcctggacgcctacgtgttcaacaccgaagcccaccctctgcctatctggacccctgcctagggtggatggctgctggtgtggggacttcgggtgggcagaggcaccttgctgggtctgtggcattttccaagggcccacgtagcaccggcaaccgccaagtggcccaggctctgaactggctctgggctcctcctcgtctctgctttaatcaggacaccgtgaggacaagtgaggccgtcagtcttggtgtgatgcggggtgggctgggccgctggagcctccgcctgcttcctccagaagacacgaatcatgactcacgattgctgaagcctgagcaggtctctgtgggccgaccagaggggggcttcgaggtggtccctggtactggggtgaccgagtggacagcccagggtgcagctctgcccgggctcgtgaagcctcagatgtccccaatccaagggtctggaggggctgccgtgactccagaggcctgaggctccagggctggctctggtgtttacaagctggactcagggatcctcctggccgccccgcagggggcttggagggctggacggcaagtccgtctagctcacgggcccctccagtggaatgggtcttttcggtggagataaaagttgatttgctctaaaaaaaaaaaaaaacacataagcaaacaaacaacatcatctcgcccaatacaaaacataaatccaacacggggggcgggccctcacaaaaaatatctcccggggggggcccccatttgcccgccacccactccatcttgtcaaagaggggccccctatggga

SEQ ID NO: 653421 - DNA, 858 bp, Homo sapiens
  misc_feature (23)..(24): n is a, c, g, or t
  misc_feature (51)..(51): n is a, c, g, or t
aagcaaaagaaaacgaaaaaggnnacggccacagacgccggaggaagaggntgtgaaaaaaagagcctgttcggcaacccccagagacccttcttcagtggcccgccgctggaagagtacaacgctgatcctcgtccacatttcacctgtggaagagcatgacggaaatagataaaggcactgtggaagaaactgcgaggagaagtttgcccccaagggtcctgaggaggatcataaggcctgagctcaggccttacctcgagcacatacctaggggaggagccttgaacattgacaccgacaataaaactgccccaggccccccttgaaaaaaaaccccccacacccacccgacataattttctcccccgcagaaacccccgctccaacccacataacccccccccccccccaactccgtccgacacctacaccacgaccccaaaaaaaacaaagaacccacccctctccctcctccactgccaatcctacattgtataccaacccaccccatcaagcacccagccacgatcccaaaatccactccccaccgggacgccccccgcacgccacgccccacactcaacaccctcctctcttattctacccaaaaaatagataacacaacgcagatgtctgaaacaacaaccccccaccccgccacccacacgtgcagacgtgttgatgcaaacaaaaagagatccccaccgaaaaacaaaaagacacacgccaccataaaacatcagtatgtgagcgaatttgacagccaccggcccgccccgccaccacgacaaaaatttttatgtgatcttttaaaaactaccaccgcccgacccccgcgcgcccgccccccacccg

SEQ ID NO: 653422 - DNA, 1005 bp, Homo sapiens
atccgccttcctgctcgcgagacgcctccgcgcgcgctcctccgccgccgggactccggcaggtttatcgccagagtccctgaactctcgcttgcttttgaatcccctgcatcggatcaccggcgtgccccaccatgtcagacgcagccgtagacaccagctccgcaaatcaccaccaagggactgtagaaggagaagaaggagagtggtgcgaagaggcagagaaaggggagagacgccccatgcggtaacggggaatgctaagtgaggaaagatggggagcaggaggctgacgaatgaggtagacgaagaagaggacggaaggtggggagggcagaggcaggcggaggcacaggtgacgggacggacgcggtgggactgagatgaggacacgcgtgaagtcaggcgtacgcgcacagcggcgcacaccctgcacacatgcgtgaaggatgacgcggtcgcatacacaccagaagcgacgaacgacccgacgaggacagactcgacagcagaacgaggcacacgcgcaactacaacaaacaacaggccgcgagaaataacaacagccaccgaactcacgcacaagaaccccaacagggccgacatccgacagtcccaaagcgcgccggcccaccgcggcccagagccacccgcaggatgacaccagcaccacacaccaccccacaaccacgacagcgactagcccacgtgggtgcacaaagaccaagaagtcacaaggcacgaataacaactcaaaagacgtagcaagcgaacagaggaaaccaaacacactacgtacagaccaatggacggcgcggcaagacagaaccgaacgtcacacgactggcaggcagcccaaacaaaccatggcgaaaccgcgtcaatcaaggagaccgcaacacagacaaagataggggcaacagaaacaagcaggcctacacacaaaggaacgacaaacaacaacagacaacagaacgcgtcggtgtctaagctctcttctccccc

SEQ ID NO: 653423 - DNA, 3287 bp, Homo sapiens
  misc_feature (253)..(253): n is a, c, g, or t
  misc_feature (257)..(258): n is a, c, g, or t
  misc_feature (260)..(261): n is a, c, g, or t
  misc_feature (263)..(263): n is a, c, g, or t
  misc_feature (265)..(265): n is a, c, g, or t
  misc_feature (269)..(269): n is a, c, g, or t
  misc_feature (276)..(276): n is a, c, g, or t
  misc_feature (298)..(298): n is a, c, g, or t
  misc_feature (453)..(453): n is a, c, g, or t
gctgcgatggctgccgtgcgaagggctggagaagcggagtgtctcggttcctctcaggtcctggacgttccttgacgccgccagtgggggggggccctgtggcggtcgccaccacgtgtagtcatgtacccgaccgcgccgcgccgcctcatcgggacttcatctcggtgactctgagcttggcgagagctagtgacaacagcaagagttggtgagggcgctcgctgctggcacggaacatggcacagcaacntgcnngnntngngatncgcggantatatctcttcctcctgccttnctgcttttctgtggactcctcttctacatcaacttggctgaccattggaaagctctggctttcaggctagaggaagagcagaagatgaggccagaaattgctgggttaaaaccagcaaatccacccgtcttaccagctcctcagaaggcggacancgaccctgagaacttacctgagatttcgtcacagaagacacaaagacacatccagcggggaccacctcacctgcagattagacccccaagccaagacctgaaggatgggacccaggaggaggccacaaaaaggcaagaagcccctgtggatccccgcccggaaggagatccgcagaggacagtcatcagctggaggggagcggtgatcgagcctgagcagggcaccgagctcccttcaagaagagcagaagtgcccaccaagcctcccctgccaccggccaggacacagggcacaccagtgcatctgaactatcgccagaagggcgtgattgacgtcttcctgcatgcatggaaaggataccgcaagtttgcatggggccatgacgagctgaagcctgtgtccaggtccttcagtgagtggtttggcctcggtctcacactgatcgacgcgctggacaccatgtggatcttgggtctgaggaaagaatttgaggaagccaggaagtgggtgtcgaagaagttacactttgaaaaggacgtggacgtcaacctgtttgagagcacgatccgcatcctgggggggctcctgagtgcctaccacctgtctggggacagcctcttcctgaggaaagctgaggattttggaaatcggctaatgcctgccttcagaacaccatccaagattccttactcggatgtgaacatcggtactggagttgcccacccgccacggtggacctccgacagcactgtggccgaggtgaccagcattcagctggagttccgggagctctcccgtctcacaggggataagaagtttcaggaggcagtggagaaggtgacacagcacatccacggcctgtctgggaagaaggatgggctggtgcccatgttcatcaatacccacagtggcctcttcacccacctgggcgtattcacgctgggcgccagggccgacagctactatgagtacctgctgaagcagtggatccagggcgggaagcaggagacacagctgctggaagactacgtggaagccatcgagggtgtcagaacgcacctgctgcggcactccgagcccagtaagctcacctttgtgggggagcttgcccacggccgcttcagtgccaagatggaccacctggtgtgcttcctgccagggacgctggctctgggcgtctaccacggcctgcccgccagccacatggagctggcccaggagctcatggagacttgttaccagatgaaccggcagatggagacggggctgagtcccgagatcgtgcacttcaacctttacccccagccgggccgtcgggacgtggaggtcaagccagcagacaggcacaacctgctgcggccagagaccgtggagagcctgttctacctgtaccgcgtcacaggggaccgcaaataccaggactggggctgggagattctgcagagcttcagccgattcacacgggtgagcacctgtcctcgccccgcgtggtcacggccaccgggccacaggcacggctgggctgtggggctcaggttggctccgctcttggtggtggctgtgacctgggtccgggagggcgggcttgccgcagcctcggggtggccacgctgcagcttgggggccctggcatccccatccccactgagcttcatggttgtgggacccagagtacttggaggggctgggcacccctcattttcatttctcagggcctgtctagggagggtctctgctgtgggcccagcatccccccagtttaggaggcacacgcacccatgactggggcaccatccccactgtggaccaggccctgttttaggtcacgccctccacgccagagtgtcacctcctggctctgctgtgatcttggcctgaggcccccgctgcctccgctcccaccgtctgccctgtgccctgtgccctgtgcggcaactgtgaggccccctgagcccaggttctgggggaggcggtttctgtcgtggtcacttgagggttgttggcatttccaggtgggctccggtggaaccacacggctcgcctgggggtggccatcatccaggcgccctccaccctgagcttgcgctgggggccacattcactatggggtggagagcgcttcggtgatgaggctgaggggggtgcagggtgccccccgtgtggtgacgaggccctggctgctgcacaggtcccctcgggtggctattcttccatcaacaatgtccaggatcctcagaagcccgagcctagggacaagatggagagcttcttcctgggggagacgctcaagtatctgttcttgctcttctccgatgacccaaacctgctcagcctggacgcctacgtgttcaacaccgaagcccaccctctgcctatctggacccctgcctagggtggatggctgctggtgtggggacttcgggtgggcagaggcaccttgctgggtctgtggcattttccaagggcccacgtagcaccggcaaccgccaagtggcccaggctctgaactggctctgggctcctcctcgtctctgctttaatcaggacaccgtgaggacaagtgaggccgtcagtcttggtgtgatgcggggtgggctgggccgctggagcctccgcctgcttcctccagccccaatccaagggtctggaggggctgccgtgactccagaggcctgaggctccagggctggctctggtgtttacaagctggactcagggatcctcctggccgccccgcagggggcttggagggctggacggcaagtccgtctagctcacgggcccctccagtggaatgggtcttttcggtggagataaaagttgatttgctcta

SEQ ID NO: 653424 - DNA, 1161 bp, Homo sapiens
gccaagttaagaaagcgttcaaggctcgaacatgccagcgtaccgttaaccaaatcccatacatataactgaagctcctcatacccaagtatggatccaagtcttagtcgaccctagtaagagaggagatctaatagtttacgctatgaagtgacaccagtgagacagacaattctccctccgccagtcagccgttgctgttcagattgataagagcacatgatactgatcgcatttcacagtctccgacatatcatacgagatcagacgcgaacgaacggtcagttatgtaccgcgtcgatcgtggtctaatccacaaccatcaggagcaatgacttcaatatacgcgacacacggtttacgaaaaaacaagctaatttaggagaaagcatacggtcatagagtctgtaactcactcgacgctggtatatacccaaatagagcatacaaccgtgctaagacattcacacagttacattagaagagacagcacgcacattgtacccgagggtgaacgacagtggtgttaaaccgagccggcaggataacaccgtaagccgatgtcgcgaacgcgtagacaataaatacacattgatgtcccgttaagtatagcgggaccacttgttagtgacagtgggactaccaccgtaggcgtttcaggctggtcctcctataacgtgttttagaccgctaggttgacaacttttgaaccgtggtccccagttgcacaggacgcggctgggtacaataggagtcaccacgtgccacagcaccgcaagaccaggaacccccatacttgcgaagggcttttctaaaatatttactataaaagtggccgaaaagcaaggatacccctgaaatcaaaaatcacaaacagggggctcccccttagagagctttaacgcaagagaccccgttggccattttaaagagagaatttttcagaggctttggggggcccggaacccattccggggacggcacggaacacgcgcaaaagcctccccgaaaccaaggtaccaatgcgataacagaaccttttccaacccaaggttcaaaagtgcgaagactaaccgtaattacgtccacaagttggaatcgccaaattaacacttggaccaaaaaacgtggaacacaaggtttaccctcttagggggaatc

SEQ ID NO: 653425 - DNA, 227 bp, Homo sapiens
  misc_feature (145)..(145): n is a, c, g, or t
gtgcccacgtgagagttggtgagggcgatgcagcccagctgcagtgctaggtagatcaggtctaccagcttcagtgcctatccagcccctgttctggggcctgtgtgcttaccacccggttgggtattgtggcggcagggccagngccatgctgcataagatcgccagcagttgtcagcaccacagtcctcagtcctctgtccactggcgaagtgctggtgtgacaa

SEQ ID NO: 653426 - DNA, 134 bp, Homo sapiens
gtgttagaaatacaaggcagctccctgcatctattggctcccactgtactgacagccagatcgttcagaaagaggcagagcgggcgaacgtgccaaggagcgggagaagcggcgaaaggagcaagaagaagaag

SEQ ID NO: 653427 - DNA, 3244 bp, Homo sapiens
  misc_feature (253)..(253): n is a, c, g, or t
  misc_feature (257)..(258): n is a, c, g, or t
  misc_feature (260)..(261): n is a, c, g, or t
  misc_feature (263)..(263): n is a, c, g, or t
  misc_feature (265)..(265): n is a, c, g, or t
  misc_feature (269)..(269): n is a, c, g, or t
  misc_feature (276)..(276): n is a, c, g, or t
  misc_feature (298)..(298): n is a, c, g, or t
  misc_feature (453)..(453): n is a, c, g, or t
gctgcgatggctgccgtgcgaagggctggagaagcggagtgtctcggttcctctcaggtcctggacgttccttgacgccgccagtgggggggggccctgtggcggtcgccaccacgtgtagtcatgtacccgaccgcgccgcgccgcctcatcgggacttcatctcggtgactctgagcttggcgagagctagtgacaacagcaagagttggtgagggcgctcgctgctggcacggaacatggcacagcaacntgcnngnntngngatncgcggantatatctcttcctcctgccttnctgcttttctgtggactcctcttctacatcaacttggctgaccattggaaagctctggctttcaggctagaggaagagcagaagatgaggccagaaattgctgggttaaaaccagcaaatccacccgtcttaccagctcctcagaaggcggacancgaccctgagaacttacctgagatttcgtcacagaagacacaaagacacatccagcggggaccacctcacctgcagattagacccccaagccaagacctgaaggatgggacccaggaggaggccacaaaaaggcaagaagcccctgtggatccccgcccggaaggagatccgcagaggacagtcatcagctggaggggagcggtgatcgagcctgagcagggcaccgagctcccttcaagaagagcagaagtgcccaccaagcctcccctgccaccggccaggacacagggcacaccagtgcatctgaactatcgccagaagggcgtgattgacgtcttcctgcatgcatggaaaggataccgcaagtttgcatggggccatgacgagctgaagcctgtgtccaggtccttcagtgagtggtttggcctcggtctcacactgatcgacgcgctggacaccatgtggatcttgggtctgaggaaagaatttgaggaagccaggaagtgggtgtcgaagaagttacactttgaaaaggacgtggacgtcaacctgtttgagagcacgatccgcatcctgggggggctcctgagtgcctaccacctgtctggggacagcctcttcctgaggaaagctgaggattttggaaatcggctaatgcctgccttcagaacaccatccaagattccttactcggatgtgaacatcggtactggagttgcccacccgccacggtggacctccgacagcactgtggccgaggtgaccagcattcagctggagttccgggagctctcccgtctcacaggggataagaagtttcaggaggcagtggagaaggtgacacagcacatccacggcctgtctgggaagaaggatgggctggtgcccatgttcatcaatacccacagtggcctcttcacccacctgggcgtattcacgctgggcgccagggccgacagctactatgagtacctgctgaagcagtggatccagggcgggaagcaggagacacagctgctggaagactacgtggaagccatcgagggtgtcagaacgcacctgctgcggcactccgagcccagtaagctcacctttgtgggggagcttgcccacggccgcttcagtgccaagatggaccacctggtgtgcttcctgccagggacgctggctctgggcgtctaccacggcctgcccgccagccacatggagctggcccaggagctcatggagacttgttaccagatgaaccggcagatggagacggggctgagtcccgagatcgtgcacttcaacctttacccccagccgggccgtcgggacgtggaggtcaagccagcagacaggcacaacctgctgcggccagagaccgtggagagcctgttctacctgtaccgcgtcacaggggaccgcaaataccaggactggggctgggagattctgcagagcttcagccgattcacacgggtgagcacctgtcctcgccccgcgtggtcacggccaccgggccacaggcacggctgggctgtggggctcaggttggctccgctcttggtggtggctgtgacctgggtccgggagggcgggcttgccgcagcctcggggtggccacgctgcagcttgggggccctggcatccccatccccactgagcttcatggttgtgggacccagagtacttggaggggctgggcacccctcattttcatttctcagggcctgtctagggagggtctctgctgtgggcccagcatccccccagtttaggaggcacacgcacccatgactggggcaccatccccactgtggaccaggccctgttttaggtcacgccctccacgccagagtgtcacctcctggctctgctgtgatcttggcctgaggcccccgctgcctccgctcccaccgtctgccctgtgccctgtgccctgtgcggcaactgtgaggccccctgagcccaggttctgggggaggcggtttctgtcgtggtcacttgagggttgttggcatttccaggtgggctccggtggaaccacacggctcgcctgggggtggccatcatccaggcgccctccaccctgagcttgcgctgggggccacattcactatggggtggagagcgcttcggtgatgaggctgaggggggtgcagggtgccccccgtgtggtgacgaggccctggctgctgcacaggtcccctcgggtggctattcttccatcaacaatgtccaggatcctcagaagcccgagcctagggacaagatggagagcttcttcctgggggagacgctcaagtatctgttcttgctcttctccgatgacccaaacctgctcagcctggacgcctacgtgttcaacaccgaagcccaccctctgcctatctggacccctgcctagggtggatggctgctggtgtggggacttcgggtgggcagaggcaccttgctgggtctgtggcattttccaagggcccacgtagcaccggcaaccgccaagtggcccaggctctgaactggctctgggctcctcctcgtctctgctttaatcaggacaccgtgaggacaagtgaggccgtcagtcttggtgtgatgccccaatccaagggtctggaggggctgccgtgactccagaggcctgaggctccagggctggctctggtgtttacaagctggactcagggatcctcctggccgccccgcagggggcttggagggctggacggcaagtccgtctagctcacgggcccctccagtggaatgggtcttttcggtggagataaaagttgatttgctcta

SEQ ID NO: 653428 - DNA, 3203 bp, Homo sapiens
  misc_feature (253)..(253): n is a, c, g, or t
  misc_feature (257)..(258): n is a, c, g, or t
  misc_feature (260)..(261): n is a, c, g, or t
  misc_feature (263)..(263): n is a, c, g, or t
  misc_feature (265)..(265): n is a, c, g, or t
  misc_feature (269)..(269): n is a, c, g, or t
  misc_feature (276)..(276): n is a, c, g, or t
  misc_feature (298)..(298): n is a, c, g, or t
  misc_feature (453)..(453): n is a, c, g, or t
gctgcgatggctgccgtgcgaagggctggagaagcggagtgtctcggttcctctcaggtcctggacgttccttgacgccgccagtgggggggggccctgtggcggtcgccaccacgtgtagtcatgtacccgaccgcgccgcgccgcctcatcgggacttcatctcggtgactctgagcttggcgagagctagtgacaacagcaagagttggtgagggcgctcgctgctggcacggaacatggcacagcaacntgcnngnntngngatncgcggantatatctcttcctcctgccttnctgcttttctgtggactcctcttctacatcaacttggctgaccattggaaagctctggctttcaggctagaggaagagcagaagatgaggccagaaattgctgggttaaaaccagcaaatccacccgtcttaccagctcctcagaaggcggacancgaccctgagaacttacctgagatttcgtcacagaagacacaaagacacatccagcggggaccacctcacctgcagattagacccccaagccaagacctgaaggatgggacccaggaggaggccacaaaaaggcaagaagcccctgtggatccccgcccggaaggagatccgcagaggacagtcatcagctggaggggagcggtgatcgagcctgagcagggcaccgagctcccttcaagaagagcagaagtgcccaccaagcctcccctgccaccggccaggacacagggcacaccagtgcatctgaactatcgccagaagggcgtgattgacgtcttcctgcatgcatggaaaggataccgcaagtttgcatggggccatgacgagctgaagcctgtgtccaggtccttcagtgagtggtttggcctcggtctcacactgatcgacgcgctggacaccatgtggatcttgggtctgaggaaagaatttgaggaagccaggaagtgggtgtcgaagaagttacactttgaaaaggacgtggacgtcaacctgtttgagagcacgatccgcatcctgggggggctcctgagtgcctaccacctgtctggggacagcctcttcctgaggaaagctgaggattttggaaatcggctaatgcctgccttcagaacaccatccaagattccttactcggatgtgaacatcggtactggagttgcccacccgccacggtggacctccgacagcactgtggccgaggtgaccagcattcagctggagttccgggagctctcccgtctcacaggggataagaagtttcaggaggcagtggagaaggtgacacagcacatccacggcctgtctgggaagaaggatgggctggtgcccatgttcatcaatacccacagtggcctcttcacccacctgggcgtattcacgctgggcgccagggccgacagctactatgagtacctgctgaagcagtggatccagggcgggaagcaggagacacagctgctggaagactacgtggaagccatcgagggtgtcagaacgcacctgctgcggcactccgagcccagtaagctcacctttgtgggggagcttgcccacggccgcttcagtgccaagatggaccacctggtgtgcttcctgccagggacgctggctctgggcgtctaccacggcctgcccgccagccacatggagctggcccaggagctcatggagacttgttaccagatgaaccggcagatggagacggggctgagtcccgagatcgtgcacttcaacctttacccccagccgggccgtcgggacgtggaggtcaagccagcagacaggcacaacctgctgcggccagagaccgtggagagcctgttctacctgtaccgcgtcacaggggaccgcaaataccaggactggggctgggagattctgcagagcttcagccgattcacacgggtgagcacctgtcctcgccccgcgtggtcacggccaccgggccacaggcacggctgggctgtggggctcaggttggctccgctcttggtggtggctgtgacctgggtccgggagggcgggcttgccgcagcctcggggtggccacgctgcagcttgggggccctggcatccccatccccactgagcttcatggttgtgggacccagagtacttggaggggctgggcacccctcattttcatttctcagggcctgtctagggagggtctctgctgtgggcccagcatccccccagtttaggaggcacacgcacccatgactggggcaccatccccactgtggaccaggccctgttttaggtcacgccctccacgccagagtgtcacctcctggctctgctgtgatcttggcctgaggcccccgctgcctccgctcccaccgtctgccctgtgccctgtgccctgtgcggcaactgtgaggccccctgagcccaggttctgggggaggcggtttctgtcgtggtcacttgagggttgttggcatttccaggtgggctccggtggaaccacacggctcgcctgggggtggccatcatccaggcgccctccaccctgagcttgcgctgggggccacattcactatggggtggagagcgcttcggtgatgaggctgaggggggtgcagggtgccccccgtgtggtgacgaggccctggctgctgcacaggtcccctcgggtggctattcttccatcaacaatgtccaggatcctcagaagcccgagcctagggacaagatggagagcttcttcctgggggagacgctcaagtatctgttcttgctcttctccgatgacccaaacctgctcagcctggacgcctacgtgttcaacaccgaagcccaccctctgcctatctggacccctgcctagggtggatggctgctggtgtggggacttcgggtgggcagaggcaccttgctgggtctgtggcattttccaagggcccacgtagcaccggcaaccgccaagtggcccaggctctgaactggctctgggctcctcctcgtctctgctttaatcaggccccaatccaagggtctggaggggctgccgtgactccagaggcctgaggctccagggctggctctggtgtttacaagctggactcagggatcctcctggccgccccgcagggggcttggagggctggacggcaagtccgtctagctcacgggcccctccagtggaatgggtcttttcggtggagataaaagttgatttgctcta

SEQ ID NO: 653429 - DNA, 656 bp, Homo sapiens
  misc_feature (79)..(79): n is a, c, g, or t
  misc_feature (114)..(114): n is a, c, g, or t
  misc_feature (117)..(117): n is a, c, g, or t
  misc_feature (431)..(431): n is a, c, g, or t
  misc_feature (436)..(436): n is a, c, g, or t
  misc_feature (439)..(439): n is a, c, g, or t
  misc_feature (478)..(478): n is a, c, g, or t
  misc_feature (518)..(518): n is a, c, g, or t
  misc_feature (571)..(571): n is a, c, g, or t
  misc_feature (602)..(603): n is a, c, g, or t
aaaatatggtagaacagaagtgaagtctgccctatagtaggatggtgagataattaagtggaactaccagatccatgtngtgattctttccagtatcattcagcagcccttggncanttgcgaggcaagtcgtcaatggggtatggagattttccaggtgggtgtggttgaaggaagggaagaaagagtttaggagcacattacaagaagaaggtgactgtaaggtccaggctgagcaggaaggtaaagcaagaaggaaacatgaggttgtgaagagaagtttagagggatgaggaggcaggagaggtgaacagttgcaggatgtagctagagtggcgatgttagatcttggggccagagagctttacaatgattatgaagatcaaagggcattagaatcaagctataaagagccactgtttgatgttggnatgtnagnatgctgcaggtggatgtctgcacattgatggtgagaacntggtcaccctggccctgctgggtctttgctaaagagactntgctctgttcttggggccgtctttcatcacctgattagagcagtggtccccanatggtgttctttggaccatctgtataaaatnntcataggtcaaggataaaatggaaaaacagagaaaatgtcacagaaatgtgcc

SEQ ID NO: 653430 - DNA, 103 bp, Homo sapiens
ctctcatcacatggtattttatggacttttgaccctcctcttgctattcgctctcttagcgaatgtccacggacctggtctgaccgattagtctgcctgatta

SEQ ID NO: 653431 - DNA, 1345 bp, Homo sapiens
  misc_feature (253)..(253): n is a, c, g, or t
  misc_feature (257)..(258): n is a, c, g, or t
  misc_feature (260)..(261): n is a, c, g, or t
  misc_feature (263)..(263): n is a, c, g, or t
  misc_feature (265)..(265): n is a, c, g, or t
  misc_feature (269)..(269): n is a, c, g, or t
  misc_feature (276)..(276): n is a, c, g, or t
  misc_feature (298)..(298): n is a, c, g, or t
  misc_feature (453)..(453): n is a, c, g, or t
  misc_feature (1304)..(1304): n is a, c, g, or t
  misc_feature (1319)..(1319): n is a, c, g, or t
gctgcgatggctgccgtgcgaagggctggagaagcggagtgtctcggttcctctcaggtcctggacgttccttgacgccgccagtgggggggggccctgtggcggtcgccaccacgtgtagtcatgtacccgaccgcgccgcgccgcctcatcgggacttcatctcggtgactctgagcttggcgagagctagtgacaacagcaagagttggtgagggcgctcgctgctggcacggaacatggcacagcaacntgcnngnntngngatncgcggantatatctcttcctcctgccttnctgcttttctgtggactcctcttctacatcaacttggctgaccattggaaagctctggctttcaggctagaggaagagcagaagatgaggccagaaattgctgggttaaaaccagcaaatccacccgtcttaccagctcctcagaaggcggacancgaccctgagaacttacctgagatttcgtcacagaagacacaaagacacatccagcggggaccacctcacctgcagattagacccccaagccaagacctgaaggatgggacccaggaggaggccacaaaaaggcaagaagcccctgtggatccccgcccggaaggagatccgcagaggacagtcatcagctggaggggagcggtgatcgagcctgagcagggcaccgagctcccttcaagaagagcagaagtgcccaccaagcctcccctgccaccggccaggacacagggcacaccagtgcatctgaactatcgccagaagggcgtgattgacgtcttcctgcatgcatggaaaggataccgcaagtttgcatggggccatgacgagctgaagcctgtgtccaggtccttcagtgagtggtttggcctcggtctcacactgatcgacgcgctggacaccatgtggatcttgggtctgaggaaagaatttgaggaagccaggaagtgggtgtcgaagaagttacactttgaaaaggacgtggacgtcaacctgtttgagagcacgatccgcatcctgggggggctcctgagtgcctaccacctgtctggggacagcctcttcctgaggaaagctgaggattttggaaatcggctaatgcctgccttcagaacaccatccaagattccttactcggatgtgaacatcggtactggagttgcccacccgccacggtggacctccgacagcactgtggccgaggtgaccagcattcagctggagttccgggagctctcccgtctcacaggggataagaagtttcaggtaaggggcaggctttctgctgatgcancccctggagctaccntgctcatcaccagatggccccaggta

SEQ ID NO: 653432 - DNA, 658 bp, Homo sapiens
tccttgcggtggcaggcaggatgttgtgaaatggtgcaggcaaaggccccagatctagcttggctggctcccgaacatgtccatatttgaagtgctgcctcaggcctggcacggcatgaagcagctgtggtccctggaggcaagaaggcagctcacggggccttccatttccagccaggcctcatctggtggatagtgtgcctagagtagcgaaagtactagagtgcccgtgcggcggagaagtcccaccaggatgccccccctcccctgataagcccgtcttctccctcgtggacaggagtcagccagtaggttgctgtggttacatgccggtgcctggaattcctccttagggtccctggggaagagctattgcttaacgcaggatgtgctagggtgtagggtctcgggcttatactttgatggctttggatgtcttacgttgtttcatggctgtcgttcttggctctttgtttctgtaggagcgcctcttccaagcagtggaggcctgagggcttgagggatggctggtgcgaccaaccagctattggagcacttgtgctcctggcacgagggagacgacaggatgtggagccttcccaggaggaactgggagaggtggcccgtgtcggccagtgcctatggctttctgttgacc

SEQ ID NO: 653433 - DNA, 117 bp, Homo sapiens
gggggtttttttttccaaagggaaaaaaaaaaacccttttttggttaaaaggcttcccctttttttaaataaaccctttttttgggaaaaaatgttaatttaaaagggcccccttta

SEQ ID NO: 653434 - DNA, 669 bp, Homo sapiens
tcttaacccgttcagtgctgccagtcaaccaagggtctgtgagtgtcagcgggggatcaggcagcaaagcctttttccccttgtgcctgtgatccttcgaaaggttgagccactgtgggctggtgggggaaggggtcaaggccatattcccaatacgtgtagggcgagggtccctgtgcgtggcacattcaggctgtgctgggaagaagagacctgggctgggaaggaaccgggtccccgagcggttcgtgctgcctcgcctcttccccctttggctcagctgagcagttgggtggtttctatgcccgcaagtttcaggaagttattcacaaaagaaaaatacatttttccccccgaggggttggggcaaggacaggggagagagtgctaggaaatgagtccccggggaaaggggcaccgggccgtgatgtaaatatctccggcctcccacgtgacgggattggcctaggaccttcgagaccaacagatttcagaaccctcagaactttgccccgggtgccttggtgggacaaagtgagggccgtacagggaagtgaaattctgagttgtgggggctaagccgtgacccccttctcaatgttccccgcccaacccattctgggcttcagaaattttttttcccagttgtggtttgtgcccaggcttggt

SEQ ID NO: 653435 - DNA, 7886 bp, Homo sapiens
  misc_feature (5008)..(5008): n is a, c, g, or t
  misc_feature (5011)..(5011): n is a, c, g, or t
  misc_feature (5043)..(5043): n is a, c, g, or t
  misc_feature (5054)..(5055): n is a, c, g, or t
  misc_feature (5061)..(5061): n is a, c, g, or t
  misc_feature (5071)..(5071): n is a, c, g, or t
  misc_feature (5077)..(5078): n is a, c, g, or t
  misc_feature (5081)..(5083): n is a, c, g, or t
  misc_feature (5098)..(5098): n is a, c, g, or t
agcggattgtgcgaggcaccgggacgtcggcggctggcggagccgggctgggctgaagctggagcggcggtggcggcggcgtagggaggccggggccggggctgaggccgcggccgggtctgcgaggcccttggggcggcaggcggcggcggcccggggctcgagcccggaggcaggagcagccgccatggccgagagcatcataattcgtgtccagtccccggatggagtgaagcggatcacagcaacaaagagagaaacagcagcaacatttttgaaaaaggttgcaaaggagtttggcttccaaaataatggcttctcggtttacatcaatagaaacaagaccggagagataacagcctcctccaacaaatccctcaacttgctaaaaatcaagcatggcgatttgttgttcctgtttccctcgagccttgctgggccctcatctgaaatggagacgtcagttccaccgggcttcaaagtctttggcgctcccaacgtggtggaggatgagattgatcagtacctcagcaaacaggacgggaagatttacagaagccgagacccacagctatgccgccacggccctttggggaaatgcgtgcactgcgtccctctagagccattcgatgaggactatctaaaccatctcgagcctcccgtgaagcacatgtccttccacgcctacatccggaagctgactggaggggctgacaaggggaagtttgttgccctggagaacatcagctgcaagattaagtcagggtgcgaggggcacctcccgtggccgaatggcatctgtactaagtgccagccgagcgccatcacgctgaacagacagaagtacaggcatgtggacaatatcatgtttgagaatcacaccgtcgctgaccgctttcttgacttctggagaaagacagggaaccagcattttgggtacttatacggacggtacacggagcacaaagacattccccttggcatcagggctgaagtggctgcgatttatgagccacctcagattggtacacagaacagcttggagcttcttgaggatccaaaagctgaagtggtcgatgaaattgctgccaaacttggcctgcggaaggttggctggatatttacagacctcgtctcagaagatacccgaaagggtaccgtccgctacagtcgaaataaggacacctatttcctaagttcagaagagtgcatcactgcaggagacttccagaacaagcatcccaacatgtgccggctctctccagacggacattttggatccaagtttgttactgcagtggctacaggtggtcctgacaaccaagtccactttgaagggtaccaggtgtccaatcagtgtatggcactggtccgtgatgagtgtttgctgccatgcaaggacgccccggagcttggctacgccaaggagtctagcagtgagcagtacgtgcctgatgtgttttataaggacgtagacaagtttggcaacgagatcacccagctggcccggcccctgcctgtggagtatctcatcatagacatcacaacaactttccccaaggatccagtttacactttttctatttcgcaaaatccatttcctattgaaaaccgggatgtattgggtgagacacaggacttccatagcttggccacctatttgtctcagaatacctcatctgtgttcttggataccatctcagatttccacctcttgctgttcctggtcaccaatgaagttatgcctctgcaggacagcatcagcttgctgctggaggccgtgcggaccagaaatgaggagctcgcccagacatggaagaggtctgagcagtgggccaccatcgagcagctgtgcagtgagtacccccaccccctgccccggcaccccgtggctggggccggagagcagcccactctgcacagctccccactgccggtggtgccctggattccgcacccagctgcatcctggcaggtgccatcggcaatgcaacgagtagagactcggcctccctgccaggcacgtggcaggctccggtgatggagcagacatgttgtccaggccgtacgtcttaggtacacagccctgtaaattttataaacctgtacatcagagatactaatctccaggcatcctaggagcactttgaacatcattgtcttaagagaatcagaaactttatggaagcgccggaagcgtgggaccttttggtctccttgagaatttccctttagtgcttaaagctgtaaggaggagaagcctgcagcatccatgttgttgctggtggacactacggaacggaccgcaggcattgcgtgtcttccggaccctcagtcaccaggtcctgaacgattccccactcgtgagaaccttctgtcagcattgctgcagggactcctcacgcaccgtggtgcctcgtgcagcccgagtgccctgagtccctgcagctgagagcaccagagtgcccgggagctacggccctggacaaatgctagaatccttctgttaacacagccttcaaaagacacatcaaacacctttataccatttcctgttttttttttttttttttgagacggagtttggctcttgtcacccaggctggagtgtggtggcgtgatcttgcctcactgcaacctccacctcctgggttcaaacgattctcctgcctcagcctcctgagtagctgggactacaggcatgtgccaccatgcctggataatttttgtattcttagtagagccagggtttcaccatgttagccaggctggtctcgaactcctgaccttgtgatctgcttgcctctgcctcccagagtgttgggattacaggtgtgagccaccacgcccagccgaggttttcttttcacacaattctttgttttttatttttatttttgtagagacagggtctcactctattgccgaggctggagtgcagttgcacaatcgtaactcactgcagcctcaaactccaggctcaagtgatctttctgcttcagcctgctgagtaactgggaccacaggcttgcaacaccacacccagctaattcttggggctttgttgttgctttttatttgtttgttttttaaaaataattttaacttattttagattcacagggtacatgtgcaggtttgtcacctgggtatattgcctgatgctgaggttggggtatgattgatcacatcacccaggtactacacatagtacctaatagtttttcagcccgccctgctctttgtgtgtgtgtgtgtgtgtgtgtgtgtgtgtgtgtgtgtgtgtgttttgagctggagcctcaccctgtctcccaggctggagtgcagtggcgcaatcttagctcactgcaaactctgcctcctgggttgaagcgattcccctccctcggcctcccgagtagctgggattacagatgtgtaccaccacacctggcgttgccatctttatgtacgtgagtacccatgtttagctcccacttataaatgaaaacatgtagtatttggtttgctgttcctgcattagtttgcttagaataatggccttcaactgcatccatgttgctgcaaaggacatgatttcattcctttttatggctgcaaaattttttaatatttttgtatcaatgaggtctcactgtgttgcccagactggtctcaaactttggcctcaagcattccttgcacctcagcctcacaaagtcctgagattatacctgggagccactgcacccagccctttgatgcagttctcaatgacaccagtctttttttttttttttcttttttgtttcccttttagagacagggtttcgctctgttgcctaggctggagtgcagtggagtgatcatagctcactacagccttcaattcctgagctcaagcgatcctcctgcatcagctttcggagtacctaggagtataaacatgagccactacacccaactaatgtttttggttggtgttttttttttttctttaagagatagggttggccgggcccggtggtgggattacagacgtgtatacacaagacacaaagatcagctcaggatgggtcataggcctaatggtaaaaggtaaaactatgaagcaggctgggcatgatgtctcatagctataatcctaacactctaggaggccaaagctggaggacactgtagcccagaagtgtgagaccagcccacacagcatagtgaagccccgtctgtacaaaaaaacaatattaaaaaaaaaagaattagctgggcatggtgagtggtccacgcctataatcccagcttctggggaggctgaaatgggaggatcccatgagtcaggagctcgaggtcacagtgagccatgattataccactccagcctgaatgacagagcaataccctgtcttaaaaaaataaaaactgtaaaacagttattaagttgaatctcttcagggccttggggtacgcaaagattcttttaggcaggatgcaggaccttggggtagaacacagaaaaacactggcataaaaataggtaaattgataaataaatttatctaaacaaaacacttgtgctcatcacagggcactgttagaaacatgaaaaggcaccaatgggggacgcagtattagcagtacatacacacaacatgacttctatctgaaacttaaaaataactctgcctgttgttaatcaaacagaaagcagaagaagaagctgggcggagggtgaaacgtttcacaaaaggaaatgcaggtcgggcatggtggctcgcgcctgtaatcccagcactttgggaggccgaggcggtggatcatttgaggtcaggagttcgagacagccaggccagcatggtgaaaacccatctctactaaaaataaaagaaattagccaggtgtggtggcacgtgcctgtggtcctagctgcttgggaggctgaggtaggagaatcgcttgaacccgggaggcagaggttgcagcgagccgagattgcgccactgcactccagcctgggtgacagagcaanacnctacctcagaaaaaaaaaaaaaaaaaaaaaanaaaaaaaaaanntaaatnaaaaatcccntggggnnttnnntttattttataaggngaaggaccctctgcaacaaaaaggaaccagcaagcacaggctccctgttactccctgtggtgcaggaggcatttttctgagggcattaagcacttcaaagtgtgcctgtggtgggagtgctgtgtgggcaggaccagcactgggtgggatgttgggggcggggagctctcagctgcctgcccctgcccccatgcccacactctggcagtctctggtgggccagaaatgatgagtgctcatttctcttccaccctgcaggcacagttggcgggcagctcccaggtctccatgagtacggcgccgtcgggggctccacacacacggccactgcagccatgtgggcctgtcagcactgcacgttcatgaaccagccaggcacaggccactgcgagatgtgcagcctccccaggacctagggcgcctgccctctgctggctaggaccgggcccagcccagcccttcctgaagccagaagcgttgctgagtgtgttccctgtaactgccccatagtgggcagccctggaggaacaaggggctggctgtcctgggctccctgacccactgaagcttctcagcacgttcctccctggagagcgggcgccacggctggtattctgcaggctgaatgcagtctccagactggaaacgcagagcggctcctcacgcctaatcctgttgacaagtcccccgccgtgttggaaagacctctcgcctctacgtggcacctggaattggggcgcacagggaggggcggatgctgccaccacccagccttctctttattttcagtgctttttgtttggcctccctgcccccatgtttttctggctgggagctcctggttacccccttgtctgactgcttggtggcaggcaccctgcctgtgagggccactttcctcttctagtagctgttgtctggtggggacgcagtggccctggacacggctcccctctgcaggtctgcaggtcggtttgctgcctgccctcctcctctcacccgatgtccaggtgggattttaaagtctgcattggttataataacagttatcagtaattcctgcccagaagacttttatttatttttttttaagataaaaactgcacaaaaggggagtgagagagactagtttccacatccttccctcctttagtgaagcccccgaggttgtgtccagggtgatgagtgtggacgggggcaccagtcagttctcccttgaagtaaacctcagtgcctgagacttttctaccaagccacacagctgcagcaactgcagatactgcgggctgagcaggagcagtggtggcgcctgccctgaggctgccctgcgatggcctgggtgggagagctgggtcaccggtgccgatgctctggccctccccaatacgctgcttcgtcccactgcaccgcctggctgagggcgttaggggctgtgcctcttgtgagggccatttgggacctccctggggcactgcacaattgatagtgtaccaatagagggagactgggcgatctggaacagcacgtggtggggtcctgcttgtgtgctctgcgttcctctgtggcgtggccaggccggggcctggctcttacccggggagtggtgggcatctcgatgcttctttgccttaatgatggccacatctgggctgctctgcacccacgggagaggctggcccagctgcagactgcttagggacttctgtgtccatcctggggggtaagcccacgtgacccacattcttggcactatgaacagagaacatttgcctgttggcttctgaagtggtcagggccatggctgacacctccaggtccgcctggcatgggacaccaagtggaaggcccaagcagctcatctgctcttgggaccaggggccagttgggttgggtctggtcacggcagagctattgtggagggtcaggaagggtggagaggagctgggttgaagcggactgctgcggatgcaactcccagcttgcccaccgcgggctgtctgctctccctcctagcagctgtcacactgaagttttgtcctctgctgtctcctctggtcctgagatgagctgtgagcctaggtggccaaggcttcctgcattgcttccctgtgagtccaaggccttcccccaccactgggcagaggctggacagcacggacttctagagagagccgcgttgccagttcctctcccactcgctcgtccttatccaccacgctattatagtttccgttgtcctccaccagcatttcccttactctgaagttccggcattcacatcattcatgttttcttttgtcttttagctaaaggaaaagcattggcgatttgtctgattctggttttgagttactctttgttcagtaatgcactttattttattgtccaaagagagtcagagctaagcatacaggcttgggggtgagccctgctgtgagagttcaggccctgggaggctcagccacctcctcttgtgggaaggaggtctcagccccacctcgcatcttcacctgcccttggtgtggacacaccctctcatgctaccagcaccataatccagtgggggtgactgggtgcacacctgcccaggtgaacacagcggctgccagtctcctggtcccgagaggaggtggggcctggccctggctccctccaaccagctgctcctgggacacaggtgctcctgcttcggctctgtttcggctcacaggtgtgcatcactgggcttggatttgcattacattgaccccagccctgcagtggaacctaataaaagcgcctgaagcaa

SEQ ID NO: 653436 - DNA, 5764 bp, Homo sapiens
  misc_feature (2886)..(2886): n is a, c, g, or t
  misc_feature (2889)..(2889): n is a, c, g, or t
  misc_feature (2921)..(2921): n is a, c, g, or t
  misc_feature (2932)..(2933): n is a, c, g, or t
  misc_feature (2939)..(2939): n is a, c, g, or t
  misc_feature (2949)..(2949): n is a, c, g, or t
  misc_feature (2955)..(2956): n is a, c, g, or t
  misc_feature (2959)..(2961): n is a, c, g, or t
  misc_feature (2976)..(2976): n is a, c, g, or t
agcggattgtgcgaggcaccgggacgtcggcggctggcggagccgggctgggctgaagctggagcggcggtggcggcggcgtagggaggccggggccggggctgaggccgcggccgggtctgcgaggcccttggggcggcaggcggcggcggcccggggctcgagcccggaggcaggagcagccgccatggccgagagcatcataattcgtgtccagtccccggatggagtgaagcggatcacagcaacaaagagagaaacagcagcaacatttttgaaaaaggttgcaaaggagtttggcttccaaaataatggcttctcggtttacatcaatagaaacaagaccggagagataacagcctcctccaacaaatccctcaacttgctaaaaatcaagcatggcgatttgttgttcctgtttccctcgagccttgctgggccctcatctgaaatggagacgtcagttccaccgggcttcaaagtctttggcgctcccaacgtggtggaggatgagattgatcagtacctcagcaaacaggacgggaagatttacagaagccgagacccacagctatgccgccacggccctttggggaaatgcgtgcactgcgtccctctagagccattcgatgaggactatctaaaccatctcgagcctcccgtgaagcacatgtccttccacgcctacatccggaagctgactggaggggctgacaaggggaagtttgttgccctggagaacatcagctgcaagattaagtcagggtgcgaggggcacctcccgtggccgaatggcatctgtactaagtgccagccgagcgccatcacgctgaacagacagaagtacaggcatgtggacaatatcatgtttgagaatcacaccgtcgctgaccgctttcttgacttctggagaaagacagggaaccagcattttgggtacttatacggacggtacacggagcacaaagacattccccttggcatcagggctgaagtggctgcgatttatgagccacctcagattggtacacagaacagcttggagcttcttgaggatccaaaagctgaagtggtcgatgaaattgctgccaaacttggcctgcggaaggttggctggatatttacagacctcgtctcagaagatacccgaaagggtaccgtccgctacagtcgaaataaggacacctatttcctaagttcagaagagtgcatcactgcaggagacttccagaacaagcatcccaacatgtgccggctctctccagacggacattttggatccaagtttgttactgcagtggctacaggtggtcctgacaaccaagtccactttgaagggtaccaggtgtccaatcagtgtatggcactggtccgtgatgagtgtttgctgccatgcaaggacgccccggagcttggctacgccaaggagtctagcagtgagcagtacgtgcctgatgtgttttataaggacgtagacaagtttggcaacgagatcacccagctggcccggcccctgcctgtggagtatctcatcatagacatcacaacaactttccccaaggatccagtttacactttttctatttcgcaaaatccatttcctattgaaaaccgggatgtattgggtgagacacaggacttccatagcttggccacctatttgtctcagaatacctcatctgtgttcttggataccatctcagatttccacctcttgctgttcctggtcaccaatgaagttatgcctctgcaggacagcatcagcttgctgctggaggccgtgcggaccagaaatgaggagctcgcccagacatggaagaggtctgagcagtgggccaccatcgagcagctgtgcaattcacagggtacatgtgcaggtttgtcacctgggattacagacgtgtatacacaagacacaaagatcagctcaggatgggtcataggcctaatggtaaaaggtaaaactatgaagcaggctgggcatgatgtctcatagctataatcctaacactctaggaggccaaagctggaggacactgtagcccagaagtgtgagaccagcccacacagcatagtgaagccccgtctgtacaaaaaaacaatattaaaaaaaaaagaattagctgggcatggtgagtggtccacgcctataatcccagcttctggggaggctgaaatgggaggatcccatgagtcaggagctcgaggtcacagtgagccatgattataccactccagcctgaatgacagagcaataccctgtcttaaaaaaataaaaactgtaaaacagttattaagttgaatctcttcagggccttggggtacgcaaagattcttttaggcaggatgcaggaccttggggtagaacacagaaaaacactggcataaaaataggtaaattgataaataaatttatctaaacaaaacacttgtgctcatcacagggcactgttagaaacatgaaaaggcaccaatgggggacgcagtattagcagtacatacacacaacatgacttctatctgaaacttaaaaataactctgcctgttgttaatcaaacagaaagcagaagaagaagctgggcggagggtgaaacgtttcacaaaaggaaatgcaggtcgggcatggtggctcgcgcctgtaatcccagcactttgggaggccgaggcggtggatcatttgaggtcaggagttcgagacagccaggccagcatggtgaaaacccatctctactaaaaataaaagaaattagccaggtgtggtggcacgtgcctgtggtcctagctgcttgggaggctgaggtaggagaatcgcttgaacccgggaggcagaggttgcagcgagccgagattgcgccactgcactccagcctgggtgacagagcaanacnctacctcagaaaaaaaaaaaaaaaaaaaaaanaaaaaaaaaanntaaatnaaaaatcccntggggnnttnnntttattttataaggngaaggaccctctgcaacaaaaaggaaccagcaagcacaggctccctgttactccctgtggtgcaggaggcatttttctgagggcattaagcacttcaaagtgtgcctgtggtgggagtgctgtgtgggcaggaccagcactgggtgggatgttgggggcggggagctctcagctgcctgcccctgcccccatgcccacactctggcagtctctggtgggccagaaatgatgagtgctcatttctcttccaccctgcaggcacagttggcgggcagctcccaggtctccatgagtacggcgccgtcgggggctccacacacacggccactgcagccatgtgggcctgtcagcactgcacgttcatgaaccagccaggcacaggccactgcgagatgtgcagcctccccaggacctagggcgcctgccctctgctggctaggaccgggcccagcccagcccttcctgaagccagaagcgttgctgagtgtgttccctgtaactgccccatagtgggcagccctggaggaacaaggggctggctgtcctgggctccctgacccactgaagcttctcagcacgttcctccctggagagcgggcgccacggctggtattctgcaggctgaatgcagtctccagactggaaacgcagagcggctcctcacgcctaatcctgttgacaagtcccccgccgtgttggaaagacctctcgcctctacgtggcacctggaattggggcgcacagggaggggcggatgctgccaccacccagccttctctttattttcagtgctttttgtttggcctccctgcccccatgtttttctggctgggagctcctggttacccccttgtctgactgcttggtggcaggcaccctgcctgtgagggccactttcctcttctagtagctgttgtctggtggggacgcagtggccctggacacggctcccctctgcaggtctgcaggtcggtttgctgcctgccctcctcctctcacccgatgtccaggtgggattttaaagtctgcattggttataataacagttatcagtaattcctgcccagaagacttttatttatttttttttaagataaaaactgcacaaaaggggagtgagagagactagtttccacatccttccctcctttagtgaagcccccgaggttgtgtccagggtgatgagtgtggacgggggcaccagtcagttctcccttgaagtaaacctcagtgcctgagacttttctaccaagccacacagctgcagcaactgcagatactgcgggctgagcaggagcagtggtggcgcctgccctgaggctgccctgcgatggcctgggtgggagagctgggtcaccggtgccgatgctctggccctccccaatacgctgcttcgtcccactgcaccgcctggctgagggcgttaggggctgtgcctcttgtgagggccatttgggacctccctggggcactgcacaattgatagtgtaccaatagagggagactgggcgatctggaacagcacgtggtggggtcctgcttgtgtgctctgcgttcctctgtggcgtggccaggccggggcctggctcttacccggggagtggtgggcatctcgatgcttctttgccttaatgatggccacatctgggctgctctgcacccacgggagaggctggcccagctgcagactgcttagggacttctgtgtccatcctggggggtaagcccacgtgacccacattcttggcactatgaacagagaacatttgcctgttggcttctgaagtggtcagggccatggctgacacctccaggtccgcctggcatgggacaccaagtggaaggcccaagcagctcatctgctcttgggaccaggggccagttgggttgggtctggtcacggcagagctattgtggagggtcaggaagggtggagaggagctgggttgaagcggactgctgcggatgcaactcccagcttgcccaccgcgggctgtctgctctccctcctagcagctgtcacactgaagttttgtcctctgctgtctcctctggtcctgagatgagctgtgagcctaggtggccaaggcttcctgcattgcttccctgtgagtccaaggccttcccccaccactgggcagaggctggacagcacggacttctagagagagccgcgttgccagttcctctcccactcgctcgtccttatccaccacgctattatagtttccgttgtcctccaccagcatttcccttactctgaagttccggcattcacatcattcatgttttcttttgtcttttagctaaaggaaaagcattggcgatttgtctgattctggttttgagttactctttgttcagtaatgcactttattttattgtccaaagagagtcagagctaagcatacaggcttgggggtgagccctgctgtgagagttcaggccctgggaggctcagccacctcctcttgtgggaaggaggtctcagccccacctcgcatcttcacctgcccttggtgtggacacaccctctcatgctaccagcaccataatccagtgggggtgactgggtgcacacctgcccaggtgaacacagcggctgccagtctcctggtcccgagaggaggtggggcctggccctggctccctccaaccagctgctcctgggacacaggtgctcctgcttcggctctgtttcggctcacaggtgtgcatcactgggcttggatttgcattacattgaccccagccctgcagtggaacctaataaaagcgcctgaagcaa

SEQ ID NO: 653437 - DNA, 1112 bp, Homo sapiens
  misc_feature (218)..(218): n is a, c, g, or t
  misc_feature (220)..(220): n is a, c, g, or t
  misc_feature (222)..(222): n is a, c, g, or t
  misc_feature (317)..(317): n is a, c, g, or t
  misc_feature (358)..(358): n is a, c, g, or t
  misc_feature (360)..(360): n is a, c, g, or t
  misc_feature (393)..(393): n is a, c, g, or t
  misc_feature (408)..(408): n is a, c, g, or t
  misc_feature (419)..(420): n is a, c, g, or t
  misc_feature (427)..(427): n is a, c, g, or t
  misc_feature (430)..(430): n is a, c, g, or t
  misc_feature (435)..(435): n is a, c, g, or t
  misc_feature (442)..(442): n is a, c, g, or t
  misc_feature (457)..(457): n is a, c, g, or t
  misc_feature (474)..(474): n is a, c, g, or t
  misc_feature (477)..(478): n is a, c, g, or t
  misc_feature (489)..(489): n is a, c, g, or t
  misc_feature (522)..(522): n is a, c, g, or t
  misc_feature (528)..(528): n is a, c, g, or t
  misc_feature (530)..(530): n is a, c, g, or t
  misc_feature (540)..(540): n is a, c, g, or t
  misc_feature (546)..(546): n is a, c, g, or t
  misc_feature (549)..(549): n is a, c, g, or t
  misc_feature (553)..(553): n is a, c, g, or t
  misc_feature (575)..(575): n is a, c, g, or t
tcagtgatctctggagaaataggttctggcgacgctggagactcatccagcctgacgggcgaaagctcggcagatacatgaaatggccagaaatcaatacttctccgagctgctactggttgccaccttccctagccccaaaccgaagccatctgccaaattccagcctctttgagctggcccctccagatggagaggacatctcctgggctgggccngntnccccagcccacccctcatgacacagaatacttgagccactgatttttcatttctttttttttttttccttcggcccctcctcagccacctgattngctctatctgcaagcctgactctgccagcctcccctggtananaggaggtttacccattccctgcacgcctgtgcngtccctgtgccccgntggggcagccnnttcagtngtnggctnggctttnggggccagtgagttngcctctttccctcctgntcnnggccccagggntctggggagcccccaggcacacctaagcgtcgnggagcntngttctgccanagcccngcntacngaccccgggaggctgggcaggnggacagccccagccaccacctttcagccttagcctgtcccccaaggatggtgaagctcagcaggggctctgagggtacgccggccaaaagaggctggaacctcctgctcaagtctagacccctatcttctctgctgcccccaccctgccagagtctgatgtttccaataccaagattgtcttcacagggcacagcccctgcagagcatctgggtcattgcggaaagaggacccggtatcccctctgggccaaggtgtgtctacaaaagggacaaacagggcaaagggagggagagaaaaagggagctagagcgtgaaaggacgacgaaatagaagagcgaaatatctttgtgagaaaggagaatataatagcaagtataggaggcagaatcatatatagcgccacgcgaagagaagacaaaaaagtggggcggagcaaccaaaaaccagagcacgttggtagtgtagatcgtataataagtacatcaataaaacggcgtactggtacacgtacttatagttattgttttagttgggc

SEQ ID NO: 653438 - DNA, 318 bp, Homo sapiens
ctacccgcccacggagatttcctcaaaaaataaatataaaaggttggatgtaatttatctcccacttcctcccaatttactaccatccatggaaaaccgctgaggttttaatacatttgggtatatttgcttttagttcttttggttttggttttggtttggagacagagtcttactctctcacccagtctggagggcattggctcgatctgggtttactgcaacctccacctcccaggttcaagcagttctcctgcctcagcctccgggggggctggaattgcaggcgtgtcccaccactcccggttaatttttata

SEQ ID NO: 653439 - DNA, 9375 bp, Homo sapiens
  misc_feature (4052)..(4052): n is a, c, g, or t
  misc_feature (4061)..(4061): n is a, c, g, or t
  misc_feature (4065)..(4065): n is a, c, g, or t
  misc_feature (4070)..(4070): n is a, c, g, or t
  misc_feature (4080)..(4080): n is a, c, g, or t
  misc_feature (4095)..(4095): n is a, c, g, or t
  misc_feature (4129)..(4129): n is a, c, g, or t
  misc_feature (4159)..(4159): n is a, c, g, or t
  misc_feature (4168)..(4168): n is a, c, g, or t
  misc_feature (4172)..(4172): n is a, c, g, or t
  misc_feature (4175)..(4175): n is a, c, g, or t
  misc_feature (4185)..(4185): n is a, c, g, or t
  misc_feature (4194)..(4194): n is a, c, g, or t
  misc_feature (4374)..(4374): n is a, c, g, or t
  misc_feature (4379)..(4379): n is a, c, g, or t
  misc_feature (4454)..(4454): n is a, c, g, or t
  misc_feature (4458)..(4458): n is a, c, g, or t
  misc_feature (4498)..(4498): n is a, c, g, or t
  misc_feature (4506)..(4506): n is a, c, g, or t
  misc_feature (4514)..(4514): n is a, c, g, or t
  misc_feature (4516)..(4516): n is a, c, g, or t
  misc_feature (4542)..(4542): n is a, c, g, or t
  misc_feature (4552)..(4552): n is a, c, g, or t
  misc_feature (4604)..(4604): n is a, c, g, or t
  misc_feature (4611)..(4611): n is a, c, g, or t
  misc_feature (4623)..(4623): n is a, c, g, or t
  misc_feature (4686)..(4686): n is a, c, g, or t
  misc_feature (4795)..(4795): n is a, c, g, or t
  misc_feature (4838)..(4838): n is a, c, g, or t
  misc_feature (4888)..(4888): n is a, c, g, or t
  misc_feature (4893)..(4893): n is a, c, g, or t
  misc_feature (4900)..(4900): n is a, c, g, or t
  misc_feature (4953)..(4953): n is a, c, g, or t
  misc_feature (5035)..(5036): n is a, c, g, or t
  misc_feature (5061)..(5061): n is a, c, g, or t
  misc_feature (5142)..(5142): n is a, c, g, or t
  misc_feature (5152)..(5152): n is a, c, g, or t
  misc_feature (5177)..(5177): n is a, c, g, or t
  misc_feature (5191)..(5191): n is a, c, g, or t
  misc_feature (5200)..(5200): n is a, c, g, or t
  misc_feature (5207)..(5207): n is a, c, g, or t
  misc_feature (5221)..(5221): n is a, c, g, or t
  misc_feature (5238)..(5238): n is a, c, g, or t
  misc_feature (6384)..(6384): n is a, c, g, or t
  misc_feature (6387)..(6387): n is a, c, g, or t
  misc_feature (6419)..(6419): n is a, c, g, or t
  misc_feature (6430)..(6431): n is a, c, g, or t
  misc_feature (6437)..(6437): n is a, c, g, or t
  misc_feature (6447)..(6447): n is a, c, g, or t
  misc_feature (6453)..(6454): n is a, c, g, or t
  misc_feature (6457)..(6459): n is a, c, g, or t
  misc_feature (6474)..(6474): n is a, c, g, or t
agcggattgtgcgaggcaccgggacgtcggcggctggcggagccgggctgggctgaagctggagcggcggtggcggcggcgtagggaggccggggccggggctgaggccgcggccgggtctgcgaggcccttggggcggcaggcggcggcggcccggggctcgagcccggaggcaggagcagccgccatggccgagagcatcataattcgtgtccagtccccggatggagtgaagcggatcacagcaacaaagagagaaacagcagcaacatttttgaaaaaggttgcaaaggagtttggcttccaaaataatggcttctcggtttacatcaatagaaacaagaccggagagataacagcctcctccaacaaatccctcaacttgctaaaaatcaagcatggcgatttgttgttcctgtttccctcgagccttgctgggccctcatctgaaatggagacgtcagttccaccgggcttcaaagtctttggcgctcccaacgtggtggaggatgagattgatcagtacctcagcaaacaggacgggaagatttacagaagccgagacccacagctatgccgccacggccctttggggaaatgcgtgcactgcgtccctctagagccattcgatgaggactatctaaaccatctcgagcctcccgtgaagcacatgtccttccacgcctacatccggaagctgactggaggggctgacaaggggaagtttgttgccctggagaacatcagctgcaagattaagtcagggtgcgaggggcacctcccgtggccgaatggcatctgtactaagtgccagccgagcgccatcacgctgaacagacagaagtacaggcatgtggacaatatcatgtttgagaatcacaccgtcgctgaccgctttcttgacttctggagaaagacagggaaccagcattttgggtacttatacggacggtacacggagcacaaagacattccccttggcatcagggctgaagtggctgcgatttatgagccacctcagattggtacacagaacagcttggagcttcttgaggatccaaaagctgaagtggtcgatgaaattgctgccaaacttggcctgcggaaggttggctggatatttacagacctcgtctcagaagatacccgaaagggtaccgtccgctacagtcgaaataaggacacctatttcctaagttcagaagagtgcatcactgcaggagacttccagaacaagcatcccaacatgtgccggctctctccagacggacattttggatccaagtttgttactgcagtggctacaggtggtcctgacaaccaagtccactttgaagggtaccaggtgtccaatcagtgtatggcactggtccgtgatgagtgtttgctgccatgcaaggacgccccggagcttggctacgccaaggagtctagcagtgagcagtacgtgcctgatgtgttttataaggacgtagacaagtttggcaacgagatcacccagctggcccggcccctgcctgtggagtatctcatcatagacatcacaacaactttccccaaggatccagtttacactttttctatttcgcaaaatccatttcctattgaaaaccgggatgtattgggtgagacacaggacttccatagcttggccacctatttgtctcagaatacctcatctgtgttcttggataccatctcagatttccacctcttgctgttcctggtcaccaatgaagttatgcctctgcaggacagcatcagcttgctgctggaggccgtgcggaccagaaatgaggagctcgcccagacatggaagaggtctgagcagtgggccaccatcgagcagctgtgcagtgagtacccccaccccctgccccggcaccccgtggctggggccggagagcagcccactctgcacagctccccactgccggtggtgccctggattccgcacccagctgcatcctggcaggtgccatcggcaatgcaacgagtagagactcggcctccctgccaggcacgtggcaggctccggtgatggagcagacatgttgtccaggccgtacgtcttaggtacacagccctgtaaattttataaacctgtacatcagagatactaatctccaggcatcctaggagcactttgaacatcattgtcttaagagaatcagaaactttatggaagcgccggaagcgtgggaccttttggtctccttgagaatttccctttagtgcttaaagctgtaaggaggagaagcctgcagcatccatgttgttgctggtggacactacggaacggaccgcaggcattgcgtgtcttccggaccctcagtcaccaggtcctgaacgattccccactcgtgagaaccttctgtcagcattgctgcagggactcctcacgcaccgtggtgcctcgtgcagcccgagtgccctgagtccctgcagctgagagcaccagagtgcccgggagctacggccctggacaaatgctagaatccttctgttaacacagccttcaaaagacacatcaaacacctttataccatttcctgttttttttttttttttttgagacggagtttggctcttgtcacccaggctggagtgtggtggcgtgatcttgcctcactgcaacctccacctcctgggttcaaacgattctcctgcctcagcctcctgagtagctgggactacaggcatgtgccaccatgcctggataatttttgtattcttagtagagccagggtttcaccatgttagccaggctggtctcgaactcctgaccttgtgatctgcttgcctctgcctcccagagtgttgggattacaggtgtgagccaccacgcccagccgaggttttcttttcacacaattctttgttttttatttttatttttgtagagacagggtctcactctattgccgaggctggagtgcagttgcacaatcgtaactcactgcagcctcaaactccaggctcaagtgatctttctgcttcagcctgctgagtaactgggaccacaggcttgcaacaccacacccagctaattcttggggctttgttgttgctttttatttgtttgttttttaaaaataattttaacttattttagattcacagggtacatgtgcaggtttgtcacctgggtatattgcctgatgctgaggttggggtatgattgatcacatcacccaggtactacacatagtacctaatagtttttcagcccgccctgctctttgtgtgtgtgtgtgtgtgtgtgtgtgtgtgtgtgtgtgtgtgtgttttgagctggagcctcaccctgtctcccaggctggagtgcagtggcgcaatcttagctcactgcaaactctgcctcctgggttgaagcgattcccctccctcggcctcccgagtagctgggattacagatgtgtaccaccacacctggcgttgccatctttatgtacgtgagtacccatgtttagctcccacttataaatgaaaacatgtagtatttggtttgctgttcctgcattagtttgcttagaataatggccttcaactgcatccatgttgctgcaaaggacatgatttcattcctttttatggctgcaaaattttttaatatttttgtatcaatgaggtctcactgtgttgcccagactggtctcaaactttggcctcaagcattccttgcacctcagcctcacaaagtcctgagattatacctgggagccactgcacccagccctttgatgcagttctcaatgacaccagtctttttttttttttttcttttttgtttcccttttagagacagggtttcgctctgttgcctaggctggagtgcagtggagtgatcatagctcactacagccttcaattcctgagctcaagcgatcctcctgcatcagctttcggagtacctaggagtataaacatgagccactacacccaactaatgtttttggttggtgttttttttttttctttaagagatagggttggccgggcccggtggctggctcacacctgtaatcccagcactttgggaggctgaggcnggtggatcncaangtcangggattgagnccatcctggccaacntggtgaaaccccatttctgttaaaactacaaaanttagctgggcatggtggcgagcgcctgtgntcccagctnctcnggnggctgaggcnggagaatcncttgacccaggaagcgtaggttgtagtgagctgagatcgtgccactgtactccagcctgggcgacagagcgagactctgtctcaaaaaaaaaaaaaagatgtggtcttgccatgttgcccaggctggtctcaaactcctaggctcaagtgatcttcctgccttggttcccaaagtgctgngattncagctgtgagccactgcacctgaccttttttttttcccccctcctttttttttgagacaggttctcgctctgtcncccnggctgaagtgcagtggcatttgaggtcagtctcaccttgncctccccnggctcaancnatcctcccgcctcagcctcctgagcngctgggactncaggcatgtgccaccatccctggctgattttttaaatttgttgtagagatgnggtctcnctatgttgcccnggctggtcttgaactcttgggcccaagcgatcctcccgcctcagtgctgagattgcagtggtnagccaccatgtccagccaactctttaataataggcagttctgactggtgtaagttctgactggtatctcactgtggttttaatttgcatctctgatgattagtgatgtngggcattttttcatgggttttttgtttgtttgttttgagacanagtcttgttctgttgcccaggctggagtgcagtagtgtgatctcggctcnctgcngcctccncctcccgggttcaagccattgtccagcctctgcctcctaagtagctggaattncaggtggctgccaccacacccagctaatttttttagttttggtggagacagggtttctccatgttggccaggctggtctcgnnctcctgacctcaagtgatccacccncctcggcttcccaaagtgctgggattataggtgtgagccaccgcgcccggccctcatgggttgttttgttttgttttgagncggaatctcnccctgtcacccaggctgcagtgcantctcatgatctccncttactgcnacctccncgtcctgggttcangtgatgctcctgcctcngcctcccgagtggctgggactgcaggcgtgcacccacgcctggctaatttttatatttttggtggagatggggtttcaccatgttggtcaggctggtctggaactcctgacctcaggtgatccacctgcctcggtctcccaaagtgctgggattacagacgtgtatacacaagacacaaagatcagctcaggatgggtcataggcctaatggtaaaaggtaaaactatgaagcaggctgggcatgatgtctcatagctataatcctaacactctaggaggccaaagctggaggacactgtagcccagaagtgtgagaccagcccacacagcatagtgaagccccgtctgtacaaaaaaacaatattaaaaaaaaaagaattagctgggcatggtgagtggtccacgcctataatcccagcttctggggaggctgaaatgggaggatcccatgagtcaggagctcgaggtcacagtgagccatgattataccactccagcctgaatgacagagcaataccctgtcttaaaaaaataaaaactgtaaaacagttattaagttgaatctcttcagggccttggggtacgcaaagattcttttaggcaggatgcaggaccttggggtagaacacagaaaaacactggcataaaaataggtaaattgataaataaatttatctaaacaaaacacttgtgctcatcacagggcactgttagaaacatgaaaaggcaccaatgggggacgcagtattagcagtacatacacacaacatgacttctatctgaaacttaaaaataactctgcctgttgttaatcaaacagaaagcagaagaagaagctgggcggagggtgaaacgtttcacaaaaggaaatgcaggtcgggcatggtggctcgcgcctgtaatcccagcactttgggaggccgaggcggtggatcatttgaggtcaggagttcgagacagccaggccagcatggtgaaaacccatctctactaaaaataaaagaaattagccaggtgtggtggcacgtgcctgtggtcctagctgcttgggaggctgaggtaggagaatcgcttgaacccgggaggcagaggttgcagcgagccgagattgcgccactgcactccagcctgggtgacagagcaanacnctacctcagaaaaaaaaaaaaaaaaaaaaaanaaaaaaaaaanntaaatnaaaaatcccntggggnnttnnntttattttataaggngaaggaccctctgcaacaaaaaggaaccagcaagcacaggctccctgttactccctgtggtgcaggaggcatttttctgagggcattaagcacttcaaagtgtgcctgtggtgggagtgctgtgtgggcaggaccagcactgggtgggatgttgggggcggggagctctcagctgcctgcccctgcccccatgcccacactctggcagtctctggtgggccagaaatgatgagtgctcatttctcttccaccctgcaggcacagttggcgggcagctcccaggtctccatgagtacggcgccgtcgggggctccacacacacggccactgcagccatgtgggcctgtcagcactgcacgttcatgaaccagccaggcacaggccactgcgagatgtgcagcctccccaggacctagggcgcctgccctctgctggctaggaccgggcccagcccagcccttcctgaagccagaagcgttgctgagtgtgttccctgtaactgccccatagtgggcagccctggaggaacaaggggctggctgtcctgggctccctgacccactgaagcttctcagcacgttcctccctggagagcgggcgccacggctggtattctgcaggctgaatgcagtctccagactggaaacgcagagcggctcctcacgcctaatcctgttgacaagtcccccgccgtgttggaaagacctctcgcctctacgtggcacctggaattggggcgcacagggaggggcggatgctgccaccacccagccttctctttattttcagtgctttttgtttggcctccctgcccccatgtttttctggctgggagctcctggttacccccttgtctgactgcttggtggcaggcaccctgcctgtgagggccactttcctcttctagtagctgttgtctggtggggacgcagtggccctggacacggctcccctctgcaggtctgcaggtcggtttgctgcctgccctcctcctctcacccgatgtccaggtgggattttaaagtctgcattggttataataacagttatcagtaattcctgcccagaagacttttatttatttttttttaagataaaaactgcacaaaaggggagtgagagagactagtttccacatccttccctcctttagtgaagcccccgaggttgtgtccagggtgatgagtgtggacgggggcaccagtcagttctcccttgaagtaaacctcagtgcctgagacttttctaccaagccacacagctgcagcaactgcagatactgcgggctgagcaggagcagtggtggcgcctgccctgaggctgccctgcgatggcctgggtgggagagctgggtcaccggtgccgatgctctggccctccccaatacgctgcttcgtcccactgcaccgcctggctgagggcgttaggggctgtgcctcttgtgagggccatttgggacctccctggggcactgcacaattgatagtgtaccaatagagggagactgggcgatctggaacagcacgtggtggggtcctgcttgtgtgctctgcgttcctctgtggcgtggccaggccggggcctggctcttacccggggagtggtgggcatctcgatgcttctttgccttaatgatggccacatctgggctgctctgcacccacgggagaggctggcccagctgcagactgcttagggacttctgtgtccatcctggggggtaagcccacgtgacccacattcttggcactatgaacagagaacatttgcctgttggcttctgaagtggtcagggccatggctgacacctccaggtccgcctggcatgggacaccaagtggaaggcccaagcagctcatctgctcttgggaccaggggccagttgggttgggtctggtcacggcagagctattgtggagggtcaggaagggtggagaggagctgggttgaagcggactgctgcggatgcaactcccagcttgcccaccgcgggctgtctgctctccctcctagcagctgtcacactgaagttttgtcctctgctgtctcctctggtcctgagatgagctgtgagcctaggtggccaaggcttcctgcattgcttccctgtgagtccaaggccttcccccaccactgggcagaggctggacagcacggacttctagagagagccgcgttgccagttcctctcccactcgctcgtccttatccaccacgctattatagtttccgttgtcctccaccagcatttcccttactctgaagttccggcattcacatcattcatgttttcttttgtcttttagctaaaggaaaagcattggcgatttgtctgattctggttttgagttactctttgttcagtaatgcactttattttattgtccaaagagagtcagagctaagcatacaggcttgggggtgagccctgctgtgagagttcaggccctgggaggctcagccacctcctcttgtgggaaggaggtctcagccccacctcgcatcttcacctgcccttggtgtggacacaccctctcatgctaccagcaccataatccagtgggggtgactgggtgcacacctgcccaggtgaacacagcggctgccagtctcctggtcccgagaggaggtggggcctggccctggctccctccaaccagctgctcctgggacacaggtgctcctgcttcggctctgtttcggctcacaggtgtgcatcactgggcttggatttgcattacattgaccccagccctgcagtggaacctaataaaagcgcctgaagcaactgcctggtcctggtgtgtccttcctgcgcactcaactgttgtctggcatctgctcagtgtggggggatttgataacttgtctccaagatatcactgttttactgtgtatcct

SEQ ID NO: 653440 - DNA, 125 bp, Homo sapiens
aagattgccgttagctcataaaggtgatgggcacacagctgttcagagaatggaacacacatgcttttcatgcacctgactcctgcctattaactttccccaccttgaatgtcaatgcttgccct

SEQ ID NO: 653441 - DNA, 174 bp, Homo sapiens
atgaaactaataaaagaaaactttgggaaaacactccacaacactattcttggctaaaaatttcttgagtataccccacaacacaggcaaccagccaaaagtggcaatgggtcacatcatagttaaaaccttcttacaagtgaggatacactcatcaagtatgagcaacccaca

SEQ ID NO: 653442 - DNA, 4412 bp, Homo sapiens
agcggattgtgcgaggcaccgggacgtcggcggctggcggagccgggctgggctgaagctggagcggcggtggcggcggcgtagggaggccggggccggggctgaggccgcggccgggtctgcgaggcccttggggcggcaggcggcggcggcccggggctcgagcccggaggcaggagcagccgccatggccgagagcatcataattcgtgtccagtccccggatggagtgaagcggatcacagcaacaaagagagaaacagcagcaacatttttgaaaaaggttgcaaaggagtttggcttccaaaataatggcttctcggtttacatcaatagaaacaagaccggagagataacagcctcctccaacaaatccctcaacttgctaaaaatcaagcatggcgatttgttgttcctgtttccctcgagccttgctgggccctcatctgaaatggagacgtcagttccaccgggcttcaaagtctttggcgctcccaacgtggtggaggatgagattgatcagtacctcagcaaacaggacgggaagatttacagaagccgagacccacagctatgccgccacggccctttggggaaatgcgtgcactgcgtccctctagagccattcgatgaggactatctaaaccatctcgagcctcccgtgaagcacatgtccttccacgcctacatccggaagctgactggaggggctgacaaggggaagtttgttgccctggagaacatcagctgcaagattaagtcagggtgcgaggggcacctcccgtggccgaatggcatctgtactaagtgccagccgagcgccatcacgctgaacagacagaagtacaggcatgtggacaatatcatgtttgagaatcacaccgtcgctgaccgctttcttgacttctggagaaagacagggaaccagcattttgggtacttatacggacggtacacggagcacaaagacattccccttggcatcagggctgaagtggctgcgatttatgagccacctcagattggtacacagaacagcttggagcttcttgaggatccaaaagctgaagtggtcgatgaaattgctgccaaacttggcctgcggaaggttggctggatatttacagacctcgtctcagaagatacccgaaagggtaccgtccgctacagtcgaaataaggacacctatttcctaagttcagaagagtgcatcactgcaggagacttccagaacaagcatcccaacatgtgccggctctctccagacggacattttggatccaagtttgttactgcagtggctacaggtggtcctgacaaccaagtccactttgaagggtaccaggtgtccaatcagtgtatggcactggtccgtgatgagtgtttgctgccatgcaaggacgccccggagcttggctacgccaaggagtctagcagtgagcagtacgtgcctgatgtgttttataaggacgtagacaagtttggcaacgagatcacccagctggcccggcccctgcctgtggagtatctcatcatagacatcacaacaactttccccaaggatccagtttacactttttctatttcgcaaaatccatttcctattgaaaaccgggatgtattgggtgagacacaggacttccatagcttggccacctatttgtctcagaatacctcatctgtgttcttggataccatctcagatttccacctcttgctgttcctggtcaccaatgaagttatgcctctgcaggacagcatcagcttgctgctggaggccgtgcggaccagaaatgaggagctcgcccagacatggaagaggtctgagcagtgggccaccatcgagcagctgtgcagcacagttggcgggcagctcccaggtctccatgagtacggcgccgtcgggggctccacacacacggccactgcagccatgtgggcctgtcagcactgcacgttcatgaaccagccaggcacaggccactgcgagcaatggtggccaagggccccttcacccccccaagggggaaccccttaaggggcgcctgccctctgctggctaggaccgggcccagcccagcccttcctgaagccagaagcgttgctgagtgtgttccctgtaactgccccatagtgggcagccctggaggaacaaggggctggctgtcctgggctccctgacccactgaagcttctcagcacgttcctccctggagagcgggcgccacggctggtattctgcaggctgaatgcagtctccagactggaaacgcagagcggctcctcacgcctaatcctgttgacaagtcccccgccgtgttggaaagacctctcgcctctacgtggcacctggaattggggcgcacagggaggggcggatgctgccaccacccagccttctctttattttcagtgctttttgtttggcctccctgcccccatgtttttctggctgggagctcctggttacccccttgtctgactgcttggtggcaggcaccctgcctgtgagggccactttcctcttctagtagctgttgtctggtggggacgcagtggccctggacacggctcccctctgcaggtctgcaggtcggtttgctgcctgccctcctcctctcacccgatgtccaggtgggattttaaagtctgcattggttataataacagttatcagtaattcctgcccagaagacttttatttatttttttttaagataaaaactgcacaaaaggggagtgagagagactagtttccacatccttccctcctttagtgaagcccccgaggttgtgtccagggtgatgagtgtggacgggggcaccagtcagttctcccttgaagtaaacctcagtgcctgagacttttctaccaagccacacagctgcagcaactgcagatactgcgggctgagcaggagcagtggtggcgcctgccctgaggctgccctgcgatggcctgggtgggagagctgggtcaccggtgccgatgctctggccctccccaatacgctgcttcgtcccactgcaccgcctggctgagggcgttaggggctgtgcctcttgtgagggccatttgggacctccctggggcactgcacaattgatagtgtaccaatagagggagactgggcgatctggaacagcacgtggtggggtcctgcttgtgtgctctgcgttcctctgtggcgtggccaggccggggcctggctcttacccggggagtggtgggcatctcgatgcttctttgccttaatgatggccacatctgggctgctctgcacccacgggagaggctggcccagctgcagactgcttagggacttctgtgtccatcctggggggtaagcccacgtgacccacattcttggcactatgaacagagaacatttgcctgttggcttctgaagtggtcagggccatggctgacacctccaggtccgcctggcatgggacaccaagtggaaggcccaagcagctcatctgctcttgggaccaggggccagttgggttgggtctggtcacggcagagctattgtggagggtcaggaagggtggagaggagctgggttgaagcggactgctgcggatgcaactcccagcttgcccaccgcgggctgtctgctctccctcctagcagctgtcacactgaagttttgtcctctgctgtctcctctggtcctgagatgagctgtgagcctaggtggccaaggcttcctgcattgcttccctgtgagtccaaggccttcccccaccactgggcagaggctggacagcacggacttctagagagagccgcgttgccagttcctctcccactcgctcgtccttatccaccacgctattatagtttccgttgtcctccaccagcatttcccttactctgaagttccggcattcacatcattcatgttttcttttgtcttttagctaaaggaaaagcattggcgatttgtctgattctggttttgagttactctttgttcagtaatgcactttattttattgtccaaagagagtcagagctaagcatacaggcttgggggtgagccctgctgtgagagttcaggccctgggaggctcagccacctcctcttgtgggaaggaggtctcagccccacctcgcatcttcacctgcccttggtgtggacacaccctctcatgctaccagcaccataatccagtgggggtgactgggtgcacacctgcccaggtgaacacagcggctgccagtctcctggtcccgagaggaggtggggcctggccctggctccctccaaccagctgctcctgggacacaggtgctcctgcttcggctctgtttcggctcacaggtgtgcatcactgggcttggatttgcattacattgaccccagccctgcagtggaacctaataaaagcgcctgaagcaa

SEQ ID NO: 653443 - DNA, 6577 bp, Homo sapiens
  misc_feature (1689)..(1689): n is a, c, g, or t
  misc_feature (1694)..(1694): n is a, c, g, or t
  misc_feature (1769)..(1769): n is a, c, g, or t
  misc_feature (1773)..(1773): n is a, c, g, or t
  misc_feature (1813)..(1813): n is a, c, g, or t
  misc_feature (1821)..(1821): n is a, c, g, or t
  misc_feature (1829)..(1829): n is a, c, g, or t
  misc_feature (1831)..(1831): n is a, c, g, or t
  misc_feature (1857)..(1857): n is a, c, g, or t
  misc_feature (1867)..(1867): n is a, c, g, or t
  misc_feature (1919)..(1919): n is a, c, g, or t
  misc_feature (1926)..(1926): n is a, c, g, or t
  misc_feature (1938)..(1938): n is a, c, g, or t
  misc_feature (2001)..(2001): n is a, c, g, or t
  misc_feature (2110)..(2110): n is a, c, g, or t
  misc_feature (2153)..(2153): n is a, c, g, or t
  misc_feature (2203)..(2203): n is a, c, g, or t
  misc_feature (2208)..(2208): n is a, c, g, or t
  misc_feature (2215)..(2215): n is a, c, g, or t
  misc_feature (2268)..(2268): n is a, c, g, or t
  misc_feature (2350)..(2351): n is a, c, g, or t
  misc_feature (2376)..(2376): n is a, c, g, or t
  misc_feature (2457)..(2457): n is a, c, g, or t
  misc_feature (2467)..(2467): n is a, c, g, or t
  misc_feature (2492)..(2492): n is a, c, g, or t
  misc_feature (2506)..(2506): n is a, c, g, or t
  misc_feature (2515)..(2515): n is a, c, g, or t
  misc_feature (2522)..(2522): n is a, c, g, or t
  misc_feature (2536)..(2536): n is a, c, g, or t
  misc_feature (2553)..(2553): n is a, c, g, or t
  misc_feature (3699)..(3699): n is a, c, g, or t
  misc_feature (3702)..(3702): n is a, c, g, or t
  misc_feature (3734)..(3734): n is a, c, g, or t
  misc_feature (3745)..(3746): n is a, c, g, or t
  misc_feature (3752)..(3752): n is a, c, g, or t
  misc_feature (3762)..(3762): n is a, c, g, or t
  misc_feature (3768)..(3769): n is a, c, g, or t
  misc_feature (3772)..(3774): n is a, c, g, or t
  misc_feature (3789)..(3789): n is a, c, g, or t
agcggattgtgcgaggcaccgggacgtcggcggctggcggagccgggctgggctgaagctggagcggcggtggcggcggcgtagggaggccggggccggggctgaggccgcggccgggtctgcgaggcccttggggcggcaggcggcggcggcccggggctcgagcccggaggcaggagcagccgccatggccgagagcatcataattcgtgtccagtccccggatggagtgaagcggatcacagcaacaaagagagaaacagcagcaacatttttgaaaaaggttgcaaaggagtttggcttccaaaataatggcttctcggtttacatcaatagaaacaagaccggagagataacagcctcctccaacaaatccctcaacttgctaaaaatcaagcatggcgatttgttgttcctgtttccctcgagccttgctgggccctcatctgaaatggagacgtcagttccaccgggcttcaaagtctttggcgctcccaacgtggtggaggatgagattgatcagtacctcagcaaacaggacgggaagatttacagaagccgagacccacagctatgccgccacggccctttggggaaatgcgtgcactgcgtccctctagagccattcgatgaggactatctaaaccatctcgagcctcccgtgaagcacatgtccttccacgcctacatccggaagctgactggaggggctgacaaggggaagtttgttgccctggagaacatcagctgcaagattaagtcagggtgcgaggggcacctcccgtggccgaatggcatctgtactaagtgccagccgagcgccatcacgctgaacagacagaagtacaggcatgtggacaatatcatgtttgagaatcacaccgtcgctgaccgctttcttgacttctggagaaagacagggaaccagcattttgggtacttatacggacggtacacggagcacaaagacattccccttggcatcagggctgaagtggctgcgatttatgagccacctcagattggtacacagaacagcttggagcttcttgaggatccaaaagctgaagtggtcgatgaaattgctgccaaacttggcctgcggaaggttggctggatatttacagacctcgtctcagaagatacccgaaagggtaccgtccgctacagtcgaaataaggacacctatttcctaagttcagaagagtgcatcactgcaggagacttccagaacaagcatcccaacatgtgccggctctctccagacggacattttggatccaagtttgttactgcagtggctacaggtggtcctgacaaccaagtccactttgaagggtaccaggtgtccaatcagtgtatggcactggtccgtgatgagtgtttgctgccatgcaaggacgccccggagcttggctacgccaaggagtctagcagtgagcagtacgtgcctgatgtgttttataagtcttcttcagtgtttcattttggataatttcttttagtcttcacattcgttgatctggacttctacagtgtctcatctgcagttaatctcatccagcctgggcgacagagcgagactctgtctcaaaaaaaaaaaaaagatgtggtcttgccatgttgcccaggctggtctcaaactcctaggctcaagtgatcttcctgccttggttcccaaagtgctgngattncagctgtgagccactgcacctgaccttttttttttcccccctcctttttttttgagacaggttctcgctctgtcncccnggctgaagtgcagtggcatttgaggtcagtctcaccttgncctccccnggctcaancnatcctcccgcctcagcctcctgagcngctgggactncaggcatgtgccaccatccctggctgattttttaaatttgttgtagagatgnggtctcnctatgttgcccnggctggtcttgaactcttgggcccaagcgatcctcccgcctcagtgctgagattgcagtggtnagccaccatgtccagccaactctttaataataggcagttctgactggtgtaagttctgactggtatctcactgtggttttaatttgcatctctgatgattagtgatgtngggcattttttcatgggttttttgtttgtttgttttgagacanagtcttgttctgttgcccaggctggagtgcagtagtgtgatctcggctcnctgcngcctccncctcccgggttcaagccattgtccagcctctgcctcctaagtagctggaattncaggtggctgccaccacacccagctaatttttttagttttggtggagacagggtttctccatgttggccaggctggtctcgnnctcctgacctcaagtgatccacccncctcggcttcccaaagtgctgggattataggtgtgagccaccgcgcccggccctcatgggttgttttgttttgttttgagncggaatctcnccctgtcacccaggctgcagtgcantctcatgatctccncttactgcnacctccncgtcctgggttcangtgatgctcctgcctcngcctcccgagtggctgggactgcaggcgtgcacccacgcctggctaatttttatatttttggtggagatggggtttcaccatgttggtcaggctggtctggaactcctgacctcaggtgatccacctgcctcggtctcccaaagtgctgggattacagacgtgtatacacaagacacaaagatcagctcaggatgggtcataggcctaatggtaaaaggtaaaactatgaagcaggctgggcatgatgtctcatagctataatcctaacactctaggaggccaaagctggaggacactgtagcccagaagtgtgagaccagcccacacagcatagtgaagccccgtctgtacaaaaaaacaatattaaaaaaaaaagaattagctgggcatggtgagtggtccacgcctataatcccagcttctggggaggctgaaatgggaggatcccatgagtcaggagctcgaggtcacagtgagccatgattataccactccagcctgaatgacagagcaataccctgtcttaaaaaaataaaaactgtaaaacagttattaagttgaatctcttcagggccttggggtacgcaaagattcttttaggcaggatgcaggaccttggggtagaacacagaaaaacactggcataaaaataggtaaattgataaataaatttatctaaacaaaacacttgtgctcatcacagggcactgttagaaacatgaaaaggcaccaatgggggacgcagtattagcagtacatacacacaacatgacttctatctgaaacttaaaaataactctgcctgttgttaatcaaacagaaagcagaagaagaagctgggcggagggtgaaacgtttcacaaaaggaaatgcaggtcgggcatggtggctcgcgcctgtaatcccagcactttgggaggccgaggcggtggatcatttgaggtcaggagttcgagacagccaggccagcatggtgaaaacccatctctactaaaaataaaagaaattagccaggtgtggtggcacgtgcctgtggtcctagctgcttgggaggctgaggtaggagaatcgcttgaacccgggaggcagaggttgcagcgagccgagattgcgccactgcactccagcctgggtgacagagcaanacnctacctcagaaaaaaaaaaaaaaaaaaaaaanaaaaaaaaaanntaaatnaaaaatcccntggggnnttnnntttattttataaggngaaggaccctctgcaacaaaaaggaaccagcaagcacaggctccctgttactccctgtggtgcaggaggcatttttctgagggcattaagcacttcaaagtgtgcctgtggtgggagtgctgtgtgggcaggaccagcactgggtgggatgttgggggcggggagctctcagctgcctgcccctgcccccatgcccacactctggcagtctctggtgggccagaaatgatgagtgctcatttctcttccaccctgcaggcacagttggcgggcagctcccaggtctccatgagtacggcgccgtcgggggctccacacacacggccactgcagccatgtgggcctgtcagcactgcacgttcatgaaccagccaggcacaggccactgcgagatgtgcagcctccccaggacctagggcgcctgccctctgctggctaggaccgggcccagcccagcccttcctgaagccagaagcgttgctgagtgtgttccctgtaactgccccatagtgggcagccctggaggaacaaggggctggctgtcctgggctccctgacccactgaagcttctcagcacgttcctccctggagagcgggcgccacggctggtattctgcaggctgaatgcagtctccagactggaaacgcagagcggctcctcacgcctaatcctgttgacaagtcccccgccgtgttggaaagacctctcgcctctacgtggcacctggaattggggcgcacagggaggggcggatgctgccaccacccagccttctctttattttcagtgctttttgtttggcctccctgcccccatgtttttctggctgggagctcctggttacccccttgtctgactgcttggtggcaggcaccctgcctgtgagggccactttcctcttctagtagctgttgtctggtggggacgcagtggccctggacacggctcccctctgcaggtctgcaggtcggtttgctgcctgccctcctcctctcacccgatgtccaggtgggattttaaagtctgcattggttataataacagttatcagtaattcctgcccagaagacttttatttatttttttttaagataaaaactgcacaaaaggggagtgagagagactagtttccacatccttccctcctttagtgaagcccccgaggttgtgtccagggtgatgagtgtggacgggggcaccagtcagttctcccttgaagtaaacctcagtgcctgagacttttctaccaagccacacagctgcagcaactgcagatactgcgggctgagcaggagcagtggtggcgcctgccctgaggctgccctgcgatggcctgggtgggagagctgggtcaccggtgccgatgctctggccctccccaatacgctgcttcgtcccactgcaccgcctggctgagggcgttaggggctgtgcctcttgtgagggccatttgggacctccctggggcactgcacaattgatagtgtaccaatagagggagactgggcgatctggaacagcacgtggtggggtcctgcttgtgtgctctgcgttcctctgtggcgtggccaggccggggcctggctcttacccggggagtggtgggcatctcgatgcttctttgccttaatgatggccacatctgggctgctctgcacccacgggagaggctggcccagctgcagactgcttagggacttctgtgtccatcctggggggtaagcccacgtgacccacattcttggcactatgaacagagaacatttgcctgttggcttctgaagtggtcagggccatggctgacacctccaggtccgcctggcatgggacaccaagtggaaggcccaagcagctcatctgctcttgggaccaggggccagttgggttgggtctggtcacggcagagctattgtggagggtcaggaagggtggagaggagctgggttgaagcggactgctgcggatgcaactcccagcttgcccaccgcgggctgtctgctctccctcctagcagctgtcacactgaagttttgtcctctgctgtctcctctggtcctgagatgagctgtgagcctaggtggccaaggcttcctgcattgcttccctgtgagtccaaggccttcccccaccactgggcagaggctggacagcacggacttctagagagagccgcgttgccagttcctctcccactcgctcgtccttatccaccacgctattatagtttccgttgtcctccaccagcatttcccttactctgaagttccggcattcacatcattcatgttttcttttgtcttttagctaaaggaaaagcattggcgatttgtctgattctggttttgagttactctttgttcagtaatgcactttattttattgtccaaagagagtcagagctaagcatacaggcttgggggtgagccctgctgtgagagttcaggccctgggaggctcagccacctcctcttgtgggaaggaggtctcagccccacctcgcatcttcacctgcccttggtgtggacacaccctctcatgctaccagcaccataatccagtgggggtgactgggtgcacacctgcccaggtgaacacagcggctgccagtctcctggtcccgagaggaggtggggcctggccctggctccctccaaccagctgctcctgggacacaggtgctcctgcttcggctctgtttcggctcacaggtgtgcatcactgggcttggatttgcattacattgaccccagccctgcagtggaacctaataaaagcgcctgaagcaa

SEQ ID NO: 653444 - DNA, 895 bp, Homo sapiens
  misc_feature (436)..(436): n is a, c, g, or t
cggcggcagcagaccccagagctcagaaggagtgagaaccctgaaccctaatcccactgaagtccagccaataagagcccagtcaccatggcggagctgcaggaggtgcagatcacaggaggtagaagccgacgtgttagccgagagacagacagcgctggaggcgcgcgatgacgtcacctcgtgatggcagagcatccatagcgagcctcgtggtccactttatcagctggtcttatgagtcgacctcaccagatatctcaaacgcccatgcgatctcttatccttaccacgaatgtgggactcaagctataatagtcttgcgttccagcacactgtttcggagtatcgaggacgatgcaaggacagatcattcgaggacacttatgatgctgggattcaactgttcggtatgcaccccgtgcgtcacatcggnacacggagcgcgagacctctcatgatgattccccatatggcgcggatcatcatacgtgacccaatcgtcgtggcaccgagacttgccaggactatggatcccttgtcgatcctgacgaggtactctaagagtatatctctatcaattaacttgagacgtcggtgttggacgctggtagcctacagtcctggacgagatatgctcttatgcacccggacactgtcgaaggtcttgtacctcattcgaaccattggagtcccgaagtgcctaaggggtctggatcgggcatcgggggctagagcaacataggctaaacaaggccctcatgcgtcttccattgccgggagatgatcctgtggacatttcttgtacagccaggaagagctctctggaaattctgaagttgatacaaaaagtacagaaaagtatcattaccaacattgcaccccacctgggatg

SEQ ID NO: 653445 - DNA, 710 bp, Homo sapiens
  misc_feature (171)..(171): n is a, c, g, or t
tcccaaaaagggattttttttttttccaagtaccggcaattggaaacccaaaaggggacccccgggttgggccaattctgggttcccccttccccaacaaaccggggggaggagggtgcgccccttaccaccctttttgtggtctcgatttcgggccccctttgctctcantctcgtgcgtgcagcatctccctataggggcagggccccacctttccctgtggaacgtgggtatatctcggctcacccaccctgtgcacatgtcgcccacacccccttcttctcccacacacaaagagaggtttctcttgtggggagaggggagatctcgtgggcacagagaaccaggagagggccaatgtgagcgagagtaacacacatttttgtgccccgcgtggattcgccagaccggacaatagataacagaagaaagtgcatcgaaaagacatgtggaacccctgtggaaccacaagacacaaacagaccaacaagtgtgtctccagagagggtctaacgctgtgtgcgtgaaaccacagggggggacacaaaagtggggaaacacaaaaaacacacctctggggggaggagcaacaggggccaaagggaccacccaggagagagggggccgggtgcgggagaacagccggcgcaacaaaggggatgatcaaagccccacctatgggcaaaaatagaggaaggagcaccccaca

SEQ ID NO: 653446 - DNA, 119 bp, Homo sapiens
aatggaggggagctaagagatagagagaaggggacagaggcaagaaaagatagtagatcacgaccgatagagaaccagggtagagggctagaaggagaatacgaagataaaataccagt

SEQ ID NO: 653447 - DNA, 9127 bp, Homo sapiens
  misc_feature (4052)..(4052): n is a, c, g, or t
  misc_feature (4061)..(4061): n is a, c, g, or t
  misc_feature (4065)..(4065): n is a, c, g, or t
  misc_feature (4070)..(4070): n is a, c, g, or t
  misc_feature (4080)..(4080): n is a, c, g, or t
  misc_feature (4095)..(4095): n is a, c, g, or t
  misc_feature (4129)..(4129): n is a, c, g, or t
  misc_feature (4159)..(4159): n is a, c, g, or t
  misc_feature (4168)..(4168): n is a, c, g, or t
  misc_feature (4172)..(4172): n is a, c, g, or t
  misc_feature (4175)..(4175): n is a, c, g, or t
  misc_feature (4185)..(4185): n is a, c, g, or t
  misc_feature (4194)..(4194): n is a, c, g, or t
  misc_feature (4374)..(4374): n is a, c, g, or t
  misc_feature (4379)..(4379): n is a, c, g, or t
  misc_feature (4454)..(4454): n is a, c, g, or t
  misc_feature (4458)..(4458): n is a, c, g, or t
  misc_feature (4498)..(4498): n is a, c, g, or t
  misc_feature (4506)..(4506): n is a, c, g, or t
  misc_feature (4514)..(4514): n is a, c, g, or t
  misc_feature (4516)..(4516): n is a, c, g, or t
  misc_feature (4542)..(4542): n is a, c, g, or t
  misc_feature (4552)..(4552): n is a, c, g, or t
  misc_feature (4604)..(4604): n is a, c, g, or t
  misc_feature (4611)..(4611): n is a, c, g, or t
  misc_feature (4623)..(4623): n is a, c, g, or t
  misc_feature (4686)..(4686): n is a, c, g, or t
  misc_feature (4795)..(4795): n is a, c, g, or t
  misc_feature (4838)..(4838): n is a, c, g, or t
  misc_feature (4888)..(4888): n is a, c, g, or t
  misc_feature (4893)..(4893): n is a, c, g, or t
  misc_feature (4900)..(4900): n is a, c, g, or t
  misc_feature (4953)..(4953): n is a, c, g, or t
  misc_feature (5035)..(5036): n is a, c, g, or t
  misc_feature (5061)..(5061): n is a, c, g, or t
  misc_feature (5142)..(5142): n is a, c, g, or t
  misc_feature (5152)..(5152): n is a, c, g, or t
  misc_feature (5177)..(5177): n is a, c, g, or t
  misc_feature (5191)..(5191): n is a, c, g, or t
  misc_feature (5200)..(5200): n is a, c, g, or t
  misc_feature (5207)..(5207): n is a, c, g, or t
  misc_feature (5221)..(5221): n is a, c, g, or t
  misc_feature (5238)..(5238): n is a, c, g, or t
  misc_feature (6384)..(6384): n is a, c, g, or t
  misc_feature (6387)..(6387): n is a, c, g, or t
  misc_feature (6419)..(6419): n is a, c, g, or t
  misc_feature (6430)..(6431): n is a, c, g, or t
  misc_feature (6437)..(6437): n is a, c, g, or t
  misc_feature (6447)..(6447): n is a, c, g, or t
  misc_feature (6453)..(6454): n is a, c, g, or t
  misc_feature (6457)..(6459): n is a, c, g, or t
  misc_feature (6474)..(6474): n is a, c, g, or t
agcggattgtgcgaggcaccgggacgtcggcggctggcggagccgggctgggctgaagctggagcggcggtggcggcggcgtagggaggccggggccggggctgaggccgcggccgggtctgcgaggcccttggggcggcaggcggcggcggcccggggctcgagcccggaggcaggagcagccgccatggccgagagcatcataattcgtgtccagtccccggatggagtgaagcggatcacagcaacaaagagagaaacagcagcaacatttttgaaaaaggttgcaaaggagtttggcttccaaaataatggcttctcggtttacatcaatagaaacaagaccggagagataacagcctcctccaacaaatccctcaacttgctaaaaatcaagcatggcgatttgttgttcctgtttccctcgagccttgctgggccctcatctgaaatggagacgtcagttccaccgggcttcaaagtctttggcgctcccaacgtggtggaggatgagattgatcagtacctcagcaaacaggacgggaagatttacagaagccgagacccacagctatgccgccacggccctttggggaaatgcgtgcactgcgtccctctagagccattcgatgaggactatctaaaccatctcgagcctcccgtgaagcacatgtccttccacgcctacatccggaagctgactggaggggctgacaaggggaagtttgttgccctggagaacatcagctgcaagattaagtcagggtgcgaggggcacctcccgtggccgaatggcatctgtactaagtgccagccgagcgccatcacgctgaacagacagaagtacaggcatgtggacaatatcatgtttgagaatcacaccgtcgctgaccgctttcttgacttctggagaaagacagggaaccagcattttgggtacttatacggacggtacacggagcacaaagacattccccttggcatcagggctgaagtggctgcgatttatgagccacctcagattggtacacagaacagcttggagcttcttgaggatccaaaagctgaagtggtcgatgaaattgctgccaaacttggcctgcggaaggttggctggatatttacagacctcgtctcagaagatacccgaaagggtaccgtccgctacagtcgaaataaggacacctatttcctaagttcagaagagtgcatcactgcaggagacttccagaacaagcatcccaacatgtgccggctctctccagacggacattttggatccaagtttgttactgcagtggctacaggtggtcctgacaaccaagtccactttgaagggtaccaggtgtccaatcagtgtatggcactggtccgtgatgagtgtttgctgccatgcaaggacgccccggagcttggctacgccaaggagtctagcagtgagcagtacgtgcctgatgtgttttataaggacgtagacaagtttggcaacgagatcacccagctggcccggcccctgcctgtggagtatctcatcatagacatcacaacaactttccccaaggatccagtttacactttttctatttcgcaaaatccatttcctattgaaaaccgggatgtattgggtgagacacaggacttccatagcttggccacctatttgtctcagaatacctcatctgtgttcttggataccatctcagatttccacctcttgctgttcctggtcaccaatgaagttatgcctctgcaggacagcatcagcttgctgctggaggccgtgcggaccagaaatgaggagctcgcccagacatggaagaggtctgagcagtgggccaccatcgagcagctgtgcagtgagtacccccaccccctgccccggcaccccgtggctggggccggagagcagcccactctgcacagctccccactgccggtggtgccctggattccgcacccagctgcatcctggcaggtgccatcggcaatgcaacgagtagagactcggcctccctgccaggcacgtggcaggctccggtgatggagcagacatgttgtccaggccgtacgtcttaggtacacagccctgtaaattttataaacctgtacatcagagatactaatctccaggcatcctaggagcactttgaacatcattgtcttaagagaatcagaaactttatggaagcgccggaagcgtgggaccttttggtctccttgagaatttccctttagtgcttaaagctgtaaggaggagaagcctgcagcatccatgttgttgctggtggacactacggaacggaccgcaggcattgcgtgtcttccggaccctcagtcaccaggtcctgaacgattccccactcgtgagaaccttctgtcagcattgctgcagggactcctcacgcaccgtggtgcctcgtgcagcccgagtgccctgagtccctgcagctgagagcaccagagtgcccgggagctacggccctggacaaatgctagaatccttctgttaacacagccttcaaaagacacatcaaacacctttataccatttcctgttttttttttttttttttgagacggagtttggctcttgtcacccaggctggagtgtggtggcgtgatcttgcctcactgcaacctccacctcctgggttcaaacgattctcctgcctcagcctcctgagtagctgggactacaggcatgtgccaccatgcctggataatttttgtattcttagtagagccagggtttcaccatgttagccaggctggtctcgaactcctgaccttgtgatctgcttgcctctgcctcccagagtgttgggattacaggtgtgagccaccacgcccagccgaggttttcttttcacacaattctttgttttttatttttatttttgtagagacagggtctcactctattgccgaggctggagtgcagttgcacaatcgtaactcactgcagcctcaaactccaggctcaagtgatctttctgcttcagcctgctgagtaactgggaccacaggcttgcaacaccacacccagctaattcttggggctttgttgttgctttttatttgtttgttttttaaaaataattttaacttattttagattcacagggtacatgtgcaggtttgtcacctgggtatattgcctgatgctgaggttggggtatgattgatcacatcacccaggtactacacatagtacctaatagtttttcagcccgccctgctctttgtgtgtgtgtgtgtgtgtgtgtgtgtgtgtgtgtgtgtgtgtgttttgagctggagcctcaccctgtctcccaggctggagtgcagtggcgcaatcttagctcactgcaaactctgcctcctgggttgaagcgattcccctccctcggcctcccgagtagctgggattacagatgtgtaccaccacacctggcgttgccatctttatgtacgtgagtacccatgtttagctcccacttataaatgaaaacatgtagtatttggtttgctgttcctgcattagtttgcttagaataatggccttcaactgcatccatgttgctgcaaaggacatgatttcattcctttttatggctgcaaaattttttaatatttttgtatcaatgaggtctcactgtgttgcccagactggtctcaaactttggcctcaagcattccttgcacctcagcctcacaaagtcctgagattatacctgggagccactgcacccagccctttgatgcagttctcaatgacaccagtctttttttttttttttcttttttgtttcccttttagagacagggtttcgctctgttgcctaggctggagtgcagtggagtgatcatagctcactacagccttcaattcctgagctcaagcgatcctcctgcatcagctttcggagtacctaggagtataaacatgagccactacacccaactaatgtttttggttggtgttttttttttttctttaagagatagggttggccgggcccggtggctggctcacacctgtaatcccagcactttgggaggctgaggcnggtggatcncaangtcangggattgagnccatcctggccaacntggtgaaaccccatttctgttaaaactacaaaanttagctgggcatggtggcgagcgcctgtgntcccagctnctcnggnggctgaggcnggagaatcncttgacccaggaagcgtaggttgtagtgagctgagatcgtgccactgtactccagcctgggcgacagagcgagactctgtctcaaaaaaaaaaaaaagatgtggtcttgccatgttgcccaggctggtctcaaactcctaggctcaagtgatcttcctgccttggttcccaaagtgctgngattncagctgtgagccactgcacctgaccttttttttttcccccctcctttttttttgagacaggttctcgctctgtcncccnggctgaagtgcagtggcatttgaggtcagtctcaccttgncctccccnggctcaancnatcctcccgcctcagcctcctgagcngctgggactncaggcatgtgccaccatccctggctgattttttaaatttgttgtagagatgnggtctcnctatgttgcccnggctggtcttgaactcttgggcccaagcgatcctcccgcctcagtgctgagattgcagtggtnagccaccatgtccagccaactctttaataataggcagttctgactggtgtaagttctgactggtatctcactgtggttttaatttgcatctctgatgattagtgatgtngggcattttttcatgggttttttgtttgtttgttttgagacanagtcttgttctgttgcccaggctggagtgcagtagtgtgatctcggctcnctgcngcctccncctcccgggttcaagccattgtccagcctctgcctcctaagtagctggaattncaggtggctgccaccacacccagctaatttttttagttttggtggagacagggtttctccatgttggccaggctggtctcgnnctcctgacctcaagtgatccacccncctcggcttcccaaagtgctgggattataggtgtgagccaccgcgcccggccctcatgggttgttttgttttgttttgagncggaatctcnccctgtcacccaggctgcagtgcantctcatgatctccncttactgcnacctccncgtcctgggttcangtgatgctcctgcctcngcctcccgagtggctgggactgcaggcgtgcacccacgcctggctaatttttatatttttggtggagatggggtttcaccatgttggtcaggctggtctggaactcctgacctcaggtgatccacctgcctcggtctcccaaagtgctgggattacagacgtgtatacacaagacacaaagatcagctcaggatgggtcataggcctaatggtaaaaggtaaaactatgaagcaggctgggcatgatgtctcatagctataatcctaacactctaggaggccaaagctggaggacactgtagcccagaagtgtgagaccagcccacacagcatagtgaagccccgtctgtacaaaaaaacaatattaaaaaaaaaagaattagctgggcatggtgagtggtccacgcctataatcccagcttctggggaggctgaaatgggaggatcccatgagtcaggagctcgaggtcacagtgagccatgattataccactccagcctgaatgacagagcaataccctgtcttaaaaaaataaaaactgtaaaacagttattaagttgaatctcttcagggccttggggtacgcaaagattcttttaggcaggatgcaggaccttggggtagaacacagaaaaacactggcataaaaataggtaaattgataaataaatttatctaaacaaaacacttgtgctcatcacagggcactgttagaaacatgaaaaggcaccaatgggggacgcagtattagcagtacatacacacaacatgacttctatctgaaacttaaaaataactctgcctgttgttaatcaaacagaaagcagaagaagaagctgggcggagggtgaaacgtttcacaaaaggaaatgcaggtcgggcatggtggctcgcgcctgtaatcccagcactttgggaggccgaggcggtggatcatttgaggtcaggagttcgagacagccaggccagcatggtgaaaacccatctctactaaaaataaaagaaattagccaggtgtggtggcacgtgcctgtggtcctagctgcttgggaggctgaggtaggagaatcgcttgaacccgggaggcagaggttgcagcgagccgagattgcgccactgcactccagcctgggtgacagagcaanacnctacctcagaaaaaaaaaaaaaaaaaaaaaanaaaaaaaaaanntaaatnaaaaatcccntggggnnttnnntttattttataaggngaaggaccctctgcaacaaaaaggaaccagcaagcacaggctccctgttactccctgtggtgcaggaggcatttttctgagggcattaagcacttcaaagtgtgcctgtggtgggagtgctgtgtgggcaggaccagcactgggtgggatgttgggggcggggagctctcagctgcctgcccctgcccccatgcccacactctggcagtctctggtgggccagaaatgatgagtgctcatttctcttccaccctgcaggcacagttggcgggcagctcccaggtctccatgagtacggcgccgtcgggggctccacacacacggccactgcagccatgtgggcctgtcagcactgcacgttcatgaaccagccaggcacaggccactgcgagatgtgcagcctccccaggacctagggcgcctgccctctgctggctaggaccgggcccagcccagcccttcctgaagccagaagcgttgctgagtgtgttccctgtaactgccccatagtgggcagccctggaggaacaaggggctggctgtcctgggctccctgacccactgaagcttctcagcacgttcctccctggagagcgggcgccacggctggtattctgcaggctgaatgcagtctccagactggaaacgcagagcggctcctcacgcctaatcctgttgacaagtcccccgccgtgttggaaagacctctcgcctctacgtggcacctggaattggggcgcacagggaggggcggatgctgccaccacccagccttctctttattttcagtgctttttgtttggcctccctgcccccatgtttttctggctgggagctcctggttacccccttgtctgactgcttggtggcaggcaccctgcctgtgagggccactttcctcttctagtagctgttgtctggtggggacgcagtggccctggacacggctcccctctgcaggtctgcaggtcggtttgctgcctgccctcctcctctcacccgatgtccaggtgggattttaaagtctgcattggttataataacagttatcagtaattcctgcccagaagacttttatttatttttttttaagataaaaactgcacaaaaggggagtgagagagactagtttccacatccttccctcctttagtgaagcccccgaggttgtgtccagggtgatgagtgtggacgggggcaccagtcagttctcccttgaagtaaacctcagtgcctgagacttttctaccaagccacacagctgcagcaactgcagatactgcgggctgagcaggagcagtggtggcgcctgccctgaggctgccctgcgatggcctgggtgggagagctgggtcaccggtgccgatgctctggccctccccaatacgctgcttcgtcccactgcaccgcctggctgagggcgttaggggctgtgcctcttgtgagggccatttgggacctccctggggcactgcacaattgatagtgtaccaatagagggagactgggcgatctggaacagcacgtggtggggtcctgcttgtgtgctctgcgttcctctgtggcgtggccaggccggggcctggctcttacccggggagtggtgggcatctcgatgcttctttgccttaatgatggccacatctgggctgctctgcacccacgggagaggctggcccagctgcagactgcttagggacttctgtgtccatcctggggggtaagcccacgtgacccacattcttggcactatgaacagagaacatttgcctgttggcttctgaagtggtcagggccatggctgacacctccaggtccgcctggcatgggacaccaagtggaaggcccaagcagctcatctgctcttgggaccaggggccagttgggttgggtctggtcacggcagagctattgtggagggtcaggaagggtggagaggagctgggttgaagcggactgctgcggatgcaactcccagcttgcccaccgcgggctgtctgctctccctcctagcagctgtcacactgaagttttgtcctctgctgtctcctctggtcctgagatgagctgtgagcctaggtggccaaggcttcctgcattgcttccctgtgagtccaaggccttcccccaccactgggcagaggctggacagcacggacttctagagagagccgcgttgccagttcctctcccactcgctcgtccttatccaccacgctattatagtttccgttgtcctccaccagcatttcccttactctgaagttccggcattcacatcattcatgttttcttttgtcttttagctaaaggaaaagcattggcgatttgtctgattctggttttgagttactctttgttcagtaatgcactttattttattgtccaaagagagtcagagctaagcatacaggcttgggggtgagccctgctgtgagagttcaggccctgggaggctcagccacctcctcttgtgggaaggaggtctcagccccacctcgcatcttcacctgcccttggtgtggacacaccctctcatgctaccagcaccataatccagtgggggtgactgggtgcacacctgcccaggagcagctggttggagggagccagggccaggcccaccctcctctcgggaccaggagacttgcag

SEQ ID NO: 653448 - DNA, 8393 bp, Homo sapiens
  misc_feature (4052)..(4052): n is a, c, g, or t
  misc_feature (4061)..(4061): n is a, c, g, or t
  misc_feature (4065)..(4065): n is a, c, g, or t
  misc_feature (4070)..(4070): n is a, c, g, or t
  misc_feature (4080)..(4080): n is a, c, g, or t
  misc_feature (4095)..(4095): n is a, c, g, or t
  misc_feature (4129)..(4129): n is a, c, g, or t
  misc_feature (4159)..(4159): n is a, c, g, or t
  misc_feature (4168)..(4168): n is a, c, g, or t
  misc_feature (4172)..(4172): n is a, c, g, or t
  misc_feature (4175)..(4175): n is a, c, g, or t
  misc_feature (4185)..(4185): n is a, c, g, or t
  misc_feature (4194)..(4194): n is a, c, g, or t
  misc_feature (4374)..(4374): n is a, c, g, or t
  misc_feature (4379)..(4379): n is a, c, g, or t
  misc_feature (4454)..(4454): n is a, c, g, or t
  misc_feature (4458)..(4458): n is a, c, g, or t
  misc_feature (4498)..(4498): n is a, c, g, or t
  misc_feature (4506)..(4506): n is a, c, g, or t
  misc_feature (4514)..(4514): n is a, c, g, or t
  misc_feature (4516)..(4516): n is a, c, g, or t
  misc_feature (4542)..(4542): n is a, c, g, or t
  misc_feature (4552)..(4552): n is a, c, g, or t
  misc_feature (4604)..(4604): n is a, c, g, or t
  misc_feature (4611)..(4611): n is a, c, g, or t
  misc_feature (4623)..(4623): n is a, c, g, or t
  misc_feature (4686)..(4686): n is a, c, g, or t
  misc_feature (4795)..(4795): n is a, c, g, or t
  misc_feature (4838)..(4838): n is a, c, g, or t
  misc_feature (4888)..(4888): n is a, c, g, or t
  misc_feature (4893)..(4893): n is a, c, g, or t
  misc_feature (4900)..(4900): n is a, c, g, or t
  misc_feature (4953)..(4953): n is a, c, g, or t
  misc_feature (5035)..(5036): n is a, c, g, or t
  misc_feature (5061)..(5061): n is a, c, g, or t
  misc_feature (5142)..(5142): n is a, c, g, or t
  misc_feature (5152)..(5152): n is a, c, g, or t
  misc_feature (5177)..(5177): n is a, c, g, or t
  misc_feature (5191)..(5191): n is a, c, g, or t
  misc_feature (5200)..(5200): n is a, c, g, or t
  misc_feature (5207)..(5207): n is a, c, g, or t
  misc_feature (5221)..(5221): n is a, c, g, or t
  misc_feature (5238)..(5238): n is a, c, g, or t
  misc_feature (6384)..(6384): n is a, c, g, or t
  misc_feature (6387)..(6387): n is a, c, g, or t
  misc_feature (6419)..(6419): n is a, c, g, or t
  misc_feature (6430)..(6431): n is a, c, g, or t
  misc_feature (6437)..(6437): n is a, c, g, or t
  misc_feature (6447)..(6447): n is a, c, g, or t
  misc_feature (6453)..(6454): n is a, c, g, or t
  misc_feature (6457)..(6459): n is a, c, g, or t
  misc_feature (6474)..(6474): n is a, c, g, or t
agcggattgtgcgaggcaccgggacgtcggcggctggcggagccgggctgggctgaagctggagcggcggtggcggcggcgtagggaggccggggccggggctgaggccgcggccgggtctgcgaggcccttggggcggcaggcggcggcggcccggggctcgagcccggaggcaggagcagccgccatggccgagagcatcataattcgtgtccagtccccggatggagtgaagcggatcacagcaacaaagagagaaacagcagcaacatttttgaaaaaggttgcaaaggagtttggcttccaaaataatggcttctcggtttacatcaatagaaacaagaccggagagataacagcctcctccaacaaatccctcaacttgctaaaaatcaagcatggcgatttgttgttcctgtttccctcgagccttgctgggccctcatctgaaatggagacgtcagttccaccgggcttcaaagtctttggcgctcccaacgtggtggaggatgagattgatcagtacctcagcaaacaggacgggaagatttacagaagccgagacccacagctatgccgccacggccctttggggaaatgcgtgcactgcgtccctctagagccattcgatgaggactatctaaaccatctcgagcctcccgtgaagcacatgtccttccacgcctacatccggaagctgactggaggggctgacaaggggaagtttgttgccctggagaacatcagctgcaagattaagtcagggtgcgaggggcacctcccgtggccgaatggcatctgtactaagtgccagccgagcgccatcacgctgaacagacagaagtacaggcatgtggacaatatcatgtttgagaatcacaccgtcgctgaccgctttcttgacttctggagaaagacagggaaccagcattttgggtacttatacggacggtacacggagcacaaagacattccccttggcatcagggctgaagtggctgcgatttatgagccacctcagattggtacacagaacagcttggagcttcttgaggatccaaaagctgaagtggtcgatgaaattgctgccaaacttggcctgcggaaggttggctggatatttacagacctcgtctcagaagatacccgaaagggtaccgtccgctacagtcgaaataaggacacctatttcctaagttcagaagagtgcatcactgcaggagacttccagaacaagcatcccaacatgtgccggctctctccagacggacattttggatccaagtttgttactgcagtggctacaggtggtcctgacaaccaagtccactttgaagggtaccaggtgtccaatcagtgtatggcactggtccgtgatgagtgtttgctgccatgcaaggacgccccggagcttggctacgccaaggagtctagcagtgagcagtacgtgcctgatgtgttttataaggacgtagacaagtttggcaacgagatcacccagctggcccggcccctgcctgtggagtatctcatcatagacatcacaacaactttccccaaggatccagtttacactttttctatttcgcaaaatccatttcctattgaaaaccgggatgtattgggtgagacacaggacttccatagcttggccacctatttgtctcagaatacctcatctgtgttcttggataccatctcagatttccacctcttgctgttcctggtcaccaatgaagttatgcctctgcaggacagcatcagcttgctgctggaggccgtgcggaccagaaatgaggagctcgcccagacatggaagaggtctgagcagtgggccaccatcgagcagctgtgcagtgagtacccccaccccctgccccggcaccccgtggctggggccggagagcagcccactctgcacagctccccactgccggtggtgccctggattccgcacccagctgcatcctggcaggtgccatcggcaatgcaacgagtagagactcggcctccctgccaggcacgtggcaggctccggtgatggagcagacatgttgtccaggccgtacgtcttaggtacacagccctgtaaattttataaacctgtacatcagagatactaatctccaggcatcctaggagcactttgaacatcattgtcttaagagaatcagaaactttatggaagcgccggaagcgtgggaccttttggtctccttgagaatttccctttagtgcttaaagctgtaaggaggagaagcctgcagcatccatgttgttgctggtggacactacggaacggaccgcaggcattgcgtgtcttccggaccctcagtcaccaggtcctgaacgattccccactcgtgagaaccttctgtcagcattgctgcagggactcctcacgcaccgtggtgcctcgtgcagcccgagtgccctgagtccctgcagctgagagcaccagagtgcccgggagctacggccctggacaaatgctagaatccttctgttaacacagccttcaaaagacacatcaaacacctttataccatttcctgttttttttttttttttttgagacggagtttggctcttgtcacccaggctggagtgtggtggcgtgatcttgcctcactgcaacctccacctcctgggttcaaacgattctcctgcctcagcctcctgagtagctgggactacaggcatgtgccaccatgcctggataatttttgtattcttagtagagccagggtttcaccatgttagccaggctggtctcgaactcctgaccttgtgatctgcttgcctctgcctcccagagtgttgggattacaggtgtgagccaccacgcccagccgaggttttcttttcacacaattctttgttttttatttttatttttgtagagacagggtctcactctattgccgaggctggagtgcagttgcacaatcgtaactcactgcagcctcaaactccaggctcaagtgatctttctgcttcagcctgctgagtaactgggaccacaggcttgcaacaccacacccagctaattcttggggctttgttgttgctttttatttgtttgttttttaaaaataattttaacttattttagattcacagggtacatgtgcaggtttgtcacctgggtatattgcctgatgctgaggttggggtatgattgatcacatcacccaggtactacacatagtacctaatagtttttcagcccgccctgctctttgtgtgtgtgtgtgtgtgtgtgtgtgtgtgtgtgtgtgtgtgtgttttgagctggagcctcaccctgtctcccaggctggagtgcagtggcgcaatcttagctcactgcaaactctgcctcctgggttgaagcgattcccctccctcggcctcccgagtagctgggattacagatgtgtaccaccacacctggcgttgccatctttatgtacgtgagtacccatgtttagctcccacttataaatgaaaacatgtagtatttggtttgctgttcctgcattagtttgcttagaataatggccttcaactgcatccatgttgctgcaaaggacatgatttcattcctttttatggctgcaaaattttttaatatttttgtatcaatgaggtctcactgtgttgcccagactggtctcaaactttggcctcaagcattccttgcacctcagcctcacaaagtcctgagattatacctgggagccactgcacccagccctttgatgcagttctcaatgacaccagtctttttttttttttttcttttttgtttcccttttagagacagggtttcgctctgttgcctaggctggagtgcagtggagtgatcatagctcactacagccttcaattcctgagctcaagcgatcctcctgcatcagctttcggagtacctaggagtataaacatgagccactacacccaactaatgtttttggttggtgttttttttttttctttaagagatagggttggccgggcccggtggctggctcacacctgtaatcccagcactttgggaggctgaggcnggtggatcncaangtcangggattgagnccatcctggccaacntggtgaaaccccatttctgttaaaactacaaaanttagctgggcatggtggcgagcgcctgtgntcccagctnctcnggnggctgaggcnggagaatcncttgacccaggaagcgtaggttgtagtgagctgagatcgtgccactgtactccagcctgggcgacagagcgagactctgtctcaaaaaaaaaaaaaagatgtggtcttgccatgttgcccaggctggtctcaaactcctaggctcaagtgatcttcctgccttggttcccaaagtgctgngattncagctgtgagccactgcacctgaccttttttttttcccccctcctttttttttgagacaggttctcgctctgtcncccnggctgaagtgcagtggcatttgaggtcagtctcaccttgncctccccnggctcaancnatcctcccgcctcagcctcctgagcngctgggactncaggcatgtgccaccatccctggctgattttttaaatttgttgtagagatgnggtctcnctatgttgcccnggctggtcttgaactcttgggcccaagcgatcctcccgcctcagtgctgagattgcagtggtnagccaccatgtccagccaactctttaataataggcagttctgactggtgtaagttctgactggtatctcactgtggttttaatttgcatctctgatgattagtgatgtngggcattttttcatgggttttttgtttgtttgttttgagacanagtcttgttctgttgcccaggctggagtgcagtagtgtgatctcggctcnctgcngcctccncctcccgggttcaagccattgtccagcctctgcctcctaagtagctggaattncaggtggctgccaccacacccagctaatttttttagttttggtggagacagggtttctccatgttggccaggctggtctcgnnctcctgacctcaagtgatccacccncctcggcttcccaaagtgctgggattataggtgtgagccaccgcgcccggccctcatgggttgttttgttttgttttgagncggaatctcnccctgtcacccaggctgcagtgcantctcatgatctccncttactgcnacctccncgtcctgggttcangtgatgctcctgcctcngcctcccgagtggctgggactgcaggcgtgcacccacgcctggctaatttttatatttttggtggagatggggtttcaccatgttggtcaggctggtctggaactcctgacctcaggtgatccacctgcctcggtctcccaaagtgctgggattacagacgtgtatacacaagacacaaagatcagctcaggatgggtcataggcctaatggtaaaaggtaaaactatgaagcaggctgggcatgatgtctcatagctataatcctaacactctaggaggccaaagctggaggacactgtagcccagaagtgtgagaccagcccacacagcatagtgaagccccgtctgtacaaaaaaacaatattaaaaaaaaaagaattagctgggcatggtgagtggtccacgcctataatcccagcttctggggaggctgaaatgggaggatcccatgagtcaggagctcgaggtcacagtgagccatgattataccactccagcctgaatgacagagcaataccctgtcttaaaaaaataaaaactgtaaaacagttattaagttgaatctcttcagggccttggggtacgcaaagattcttttaggcaggatgcaggaccttggggtagaacacagaaaaacactggcataaaaataggtaaattgataaataaatttatctaaacaaaacacttgtgctcatcacagggcactgttagaaacatgaaaaggcaccaatgggggacgcagtattagcagtacatacacacaacatgacttctatctgaaacttaaaaataactctgcctgttgttaatcaaacagaaagcagaagaagaagctgggcggagggtgaaacgtttcacaaaaggaaatgcaggtcgggcatggtggctcgcgcctgtaatcccagcactttgggaggccgaggcggtggatcatttgaggtcaggagttcgagacagccaggccagcatggtgaaaacccatctctactaaaaataaaagaaattagccaggtgtggtggcacgtgcctgtggtcctagctgcttgggaggctgaggtaggagaatcgcttgaacccgggaggcagaggttgcagcgagccgagattgcgccactgcactccagcctgggtgacagagcaanacnctacctcagaaaaaaaaaaaaaaaaaaaaaanaaaaaaaaaanntaaatnaaaaatcccntggggnnttnnntttattttataaggngaaggaccctctgcaacaaaaaggaaccagcaagcacaggctccctgttactccctgtggtgcaggaggcatttttctgagggcattaagcacttcaaagtgtgcctgtggtgggagtgctgtgtgggcaggaccagcactgggtgggatgttgggggcggggagctctcagctgcctgcccctgcccccatgcccacactctggcagtctctggtgggccagaaatgatgagtgctcatttctcttccaccctgcaggcacagttggcgggcagctcccaggtctccatgagtacggcgccgtcgggggctccacacacacggccactgcagccatgtgggcctgtcagcactgcacgttcatgaaccagccaggcacaggccactgcgagatgtgcagcctccccaggacctagggcgcctgccctctgctggctaggaccgggcccagcccagcccttcctgaagccagaagcgttgctgagtgtgttccctgtaactgccccatagtgggcagccctggaggaacaaggggctggctgtcctgggctccctgacccactgaagcttctcagcacgttcctccctggagagcgggcgccacggctggtattctgcaggctgaatgcagtctccagactggaaacgcagagcggctcctcacgcctaatcctgttgacaagtcccccgccgtgttggaaagacctctcgcctctacgtggcacctggaattggggcgcacagggaggggcggatgctgccaccacccagccttctctttattttcagtgctttttgtttggcctccctgcccccatgtttttctggctgggagctcctggttacccccttgtctgactgcttggtggcaggcaccctgcctgtgagggccactttcctcttctagtagctgttgtctggtggggacgcagtggccctggacacggctcccctctgcaggtctgcaggtcggtttgctgcctgccctcctcctctcacccgatgtccaggtgggattttaaagtctgcattggttataataacagttatcagtaattcctgcccagaagacttttatttatttttttttaagataaaaactgcacaaaaggggagtgagagagactagtttccacatccttccctcctttagtgaagcccccgaggttgtgtccagggtgatgagtgtggacgggggcaccagtcagttctcccttgaagtaaacctcagtgcctgagacttttctaccaagccacacagctgcagcaactgcagatactgcgggctgagcaggagcagtggtggcgcctgccctgaggctgccctgcgatggcctgggtgggagagctgggtcaccggtgccgatgctctggccctccccaatacgctgcttcgtcccactgcaccgcctggctgagggcgttaggggctgtgcctcttgtgagggccatttgggacctccctggggcactgcacaattgatagtgtaccaatagagggagactgggcgatctggaacagcacgtggtggggtcctgcttgtgtgctctgcgttcctctgtggcgtggccaggccggggcctggctcttacccggggagtggtgggcatctcgatgcttctttgccttaatgatggccacatctgggctgctctgcacccacgggagaggctggcccagctgcagactgcttagggacttctgtgtccatcctggggggtaagcccacgtgacccacattcttggcactatgaacagagaacatttgcctgttggctccctccaaccagctgctcctgggacacaggtgctcctgcttcggctctgtttcggctcacaggtgtgcatcactgggcttggatttgcattacattgaccccagccctgcagtggaacctaataaaagcgcctgaagcaa

SEQ ID NO: 653449 - DNA, 2244 bp, Homo sapiens
cggacgcgtgggtccggacgcgtgggctcagcacgttcctccctggagagcgggcgccacggctggtattctgcaggctgaatgcagtctccagactggaaacgcagagcggctcctcacgcctaatcctgttgacaagtcccccgccgtgttggaaagacctctcgcctctacgtggcacctggaattggggcgcacagggaggggcggatgctgccaccacccagccttctctttattttcagtgctttttgtttggcctccctgcccccatgtttttctggctgggagctcctggttacccccttgtctgactgcttggtggcaggcaccctgcctgtgagggccactttcctcttctagtagctgttgtctggtggggacgcagtggccctggacacggctcccctctgcaggtctgcaggtcggtttgctgcctgccctcctcctctcacccgatgtccaggtgggattttaaagtctgcattggttataataacagttatcagtaattcctgcccagaagacttttatttatttttttttaagataaaaactgcacaaaaggggagtgagagagactagtttccacatccttccctcctttagtgaagcccccgaggttgtgtccagggtgatgagtgtggacgggggcaccagtcagttctcccttgaagtaaacctcagtgcctgagacttttctaccaagccacacagctgcagcaactgcagatactgcgggctgagcaggagcagtggtggcgcctgccctgaggctgccctgcgatggcctgggtgggagagctgggtcaccggtgccgatgctctggccctccccaatacgctgcttcgtcccactgcaccgcctggctgagggcgttaggggctgtgcctcttgtgagggccatttgggacctccctggggcactgcacaattgatagtgtaccaatagagggagactgggcgatctggaacagcacgtggtggggtcctgcttgtgtgctctgcgttcctctgtggcgtggccaggccggggcctggctcttacccggggagtggtgggcatctcgatgcttctttgccttaatgatggccacatctgggctgctctgcacccacgggagaggctggcccagctgcagactgcttagggacttctgtgtccatcctggggggtaagcccacgtgacccacattcttggcactatgaacagagaacatttgcctgttggcttctgaagtggtcagggccatggctgacacctccaggtccgcctggcatgggacaccaagtggaaggcccaagcagctcatctgctcttgggaccaggggccagttgggttgggtctggtcacggcagagctattgtggagggtcaggaagggtggagaggagctgggttgaagcggactgctgcggatgcaactcccagcttgcccaccgcgggctgtctgctctccctcctagcagctgtcacactgaagttttgtcctctgctgtctcctctggtcctgagatgagctgtgagcctaggtggccaaggcttcctgcattgcttccctgtgagtccaaggccttcccccaccactgggcagaggctggacagcacggacttctagagagagccgcgttgccagttcctctcccactcgctcgtccttatccaccacgctattatagtttccgttgtcctccaccagcatttcccttactctgaagttccggcattcacatcattcatgttttcttttgtcttttagctaaaggaaaagcattggcgatttgtctgattctggttttgagttactctttgttcagtaatgcactttattttattgtccaaagagagtcagagctaagcatacaggcttgggggtgagccctgctgtgagagttcaggccctgggaggctcagccacctcctcttgtgggaaggaggtctcagccccacctcgcatcttcacctgcccttggtgtggacacaccctctcatgctaccagcaccataatccagtgggggtgactgggtgcacacctgcccaggtgaacacagcggctgccagtctcctggtcccgagaggaggtggggcctggccctggctccctccaaccagctgctcctgggacacaggtgctcctgcttcggctctgtttcggctcacaggtgtgcatcactgggcttggatttgcattacattgaccccagccctgcagtggaacctaataaaagcgcctgaagcaa

SEQ ID NO: 653450 - DNA, 154 bp, Homo sapiens
gaatcgagctcggacccgataggcagcacactccttactgatgaaacaaaactagaatctgctttatgaaaactgacttaattttgtatgtcagtttatctatttactaagcatttttgatggtactatggctaaggtcggagtgtctacaaca

SEQ ID NO: 653451 - DNA, 7869 bp, Homo sapiens
  misc_feature (4052)..(4052): n is a, c, g, or t
  misc_feature (4061)..(4061): n is a, c, g, or t
  misc_feature (4065)..(4065): n is a, c, g, or t
  misc_feature (4070)..(4070): n is a, c, g, or t
  misc_feature (4080)..(4080): n is a, c, g, or t
  misc_feature (4095)..(4095): n is a, c, g, or t
  misc_feature (4129)..(4129): n is a, c, g, or t
  misc_feature (4159)..(4159): n is a, c, g, or t
  misc_feature (4168)..(4168): n is a, c, g, or t
  misc_feature (4172)..(4172): n is a, c, g, or t
  misc_feature (4175)..(4175): n is a, c, g, or t
  misc_feature (4185)..(4185): n is a, c, g, or t
  misc_feature (4194)..(4194): n is a, c, g, or t
  misc_feature (4374)..(4374): n is a, c, g, or t
  misc_feature (4379)..(4379): n is a, c, g, or t
  misc_feature (4454)..(4454): n is a, c, g, or t
  misc_feature (4458)..(4458): n is a, c, g, or t
  misc_feature (4498)..(4498): n is a, c, g, or t
  misc_feature (4506)..(4506): n is a, c, g, or t
  misc_feature (4514)..(4514): n is a, c, g, or t
  misc_feature (4516)..(4516): n is a, c, g, or t
  misc_feature (4542)..(4542): n is a, c, g, or t
  misc_feature (4552)..(4552): n is a, c, g, or t
  misc_feature (4604)..(4604): n is a, c, g, or t
  misc_feature (4611)..(4611): n is a, c, g, or t
  misc_feature (4623)..(4623): n is a, c, g, or t
  misc_feature (4686)..(4686): n is a, c, g, or t
  misc_feature (4795)..(4795): n is a, c, g, or t
  misc_feature (4838)..(4838): n is a, c, g, or t
  misc_feature (4888)..(4888): n is a, c, g, or t
  misc_feature (4893)..(4893): n is a, c, g, or t
  misc_feature (4900)..(4900): n is a, c, g, or t
  misc_feature (4953)..(4953): n is a, c, g, or t
  misc_feature (5035)..(5036): n is a, c, g, or t
  misc_feature (5061)..(5061): n is a, c, g, or t
  misc_feature (5142)..(5142): n is a, c, g, or t
  misc_feature (5152)..(5152): n is a, c, g, or t
  misc_feature (5177)..(5177): n is a, c, g, or t
  misc_feature (5191)..(5191): n is a, c, g, or t
  misc_feature (5200)..(5200): n is a, c, g, or t
  misc_feature (5207)..(5207): n is a, c, g, or t
  misc_feature (5221)..(5221): n is a, c, g, or t
  misc_feature (5238)..(5238): n is a, c, g, or t
  misc_feature (6384)..(6384): n is a, c, g, or t
  misc_feature (6387)..(6387): n is a, c, g, or t
  misc_feature (6419)..(6419): n is a, c, g, or t
  misc_feature (6430)..(6431): n is a, c, g, or t
  misc_feature (6437)..(6437): n is a, c, g, or t
  misc_feature (6447)..(6447): n is a, c, g, or t
  misc_feature (6453)..(6454): n is a, c, g, or t
  misc_feature (6457)..(6459): n is a, c, g, or t
  misc_feature (6474)..(6474): n is a, c, g, or t
agcggattgtgcgaggcaccgggacgtcggcggctggcggagccgggctgggctgaagctggagcggcggtggcggcggcgtagggaggccggggccggggctgaggccgcggccgggtctgcgaggcccttggggcggcaggcggcggcggcccggggctcgagcccggaggcaggagcagccgccatggccgagagcatcataattcgtgtccagtccccggatggagtgaagcggatcacagcaacaaagagagaaacagcagcaacatttttgaaaaaggttgcaaaggagtttggcttccaaaataatggcttctcggtttacatcaatagaaacaagaccggagagataacagcctcctccaacaaatccctcaacttgctaaaaatcaagcatggcgatttgttgttcctgtttccctcgagccttgctgggccctcatctgaaatggagacgtcagttccaccgggcttcaaagtctttggcgctcccaacgtggtggaggatgagattgatcagtacctcagcaaacaggacgggaagatttacagaagccgagacccacagctatgccgccacggccctttggggaaatgcgtgcactgcgtccctctagagccattcgatgaggactatctaaaccatctcgagcctcccgtgaagcacatgtccttccacgcctacatccggaagctgactggaggggctgacaaggggaagtttgttgccctggagaacatcagctgcaagattaagtcagggtgcgaggggcacctcccgtggccgaatggcatctgtactaagtgccagccgagcgccatcacgctgaacagacagaagtacaggcatgtggacaatatcatgtttgagaatcacaccgtcgctgaccgctttcttgacttctggagaaagacagggaaccagcattttgggtacttatacggacggtacacggagcacaaagacattccccttggcatcagggctgaagtggctgcgatttatgagccacctcagattggtacacagaacagcttggagcttcttgaggatccaaaagctgaagtggtcgatgaaattgctgccaaacttggcctgcggaaggttggctggatatttacagacctcgtctcagaagatacccgaaagggtaccgtccgctacagtcgaaataaggacacctatttcctaagttcagaagagtgcatcactgcaggagacttccagaacaagcatcccaacatgtgccggctctctccagacggacattttggatccaagtttgttactgcagtggctacaggtggtcctgacaaccaagtccactttgaagggtaccaggtgtccaatcagtgtatggcactggtccgtgatgagtgtttgctgccatgcaaggacgccccggagcttggctacgccaaggagtctagcagtgagcagtacgtgcctgatgtgttttataaggacgtagacaagtttggcaacgagatcacccagctggcccggcccctgcctgtggagtatctcatcatagacatcacaacaactttccccaaggatccagtttacactttttctatttcgcaaaatccatttcctattgaaaaccgggatgtattgggtgagacacaggacttccatagcttggccacctatttgtctcagaatacctcatctgtgttcttggataccatctcagatttccacctcttgctgttcctggtcaccaatgaagttatgcctctgcaggacagcatcagcttgctgctggaggccgtgcggaccagaaatgaggagctcgcccagacatggaagaggtctgagcagtgggccaccatcgagcagctgtgcagtgagtacccccaccccctgccccggcaccccgtggctggggccggagagcagcccactctgcacagctccccactgccggtggtgccctggattccgcacccagctgcatcctggcaggtgccatcggcaatgcaacgagtagagactcggcctccctgccaggcacgtggcaggctccggtgatggagcagacatgttgtccaggccgtacgtcttaggtacacagccctgtaaattttataaacctgtacatcagagatactaatctccaggcatcctaggagcactttgaacatcattgtcttaagagaatcagaaactttatggaagcgccggaagcgtgggaccttttggtctccttgagaatttccctttagtgcttaaagctgtaaggaggagaagcctgcagcatccatgttgttgctggtggacactacggaacggaccgcaggcattgcgtgtcttccggaccctcagtcaccaggtcctgaacgattccccactcgtgagaaccttctgtcagcattgctgcagggactcctcacgcaccgtggtgcctcgtgcagcccgagtgccctgagtccctgcagctgagagcaccagagtgcccgggagctacggccctggacaaatgctagaatccttctgttaacacagccttcaaaagacacatcaaacacctttataccatttcctgttttttttttttttttttgagacggagtttggctcttgtcacccaggctggagtgtggtggcgtgatcttgcctcactgcaacctccacctcctgggttcaaacgattctcctgcctcagcctcctgagtagctgggactacaggcatgtgccaccatgcctggataatttttgtattcttagtagagccagggtttcaccatgttagccaggctggtctcgaactcctgaccttgtgatctgcttgcctctgcctcccagagtgttgggattacaggtgtgagccaccacgcccagccgaggttttcttttcacacaattctttgttttttatttttatttttgtagagacagggtctcactctattgccgaggctggagtgcagttgcacaatcgtaactcactgcagcctcaaactccaggctcaagtgatctttctgcttcagcctgctgagtaactgggaccacaggcttgcaacaccacacccagctaattcttggggctttgttgttgctttttatttgtttgttttttaaaaataattttaacttattttagattcacagggtacatgtgcaggtttgtcacctgggtatattgcctgatgctgaggttggggtatgattgatcacatcacccaggtactacacatagtacctaatagtttttcagcccgccctgctctttgtgtgtgtgtgtgtgtgtgtgtgtgtgtgtgtgtgtgtgtgtgttttgagctggagcctcaccctgtctcccaggctggagtgcagtggcgcaatcttagctcactgcaaactctgcctcctgggttgaagcgattcccctccctcggcctcccgagtagctgggattacagatgtgtaccaccacacctggcgttgccatctttatgtacgtgagtacccatgtttagctcccacttataaatgaaaacatgtagtatttggtttgctgttcctgcattagtttgcttagaataatggccttcaactgcatccatgttgctgcaaaggacatgatttcattcctttttatggctgcaaaattttttaatatttttgtatcaatgaggtctcactgtgttgcccagactggtctcaaactttggcctcaagcattccttgcacctcagcctcacaaagtcctgagattatacctgggagccactgcacccagccctttgatgcagttctcaatgacaccagtctttttttttttttttcttttttgtttcccttttagagacagggtttcgctctgttgcctaggctggagtgcagtggagtgatcatagctcactacagccttcaattcctgagctcaagcgatcctcctgcatcagctttcggagtacctaggagtataaacatgagccactacacccaactaatgtttttggttggtgttttttttttttctttaagagatagggttggccgggcccggtggctggctcacacctgtaatcccagcactttgggaggctgaggcnggtggatcncaangtcangggattgagnccatcctggccaacntggtgaaaccccatttctgttaaaactacaaaanttagctgggcatggtggcgagcgcctgtgntcccagctnctcnggnggctgaggcnggagaatcncttgacccaggaagcgtaggttgtagtgagctgagatcgtgccactgtactccagcctgggcgacagagcgagactctgtctcaaaaaaaaaaaaaagatgtggtcttgccatgttgcccaggctggtctcaaactcctaggctcaagtgatcttcctgccttggttcccaaagtgctgngattncagctgtgagccactgcacctgaccttttttttttcccccctcctttttttttgagacaggttctcgctctgtcncccnggctgaagtgcagtggcatttgaggtcagtctcaccttgncctccccnggctcaancnatcctcccgcctcagcctcctgagcngctgggactncaggcatgtgccaccatccctggctgattttttaaatttgttgtagagatgnggtctcnctatgttgcccnggctggtcttgaactcttgggcccaagcgatcctcccgcctcagtgctgagattgcagtggtnagccaccatgtccagccaactctttaataataggcagttctgactggtgtaagttctgactggtatctcactgtggttttaatttgcatctctgatgattagtgatgtngggcattttttcatgggttttttgtttgtttgttttgagacanagtcttgttctgttgcccaggctggagtgcagtagtgtgatctcggctcnctgcngcctccncctcccgggttcaagccattgtccagcctctgcctcctaagtagctggaattncaggtggctgccaccacacccagctaatttttttagttttggtggagacagggtttctccatgttggccaggctggtctcgnnctcctgacctcaagtgatccacccncctcggcttcccaaagtgctgggattataggtgtgagccaccgcgcccggccctcatgggttgttttgttttgttttgagncggaatctcnccctgtcacccaggctgcagtgcantctcatgatctccncttactgcnacctccncgtcctgggttcangtgatgctcctgcctcngcctcccgagtggctgggactgcaggcgtgcacccacgcctggctaatttttatatttttggtggagatggggtttcaccatgttggtcaggctggtctggaactcctgacctcaggtgatccacctgcctcggtctcccaaagtgctgggattacagacgtgtatacacaagacacaaagatcagctcaggatgggtcataggcctaatggtaaaaggtaaaactatgaagcaggctgggcatgatgtctcatagctataatcctaacactctaggaggccaaagctggaggacactgtagcccagaagtgtgagaccagcccacacagcatagtgaagccccgtctgtacaaaaaaacaatattaaaaaaaaaagaattagctgggcatggtgagtggtccacgcctataatcccagcttctggggaggctgaaatgggaggatcccatgagtcaggagctcgaggtcacagtgagccatgattataccactccagcctgaatgacagagcaataccctgtcttaaaaaaataaaaactgtaaaacagttattaagttgaatctcttcagggccttggggtacgcaaagattcttttaggcaggatgcaggaccttggggtagaacacagaaaaacactggcataaaaataggtaaattgataaataaatttatctaaacaaaacacttgtgctcatcacagggcactgttagaaacatgaaaaggcaccaatgggggacgcagtattagcagtacatacacacaacatgacttctatctgaaacttaaaaataactctgcctgttgttaatcaaacagaaagcagaagaagaagctgggcggagggtgaaacgtttcacaaaaggaaatgcaggtcgggcatggtggctcgcgcctgtaatcccagcactttgggaggccgaggcggtggatcatttgaggtcaggagttcgagacagccaggccagcatggtgaaaacccatctctactaaaaataaaagaaattagccaggtgtggtggcacgtgcctgtggtcctagctgcttgggaggctgaggtaggagaatcgcttgaacccgggaggcagaggttgcagcgagccgagattgcgccactgcactccagcctgggtgacagagcaanacnctacctcagaaaaaaaaaaaaaaaaaaaaaanaaaaaaaaaanntaaatnaaaaatcccntggggnnttnnntttattttataaggngaaggaccctctgcaacaaaaaggaaccagcaagcacaggctccctgttactccctgtggtgcaggaggcatttttctgagggcattaagcacttcaaagtgtgcctgtggtgggagtgctgtgtgggcaggaccagcactgggtgggatgttgggggcggggagctctcagctgcctgcccctgcccccatgcccacactctggcagtctctggtgggccagaaatgatgagtgctcatttctcttccaccctgcaggcacagttggcgggcagctcccaggtctccatgagtacggcgccgtcgggggctccacacacacggccactgcagccatgtgggcctgtcagcactgcacgttcatgaaccagccaggcacaggccactgcgagatgtgcagcctccccaggacctagggcgcctgccctctgctggctaggaccgggcccagcccagcccttcctgaagccagaagcgttgctgagtgtgttccctgtaactgccccatagtgggcagccctggaggaacaaggggctggctgtcctgggctccctgacccactgaagcttctcagcacgttcctccctggagagcgggcgccacggctggtattctgcaggctgaatgcagtctccagactggaaacgcagagcggctcctcacgcctaatcctgttgacaagtcccccgccgtgttggaaagacctctcgcctctacgtggcacctggaattggggcgcacagggaggggcggatgctgccaccacccagccttctctttattttcagtgctttttgtttggcctccctgcccccatgtttttctggctgggagctcctggttacccccttgtctgactgcttggtggcaggcaccctgcctgtgagggccactttcctcttctagtagctgttgtctggtggggacgcagtggccctggacacggctcccctctgcaggtctgcaggtcggtttgctgcctgccctcctcctctcacccgatgtccaggtgggattttaaagtctgcattggttataataacagttatcagtaaaaaaaaaaaaaaaaaaaaaaaaaaaaaaaaaaaaaaaaaaaaaaaatttttggggggctcgggcctcagaagaagacttttcaagaaccatcgcgttgggggcgcgcggcgggcccatgtggtgttagatggaaaccggtcgctcatagcgtgtccccagaaggaaactcgtgggtcctggaacaagtgtgtgggttttttctcacaattaaaaaacgcccggggtggaaccggaagtggtttcttggaccaaatcccagaggggagtccgggaggccacaggggattctatcaacaggagtcccagcgaactcgatataattagcgcgcgcgcggagg

SEQ ID NO: 653452 - DNA, 6699 bp, Homo sapiens
  misc_feature (4052)..(4052): n is a, c, g, or t
  misc_feature (4061)..(4061): n is a, c, g, or t
  misc_feature (4065)..(4065): n is a, c, g, or t
  misc_feature (4070)..(4070): n is a, c, g, or t
  misc_feature (4080)..(4080): n is a, c, g, or t
  misc_feature (4095)..(4095): n is a, c, g, or t
  misc_feature (4129)..(4129): n is a, c, g, or t
  misc_feature (4159)..(4159): n is a, c, g, or t
  misc_feature (4168)..(4168): n is a, c, g, or t
  misc_feature (4172)..(4172): n is a, c, g, or t
  misc_feature (4175)..(4175): n is a, c, g, or t
  misc_feature (4185)..(4185): n is a, c, g, or t
  misc_feature (4194)..(4194): n is a, c, g, or t
  misc_feature (4374)..(4374): n is a, c, g, or t
  misc_feature (4379)..(4379): n is a, c, g, or t
  misc_feature (4454)..(4454): n is a, c, g, or t
  misc_feature (4458)..(4458): n is a, c, g, or t
  misc_feature (4498)..(4498): n is a, c, g, or t
  misc_feature (4506)..(4506): n is a, c, g, or t
  misc_feature (4514)..(4514): n is a, c, g, or t
  misc_feature (4516)..(4516): n is a, c, g, or t
  misc_feature (4542)..(4542): n is a, c, g, or t
  misc_feature (4552)..(4552): n is a, c, g, or t
  misc_feature (4604)..(4604): n is a, c, g, or t
  misc_feature (4611)..(4611): n is a, c, g, or t
  misc_feature (4623)..(4623): n is a, c, g, or t
  misc_feature (4686)..(4686): n is a, c, g, or t
  misc_feature (4795)..(4795): n is a, c, g, or t
  misc_feature (4838)..(4838): n is a, c, g, or t
  misc_feature (4888)..(4888): n is a, c, g, or t
  misc_feature (4893)..(4893): n is a, c, g, or t
  misc_feature (4900)..(4900): n is a, c, g, or t
  misc_feature (4953)..(4953): n is a, c, g, or t
  misc_feature (5035)..(5036): n is a, c, g, or t
  misc_feature (5061)..(5061): n is a, c, g, or t
  misc_feature (5142)..(5142): n is a, c, g, or t
  misc_feature (5152)..(5152): n is a, c, g, or t
  misc_feature (5177)..(5177): n is a, c, g, or t
  misc_feature (5191)..(5191): n is a, c, g, or t
  misc_feature (5200)..(5200): n is a, c, g, or t
  misc_feature (5207)..(5207): n is a, c, g, or t
  misc_feature (5221)..(5221): n is a, c, g, or t
  misc_feature (5238)..(5238): n is a, c, g, or t
agcggattgtgcgaggcaccgggacgtcggcggctggcggagccgggctgggctgaagctggagcggcggtggcggcggcgtagggaggccggggccggggctgaggccgcggccgggtctgcgaggcccttggggcggcaggcggcggcggcccggggctcgagcccggaggcaggagcagccgccatggccgagagcatcataattcgtgtccagtccccggatggagtgaagcggatcacagcaacaaagagagaaacagcagcaacatttttgaaaaaggttgcaaaggagtttggcttccaaaataatggcttctcggtttacatcaatagaaacaagaccggagagataacagcctcctccaacaaatccctcaacttgctaaaaatcaagcatggcgatttgttgttcctgtttccctcgagccttgctgggccctcatctgaaatggagacgtcagttccaccgggcttcaaagtctttggcgctcccaacgtggtggaggatgagattgatcagtacctcagcaaacaggacgggaagatttacagaagccgagacccacagctatgccgccacggccctttggggaaatgcgtgcactgcgtccctctagagccattcgatgaggactatctaaaccatctcgagcctcccgtgaagcacatgtccttccacgcctacatccggaagctgactggaggggctgacaaggggaagtttgttgccctggagaacatcagctgcaagattaagtcagggtgcgaggggcacctcccgtggccgaatggcatctgtactaagtgccagccgagcgccatcacgctgaacagacagaagtacaggcatgtggacaatatcatgtttgagaatcacaccgtcgctgaccgctttcttgacttctggagaaagacagggaaccagcattttgggtacttatacggacggtacacggagcacaaagacattccccttggcatcagggctgaagtggctgcgatttatgagccacctcagattggtacacagaacagcttggagcttcttgaggatccaaaagctgaagtggtcgatgaaattgctgccaaacttggcctgcggaaggttggctggatatttacagacctcgtctcagaagatacccgaaagggtaccgtccgctacagtcgaaataaggacacctatttcctaagttcagaagagtgcatcactgcaggagacttccagaacaagcatcccaacatgtgccggctctctccagacggacattttggatccaagtttgttactgcagtggctacaggtggtcctgacaaccaagtccactttgaagggtaccaggtgtccaatcagtgtatggcactggtccgtgatgagtgtttgctgccatgcaaggacgccccggagcttggctacgccaaggagtctagcagtgagcagtacgtgcctgatgtgttttataaggacgtagacaagtttggcaacgagatcacccagctggcccggcccctgcctgtggagtatctcatcatagacatcacaacaactttccccaaggatccagtttacactttttctatttcgcaaaatccatttcctattgaaaaccgggatgtattgggtgagacacaggacttccatagcttggccacctatttgtctcagaatacctcatctgtgttcttggataccatctcagatttccacctcttgctgttcctggtcaccaatgaagttatgcctctgcaggacagcatcagcttgctgctggaggccgtgcggaccagaaatgaggagctcgcccagacatggaagaggtctgagcagtgggccaccatcgagcagctgtgcagtgagtacccccaccccctgccccggcaccccgtggctggggccggagagcagcccactctgcacagctccccactgccggtggtgccctggattccgcacccagctgcatcctggcaggtgccatcggcaatgcaacgagtagagactcggcctccctgccaggcacgtggcaggctccggtgatggagcagacatgttgtccaggccgtacgtcttaggtacacagccctgtaaattttataaacctgtacatcagagatactaatctccaggcatcctaggagcactttgaacatcattgtcttaagagaatcagaaactttatggaagcgccggaagcgtgggaccttttggtctccttgagaatttccctttagtgcttaaagctgtaaggaggagaagcctgcagcatccatgttgttgctggtggacactacggaacggaccgcaggcattgcgtgtcttccggaccctcagtcaccaggtcctgaacgattccccactcgtgagaaccttctgtcagcattgctgcagggactcctcacgcaccgtggtgcctcgtgcagcccgagtgccctgagtccctgcagctgagagcaccagagtgcccgggagctacggccctggacaaatgctagaatccttctgttaacacagccttcaaaagacacatcaaacacctttataccatttcctgttttttttttttttttttgagacggagtttggctcttgtcacccaggctggagtgtggtggcgtgatcttgcctcactgcaacctccacctcctgggttcaaacgattctcctgcctcagcctcctgagtagctgggactacaggcatgtgccaccatgcctggataatttttgtattcttagtagagccagggtttcaccatgttagccaggctggtctcgaactcctgaccttgtgatctgcttgcctctgcctcccagagtgttgggattacaggtgtgagccaccacgcccagccgaggttttcttttcacacaattctttgttttttatttttatttttgtagagacagggtctcactctattgccgaggctggagtgcagttgcacaatcgtaactcactgcagcctcaaactccaggctcaagtgatctttctgcttcagcctgctgagtaactgggaccacaggcttgcaacaccacacccagctaattcttggggctttgttgttgctttttatttgtttgttttttaaaaataattttaacttattttagattcacagggtacatgtgcaggtttgtcacctgggtatattgcctgatgctgaggttggggtatgattgatcacatcacccaggtactacacatagtacctaatagtttttcagcccgccctgctctttgtgtgtgtgtgtgtgtgtgtgtgtgtgtgtgtgtgtgtgtgtgttttgagctggagcctcaccctgtctcccaggctggagtgcagtggcgcaatcttagctcactgcaaactctgcctcctgggttgaagcgattcccctccctcggcctcccgagtagctgggattacagatgtgtaccaccacacctggcgttgccatctttatgtacgtgagtacccatgtttagctcccacttataaatgaaaacatgtagtatttggtttgctgttcctgcattagtttgcttagaataatggccttcaactgcatccatgttgctgcaaaggacatgatttcattcctttttatggctgcaaaattttttaatatttttgtatcaatgaggtctcactgtgttgcccagactggtctcaaactttggcctcaagcattccttgcacctcagcctcacaaagtcctgagattatacctgggagccactgcacccagccctttgatgcagttctcaatgacaccagtctttttttttttttttcttttttgtttcccttttagagacagggtttcgctctgttgcctaggctggagtgcagtggagtgatcatagctcactacagccttcaattcctgagctcaagcgatcctcctgcatcagctttcggagtacctaggagtataaacatgagccactacacccaactaatgtttttggttggtgttttttttttttctttaagagatagggttggccgggcccggtggctggctcacacctgtaatcccagcactttgggaggctgaggcnggtggatcncaangtcangggattgagnccatcctggccaacntggtgaaaccccatttctgttaaaactacaaaanttagctgggcatggtggcgagcgcctgtgntcccagctnctcnggnggctgaggcnggagaatcncttgacccaggaagcgtaggttgtagtgagctgagatcgtgccactgtactccagcctgggcgacagagcgagactctgtctcaaaaaaaaaaaaaagatgtggtcttgccatgttgcccaggctggtctcaaactcctaggctcaagtgatcttcctgccttggttcccaaagtgctgngattncagctgtgagccactgcacctgaccttttttttttcccccctcctttttttttgagacaggttctcgctctgtcncccnggctgaagtgcagtggcatttgaggtcagtctcaccttgncctccccnggctcaancnatcctcccgcctcagcctcctgagcngctgggactncaggcatgtgccaccatccctggctgattttttaaatttgttgtagagatgnggtctcnctatgttgcccnggctggtcttgaactcttgggcccaagcgatcctcccgcctcagtgctgagattgcagtggtnagccaccatgtccagccaactctttaataataggcagttctgactggtgtaagttctgactggtatctcactgtggttttaatttgcatctctgatgattagtgatgtngggcattttttcatgggttttttgtttgtttgttttgagacanagtcttgttctgttgcccaggctggagtgcagtagtgtgatctcggctcnctgcngcctccncctcccgggttcaagccattgtccagcctctgcctcctaagtagctggaattncaggtggctgccaccacacccagctaatttttttagttttggtggagacagggtttctccatgttggccaggctggtctcgnnctcctgacctcaagtgatccacccncctcggcttcccaaagtgctgggattataggtgtgagccaccgcgcccggccctcatgggttgttttgttttgttttgagncggaatctcnccctgtcacccaggctgcagtgcantctcatgatctccncttactgcnacctccncgtcctgggttcangtgatgctcctgcctcngcctcccgagtggctgggactgcaggcgtgcacccacgcctggctaatttttatatttttggtggagatggggtttcaccatgttggtcaggctggtctggaactcctgacctcaggtgatccacctgcctcggtctcccaaagtgctgggattacagacgtgtatacacaagacacaaagatcagctcaggatgggtcataggcctaatggtaaaaggtaaaactatgaagcaggctgggcatgatgtctcatagctataatcctaacactctaggaggccaaagctggaggacactgtagcccagaagtgtgagaccagcccacacagcatagtgaagccccgtctgtacaaaaaaacaatattaaaaaaaaaagaattagctgggcatggtgagtggtccacgcctataatcccagcttctggggaggctgaaatgggaggatcccatgagtcaggagctcgaggtcacagtgagccatgattataccactccagcctgaatgacagagcaataccctgtcttaaaaaaataaaaactgtaaaacagttattaagttgaatctcttcagggccttggggtacgcaaagattcttttaggcaggatgcaggaccttggggtagaacacagaaaaacactggcataaaaataggtaaattgataaataaatttatctaaacaaaacacttgtgctcatcacagggcactgttagaaacatgaaaaggcaccaatgggggacgcagtattagcagtacatacacacaacatgacttctatctgaaacttaaaaataactctgcctgttgttaatcaaacagaaagcagaagaagaagctgggcggagggtgaaacgtttcacaaaaggaaatgcaggtcgggcatggtggctcgcgcctgtaatcccagcactttgggaggccgaggcggtggatcatttgaggtcaggagttcgagacagccaggccagcatggtgaaaacccatctctactaaaaataaaagaaattagccaggtgtggtggcacgtgcctgtggtcctagctgcttgggaggctgaggtaggagaatcgcttgaacccgggaggcagaggttgcagcgagccgagattgcgccactgcactccagcctcggcaacaacaaaaaaaaggagatgcaggaacagtcactatcattagtcatcagggaaatgcaaattaaaacatgagaagccgttacacattcatcagtgtggctcaaatgaaaaaaacgcgacaatgtcaagtgtgagtgaagatgtgaagcagctgggactctcgtaccttgcgagtgggaggcaaaaccgtgccaccctcgcgagaactgtgtctcagggtctcagaaagttcagcacacaattcacaggtgtgcatcactgggcttggatttgcattacattgaccccagccctgcagtggaacctaataaaagcgcctgaagcaa

SEQ ID NO: 653453 - DNA, 814 bp, Homo sapiens
cctgcggagtatactgctaagatgctgtccgtgcgcgtatgctgcgggcgtggtccgcgcccttcctcgtgtcgggccggactggtctccagaaatgctatgggttcatctttcattgctgcgaggaactgtccatgcctctaatccatctcatcttcagaagagctggcgactgctgatgatgtcctctattcttgagagagcgtattcttggagctgatacctctgtcgatcttgaagaaactgggcgtgtcttaagtattggtgatggtgattagcccgcgtacatgggctgaggaatgttcaacgcagcaagaaatggtagagtttcgcttcaggcttaaagggtatgtccttgaacttggaacctgacaatgtgtggtgttgtcgatgatattggaaatgataaactatagttagaggaacggagatataggtgaacgaggacaggagtccattgtggacgttccagttggtgaggagactgtcgggtcgtgtagttgactgcccttggtaagtgctacttgatggagagggtccaatgggtgccataggacgcgtaggcgagttggtctgaaatggccccggtatcattcctcgaatttcagtgctgggaagccaatgcatgactggcatttaaggctgtggatagactgtggtgccctttggtcgtggtcagcgtgaactgattattggtgaccgaacagactgggaaaacctccaattgctattgacacaatcattaacagaaaagttcaatgatgggtctgttaacaaaagagtggtcttgttttatgttggcttgtccacgggc

SEQ ID NO: 653454 - DNA, 194 bp, Homo sapiens
tacacgctgtggcaacatgaacggatagcttgccgagaagagcaatcccaagacacatagatttggtcttttcacatagtcccatatttctggaggcttgttcatttctttttactctttttttctctaaacttctcttctcgctttatttcattaaattgatcttcaatcactgataccttttcttctgcttg

SEQ ID NO: 653455 - DNA, 269 bp, Homo sapiens
gacggaaaggactcgaatggaaatcactggaatagaatgcaatttaataaaataggaacaaatgtaatggaatggaatggaaaggaatcgaaatgaaaggaatggagtggaatggaatggaatggaatcgtatggaatggaatggaatggtacggaatagaatggaatggaaggaattgtaatggaatggaattgaatggaatggaatggaatggaatggaatcaacgcgagtgcagggtaatgtaatggaaaggaatgcaatgtcgac

SEQ ID NO: 653456 - DNA, 283 bp, Homo sapiens
gatgtgggactgaaaaaggaacccaggacactaagcagtagaaagatctatatgcagggccggcgcggtggctcacgcctgtaatcccagcactttgggaggccaagataggcggatcacgaggtcaggagatcaagaccatcctggctagcacggtgaaaccccgtctctactaaaaaatacaaaaaaattagccgggcgtggtggcaggcgccggtagtctcagctactagggaggctgaggcaggagaatggcgtgaacctgggagatggaggttgcagc

SEQ ID NO: 653457 - DNA, 376 bp, Homo sapiens
  misc_feature (8)..(8): n is a, c, g, or t
  misc_feature (160)..(160): n is a, c, g, or t
  misc_feature (164)..(164): n is a, c, g, or t
  misc_feature (236)..(236): n is a, c, g, or t
tggggccntgtggttttttcttgttgttgcctttggccctgccgtgtctgtgcaagtcctcctgtccattgactggtggagaagtgatcccagattcctaacacaatacttacttaattccccagctatagcacccccttgcactttttggtttctcctncccncatagttcttctccatcatggcttcctcctcctcttcttctgttctttccctttcccctctcatcctcttcnacctctccacctacctccactctcaaaacttccatcccagctttcccctccactgccctatcacaggctctagctttcattgagcagttaaagtggggagatagttcccatgagatcacctgagtatgtgatgtcgacgc

SEQ ID NO: 653458 - DNA, 362 bp, Homo sapiens
  misc_feature (276)..(276): n is a, c, g, or t
  misc_feature (335)..(335): n is a, c, g, or t
ggcgggtctcttccggagtcgggctaggatatagcgggcagctccacgggaaagagtgtgttcatcggagaaggggtgagtgtgtggtgcctccagacttgatgcagttgtgtgtgcccagcatctccctgggcctctgctcatgtacagaattccagtgtgtgcaacaaagagtcagtgtgaggagtgaggagggatttggtagtgctgctgacgctgtggctggcgttgggtgaagcctgctggtggcatgtctgtagtccaacaggggttatntgagtggcatgtaggtgaacaagacagcacaaagtaccctttgtggaaactacagctgngtttccccagacttcatttgaccccat

SEQ ID NO: 653459 - DNA, 238 bp, Homo sapiens
accaaagtaacactggagaggtgttaggtcttctctctcccagtccataagagctgcatggctaaagagtatcaagttttaatgatgaggctggtgtcttccacctacttgtctcatatctgttgtcatgctggtaaggtacacaggagagttgtgtcagcagggatactgtaggcgtggaggtggcagctgcagctgggcctggattgtggcactaaccgtgggcatttcaggctga

SEQ ID NO: 653460 - DNA, 288 bp, Homo sapiens
ggcaccggctcggtcgcggtcacggacatgggcggcgcctttggcgcggacacgatcccacaagccgctgttgcgggcgaagtcatggttgccgggcagcagccaccaggtacaggcatagcgctgcatccgtgacaccgcctgcacgatcacgcggtcttccggtccctcagtatcgaacacatcgccagcgaccagcacatgcgcgacatcatgctccgcagctgctttgccgatcgcgtcaatcgcatcgaaccgcgcctcgctaagcgcagcgcgcacgtcgct

SEQ ID NO: 653461 - DNA, 821 bp, Homo sapiens
  misc_feature (6)..(7): n is a, c, g, or t
  misc_feature (9)..(9): n is a, c, g, or t
  misc_feature (34)..(34): n is a, c, g, or t
  misc_feature (63)..(63): n is a, c, g, or t
  misc_feature (75)..(75): n is a, c, g, or t
  misc_feature (86)..(86): n is a, c, g, or t
  misc_feature (91)..(91): n is a, c, g, or t
  misc_feature (119)..(119): n is a, c, g, or t
  misc_feature (123)..(123): n is a, c, g, or t
  misc_feature (131)..(131): n is a, c, g, or t
  misc_feature (138)..(138): n is a, c, g, or t
  misc_feature (151)..(151): n is a, c, g, or t
  misc_feature (154)..(154): n is a, c, g, or t
  misc_feature (161)..(161): n is a, c, g, or t
  misc_feature (234)..(234): n is a, c, g, or t
  misc_feature (254)..(254): n is a, c, g, or t
  misc_feature (272)..(272): n is a, c, g, or t
  misc_feature (277)..(278): n is a, c, g, or t
  misc_feature (284)..(284): n is a, c, g, or t
  misc_feature (312)..(312): n is a, c, g, or t
  misc_feature (335)..(335): n is a, c, g, or t
  misc_feature (348)..(348): n is a, c, g, or t
  misc_feature (364)..(364): n is a, c, g, or t
  misc_feature (373)..(373): n is a, c, g, or t
  misc_feature (418)..(418): n is a, c, g, or t
  misc_feature (466)..(466): n is a, c, g, or t
  misc_feature (495)..(495): n is a, c, g, or t
  misc_feature (500)..(500): n is a, c, g, or t
  misc_feature (503)..(504): n is a, c, g, or t
  misc_feature (517)..(517): n is a, c, g, or t
  misc_feature (531)..(531): n is a, c, g, or t
  misc_feature (559)..(559): n is a, c, g, or t
  misc_feature (779)..(779): n is a, c, g, or t
taaatnncnaaataggttttattttggccaccancatttaatgacattcaattaaggatttcntgaacaatttcnaccaaaaaaanaattnccccccccaaaacattgaaaaaattganaacngggtaccnaacagtngccaaacaagtcnacnccattcnttagtatgaaaagcaacaaaaaaaaatggagcctcaaaatattttatttcaaatttattttatgccagacccnagccgtaaccggaacccatncccagtctatgggtttcngaatnncatttncccatttattgtatttttatgagaaacntgttgtaatgagtctgtcccacnttatttgacattnaccaaagccgtataanagccatgcncagtttatttacagtattgtacattaaatgaaaatgtttgaagancacacaaagatttcacaaaaccataaccaatacagaaagatgtgtganacacattaggggccttcaaaattttaggnatggnatnntgccaagattatnttggcttataagtnttaggcaatcactaacctgaaataagtnacaaaaacatgcagatgattaccatttcaacaaatgaaaacctataaatgtctagctaaaagctaaaatattgtgtagctgaaatactaccatataacaatgggaatttataaaacaggaaaaaaggttactctttaaaagtcttccatgagttatagattttcagtaattttctataaaaacattcagaaattaagtttctcaaattatgtttatcacnaaattatgttttcagtagtgactggggccatgacttttaaat

SEQ ID NO: 653462 - DNA, 109 bp, Homo sapiens
  misc_feature (25)..(25): n is a, c, g, or t
  misc_feature (52)..(52): n is a, c, g, or t
  misc_feature (68)..(68): n is a, c, g, or t
tttacttttgaatgttacaaaaggnaataactttaaaactattctcaagagnaaatattcaaagcatnaaatatgttgctttttccagaatacaaacagtatactcatg

SEQ ID NO: 653463 - DNA, 902 bp, Homo sapiens
cattgtgtagggggctgtgtctgtattgaacaccaagagtcatacacatacccctatacaagtggttaatacacacattcgcgtacacagtgaaatcaaaatacacagcatcaacaccgtctctgcgacatgcaaagctcgtcatcctgagcttatgcattgatgccacccgtctctccgtgagcacacgtacaaggcatgagatcccgtggtccaggtcctgaacgcgccacgcacagacatctccattatactgtcctgtgccacctctgccctctctgatctttcccaaaggccagttcacaccatgagtcaccagcaataggatacacatgaaacacgcacacatggtgcacaggcaacattgacaacacttctgcaggtcactaacttcctcatgtgaaaccacggacaaattgcctcgcgctgaaccgccacatgcaccttgacaaatcccacccaagttaactgtggagaaacaatgtgatgctctgtgcgtgtctcattcttcaacttgtgaacccaatggccgagaacactagttgctccaatggcgaccattaaagcgttggatagcacccatagggccttcggttggcccatttgtgggtgttgcccaccacagcaggttgaaaggccgcccgacgttggaaagacacggccagccgttaacctggttcatggcgcagcagcactttagcaggtgtgcggaagagcaagagttcagtatgcacccggcgatcatgggtgtttcctaagacggaagcatttgaagagtcccatcaacttacctttttggaccagttagagcagttctgacacggacaggtggttagacaccacagcatgacacacagccgagctagcgacaacaacacaaaaccacagaaaggaacacacag

SEQ ID NO: 653464 - DNA, 336 bp, Homo sapiens
  misc_feature (38)..(39): n is a, c, g, or t
tattacaattttataaacatataataatttttaaatanntttttcaacacaaggtgctactgtcttcccgtcagtctgtgttaccccagaaccatctctgttctaagccaaggtgtggaagaagcccttcccataattctgctaagctttgtcatgcaatctcatggtatcttcatcagacatctgaattgagccttgaagtgtgagtaggagttcatcagggctgcatagtgttccatggatgcttagaccacaatttacttagccaacccctactgaggaacactgaagttgtttcctgtttttcaaaagtataaataaagtgtgagtacctgt

SEQ ID NO: 653465 - DNA, 489 bp, Homo sapiens
ctacatcacaactcacgcaccgcacacgatcacacacacagtgccaaactcctgacctgcacacacacaccatcatcacacatcccaattcacatctcatagcccaataatgtaagagtggaaacctagtcctgaatttcaaatgccaggagatcagtatggaaacagaatctgattttcttatttttatttgttttttttgagacagcatctcactctgttgcccaggctgcagtgcaatggcacagtcacagctcactgcagcctcgacctcccaggctcaagcagtcctcccacttcagcctcccaagtagctggactacaggcatgcaccaccacaccctactaatcttttttaaattttttttttggtagagatagggtgccactgtgttgctcaagttggtctcaaactcctgggctcaagcaatcttcctgcctcagcctctcaaagtgctgggattacaagagtgagccaccgcctgcagc

SEQ ID NO: 653466 - DNA, 625 bp, Homo sapiens
  misc_feature (244)..(244): n is a, c, g, or t
  misc_feature (573)..(573): n is a, c, g, or t
  misc_feature (588)..(588): n is a, c, g, or t
  misc_feature (602)..(602): n is a, c, g, or t
  misc_feature (607)..(607): n is a, c, g, or t
gttagatggagtctcgctctgacgcccaggctggaggcaatgggacgatctcagatcactgcaaactccccctcccgagttcaagcaattctctgtctcagcctcccaagtagctgggattacaggcgcccgccactacgcccggctaatttttttgtatttttagtagagacggggtttcaccatcttggccaggctggtcttaaactcatgatctcctgatccacctgccttggcctcccanagtgctgggattacaggcatgagccaccgcgccagccaactacttttgaagtcaggcttacgaagatataatttacattcattaaaactcatcctttttagtgtagacatctgtgagtttggacaaagtcatatcattgtgtaactatcacgacattaatgatataaaacaatttataaccaaaatttccctcattttctgttttagtcagcctcttccacactccctgccaatgacacttaacttattttctgtccctgtagttctgtcttttccagaatatcatatacataaaattatttgtcatttaaatgaattaaaagtatgtngccttttgattatgngttctacttactgnaatanatttgagattcatcaaaa

SEQ ID NO: 653467 - DNA, 1328 bp, Homo sapiens
cacccaagccacttgtcaacacatatgtgtaccatcccatgtgtgcagcaagcaacagcacacaataccatcatttatctttccagcatgcaacacagtatcacccattttacacatgcaaagcagttggcactccagcaatcaagttgtgtcaagcaagttcaacaatgcatcagcagcacatactcatacagatcttgatacattcacagacgactaaagtaaatcacatttcgacaggcacctttctgtagtgatacctattaatattaccggactcacaccttatgaacaactgatatacctctcacactgaatctgcactgcgacacgattccgttatgtaccacggcatggacacagcagaccagcttccacagaccaggtgtatgggacacagcgataataataccactatcaacacgacattcatccatactgctcacgacactacgcatacacctgaccacaatcctaaacgcagtaaccatattccacacacttcgcagtcactacaccagtcacacatacatgaccattaagaggacatgtcacctaccacacaggtgacacagactcgtcatgcaatggcccatcatatccccacaaaaggttgtacacagggctccacaatgggtcctcagcaacacgccatcagacacggacaccaggcggcacctccaacaactcacagacgagcacatacccaagcacaacgcataaataacactattgaaacaagccgaccacatggacacgcacatacagcaaacaaaacggaacgcagccaggacaaccaggaacgaggcacacgtacaacaccaatcacatgaacacatacaaaacatgataccaacaacagcccacgcaatatcccaagagtccacaaataacacaagacgcagggcgacaatgacaccaactacaccacgaagttatcccccaagcgataggagacatgaccaaacacaaacagtcaacagtgcacccccctgtagaataacagtagaaaggcgacgtcacgcaacagctaccgagcacgacacaagcactacaagaacgaaaacaaacaaccaccaagctacaaaacaaccacaaccacgcgaaacaagggaccaaaacacgaagaacacacaaacagaggacggaagcaaaacagacggaacacagagccacacaccgtgaccagaagaagacaaccaacaaaaaaagacgaggagcacccacgcaccagaagacacgccaccacaaacaccatcgaaccaagcccacacggcgcaaacaccaaaacacacaagaagacaaaacaacacaacacaagaagacac

SEQ ID NO: 653468 - DNA, 408 bp, Homo sapiens
  misc_feature (48)..(48): n is a, c, g, or t
  misc_feature (50)..(51): n is a, c, g, or t
  misc_feature (74)..(74): n is a, c, g, or t
  misc_feature (385)..(385): n is a, c, g, or t
  misc_feature (393)..(393): n is a, c, g, or t
aaaatttaaaaaaaaactaaaaaaagcataatcgcaaaaatgacaccntnngtcaaaaaaatgtagacataaangactggaaagataataacggccgagctgtcatagaaatcacagctaaaatgcgcaagttagcccatgttccagttcagacttgctccagataatccccggattccttgtttagaggatggttctcaacctttaaaagattcaaaaccctcattggtgggtttttgtttattcttggaatctgcctcatcctcccttgacttttacccctgtaagtaggagtatttgtcaactatagaggcagtggtaacccgacacactgccacgcagttgatggcattaaccaaatatcagccgctgccagtagaagaanagagctcngctctgtggaagagg

SEQ ID NO: 653469 - DNA, 257 bp, Homo sapiens
atcccatgcattagtgaggacagagggaaggagaggcggagcctcaggtatcgagtgatcttgtcgggaggattaacccctgtgtcccgagggtcctgagcgcaactcgggcgttgggtcggatcagcaggttggttatgctggcattattgagggagagccggagccagccttcaggaggaaactggaggtgctctggacaggatgtagcggattacgttggggtggcagattgagatctcgtaactgtcctcact

SEQ ID NO: 653470 - DNA, 424 bp, Homo sapiens
cagattagctttcattcgttgaataaactgcttaaatatctagagcagtgtactcctcacttgtaaagtcctcccatatgagatctatagagaaaccatgatgcggtggtggaaatgaatagcatcctcacttctttggagcgaatcactgagaacagtccttaaatggctaagccttcgtgtggcagttaagaattcaacttgccaagtctatcattgctgtgacatctgacatgcacgtatggggtgtgcctttggctaaatcatatatgttgacaaactcgaggggggacacggtacccacttcgccctataccgaaccgattgctgactggccgacgtgcaacaccgactggactgggacaggactgtggcctcgccactttatgcttgcagcacattcgactttatccccgtggtgtgg

SEQ ID NO: 653471 - DNA, 465 bp, Homo sapiens
  misc_feature (61)..(61): n is a, c, g, or t
  misc_feature (65)..(65): n is a, c, g, or t
  misc_feature (73)..(75): n is a, c, g, or t
  misc_feature (77)..(77): n is a, c, g, or t
  misc_feature (84)..(84): n is a, c, g, or t
  misc_feature (130)..(130): n is a, c, g, or t
cgtcatattatagaggtgcatgatttagaaggttatgaagccaaagttacagaccaggccnggcntggtggcnnncncctgtantcccagcactttgggaggctgagacgattgcttgagcccaggagtncaagaccagcctgggcaacatagtgagatgccccatctcttaaaaaaaaaaaaaatttataaacaaaaaagggacaattaggcaggcaagaattttgtcacttaaagtgaacaaaacaggtagtgtccggttagcagcagtagtgtaaaatgctttgtataagataaaccttaagaaaatttcttagtcctttgatactatataaacaatgatgtaattctgtcctgggaagaggctggcactgtgtgatgaccttactctgcaaactagattgaggtacttaatatgtaaaagtaaagtcttatattaaagcttgattaccatagctatccacc

SEQ ID NO: 653472 - DNA, 589 bp, Homo sapiens
  misc_feature (14)..(14): n is a, c, g, or t
  misc_feature (185)..(185): n is a, c, g, or t
  misc_feature (189)..(189): n is a, c, g, or t
  misc_feature (197)..(199): n is a, c, g, or t
  misc_feature (201)..(201): n is a, c, g, or t
  misc_feature (208)..(208): n is a, c, g, or t
  misc_feature (254)..(254): n is a, c, g, or t
agattttataacanaattaagatgttagtacaatatcgtgtttcgccgccgggcgcggtggctcacgcctgtaatcccagcactttgggaggccgaggcgggcagatcacaaggtcaggagatcgagaccatcctggctaacacggtgaaaccccgtctctactaaaaacacaaaaagttagccnggcntggtggcnnncncctgtantcccagcactttgggaggctgagacgattgcttgagcccaggagtncaagaccagcctgggcaacatagtgagatgccccatctcttaaaaaaaaaaaaaatttataaacaaaaaagggacaattaggcaggcaagaattttgtcacttaaagtgaacaaaacaggtagtgtccggttagcagcagtagtgtaaaatgctttgtataagataaaccttaagaaaatttcttagtcctttgatactatataaacaatgatgtaattctgtcctgggaagaggctggcactgtgtgatgaccttactctgcaaactagattgaggtacttaatatgtaaaagtaaagtcttatattaaagcttgattaccatagctatccacc

SEQ ID NO: 653473 - DNA, 1490 bp, Homo sapiens
  misc_feature (1472)..(1472): n is a, c, g, or t
agcggattgtgcgaggcaccgggacgtcggcggctggcggagccgggctgggctgaagctggagcggcggtggcggcggcgtagggaggccggggccggggctgaggccgcggccgggtctgcgaggcccttggggcggcaggcggcggcggcccggggctcgagcccggaggcaggagcagccgccatggccgagagcatcataattcgtgtccagtccccggatggagtgaagcggatcacagcaacaaagagagaaacagcagcaacatttttgaaaaaggttgcaaaggagtttggcttccaaaataatggcttctcggtttacatcaatagaaacaagaccggagagataacagcctcctccaacaaatccctcaacttgctaaaaatcaagcatggcgatttgttgttcctgtttccctcgagccttgctgggccctcatctgaaatggagacgtcagttccaccgggcttcaaagtctttggcgctcccaacgtggtggaggatgagattgatcagtacctcagcaaacaggacgggaagatttacagaagccgagacccacagctatgccgccacggccctttggggaaatgcgtgcactgcgtccctctagagccattcgatgaggactatctaaaccatctcgagcctcccgtgaagcacatgtccttccacgcctacatccggaagctgactggaggggctgacaaggggaagtttgttgccctggagaacatcagctgcaagattaagtcagggtgcgaggggcacctcccgtggccgaatggcatctgtactaagtgccagccgagcgccatcacgctgaacagacagaagtacaggcatgtggacaatatcatgtttgagaatcacaccgtcgctgaccgctttcttgacttctggagaaagacagggaaccagcattttgggtacttatacggacggtacacggagcacaaagacattccccttggcatcagggctgaagtggctgcgatttatgagccacctcagattggtacacagaacagcttggagcttcttgaggatccaaaagctgaagtggtcgatgaaattgctgccaaacttggcctgcggaaggttggctggatatttacagacctcgtctcagaagatacccgaaagggtaccgtccgctacagtcgaaataaggacacctatttcctaagttcagaagagtgcatcactgcaggagacttccagaacaagcatcccaacatgtgccggctctctccagacggacattttggatccaagtttgttactgcagtggctacaggtggtcctgacaaccaagtccactttgaagggtaccaggtgtccaatcagtgtatggcactggtccgtgatgagtgtttgctgccatgcaaggacgccccggagcttggctacgccaaggagtctagcagtgagcagtacgtgcctgatgtgttttataagaccngaacgcgctgatggtacc

SEQ ID NO: 653474 - DNA, 1486 bp, Homo sapiens
agcggattgtgcgaggcaccgggacgtcggcggctggcggagccgggctgggctgaagctggagcggcggtggcggcggcgtagggaggccggggccggggctgaggccgcggccgggtctgcgaggcccttggggcggcaggcggcggcggcccggggctcgagcccggaggcaggagcagccgccatggccgagagcatcataattcgtgtccagtccccggatggagtgaagcggatcacagcaacaaagagagaaacagcagcaacatttttgaaaaaggttgcaaaggagtttggcttccaaaataatggcttctcggtttacatcaatagaaacaagaccggagagataacagcctcctccaacaaatccctcaacttgctaaaaatcaagcatggcgatttgttgttcctgtttccctcgagccttgctgggccctcatctgaaatggagacgtcagttccaccgggcttcaaagtctttggcgctcccaacgtggtggaggatgagattgatcagtacctcagcaaacaggacgggaagatttacagaagccgagacccacagctatgccgccacggccctttggggaaatgcgtgcactgcgtccctctagagccattcgatgaggactatctaaaccatctcgagcctcccgtgaagcacatgtccttccacgcctacatccggaagctgactggaggggctgacaaggggaagtttgttgccctggagaacatcagctgcaagattaagtcagggtgcgaggggcacctcccgtggccgaatggcatctgtactaagtgccagccgagcgccatcacgctgaacagacagaagtacaggcatgtggacaatatcatgtttgagaatcacaccgtcgctgaccgctttcttgacttctggagaaagacagggaaccagcattttgggtacttatacggacggtacacggagcacaaagacattccccttggcatcagggctgaagtggctgcgatttatgagccacctcagattggtacacagaacagcttggagcttcttgaggatccaaaagctgaagtggtcgatgaaattgctgccaaacttggcctgcggaaggttggctggatatttacagacctcgtctcagaagatacccgaaagggtaccgtccgctacagtcgaaataaggacacctatttcctaagttcagaagagtgcatcactgcaggagacttccagaacaagcatcccaacatgtgccggctctctccagacggacattttggatccaagtttgttactgcagtggctaaacactgctttgaaaaccaaacaaactcctgctgcggactccggcatgtttgatggaggcctttcaaaagagtccacggcttaatggaggttgtttatgtggagacttcgatctgtacctgctgtcccctgtcactccctggaaacttggcggcagatgttgcagcgttaagttgtctctga

SEQ ID NO: 653475 - DNA, 132 bp, Homo sapiens
tgtggcctgcgtggtcgggcagggtcgatccagctccgtcccggcggccccgcggcagaccagatggtgggtgtggagaccaggctcctgaccccgccatgcatgcagcgccacatggaagccgtgcggccg

SEQ ID NO: 653476 - DNA, 1771 bp, Homo sapiens
  misc_feature (1746)..(1746): n is a, c, g, or t
  misc_feature (1761)..(1761): n is a, c, g, or t
  misc_feature (1767)..(1767): n is a, c, g, or t
agcggattgtgcgaggcaccgggacgtcggcggctggcggagccgggctgggctgaagctggagcggcggtggcggcggcgtagggaggccggggccggggctgaggccgcggccgggtctgcgaggcccttggggcggcaggcggcggcggcccggggctcgagcccggaggcaggagcagccgccatggccgagagcatcataattcgtgtccagtccccggatggagtgaagcggatcacagcaacaaagagagaaacagcagcaacatttttgaaaaaggttgcaaaggagtttggcttccaaaataatggcttctcggtttacatcaatagaaacaagaccggagagataacagcctcctccaacaaatccctcaacttgctaaaaatcaagcatggcgatttgttgttcctgtttccctcgagccttgctgggccctcatctgaaatggagacgtcagttccaccgggcttcaaagtctttggcgctcccaacgtggtggaggatgagattgatcagtacctcagcaaacaggacgggaagatttacagaagccgagacccacagctatgccgccacggccctttggggaaatgcgtgcactgcgtccctctagagccattcgatgaggactatctaaaccatctcgagcctcccgtgaagcacatgtccttccacgcctacatccggaagctgactggaggggctgacaaggggaagtttgttgccctggagaacatcagctgcaagattaagtcagggtgcgaggggcacctcccgtggccgaatggcatctgtactaagtgccagccgagcgccatcacgctgaacagacagaagtacaggcatgtggacaatatcatgtttgagaatcacaccgtcgctgaccgctttcttgacttctggagaaagacagggaaccagcattttgggtacttatacggacggtacacggagcacaaagacattccccttggcatcagggctgaagtggctgcgatttatgagccacctcagattggtacacagaacagcttggagcttcttgaggatccaaaagctgaagtggtcgatgaaattgctgccaaacttggcctgcggaaggtactgaggcatccggcagccaagcagggggcgtggccaggctctgttgggcatccaggccagggggagttgggagagtggccgggctgtgtcgggtactggctctctccggctgcacaaggtcaggtgcaggcactatatgttttgaaacttcacatatgtttgttgggcaccaataacctttatgttcctctgacttaaactaaaatgagaacattttcttgagcataaaaaaaaaaatcccagtgcagatctggctgttatatttcagccttccagccacacttcatgaggactgcttcaagtgggaaacagaccccagccgcacccctgctggctcctctgtgcatgtgtgtcccttctgcctgagctctcccttcatgtagcttggaagccgaggacagtcaaggctgacattccattgacagtgttcatgttctgtgccatgcacttggagcttctgctgctccgtcatcaatcatcatttaatttcctgtttataatttagctctctgagcctacaattcttcctagtttcatggaacagttagaagatgagaaaaggatttccttttttattctattgatctggtttatctgacattgatacagttcccaggaacaattttaataaattnatgtagagccatgantttgancata

SEQ ID NO: 653477 - DNA, 179 bp, Homo sapiens
ttttttggttgtttgggcccccccccccccccccttttccccccgtggggttttttttttccccccccccttttttaaagcccgggcgggggggccttttttttttcccccccggggcctttgtttttttttggggggggcccccttttttttttccccccaaacccccccccccccga

SEQ ID NO: 653478 - DNA, 132 bp, Homo sapiens
gagcatgtatgaaagggaggcagacaggacctgagacttgtgccctagtcacatatctgtatgaagccaggagggtggaactatgatgacatctcctaacaatacccacatgcacatctctgtcatacagat

SEQ ID NO: 653479 - DNA, 858 bp, Homo sapiens
  misc_feature (845)..(845): n is a, c, g, or t
  misc_feature (847)..(847): n is a, c, g, or t
agcggattgtgcgaggcaccgggacgtcggcggctggcggagccgggctgggctgaagctggagcggcggtggcggcggcgtagggaggccggggccggggctgaggccgcggccgggtctgcgaggcccttggggcggcaggcggcggcggcccggggctcgagcccggaggcaggagcagccgccatggccgagagcatcataattcgtgtccagtccccggatggagtgaagcggatcacagcaacaaagagagaaacagcagcaacatttttgaaaaaggttgcaaaggagtttggcttccaaaataatggcttctcggtttacatcaatagaaacaagaccggagagataacagcctcctccaacaaatccctcaacttgctaaaaatcaagcatggcgatttgttgttcctgtttccctcgagccttgctgggccctcatctgaaatggagacgtcagttccaccgggcttcaaagtctttggcgctcccaacgtggtggaggatgagattgatcagtacctcagcaaacaggacgggaagatttacagaagccgagacccacagctatgccgccacggccctttggggaaatgcgtgcactgcgtccctctagagccattcgatgaggactatctaaaccatctcgagcctcccgtgaagcacatgtccttccacgcctacatccggaagctgactggaggggctgacaaggggaagtttgttgccctggagaacatcagctgcaagattaagtcagggtgcgaggggcacctcccgtggccgaatggcatctgtactaagtgccagccgagcgccatcacgcagactcgcctaatgngntcctctagatc

SEQ ID NO: 653480 - DNA, 725 bp, Homo sapiens
  misc_feature (2)..(2): n is a, c, g, or t
  misc_feature (212)..(212): n is a, c, g, or t
  misc_feature (225)..(225): n is a, c, g, or t
  misc_feature (227)..(227): n is a, c, g, or t
  misc_feature (235)..(235): n is a, c, g, or t
  misc_feature (242)..(242): n is a, c, g, or t
  misc_feature (247)..(247): n is a, c, g, or t
  misc_feature (266)..(266): n is a, c, g, or t
  misc_feature (271)..(271): n is a, c, g, or t
  misc_feature (274)..(274): n is a, c, g, or t
  misc_feature (319)..(319): n is a, c, g, or t
  misc_feature (322)..(322): n is a, c, g, or t
  misc_feature (343)..(344): n is a, c, g, or t
  misc_feature (384)..(385): n is a, c, g, or t
  misc_feature (389)..(389): n is a, c, g, or t
  misc_feature (403)..(403): n is a, c, g, or t
  misc_feature (406)..(406): n is a, c, g, or t
  misc_feature (412)..(412): n is a, c, g, or t
  misc_feature (415)..(415): n is a, c, g, or t
  misc_feature (436)..(436): n is a, c, g, or t
  misc_feature (447)..(447): n is a, c, g, or t
  misc_feature (449)..(449): n is a, c, g, or t
  misc_feature (553)..(553): n is a, c, g, or t
  misc_feature (575)..(575): n is a, c, g, or t
cnaaaatccatgagtaaactggattttatatttgaaatgattttacatatttgatctccagtgatttcccctccatcatgatctactccatcaatgactatagaaaaagttgttaccaacaatcatcataccggggaagtttttcaagatgctctttcaaacagaagcagtgcaaacaagttcagatggcaagggatacgataagacctggngcttatcttcggncncgtaaaanataaaantcccnaacatgtattccttaaganatganaangcagaacaacattttgatcagtgaaaaatattataaggctatatnacncattcttaccccgtgatcgcnntacttacatttctccctgttcattcaggtgctattgttcnntaancattcaaattctcnttnacagtnacnctagatgtggacgctcctggncggcgcttctntngatttagcaacaattgtgtcaacaggaggcaagtgacccttaaaatactgttgttggctctgttttattctgtttgtgaatgatttgttcacagtctgtatgtntttttctgcaaggaaacgaganatatctcacaacagctaattaagaaatcatttctataaaataactctcaatattacagaaacagatattctaaaacacaagtgtagctcaaaaaataattgggcagaatcaattttctttggcaagaaattgctaattcctcaccaaatg

SEQ ID NO: 653481 - DNA, 851 bp, Homo sapiens
cggacgcgtgggtccggacgcgtgggctcagcacgttcctccctggagagcgggcgccacggctggtattctgcaggctgaatgcagtctccagactggaaacgcagagcggctcctcacgcctaatcctgttgacaagtcccccgccgtgttggaaagacctctcgcctctacgtggcacctggaattggggcgcacagggaggggcggatgctgccaccacccagccttctctttattttcagtgctttttgtttggcctccctgcccccatgtttttctggctgggagctcctggttacccccttgtctgactgcttggtggcaggcaccctgcctgtgagggccactttcctcttctagtagctgttgtctggtggggacgcagtggccctggacacggctcccctctgcaggtctgcaggtcggtttgctgcctgccctcctcctctcacccgatgtccaggtgggattttaaagtctgcattggttataataacagttatcagtaaaaaaaaaaaaaaaaaaaaaaaaaaaaaaaaaaaaaaaaaaaaaaaatttttggggggctcgggcctcagaagaagacttttcaagaaccatcgcgttgggggcgcgcggcgggcccatgtggtgttagatggaaaccggtcgctcatagcgtgtccccagaaggaaactcgtgggtcctggaacaagtgtgtgggttttttctcacaattaaaaaacgcccggggtggaaccggaagtggtttcttggaccaaatcccagaggggagtccgggaggccacaggggattctatcaacaggagtcccagcgaactcgatataattagcgcgcgcgcggagg

SEQ ID NO: 653482 - DNA, 232 bp, Homo sapiens
cccccagaacgtggggcgaggctgaggcaggcagatcacaaggtcaggagttcgagaccagcgcgaccaatacagagaaaccccatctctactaaaaatacaaaaatcagccaggtgtggtggcacacgcccgatagtcccagactacctgggagggccgatggtgggacggagaggaactcctctcctcccacctcaagaagatgatgttctaactggcacgtggtgtcct

SEQ ID NO: 653483 - DNA, 142 bp, Homo sapiens
tctgccaaagcgtagtacccaaaaaaaaaaaaaaataaaccttttttccccaccaaacccacgccaatctctccatctcttcttactctcttatattccttttatatctccttctgtgttctctctgtgctttattcaccct

SEQ ID NO: 653484 - DNA, 235 bp, Homo sapiens
ccggcccgagttgagtcagacacacgatcatggctcactgtggccaaccccctggtacaagtgattcttcgcctcagccttccgactggctgggactacacacgtgcaccaccacattctagctaattttatttatattattatttgtagagatggagtcttgctatgttgcacaggcaggtctcaaactcctgggctcatgcgatattcctgccttgggcaacgggaaggaacg

SEQ ID NO: 653485 - DNA, 949 bp, Homo sapiens
agcggattgtgcgaggcaccgggacgtcggcggctggcggagccgggctgggctgaagctggagcggcggtggcggcggcgtagggaggccggggccggggctgaggccgcggccgggtctgcgaggcccttggggcggcaggcggcggcggcccggggctcgagcccggaggcaggagcagccgccatggccgagagcatcataattcgtgtccagtccccggatggagtgaagcggatcacagcaacaaagagagaaacagcagcaacatttttgaaaaaggttgcaaaggagtttggcttccaaaataatggcttctcggtttacatcaatagaaacaagaccggagagataacagcctcctccaacaaatccctcaacttgctaaaaatcaagtaagtgtcctctgaggaggaagcagggaatggggggaaatgaggtccccatgatctgcccgaggttgccgagttttatcctctttcctcatcacaccactcattatggtcttatcaactgaccagaatacacatgaccgtgttgcttgccaggaattcagtaattatcctgaatctgcagttaccattgagcagatttgattgactttgcagaattctggaatttgtgtcactgaggagaaagttattgtctttgtccatgtacggcgtggagtgagctgcatactcagctgcttgtctggagtgaaagaccttgaacacagctgtgtgccgggaaatcatgttagccctgctggcttgggtaggagtgctgccactgcagtggcccatgccaccctgtagagttggtcattcaggaccttcaggactcagagacctcttgtcacagcctggctactgcctgtttttgtaaagtgttattggaacacagccaggtcgtgttgttggtgccagtttcatgttacaagggcagagtttagttgaggtaatccga

SEQ ID NO: 653486 - DNA, 649 bp, Homo sapiens
agcggattgtgcgaggcaccgggacgtcggcggctggcggagccgggctgggctgaagctggagcggcggtggcggcggcgtagggaggccggggccggggctgaggccgcggccgggtctgcgaggcccttggggcggcaggcggcggcggcccggggctcgagcccggaggcaggagcagccgccatggccgagagcatcataattcgtgtccagtccccggatggagtgaagcggatcacagcaacaaagagagaaacagcagcaacatttttgaaaaaggttgcaaaggagtttggcttccaaaataatggcttctcggtttacatcaatagaaacaagaccggagagataacagcctcctccaacaaatccctcaacttgctaaaaatcaagcatggcgatttgttgttcctgtttccctcgagccttgctgggccctcatctgaaatggagacgtcagttccaccgggcttcaaagtctttggcgctcccaacgtggtggaggatgagattgatcagtacctcagcaaacaggacgggaagatttacagaagccgagacccacagctgtaagtgatccatgagattccagggtcctacttgtggtgatcttaatgggtgaataaagggaaatatttataacaa

SEQ ID NO: 653487 - DNA, 109 bp, Homo sapiens
gagcctggtccctgtggtttggctggggatgctgaggagacagtgacggggtgctcggcccagagatcgaagtaccaataccatggcgaatagcctccagtgtcggcgc

SEQ ID NO: 653488 - DNA, 409 bp, Homo sapiens
ttataagctcactgaaatattattgctggaggggctcaggcaagctagatgtagtaacgagtgatctggagagatgcgtctcagcaccctccccaggagatgcatctcagtcccctctttccgtccttcccgttcagtcccagccctgggcctgggctgccgacacctggaccagagcccttgctgtgattggtgctccctgggcctcccgggtgtatgaagccaggcgtcggcccctccgggagccctgaggtgagccgccggggtccccctgctgccagacttcgcccgtacctaacatgcatctcactctgggtgtcttggactcttattccatgccaacgtgtcatttgtataactctaaacgcccatgatagtagcttccaactggaacatagcgaactaaaat

SEQ ID NO: 653489 - DNA, 474 bp, Homo sapiens
gaggagttttgcacgttgatcgcctgttcggtgtgggctgagcatggagacatgcctccacaagaccgggtcaatagatgtcccgtcgccaagaaagacaacacttcagaccaagacgaaatgaaacctgcggtgatacttggtgaggaagacgacctgttccgaccacagcctggagccttctctcattggcctcttcgttacaagaagaatcgaggagctccgtccatcagatgatccaaaataatgcttacatcttaaatgaagtctcggatctctaagaatgcctcaggtcccgaaggaaacgccctgagatatggaacgaacctctggagtcccagcgcggcgttgtcctggggcccagagattccattcgccatgtgcgccctgcccccgtccctgtggaagtggtccagaatgttcttgtcgcattgatcaaatccctgacaatgctaccacattctagagccaaaa

SEQ ID NO: 653490 - DNA, 1063 bp, Homo sapiens
tcagagtagacaacaatcagctgctcctgctcatgatccacgtgttcctgagaaaacgaagagcagctgttcaaaatgatcctggatgagcacctgtgtgcacatggatgggcaacctgcagctgctgtactgtgctgctcacagactgctatgtctacctgctccgtgaaatgggtgccacatgagaagccatacctggtggaagaggccgtattcttacaatgaacttgactatgtgtcggttggccttgaccagcagacggtgaagctggtgtgcaccaaccgcaggaagcagtttctgctggacactggctgatgtggcgctggcatgagttacattattttggcattctttgaagtcagacatgatcaaaggctgtcgagaagcctccctaccaccagacatcctgacggatgccaccatggagaagctggacactggcacaaatttagtggcccaagaatcgaagtgtgaggcatctgcttgtcaccgatgacgcttctacggaccttgtgcacttgggaggaccaccacagacgagatccctgggaccaacgccctgccactgctcaaccaccgagggcaccatacaaccaagagaaggcatgcagaactacaaggcggccagctcactaaactgtggcaaaggaaacaatggaacagaagttctaacgagtgatgcatcaaaaaaacagggataccatctaccagtaacccaggacacgaaccggaaaggtaataacatcatgaacaccaggatgaacactagaagatatatatacaacatacgtggacttgacgggaaacacagatatcacgggatttgatcacaatatcatacaagagataatcatcatcgcaactggacccttcctgaagagaataattataacgaaaaccgaggagcacaaatttacacgagtagagagacagtaattcctgtcacaggcagttgacacatggggatacatcacgagaggaagtagatcgcaatacagaatcaaaccagtatacagatatcaacaagtagaaagaataatatgaacacaccggtaataaaa

SEQ ID NO: 653491 - DNA, 99 bp, Homo sapiens
aggccccggcggctggggggccgcaaggacaaagaagacagcagtgatgagctcgaagaaggtcgaagaggcgtgagttagggagagcccgatcctgca

SEQ ID NO: 653492 - DNA, 162 bp, Homo sapiens
cacgaggcgagccggggctatttctggcgctggcgtggctccaagaagggcatcccatgcatcactcttccacctgctccttatagaagggaatatgagtgagtcgagggcgaagtccaaccagcccttggtctccaagcatgtaaaggacggcactgagaa

SEQ ID NO: 653493 - DNA, 527 bp, Homo sapiens
  misc_feature (12)..(12): n is a, c, g, or t
  misc_feature (39)..(39): n is a, c, g, or t
  misc_feature (55)..(55): n is a, c, g, or t
  misc_feature (94)..(94): n is a, c, g, or t
  misc_feature (107)..(107): n is a, c, g, or t
  misc_feature (130)..(130): n is a, c, g, or t
  misc_feature (134)..(134): n is a, c, g, or t
  misc_feature (160)..(171): n is a, c, g, or t
  misc_feature (174)..(176): n is a, c, g, or t
  misc_feature (178)..(180): n is a, c, g, or t
  misc_feature (186)..(186): n is a, c, g, or t
  misc_feature (188)..(189): n is a, c, g, or t
  misc_feature (193)..(193): n is a, c, g, or t
  misc_feature (198)..(199): n is a, c, g, or t
  misc_feature (232)..(232): n is a, c, g, or t
  misc_feature (331)..(331): n is a, c, g, or t
  misc_feature (335)..(335): n is a, c, g, or t
  misc_feature (338)..(338): n is a, c, g, or t
  misc_feature (340)..(346): n is a, c, g, or t
  misc_feature (350)..(350): n is a, c, g, or t
  misc_feature (354)..(357): n is a, c, g, or t
  misc_feature (360)..(363): n is a, c, g, or t
  misc_feature (365)..(365): n is a, c, g, or t
  misc_feature (421)..(421): n is a, c, g, or t
  misc_feature (437)..(437): n is a, c, g, or t
  misc_feature (451)..(451): n is a, c, g, or t
  misc_feature (483)..(483): n is a, c, g, or t
tcccattaaatnatggctgagggctatcccagaggcatnatgccccagcatttcngacctgcttcaagtacaagctgctgagctcctgcagctngagaatgccctcngaccaattatcaggtgctttcancaanaagtatttcacagagacagagacagnnnnnnnnnnnnagnnngnnngggggntnngggnggggnncccacagagcctgctgcatatgtacaagcctantctcgcaaacctctaatgcacacacccttaacttgcacatttcctgtacagatatgctcatcttcatactcaccctctgctccattctcttatctcagnatcntcncnnnnnnnaacnctgnnnnggnnnntncacaaaatggcataataaatagttacaggtaaataggtacaggttcagtaaataanacttgggtaatacttnataattactgaacnaagatcaaggacaaaattgttcaacttgatgnggaaatccacaattgagctgtataggaggaaaagaaccatcttc

SEQ ID NO: 653494 - DNA, 361 bp, Homo sapiens
aggtaccttcagcgtagagatggattttcactatgtagtgcgattctggtctagtaactccagacctcagggtatccacccatctagtgcctccctatatgtctagtgagtactcggtatgagccacaggtcctagaccagtttctgtattaaaatacatcttaggggactgaaaatcgattcctggactacggtttaattccccttattttttttagataaatctgctagtctgatacctattacatatccagagcctggtcataaatacgaatttctgaattttgtaatgcacaaattgctcttataagtaaacagtcagacaccccttctccacacgcataacgcgcctaatggcgtc

SEQ ID NO: 653495 - DNA, 921 bp, Homo sapiens
agagtcttttgggtggtgggcaacgccacactcgtttcgctcgggtcccctcgcgttgtctttgttatacctcatcggccgcggtgccgtcttcggcccgccctctctttggttgtggaggtccctgttgttatcgccgcccgccccctttggggggttctctctccgccgccgtctatggttgccgcctgtctcccacatatggggcaggcccccccccttgtgggtggttgtaaggagcccctccctcccggagtggcccctgccgctctccccccgccgttattctttcggcggggacattaatctcctcccccccttccccggcggagatgttttctttcggggctgttccttattacacgccacgcagcagcgcttctcactcttttttctccaccgcgccctcgcggtgtgagtattattgcggctctcgctgagtggtgttttcgctcacgcaccacacgcactaaaatcatccacctctgcgagtgacgtgtgtggtattcccccccgcccccctcgtctcccctcgcatagtggtgctgttcctctttatatgatgggtcaccactccctccctcaaggcctctcgatgcagggccttgtatgaaagagaacgacttctcaccccgcgtcggtcctctctatgatgaatcatttcgtatttattccgcctgctactcgtgcttgccccacctcgcccgccgtgtccttcagacaggggggcccaccctgctgatcaacaggagttttttcatctacaacaaaacaaaaataatattctcttttgctggtcgttctattccccctcccgttcttctattattttggggcgcccccccccctttcgccccccccacaaatttcgctttttttttttttttttttaaagggggggttttttttattttcccccca

SEQ ID NO: 653496 - DNA, 317 bp, Homo sapiens
ttttttttgtttttggtttttgggtgactgagtctggctctgtcttccaggctggagtgcagaggcatgatcttggctcaatgcaacctctgcctccccagcccaagccatcctcccacctccacctcccgagtagcaggggctacagactcgaccaccacgcccagttaatttttgtatttcttatagacaaggttttgccatggtgcccgggctggtctcgaactcctgagctcaagcaatccacctgcctcagcctcccaaagtagcgggattacaagcgtcagttactgcacctggcctctttctcgtcgacg

SEQ ID NO: 653497 - DNA, 1070 bp, Homo sapiens
  misc_feature (366)..(366): n is a, c, g, or t
  misc_feature (509)..(509): n is a, c, g, or t
  misc_feature (548)..(548): n is a, c, g, or t
  misc_feature (558)..(558): n is a, c, g, or t
aagaagaaacagcagaaagcagtctcaggttcaacttgccattcaggtgttacttgtggataagcacaaatatttcctgttggttaaactttaatcagttcttatctttcatctgtttcctaggtaaaccagcaaattggctcgataatatcgctggctaagcgtcaggcttgttttcatgctgtgccactccagagacttctgccacctggccgccacactgaaaactgtcctgctcagtgccaaggtgctactcttgcaagccacacttagagagagtggagatgtttatttctctgctcctttagaaaacgtggtgagtcctgagttccactgctgtgcttcagtcaactgaccaaacactgnttgaattataggaggagaacaataacctaccatccgcaagcatgctaattgatggaagttacagggtataccatccgcaagcatgctaatttgatggaagttacagggtagcatgattaaaactaccttgataattacagtcnaagatgtgtcacctcaaaggcttgaagaatatatttctnggtgaatttngtatgtctgtcatatgacacttgggttttttaattaattctattttatatatatatatatgtttcttttcctgtgaaaagctgtttttctcacatgtgaacagctggcacctcattttaccatgcgtgagggaatggcaaataagaatgtttgagcacacttgcccacaatgaatgtaactattttctaaacactttactagaagaacatttcagtataaaaaacctaatttatttttacagacaaaatatctgtccgttttataaaaagttatgcaaatgactttatttatttttatttcctgcataccattagaataattttatttcatttcttcaaattaccaagcactgtaatactataaattaagtaatactgtgtgattcagactataaaaaatcattcagaaaattataatcgtcatcgtcaacaagatttgatgtataagatgatatttccttacaatactgggaatccagtggcgagtgagacattatgtttatgaaatatta

SEQ ID NO: 653498 - DNA, 139 bp, Homo sapiens
ttctctgtgggggacgctctcagtggggtgaggtcgctcaggtgggaggcaggaggattgcttgaacctgggaggcggaggttgtagtgagctgagatcgcgccactgcactccagcctcggccccacagagagagcgt

SEQ ID NO: 653499 - DNA, 421 bp, Homo sapiens
  misc_feature (94)..(94): n is a, c, g, or t
gacacacgaatgataagaaagcaaacagccttaattgctgagatggagaaagttatagtagtctggatagatcaaacagcccacagcatgcccntaagccaaagcctaatccagagtgaggccctaactcgcctcatttctgtgaagacagagaggtgaggaagctgcggaagaaaagttggttcatgaggtttaaggaaataagctgtctctgtaacataaaagtgcaaagtgaagcagcaagtactagtggagaagctgcagcaagtcatccagaagatctagctaatgccaggcatggtggctcgtaattgatcatggtgtctataatcccaccactctgggaggccagggcaggaggattgcttgagcttaggagtttgataccagcctgggcaacatggtgaaaccccgtctttgc

SEQ ID NO: 653500 - DNA, 244 bp, Homo sapiens
ctttttttggggggggggggtggggggcccctttttttttttcctttaagttcccccccccccccccccctttccggggggccggggtttttttgggggggcccaaaaaaccccccccccttttttttttgggggggttttttttaaccggcccggggcccttgggttaaaagggcccccctttccctttttttttggggggaaaaatttttttttttaatggggggggggttttttttttgta

SEQ ID NO: 653501 - DNA, 1052 bp, Homo sapiens
cagtgagctatgattgtgccactgcacttcagtctgggtgcagagcaagaccttgtcttttttttttttaaatcatttttttaaaaagtaattttagtgttaagctccatggggctataggtcctttattattagtttttttttttgtaaaaagtgagaattgcgcccgggctcatcaccacgctcagggaagcggcgcagggcggggagactcagagcgttatcacaaggaaccctctccagccctccggggggtcaacagggagtcttcttgtggtgccctcagccccactgtaggcgggggcgacatacggggacacgcccaccacagccctgggtattgttttttcagaattttttagcacagaaattgggggttttccccccgatgtgtgtgggcccgggaccgagtgggccctgtagaaagaatccgcttgaaccctaaagagagtgaatcgctgggcgccgcggccctccgcaaagtggtggggttggggacctccgggcgtgggacgccaaatatagtgtcctgggtgccaggcgggatataagcttctaaaatatatattaaacactactctacgctacagaacgtgtttctaaccccacatttcggggcccaattaactggggctgtttcacacaacacgttttttaaaattatgtaccacaagggataaatcttcagcggacagggtgagttttcggggacacaccccgcgtgatatccaccccaatggttgttagtgggaacccccagcggtatacgcctctgcgataaggatatttcttccgaaattggtgtcattggccttgtgttaactcacttgtctgttctctccccctttacaaaaacccaagctggcgtatcttctcacatccttgggaggtggaccctcgcaatcgcgggccaacaaaatactcgatcagaagagaacccagggtggcaaatttgcggctatggcccacaatatactacggggttcgcgcagactcgtggtctacatatgcgacgaccattggtcgtgacatttatataaacacaaagcagg

SEQ ID NO: 653502 - DNA, 142 bp, Homo sapiens
caactgttctggaatgtcatgtgtatacagctcttcggattcctggctttcatgatattcatgtgctgagatggagagacgtagtaccctgatctaccagacacactgaacatccatgaacgccaggaaaccgagggagacc

SEQ ID NO: 653503 - DNA, 606 bp, Homo sapiens
taaaaggaaaacccggtaatgatgtcggggttgagggataggaggaaaaggggggataggtgtttgaacttgagggtgtttctcgtgtgaatgagggttaatgtggtaaaggtggtgggtgagtgagccccatggtgtggtggtaaatatgtagagggagtatagggcggtgactagtatgtggagtccggtaagtaggagagtgatattggatcaggagaacggtggttactagcacagagagttctcccagtaggtaataggggggggataagggaggtagagaggttgctaaaagtcatcaaaaagctatagggggagtacgaagtcgaacgccctctgcgacgaggatctatagatcgcacactggggcgagcgcgtcacgcaacatcatggaaggtccggctagcgccccaacccagtcaatagacgcgactgtcaacgcccggggtccccacccctgccacactgactcgcacgccggtgcaccgcccacagcggagcttccggcactcgccaccggggctcgtcaccaaacgaagcgggcacctccggccgccgatccgacacgagcattcaccaccggagcccaccaacagggccagc

SEQ ID NO: 653504 - DNA, 961 bp, Homo sapiens
  misc_feature (961)..(961): n is a, c, g, or t
tcagattggatttctggtgaaggcacagaatgcctgtatatgatgtaactgtgtcccccctcccgcccccaccaaaaaaaaaaaaggaaagaaaagttgtccatattgtgtaaattataccttgctaaagttaaaaaaaatagttttaaagggaaaagtcaattattgaataaacgggcttgaggctggtaggtctaaaggcccatagaacggttatagagatgtatatagaattatagttcttatttttttccttggtgtgaagccttttataacagattaacaatcaactgcataaatattattaatattttaaaaagaaagttaagtggtatgtgggtaattcacaaactatcatgcaaagaaaaactcagaaagacagaaaagaataaacatgatttgagataacatgtatttacaggggatgtggttttaataaaattagtcccctataattgtccctgacaaggtacagaatggtatatacttataatggtaatggagttagaaacaaagatcatggtggcacttccatccagtaaaaactgcactgaatgaaagagttaaatctcaactgaacttttcagttggttggaacaagaatgcatggagatttatatagctctaattatagaataactaggctgtgacgaagtgtaggttgggcgggtgcatagtgaatacgtaaagtaggacccggattgaggtggaaacagggccaggaacacgtagaagagcacgacattaagccaggagcacattacaaagagctgacatccatgagaacgcagggcatgttcggcacgaagtaacgcacgaaacgtcgaggtaaattctcctcctacacgtatacggacaccatgaataggtagaagtactagaagacagtaagacgacaacgaagttcgcaccaccagcaacacattcaacctggcgacacatagctatactaatccattcn

SEQ ID NO: 653505 - DNA, 81 bp, Homo sapiens
agcggggctcctcccgcgggtggcagcggacggggcgcgcccctcggccagtcctcggtcctcaggcttgtggctccgttg

SEQ ID NO: 653506 - DNA, 496 bp, Homo sapiens
cacgagagagagagagagagagagcgagagagagagagagagagagagagagagagagagagcgagacagagatagcgagtgtgagagagcgagacagagatctctagtctccgtctttttctttcccttcttttctcttctcgcatcctgtacgcctaagtctttggcaggtcactctcttccccccagcccctcctcggcgcgacgtgactcatcgctcggtgcgcccgcttgatatttgacaatttgacctctctatcctgggttcttgtcttaatcactgcttgatgcctttccgctatgttggcaccagattttttgctattgtgtctgcaatctcttccactcactttatcagcatttttctctactcttgtactcgttggtactagcattatcctgctttatggttcccacatcttgttgccatatctcgtcgtatgactttttcacttctctattcggccctcttgtctccagtgggttgtccgggct

SEQ ID NO: 653507 - DNA, 192 bp, Homo sapiens
tctgagtggcccagtgtggatgctgagtgacagcctcaaacttaacactcagtctaaggctctttccactaaggagctgcctctacccagggtccaggaagggctcgccaaggcacctcctcacagcccccttctccaccgaggtgacacacagcacaccgtgtattggacgcacttcctcacgttgacacc

SEQ ID NO: 653508 - DNA, 985 bp, Homo sapiens
acttgacctcagctgcgatctgtctgacagcaaagatgcttattaagaagacgtggaaccccaagttcaccctgcgctcgcactacgaacgtgcatatcgtatccctggtgacctataccaccacagccagtcaggctctgctcaccgcctccgaggacggcacagctcaatgctctgtgaacctgcacgaagtgctggtcacagggacaaggaagaattgctgtgctgctagatgtgtgaacctatacatgctttacctgggactcacatgggattgcccacgtgtattggctgtgtgctatggggcagcaacaagtgaataccatgatacatgatggacaggtggccggagtgccatgcaaatccacttagagttagggaaagacttctcaagaacactcagcagttggacatcccttaatgatggacatacagaaccaaagcagatgaattgagacctactgatacttggaagggacaacagtaggacgccgatggagagaggccatggacgctatcaagtccagaccatacaccaatacgaccatggacatacctagaatctgcatggataggcaacccgatacccgaaatacaatggtgaacgacacaaagacaaggcaagacaggaccggtgatctgggagtccttgagaaacctaacaccacaacagagacaaagtggatagcaacaggagggatacaccacaaacaatcaaatggaacataacagcagagcaacacagcagacatagaccaaacaattggatggccctccatatccggatcgtggcagacaacgacattgatattgaatatggcatgatggatgagcacatagaacaagacggaggatcctagggctaaaaggggacgagcaaggacaccaagtagtagattatcacaaagcatcaccattacgcgcagaagaaggagaagcgaactggaactgaaagagcgggagtcgtgtagcatgaagagaaca

SEQ ID NO: 653509 - DNA, 165 bp, Homo sapiens
ctctagagatccccctgtatctggagacaaaaaagggggaggggggccgaaggctcatcattcaacaataaaacaaaataaataaagtattaaggcgaagataaaaaaaattttgcatatacataatttacacgaaagcaatgctctcacctccccgggatacag

SEQ ID NO: 653510 - DNA, 312 bp, Homo sapiens
gaacagtttgcctggagacattctactggtaccttaccatgaggtatccagtatctccgtgataccttcatctgccccggagattgtgcctccacctacgcgtagccgtcagagactggcaggctcgctaaaggtctgagggtgagcgacctcgagactaaagagggagctacaagatacctcagacgagtctgtccacctgtgcgcagaagcgagctgggctggtacaccgattcagttgagcgattgcgtgacgtgtagcacctagtaattggaaggtcttttcattaattacttaagcaaaacctaaaa

SEQ ID NO: 653511 - DNA, 492 bp, Homo sapiens
tgtattatattcttttgaattacacttttgatatcgtcctcaggcaaacagattttcagaatttaataaataaataaaagcaactctaacactgagtagttttttgaaataaattataattgcaaagaactaaaataacttcatcaagaacacacactacaatttgaaaagatttttctctttttcatggctcctacagagaaaacaaaagtgaaagtgtgggaaagagacaggttttagtcacaaatattagaaatataaaatagcataaaacttatatgatagttcctcttctactatagaaatttatcctccaggataaataaatttgcttcatgcaggacagttttaaacatcactagtaaatgaaattatacccccttagaatataattttacagttgaattttttgtctttttagagactgttaccttatgtatccgtcatctgagcttattttggattacttttggtataagactttagttaata

SEQ ID NO: 653512 - DNA, 820 bp, Homo sapiens
caggactgtggtttgtcgttccacatgtgtttcttgctatgttggattactagaagaagtacagcttacaaaggaatgccctagaacaaggaacgttttcatctattacaatattttctcccagtgttcctgatagtggcgactattgcggccaatggggtcatcatagcactatatagagagaagctgtcaatgtagtgtcttcaaaggagggaaaacgttctacgaatctaagatccatggagctagaattggtagaatctaggctcatcagaatcgtcgactatggattgctccgatcaaactgtgaaaagtaaatgatgtggaccttgctggaaacaaaggcttagcacactatctcttgttcaatggcccaccaagacatatagaattgggaactgatacatgtgtcccttataggctcatttaattatatctctacaatttcttatttagggggaaacttatttgaatcagattagatttagtcataccaccttttatgttttattatttttgaattcatggagccatgataaagagattttgtaaaatcagaattattgatagcgctgtagtgcggagtatgtcaatttgtgaatgtataatcagaagtcgtgaatttatgtataggacatatagctctaggtaacttgccagtatctttgggttgacaccttgtatcgtcacagctctgctctatgtacttataagttttgcaaaataaccatgtgtaacatttgataaagcatatttatgaacatatttcttaataagaaaaatatgccattttattatactttctaggtttttcaaaata

SEQ ID NO: 653513 - DNA, 85 bp, Homo sapiens
tccgttcttcaaggtggaagccaagagaggcatcaggatgggtgggtttctgattgtggcaacgtttgctaccgttcacagttac

SEQ ID NO: 653514 - DNA, 468 bp, Homo sapiens
tcttcgtgccttctccaattaaagggctgatgggactagcctatgaagcagagaagtggtttcttcactacttcttggacccgactctcgtctaggtactctgtctgactcattctgtaacggatggaggatcgatttgggtaccccgtgctcaatgggctcaccatggatcagcacgcacggtgaaggagagctgcaggagaagagtcccaagcatactggttcatgcatgcgatgggctttgtgatcacgaaccagttactgctgtcatgagagtagggggaagagaagctaaaaccaagagtgcgaatgatggagatgtctggcagcgagtcggaagagcctccatgaatgctttagtaccagacttggcaaatggttcccaaattatttatgagatcagctttggtcatgccaatgcctgtgtctaccaaagtcagggtacgttcctgacggtaagggagatga

SEQ ID NO: 653515 - DNA, 303 bp, Homo sapiens
  misc_feature (189)..(189): n is a, c, g, or t
gcgaggccacatcgactacagacaccatggggaaggtgaaggtcggagtcaagcggattggagtcgtatatggagcgcctggtcaccagggactgctatttaagctctggtaacagtggatattggttagccagtcaatggaccccgttcattgatcatcaatctacatggttctacatgattccagantatcgattccgagctcgcgatggtcaatattcctactggcgactcgtccaaggcatgaggatacgggtaagcgttgtcgatcacagtggataagtcgccatacacacgatcgtt

SEQ ID NO: 653516 - DNA, 150 bp, Homo sapiens
tgagacgaaaaggccggctgagcggtctgctgagtgccaatgactatactataacacgaccgtgtcaaatcatctattcacagctgagagacacatctacgtgctccgtccatggctcgatgcctcaggcctgaccttttctcgctacct

SEQ ID NO: 653517 - DNA, 159 bp, Homo sapiens
ggaagacaatatccaagccaaagcagaaacatggcacaagcacaccagcatcagcgcgtgcccgctccagaccacatctgcaggctctgccttgcgtcactgaacccaaagaagtgctacgcgcccgaaaaacgggtcgcgttgaagcatctagctaac

SEQ ID NO: 653518 - DNA, 278 bp, Homo sapiens
ggacggtgcaatgagacacgctatgatctcaccaagtcccttcccaagattctgggacccggagatcacctccaccataaggactcgatcgaggcccaagatgagaaaacacatgctcctggccaggcgcagtggctcatgcctgtaatcccagcacttttggaggccgaggcgggcagatctagaggtcaagagatcgagaccatcctggctaacatggtgaaaccctgtctctactaaaaatacaaaaaaattagccgggggtgggtggagagcgg

SEQ ID NO: 653519 - DNA, 555 bp, Homo sapiens
aaaacaaacttttaggttcaagggcacatgtgccggtttgttctttgggtaaacttgtgtcacgggggtttgtgtgtataaattatttcatcacccaggctagtacccgatagttattttgtctgctgctccccctccaccctccaccctccaataggccccagtgtctgttctgctctatgtgtccatgtgttctcatcatttaactcccacttatgaagtgagaacatgtggtatttggttttctgttcctgcattacttttctaaggataatggtctcctgctccatctatgtccctgcaaaggacatgatctcattcttttttatggctgcagagtactccgtggtgtatatgtactacattttctttatccagtctaccgttgatggatttaggctgattccatgtctttgctgttgtgaatagtgagaagattctgtttcatcccactgaacccacagctacagtcaccccaaaagcagcagcagaggagttcccacaagggagtgcccttaaccgtccccagatggggctggttgggattccaaagaa

SEQ ID NO: 653520 - DNA, 357 bp, Homo sapiens
acctcctacccacgcatcattaaaggatatacatattatacttcatcttcatcctcttcctcctcatcttcatcttcttcttcctcctcctcctcctcatcttctgggtgtcgtgcttcttctttgagcctgtgtgggctgtcaggggccttctttcctgcgttcacttttgcccttgtgcacgatatgcaccaatatccttttcatatttctcctcttatcttagctgctttctgtgcatatggttgtgtatctttgggctgagtgttcacaccacatttcacccaatttctttgcagtatcccccctggatatgccacggtgtgcacttttgatctttgggcgatgtgcacagca

SEQ ID NO: 653521 - DNA, 174 bp, Homo sapiens
taggagtataagactgtcatgaacaacgacgtaatcaccacccaacaatgactaatcaaactaacctcaaaacaaataataaccatacacaaacaattaaagggaggaaccttgatctctaatactaattatccttaaatcatttttaattggccaacaagttaaccttccttc

SEQ ID NO: 653522 - DNA, 114 bp, Homo sapiens
ccccgatagacgtaataaaataaaagtgtcacaagctacatgatggatctcttcttttaagtgtatgcataggagtttcagtttaggctagtgatgggctaactatgctcagcc

SEQ ID NO: 653523 - DNA, 129 bp, Homo sapiens
  misc_feature (129)..(129): n is a, c, g, or t
tgaccaataaagctaaaactcacccgagttgtcaaaaactccagattgacacacaatagacttcgaaagtggctttaacatctctgaacacacaatagctaagacccaaactgggattaggggatcctn

SEQ ID NO: 653524 - DNA, 201 bp, Homo sapiens
ccaaaaagaaatttttgggcaaccgagggctcccaatttggaatgggaggttaacctttgccttttcatttttttttgaagggcaaaatttccgcaaaagcgcgcaaaagtcttttcaagaaggggccgaaggcccaccaaccaattccgggaaattaaaagccctttgggttaaatttgaagggaatttgccaaaaagaa

SEQ ID NO: 653525 - DNA, 112 bp, Homo sapiens
tccaaaaaacagtcaaagaagcatttccctttgaattcagtcctaaaaatatgaatgcctgataatgaatttcaaaataagtatcttacaggtgtgtccatgagacagggta

SEQ ID NO: 653526 - DNA, 421 bp, Homo sapiens
  misc_feature (23)..(23): n is a, c, g, or t
  misc_feature (34)..(34): n is a, c, g, or t
  misc_feature (63)..(63): n is a, c, g, or t
  misc_feature (96)..(96): n is a, c, g, or t
  misc_feature (404)..(404): n is a, c, g, or t
  misc_feature (409)..(409): n is a, c, g, or t
  misc_feature (411)..(411): n is a, c, g, or t
  misc_feature (413)..(413): n is a, c, g, or t
tattgtgggtttttttgaaatgntggtttttaanacttgatttaatcacccactcaaaaatgnttttgatggtcttaaggaaaaatctctgctttnactctttagaaataatggtcattcgggctgggccgccaagggtcacgcctgtaatcccagcactttgggaggccgaggtgagcggatcacaaggtcaggagttcgagaccagcctggccaagagaccagcctggccagtatggtgaaaccctgtctctactaaaaatacaaaaattagccgagcatggtggcgggcacctgtaatcccagctactcgagaggctgaggcaggagaatctcttgaacctgggaggtgaaggttgctgtgggccaaaatcatgccattgcactccagcctgggtgacaanacacnantntccatctc

SEQ ID NO: 653527 - DNA, 145 bp, Homo sapiens
agcacgagccgagggatggacatcttgtcattcgtatctttgaataaatgtcacttgttagaggcaaaagaaggaaccgtgaacattttagacaccctttatctttggggtaggctcttgccccaggcgtcggctcttgcctcct

SEQ ID NO: 653528 - DNA, 557 bp, Homo sapiens
  misc_feature (2)..(2): n is a, c, g, or t
  misc_feature (14)..(14): n is a, c, g, or t
  misc_feature (44)..(44): n is a, c, g, or t
  misc_feature (50)..(50): n is a, c, g, or t
  misc_feature (111)..(111): n is a, c, g, or t
  misc_feature (197)..(197): n is a, c, g, or t
gnttaagccagaanatttgttaaggccagaatttttgagcccancttggncaatatagtaagcccataggctgggtgtggtagcctacgcctgtaatccccccactttggnagactgaggcaggcacatcacttgaggtcaggagttcaagaccaggctggccaacacagtgagaccccccatctctaccgaaactncaaaaaattggccgggcgtgatggtgcatgcctgtggtcccagctactcaggaggctgaagcaggagaatcacttgaacttgggaggcggaggttgcagtgagccgagattgagccactgcactccagcctgggcaacaggagaccctgtctcaaaatatatatatatacacgtctgtgtgtgtgtgcgcgcacacgtgcgtataacaagccaagtgtggtgatacatacctgtggtccttgctactcaggaggctgagatgggaggatcatatgagcccaggagtttgagtttacagtgagctgtgattgtatcactgcattccagcctgggtgacagagcaagaccctgtctctattt

SEQ ID NO: 653529 - DNA, 267 bp, Homo sapiens
tacaagaaagagacgagatgctggtggcaggtcatgaggacagcaatggttgtatcaacgtataatgcgttcgtgatggcatatcctgctcggggtgacgggcccatgtgggcggagctcgtccgcatggtgctgaatggctgagcgaccttcccaatctccccagagtccgtgcctttcccctgtgtgaatttgcgtactctagcccaaagtttccctagcgcttccttgtctcccccactctcccctctcgtctcttctcttgta

SEQ ID NO: 653530 - DNA, 229 bp, Homo sapiens
gtcgacagaaaatattttgggcaggtgtggtggctcacgcctgtaatcccagcactttgggaggctgaagcaggaggatcacttgaggccaggagttcaagtccagcctgggcaacatagtgagaagattgggtgtcctgcacatagtaggaagccaaaaatttgtcaagtgcaggtgtctgctgttcctgggaggttttagaggggagcagacgcttgactgtcgacg

SEQ ID NO: 653531 - DNA, 153 bp, Homo sapiens
tggaaatgagagtgtctcattctgttgcccagaactaaagtgctggtggcacgatctcagctcacgtgcaacctctgcctcccgggtttcaagacaattctccgtgcctcagcccctccgtgagttagcgtgggacttacgggttgcctgtgc

SEQ ID NO: 653532 - DNA, 154 bp, Homo sapiens
accatctcatgcccagtgtttcttctgatttttttttccccttccctccctccctctccggcattcttccctggttcagcacaggtaaaacggttcccctccctcccggccttcatggatcaccaccacacgatgaggcatgagatgttggaag

SEQ ID NO: 653533 - DNA, 305 bp, Homo sapiens
  misc_feature (1)..(2): n is a, c, g, or t
nnggtaacccgtatcttctaacacttaacggccagtaggcaccccccatgtaaaagtgagctgccagaccgtctcttaaaaaatgtttccctttataaaagcaccactggccggttgaatcttaagggttaaaattttaatatgaaagatcctcatgaattaaatagttgatgccatttttaacgttaattgatataaaaaaaaaaacaacaaaattaggcttgtaaaactgactttttcattacgtgggttttgaaatctagccccagacataatgttagagatacgggatcctctagagcacc

SEQ ID NO: 653534 - DNA, 720 bp, Homo sapiens
  misc_feature (720)..(720): n is a, c, g, or t
gcacgagggagcacaagcagatcttctctgcggagaaggcagatttccagctcctaagaacaccctgttccacatggaagctgacgtgcccttccccagggacccacgccaaaaggccattcttccaggccagcgtcccagggcgctgctgtgcgtggttcgcagccccggcaaacgatggcctgcactgcgtgctgtccgccctgttcctgctggactctctgcactgtgtcctgatcaccctctcagctgatagtgggcactgcagtgtgaatcttctcatggacaacagaccaatcctgcctccaccagtgccgtcgccaaatcagtaacacagagcaacctcaaacatttctgaatgtttaggtcatctaatacttggcaaaagagtgggccgaacacctccaccctcagctttctcttctgtttgagtgtgagtgtgtgtagcagagtctgagaaagatacatacagccaccttccttttctgagctagggaaaatttgaacaagagcactgaaatgcaaacactaatcaaaaaggaagtattttccattttaattctaaagagtggaaatagaaaaaaatgattttgctaaaacaaaatatgcagacacctttgggcgtgctataaaggcccatgctactccagagatgacccagccggacagaggtgggtgtggacggacagcatggatctagatgattccacacgtttgggn

SEQ ID NO: 653535 - DNA, 877 bp, Homo sapiens
  misc_feature (74)..(74): n is a, c, g, or t
  misc_feature (114)..(114): n is a, c, g, or t
  misc_feature (138)..(138): n is a, c, g, or t
  misc_feature (161)..(162): n is a, c, g, or t
  misc_feature (167)..(167): n is a, c, g, or t
  misc_feature (208)..(208): n is a, c, g, or t
  misc_feature (226)..(226): n is a, c, g, or t
  misc_feature (231)..(231): n is a, c, g, or t
  misc_feature (249)..(249): n is a, c, g, or t
  misc_feature (300)..(300): n is a, c, g, or t
  misc_feature (305)..(305): n is a, c, g, or t
  misc_feature (313)..(313): n is a, c, g, or t
  misc_feature (316)..(316): n is a, c, g, or t
  misc_feature (320)..(320): n is a, c, g, or t
  misc_feature (326)..(326): n is a, c, g, or t
  misc_feature (328)..(328): n is a, c, g, or t
  misc_feature (357)..(357): n is a, c, g, or t
  misc_feature (379)..(379): n is a, c, g, or t
  misc_feature (382)..(382): n is a, c, g, or t
  misc_feature (390)..(390): n is a, c, g, or t
  misc_feature (401)..(401): n is a, c, g, or t
  misc_feature (403)..(403): n is a, c, g, or t
  misc_feature (407)..(407): n is a, c, g, or t
  misc_feature (416)..(417): n is a, c, g, or t
  misc_feature (424)..(424): n is a, c, g, or t
  misc_feature (428)..(428): n is a, c, g, or t
  misc_feature (437)..(437): n is a, c, g, or t
  misc_feature (477)..(477): n is a, c, g, or t
  misc_feature (481)..(481): n is a, c, g, or t
  misc_feature (514)..(514): n is a, c, g, or t
  misc_feature (553)..(553): n is a, c, g, or t
  misc_feature (556)..(556): n is a, c, g, or t
  misc_feature (583)..(583): n is a, c, g, or t
  misc_feature (620)..(620): n is a, c, g, or t
  misc_feature (744)..(745): n is a, c, g, or t
  misc_feature (844)..(844): n is a, c, g, or t
agaggtgcctcccgctcgttgccgcgtcctacccgcaccgtgcgcggctcgagctgaggacaccaacggccgcnactccccggcgagaccaggccggagcgtggacggcgcgcncgccccgcgagggagggcgctgangcgcgcgccggaagcgggagcgnnagcgngagcgcggcggcggcggcgaaggtgcgggcggccgagcggngggcggggctgcggtgcntgcanaaccttggacagaagctncctagctgccgccgccgccgctgccgccgtcgccgccgccgagcgcgatcncagcngatccccnccnagcncccccnancgccgccgagcgccgggaccgcggcggcngggccgcggtcgcgcattgcgnagngcgcgganaggatctgccncntgcngggcagatnnaaggggncagnacgcttccngggagcgccccctcctcctctccgtgggccgccgcaggtncggntgagcgcgttttatccctccggccggcaggctngcgcgcgcaggggcgcgagcccccggcccggtcgcgcanagncacccatgtggcacggtgctgtccctntctcccagctaccggaaggccacgctgtttgaggatngcgcggccaccgtgggccactatacggccgtacagaacagcaagaacgccaaggacaagaacctgaagcgccactccatcatctccgtgctgccttggaagagaatcgtggccgtgtcggcaannaagaagaactccaagaaggtgcagcccaacagcagctaccagaacaacatcacgcacctcaacaatgagaaactgaagaagtcgctgtcgtgcgccaanctgtccacattcgcccagccccaccggccagcg

SEQ ID NO: 653536 - DNA, 139 bp, Homo sapiens
  misc_feature (111)..(111): n is a, c, g, or t
gtggtgatctagagatcccaacctacagcgcctgtatgatggttctttatcatttctcttccccctttttgggcatccgggctggcctccagttttaggtcctttagtttncttctggtaaggcaacgggagaacacct

SEQ ID NO: 653537 - DNA, 258 bp, Homo sapiens
gctagtactgtgtaatatatataggaaaacatgtgtgtgcacattgctacatctatatatcttcacaatatataaataaataagcacgcactatgtgtgagcagatagaaagaatgatagagtcatagctgtaacacgtggttattataaataaataaatagatgaacttctggctgatttaaagcagaataaaaagtgaaaaagtcaattacataaaataggaaaatataatttacgggtaactaaagaaccaagga

SEQ ID NO: 653538 - DNA, 317 bp, Homo sapiens
  misc_feature (4)..(4): n is a, c, g, or t
gtantggggatcgtgggaatacgatcacccaaatagcagcacataacacccatatatacagcagcccccatatgtttaacaccactgtataccagcatcgtgcttgccatttcctatgccttctcttatatgaatccacttaacatgctcttcaatgaccaagagcaatcatttggcagcccccatcttgtagattgaggagccttgaggctcatgataagactaatgttacacgctactgacgatcacatcagctgagcgtagagaatgggagtcagcatgaagccacctgtgaatccgtaggtctaagcttgcca

SEQ ID NO: 653539 - DNA, 437 bp, Homo sapiens
  misc_feature (273)..(273): n is a, c, g, or t
ttctcatgctgaatggagagatcgtacctgaaggagtcaaattatgcgatcaactgtaggctcaacagactaaggacaaaatggcaggtcttcgacaggtaacactatgtgttcactcgatctgttatatccacagcaccaaggcatataatagacaggaaataaatgcgtagatgaatgaatagaacaaaacttgttgatattcatgcaggtattttcctcctttccttaccagaggatgacagaaccctcggaatgacaaaagggagcatngggaacttattaggaggtacgtgtgtttccaggaggtgaggggacagaagagaggtgcactggaagtggtttcccaaatgtcaagagagttgcctaactctttggaggaagataagactccaagaaacaaaatgattaaagaacagcccacgaggcatacagta

SEQ ID NO: 653540 - DNA, 921 bp, Homo sapiens
agagcgaagggcgtacagccggaaaccgtcggacgcgacaaacatgggagccgagactggcgggcgcacgggcgcatgtgagaccgcgaaacccgcacatggggactattagcggaactcagccaggaagtgatgagaagaaatgtttccgccgggagacccttgagcgccagcaacaatgtccggtatccaattcagaaaaggcaccaagtacttccaccaggggaaatcagaatggctgaccagagattagcgagaaagtggtcgacccaagagctaacacggccacaatggtggtatctggtgtcgcaggcttgaagatggagagaactttaagtgttatatgacttgccagatcaactacatgctgccagttggtgcttccccgtgctgctgttgatgctggctttgttccccatgacaagccagttggaccagacgggaaaaatagtagcccccagaactttatattgctgttggaatatctggagcccatcccaccatttagctgggatgaaagaccagccagcaccaattgtgcccaatttataaagaccccagaagctcccattttcccagtggccagattatggaatagttgcaagatttatttaaggtagttcctgaaatgactgagatcttgaagaaaaaatgaatcaggatcatgccctttaaaagaaaacttttgttaaagtattcccacctgaaatcaccagatatttgtgggtattatcaccaatccattggaaagcctggagagctacctttcataatttgagggaaaatttttaaccgatgtcccgaatgcttgtttatgggattgctgtgtttccttttaattatttgtggttcccaaccattattgtttgaacttttttaattctgtactaaatttataatataagcttttcccccgcttta

SEQ ID NO: 653541 - DNA, 393 bp, Homo sapiens
  misc_feature (173)..(173): n is a, c, g, or t
ccccgaacatgtcgagctgtagcatgaagtgtggccggcacacttgaggaactggacttgtttatttatttatttttatttattattatgtattgggagacagagtctcactctgttgtccaggctagagtacagtggcgtgatcttggctcactgcaacctccacctttggngttcaagtgattctcctgcctcagcctcctgagtagctgggattacaggtgtgtgccaccacacccagctaatttttatattttgggtagagggggtttcgccatgttggccaggctgttctcaaactcctgacctcaggtgatctgcctgccttgccctcccagagtgctaggattacaggtgtgagccaccgcgcccggactatccttgactgttcca

SEQ ID NO: 653542 - DNA, 101 bp, Homo sapiens
agagtcagactagagaggaccgggtctgcagccagccggttagggatgtgggggtctgctgatccacacacaccaccttcttcatgtcctcaaagctgtgg

SEQ ID NO: 653543 - DNA, 112 bp, Homo sapiens
aagagtctatttgggattgaagactgaagtctgacgacacggccgttttttattgtgtgagagaccgttggcagcagccgatactgggtgacgtctggggcccgggaacccg

SEQ ID NO: 653544 - DNA, 241 bp, Homo sapiens
ctgaggattccccggcggtgtacaggcggtactacatgcggtactacaggcggtactacaggcggtactacaggcggtactacaggcggtgctacaggcggtactacaggcggtactacaggcggtactacaggcggtactacagacggtactacagacggtactacagacggtactacagacggtactacagacggtactacagacggtactacagacggtactacggacggtactacag

SEQ ID NO: 653545 - DNA, 148 bp, Homo sapiens
  misc_feature (19)..(19): n is a, c, g, or t
tgcatgcatttgccagganatcccacatcattcggattttgttcaactcaatgctgcttcaaaaaaatggtggaatattgataggggggtgagctatgattacgacgtccggcgatattaatgtggatatatttccgcttgtcccaag

SEQ ID NO: 653546 - DNA, 182 bp, Homo sapiens
aagcttgatagcctaggctggtctcaaactcctgggctcaagcgattcacctgcctcagcctcccaaaatgctgggattacaggcgtgagccaccgcgccagcctgtttgcatcattttaagggacacgaattatgtctttctcgggcgttacattatagacggagctgctttccctccttt

SEQ ID NO: 653547 - DNA, 205 bp, Homo sapiens
acggacgtccagctgagatctcctaggcggactacacaggtgtcggtaactggaaaagtctgttcggccggagcgcttagtagagagaccttcactcgccaactgggaggaccgaggggacttaagacataagtttctaccttggggaggttaactacgggtatgttccttaaacgaagccttggtgtattaatctggtcgaccg

SEQ ID NO: 653548 - DNA, 347 bp, Homo sapiens
attctttctctcatgtgcagtctgccaaaaagtacactagatgcttaatatagcccaatataataatcttgtcctttgtgcagctcatatttcaaggagtacaggaggagagagaaaattaagtaaatatatggtgataaaggctaaatgaaaactagggtggtcacagagtctgtctaataccctgacatttgacgcagagacctgacaagcaagacatggagatccagggaatatgacccagaagagatgagcagctgcaaaggacctgaatacaggatgatacgtggcccattaaagcgctagccagggagacagtgaaagtggagctgaatgagtgagcacag

SEQ ID NO: 653549 - DNA, 751 bp, Homo sapiens
  misc_feature (637)..(637): n is a, c, g, or t
  misc_feature (649)..(649): n is a, c, g, or t
  misc_feature (663)..(663): n is a, c, g, or t
  misc_feature (667)..(667): n is a, c, g, or t
  misc_feature (677)..(677): n is a, c, g, or t
  misc_feature (689)..(689): n is a, c, g, or t
  misc_feature (730)..(730): n is a, c, g, or t
acgactggtgatgggagcgcaatatatgaggggatacagtgcctcaggtttaaaagagcaggaagctgagtgagaggttgcagaaaaagtgtcttcgctcggcagaggttacaggtggcatctcagaaagagctttgaggctacaggctgtagtcgggaaggggatcggagaactgtgtgaagggacagcttagggactagcgtcctgggactagggggaagttcgcgactttctgaagactggcaggaatgtgcctcctggccctcgatgcttcccccctgaggggaggcatcgtgagggactgtggcaggcttcactgaacgctgagccggggaggtccaactccacgtatggatccggggaatgagaattcagccacagaggctgccgcgatcatagacctagatcccgacttcgaaccccagagccgtccccgctcctgcacctggccccttccccgaccagagatcgctaaccagccgtccgagccgcccgaggtggagccagatctgggggaaaaggtacacacggaggggcgctcagagccgatcctgttgccctctcggctcccagaagccggccgggggcccccagcccggaatccttggggggctgtaacaggtcctcggaagggangctcccgccggnaatgccctgggganatcngtcatatgcngaactcatcagncaggccattgaaagcgccccggagaagcgactgacacttgnccagatctacgagtggatggt

SEQ ID NO: 653550 - DNA, 549 bp, Homo sapiens
  misc_feature (385)..(385): n is a, c, g, or t
  misc_feature (392)..(392): n is a, c, g, or t
  misc_feature (396)..(396): n is a, c, g, or t
  misc_feature (417)..(417): n is a, c, g, or t
  misc_feature (450)..(450): n is a, c, g, or t
  misc_feature (455)..(455): n is a, c, g, or t
  misc_feature (458)..(459): n is a, c, g, or t
  misc_feature (461)..(461): n is a, c, g, or t
  misc_feature (463)..(463): n is a, c, g, or t
  misc_feature (472)..(472): n is a, c, g, or t
  misc_feature (476)..(476): n is a, c, g, or t
  misc_feature (485)..(485): n is a, c, g, or t
  misc_feature (490)..(490): n is a, c, g, or t
  misc_feature (503)..(504): n is a, c, g, or t
  misc_feature (545)..(545): n is a, c, g, or t
acgactggtgatgggagcgcaatatatgaggggatacagtgcctcaggtttaaaagagcaggaagctgagtgagaggttgcagaaaaagtgtcttcgctcggcagaggttacaggtggcatctcagaaagagctttgaggctacaggctgtagtcgggaaggggatcggagaactgtgtgaagggacagcttagggactagcgtcctgggactagggggaagttcgcgactttctgaagactggcaggaatgtgcctcctggccctcgatgcttcccccctgaggggaggcatcgtgagggactgtggcaggcttcactgaacgctgagccggggaggtccaactccacgtatggatccggggaatgagaattcagcaaaaaaanaaaaaanaaanaaaaaaaaaaaaaaaaaaatnaaaaaacaaaaaaaaataaaaaaaaataaaaanggaanctnnancnaaaaaaaanaaanaaaaaaaanaaaanaacaaacaaaaannaaaaaaaaaaaaaagggaaaaaataaaaaaaaaaggagaanaaaa

SEQ ID NO: 653551 - DNA, 107 bp, Homo sapiens
tgaaaatgggcaggcctccctgtagggttgcctgacaattccctagatgccctctttaaaatcagaagctgcatgctggcccacccagtcacagacaacggggaaca

SEQ ID NO: 653552 - DNA, 227 bp, Homo sapiens
actggtgggtcgttctacgctttggagtaatcaccccggacttgagttctggacgtgccaattgttggtgtccgcgctctcatacgcgcggtacacccaggtggcaggcgcagtcactctggtatcggtgatcttgcctgccgtaggctgcggtcagttcgttttccttttccagggtgcggctccccatgggtttacctgccttggcagtgagaacgacccacctg

SEQ ID NO: 653553 - DNA, 86 bp, Homo sapiens
ggtataaattttactcttgcaacataactaccatctctttcttaaaacgagatcaggttagcaaatgatgtaaaagaaaaaaaaaa

SEQ ID NO: 653554 - DNA, 892 bp, Homo sapiens
ggctcttcttatgttcgaagcgacgaaaatgtttctctccctggtgggtgccctcaacctgatgtgatgggggggttccttcccttctccccaccaatattggggggggagaatcaaatgctgggcttacattctaatacctgttccgcgcctcataaaagggggggatcaccttcaagggtttgctgttatccccaaaccgcctgagctttttgtgatccagacagtcggggattaccgcccccagattagcctaaagttaggtgcaatgtggaccccctctctccacgaatccgggggtggtctaactgcgtgctctgggcgatgagccgacacaacttggtagtttcagaaagccactatagcagggggggtattaattgcactcactggcctcctaagcaaagggaccgtttatttctgtattctgtctctatgattatagaggaaaaccatttccaagggtttcctagctacgtgtgttcccctgcgccccacgattttttccacgcctcatgagagcttcccacgggaaatatgcccacgtatgtagcaaagctgtgtcttacggtagtcctctttccccaggtgttacctttctgtctacatgggttcctagttggcaatatcacgcgttggtccaaacggtaaaatcgcacgtcgttttatcgaggcaccacatttaattttacttgcctctccattaagaggacacattaactgcttttttccacacaagagtgcaatgcctatagtcccttggccaagaaggtgaggaatcagaaaaggggttagaaaagtatccctgtattcaatcagagggtaatattctcccccggataaatggaagggacaatgaagtaaaacttagatgatacggggacaagaacaa

SEQ ID NO: 653555 - DNA, 320 bp, Homo sapiens
  misc_feature (235)..(235): n is a, c, g, or t
  misc_feature (287)..(287): n is a, c, g, or t
aagaacttcagtaggaactgattggaatttaatgatgcagcattcaatgggtactaatttcaaagaatgacattacagcagacacacagcagttatcttgattttctaggaataattgtatgaagaatatggctgacaacacggccttactgccactcagcggaggctggactaatgaacaccctacccttctttcctttcctctcacatttcatgagcgttttgtaggtaacgncgaaaattgacttgcatttgcattacaaggaggagaaactgccaaagggggntgttggtggaagtttgttctgtctaatgaagtg

SEQ ID NO: 653556 - DNA, 178 bp, Homo sapiens
  misc_feature (20)..(20): n is a, c, g, or t
  misc_feature (162)..(162): n is a, c, g, or t
  misc_feature (164)..(164): n is a, c, g, or t
aacctttattcatcctcctntccaagacctatgagaaggttccaggccccaggaacacaggcttcttggccccagatgcacctccctgcaccccggggttgtataccacaccccgggcccctaatcccaggccccgagataggaaagccaactagttctttntntgtgattcagtagg

SEQ ID NO: 653557 - DNA, 361 bp, Homo sapiens
  misc_feature (10)..(11): n is a, c, g, or t
  misc_feature (19)..(19): n is a, c, g, or t
  misc_feature (361)..(361): n is a, c, g, or t
gcgctgtcanncaggctgnagtgcaatggcgcgatctaggcttaatgcaacctcgtctcccgggttcaagcgattttcccgccccagtctcccgagtaactgtgactgcaggtgtgcgccaccaagctattttttgtatttttagtagagaccgggttccgccatgttggtcaggctggtctcgaactccagatctgaaatgatctgcctgccttgccctcccaaagtgctgggattacaggcgtgagacaccgtgcccagctgggtttttgctgtttttttttgcagggtcttgatttcgcttaggccagagtgatggcaccatcatagctcactgattttgctatttacttttgttttn

SEQ ID NO: 653558 - DNA, 850 bp, Homo sapiens
agcggggaacgacggagggcgctgcggtaaggagcagccgccacagacacagccgcttcgcagcctcccgccgctggtttgtcacgccccgcggctgcgggcggcgggcggccgagcgcgctctgaggttctgtccctcatcgctgaacccgctgtctcccgtccgcagctcctcgcgggaaggggggcggtctggtgtgcctgacgcagagccgaacttacctccaccagaccctcagacatgaactgcacaaccatacaatcacatcaacttacaatcgtagcatacatgcaataaatgacccactccttaccagaccattcaactctccaccacaacacatatgattacaataaacgaccatctataactattaaaaaacacaatacaaatcaccaccatcacactcatctcaatctacacagatatacgatataaactacacattatatccactactagaagaaataccagaaatctcatctgataacatctaagacaaacacacacaaataatactctcatagacacacagataccagcaagcgagagcagcacgacgagctaccctacacaacacaaataaacatatctataacccacacacacacacattcaccaatcacgacatataatacaacagaataattaccatcatcacagaaacactataaatacataaacaaataacaccatcacaactaccaacaatatagactatctcaaatataccaccacagcccagaaaactagaaacaacacaagcataaacacaacagaacaaacatccaccaacacaacatactcactccacatcaactgaccacaatagaatcacaacacaaccag

SEQ ID NO: 653559 - DNA, 922 bp, Homo sapiens
gattgagctcgacgaggacgtattgtattacatgtaactgccgctcgggtttttacaataatgaaacaaatcaaaggcttgtgaaacatctctaaatcttcctgttcattgaccagtttctcaatcacaaaaaacaggaacgtctgtgaggttcaattctggaaagggggattggtttagtggctcttctgatacaaccacagacccctcggataatactgtggtccaaagaaggctgctgtatgttctctgtatgctagactcattccttgtgaataatactcatattatagcttttaatactcaactgcacagttccatatagacttgatttttcggacgattgttttttacctcattcctaatttcaccggatttattctagcctaacattcattgcatgaatgcttagaattcatattgttccttcagttacgacctgttattctccccttttacatgagaacgtaacccctagttgttacttaactaatttgttaaccatagtcaccattttcttattctttgaatacttattatctattgcggcctaacttgtgtttagttttttcatggagttttatcatatcgcggtgcaaaatcgttatatctacaacatgctttagtattttttatatttcatttccattagctaatttatatgattacgcgagcccctttgagtgttatatccgctttgacattgatgtattcgctcttattttcctggttgcaaatatgctatgtttattcacacttaatttgctaccccatattggtttattatggcggtgtcaccatatttttgtgttgatgcttttattcgatccgtatctgtatacgcttacttcctccttgccacgccattttttatatctaacccgttcccgtctccgcttaatttcccattcccgttataaat

SEQ ID NO: 653560 - DNA, 567 bp, Homo sapiens
gacttttccctatcaatagatagccttacagatgaatttcttagcctgcagaaatgtgttaaactgtactaaaacagatttagtttttgtgagataaacagatagtgaaaaataaacttagccaaatctcatgtgaggataaaaaaaagcgatgtcccagaataagtcaatgtgacactcaagatctaaacaatattaattaacttttaagtatttaatcaaatttcagcacccagcaaataataggcactgtaaatatttgcttaatatacgtagctgtgaatttttgcccacatttaggcggacgggacacttaacgccagaatattcccgaaagtcaagttttgtcatcttacacttaggaagttacgttaccaacttctcaagtctcgtagtatttttcttaagcgcaatttggcactttccagttacctcgttggttaccggtcatcaggttcttgacaaagattgcaatacagtagtttaagaactatttaaactaggtattccattaactaggtaaaaaccactcgaatgacctcgtggtccaattccattcgcaagggt

SEQ ID NO: 653561 - DNA, 454 bp, Homo sapiens
cagtttcttgtcattgtttcatgacagtaggttgtcgtaagacaaggctgcatgaagtgtgaactggacttttcttggatccataaaacaatgtgcttttggagaatgtgggcatcgatcctactacctcacgcgtgcaaagcatttgagctaattccccagccgtttggaatttccacaagaagcaaccaagagggtccggtcttgtcaggctatgctgttggtggacttgtttgttgatgtgccagcacttgcagaggctcagtgcatttcaacaattgagcaaaatagcaaatggccggttagctcagttggttagagtgtggtgctaataacgccaaggtcatggttcgatccccatactggctattatgtacatttgagtgtcaaaattacgagtcacatgcatgtggtcgacgcggccgcgaatttagtagtagtagtaggcggccgc

SEQ ID NO: 653562 - DNA, 184 bp, Homo sapiens
ggtgtcgtgaaactacctcggagagccgaaatgggaaggaaaagactctatgccacgttgtcgtcattggacacgtagattcgggcaagtccaccactactggccatgctgatctataaatgcggtggctgcgacaaaagaaccattgaaaatttagagaaggaggctgctgagtgggaaaggg

SEQ ID NO: 653563 - DNA, 1211 bp, Homo sapiens
cagcttttcgtggcaggtggatggtgcttgaactgaatctcaaagcaatgaacaggctgttatttagccaactagtgacattgaacggagtcacttcacgacacgagtgatgctgcctgtgcctgctaggactaggactagggacaataacagagaaactggcatgtccatattcaccctcacacttactactactctctgttctctactctctctctgatgacaccccaaccacctcaccacctgcatacacctcatctacatagacaacacatgtacaacaaacaaaggcacacataaacaatcactcttcacttacacacatactacttaacacccagagaagacagctactacaaccgaccacacctcaccccacactgctaaccaacctcccatcatctagcactatttaactctactacgcacaaccttcactacaatacaccttgcgaaacctataattctgttgtaactaacaccttcactgctagccccattaatacaaccacacactaacagccaactacaacgcagcactgcacacaccaagaataattaataaacgcaaagtcaccacatcacactatcaacaaccacttacgcacgccgtagacaacacacacttaccaacatagcgaacctataagagttaaacctcaacactggataaagacaggtccggctaccttgaccacaactacacccagagccagctgcgtaaacaccactgccagatcggtaacacagctacgacactacgacagtataaggaacgacaacaacgacctgaccgacaagagaaaaatacaaggggagaaaaccaccccataactacagaccgacagaccagaataaacaaaacaaacagaacccaggaaacagtaaaacagcaccaacaaggaaaacaagaacacatgcaaaacaatataggagagactgctccaatgctagacggacaggtcgagtaccaggcggacatcaagaaagagacaccacgcactacacagctgcacaagactgagattagcgagacgactagtaactcatcaaaaagcaccagttaataaaccacaaccacgcacacacacagcaacacacacactgaagacaatgagaactcagacgcatagtactacaccaatatcaaaggagataatcgaactcgacgatatctaaggagatgcattagaagataagaaacaaagatt

SEQ ID NO: 653564 - DNA, 727 bp, Homo sapiens
  misc_feature (90)..(90): n is a, c, g, or t
  misc_feature (107)..(107): n is a, c, g, or t
  misc_feature (238)..(238): n is a, c, g, or t
tggggctctctgaccagcaccaggggggtgggcaaaaacaagcgccttacaaaagggggcaaaaggggagccaaaaaaaaaggggttganccattttctaaaaaagnatgggtatgatgtgaaagccaccgtgctagtgttctcaatataagaaaatatgggaaagacgctcgtcaccgaggcacccagaggacaccaaaatggcttctgagtggctctcaggggctcggtggtgttntgaaggtgagctctggcgtgattgtgcagaagtgagtgaagtgtgctttataaaaaatctcaagcgtgatatacgtgaagatgtctcggggtaaaaacggccgtgactaactctccagggcagtggatcttacccggtgacaaaatgtgtgtcccatgggctcaaaaagtgggcagacaatgtgatgggaagcctcacgttggatgtcaagactaccgagggtaactggctacgcacgggtccgggtggtgggttttactaaaaaagcgcaacaatcagatagggaagaccctcttattgctcagcaccaacgggtccgccaaatccggaaggaagatgttgggaaatctggacccgaagaggtgcgacaattgacttgaaagatgtggtccataaatggattccagacgcttgggaaagactagaaagggtggccatctattatcctctcctgatgtctccgtgaaagtaatggcgaaacccagttgt

SEQ ID NO: 653565 - DNA, 1417 bp, Homo sapiens
  misc_feature (1322)..(1322): n is a, c, g, or t
gctcttgcccgtatcgcagaatcatggatatatcgtagtattactgatctgatgtctcgtatactctgagtactaatacccctggatggtcgatgcatggttgcttgcttggttgcacaattgtgagagtaccgggctcaccctcctggcttgtcttggatcgactctgagcgatggtgtggccacgtccctgacttggcgaggggcggattcactccctcgtagcgtctgtggcagacggccttgcgggccccgtagtaggccgtgtgctcgtcttgtaatgcctcgaataagtggggcctaatgcctcgtataggtaagggaaagtcacctctttgttcgagcttacagagtcccgtccgcgtaggtacagtagatgtagaaaagccaatagtgagcaacggatgctttcagacgtaacaagtctgctttcccactctcgggcatttggaattagtctcgaatgagttcgaagccgttgtgggtgtctgcgtgcacggttttaagcttcgtgactgcacgagagactgtgccctgctagtcctcttggtcactctaccctgtactcccactgttgcgcctactcatagaggacgtgtcattgagatccattggtgcttccagaggagcccgcgttgcgccttccacaaggcaatcttttttgaatgcttagcgcaaggccagggtcgtgttagagcacgctctcgcgagattccaatctgcccttgctcggattttgcatacgagtgtagtgtacgccaggaaagacccgttggtgctgcctcccgttagtgcttagcgtgggttagtcctggtaaacgttttggcccttgcgattgatcgtagagaggtttcagagtgcaagcggtatagcctcctagttgcgttgtcccatcttctctgttcactgaaaggccgggtctcgaacctttactcttttgtgggggctaaagaacttgagtttttcaccaacgaggacatgggttttaagtggctcggaggggtccaccccggtggggagctctccgccacggttggcgctgttttttacccccgcggtagattcgcgggagtggaaagtgactcccccttgtgtgcacagttgtatgagcatatcttctgccccagctttgtgagggtggttttgccgggagacctgcattcccacagcttgtctgtgggaggcgcaaactgcccctcctatataaaaggcccacgtcgtatgagggtgggctcaccacgaggagtggtgctcttcgcgcaacgcaggaccatcgtccgggccggaggaagaaatccaggttgtgagtcacaaccaagtnaggagagggtgtggcggcagtatgaaccacgtgacacgagccgacggcacatctgtagttgtggcgagcgcatcgcggtgataggttatataggc

SEQ ID NO: 653566 - DNA, 174 bp, Homo sapiens
ttcttgcattaactattaagattaatcagattcttgagtctgcatgtagaggtaatgtatcccgcgttactaattggaactactacatgagaattataaaactggcatattgggtttgactctcaatctttccaaagctcttcgtatttttctgctttcatcccacatttttct

SEQ ID NO: 653567 - DNA, 1138 bp, Homo sapiens
ttctcgaggatcccagttactcctttgagacaccaaaaaaagtgcttccatatggttacattgttaattccataactcgcatttacaacagtaatgatattgtaaatgcgattatggaattaacaatgtaaccatatggaagcaactttttttggtgtctcaaaggagtaactgcagcttggtttgaaatttgtactgtttctatcataaataaagttatggcttcttgttggaaaaaaaaaaaaaaaaaaaaaaaaaaaaaaaaaaaaaaaaaaaaaaaaaaaaaaaaaaaaaaaaaaaaaaaaaaaaaacaaaaacacaaaaaaaaaaaaaaaaaaaaaaaaacacaaaaacaaacaataagaaaacaaaacaacaaaaaaaaaaagacagggaggggcacctcaatgatcgcacaatcacagagaaacagagaacacaaaaacaacaacacaagaaaacgaaagaaagcgagaagcaggagagagagcgaccatccaataaagaagagagacacaagacaaacacactacaacaaacacgacacgtaccaaccgcgcgagcgacgagggcacgcaggggcgggagaaaaagacggcgaggacaggagaggcgcagacgagcgggagagacacaaaaaaagaaagcccagaaagggggcgcgaggcggcggacgaaaagcaggagagccaaacaaccgaacggcagacccagaggcaaggaaggacgagggggagtggatgagcattcctatcaacagtaaagtaatatagacaggagagataagagaggcaacagcgagagagaagagcggcaagacaggaaggagaagaaggaaacagagaggacggagcaaaacagaaaagagaagagactcgcccacgctaaccggaacagaaatataaaaaaagacaagagcaacggcaagcaaggcgaacagcagggggagaggaggaaaggacgaaaacagacgacaacaggcaagaacagacggcactcaaacagatataaaccgagaaagagcaagacgaaggcaacacaaaggacggcagagcaacacgagagaacgcgagagcgggaggcaaagagaggacaatgcagaaagcgacggacaacaaagaacgcaagcagcagaaaa

SEQ ID NO: 653568 - DNA, 109 bp, Homo sapiens
agtactatggcaacagttgtagttaaataaacatcacaggtcacacttgttctaggctcccaagcctgggtcactgctacatggatttgcgccaaaaaattcccaggct

SEQ ID NO: 653569 - DNA, 550 bp, Homo sapiens
gtgattggcttggcgagtgggcagtgaggtcagcgggaatgacgggaacatgcgggtgacactgcctcagatgataccattaggggggccacaagatgggccctaagtcaacaccgttcttcatgtagtagttctccagcttggcccagcaatgtgcttgccctaggtgtacttacgcacgcagttgcgatgtggggccggcatcttatgcatgcaggcatcttccgcgggcctggctccgccatgtgaatccatcttctggagcacgtagttggcatacaggtcctacatcatggtgtatcaaggcactgtggagaccgtcgttcatggtgcacagctcatcgatgagcacagggcgctccgtaacgtgcggcgtgcttcccaaacttctccacaagatgggttgcaacgttggtgcggactcaatacacgtacattggctcggatttcggttacaattttgctttgatcctcaggccgaccgtgttccagtacatgttggctcacatagtcccccatatagatgtgtacatctgtctgtgtctggtgc

SEQ ID NO: 653570 - DNA, 349 bp, Homo sapiens
attcgcggccgcgtctaccggtggtgcagtcttggctcactgcaacctctgccttctgggatcaagtgattctcctgcctcagcctcctgagtagctgggattatagacatgcgccaccgtgcccagctgatttttgtatttttagtagagatggggtttcgccatgttagccaggctggtctggaatcattttaaaaccaaaaggtttgtatttaactaacttactaagattattgtattccgccagatgcggtggctcacacctataatcccagcacttcgggaggccaaggtgggctaatcactagagcccaggagtttgagaccagtctgagaaacatggtgaca

SEQ ID NO: 653571 - DNA, 236 bp, Homo sapiens
  misc_feature (4)..(5): n is a, c, g, or t
  misc_feature (72)..(72): n is a, c, g, or t
ttcnngcgcaaggccgccgctatcgccgagcaataccaggccgtgatcgccaactggatcgcccgccaaagnggctcgacccaggccaaggccggcttcgaggcctccatcagcatcaaagcgctgcacgaagcctgtgcccttccctcgcgcagccaaggcgaattactgccttccacagccggccgcctgagcatcgcacggcgccgcccgctgggcgtgatcggagtcatcag

SEQ ID NO: 653572 - DNA, 421 bp, Homo sapiens
gggttttacccccgcttccattagaaccacaggaaaggccttgttttccaaaccaaagtgggtaataactgggggaaggaaaaaaaaccctcgggttttcccttttaaaggggggaaccctttcaaaaacaagggctgggtggacccggccccctcaagggtgccgggaaatatggtcccctgttgccgggccattctcggggttaaaaaccccattaaatcacccaactggggatttttgggggcaaaaaccccccccggggtttttaaaccctgaaattattttgaaggggggggtttaaaaaaaaaaaaaaattttaacccttcctgggggaagggtttctgttccccgggagggaaaattttttcctttctccaaatcccccttggtaggtcttttctttataaatttttccgtgga

SEQ ID NO: 653573 - DNA, 124 bp, Homo sapiens
atccatgtggcatctgataggagtattcaacatgcgataacccaagggatgtatctgggttagggggagggaaggggagcattagtgctgacgagatattcttacttcatgactatggagttcg

SEQ ID NO: 653574 - DNA, 620 bp, Homo sapiens
gatcccgtatcatttcaggtctttgaatgtttttaaacgaaatgcagatcaaattgtaagtaaattttgaataccactgagtcaaaagcttctttcgtagataagaaattattcaaacaagtaatttgatgagtgacacataggaatatcttgctagtgcttgaatttgaaccagtactataaattcttagaggatttatctttcattgcaagttgaataaaattcgctccataaagatgtggaatctattttgatattttaatgttaaacaaataattagtttttgaatttaaaaggtggaaaagtaccaaactcctaaaatttgctataaggttcaaaaatgttagttaatgtactccatattgtgtttgtagatcttctaatttgtagtctttatctagctctgattgccagttttgctgcaataaaaacaatagaataagaggtttacaatttgaaaaaaaaacttatatttgaaaattgagtttgggtatgtgggacttcaagaaaaatatttttaaaacgttattagattttacttatgtcctaagcactccactgtatattgtggatttaacaatggggtcaaataaggactcccaatttaagaatcagattt

SEQ ID NO: 653575 - DNA, 385 bp, Homo sapiens
  misc_feature (366)..(366): n is a, c, g, or t
atgatcgcacagaccaggtaactgtaacacagattggataacttacctaagatcatataattagatagacccagggttctaaccgaagggctggagaaagctggtatataatccacagagcatcattaggtagactgtggcagaattaggtactttcacttctctttgccaatcaaggacagcaataacgtcagtcctctcctcttcatgctgttacaagcaggctgcagtcaccagaacagaccagggtttttcaccttaggaatgtccttccctttccgtataaagacgctctttactgacagtattaagatagacttgggttattcttttttctagtaatggtgagggacctttgtttggctntaaattttgcctagttctc

SEQ ID NO: 653576 - DNA, 226 bp, Homo sapiens
caaggtcaggaattttcgagaccagcctggccaacgtggtaaaaccccatctttactaaaaatacaaaaattggccgggcatggtggtgggcccctgtaatcccagctactcaggaggctgaggcaggagaactgcttgaacccgggaagcagaggtgtgcagtgagccgagatcacgccagcggcactccccgcctaggtgaccaaagcgcccactccttttcca

SEQ ID NO: 653577 - DNA, 210 bp, Homo sapiens
  misc_feature (55)..(55): n is a, c, g, or t
  misc_feature (57)..(57): n is a, c, g, or t
caccgttcgaacagcttcctgtccgaaaatacattgtaaatgtctatcagatatntnaggatggggagcagagtttgatcctgtctacttcacaaacaacagcgcctgatgcccctcctgacccgactgtggaccacgttgatgacacctcaatagttgttcgcctggagcagaccccaggctacctaaaaacatagagtaccgagctcg

SEQ ID NO: 653578 - DNA, 847 bp, Homo sapiens
  misc_feature (475)..(475): n is a, c, g, or t
cacaaggatcatacaagagctatgaaagtgaagagagacatacgttatctaacaatctgagagagatgactcaatcagcatactctctcttggcgcacaatgacagggacagatactgtacaatacaggagcatgacaacgaaaacaaacaccaatgcaccgaaatgacctcacagtgccacacctcacgccaacacacacaccacaatatagcccaaaactccccactgatgcccgcacaccaacaacactttgtcccccgttccccccccccccctaccaccccctttcccgaccctccaccccatccttataatttacacttaccagggcccactacaccacttcaactcgtcccccctcctctccacccccaccacccatctctttcccgtatccaccttttcacttgatatcatcccgagcgccctcgtgccatttcgtcccccaccccccttgcgccatcttatcccanacttccccaatttccattagtttctactttctcccccatccaccaattacactcccccccctcccgttctcctttgcccccctacccccccacattctccaccccttttccccccctatttcccccacattgtgttttaccttacctcccattttcccactttttttcccctctccctcgtgccccacccaccccttgtctcccactcaccttcgttttctccataccactctacaccaccccctctccccgcttcactgcccaccccatttcacccacacttcccccattgattcaccgaccctcccgtgtccaccccacccccaccacctttacccagatttatcccacccccccacccccacttcacct

SEQ ID NO: 653579 - DNA, 434 bp, Homo sapiens
caaatctctgagacaagtacattgaagactatctcttgacagacacgtgtatccacatgcaactacaaccatgaccattgacatcatctgtgggttcctgaaggaaaggtgcttccgaggtagctcctaccctgtgtgagtagtacaaagtggtaaagggtggctcctcagtgcaagggacaacacacctcagaaggccgatactgacgctgacctgatagtacttcctacagtcctctcaccaattttcaggatcacataaatcgccagggagagtacatccaggaaataaggagacagctgaacacctgtcaaagagagagagcattaaccagtgaagttagaggtccaggctccacgcatgagcaacccacgtgcgctcagattcgtactgagtacactccaactcgggaagggggtggagtccgatgtgc

SEQ ID NO: 653580 - DNA, 119 bp, Homo sapiens
ttgaacttccagggaaatactctcctcaagaacatcctttaattgttggctgcattcgctattcaatctggcccaaacggtgtcggtttccttattacgtctaattgatgcctgaatag

SEQ ID NO: 653581 - DNA, 418 bp, Homo sapiens
actctcgaggggacagctcatctgtactgactgggaggtccatgcccatagagagctgccgtcctctctggacactcactttaatgagaagcggacaaactggacttccctaatgtaggacagtggtgaagcttccaaaaattataacagatttatttatttattcaatgtttttaaagtattaggcattttttgtttgtttgcttgtgtgtttgtttgttttgagacagtcttgctctgtcacccaggctggagtgcagtggcacgaactcggcttactgcaacctttgtctcccggattcaagcgattctcatacctcagcctcctgagtaaataggattacaggcatgcgccaccatgcccagctaattttcgcatttttagtagagatggggtttagccatgttggccaggctg

SEQ ID NO: 653582 - DNA, 614 bp, Homo sapiens
  misc_feature (79)..(79): n is a, c, g, or t
  misc_feature (140)..(140): n is a, c, g, or t
ttcatggcataaatcaactcacattgttgtgcaacatagccactatccatctcagagctttccaacagcctttactganccatgttcttgttggacaatgccctccatctccttcccacagcccctggcaaccccgcttnactttttgtctctatgatttgactactctaggtatcttatgtaagtggaatcatacaatatttgtccttttgtgactggcttatttcgcttagcacagtgccctcaaggttcttccatgtcgtagcatgtgtcagcatttccattgcttttaaggctgaataatatttcattgtatgtgtagatcacatttggtttattcatttatctgtcaatgaacatttgagttgtttcttgctttagttgattgtgaatcatgctgctatgaacatgggtgtacaaatgtcttttcaagcccctgcttttatttcttttgtatatatacccagaagtggaattactgaatcatatgctaattccatgtttaattttttgaggaaccaccatattgcttttcacaggagtatcattttacattcccatcagtaatgcactccggtctgggcaacagagtgggaccctgtttcacgaaaaca

SEQ ID NO: 653583 - DNA, 1116 bp, Homo sapiens
  misc_feature (1116)..(1116): n is a, c, g, or t
acaggcccttcctagagtgtcactggaaatcacagtcaacgccattgaaaactgacctcccacaccagaacgtgctacgttctttctgtcatgcctatgtgtgctccattccgtcatttctacttggctcaagaacaacatttctgcagtcaggtgcagactgtttacaaaaagaggcagcaaaatcaatgccatccttgaacatgatgagatgtgagaacttacaaatgcaacaaaggcaatacatgcatagcaaattcatttcttcaggtacagcaatcagttgcataggcatgtgagggtgttaacttggggtgaaagtggaggaaggtcccaggtgcaatcggctctcgatggaaatttggaattaaagcaaatcaaacgtcctgggggttacacaagaataccagatttcaaaagtttgcctgtagagcaaaataaaacagtcagtagtagtcattaatccttgaggcccaacgcagccgatgggtcggtgtaagggaaatttctgagatgggagtgagatctgatcggatcctgggaaggatgtataccaccagttagaacagtgtagggtactgggataccatgggcaagtctagagtgggcggagtgaaaagggacaagcatgggcatatcagtataggcatgtccacatgactaacaggaggattgaaatgatcttatggacacaatattatagagacattcaacgagtaataagaactcacagaaacagagataagatatcagcagcccaggacagcctgagcaccgtagcacggaactcaatgccccacacctgcgcaccaaggcacactccaccaaggcacgcaagcaatacagacaacgcacacgcaccacccacaacccagtgcgccacacaaacagcagaagaaaaagcaagacaaaacagaacacccaaaagacaacaacgatacaaggaacaagaaacgaacaacaaacaaaaacaacgccccaaagccagcggacaagcaacgagacaggcacagcagtacgagtaaagcgcagcagcgcgaaaaagagaagcacacacaacaagaagcagacaacaagacgacaccacccacggtgtaccagctccctacacaacan

SEQ ID NO: 653584 - DNA, 754 bp, Homo sapiens
  misc_feature (530)..(530): n is a, c, g, or t
  misc_feature (535)..(535): n is a, c, g, or t
  misc_feature (550)..(550): n is a, c, g, or t
  misc_feature (588)..(588): n is a, c, g, or t
  misc_feature (616)..(616): n is a, c, g, or t
  misc_feature (632)..(632): n is a, c, g, or t
  misc_feature (635)..(635): n is a, c, g, or t
  misc_feature (640)..(640): n is a, c, g, or t
  misc_feature (642)..(642): n is a, c, g, or t
  misc_feature (649)..(649): n is a, c, g, or t
  misc_feature (655)..(655): n is a, c, g, or t
  misc_feature (657)..(657): n is a, c, g, or t
gtggcaatcttgctcgccgggcagccgcgcacacaaccatgatgcaaaggatacccctgatgagccctgggcatttccagctcgagagttccttcgaaagaagctgattgggaaggacagtctgtttcacgatagcaaaacaagcactccccaggggcgcagagtcatgcgcatgcatcgtcaccgtatggcaaaaagcatacctacatgtgggcaacacacatttgctagtcaatcaacttggttggccaagcagaggcattcagccaaacccaggcagcagcaaggccatgcagcaagctaaatcaatccatgcaagccagcacaccggcaattcaagcaatcgtcgcaagaaacacagccaaaggcaagccaagaacagggatgtggagtgaggggaacgagttcacatactatccgggatctcaagtataccattgaaaacccaaggacacatttgtggactcacaccaccagaagcctgttaatgctatcatcgagcatgtgcgggacggcagtgtggtcagggncctgntcctcccagattacnacctggttacagtcatgctgtcaggcatcaagtgcccnacttttcgacgggaagcagatggcagtnacactccagagccttntgntgcanancaaaatntttcantnagtcgcgactgcttcaaagagatgtcagatcattctggagagctgacacaacagaacattctgggtaccatccttcatccaaatggcacatcacaga

SEQ ID NO: 653585 - DNA, 379 bp, Homo sapiens
acgaatcattggtcatgatgaagattggataagtgtggaaggcactgatctgaggaaatacctgtagttgctcacgtgagtgcagatacgaaggaatgggtcgagaaactgaccgcagtttgtatcagatctgatgcctttcttcactttccgatatgacgtatacagcagctatataggagtggtgtggcgtacattgtcgctccactccggatatctgttgttgaccaatttgtgattgagaggctgtctactaactgggcatcatcctcgctcgtacgaagcttccgggtcttacaccatctgattttaccaaacagtgtttaccgggtggcttatgtgtaggtgaacagtcacgcctgaaacttaagcggatcag

SEQ ID NO: 653586 - DNA, 236 bp, Homo sapiens
  misc_feature (93)..(93): n is a, c, g, or t
  misc_feature (166)..(166): n is a, c, g, or t
  misc_feature (197)..(197): n is a, c, g, or t
  misc_feature (222)..(222): n is a, c, g, or t
gaataaactggtttggaaccagaaaagtacaaaaaagaacagctagaggtacatagacacaggacaattaatcaatttgggaaaaaaaaaagnacttactttctccattgctgcctgaattgtttcccaatctgccttgaaatgccacttttggccaatatttttncaaaaatttgaccaaaaaagaaaaagcactnaatttccctttttatacaaaaatgnttaagtaggcaagt

SEQ ID NO: 653587 - DNA, 948 bp, Homo sapiens
aggggaaatatgtgaaaagaggcatccagaggaatgaatgtaatgtgtgacaaacagtcggcagaacatcactggctaaggaatttctggacacaccttcaaattggcaagtgtcatattctcaggatgatttttcttcaagccagagttgtgagaatagagacagataaaataatggatttatgcatgttaccatgtcgctatgaagcgacttgaacatggaatcaatgatgtcagccatttccatgctgggatgggaaagcgcaagactactctggtcggtatcaacagaccaggaaagtgtctagaggaaattcccacttttaatcatcgaaggcttctcttctctcctaactcattaagccccttgagcactatatggaatagaagctatgtcctgactatgtccatatgaagaatgtataaggaggaggagtacaagaggtctatcagcctgccagactctccgggactatctttgagtggccatgtgtggcccatgtatctaaagctacagacaagcaatgcaggacatcacatgggaagttgtgtacctggatggaacgagaatctgatagaggacctctctttgcaagtatatgaagatctaatacaagaactagcaagagcacaaagtgtttgcaagtgacagcataaagacggaacacaacaaatccttcgtgaagtgaacttagggagactccaaggagtaatcctaagaacctctcaccaagatacaatgtagtactgtggtacaatgactagccattgtttatatgatttgagtggtattatcgcacatggttttcaccaacatgtgggacaataaatatccatgccaatggacaggacgttgtaccctaagcaagttgctcccatctccagggagcgctatagatacagcagagctcacagtgagatgagaaagtgctccactttctgaacata

SEQ ID NO: 653588 - DNA, 115 bp, Homo sapiens
caatactcgcgggcacgtcatgtatgtaggtctcacagatttcaagcctggctactggattggtgtccgctatgatgagccactggggaaaaatgatggcagtgtgaatcggaaa

SEQ ID NO: 653589 - DNA, 384 bp, Homo sapiens
agaccatacaggatcccctcttctccgaaagcaacatctctgatggtgcactccaccgtcaccagtggctatggcgggtgccagtggtgtccgcagtggctctactgcctggggttgatggacagctagcctactcctagtagcagtgttcttggctgtttgaggtggcttcagtcccagcactggcaagagccattgggggtggccttgcgagctctgttggaggcggcatgttccaccatccagtacaccaccacctcgctcctccagctaggaagagctatcagcactagacgtgcgtctgcgacctctcggtccccaccaggtcctcaggccccgtctctggctgcagagccctctcctcattttgcctttcggagaaaa

SEQ ID NO: 653590 - DNA, 839 bp, Homo sapiens
ggatatgctgcaagataatgtatttaacaatattggggcaaatattcaataaatagtgtacatcgttaaacattcttacttgaaaaaatgcatatatatatgtgtgtatatatatatatatatatatatatatgaacagaagacaaggaaagtggtgtagtgtctaaaaaattctagtgggagcttatcagcagtttatcaaataataagagcgagagaatctctatttggtccttaatcactgggacacagagtagtcaagtggaaatatttggtgaattacttataagggtactgagtatatatatatgatttccaacctgttttaaacgacttatgagtaagagatagcattttctagtgtgtggcacatataatgccactttggaactcgttgtgacaaatgtagatgtgactcttaaaaattaagccttgcgtatagtgggccctcataagctgtgacaattttttcccaaaaaatagccacaataaatagtaatggaagctatatcaacggggggattgaaaggtcatgagtgtaatattatatacactctatcaacatagggtaacaagctgaacatcccacccaatagaagaagtctcacaggaaaagtcatggtactcaaggtgctccacggtcaagcggccccactttaccattcataacactcagggggcaacaacatccggaaccaacacaacgacaccgacagccacaaacaacagacgggcgggcgcaaaaaaaaccccccgcgggaccaagacaggcaccccgtcttggcacaccggagcccaaggggggcaaaacacaacagcgcccgaaacacgcacgggac

SEQ ID NO: 653591 - DNA, 282 bp, Homo sapiens
aggaccccgcagtgtgagctgccctcagcaacttaggtggttgatttgaaactgtgaacgtgtgatttcttcaggagactggaagtctctagaacagccttgtctatgcctatttgtgggcttttaacgtatttaagggaccacttaagacgagattagatgggctcttctggatttgttcctcatttgtcacaggtgtcttgtgattgaaaatcatgagcgaagtgaaattgcattgaatttcaagggaatttagtatgtaaatcgtgccttagaaactca

SEQ ID NO: 653592 - DNA, 620 bp, Homo sapiens
  misc_feature (5)..(5): n is a, c, g, or t
ccganattcagaggtcgcagaataacgtgctgaaaaacataaacaggggactttataaactcctggacctcagcgttacggactccagctggcccattcattactacatattttaattctaaatcggggtgcatcataaaatcacgcaaccgcacagcaaccttagaagctattgatataaaaccatttgcatccggcagatcaagagtacaataatcaacattgtatgtatcacgcaagaaatgaaccaacaacccgcttccaatgtatccattagtaggaaaaaataacaaactactcttaaacctcccaccgacactaaactgctaaccacatctaacactttgaattctagaaccgctcaaaaagcggtctcataagtccgacaatgtgctgatcgggcaaaaccatgtactacagcttattatctacctcgcgtctgccgaatcagacagccggtatagaaaacgtgcgcattaggacgcagtccgtagaatacaggtgatatccaggatcaaacaagaatcccctgtatacctatcataagtaacatcatctccccggtaagggcaggtgtaagactcttctcttgcagtgctctgataggggtgtgcttcaca

SEQ ID NO: 653593 - DNA, 303 bp, Homo sapiens
cgtcgaccagacctcgtcatcattggcgccctcatcgtggctaacaagaccctgtctccacagtatttcatttggtgggccgctccgactgcaatgatcctggatcgtgtctcggccgaggccaaggaccctggtgattccgacgccctatcctgggcacgcacgtggtgctggatcgtcgccgtgctgatggccgtcaccaccttcatgacccagcaggtgtacccactgcactaccaaaagatcctcgggggttcatcaagtaccggctggttgctcgtcagtcgcaacatgcgtcgacgc

SEQ ID NO: 653594 - DNA, 164 bp, Homo sapiens
atcaactctggagttcgaggggagggatggccaccagagatccactcggtcacccaacagttttaccaaccaccccgggttcggaactaataggaaaagactctttgtgaagaagcgagccagtgactgaaacaccctggtggaaacctgttgacagaccttgc

SEQ ID NO: 653595 - DNA, 161 bp, Homo sapiens
aatacctacctgaagaggaagaagaaggagaaagaaggaagcagaagaagaactaagaagaactaagaagaaggagaagaagaaggagaagaagaaggagagaagaactaagaagatgaaagagagagaggaaggtggggaactaaggatgaaggtaggta

SEQ ID NO: 653596 - DNA, 248 bp, Homo sapiens
  misc_feature (207)..(207): n is a, c, g, or t
ataacattaccttggtacctcagctcatgctagaccattctaatttgagcgaagctaaatcatgggtctatagatctagtttagcaaaatctccacacgatgaaatttagcttactacccctaactgttcaatgttttgggtccaatttagacaccaaaaaatgttttataatcctagacattacattaatgaactttttataaacnaagtcctgtctgggcatacccgttcgcataatgttagagat

SEQ ID NO: 653597 - DNA, 864 bp, Homo sapiens
atgatatgttttgaccgtgtggagtttcgtgtcccaacaggattgtgccgtgccctgtggtcaacactcttgattactggggccagcgccccctatgggttaacccgtcgcgcagcgtctgcttatgggtggacaaaaacgcgttataccgcggtcgtgtgtaccacgtgtatgaagccctgcgacatggccatgcagactgacggagatgatcgcggtaagggtggttcaggaaatttgcctgtaggagcagccgaaaacctagctgggttgcagcgcagcgtgagacaccgatgggcaacccgcgcccccacctgtcagatgaattagtgacacccggagcacaggcccacatgtgtggtatgcgccagaatcccgcttagaactaattttctggaccggcgggccggtgctaatatcagacgcgtggacaacatagggcgagctgtgagtgccgaaaagtaagcgctgtatgggattaattatgttagatatttagacaagctcaatagactcttgagggggacaacatcagcatttcgggaaaatagaaaggaatgctccccccaaggcaagcgcaaagcgattactgtgcagccggccccacgtggtaggagaacccgagccaccaagaaagtagggcagttataacaccagacccccagtgctgacggcccccgcccagccagtatgttcatagagggcccagcagtccacctccgcataagcgtttagtgcagcacaacaaaaccacctgtgagacatgtacaacggagccaacaccacccactgatgggggctacaataccggaaggcgctcacccaacaaatatacgccccagggcaaacccacggtccacgaca

SEQ ID NO: 653598 - DNA, 290 bp, Homo sapiens
gcggcgcccttttttttagttaaatttatcttggtacaaaatgcctttcttgctgcgcgcagtggctcatgactgtaatctcagcaccttgggaggccgaggccggcggatcgcctgaggtcgggagtcgagaccagcctgaccaacatagagaaaccccgtctctactaaaaatacaaaattagccgggcccggtggttcatgcctgtaatctcagctactcaggaggctgaggcaggagaatcgcttgaacccgggaggcggaggctgtggtgctcggcggccgcaag

SEQ ID NO: 653599 - DNA, 504 bp, Homo sapiens
acaattctaagatgggaaaaagcatggacaactgtaaggggaagaaagggatcctcacccttctccctaatgacacgctttgggcttagtcttttggggctgctataaccaaatatcctaagttgggtggcctataaacaacagaaatgtatttctcactgttctggaagctgggaagtccacgatcaaggctctggcagattcgatgactggggaggccctgttttctagttcgtacttggcaccttccagctgtgccctcacgtggtgcaaaggacaaatgagcttccttgggcctctcttacaagaggtctgtcttcatgacctaatcacctcccaaaagccccaccccctaatactatcaccatgggggttagggttttcaacatggaatttgtggggggatacaaatattgggaacatagcactttcctcatctatgatttcggtgctgtggaattggggagaaagagaacatttaggattcagggggtaagtttttgt

SEQ ID NO: 653600 - DNA, 444 bp, Homo sapiens
gcgtcgactgtttcatggcgcaactcccaagaacctagcgtgaggcaatagacacaggctaccgggcgcgccgacaggcaaaaatcacccgtctcgatagtcgctatcgatcgcctcggtcgttccgggatcgggcaccacatattccttaacgaactataaatatggaaatacgttcgtttacggaatattaaaaaacccttacaacggttctcacaccttatccactgttgcccgggcaactgttcgcccaccaacagtcgatcaacaaaacagtccgccagccagcacccggcacctcgcttaccccgccaggtgcctgcaaacaggggatctgggcgcttggtacagctcttgctgatgccctgtcactgaccctgctcgctgagcaactgtttgaaaaggaactgatcatgtctcgcgcactgaaagtcgttggtcgac

SEQ ID NO: 653601 - DNA, 150 bp, Homo sapiens
  misc_feature (30)..(30): n is a, c, g, or t
  misc_feature (49)..(49): n is a, c, g, or t
  misc_feature (89)..(89): n is a, c, g, or t
  misc_feature (132)..(132): n is a, c, g, or t
caatggcatcaccccccgccggtggctgcngctgtgcaacccggggctngccgataccatcgtggagaaaattggggaggagttcctgnctgacctgagccagctgaagaagctgctgccgctggtcagtgncgaggtgtttcatcaggg

SEQ ID NO: 653602 - DNA, 896 bp, Homo sapiens
aaatgaattaaaaatgtgaaatcgggttaaagtgatgatgataaaatagcatgcaagaaacaagctccttccatcagacttggctactgtttccttctggtacgattcgggttcggaagagcctcttgtagtccttctcttatgaggtatgtcgtgcgttatcttaatatgtctgtaagcattatggagatataattcacataccttagcaactatcagcttattttaacgggtacaagtgtctagtggtaactgagtgtattcacaaacgttgtgtaacccgtgaaacacagtcaacttgttagaagcatttcgttaccccgaaaaacgaaaccctgatacccctagaagcatgtcaacctctcagttttctcgccagagggcagcagccaaaattcttcggaggcgccttggggatggcacagcatgagtacaaccgagagttctcggtgctgataagcattatggacaagagaacgtgcggggcaggtccgcagttgtgatgacgggaaagaagggtaaccaaacgtacaacgcggggactaacaggggggaccgcggaccattgcaccaaagcacccggataaccccggatcaacaggcacggccgagcaatacaggaggcgataccgccaagcgcaactgccagaacacgagtgggcaagttcggccgcagggggaagaacaggggggcagaaagtgggaaggggggagacaagtgcagaaccgagggggtagggcccgtggacaaggggacggaccagcgacacgggaggccacggtcacaccgaaggggtacgtgacacgccgcggcgaagggcagacaaggggcgggcgggtccaacaatcgacaagcggacaaagagggccaacacacgatgaagcgaggcgtaaag

SEQ ID NO: 653603 - DNA, 388 bp, Homo sapiens
tcccccgccccgccaacatccgtcacctcacgcgatagcgcccggcaccttagcctcctctccaggaaagcggacgccttttccgacctgggacagccgcgtgatgcccggatccccaatcaaaggcgccttggaccttcaggatcaccccggtctttctcagaacttcatgagtcccaggtgctagactcatgtctcgcggatggcctttcccgtgcctggtctttcttgtcttaaatggagttggacctctaataggcccttctaagttctcaaggtagctacccaggttagtggtactactatcagtaggtggagcgtttagaagggtagttggggcgaggagtgaacttcgggaatgacttctaggtcaggtcttcgctgattc

SEQ ID NO: 653604 - DNA, 256 bp, Homo sapiens
agtggttggtgtttactggaatcttgttttttttttttcggtttttttgactactcggggggttttccttttttacaggaactaaatcaacaaactttttcgattcctcaactttagatttttattttttttgattaccatttacttttcttcatttaaaacttttaacgcctcagcctttttcttaggccaaggccttccaccaaggatttactccgggacggatctaactggattttccgaggtgggtttaaga

SEQ ID NO: 653605 - DNA, 287 bp, Homo sapiens
tgttatctatcttgatcttgtcattgctgtcttccattttccatgatagtcttgagtatattaagtcatagttattttgagattccttgtgagatagttacaacatctgtgtcttatctgtcttctgatgatagctttatctcttccaagtgtgttcttttcttgcctttttgtatgtctcataattttttattgaaaactgcgcatcatgcataggacatagatactgtcttggagatcagcctgcctttcattctgctaggccatgtgggattttgtgttcccct

SEQ ID NO: 653606 - DNA, 196 bp, Homo sapiens
  misc_feature (56)..(56): n is a, c, g, or t
  misc_feature (95)..(95): n is a, c, g, or t
tcgaattcaagctttctaacgcatgtacgggggacatgctagttggtagatattcnctggagtccagctttaaggcttgtcaaagtaagccaatngtttctcttttgggcccctatacaaaggcacagaaggaaagaatcaagattcatacaatattaatggtgaaaacactgtagtaataaattttcatatgcca

SEQ ID NO: 653607 - DNA, 421 bp, Homo sapiens
  misc_feature (14)..(14): n is a, c, g, or t
  misc_feature (28)..(28): n is a, c, g, or t
  misc_feature (47)..(47): n is a, c, g, or t
  misc_feature (89)..(89): n is a, c, g, or t
  misc_feature (148)..(148): n is a, c, g, or t
  misc_feature (257)..(257): n is a, c, g, or t
  misc_feature (274)..(274): n is a, c, g, or t
  misc_feature (280)..(280): n is a, c, g, or t
  misc_feature (292)..(292): n is a, c, g, or t
  misc_feature (304)..(304): n is a, c, g, or t
  misc_feature (327)..(327): n is a, c, g, or t
  misc_feature (335)..(335): n is a, c, g, or t
  misc_feature (367)..(367): n is a, c, g, or t
tattggcccaggcnggtctcgaactccntgaccctgtgatccacccncctcagcctccccaaagtgctgggattaacaggcatcagccnatcacgcccggctgggatttttaaattgggtgaattaacatactcattcaacgttggcnagttttggccagatgccatacgcacgcctgtaatctcgacatttgggaaagccaagaagggaggatcacttgaggccaagagttcgagactagcctgggcaacataacnagaccccaactctatgnaaaacnaaaataaataanattagtcaggcntagaggcctatacctgtagtacnacctatgnaggtagatcatttgagcccaagaattcgaggntgcagtgagttatgatcatgccattgcatgctagcctgggtgacagagtgagac

SEQ ID NO: 653608 - DNA, 171 bp, Homo sapiens
gctgtctgcctctccaggcttgtcggacatccttctggctgggcctgtgcggaaacttgaggctgaaatcagtgagctgcatgcacttgaccggcatggcctgtcatccatcacttgagtgcacggtccactcgaccacaagccctgattctgctcaactactcactgtac

SEQ ID NO: 653609 - DNA, 795 bp, Homo sapiens
ctaggcagtgaatgccccttcatgaaaaaggaggaagcgctcccccaatgagcgggctctgtgccccgtgggacctggctcctcctgggccgtctcggcctgaacgtgtgtggctggacaagtcacttttcagaccagtgcatgagagctcctacctgccagagagctggcagatgtggcttgccagcgcatggctggcctccgtgccgttggccccgttgtgggtctcgtgcaccctagtggaagccaggtggtctgccaccactgtgacctgggggatctggggtcaacaagtcctccttcgatcaggctgacgcggtgccttcgtggagttggtcctcagggccgctgtttgcatcggtacctccgatggtgcaagctccgcgaggcatgtggtgactcccaacatcaggccagcaagtgtggcctgtcccctgagctgtggccaggcagtcgcaagcccacctggtcggatggcgctagcccccgctgggcagtgctgcaggcactggtggttcgggaggtgtggctggagaagtccccggtatgatgctatgccgacgagtgggcttctacgaggccctgtttgacggccatcccccagtgaagtgtcgcctgcaagagcgagccgggctggcctgagggttcccggcggggcggaagaccggcggggcgcaacatcttagggaacaaggcggggcggctgggacggccgatggggaggccctttgcttgccctatgtacttctgcgaagagtcaaggcccctgtacagagctgctaaaaagccagtgcg

SEQ ID NO: 653610 - DNA, 403 bp, Homo sapiens
tatctgagtgcacacttctcttcagcagacagcactggcagtttgagtctgtccatcctgcagcacagctctgataggaactgggcagtcaccaggccctgatcatttcgctaagagagcagatagagttcctgacctccaggccagtcctgatccctgacctaatgttatcgcggaatgatggtaagtaaagtgtctcttgcatctgcatagagagggtcctgggagcttaggaagtgatggggaacagtgatgtatgcagctcatgactaggtggacaggcctctggggacagctggtacaggagggaaagggacctcacgggaggcccagaaacctggtaagaggtgaggtattaaggtctgggatggagaagctctgagggtatatttttctgcctcta

SEQ ID NO: 653611 - DNA, 572 bp, Homo sapiens
tggaggcactaggagtggatgtgtttattttagcatcttatgtggcacctgatatatatgccagcgggtgtcctaagcactttacagatattagctcaggtaatccactcagcttttacagatgaggaaactgaggcagagagagactaaagcatttgcctcacgtcacacagtgagtgatagcagagccaggatgcagagtctgccttcgagtccctgctgttaagtgctgtctttctgctgggactgccaggttcttgccattttgacaagtattataaccaactgggtctctgtttcctcctcataaaatggagagaataatattaactgtcgagtggtcactttgagaagtgtgaagggctccgcagacagaaggaccacttcttatctgatcatgttcccagctggggttggtttgtctccgtttcctcatccgcccacagttagcaggctctggcagctcttattgccttgtaggaccagtgagttcccaaggagatttctggacccctttccccatggcaaccttctcatgttcaacccctgacacaacccctgccaaacctcta

SEQ ID NO: 653612 - DNA, 442 bp, Homo sapiens
  misc_feature (6)..(6): n is a, c, g, or t
  misc_feature (139)..(139): n is a, c, g, or t
  misc_feature (151)..(152): n is a, c, g, or t
  misc_feature (167)..(167): n is a, c, g, or t
  misc_feature (195)..(195): n is a, c, g, or t
  misc_feature (205)..(206): n is a, c, g, or t
  misc_feature (262)..(262): n is a, c, g, or t
  misc_feature (281)..(281): n is a, c, g, or t
  misc_feature (291)..(291): n is a, c, g, or t
  misc_feature (338)..(338): n is a, c, g, or t
  misc_feature (419)..(419): n is a, c, g, or t
ttctcnggttattttctgtttggacccctgggccacaggagtggggtggggttggggcttgggagagtgcaatgtggctttttggtatgatttgttttattgcttgcccgctcagcacgctcctgttactcctaacaangtttgagatttnngcccttaaacctgtnggtttcaccatcagtttttctttttttncttttttttnntttttttgcataggcattactaggggcataaatgggcgactggcatagaaagtggngaggagccgaagccaaggnattgctttanacacaagatgaaaatactctggtcggtccaaagcatcacctattggnggggggcatctcacttagctgtggagaagtcctctggaattagatctcagagagacggctgttaggaccggggaacctttnggcagggggcgaattgccgtttc

SEQ ID NO: 653613 - DNA, 686 bp, Homo sapiens
gccgcatatctgcgcgagggttcccttgggcgatttttctcgagctcactttatcatacctaatacctcgagggctactgtatcaccggacctagcatggtctcgcgccatggttctcagcgatgctgacgtgcggaagctgatgcgcatgtgatggctttcattgaacaagaagccattgagaaagccgaagaaaataggatgcgaaggcagatagagagagttcaatcatagagaaaaggtcgggttgtggaagagccagatcgactagaagatgagtggaatgtaatgatgaggactgagaagagaaaggtgagtggagctgcgaaacgaaaattcagagtgtccgagtgtgactgagtgcaagcggagggtcaaaggtcctcaagagcaagagatgagcttatcgacagacctactaaactgaggcaaagcagagactcagccaaggtggtacaagatgagcaagcaggtaccaaggtgctgctggatggagcgggttctccaggggtagtggcagtgtggtggagcgtccgaagtgattgtgcgttgcaggaaacaagattggcctctggtaatgggatggagtgacagaagggaatgcctatgtagcaataattggcaccgaaaagagatgttgatgtgcaaattgatcaggagtctagctgctgaagacatagctgggg

SEQ ID NO: 653614 - DNA, 1269 bp, Homo sapiens
  misc_feature (396)..(396): n is a, c, g, or t
  misc_feature (535)..(536): n is a, c, g, or t
gcgccgattccgtcctccttggtcagccgacgtccttggctggcgtcagaaagatggctactaacttcctatcacatgagaacgatctacgttcgacaagttcaaatatgagcagacgcagaaaggagattctacgtagctatgatgaagcggtgcctgtgtccaggtgcctcccgaccgagtgatgaacggcagtccagcgtgatcctccgtgcatcattgccgcagatgctcatagagaacatccagaaatccctggtttggaagctcaggccccgggggctccagcggcaaccagcggagaccacggtgagctcgtcgtccggatggccagtctggaagtggagaaccagagtctgctgtggcgtggtacaggagctgcagcaggccatctcnaagctggaggcccggctgaacgtgctggagaagagctcgcctggccaccgggcacggcccacagacccagcacgtatctccatgcgccaagtggagccccagccaagaagcagcacaccagcagaggatgacgaggatnntgacattgacctgtttggcagtgacaatgaggaggacggacaatgaggcggcacagcttgcgggaggagcggctacggcaggtaccgcggacgacagaggccatgaagactagcgctggtgagcaagtcctccatcctgctggatgtcaagccttgggatgatgcagacggacattggtcagtggaggcctgttgtgcgctctatccaaggcttggaccggggcttggcctgggggggctaccaaagcttggttgcccggtggggcctaccggaatccgagaaggctacccgcattcacagtgtgctggtggacggacgacacacggtgggcgaccacacatttgccttggacgtgaagtatgaatccccaaggttagagagacacacgtgagaagtgtccaaccttgcgcacgatttgacaacgcagcgattcggaagagccctgcagacgtgttcggtacgtttacccacggtggactaagcggccctggccatgcaataaccgaaaatggacaacgggcacaacgagagaaacaacacgaagaacacaacacagagctgccggagaaatgacataatgcgtgagggaccagagagacaagcagagatcgatgagtgcagtgatcaccaacgcgtgactgagcaccgcagatgatgtgaccacagagggaaacaatcagcgcgacaccaactagatcacatgtatacatgagccgagcagcaccaacgggt

SEQ ID NO: 653615 - DNA, 185 bp, Homo sapiens
ttacatcctaaccagttcagccgaagagtatcgtagcacaagcataacttggtttgattgaaagcctgggatcaaacgctcagctgagcctccaagcttctcgggatgtttgccttccccaagcttggcacagtccttgtctagcagtacttcagctgtgagtttggagaaacgtatcgatcatc

SEQ ID NO: 653616 - DNA, 156 bp, Homo sapiens
tgttcttttcttctaatatcgtctacagaggtttagtacgacctatttccttttgacaccaaagcgacgtcaaatacaagccgttgtcgtgtcttaaattggctgtacttgtgagtataggtagttcacgtgtttcttttctcactactcctcctc

SEQ ID NO: 653617 - DNA, 260 bp, Homo sapiens
acggcagaagctgtctgcataaagctcaggagttctactattcaaaggaagaacagggaatggagactggtggaaagctagcagtggtctttaaaacactaaatatggggacactgaggcaggagaatcgcttgaacctgggaggcagaggtggcagtgagcccaaatctcaccattgcactccagcccgggcaacaagagtgaaactccatctcaaaaaaacaaacaaacaaacaaacacactaaatacggccaggtgc

SEQ ID NO: 653618 - DNA, 196 bp, Homo sapiens
caagtacttcctcacgcaagcaagcggcgtccattagtcctgctagattagctatcctcttcaacaagtatactctccggacaatgaagcataaccaatactaccaatcaatactcatcattgataatcataatggctatagcaataaaagctcaggaatagccccctgtcacttctgagtcccacttcttaccac

SEQ ID NO: 653619 - DNA, 133 bp, Homo sapiens
gactatagaggatcccagcgcagataaggccaaatacctcacaagaaaaccaggcagccagctgtggaggctgttaagatgctggatgatgatcctcctgcagactgagctgcctcatgtgccctgtgtgact

SEQ ID NO: 653620 - DNA, 167 bp, Homo sapiens
accacgagacatactgcctacggaaaacatagtaggaagaggggagcacctagaacctcagcagcgggatggacgtgggagggatgccgaccggctaatgacttgagcagtgttatggccagtgggtccagggtgggccacaagaagctgatacctttagggtggta

SEQ ID NO: 653621 - DNA, 109 bp, Homo sapiens
ccagaaatggaggctcaagtcctaggttcaatagaacttagagtgtgatttttttaaaaaataggttgttgatattaattgatgctgacaagtggtcatcgaactcata

SEQ ID NO: 653622 - DNA, 316 bp, Homo sapiens
ccgggattaccctccaccacacccggctaatttttgtatttttagtagaggtggggtttcgccatattgaccaaggtggtcttgaactcctgacctcaggagtcccgcctcggcctctcgaagtgctgagattacaggcgtgagctaccctgcccaggctgaccatgtatattcctaatttttgtactttttttttttttggagacggagatccacttttgggccccaagctgaagggcaatgccttgatctgggttaattgcaacctttgcctcttgggttaaagcaattctcctgcctgggcctcccgagtagc

SEQ ID NO: 653623 - DNA, 186 bp, Homo sapiens
agagggggtttctccatgttggtcaggctgatctcgaactcccgacctcaggtaatctgcccgccttggcctgccaaagtgcttttgttactgaaaaaaatcataatttgacacagtgagagcctgcagcgctagtttattagatattctgatttgggctaagagcaatatacaacccagtaacat

SEQ ID NO: 653624 - DNA, 739 bp, Homo sapiens
gaagaggaaggaatcgaaccccgctggagcttggttacagagcgcaaccccatggctccatgagtttttcaaaaaaaaaaaaaagaaaaaaaaaaaaaaacaaacaaaaagaaagaaaaaaagacaagcaaaagaaaaaaataataattaaagatataaataataagagggagtgatgtgtgtacataagaaagacctggtgttacaggaggtaataacaattgagtatacttatacgaagtactttatattttagatagaagggagtgatgagttaatattagaagtgtagtattataatataattacagagtgagtagaagattaataaagtaaataaaggaggagggaaatagatgaaatggaaggtgttagtattattgtatgaaggtgagagaggatatgtaggaggaggaagtagaaaagggatgaaggagagagaataattagataagaagtggaggtaatagggagattgtgagaagagatgataaattagtgaatgataggttagagagagttagtatgtttagatgatatgaagtagatagatgaatggatgtagtttgtgtatgtgatgatggtatcagtaattatgaatgtggttgtgagagagtggtgatgggtagatatggtaagtagagagataaatgatagaatgcgggggggtgataaatgaataatataaatagtagggtgatgttataaattatagatgaggactaggtattaaaggggc

SEQ ID NO: 653625 - DNA, 235 bp, Homo sapiens
aaaaaaaaaaaaaaaaaaaaattgcttttgttcctctgtgtacacagctgtcttcctgcactcctgtgtgtccatccttgggcagaatcagtacagccaagcactaaaggcgaacctctatatagctatcggtgggtgccccagactatcttcgcccctcttgtgcccctatctcagtctgtcctagacagtccatgggtcaatccctgccaccggccccttctgtcgtcttctc

SEQ ID NO: 653626 - DNA, 635 bp, Homo sapiens
  misc_feature (48)..(48): n is a, c, g, or t
  misc_feature (109)..(109): n is a, c, g, or t
  misc_feature (115)..(115): n is a, c, g, or t
  misc_feature (585)..(585): n is a, c, g, or t
aaactccggtttgcttgtttgcacaatgacgacacaaaaacactgtgnggttggacggagctcgcgtctcgaagtgtttctaagatgctattttcagcaggtcactatnaacgcnttctactctgaagcacacaggggctggggctggccttcggagttacgaggaaacgaggaccaggaccagggattctgcatcagcacagccgccaggagccggccggggccccatccctgacactgctgtcgcccggctgtacctgggtgctgtgtccgcggggcgtctggagacgtcgatgtggtcatagcagggcctggaacggggaggtctggcctgaactagagaaatgaggggcgtatccgcttctccaccctggcctcagatgaagaggctctgggggcaggagggagtcagacacgtgcagggcaggcggcctgtgcagggcccaaccctccggcaccagaacctgacctcctcagaggcccccaccatggagggatgtctgggggatgctgtgcgctgccgctacgatgtttggttagagattaaagccatttcagaagtgacacctgcccatgtgatgcaangggctggacccggtctgtggcgatactccgccgggtatacagctcggatt

SEQ ID NO: 653627 - DNA, 563 bp, Homo sapiens
  misc_feature (48)..(48): n is a, c, g, or t
  misc_feature (109)..(109): n is a, c, g, or t
  misc_feature (115)..(115): n is a, c, g, or t
aaactccggtttgcttgtttgcacaatgacgacacaaaaacactgtgnggttggacggagctcgcgtctcgaagtgtttctaagatgctattttcagcaggtcactatnaacgcnttctactctgaagcacacaggggctggggctggccttcggagttacgaggaaacgaggaccaggaccagggattctgcatcagcacagccgccaggagccggccggggccccatccctgacactgctgtcgcccggctgtacctgggtgctgtgtccgcggggcgtctggagacgtcgatgtggtcatagcagggcctggaacggggaggtctggcctgaactagagaaatgaggggcgtatccgcttctccaccctggcctcagatgaagaggctctgggggcaggagggagtcagacacgtgcagggcaggcggcctgtgcagggcccaaccctccggcaccagaacctgacctcctcagaggcccccaccatggagggatgtctgggggatgctgtgcgctgccgctacgatgtttggttagagattaaagccatttcagaagtg

SEQ ID NO: 653628 - DNA, 302 bp, Homo sapiens
ccggtaccggttgacgtggcttgtgggttgaccgcggcttactgcttgtatctcagcactttggaaggcgaggcgggaggatcacgaggtcaggagatcaagaccatcctggctaacacggtgaaaccccgtctctactaaaaatacaaaaaattagccaagcatggtggcaggcgcctgtagtcccagctactcaggaggctgaggcgggagaatggcatgaacctgggaggcagagcttgcagtgagccgagatcgtgccactgcactccagcctgggtgacagagcgagactccgtctc

SEQ ID NO: 653629 - DNA, 1023 bp, Homo sapiens
  misc_feature (334)..(334): n is a, c, g, or t
gaactatcactgtatgatggcgctgccataaatcaccgagcatcatccggcttcaacagagccggcagatgatatgcctaatggaaagcctcgactcgtgcacagatactgggcgaggcttcttcatggacagagctcggtgaatattccatgttgatacagagtgccatataggcttcaagtctgcctcactcttgttgggaaatgaactaagggacattacagaggcctgttgagccttctgccgtctccgacggtatgcagcgggaatgtctcagagcgctgtgagagagatagttatatcgaatgcacagaggtgaaactctgtcccttnaagtaagacatgccagtctggtgtggatattctctagaatacaattgacgctgtacaggggtcgcgggtccactggttgactccctctgcagggcatctggcataatgcgcttggcggagactccaaccttgtggtccatccaggtctcatctagcgagaaacgtcgtcgtaatcgtcctctcggatacctcctttgtattaccacacaaattccaccaggccactggaccgcaagctctcctctccatacacccagccgaatgtaccttggggtgctgaggcagggggtttagcccagcatgcacccaattgcatacccccaggagtgcgcattgtgtggggacgaagctccttgcctgtcaaaccctaagacattctgtacacgcactcaggaattcgggagggacaacgctgtcagggttccacatggcttaccctttcggggagcttgatcctagtgaccttccttgggggttgcactaatactcacggttacactcagcctccaatccggggtttttcccaaggggttcccactcttactccagtctcccccttgttggcctagcaagttcaactaggaagagttttcccaaagattcggttgtcggattcggattctggccccaaccaagcactggagaacgctggaaacttccacaagcacccattcccgccgaacgcgccc

SEQ ID NO: 653630 - DNA, 90 bp, Homo sapiens
ggatttgctggtgcagtacaactaggcttaatagggagctcgaattcgactcgaattcgagcctcgaattcgaggctcgaattcgagaaa

SEQ ID NO: 653631 - DNA, 315 bp, Homo sapiens
acctagtagaagaaaagtgtaggttatatgcactacgaaaaggaccaacgttgtaggcccctacggctactccaacccatcgcgatgcctaaaatattcaccaaagaaccctacgacacgcacatcctcaatctccatgttcattattgcagcaatcctagccttatccctagcactaacaatatgagttccactaacaaatacctaccctctaatcaacataaatctaggagtactattcatgctagccatgtcaagcctagcagtctactctatcctatgatcaggatgagcatccaactcaaaatacgcact

SEQ ID NO: 653632 - DNA, 1165 bp, Homo sapiens
agcgggcactctgggtagcacagagagctcagggtagcctgcctagatggcggcgcgcacctgggccgcggcgtcgtggaggctgctggtgccaccctgctgagggctctctgtggggcagccctgctgcgggacgactgtgctggggttgatgctgcgcctgctgacaagtgggtggactcttgtggaaccctcgtggtgcatgcgcatccccggcagttgcaatggcagcaagcatgtcacaagcccaatgctcggtatcccctgctgactgagttgcaacaggggcaagccccagtggaatgcacaggaactgccttcttggggaggggccttcttggcgcaggctgggaactaactccatccgttgttgggaacgacccacgcccttaaactaacaactcggttctttgggagaccttgggagaacgtttccaagccaccttggcgcaaaggaattccgaggctttgtgtttccctttgtggtgaagtggcccaacgtaaaacaacttgatcagtccgttgggtcaaaagcgttggcgttatggtggacccccaagtcaatttgttctccggcgaaacggtatccccccccggaaaagaaaagcgggttttggcctttggtgactacgtgtggaggaaggcgtcagaatgttgaagcacctgttgggaaagcgtgggaactgtgttgtagggcgtaattcaaccccttaaccgaggaggtgaaagaccgtaacctgtggacgaaccccaacgtcttgacacatgtcagccttgttgcccaacaacgtaaccaggccattgcaaaaggaagtgtgtgccattgggtgatgtctttaccctaacaccaggatgtgtggagagacccccctggattgggttatggcacgaaattcatttaactaatttatgccgcacatggtaggatccccccgccaatttttggtgggcgcttttaggtacggcggaacaggcgaaagtatggactgtgggacccttagattcgccgaagctggaaaatcccagagaagaaagctattatgatgcgcacacaaacaagtagtacgaagttcatgttatgcttagcgttgggacggttatctcaacgtattggcgagagaagttccccattctagcgcgtatttatggacaagtggatatacag

SEQ ID NO: 653633 - DNA, 158 bp, Homo sapiens
tatactaaaaactataaaatagacaggtgtggtagcacaatgcctgtaatcccagctactcgggaaagctgagagacaggagaaccgcttgaacctgggaggtagaggctgcagagttagaaggtacagaattcctagaagcacctatagggggtaag

SEQ ID NO: 653634 - DNA, 137 bp, Homo sapiens
ggaggttgaggcttcagtgagccgtgattgtgcaactgcactccagcctgggtgacagagcgagactctatctccaaaaaaaaagagagtgttcagcagtggactgaccacttagaaaatagatcctcactcaccag

SEQ ID NO: 653635 - DNA, 380 bp, Homo sapiens
ggtcttgcatatcatacattctctctatgatacttgaggtaccagcttgtatttaattctgattcattatccctaaagtagcgtcattaaggatacttagcattaaggacctaagcccaccatagttcgaatccaagactaaagcgtactcgaatgattaaagggtctggtagagaataggaagcagtgctgttgggcacggctagctgttgtcacgcattgtatgcaatgaatttgtctccttctgatctatatgttcatgccagcccatgtactaggcatttcgaatactccaagtaagattttacaccttgccatgtggctgggtattctgatgagcagtgccaatgaattgactatgtccagtcactttccagtat

SEQ ID NO: 653636 - DNA, 636 bp, Homo sapiens
gccgagcctggagatgagggggagccggggcgttcggtgactggagcttgaacgcacgaagtagcctcccggctgtcgggatctcgtcctcccagtacaccctgacacagcctgtcccatgagccatgtgagtcgtgcaggaggtcatcagcgacctgcatggttacagaggtgtggaccgacgatgctgcatgcatgcagggtgctgcgaacgacctcgttcttcgcaagctccatgtggcatgaaatgcgctgttcttccaccttggaggagctgcagaacgatcttcgcccagatctggacggagcatcatcgaggtgtcgattcccatgttcctcgaatcgcctgtatgaagcggaggcaggagagttggctacctcagtcgaggagatcgagagcacgtgctgcttggcccgtgtttggatggttgcttgaggtgctcctgggttccatgaacatctcctccctgtttctgcagcgcgccatgtcatttgccttagagcagctcaaagcacaagctaacgcaaggatccctcgtgttctgtgccttcgctgcaggaagctgagagccgcccgctggttgccgcctgctgcagtctgaaggacatgatccccactggagatgcagcggctga

SEQ ID NO: 653637 - DNA, 102 bp, Homo sapiens
  misc_feature (16)..(16): n is a, c, g, or t
tcaagaagaccgtgtntcaatgcaatcctgcacattttggctgtgaaggccaaatgcaggttatttgacttttgggaaactcagtctcctcctctgagaatg

SEQ ID NO: 653638 - DNA, 820 bp, Homo sapiens
aaacacacacaaaagaaaaagactttttttttttgccaaggccagtgttgctgcctaaaaaaaaaaaaaaaaaaaaaaaaaaaaatatgctataaaagggggaaaagctcccttttaaatgggccccaagttttgaagtctcccttttttttgggctccgtgttagtggtttggttttctacttgttttggtttgttgcaacaatgtgtataacgggggtttgctcgcggggcgagtgggggtgatttttgtgtttgcacatcttgtggtcaggggcgacaaatgtgttttgggcttgtgtctttcttatcttgacccctggacatgtgtgttgtgcgattctcaccccgtgtgtttgtgttttgtgtgtttgtgcgcgcttatattgtgatgtgcccgcggaagtgctcttttgtgaaccgagttagaacgcccgaaatgtgtcttagacaccctgttgtggggaaattctgtgcctcgtgtgtgtgtccccccttatatatccattttccgtggtgagttttacaccagaagaccgccggtgcttaatagtgtgtcgcgctctgtgagggagcccttttaagtgaaccactgtgtgtgtcacaataaaatctctccaatgtgtgcaatcttttttctcaaaacaaacacaaaaacaacaacacaataaacaacaaaaaaaacaacaatacaaaaaaagagggcgcggcgcgcgccctctataaatatatttctccccacagggggggccacccccacctcattatctgctctctctcccccgctcttcttcttgtctaaccaaagggtagctccacaa

SEQ ID NO: 653639 - DNA, 898 bp, Homo sapiens
caaggggtggctcacgcctataatcccagcacttgtgtgaggccgaggcgggtggattccctaaggtcaggagttcaagaccagcctgcagcatagtgaaacccatctctactaaaaatacaaaaattagccaggcgcagtggcacaaccctgtaatcccagctcactcgggaggctgagggaggagaatggcttgagccgggagcacagagtgttggcagtgagtcaagatcatgccactgactcccagccttggccaaacagagcgagattgtcccccccccaaaaaaaacaaacagggagagagactgggctttcaaaggagggcccaagaattacggggttgaacttaaaacatggtttggctggggtggcaatttgggtgggcatcaaaaacttgtaattccacagactttgtggaagggcaagaagagggagttgtggatcacccttgaaggctcaaaaaaggttcggaaaatcaggcttggaccgcggacaatatgtgggaaacccttgttttttaaactaaaaaattaacaaaaaatttaagtgggcaaatggggtggggggcaccctttgttatttgcaaggttccttccaaagaagattgggagggcacgggacggaacttggctgggaaaccccacaggtggggttgggagggttgcgcagggacgccaacaggtggggcgccacatgtggcactccaagcacttgggcacacgggagggtgacaactccgtgtcgtcaaaaacaaaataactacatatcacaccacacacaccagtgttgcgcccgcctgcccctaggaaaaacttttcgtacaacccactgtgtggggggcgcgaccagaggtgagagacacgggggccaacgcgtcacgaaaacaccgtgcaag

SEQ ID NO: 653640 - DNA, 960 bp, Homo sapiens
tcactcatacacgctttgctccttacattgtcgaaacgcgtcactagaatagtcaacaagtttctgccaatatatgtgtcccgcccctttaaacacaaacttttttctcctcccctccccctctcccctctcccttggaacccccgggcacaaattgttacagaaccacttagccgcctaaaatgtccacacacaaccgcgttccccgcggcttactactaataccctctccccccaccagtatattaaaccccctgtatacagagaaccctctggggaaccacccctgtccccgctttaattttcgaactcggccccacagaggtcacattcttcgggtacccctgccccataaggtttggagcgctcacacctggcggagaagagaacacccttgggccccaaaggcgcgcaaacctttccaatgcctcacacgtgctggggtaataatatgctccgcaccacccgcatgtgtgctgatatcttgcccggcctcggcccgactttcggagaacccgaggcgaggcacgtctcacccccagagaagcgagatggtgatatttgttgggataacccccccggtaagcacaaaaggacgcccactagtagggttctttatgccacgagggtgcccccctcctgcactttgctctcggaagttttctgtgctgcccggcctcccctcggctctcccccacaaggtgatgtcgcttggttgcgagatttttaaggatcacatatatgcgtaatagctaccacggagcgcccattatgtgggtggcaggagtccactttccacccgggttctagcagaggcactgagccaccccgcaacaatggagagtgggtgcccaccacggcgaacccccgccccccgcggggggccccgccccacccccgaaagggggcctttccaggaaaaccccccagggacaaaacaaaaaaaacagaacaaaaaaa

SEQ ID NO: 653641 - DNA, 331 bp, Homo sapiens
tcttcatgaggttcctcccaagaattggtcattcattgcagcagcactcgaagcgtcacgctaggcaataccgccgtcgacgcgcaccagagatcccgtggtgaagctcgacttgctcgacgcaagatagagcgccgccgtcacgatctcctccggctggccgctgcgcttcaacgcggccgtcggattgagcttgtgctcctcgctccaggccttggagacgtcggtcaggaagcggcccggcgaaatcgtgttcacccgcaccttgggaccgtactcgaaagcaaacgcctcggtcagcgcgttgagtgccgccttggcgccggcataa

SEQ ID NO: 653642 - DNA, 687 bp, Homo sapiens
ggcgccgcatcccatcgacagttcggatcatatcgccatatcggcgagactcgactcgcaaacggagatcagttctcacataatgacatcagggtatagtacaacatgtctgtagccgtgaggcacattaggagatagctgctcttgaccactgacaatacgagtgacatgtcagattccatagatcagtgatagactagatagctagatagatatgagaagatcgtgagggaccgcaatggagctgtacttctatttgcggacttattggaagaccttgctatggactaacacacgactggcccacgttaccaccacttcacctcagctgacagcctgccagccctcggagctgtgacacctacttgactgcatctgcttgataaataagaagaaccagctggtacctgtaacataaaagaacagcaagaatacagaaacaaagcaaatcatgattcagaatgtcacaatcatcttggatctttgcacttgcatcacaatgttggggatctttttatcttcatgtaaagaagccctggctagcctaatgtaggaaccacctgcagcagaaacaagccatcccaacggaggagccctaatgccaaacaagaaagtggcaaccatcctaaactcttcagccccaagcaaatcaccagccccagtcacatcaccagctgatggtagaaa

SEQ ID NO: 653643 - DNA, 902 bp, Homo sapiens
  misc_feature (24)..(24): n is a, c, g, or t
  misc_feature (125)..(125): n is a, c, g, or t
  misc_feature (178)..(179): n is a, c, g, or t
  misc_feature (186)..(186): n is a, c, g, or t
  misc_feature (188)..(188): n is a, c, g, or t
  misc_feature (221)..(221): n is a, c, g, or t
  misc_feature (257)..(259): n is a, c, g, or t
  misc_feature (264)..(264): n is a, c, g, or t
  misc_feature (273)..(273): n is a, c, g, or t
  misc_feature (280)..(280): n is a, c, g, or t
  misc_feature (289)..(290): n is a, c, g, or t
  misc_feature (294)..(294): n is a, c, g, or t
  misc_feature (298)..(298): n is a, c, g, or t
  misc_feature (311)..(311): n is a, c, g, or t
  misc_feature (327)..(327): n is a, c, g, or t
  misc_feature (342)..(342): n is a, c, g, or t
  misc_feature (352)..(352): n is a, c, g, or t
  misc_feature (360)..(360): n is a, c, g, or t
  misc_feature (366)..(366): n is a, c, g, or t
  misc_feature (416)..(416): n is a, c, g, or t
  misc_feature (477)..(477): n is a, c, g, or t
  misc_feature (538)..(538): n is a, c, g, or t
  misc_feature (540)..(540): n is a, c, g, or t
  misc_feature (543)..(543): n is a, c, g, or t
  misc_feature (567)..(567): n is a, c, g, or t
  misc_feature (570)..(570): n is a, c, g, or t
  misc_feature (575)..(575): n is a, c, g, or t
  misc_feature (738)..(738): n is a, c, g, or t
  misc_feature (855)..(855): n is a, c, g, or t
gaaaaaaagaaataaaatttatgngctaaaaaagccaaaacaaaaataaaaaaagggaaaaggttataaaaataaatatggatcccagtattaaaagttgaacagagaatgtgatttttaaattnttaggggatgataaagttgtgtagaaagtgaacacttacaaattatttaaaanntggaatnantgagcagaaattaaacagttggatgatgggggngggggggagggggggtatgggggggggggggggggnnntgggnggggggcangggtttntgagggggnngggngggnttgattagataangggggggggtaatagnggggggggggggagngatagtaacntgggtacnagaggngggttccactgggttgggaattttgatgtgggccccggaaatctgggggntttcattaatgttggggggttggcgcgggattatggagggaattaagttatttggaatggngagttgatgggtggtttgagtagatggatccaaacttgcccaatagcctttcacctctggngnggnggggtgaattggggggaatggggnggngcggnggataatgggaaagtgagaatgttgtcttgccacctggttcagcttggccagatcgagcggagaaatggtgtgttgtccttgaatcgagtaggcatctagaggtggtccctccaggtcatgggtggcatgggggtagcccgcagcgtcgctgacccgatcttngccgcccgcgcagatgactggggagctggccggcatgggctggtacggaatggtcatgactctcccttgcggagactgggagagcgtctccagcatgaccaggcaaatctgcttganacactcggtgacagactgcggacccagcgatggtgatggccgctcgt

SEQ ID NO: 653644 - DNA, 154 bp, Homo sapiens
gggcctctgctggggtggcagccgggcgacaggcggaggatgtatgccgccaacgtccgaccagccgtcgtgcctgagcaccaacgccgctgctcgcctcctcaggcgccgccggtccctgcgcctcaaccgcagcagtcgccggcgccacggc

SEQ ID NO: 653645 - DNA, 269 bp, Homo sapiens
ctacagatgcttatcgtgcacgaatgtcgcgcaatgcagtagttgactggtgctctgcacgccacggggctcttgtggaatctcggcgcagcgtaaggagcatccagcatgacctctttgtctgggaacacccggtcgacagcccagtgcccagggcctcgtcagccaccatcttgcgggcggtgaaggccagctcgttgaccaggctctgtttcccgatgaccttgggcaggcgctgcaggtgttcctacatctgcaaggaacccacg

SEQ ID NO: 653646 - DNA, 277 bp, Homo sapiens
atgtagccccagagaaccctctcaacatccccttgtaaaatcaaatagccgagtccaccagaggccacagctcattggacaacaaggaaacaaccttgtagagagagtacaaaaatacaacggggcatagtaggcctaaacagcagacaccaattaagacagcgttcaagctcaacacccactaactaaaaaatcccaaacatataactgaactcctcacacccaattggaccaatctatcaccctatagaagaactaatgttagtattgtatacag

SEQ ID NO: 653647 - DNA, 1066 bp, Homo sapiens
ctaatttacaagaacaccgcggcctgaggcctggagagtcccttcaacccggtgaggcgtgcggctgcatgggagccgagacggctgcctattgccctccagcctggtgcaaaaagagctgaaactccgtctcagaataaaaaaataaaacttggctctgaaaccgggaatgctgcgcggatggcggccaaggtgccctcttctttcttcccgtgccgtgtgtcccggaagggttacccctaccagagggcgccccgggactcccggcaaggcgggaggagaagagggcgggagactgatgccgaggggccgggaggctcaaagggcccttggtgggccggctcgtggctctcccggcacatcggcaagggcgcggggcggcgtggaccctgaggggcctccccaggaccaaaggtgtccccagagtggctgcgctggacgggcagcgacggcgcttgtgagaaaacccggcagaaaagaacgcgctggcgctgcagcaggggagcccggtcacaccgcccgggcgaggacagagacttctccaccagagggcacgacgtttacgcacagggcccaaagaggcccagaggttcccatggagggtgatgtgcaggccccccgagtatacaggtcccgtgagcgggggagaaaggcaccacggggggtgtgtcaacaaaggaaaccgctccttacgacattcccagtaccggtggtcgcaccgaaaagggtggacatgagagtgtccatggatggcttagcacggcacacgacagcagggatccactctggaatcacggttcggcaccggacccataagttctggcttgtgggtgaacactcctccactttgggttcaaaacccccccaaaccgggacacggtatttctccccttccccgtggaggcctttccgcttgatacccttatgaggcacccaaggaatacttataacgctcaatagtggtagagatacattggtaaaccagggggtggaaaatgacgagtaggtgaacagaggggaaacccattacgcgtggggtagactgtgatgaaagggagacactgag

SEQ ID NO: 653648 - DNA, 212 bp, Homo sapiens
cggactccaagcaaaggcttatgaaagtctacataaaatagaaatatgtaagagataacatgtgaaatgtacactcaggtctaactatcataccttttatttctctggttaagaagtagactggacacaggaatcaggaagtcccagacggaagagagaaagagacaggagaaaacaagagggcgaattacaccaagttaccagacattcag

SEQ ID NO: 653649 - DNA, 800 bp, Homo sapiens
ggttctaccgcagttcctgtctctctgccaacgaccgccggatggcttcccaaaaccgtgatccagacgccactagcgtcgccggcgcccgtaaaggagctgagccgagcggtggcgacctgccggggtcgcggtgggacaataaggctacagcagagagctgatgacgcctctagtgatgtcgtgggcgatataatggtgattgtctggcacgttcgcccatgaaaatcacgatcaatcctatttacacggtgtggtaggtgacctatctcgatgagagacagccatgggtaacagtatatgaaggacctgaggtatagacgctttcgctagatgtttccctcgagtggctacgctcttacaatgcagcaccaacaagtgaagtatccatcgacgcacgcatggtatcgacccgcgaacgtaggacgaccgcgaggtgtagacatatgccgtggaccatacctgaagggaaacagtgtgtctcgtccgtggtcatggatggttcaggaccgattactgctcttcgcgatgccagagcacttactagggcagaatcgcgagcgatgtagatgaagtacccattgaagcgactacattgctggcgaggctcgtggacataagaccccgaccagtgtttcagaagaaagtagcgcgtgtacagaataccttgactcaatacgcaggtacacgcgagccgaggaggccactgtatccatggctaggcgcagacctgtgccttgttggtcgtgcctttttacattgtgtcgcttacggatggtcatgtccggttgttgtgacta

SEQ ID NO: 653650 - DNA, 297 bp, Homo sapiens
gcgctcaatggaattcctttttttttaagtataatgagctctgtgagattgcaattcagccctctctttagtttatgaaaatttttttccatatcactttaattattatctcttctgtcttttctctcttttacttctggaactcttcttatgactgtatgttgaggtttccttgatccattcaaggcttttctctttcaacattacgactttcatcgctttgtatttttacttcgcgctttgaaatttcattaattggctctttcatactgccagttagcatcgatcttctacttt

SEQ ID NO: 653651 - DNA, 329 bp, Homo sapiens
  misc_feature (46)..(47): n is a, c, g, or t
  misc_feature (56)..(56): n is a, c, g, or t
  misc_feature (62)..(62): n is a, c, g, or t
  misc_feature (65)..(65): n is a, c, g, or t
  misc_feature (74)..(74): n is a, c, g, or t
  misc_feature (94)..(94): n is a, c, g, or t
gcttctcacgctgtgctcacggttcgtgccatcaagccactctatnnggagcgagnctgggngcngttcactgntgcagttgtgtcctggctanatcagaactcgaatggccttgttatcttgctctggggctctatgtctcagaagaaggacagtgccattgataggaagcggcactatgtacgacagacggctcatccctcccctgttgtcagtgtatagagggttactttggatgtagacacggttcatagaccaatgagctgctacagaagtcaggcaagaagcccattgactggaaggagccatgatcctcagctgaggggtgg

SEQ ID NO: 653652 - DNA, 877 bp, Homo sapiens
ctctcataagccctcaacatccactccctcttagccaatattgtgcctattggcatattagtgtttgccgcctgagactgatcgtgggtactacccgtattagtctcaatctccaacgactatgatggcctaagaaatacggtacttgtaaccatataaccgtatgtcccgatatgcgaaggaacttaaatcggtcccccatctacatttatgatcagatctacaaccgacgtggacactggattttctcacattaaacagacccccgtcacatttggaatcaaacacaaaccaccccaaagcctaattattcagatatcatcccttctactatttttttataaccaaattcaaacaagcaacctatttacgctgtcaccccaaacacttattcctccgaaccccctaaaaaaaccccctcttaatactacagttacccttgactccttaccccttcaccattcatggcacgccaaggccaacttatccagtgaaaccatcttatcacgaaaaaattttctacctctctatactaattctccctacaaatctccttaatttataaaccatttcacagccactagaactaatcaatatttacatatctttctgtcacaaacccaacacttttatcccccaaccttggctaatcactcaaccccgatgagtgcccacccagccaagaacacgccttgaacgcaggcaccataccttccctattcttacaccccctagttaggctccctttccccctaattccatccgcactgatttctaacactcacaaaacaccttagtctcaataaaacattcttactactcaatctactgccccaagacatatcaacttccgcaccacaacttatttgctcattca

SEQ ID NO: 653653 - DNA, 1067 bp, Homo sapiens
cacacacacactacacacacacagcacgacatagttatgtgccttggcatgaggcggggcatgtgtgtaatatgtgacccctggacttgtctacctatcagggtttccatactcgtccctccccttcctggctcatgctgtctggagtctggcaagcgggcggtgtgttcagacaggtcctaggcctgtgtcgcatgtccaggcactggcctgaccatccgggctccctggcacaagtccccaggcacggagcagctgttgtccatcccttcccagacaagctctatttggtatcacaatgacctttagagaggtctcccaggccagctcaaggtgtcccactatcccctctggacgggaagaggccggaaaattctccccgggtccctgtcatgctactttctccatcccagtacagagtgtccaggacatcttatctgcaggcataagagaattataagcgcagagatttcccttaggcccaggaacttgggctccagctcatcgtgttccttctgggcccattcaatggcagggttctgggctccaagctgaactgggggagacgaacgagataccagaagctaccatggtgactttacctgataggccctacaagatcaggggagtcgcttatttgcggacacgagagagacgaagacgtcacgtttggctacgggggaagctagctgaaaaagtcgatggcgccaggcatgcccttaggaggcacaattctagcagtggagtaacagggcttctgggtcatgattgaaccctttgagcggcctctttgcccagtcctttggaaaaaaggggcccatataccctactgggaatcatctaaggggaaaagaaccgagagagacgagggagatgggaaaggcagggaggcgcccaagagcagacaaatctcgaaaaaacaaaagcggccgccccgcaaggacacaccaagggggccaaccgtgacgcgacacaccgctagtacaaaacagagaaacggagcaccaggtcccggtgcactatccactcggggtaccacccaccgcgtacgaacacaactcgcccac

SEQ ID NO: 653654 - DNA, 314 bp, Homo sapiens
tgggtatcttaggactgtataatggtccacgaggttcagctgtttactacataatgagctgcccgtgaagaggcgtagtatgacacagtgaagacgagaaggaccctatgcagcttcaattataaagtgcaaagtgtatctaacaaagccacaggtcctaaactaccaaacctgcattaaaaatttcggttggggcgacctcggaggtgagaagccaatctccgagcagtacatgctaagacttcaccagtcaaagcggaacgtactatactctagttgatccaataacttgaccaacggaacaagttacccta

SEQ ID NO: 653655 - DNA, 861 bp, Homo sapiens
gatataggagcctctctccctactgctgctacacaggaccctgagactgacctgcgggacgaatccatgagatgagcctgatccttcttgctcagcctggtcggcctgtagtcggatagtaactctggtgtcatgaatcacatgaaagcgtggaatcgtatgaacttaatccctgcattaacaggagagatgcaaataccttcgtatccctctcggcagaatatggagagctgagtgtccctgagaggatccgagaacgctctaagcctgtccacgagctcagtagggacgcctgtgatgactacagacttttgcgaacgctacgccgtggtttatggatacaatgctgcctataatcgctacttcaggaagcgccgaggggccaaatgagactgagggaagaaacaaaaatcgcgtttttttactggcggctgtcacctgatttggtatccccctgtagcagcgttactgaaatacataggcttatatacaatgcttcttccctgtatatgctcttgtctaggctgcaccccttttcccgccccagatcgataagtatgaaaggtgcactgcagtgaggtccaaaggagagtcaccgtttgttgatgttccatagctaaacttctggtgtgctacttgcatctgtaatctgcttcttggggagatattgggccactaatcatggccaccttaccagatcagagatctggcgctcaaactaagtaacttggaagaaactacttaagacggaggaaaagccccaccggctaagtctaacccttcgtgaccgaaggcaggagttgggccccggcaaggaaaagcccctgggcccagcaaaaacttcgccccacaaaagaacac

SEQ ID NO: 653656 - DNA, 274 bp, Homo sapiens
ggcacgatcagagaggagcctgcctctaaaggaaactctctgcaagtcacattccccagtgaaactctgaaattatctgaaaaatgtatatagtagctaaagggggaatcttataaaatcctgtgcaatagacatacatagctgtactcagaagggctgtcttcatctggactcccactagagaacaggcgagctcctgagggctctccaaggctgcagactgaggtccttgagtgcccaggcttgaagcacattggctgtcattctgatgtga

SEQ ID NO: 653657 - DNA, 344 bp, Homo sapiens
atcacagttagtaagtaggggacagggatttgagccctagcagtctaagactagagtctctgtcttttttatttgtattttaacctcaactttattcatctcccatgtgcctgttgagtctcaaaccccctttcttcccatcagctcgggcagcctcatcaagatgacgtgattccttacttcagctccttgcctagcaccggagagggccaagggggctgaagcacggccatgaccccagcactgggccagcacggggcatacgtggcgtggtcacagcgggcccatctgccacttggtgagctcatcatcagccccaaggggaactagactcacagacctag

SEQ ID NO: 653658 - DNA, 112 bp, Homo sapiens
taggcgttgtcagtgtgcgttgtcagtgggtgcatggaagaggcagccaggagagggagggctacccacatgcaggcaatagaagcagggagatactgtttcttgcacctaa

SEQ ID NO: 653659 - DNA, 138 bp, Homo sapiens
ccacactactactacccggtgccgatgaatagcgacacctcgctattcatcggcacctcgctttcatcggcacctcgctattcatccggcacctgtgctagtcttgtctccatagtcttgtgggggtgccgattaata

SEQ ID NO: 653660 - DNA, 438 bp, Homo sapiens
ggaagtgatctcaagctggattcattcatttttttatggtgaacagttgagccttttaaaaaagccaagcatctggctgggtgcagtggctcgcgtctgtgatcccagcactttgggaggccgaggcgggtggatcacaaggtcaagagatccaggctggtctcgaattcctgacctcaggtgatctgccttcttcggcttctcaaagttctaagattacagtcgtgagccaccgtgcctggctggtggcggtggtggtttttttaatttttttaatttttgttttttcaacttttattttgattcgggggcacatgtgcggtttgttacctgagtaacaaaaaaaaagcctctgcctttatgagataaacttttttatattctgtatgagtaagatcatacaaaatttgtctttctgtgtctggcttgtttcagtta

SEQ ID NO: 653661 - DNA, 381 bp, Homo sapiens
gggcgcagtggctcacgcctgtaatctcagcactttgggaagcagaggcgggaggatcgtttgagaccaacctggccaacatagtgagaccctgtctctacaaaaaattagaaaattagccgggcatggtggcgcgcgcctgtagtcccagctactcgggaggctgaggtgggagaattgcttgagcccaggagtttgaggctacagtgagctataatcataccactgcactccagcctgggcaacagagcgagaccctgtctcttaaaaaaaaaaagaagaagaagaaaaaaagaaaagtgctcttctgcccataggaggtaagtagggaatctgggggacatctcataaagagtaagagaagaccaagggttcttatag

SEQ ID NO: 653662 - DNA, 752 bp, Homo sapiens
agcgggcagccgcacttcaccaatgcggccggatcctgaggggacatggctgtgcaacctctgcagcgtctgtgctgctggcgggtgcaagaaactggtggcgacactgcctgatccctggatgcatgtttgccaaggtgacgacggcgataaacgccagcggttgtgagtcagagtgccgtggggagcgcggagtgctggtgtgagtgacaggagagacacgaaagctcgacgtcggcacaagacagggagccgcgcaccgtcttgttcacgggagattccggcttctcagtctcgcccttccatggagggcgttccttcttgctagccaggtcactcatgttcgttcacccctggccgctgcaacgacgaagttcgtcacgtatctactcaccagtgcgtgagagtttgcaaggtggctacttaatcatgaggtgtcacttgcaatcctccgccttctcgggattcataggcgattctcggttgcctcagcctcccgagtagtagctgggagtacaggcatgtgccagcatgcccagctgagttttctgtattttctggtacagacctggtttcgccgttgttggccatgcgctggtctcgagcttctgacctcaagtgatccgcctgcctcggccttccaaacgtgctgggattacatggcgtgaaccactgagactggtcagttattggctctttttaaacgattgtgttgctttctgcctcaatattaatatgttggaagttaccag

SEQ ID NO: 653663 - DNA, 221 bp, Homo sapiens
  misc_feature (3)..(3): n is a, c, g, or t
  misc_feature (161)..(161): n is a, c, g, or t
  misc_feature (190)..(190): n is a, c, g, or t
tanggtggagcgagtgtgtgtgtctattaattacaaatggatcactcggcagaagtacgtgaagcaaacaaaggaattactacaagaaccaaaaattatacaaggaatatttttacaagttcgttctgtgaatattcaagatttttacagaatcatgatcnatgcttaagtggcaactggatgacggccnaccttcaagagtacagtagtgcaaaaagaaa

SEQ ID NO: 653664 - DNA, 215 bp, Homo sapiens
tggtgtaggaaagggctggctgcataggaaggactgaagttggaacggacatcgggaaagcagaggggcagtgaggtttactacaaccgaaaaggactcttgaaacgagaatcagtgttgatgtcagggtgaactttgtgggtacattacttggtgttaagattgttggcagtggtagccccttttcagaaggcaacttgctgtaagtcagggtg

SEQ ID NO: 653665 - DNA, 351 bp, Homo sapiens
ctcattattatacttctcaacgcttactacttattaacgctttatacttctcaacgctttatacttcctctcaacgctttatactttctcaacgctttatacttcctctcaacgctttatactttctcaacgctttatacttcctctcaacgctttatacttcctcaacgctttatacttcctctcaacgctttatactttctcaacgctttatacttcctctcaacgctttataaatcgttgaggaagtataaagggttgaggagtataaagcgttgaggagtataaagcgttgaggaggtatcaagcgttgaggaagtataaagcgttgagaggaagtataacgcgtcg

SEQ ID NO: 653666 - DNA, 242 bp, Homo sapiens
ctttagcttccattttaagaaaacatatggccgccatagaattgtttcttatttatatttaatttatggataaactcagggaatcttctattttaacagtacttttggcgttcatacatttttcatatagcccttctgtctgtaggagggaggttaatgccaaataccattattgcctgtgaggaagaccatcatcttgtgattggaccatactaatgaaatatgaatgctctagttgagcc

SEQ ID NO: 653667 - DNA, 175 bp, Homo sapiens
atccgagtgaaaggagcagcacttcaggaggtacatctttacaccttctctactgtacaacccatcccagatgaagacagtccctggatcaccgccagcacagacagaatccctgctaccaatatggactccagtcatacgtccacccgcttccgccttactgcaaactccaaca

SEQ ID NO: 653668 - DNA, 420 bp, Homo sapiens
tttttttttttcaggttttagttttccaccgagttttatccacacggaaaactctcaaaaactataaaccaaaatgttcactcaggaatatgttttaattttgcttttctttttttttgtattttctaaaatgtctataataatgttatttttgtccaaaaagaaaaatgtttatggccgggcgtggtggctcaaacctgtaatctcagcactttgggaggccaaggtgggcggatgatgaagtcaggagatcgagaccatcctggctaacacggtgcagccccgtctctactaaaaatatgaaaacaaaattagccgggcgtggtgacatgcacctgtggtcccggctgctcgggaggctgaggcaggagaatgtgaacccgggaggtggaagtttgcggtgggctgagattggaccac

SEQ ID NO: 653669 - DNA, 157 bp, Homo sapiens
agtgctccaggacacagtctttctgcacccgcatccggcgtctgcggacagtggccagagcagcttcaccacagagctttccacccagaccgtcaactacgggacagtgggggagacaggtcaccctatcacatctagcccagtacagggtatgggg

SEQ ID NO: 653670 - DNA, 220 bp, Homo sapiens
tggtgttaccgtctagtcggatgcttttctgctgtgccacgatgggaattccacaatgggctgtcctgattaccacaaagtatttgacaaaatttcccaagatcatttcatggatcagctagtaaatgtgagtagtagattagtgctttgggggtagatcataactaatgaaccaccacccaggttcccagttacataataatgacaacaccacagtacg

SEQ ID NO: 653671 - DNA, 396 bp, Homo sapiens
  misc_feature (170)..(170): n is a, c, g, or t
  misc_feature (234)..(234): n is a, c, g, or t
  misc_feature (249)..(249): n is a, c, g, or t
gactttattcagccccacacgctgctggggaatgtggcatgttctagctctgagatgttaactgagagaagagaagtccaacaaagccgatacgtgcagacctgtctacagaatccttcattatccagtttaatcaggagtcacttggtctttcattaacttggtcccanagaaggaattcagtcctagataagtaaatcctcaatttgctgttccctgaagtatggaaatgangttgggccagtattnaatctctgctgccatgagaggccctttctagctaatagataaaaacctctttggctcacacttagtaatgaccttgtggtctttgggactctggctgacctgccattcccggagcaggggtagcggcttcaatttcgtaatcatggt

SEQ ID NO: 653672 - DNA, 126 bp, Homo sapiens
cttgagtctcctaaagcactgggattatgggtgtgagccactttgcctgacctgagctcaaaactttagcacagattttttaaggaaagggaataccatttgtgagggtcatggtcaccgcagatc

SEQ ID NO: 653673 - DNA, 104 bp, Homo sapiens
cctcgtacgagccttatgagctgtgaggtactgcggatgaggtgtcatgtgcgcggaggaggcaggcacacaggagacggctgagaggagaggggccgacgtgt

SEQ ID NO: 653674 - DNA, 248 bp, Homo sapiens
tggtctcaacaaaggttagttctctctacagcaattagaagggtttagaactgggaaaggtcaggtagggagtggcctgatactggcagtattcacgtgggagctccattaccattcgatggagtcttttttttttttttttcacgggggatgtaaggggggccagtctaaaagtcagggcagttggaggcactctgggtgtgtcaccatattacagggcaaaagcttctttgggctctcccttaagt

SEQ ID NO: 653675 - DNA, 244 bp, Homo sapiens
ctcaggcacactacctacacacaccaaaacacatcacacaagcacacatcacacacgctaacacacatcacacactaacacacacatcacacactaacacacatcagcacgtgctaaaacacatcacacgcccacatcacacacactaacacatcacacaagcacacatcgcacacgctaacacacatcacacactaacacacacatcacacactaacacacataccacggtgctataacgggt

SEQ ID NO: 653676 - DNA, 245 bp, Homo sapiens
tggactaaaaaagctcgtgtgtagtagaaagggtggaatgtatggaaaatttattagaagcaggaagtattggttagtctagcttattccctttcagtctttttccaatatttttataaactattgagtacttactggaatttagtcctggggctcttccttattaagggtggtatcataaatacttggatgtttcaaacattctaaataaataatttccaggggcttcataataaaaaaaaaaa

SEQ ID NO: 653677 - DNA, 491 bp, Homo sapiens
tttccctacgaatgcctaatccaaggttcccaaatcggcccgcacatccacaagcacataaaaggaaaaggtcccgtttttatagtagtttaaacgcgctgcttagactagaactgacgatcgcgtagttttaactatctctagcctaggacttttaggatggaattgtatctcttccctaggactttatttgtgataatggtttaatagatttagactttagacttatcttgaggggtggagctatccgcctaaaagaaaagacttgtgaaaggcccatattggctcgaggtactaggagggatacttttgaccggcggggatggagttgctgtctgaggaataaggggggatcgttacttctattcctcccgacgatcgattagctctgaatttcctttaatttgtgtccccgattcttggtgcttgggcttgtttagcttcctgtcgaagggacgcgccggggggacatcgtttggggcccctaaggt

SEQ ID NO: 653678 - DNA, 354 bp, Homo sapiens
  misc_feature (162)..(162): n is a, c, g, or t
agtggctgggattgcaggcacacgccaccacgcccggctggtttttgtgtttttggtagagacggggtttcaccgtgtcagccaggcttttcttgaacttctgatctcaggtgatcctcccgcctcggcctcccagattgctgggattacaggcgtgacacncacgcccacctgtaaccattatttttaaggattgctaccattgggatagttctgtcatgggtccaacttttgggatatttaaaattgatccctgtgtgggctaacagaattaatgttttccaaaaatgtttgaaaattatataggttctccttaattccccacctctaactataatttttggggttatttct

SEQ ID NO: 653679 - DNA, 425 bp, Homo sapiens
  misc_feature (384)..(384): n is a, c, g, or t
  misc_feature (425)..(425): n is a, c, g, or t
ctcacaagtacctatgaagtagctcttcctctccccattttacagaagatagcagaggctgaaagaactgactcagaaccccacagcttgtgagtggtatgaggagactatgtcctctgccttctagcctggtgttcttccttgcatcatgccccatactctgcgtaataaaaatacagcgaggcctttgaactgtaaagaaacagacctgggcaggcagggtggctcacgcctgcaatcccagcattttgagaggctgaggcgggcagatgatcgagaccagcctggccaacatggcaaaaccccgtctctactaaaaatacaaaaattagctgggcttggtggcggcctcctgagtagctggggattagcaggacctggcancaggcccggctagtttgtgtattttagtagagaggggggtn

SEQ ID NO: 653680 - DNA, 202 bp, Homo sapiens
aaccctgtttctcaggctggagggcaagtggtgccatctccactcactgcagcctcgacctcccaggctccactgatcttcccacctcagctactcgggaggctgaggcaggagaatcgcttgaacctgggaggtgaaggttgcagtgagtcgaggtcgcgccactgcactccagcctggtgacagaacgagatccgtctca

SEQ ID NO: 653681 - DNA, 596 bp, Homo sapiens
ggcgggcgcctgtagtcccagctactcgggaggctgaggcaggagaatggcgtgaacccgggaggcgcagcttgcagtgagccgagatggtgccactgcactccagccttggcaacagagtgagactccatctccaaaaaaaaaaaaaaaaaaaaaaaaaaaaaaaaaaaaaaaaaaaaaaaaaaaaaaaatatcatgggggggatcccaagacaaaagacccccatggggggacctgtgtcacaattgtccccttggtgttacacatctcaatcagtgggaaccccttgtccaccctcgtttttgggaactcactgcagttccctattcaagccgttagaaaaagaacaaaggttcccagactgggggattttcaaaagggccgcaccccgttggcggttaaaacaattgtgcgacctgatatgctagggaaaaacgtgacggatttttcttaagttaaaatttatgttataactatggagataaacggattatttgctaataggcctaaagtttcgaacgatctgtgtatagcgaggaatcgaccggaaaaggtagccctgttttacaatttggaacacaaaacccttgtgtga

SEQ ID NO: 653682 - DNA, 310 bp, Homo sapiens
acaacggctaggaactcaatcatatggggaaggtaagtgtactcgagaaaaaggagagagatcacctctatccaaaagagtgcttgatactagcagccccagctactcgggaggctgaggcagaagaatcgcttgaatcctggagagcagcagttagcagtgagattactttagtcgaaaacttcactatttgcagcggaccaaggaacaacacgatcatgctctatctgtcattctaggtagtcctacgctgtactccgtcctggtggcaccctcaatttcaagtaagcaggaactgggagtgatcctc

SEQ ID NO: 653683 - DNA, 1224 bp, Homo sapiens
gcagtaagatcgagcgaggagcccaagagcgagcgcgctagtacggaagctcgagccgcctcacgctcggcgcgacccctactctcgtgcctgcctgccgcactgcgccggcgagatccgccccggtctccccggagagcgagccccggccgcctgcgaccacctagccgcgctaataccgccgaccaaccggcaccgaggcgcctgaagcgagagcagaggaggaggaggccatgagtgaggcgggcgaaggccacctgccaacaagcaaacaatccatcccttcccgggagggctccgcgacgggaaggcggccctgccgagggacttccgcaagggacccgcggaggtgcgcaaatgaatccctgggttggggaacccgggtggacgccccgcttgggggcggcggggaacccagggttgcccaggtcggactcacttgtgatgccaaggggaacaatgaccccagggtgggaagacagctgcgaggccaatgggatacaaggcggagagaccaggcggtcccacccagacctccatgaggaggcaaagcggccgcaccggagttaggaaaagaaaacggggagggacaaccagagagtgtcccgaaacaaaacacgaacggggagcaggggaacgcgtggcacaccaaagaggggtccccaaccgggccagaacgcacgtacagaaggacgaacatgcacaatacaagaagtgaaacaggcaagacaaaagtatgttgacagcgtcccaaccgaccaagttgaacagtcacagaggaagaaatgccccaccacggcaagggaacatgtagtgagctagtggcgacgatcaaaaggagacgaacaagggaacaaagaagcagagaaactagaaacaaaacaggaaaagaacgggaacacaacacagaggaaaaagaggagaccagggacacaggaaaggagagaacccagaagagaagcgccacaagaaaaaccacaacgaagaagcagagcagccacaaccaataacgggggccaacaacgcaggaagagggagcccaagatacaacactcagataaaataacgcacgacagaaggaaccaaacgggagcacgcaagccgagaaaaaaatcaggaacaacgcaagacacacacacgaagcaaaaagaaagaggggagatcgtaggggcgcccgacgagaatagagacgggaacgaaccacaacaatactagcaccacccc

SEQ ID NO: 653684 - DNA, 674 bp, Homo sapiens
ggatctaatttacagtcccaccaacagtgtaaaagtgtccctatttctccacatcctctccagcgagtctgttgtatccatgactttgtaatgattgccattctaactggcatgagatggtatctcgtggttttgatttgcatttctctaatgatcagtgatgatgagacatttttttttcatagtttgctggctgcgataaatgtcttcttttgagaagcgtctgttcatatccttcccccactttttgatggggttgtttgtgtataagtttaatttgtttaagttctttaagttctttgtagattctggatattagccatttatcagatggatagattgcaaagcttttctcccattctgtaggttgcctgtgcactctgatgatagtttcttttgctgtgcacaagttctttagtttaattagatcccatttgtcaagtttgaacttagcccattttatctattgcaaggatacagagtcttaaggacgatcgttatactgtacaattttccttattgtaagtctagaacagacttaaagcattttccgtattagagacaattgtgctctttcctgagcaattagctgcttttgctttatgggtactgtggattggtgtaacctgattaggcattacctactggtatagagtcatgggaagaatagaata

SEQ ID NO: 653685 - DNA, 288 bp, Homo sapiens
gcccttgccctcctttttgccatttttttggggggcccggggggcccgggtgggccccctccggcaaaaggttattggggtttttccgccccggggcaaatttcaagggacctccccaaagggggtgttttccctggatggggggaaaggttgggtcccaagcctcccgggtcaagggaaaacatgggttgttttttcaaaaaccccgggggccttggcggggaaggtgtctttgggacccggcttttccccggggaaattttggggctttttttggtggggttgcca

SEQ ID NO: 653686 - DNA, 937 bp, Homo sapiens
gttacgaggatccggtgttctaacccaggggaaaatatgcggacttttgatctgatagcagcgagacccgtgtcatgtttgatgagatgatagcgaaatacattggctgagaatcttcaactgctggtggaccggaccgatggtcaactactgtattccgtctgcactacgaccgtgtgtactatgtgagtgagaagattatgaagctggccgacaatatttccggggactagctggtgtcggctgggtgacctgcttgggaaaattcactaagaattgccacaagttcggttgcacgtcacaggtctggattatgcttgtaacttatggcaagtataaagtttggataaacgcctggttgcagagcatggtccttcctgtattgggaaccatgtagtttagaatcctggtctggtgtcgaatcaactgaaaatatttctcacgtaccaggcgcaggtggtggaactccatgtagacatcccttaagtgattttgggggtgtacatgccaaatctactacaaagactggtgaaaacgtaagcccatggctgaactgtggattcatctatggtggacataggggaaaacatgtgaggcgtcaaggagaccgtcgaatacaaggaaggcttgccatgacgaaggctgtttggaatcgccgcgtttgtacctggttatgagggatccacatcttgtccgatttggcaacaccctaacacttaggagttctctaagtgcgtctcattcgctagaaaagaaggggacaacaaatgataagtgctaaacatgggttaacatgacaaagaaaatggcaattgacaacggcttgtagaaaagtacactcagacgggaaaaatgttggaacagaaacagaatgtaaacaaaacacgcagacagaagacgacaaaaacaaacaccacagaagacagaatatataacg

SEQ ID NO: 653687 - DNA, 242 bp, Homo sapiens
  misc_feature (217)..(217): n is a, c, g, or t
agaaaactaaaaatccgaatgttctcacttatcagtgggcagctgaagtgatgagagccattaccatgcgttaaggacacactgcggcctgtcggaaggttgtgtgtcgcaggaggcagagcatcaggaagaatagctcatgcatgcttgggctttataccttactcattggattctctgtgtagcataccaccatggcccattgtatatctacatnatagagctgcacattctccatgctg

SEQ ID NO: 653688 - DNA, 283 bp, Homo sapiens
  misc_feature (40)..(40): n is a, c, g, or t
  misc_feature (48)..(48): n is a, c, g, or t
  misc_feature (50)..(50): n is a, c, g, or t
  misc_feature (52)..(52): n is a, c, g, or t
  misc_feature (105)..(105): n is a, c, g, or t
  misc_feature (119)..(119): n is a, c, g, or t
  misc_feature (139)..(139): n is a, c, g, or t
  misc_feature (216)..(217): n is a, c, g, or t
  misc_feature (228)..(229): n is a, c, g, or t
  misc_feature (236)..(236): n is a, c, g, or t
  misc_feature (248)..(248): n is a, c, g, or t
  misc_feature (265)..(265): n is a, c, g, or t
  misc_feature (279)..(279): n is a, c, g, or t
acttgatggccctaaaggaactggatatatcaagactganttgatttntntntctgaagttcacccttctagacttcagaccacagacaacctgctccccatgtntcctgaggagtttnacgaggtgtctcggatagtnggctctgtagaattcgacagtatgatgaacacagtatagagcatgatttttttttatcttctctggcgacatttttnnttctcatctgnnattcccncctgctactctnttccttcacatcctgtntttctagggaaatnaaag

SEQ ID NO: 653689 - DNA, 465 bp, Homo sapiens
  misc_feature (220)..(220): n is a, c, g, or t
  misc_feature (275)..(275): n is a, c, g, or t
gattgttgggaccatgctgcccccactcccgcttttgttggggctctaagttctggaaggtgtgtgcacagagggtgctcatgggactcgcatgcagctctcagcactgggtgggagggcgttggcttgtccagaatggggacgtggggcagccacccctgcccagcgatgagcgcagacacccgtgtgatggggacagcagcccttggtgcaaagccangagacttgatccttggctcttgaccggctggacagacgggaatgaccccaagggnctggggcgttggccgtggggcctccgtggaaatccccaacttagacattctttgggcttggtgtcgcatactgggtgtcacggcacacatttactctgcattgtccccgtctttcccatcgcctagcgtttggggaggaacagggagagagcttcggggcgtctgtctccgtgctctcctgcctccaccg

SEQ ID NO: 653690 - DNA, 509 bp, Homo sapiens
gcgacaggtagaagagtactcctccccacagatacccgtccagtcagaacctataagcatagtagcactataactagagaaatagtctataacacgatctacggtagtaacaggtagcggacatataaggataataggtagggccctacaatccaatagactaagtgtccttaataagagggagatacagacacacagagggaaaaagtccacgtagatagacaaaggctgagatagcagtgacagagtagataaaaccaaggactagacggcaaccaccagaagatagcgagggcggcacgagacagatatctacccaataacagcctccaatagaaaaccaatactaaacaccctcatacaatacagactactagccaccagaactgtgagagcattacatttctgaagtaaaaagccaccaataaagtaggaataaattatggcagcccaaggaaacgaatacacgggctaactatacaaactggatcttccacaaaaaacacaac

SEQ ID NO: 653691 - DNA, 580 bp, Homo sapiens
tctgggggggcccccctttttttctcacaaaaaaaaaaaaaaccgggtgtaaaaaaattcttttaaaaaattccctcgggggaaaaaaaaaagtgagtccccccacctcctcccccccacacccccaacaattgtgtggtcgcctctcggcggaagagatatacccgaagcgtgcggcggtagcacccctcggtgaagaacaatgcgtagagcgggtgggcgtctcccccgcggggagggagaagagacagcagagggcgaaggggagaagaagcgccagggggtcacccctcacatactcttctataacctcaccccacgcagcgagagggagtgtgcgcccctcctcccgccgcgcgagtgcgggggggtgtccctctaaacaccagcgaggggttgtatgaagacggaccacgggcgatgtgggaaaagagagagagaggatcgtgaaagttagcgagaggatttataccgcggaagagagtggctcctcccctactaatcggcggtaaacggaccgaaggagagagtggcgccctcgcacgccccgcgaggaggaggagagtagttatcgaaagaa

SEQ ID NO: 653692 - DNA, 1199 bp, Homo sapiens
  misc_feature (28)..(28): n is a, c, g, or t
  misc_feature (43)..(43): n is a, c, g, or t
  misc_feature (58)..(58): n is a, c, g, or t
  misc_feature (62)..(62): n is a, c, g, or t
  misc_feature (80)..(80): n is a, c, g, or t
  misc_feature (733)..(733): n is a, c, g, or t
  misc_feature (856)..(856): n is a, c, g, or t
  misc_feature (884)..(884): n is a, c, g, or t
  misc_feature (899)..(900): n is a, c, g, or t
  misc_feature (903)..(903): n is a, c, g, or t
  misc_feature (917)..(917): n is a, c, g, or t
  misc_feature (1022)..(1022): n is a, c, g, or t
  misc_feature (1135)..(1135): n is a, c, g, or t
  misc_feature (1139)..(1139): n is a, c, g, or t
  misc_feature (1142)..(1144): n is a, c, g, or t
  misc_feature (1148)..(1148): n is a, c, g, or t
  misc_feature (1150)..(1151): n is a, c, g, or t
  misc_feature (1155)..(1155): n is a, c, g, or t
aaaacactcaggtgctttcagatttcanagcctcgggcagtgnacatagggaatctcnggcngctctgagctagacacancagcttcaggaagagtaccagatcctgatgggaaatttcttttccccattccttttccctcctgagtggagggagtcctcttcttcgcctccctgagaattgctgtgctctgtattgagagcacctgcctgctgacttagctcaaaggcaagccagaacccttccctgaagactggcaagaggtggtgtttagagcaacgtccaggctaagagatgactcctattaactgctgattatctgttactgctgccctgagctggggcccaagggctgggaaatctgttggtgctaccctgccctaccattcacccagctcacagactgccaacaggaagtgctgtttggctagtttcctcccacttgtctacccctcctttgtccttagaccaacatgtttacctctctgctttgccaacttagccagcaggccatccccggccctaacgtctcctggccattatctcttagttatggctttcacgctctcaataggattctgtatttggtcccaatttcctcaagttcttattgaggttactcccatcaattccacggagggaacagtagttattatagaagcatttgcgctctatctaaagattaaaaatagaatctgcttttatttcccaaagtctgtctctgacggttgagncattgaactcaggcagagggacgaggctgggcagggctgtcctgagtttaggggcctatccctgcatttcactgagacctcggaatctcctctgtgaattccacctgcctagttctccccttncatcctctctctcttcccacatcatcanagaggaaaagctctnngtncaaaaggaagaganaacgtaagcatcttatttgcttttaaaagaattttaaaccatgaaaaagatatttttaaagaaattcaccgagaacattaaagttcattatattaagtatttatnatgtgtgagaataataaatatataactgcagctagtaggtccctttccctaatcttttaggtcatatgagtagggtttgcttggtgccagtcctgtgcccttttctctccagncatnttnnntgtngnncagnaaagtattgcactgcactgtcagagtctcctttcactatacttt

SEQ ID NO: 653693 - DNA, 381 bp, Homo sapiens
ccagtgagcagccgggcaaatttcaccatcaccaccaagcaaaaatcagcaaaaacactcctgtgtgtcagaaatgggagggttaagggatgccagtaaagtccatgccctcaggaaaaacaatactgggtccttagctcttgtcaaggtaactgccaagacaaaacacccaattctgtgtatggttttctccagattaaaaaactaactcggctgggcgcggtggctcacacctgtaatcccagcactctgggaggccgaggcgggcagatcacctgagatcaggagttcaagaccagcctggccatggtgaaaccccgtctctactaaaaatacaaaaaataagctgggcgtggtggtgtgcgcctgtaatcccagata

SEQ ID NO: 653694 - DNA, 1386 bp, Homo sapiens
  misc_feature (608)..(608): n is a, c, g, or t
gctcctcgacagctcaatgtccgaagagcttgcctttacccccaaaggacagtcggggagaagccgaacgttcttggcgcactgactgaagaggaacgcgtggtgtcgggagaggctgatctatgggggctagctgactcgagagcgatgcgtaaggagatagcgtgagaggaagtagagctgtgacgtgctggtgtgtcgttggtggtcgtgcagtgatcgtgtgtcctgtcatggactatgcgatgcctgcatcacatagggaggctgcgcaacgcgatgaccaaaatacgcggtggtatggggcgatggaggagaggagagaatctaggaaagagatccacgtcttgggacgagtcctgcctacatggcccgcacgaacagaccatccggatgtggaaagcttatgtacttgttattcggacacatacggacgtcccttcgggaagcaatctagggtttcgcgcgcaaagcatctagggggacccacgcacatagtatggtagaacagagcacatggttcctgtagatgcaagacatctacacacaaaacgcctttgcaattggttcaagaacgtgtggctccttttgtggcacaggaaggcccnttttagttccctccgcatggagaacagcgggcgggggaaacttgggacacccccgcggcaaagggaaccaccgttccccttgagaggggaccccttttgttgaacaggccaatgggcgaatgttgtgcattgggccccaaaaaaccaaggacaccccaggaaaccaccttagaggcgcttaatttcttgcgacgcttttcttcccgtatggccccttgtaaattggcggagcaggcgttgtctctccagtggcgttccccaccattacacaccgtgggcgagtccccttcccattttgcaagagagaggaccacacatgtgggtaacagccgcttttgggcaaacgttaaagaaggcgcaggttaaggggtttaccttaatggggtgtggggttccggatttgaagcggcgcggtaagggcgccaagggggcgcctaaagagggggggcaatatattggccccccaatttaaccgaaagaccgtattactcttcccacacggccctggttaggggtgtcctttatcccccctgcggactggactaggcgcaaaccgaagcggtttgcgccagccaatatggccggcaccctaggtttctaaggaagggtttctttttggaccagaccttccgccgcgccgattttggttggacttgggaaaaggttgggtccccattgttctttttcccccatttctgtttccctataggtcggtgtgtccgcgtctcagaggtgtgcccgcgcgcggtgggtgccggcttaggtattgcgcctgggg

SEQ ID NO: 653695 - DNA, 255 bp, Homo sapiens
attaatcgagccttaccagtgaatcgactcgggtactggagtaatcctctatgagtcacaggctccagcgttaactgatatttggaggtcagcacggtgctcacgtgtcgacggaacttgtacagggaggcatgcaccgagagttggtgaatacactgtcgaccatggctccagttttaacgagtatttgggaggtcagcacgtgtgctcactgtgtcgacgcgaacttgtccaggggaggcatgcaccggcagt

SEQ ID NO: 653696 - DNA, 1042 bp, Homo sapiens
agcggattgaagaagaacacaaactgagctgagcagatgtcacacacgactccacgagtgcatttgtgctagtatggccgacgataccacaacacgttctctgtatacgagattgacgcggtcgcattggtgggcagggcagtgggtattacatcgacgggcactctgtgacattcgaacgttgtgcaagcacgcctacaaatgcatcgtacgagcgtaacgtgatgcataacacggattcctgtgaaaaatagatcatagacctaataacaatcagagttatctccacaggcgtcgtaaggcaccaccatggatcgaagagatcgcgatgacacgctgcttcatgtgacgtgcgtactctcgagagagctagccgtgacgctaagagcgcgactgaagaaggctccggtattgagcccattggcaccttgtagaattttcttggacaggtatggagggtcaacggtggacaggcacgaatttcccgggaaagaccttctaagttcacaatgtcgccatactgtcgaattcaccaaagcaaaatgggcccataaagaaaccgttcgggtgtaacaatttgcgtagcaaatttggtccaaatccccacgggtgacatgagtggacagagtcctctatgttccgaggacagggggccttagcgaaaatagattcgcttttggaattcgaagaggacaatggagtgtactctcgcgaaaggctggttcttccaccgtcggggcaaaatatggcgcttaatcccaattggcgagggattttcttatagcatccggtgcctgagaaagatgggcatgtctaagtgcaatcgtgaccttgcctctgggggtggcccaataccgttaggtgcacgtgcagtgtgtccaagtgaggaggagcaagtctcctaagaaaggaacccccccttaaaaaaacatccgtggaagtcaagtggaaaagattcaccaagtgaactggaacgaaactggactgggaaaggaaaactcaacatcgaacgcgtggggtaagcgtcgtatgttgtggcatg

SEQ ID NO: 653697 - DNA, 818 bp, Homo sapiens
cattgaccatctcacttctaggaatactagtatatcgcgtcacacctcatatcctccctactatgcctagaaggaataatactatcgctgttcattatagctgacgtctcataagcacctcaacgcccactccctcttatccaatattgtgcctatttgccatactagatctttagccgcctgcttaaacaactgatcggcctaaccctactagtctcaatctcctaaccacatatggcctatacatactgtacataacctaaacctactccaatgctaaaactaatcgtcccaacaattatattactaccactgacatgactttccaaaaaacacataatttgaatcaacacaaccacccacagcctaattattagcatcatccccctactatttttcaatccaaatcaacaacaacctatttagctgttccccaaccttttcctccgatccccctaactaacccccctcctatatagctaactatactgactcctacccctcacaatcatggcaagccaacgccacttatccagtgaaccactatcacgaaaaaaactctacctctctatactaatctccctacaaatctccttaattataacatacacagcacaggaactaatcatatcttatatcttcttcgaaaccacacttattcccagcttggctatcatcacccgatgaggcaaccaggcaaaagctgaacgcggcacatattactattctacaccttaataggtcccttcctatcatgcctaattacatcacaaacctagtcctaaatttactatcatcttctgccaaattaactcttc

SEQ ID NO: 653698 - DNA, 343 bp, Homo sapiens
gcacgagagagatagagcaccactctattctctctgtttagaaacaagcggtacagtgtggacatttttgtcaccgttctcacagccttgctgttttcaaaacaaaatcctgtaagtgtctaattctcattacctgggccgagataaccaagctttcctagggttaggagacccaccggtataaactcccaccgggtgactctcgttggacccataacaccgtgttgtacccggaccaacatatttcccagaaattgcgtaaaacccacgacccttaaccaatgtctgtctatcgcaaggcacctgatgaagggctactggacccccgcgcctctgttttctt

SEQ ID NO: 653699 - DNA, 353 bp, Homo sapiens
  misc_feature (76)..(76): n is a, c, g, or t
  misc_feature (84)..(84): n is a, c, g, or t
acaccatccgctcgcgcagacgtaacaccctgtgaacatctgctcgccctgtgggtgccgtggatccttgagggtntgcacgtngttgagagcagccggatcatgctatccgccttgtccaagtcccgttccacctcccccgcccgctgtggcactttgcctgcagccagcagccggacatccgactgcagcagggcgtcggcctggttcagctgctcctcacacagccccgccttcatctgcagcttggtcacgatgcgctgaagacactccagcctctcaaactcgctgcggagctgcttctcccgcgccaggatggggcctccagagaagctttttagaagggccagact

SEQ ID NO: 653700 - DNA, 280 bp, Homo sapiens
ttgagcgatctgctgtgcaatcttcctcgggtcgcccgtgggcgaggtcgggtacgtaccggtgtcgcggttccagcgctccccaaatgcaaaccagtcgatgggtggcgccggggtgccggtgcgtaattgctcctcgagggagtcgaagtacgcctgccagcgggctttgtagtagtcgccggtaagaccggaccagtccttgttgccatagtcatgcaggctcgcctcctcactcgcatggcgatccccccaggtggtgagcagcgagcgggcatcg

SEQ ID NO: 653701 - DNA, 135 bp, Homo sapiens
tgttgagtagttcgggttacagtaacacgtaccatgcgcagctaatttttgtatttttggtagagacggggtacaccaggttggcaggctggtctcgaactcctgacctcaagtggtccacccgagctgaagagg

SEQ ID NO: 653702 - DNA, 863 bp, Homo sapiens
taaaagagggtctctgtcaacgcaaattgggatgtgcaggggcacgatcttagttcattacaattttctggcctcccaggttcaaggcaattctccggcctcagcctccgggagtagctggggatataacagggcttgcacaaccagcgcccagttaatttgggtgatcttacagtagagaccgggttctcaccatggtgggccatggttgggtcccgaattcttggacctcaggtggatccaccacagctggggctccccaaaggggcgggcgatatatagggtggcgagccatggcggccgaagccctaaagttattatcaattcaaccagctggtaacggtcacttagaaggtaagaacacatggcgggaattcagcttcatgttttcttacatattacaaaaagggttccccccgagtaatttctggaaattgttagggccaacagcccaaatatttccaaaaaatggggagagactacctctttaaaggaaacgggtttacggtctcggtgtatatcgccagcagtcttattaaacgcgagcgttggaaacgttctgcgcctttacacagctgcccgcctggattaaacttgcgacggggcacgggtaaaatgggcttagataagaaggtgggagcactcccggacactgtgcccaaactgggttacacgcactcagactagcatatccaagaagtggtgttgataaaggtctgttgaacaccaagggcatcctattcacagctgcaattccacaacggggcggaggccacactgttgtgtgcgcacccatattggataggtagcggaggtattcgcgaaatgaagccactttaaagcacgcgcttcaggtgttagtc

SEQ ID NO: 653703 - DNA, 336 bp, Homo sapiens
caaacactactgttatccaataacatattatatatcacagatgtttccacatcaacactgattgtccatttacatttccgctggtcacttaattttgtactgatcctaattgctaatgcttcattcttacctttttcttttttaaaattaaagcactaatgacctatcataagaaagagttgcaccccagtaccctggtatttttcactgggttctaaagagcaaagaaaaaataaaaaagagaggggtaaaaaaaagggaggagggcaggataggagagagcccagtaagtggtttttgtcctgtggttcggattcttgaggtaatccgtgaggg

SEQ ID NO: 653704 - DNA, 130 bp, Homo sapiens
ataaatacgaccatgacactctaaatatactgtgactatctaggacactcctggacggggactactggacacagacacacacacgaccattacgactagacctacacggaaactctacaatacacacgta

SEQ ID NO: 653705 - DNA, 115 bp, Homo sapiens
agcgccctgcatcctccttcctcaggcctgtgaatccaccacactgaatgagccatccttctcctgggggtttgaccaggatcctgccctcaaaggctggggccctcttccccag

SEQ ID NO: 653706 - DNA, 393 bp, Homo sapiens
  misc_feature (271)..(272): n is a, c, g, or t
attcttcacttttggcaatatagttatttgtacaaattcgataggaatctgttttcttttgtaacagaacacagttggatacactgattattttgccaaggctttcattggaatggcataattttttaatgaccagactgctttgaggatttgaagttgactttatagagcctataaaaagccttggaaaaattagcctgataccttgtctacacagtttccttacaaggttcctggccttgcggtagtaaagaatgtcactctctggcannggcccaggagcctttcaggatatttctgggaaccgttgacagagagcaggcagtgtatccgaatttatacagcgaattacaagctgcagtctgattgtgaatccttgtcttggcttctctg

SEQ ID NO: 653707 - DNA, 129 bp, Homo sapiens
gcggccgcctactactactactgctcgaattcaagcttctaacgatgtacggggacatgtctggtctggggcttggatgttgcactgcccactgcctgtcccttctggtaaaataaagaactcttaatg
